United States Patent Application Publication US 2007/0042381 A1 - sequence listing, part 67

SEQ ID NO: 3052745 - RNA, 19 nt, Human
acacaaaaguuucucuuuu

SEQ ID NO: 3052746 - RNA, 19 nt, Human
acacagcucuucuccaggc

SEQ ID NO: 3052747 - RNA, 20 nt, Human
acaaggaugaucuaggaaga

SEQ ID NO: 3052748 - RNA, 16 nt, Human
acaaggauugcuacug

SEQ ID NO: 3052749 - RNA, 13 nt, Human
acaauuuauuaug

SEQ ID NO: 3052750 - RNA, 20 nt, Human
acacugggagaaaugaaaaa

SEQ ID NO: 3052751 - RNA, 17 nt, Human
acacugugcugagucug

SEQ ID NO: 3052752 - RNA, 22 nt, Human
acacugugcugagucugaaggc

SEQ ID NO: 3052753 - RNA, 13 nt, Human
acagaggcagccc

SEQ ID NO: 3052754 - RNA, 21 nt, Human
acagaggccaugggccuccug

SEQ ID NO: 3052755 - RNA, 14 nt, Human
acagaggggguggc

SEQ ID NO: 3052756 - RNA, 17 nt, Human
acagaggccaugggccu

SEQ ID NO: 3052757 - RNA, 23 nt, Human
acagaggcagccccauucugccu

SEQ ID NO: 3052758 - RNA, 14 nt, Human
acagacaaagcgug

SEQ ID NO: 3052759 - RNA, 13 nt, Human
acagacaaagcgu

SEQ ID NO: 3052760 - RNA, 16 nt, Human
acagaagcuccaggua

SEQ ID NO: 3052761 - RNA, 16 nt, Human
acaaagaaauuaugug

SEQ ID NO: 3052762 - RNA, 14 nt, Human
acaaagaaauuaug

SEQ ID NO: 3052763 - RNA, 12 nt, Human
acaaagaaauua

SEQ ID NO: 3052764 - RNA, 13 nt, Human
acaaaaugaaacg

SEQ ID NO: 3052765 - RNA, 22 nt, Human
acaaaaugaaacgcaaccacca

SEQ ID NO: 3052766 - RNA, 13 nt, Human
acaaaauggaaua

SEQ ID NO: 3052767 - RNA, 14 nt, Human
acaaaauggaauac

SEQ ID NO: 3052768 - RNA, 21 nt, Human
acaaggaugaauuaaguuuuu

SEQ ID NO: 3052769 - RNA, 15 nt, Human
acaagaaaugaaagc

SEQ ID NO: 3052770 - RNA, 16 nt, Human
acaagaaaugaaagca

SEQ ID NO: 3052771 - RNA, 13 nt, Human
acaagaaaugaaa

SEQ ID NO: 3052772 - RNA, 18 nt, Human
aauuuucaucuaggauuu

SEQ ID NO: 3052773 - RNA, 16 nt, Human
aauuuugugcccccau

SEQ ID NO: 3052774 - RNA, 18 nt, Human
aauuuugugaagcaaaau

SEQ ID NO: 3052775 - RNA, 13 nt, Human
aauuuugugaagc

SEQ ID NO: 3052776 - RNA, 17 nt, Human
aauuuugugaagcaaaa

SEQ ID NO: 3052777 - RNA, 14 nt, Human
aauuuugauguuuu

SEQ ID NO: 3052778 - RNA, 17 nt, Human
aauuuauuauggcacau

SEQ ID NO: 3052779 - RNA, 20 nt, Human
aauuuauuuaugggauccug

SEQ ID NO: 3052780 - RNA, 19 nt, Human
aaugucacaggcaggucca

SEQ ID NO: 3052781 - RNA, 16 nt, Human
aaugucacaggcaggu

SEQ ID NO: 3052782 - RNA, 12 nt, Human
aauuguaaggaa

SEQ ID NO: 3052783 - RNA, 16 nt, Human
aauuguaaggaaugau

SEQ ID NO: 3052784 - RNA, 17 nt, Human
aauuuccugggagcuuu

SEQ ID NO: 3052785 - RNA, 18 nt, Human
aauuuccugggagcuuuu

SEQ ID NO: 3052786 - RNA, 21 nt, Human
aauuuccugggagcuuuugua

SEQ ID NO: 3052787 - RNA, 17 nt, Human
acauuuccuaaauauau

SEQ ID NO: 3052788 - RNA, 16 nt, Human
acauuuccuaaauaua

SEQ ID NO: 3052789 - RNA, 23 nt, Human
acaugucuuuucuugcaugaggc

SEQ ID NO: 3052790 - RNA, 19 nt, Human
acaugccucucucaggcca

SEQ ID NO: 3052791 - RNA, 12 nt, Human
accagcagagca

SEQ ID NO: 3052792 - RNA, 13 nt, Human
accagcagagcac

SEQ ID NO: 3052793 - RNA, 14 nt, Human
accagcagaaaugc

SEQ ID NO: 3052794 - RNA, 17 nt, Human
accagccccagugccca

SEQ ID NO: 3052795 - RNA, 16 nt, Human
accagccccagugccc

SEQ ID NO: 3052796 - RNA, 19 nt, Human
accagccccagugcccaca

SEQ ID NO: 3052797 - RNA, 18 nt, Human
accagccccagugcccac

SEQ ID NO: 3052798 - RNA, 20 nt, Human
accagccccagugcccacag

SEQ ID NO: 3052799 - RNA, 19 nt, Human
accaaggcugauuaaacca

SEQ ID NO: 3052800 - RNA, 20 nt, Human
accaaggcugauuaaaccaa

SEQ ID NO: 3052801 - RNA, 23 nt, Human
accaucauugaaaucuuuuugcu

SEQ ID NO: 3052802 - RNA, 15 nt, Human
accaucauugaaauc

SEQ ID NO: 3052803 - RNA, 12 nt, Human
accaucauugaa

SEQ ID NO: 3052804 - RNA, 15 nt, Human
accaucaagccacca

SEQ ID NO: 3052805 - RNA, 14 nt, Human
accaucaagccacc

SEQ ID NO: 3052806 - RNA, 15 nt, Human
acccacccccaccca

SEQ ID NO: 3052807 - RNA, 17 nt, Human
acccacccccacccaag

SEQ ID NO: 3052808 - RNA, 15 nt, Human
acccacccuccuuuc

SEQ ID NO: 3052809 - RNA, 13 nt, Human
acccaugcugccc

SEQ ID NO: 3052810 - RNA, 19 nt, Human
acauaauuaaauuuugagu

SEQ ID NO: 3052811 - RNA, 15 nt, Human
acauaaguaauucaa

SEQ ID NO: 3052812 - RNA, 15 nt, Human
acauaagauaaaugu

SEQ ID NO: 3052813 - RNA, 16 nt, Human
acauaagauaaaugug

SEQ ID NO: 3052814 - RNA, 16 nt, Human
acaugcaaggucauuu

SEQ ID NO: 3052815 - RNA, 20 nt, Human
acaucccuuaccugggaaag

SEQ ID NO: 3052816 - RNA, 15 nt, Human
acaugccucucucag

SEQ ID NO: 3052817 - RNA, 16 nt, Human
acaugccucucucagg

SEQ ID NO: 3052818 - RNA, 17 nt, Human
acaugccucucucaggc

SEQ ID NO: 3052819 - RNA, 18 nt, Human
acaugccucucucaggcc

SEQ ID NO: 3052820 - RNA, 17 nt, Human
acaugcaaggucauuuu

SEQ ID NO: 3052821 - RNA, 13 nt, Human
acagcucuguccu

SEQ ID NO: 3052822 - RNA, 16 nt, Human
acagcucuguccuggg

SEQ ID NO: 3052823 - RNA, 23 nt, Human
acaggcaagcaccuccugccucg

SEQ ID NO: 3052824 - RNA, 20 nt, Human
acaggcaagcaccuccugcc

SEQ ID NO: 3052825 - RNA, 14 nt, Human
acagcucuguccug

SEQ ID NO: 3052826 - RNA, 18 nt, Human
acagcuccuucuguccua

SEQ ID NO: 3052827 - RNA, 16 nt, Human
acagcuccuucugucc

SEQ ID NO: 3052828 - RNA, 17 nt, Human
acagaggggguggccuc

SEQ ID NO: 3052829 - RNA, 18 nt, Human
acagaggggguggccucc

SEQ ID NO: 3052830 - RNA, 19 nt, Human
acagaggggguggccuccc

SEQ ID NO: 3052831 - RNA, 15 nt, Human
acagcuccuucuguc

SEQ ID NO: 3052832 - RNA, 19 nt, Human
acaggcaagcaccuccugc

SEQ ID NO: 3052833 - RNA, 13 nt, Human
acagggccucugc

SEQ ID NO: 3052834 - RNA, 17 nt, Human
acagggccucugcggag

SEQ ID NO: 3052835 - RNA, 12 nt, Human
acagggccucug

SEQ ID NO: 3052836 - RNA, 23 nt, Human
acaggugugagucaccaagccca

SEQ ID NO: 3052837 - RNA, 22 nt, Human
acaggugugagucaccaagccc

SEQ ID NO: 3052838 - RNA, 19 nt, Human
acaggugugaaccaccaca

SEQ ID NO: 3052839 - RNA, 22 nt, Human
acagugagucgaggacagggag

SEQ ID NO: 3052840 - RNA, 23 nt, Human
acagugagucgaggacagggagg

SEQ ID NO: 3052841 - RNA, 20 nt, Human
acagugauuaccagggacug

SEQ ID NO: 3052842 - RNA, 21 nt, Human
acagugauuaccagggacuga

SEQ ID NO: 3052843 - RNA, 19 nt, Human
acaguggggaaugaagaua

SEQ ID NO: 3052844 - RNA, 15 nt, Human
acaguggggaaugaa

SEQ ID NO: 3052845 - RNA, 15 nt, Human
acuuuauuuuguguu

SEQ ID NO: 3052846 - RNA, 12 nt, Human
acuuuaugcuaa

SEQ ID NO: 3052847 - RNA, 17 nt, Human
acuuuaugcuaagugaa

SEQ ID NO: 3052848 - RNA, 22 nt, Human
acuugggaggcugagaugggag

SEQ ID NO: 3052849 - RNA, 14 nt, Human
acuuaaauaaugug

SEQ ID NO: 3052850 - RNA, 19 nt, Human
acuucaaauccuugaagau

SEQ ID NO: 3052851 - RNA, 13 nt, Human
acuuaaaaauggu

SEQ ID NO: 3052852 - RNA, 14 nt, Human
acuuaaaaaugguu

SEQ ID NO: 3052853 - RNA, 20 nt, Human
acuucugccauauucuguug

SEQ ID NO: 3052854 - RNA, 19 nt, Human
acuucugccauauucuguu

SEQ ID NO: 3052855 - RNA, 19 nt, Human
acuucagcgguuuauauaa

SEQ ID NO: 3052856 - RNA, 20 nt, Human
acuucaaauccuugaagauu

SEQ ID NO: 3052857 - RNA, 17 nt, Human
acuucagcgguuuauau

SEQ ID NO: 3052858 - RNA, 18 nt, Human
acuucagcgguuuauaua

SEQ ID NO: 3052859 - RNA, 17 nt, Human
acuucuuauacauuuga

SEQ ID NO: 3052860 - RNA, 23 nt, Human
acugacauuguuggccaaagcca

SEQ ID NO: 3052861 - RNA, 22 nt, Human
acugacauuguuggccaaagcc

SEQ ID NO: 3052862 - RNA, 13 nt, Human
acugaucucucgu

SEQ ID NO: 3052863 - RNA, 22 nt, Human
acugauggcuaauguacugcau

SEQ ID NO: 3052864 - RNA, 22 nt, Human
acugaugggcaacccccagccu

SEQ ID NO: 3052865 - RNA, 12 nt, Human
acugaugggcaa

SEQ ID NO: 3052866 - RNA, 23 nt, Human
acugauuuuuuuuuccuucagug

SEQ ID NO: 3052867 - RNA, 21 nt, Human
acugauuuuuuuuuccuucag

SEQ ID NO: 3052868 - RNA, 22 nt, Human
acugauuuuuuuuuccuucagu

SEQ ID NO: 3052869 - RNA, 19 nt, Human
acucugugucagguggggc

SEQ ID NO: 3052870 - RNA, 21 nt, Human
acucugugucagguggggcag

SEQ ID NO: 3052871 - RNA, 15 nt, Human
acucugucucagucc

SEQ ID NO: 3052872 - RNA, 17 nt, Human
acucugucucaguccau

SEQ ID NO: 3052873 - RNA, 19 nt, Human
acucugucucaaaaaaaca

SEQ ID NO: 3052874 - RNA, 20 nt, Human
acucuuaagaagacugcauu

SEQ ID NO: 3052875 - RNA, 14 nt, Human
acucuuaagaagac

SEQ ID NO: 3052876 - RNA, 15 nt, Human
acucuuaagaagacu

SEQ ID NO: 3052877 - RNA, 15 nt, Human
acugcccggcagggu

SEQ ID NO: 3052878 - RNA, 14 nt, Human
acugccauccuggc

SEQ ID NO: 3052879 - RNA, 20 nt, Human
acugcuuuuggucuguguga

SEQ ID NO: 3052880 - RNA, 16 nt, Human
acugcuuuuggucugu

SEQ ID NO: 3052881 - RNA, 15 nt, Human
acugcuuuuggucug

SEQ ID NO: 3052882 - RNA, 14 nt, Human
acugcuuuuggucu

SEQ ID NO: 3052883 - RNA, 22 nt, Human
acugcccggcaggguccuagaa

SEQ ID NO: 3052884 - RNA, 19 nt, Human
acugccauccuggcccagg

SEQ ID NO: 3052885 - RNA, 18 nt, Human
acuaguauuucuaugaaa

SEQ ID NO: 3052886 - RNA, 16 nt, Human
acuauuguuagucucu

SEQ ID NO: 3052887 - RNA, 17 nt, Human
acuagggaagauaauau

SEQ ID NO: 3052888 - RNA, 18 nt, Human
acgcuggagugcagugag

SEQ ID NO: 3052889 - RNA, 19 nt, Human
acgcuggagugcagugagc

SEQ ID NO: 3052890 - RNA, 19 nt, Human
acggacacucaaaagcugg

SEQ ID NO: 3052891 - RNA, 19 nt, Human
acggacgaaccuugaaaac

SEQ ID NO: 3052892 - RNA, 15 nt, Human
acggaagagccuugc

SEQ ID NO: 3052893 - RNA, 16 nt, Human
acggaagagccuugcg

SEQ ID NO: 3052894 - RNA, 23 nt, Human
acgucugacaggcaaugcuggcu

SEQ ID NO: 3052895 - RNA, 15 nt, Human
acgucugacaggcaa

SEQ ID NO: 3052896 - RNA, 15 nt, Human
acuaauagacaauuu

SEQ ID NO: 3052897 - RNA, 11 nt, Human
accugugucuc

SEQ ID NO: 3052898 - RNA, 19 nt, Human
accgggccacagagaaagu

SEQ ID NO: 3052899 - RNA, 15 nt, Human
accgggccacagaga

SEQ ID NO: 3052900 - RNA, 14 nt, Human
accgugaggccaga

SEQ ID NO: 3052901 - RNA, 14 nt, Human
accggcuggccugg

SEQ ID NO: 3052902 - RNA, 15 nt, Human
accggcuggccuggc

SEQ ID NO: 3052903 - RNA, 17 nt, Human
accggcuggccuggccc

SEQ ID NO: 3052904 - RNA, 18 nt, Human
accggcuggccuggcccc

SEQ ID NO: 3052905 - RNA, 19 nt, Human
accggcuggccuggccccu

SEQ ID NO: 3052906 - RNA, 20 nt, Human
accgggcacucagaagacac

SEQ ID NO: 3052907 - RNA, 17 nt, Human
acccuguuaccauuuug

SEQ ID NO: 3052908 - RNA, 22 nt, Human
acccugugauggggcccugccu

SEQ ID NO: 3052909 - RNA, 16 nt, Human
accccacacacgccag

SEQ ID NO: 3052910 - RNA, 14 nt, Human
acccaugcugcccu

SEQ ID NO: 3052911 - RNA, 15 nt, Human
acccaugcugcccug

SEQ ID NO: 3052912 - RNA, 15 nt, Human
accccaagacuccca

SEQ ID NO: 3052913 - RNA, 16 nt, Human
accccaagacucccau

SEQ ID NO: 3052914 - RNA, 17 nt, Human
accccaagacucccaug

SEQ ID NO: 3052915 - RNA, 18 nt, Human
accccaagacucccauga

SEQ ID NO: 3052916 - RNA, 16 nt, Human
accgugaggccagaga

SEQ ID NO: 3052917 - RNA, 17 nt, Human
accgugaggccagagac

SEQ ID NO: 3052918 - RNA, 12 nt, Human
accucaggccug

SEQ ID NO: 3052919 - RNA, 13 nt, Human
accucaggccugg

SEQ ID NO: 3052920 - RNA, 14 nt, Human
accucaggccuggg

SEQ ID NO: 3052921 - RNA, 22 nt, Human
accucaggccugggggcugggc

SEQ ID NO: 3052922 - RNA, 18 nt, Human
accucaggugagaagcag

SEQ ID NO: 3052923 - RNA, 20 nt, Human
accucuugagccuugaacuu

SEQ ID NO: 3052924 - RNA, 19 nt, Human
accucuugagccuugaacu

SEQ ID NO: 3052925 - RNA, 17 nt, Human
accucuugagccuugaa

SEQ ID NO: 3052926 - RNA, 17 nt, Human
accucugccucagaaaa

SEQ ID NO: 3052927 - RNA, 18 nt, Human
accucugccucagaaaac

SEQ ID NO: 3052928 - RNA, 11 nt, Human
accugccaggg

SEQ ID NO: 3052929 - RNA, 12 nt, Human
accugccaggga

SEQ ID NO: 3052930 - RNA, 13 nt, Human
accugccagggac

SEQ ID NO: 3052931 - RNA, 15 nt, Human
accugccagggacag

SEQ ID NO: 3052932 - RNA, 16 nt, Human
accugccagggacaga

SEQ ID NO: 3052933 - RNA, 18 nt, Human
accugccagggacagagg

SEQ ID NO: 3052934 - RNA, 21 nt, Human
aaauguuuuuuuuuaaagacu

SEQ ID NO: 3052935 - RNA, 18 nt, Human
aaauguuuuuuuuuaaag

SEQ ID NO: 3052936 - RNA, 17 nt, Human
aaauguucaucaaugaa

SEQ ID NO: 3052937 - RNA, 20 nt, Human
aaauguucaucaaugaauga

SEQ ID NO: 3052938 - RNA, 18 nt, Human
aaauugaugggauuuggu

SEQ ID NO: 3052939 - RNA, 14 nt, Human
aaauugauguguuu

SEQ ID NO: 3052940 - RNA, 22 nt, Human
aaauguuuuuuuuuaaagacuu

SEQ ID NO: 3052941 - RNA, 12 nt, Human
aaauuaacuuuu

SEQ ID NO: 3052942 - RNA, 14 nt, Human
aaauuaacuuuuau

SEQ ID NO: 3052943 - RNA, 13 nt, Human
aaauuaacuuuua

SEQ ID NO: 3052944 - RNA, 22 nt, Human
aaauugacacuuaaaaaugguu

SEQ ID NO: 3052945 - RNA, 17 nt, Human
aacacuaacaugauuug

SEQ ID NO: 3052946 - RNA, 21 nt, Human
aacacauacaggaagguagaa

SEQ ID NO: 3052947 - RNA, 22 nt, Human
aacaaaccuguuucugcagcca

SEQ ID NO: 3052948 - RNA, 20 nt, Human
aaaugcuagguuaauuccaa

SEQ ID NO: 3052949 - RNA, 14 nt, Human
aaaucuuaacuuga

SEQ ID NO: 3052950 - RNA, 19 nt, Human
aaaucuccaaaauaaaacu

SEQ ID NO: 3052951 - RNA, 22 nt, Human
aaaucuccaaaauaaaacuuuu

SEQ ID NO: 3052952 - RNA, 15 nt, Human
aaauggacguguuau

SEQ ID NO: 3052953 - RNA, 17 nt, Human
aaauggacguguuauga

SEQ ID NO: 3052954 - RNA, 14 nt, Human
aaauggacguguua

SEQ ID NO: 3052955 - RNA, 17 nt, Human
aaauggaauacucuuau

SEQ ID NO: 3052956 - RNA, 15 nt, Human
aacguauaaaagccu

SEQ ID NO: 3052957 - RNA, 15 nt, Human
aacucaccccagccc

SEQ ID NO: 3052958 - RNA, 18 nt, Human
aacucaccccagccccaa

SEQ ID NO: 3052959 - RNA, 16 nt, Human
aacucaccccagcccc

SEQ ID NO: 3052960 - RNA, 17 nt, Human
aacucaccccagcccca

SEQ ID NO: 3052961 - RNA, 17 nt, Human
aacucaaacucuuaaaa

SEQ ID NO: 3052962 - RNA, 23 nt, Human
aacugagaugugaacacaucagc

SEQ ID NO: 3052963 - RNA, 18 nt, Human
aacucauauuuucaugcu

SEQ ID NO: 3052964 - RNA, 15 nt, Human
aacucauauuuucau

SEQ ID NO: 3052965 - RNA, 16 nt, Human
aacucauauuuucaug

SEQ ID NO: 3052966 - RNA, 16 nt, Human
aacagcuaaugggaca

SEQ ID NO: 3052967 - RNA, 15 nt, Human
aacaucccuccuggg

SEQ ID NO: 3052968 - RNA, 17 nt, Human
aaccaguguuguggauu

SEQ ID NO: 3052969 - RNA, 19 nt, Human
aaccaguguuguggauuua

SEQ ID NO: 3052970 - RNA, 13 nt, Human
aacccuucagugc

SEQ ID NO: 3052971 - RNA, 15 nt, Human
aacauggaaguacua

SEQ ID NO: 3052972 - RNA, 22 nt, Human
aacaugcuacacacugcauguu

SEQ ID NO: 3052973 - RNA, 19 nt, Human
aaccgagggggcugcuccc

SEQ ID NO: 3052974 - RNA, 20 nt, Human
aaccgagggggcugcuccca

SEQ ID NO: 3052975 - RNA, 21 nt, Human
aaccgagggggcugcucccac

SEQ ID NO: 3052976 - RNA, 16 nt, Human
aaaauuauuuuguuca

SEQ ID NO: 3052977 - RNA, 18 nt, Human
aaaauuauuuuguucaua

SEQ ID NO: 3052978 - RNA, 20 nt, Human
aaaauuauuuuguucauaca

SEQ ID NO: 3052979 - RNA, 17 nt, Human
aaacagcuaaugggaca

SEQ ID NO: 3052980 - RNA, 20 nt, Human
aaaauuaagaaaggauaaag

SEQ ID NO: 3052981 - RNA, 13 nt, Human
aaaauuaagaaag

SEQ ID NO: 3052982 - RNA, 12 nt, Human
aaaauuaagaaa

SEQ ID NO: 3052983 - RNA, 22 nt, Human
aaaauuaacaugaauauuuagu

SEQ ID NO: 3052984 - RNA, 19 nt, Human
aaaauccauacauuugugu

SEQ ID NO: 3052985 - RNA, 15 nt, Human
aaaauuagccaagug

SEQ ID NO: 3052986 - RNA, 15 nt, Human
aaaauaaaaaacacu

SEQ ID NO: 3052987 - RNA, 21 nt, Human
aaaauccacuuuaucuugaau

SEQ ID NO: 3052988 - RNA, 20 nt, Human
aaauaaaaauauuguguugu

SEQ ID NO: 3052989 - RNA, 19 nt, Human
aaauaaaccucaaaauguc

SEQ ID NO: 3052990 - RNA, 15 nt, Human
aaauaaacgucuuaa

SEQ ID NO: 3052991 - RNA, 16 nt, Human
aaauaaacgucuuaaa

SEQ ID NO: 3052992 - RNA, 11 nt, Human
aaauaaauuau

SEQ ID NO: 3052993 - RNA, 19 nt, Human
aaaggcagaagcaacccaa

SEQ ID NO: 3052994 - RNA, 22 nt, Human
aaaggcuccaggagcagccaca

SEQ ID NO: 3052995 - RNA, 21 nt, Human
aaaggcuccaggagcagccac

SEQ ID NO: 3052996 - RNA, 14 nt, Human
aaaggcuaccuuug

SEQ ID NO: 3052997 - RNA, 17 nt, Human
aaaggcuaccuuuguau

SEQ ID NO: 3052998 - RNA, 14 nt, Human
aaaggcuccaggag

SEQ ID NO: 3052999 - RNA, 15 nt, Human
aaagccaaagcuagg

SEQ ID NO: 3053000 - RNA, 20 nt, Human
aaagcauuguaaaugugcuu

SEQ ID NO: 3053001 - RNA, 19 nt, Human
aaagcauuguaaaugugcu

SEQ ID NO: 3053002 - RNA, 15 nt, Human
aaagauacaguuacu

SEQ ID NO: 3053003 - RNA, 22 nt, Human
aaaccucaaaaugucuaagaua

SEQ ID NO: 3053004 - RNA, 17 nt, Human
aaaccucaaaaugucua

SEQ ID NO: 3053005 - RNA, 17 nt, Human
aaacucuugaccucagg

SEQ ID NO: 3053006 - RNA, 14 nt, Human
aaacccuucagugc

SEQ ID NO: 3053007 - RNA, 21 nt, Human
aaacccugucucuacuaaaaa

SEQ ID NO: 3053008 - RNA, 17 nt, Human
aaaccccaucucuacaa

SEQ ID NO: 3053009 - RNA, 18 nt, Human
aaacccagcucuggucca

SEQ ID NO: 3053010 - RNA, 20 nt, Human
aaacugauuuuuuuuuccuu

SEQ ID NO: 3053011 - RNA, 13 nt, Human
aaacugauuuuuu

SEQ ID NO: 3053012 - RNA, 19 nt, Human
aaacugauuuuuuuuuccu

SEQ ID NO: 3053013 - RNA, 13 nt, Human
aaagaaacauuug

SEQ ID NO: 3053014 - RNA, 15 nt, Human
aauccaaugaaauga

SEQ ID NO: 3053015 - RNA, 16 nt, Human
aauccauacauuugug

SEQ ID NO: 3053016 - RNA, 14 nt, Human
aauccauacauuug

SEQ ID NO: 3053017 - RNA, 17 nt, Human
aauccauacauuugugu

SEQ ID NO: 3053018 - RNA, 18 nt, Human
aaucuccaaaauaaaacu

SEQ ID NO: 3053019 - RNA, 12 nt, Human
aaugauuaauua

SEQ ID NO: 3053020 - RNA, 13 nt, Human
aaugauuaauuaa

SEQ ID NO: 3053021 - RNA, 15 nt, Human
aaugauagcuacugu

SEQ ID NO: 3053022 - RNA, 15 nt, Human
aaugauaacuggaaa

SEQ ID NO: 3053023 - RNA, 16 nt, Human
aaugauaacuggaaac

SEQ ID NO: 3053024 - RNA, 14 nt, Human
aaugauaacuggaa

SEQ ID NO: 3053025 - RNA, 22 nt, Human
aaucauuucugcaucagcugcu

SEQ ID NO: 3053026 - RNA, 22 nt, Human
aaucaaauaugcaaagcacuga

SEQ ID NO: 3053027 - RNA, 16 nt, Human
aaucaaauaugcaaag

SEQ ID NO: 3053028 - RNA, 15 nt, Human
aaucaaauaugcaaa

SEQ ID NO: 3053029 - RNA, 17 nt, Human
aaugggggugcauuuga

SEQ ID NO: 3053030 - RNA, 15 nt, Human
aaugggggugcauuu

SEQ ID NO: 3053031 - RNA, 15 nt, Human
aaugucacaggcagg

SEQ ID NO: 3053032 - RNA, 23 nt, Human
aaugcucuuuacuucauggacuu

SEQ ID NO: 3053033 - RNA, 14 nt, Human
aaugggagcucaug

SEQ ID NO: 3053034 - RNA, 13 nt, Human
aaugggacacuaa

SEQ ID NO: 3053035 - RNA, 23 nt, Human
aaugcgugcauaccacuuuuguu

SEQ ID NO: 3053036 - RNA, 21 nt, Human
aaugcgugcauaccacuuuug

SEQ ID NO: 3053037 - RNA, 14 nt, Human
aauaauaaauauuu

SEQ ID NO: 3053038 - RNA, 19 nt, Human
aauaaagcuguguggcagu

SEQ ID NO: 3053039 - RNA, 11 nt, Human
aauaaagcugu

SEQ ID NO: 3053040 - RNA, 20 nt, Human
aauaaaccucaaaaugucua

SEQ ID NO: 3053041 - RNA, 15 nt, Human
aauaaacgucuuaaa

SEQ ID NO: 3053042 - RNA, 17 nt, Human
aauaaaccucaaaaugu

SEQ ID NO: 3053043 - RNA, 10 nt, Human
aauaaaccau

SEQ ID NO: 3053044 - RNA, 12 nt, Human
aauaaaauuuuu

SEQ ID NO: 3053045 - RNA, 13 nt, Human
aagugcugcauuu

SEQ ID NO: 3053046 - RNA, 22 nt, Human
aaguugauaugccuuuucccaa

SEQ ID NO: 3053047 - RNA, 17 nt, Human
aaguucugcagauaaac

SEQ ID NO: 3053048 - RNA, 12 nt, Human
aauaauguuuca

SEQ ID NO: 3053049 - RNA, 19 nt, Human
aauaauguuaacauggaca

SEQ ID NO: 3053050 - RNA, 14 nt, Human
aauaauguuucaaa

SEQ ID NO: 3053051 - RNA, 21 nt, Human
aauaccugucccccugacaac

SEQ ID NO: 3053052 - RNA, 19 nt, Human
aauacgugggcauucaaau

SEQ ID NO: 3053053 - RNA, 20 nt, Human
aauacgugggcauucaaaug

SEQ ID NO: 3053054 - RNA, 13 nt, Human
aagauuuucagaa

SEQ ID NO: 3053055 - RNA, 19 nt, Human
aagauuuugaaauuuuuau

SEQ ID NO: 3053056 - RNA, 19 nt, Human
aagccaccaacauacuccc

SEQ ID NO: 3053057 - RNA, 15 nt, Human
aagcagggacuugaa

SEQ ID NO: 3053058 - RNA, 21 nt, Human
aagcagaggaaggagaggaga

SEQ ID NO: 3053059 - RNA, 20 nt, Human
aagauucauauuuacuucuu

SEQ ID NO: 3053060 - RNA, 20 nt, Human
aagauucaaugccccugaau

SEQ ID NO: 3053061 - RNA, 21 nt, Human
aagauucaaugccccugaauu

SEQ ID NO: 3053062 - RNA, 14 nt, Human
aagauacugaaaua

SEQ ID NO: 3053063 - RNA, 16 nt, Human
aagauacugaaauaaa

SEQ ID NO: 3053064 - RNA, 20 nt, Human
aagauacugaaauaaacguc

SEQ ID NO: 3053065 - RNA, 23 nt, Human
aagacagugaaagaaaauaacaa

SEQ ID NO: 3053066 - RNA, 21 nt, Human
aagacauucuuccaaaaagau

SEQ ID NO: 3053067 - RNA, 16 nt, Human
aagacuuuggaaagag

SEQ ID NO: 3053068 - RNA, 15 nt, Human
aagacuuuuaugaua

SEQ ID NO: 3053069 - RNA, 16 nt, Human
aagacuuuggaaagac

SEQ ID NO: 3053070 - RNA, 15 nt, Human
aagagaacuuccaga

SEQ ID NO: 3053071 - RNA, 12 nt, Human
aaggaauuuuau

SEQ ID NO: 3053072 - RNA, 11 nt, Human
aagcugccagc

SEQ ID NO: 3053073 - RNA, 12 nt, Human
aagcugccagcc

SEQ ID NO: 3053074 - RNA, 22 nt, Human
aagcugccagccgagauagcca

SEQ ID NO: 3053075 - RNA, 14 nt, Human
aagcugcugacagu

SEQ ID NO: 3053076 - RNA, 20 nt, Human
aagcgugagccacugcaccg

SEQ ID NO: 3053077 - RNA, 17 nt, Human
aagcgugagccacugca

SEQ ID NO: 3053078 - RNA, 21 nt, Human
aagcgugagccacugcaccgg

SEQ ID NO: 3053079 - RNA, 16 nt, Human
aagcugcugacagugu

SEQ ID NO: 3053080 - RNA, 23 nt, Human
aaggaaugauuaauuaaaacaca

SEQ ID NO: 3053081 - RNA, 21 nt, Human
aagccaccaacauacucccau

SEQ ID NO: 3053082 - RNA, 19 nt, Human
aagccagauuuuccugaaa

SEQ ID NO: 3053083 - RNA, 18 nt, Human
aagccagcaggcucucag

SEQ ID NO: 3053084 - RNA, 15 nt, Human
aagccagcaggcucu

SEQ ID NO: 3053085 - RNA, 16 nt, Human
aagcgauucuucugcu

SEQ ID NO: 3053086 - RNA, 16 nt, Human
aagcgugagccacugc

SEQ ID NO: 3053087 - RNA, 14 nt, Human
aagcgauucuucug

SEQ ID NO: 3053088 - RNA, 15 nt, Human
aagcgauucuucugc

SEQ ID NO: 3053089 - RNA, 17 nt, Human
aagggacugagaaauuu

SEQ ID NO: 3053090 - RNA, 15 nt, Human
aagggacugagaaau

SEQ ID NO: 3053091 - RNA, 18 nt, Human
aagggacgcuacccggga

SEQ ID NO: 3053092 - RNA, 20 nt, Human
aagggacuuggaagcuccgc

SEQ ID NO: 3053093 - RNA, 15 nt, Human
aagggauuuucagcc

SEQ ID NO: 3053094 - RNA, 17 nt, Human
aagggauggcaagaugu

SEQ ID NO: 3053095 - RNA, 14 nt, Human
aagggauggcaaga

SEQ ID NO: 3053096 - RNA, 23 nt, Human
aagggauuuucagcccucagaau

SEQ ID NO: 3053097 - RNA, 21 nt, Human
aagggauuuucagcccucaga

SEQ ID NO: 3053098 - RNA, 12 nt, Human
aaguagaggagg

SEQ ID NO: 3053099 - RNA, 14 nt, Human
agaugguucuagca

SEQ ID NO: 3053100 - RNA, 14 nt, Human
agaugagugagcau

SEQ ID NO: 3053101 - RNA, 19 nt, Human
agauguagaggagaaacug

SEQ ID NO: 3053102 - RNA, 16 nt, Human
agauguagaggagaaa

SEQ ID NO: 3053103 - RNA, 23 nt, Human
agcaaagcugaugacaacuuccc

SEQ ID NO: 3053104 - RNA, 21 nt, Human
agcaaagcugaugacaacuuc

SEQ ID NO: 3053105 - RNA, 20 nt, Human
agcaaaggagauuggaagga

SEQ ID NO: 3053106 - RNA, 21 nt, Human
agauugcaacaggcugggcuu

SEQ ID NO: 3053107 - RNA, 20 nt, Human
agauugcaacaggcugggcu

SEQ ID NO: 3053108 - RNA, 23 nt, Human
agauugcaacaggcugggcuuca

SEQ ID NO: 3053109 - RNA, 19 nt, Human
agauugcaacaggcugggc

SEQ ID NO: 3053110 - RNA, 19 nt, Human
agauucuuuccugaggcug

SEQ ID NO: 3053111 - RNA, 21 nt, Human
agauucuuuccugaggcuggg

SEQ ID NO: 3053112 - RNA, 18 nt, Human
agauucuuuccugaggcu

SEQ ID NO: 3053113 - RNA, 18 nt, Human
agcaaaagaugcuucuca

SEQ ID NO: 3053114 - RNA, 24 nt, Human
agcaaaauuuuuucucuaggaaau

SEQ ID NO: 3053115 - RNA, 23 nt, Human
agcaaaauuuuuucucuaggaaa

SEQ ID NO: 3053116 - RNA, 21 nt, Human
agcacgauuucuguuuagaua

SEQ ID NO: 3053117 - RNA, 19 nt, Human
agcacgauuucuguuuaga

SEQ ID NO: 3053118 - RNA, 17 nt, Human
agcacgauuucuguuua

SEQ ID NO: 3053119 - RNA, 16 nt, Human
agcacagacccugccc

SEQ ID NO: 3053120 - RNA, 14 nt, Human
agcacagacccugc

SEQ ID NO: 3053121 - RNA, 15 nt, Human
agcacagacccugcc

SEQ ID NO: 3053122 - RNA, 12 nt, Human
agcacagacccu

SEQ ID NO: 3053123 - RNA, 16 nt, Human
agccaaagcuaggccu

SEQ ID NO: 3053124 - RNA, 17 nt, Human
agcauccuggcacccgg

SEQ ID NO: 3053125 - RNA, 14 nt, Human
agcauccuggcacc

SEQ ID NO: 3053126 - RNA, 17 nt, Human
agccagaggagagagga

SEQ ID NO: 3053127 - RNA, 18 nt, Human
agccagaggagagaggac

SEQ ID NO: 3053128 - RNA, 14 nt, Human
agccagcaggcucu

SEQ ID NO: 3053129 - RNA, 13 nt, Human
agccagaggagag

SEQ ID NO: 3053130 - RNA, 15 nt, Human
agccagaggagagag

SEQ ID NO: 3053131 - RNA, 16 nt, Human
agccagcaggcucuca

SEQ ID NO: 3053132 - RNA, 15 nt, Human
agcccaccccucaac

SEQ ID NO: 3053133 - RNA, 14 nt, Human
agcccaccuuggcu

SEQ ID NO: 3053134 - RNA, 16 nt, Human
agcccaccuuggcuca

SEQ ID NO: 3053135 - RNA, 14 nt, Human
agcccacgccccca

SEQ ID NO: 3053136 - RNA, 20 nt, Human
agcccacgcccccacuggug

SEQ ID NO: 3053137 - RNA, 23 nt, Human
agcccacgcccccacuggugaca

SEQ ID NO: 3053138 - RNA, 13 nt, Human
agcauccuggcac

SEQ ID NO: 3053139 - RNA, 19 nt, Human
agccccauucugccugccc

SEQ ID NO: 3053140 - RNA, 18 nt, Human
agccccauucugccugcc

SEQ ID NO: 3053141 - RNA, 17 nt, Human
agccccauucugccugc

SEQ ID NO: 3053142 - RNA, 17 nt, Human
agccccauccucuguac

SEQ ID NO: 3053143 - RNA, 23 nt, Human
agccccauccucuguacagagcc

SEQ ID NO: 3053144 - RNA, 15 nt, Human
agccccauccucugu

SEQ ID NO: 3053145 - RNA, 17 nt, Human
agcccgggcucugccuc

SEQ ID NO: 3053146 - RNA, 18 nt, Human
agcccgggcucugccucc

SEQ ID NO: 3053147 - RNA, 20 nt, Human
agcccgggcucugccuccca

SEQ ID NO: 3053148 - RNA, 21 nt, Human
agcccgggcucugccucccau

SEQ ID NO: 3053149 - RNA, 24 nt, Human
agccccaaaacucuccucugcugc

SEQ ID NO: 3053150 - RNA, 13 nt, Human
agccccacagccc

SEQ ID NO: 3053151 - RNA, 22 nt, Human
agacagccaacuauggccugug

SEQ ID NO: 3053152 - RNA, 15 nt, Human
agaccacguuucuaa

SEQ ID NO: 3053153 - RNA, 22 nt, Human
agacagauacuccuccaagguu

SEQ ID NO: 3053154 - RNA, 21 nt, Human
agacagagucucacuguugcc

SEQ ID NO: 3053155 - RNA, 17 nt, Human
agacccaaaaggcagaa

SEQ ID NO: 3053156 - RNA, 19 nt, Human
agacccaaaaggcagaagc

SEQ ID NO: 3053157 - RNA, 22 nt, Human
agacaaugacuuacuguacaug

SEQ ID NO: 3053158 - RNA, 21 nt, Human
agacaaugacuuacuguacau

SEQ ID NO: 3053159 - RNA, 15 nt, Human
agacagagcuacaca

SEQ ID NO: 3053160 - RNA, 20 nt, Human
agacagagucucacuguugc

SEQ ID NO: 3053161 - RNA, 19 nt, Human
agacagagucucacuguug

SEQ ID NO: 3053162 - RNA, 13 nt, Human
agacagagcuaca

SEQ ID NO: 3053163 - RNA, 11 nt, Human
agacagagucu

SEQ ID NO: 3053164 - RNA, 20 nt, Human
agacaaugacuuacuguaca

SEQ ID NO: 3053165 - RNA, 14 nt, Human
agaaguaacuuacu

SEQ ID NO: 3053166 - RNA, 20 nt, Human
agaagucacauuccugaaca

SEQ ID NO: 3053167 - RNA, 21 nt, Human
agaagucacauuccugaacag

SEQ ID NO: 3053168 - RNA, 18 nt, Human
agaagucacauuccugaa

SEQ ID NO: 3053169 - RNA, 21 nt, Human
agaagacacugaugggcaacc

SEQ ID NO: 3053170 - RNA, 13 nt, Human
agaagacacugau

SEQ ID NO: 3053171 - RNA, 21 nt, Human
acuuuccucuuuggucuacac

SEQ ID NO: 3053172 - RNA, 21 nt, Human
agaagagauugugguuucauu

SEQ ID NO: 3053173 - RNA, 21 nt, Human
agaagagcuguucacagccag

SEQ ID NO: 3053174 - RNA, 22 nt, Human
agaagagcuguucacagccaga

SEQ ID NO: 3053175 - RNA, 23 nt, Human
agaagagaaugcacaaacagagg

SEQ ID NO: 3053176 - RNA, 19 nt, Human
agaaugcacaaacagaggc

SEQ ID NO: 3053177 - RNA, 22 nt, Human
agaaugcacaaacagaggccgc

SEQ ID NO: 3053178 - RNA, 17 nt, Human
agaaugauuaugaauua

SEQ ID NO: 3053179 - RNA, 17 nt, Human
agaaugagagacacacu

SEQ ID NO: 3053180 - RNA, 22 nt, Human
agaaugagagacacacugaaga

SEQ ID NO: 3053181 - RNA, 18 nt, Human
agaaugaaagggcccaga

SEQ ID NO: 3053182 - RNA, 16 nt, Human
agaaugaaagggccca

SEQ ID NO: 3053183 - RNA, 21 nt, Human
agaagugaaaaucuacacucc

SEQ ID NO: 3053184 - RNA, 22 nt, Human
agaagucacauuccugaacagg

SEQ ID NO: 3053185 - RNA, 13 nt, Human
agagccagggucu

SEQ ID NO: 3053186 - RNA, 16 nt, Human
agagagaccacuuuuc

SEQ ID NO: 3053187 - RNA, 16 nt, Human
agacuggauaguccgu

SEQ ID NO: 3053188 - RNA, 16 nt, Human
agacgcugugcugccc

SEQ ID NO: 3053189 - RNA, 20 nt, Human
agacugaguacguugugcau

SEQ ID NO: 3053190 - RNA, 18 nt, Human
agacucugucucagucca

SEQ ID NO: 3053191 - RNA, 22 nt, Human
agacugaguacguugugcauuu

SEQ ID NO: 3053192 - RNA, 13 nt, Human
agacucugucuca

SEQ ID NO: 3053193 - RNA, 18 nt, Human
agacucugucucaaaaaa

SEQ ID NO: 3053194 - RNA, 13 nt, Human
agagggccugcaa

SEQ ID NO: 3053195 - RNA, 16 nt, Human
agagggccugcaaggg

SEQ ID NO: 3053196 - RNA, 17 nt, Human
agaggggguggccuccc

SEQ ID NO: 3053197 - RNA, 19 nt, Human
agaggggguggccucccaa

SEQ ID NO: 3053198 - RNA, 22 nt, Human
agaggacuuuucuuuguggcuu

SEQ ID NO: 3053199 - RNA, 21 nt, Human
agaggacuuuucuuuguggcu

SEQ ID NO: 3053200 - RNA, 14 nt, Human
agaggacuuuucuu

SEQ ID NO: 3053201 - RNA, 13 nt, Human
agaggaaugaagu

SEQ ID NO: 3053202 - RNA, 17 nt, Human
agggacugagaaauuua

SEQ ID NO: 3053203 - RNA, 15 nt, Human
agggacccuccacca

SEQ ID NO: 3053204 - RNA, 15 nt, Human
agggacugaggggag

SEQ ID NO: 3053205 - RNA, 18 nt, Human
aggcuuagucacugagac

SEQ ID NO: 3053206 - RNA, 21 nt, Human
aggcuguaucccaugagccuc

SEQ ID NO: 3053207 - RNA, 20 nt, Human
aggcuguaucccaugagccu

SEQ ID NO: 3053208 - RNA, 22 nt, Human
aggcuguaucccaugagccuca

SEQ ID NO: 3053209 - RNA, 17 nt, Human
aggcuuagucacugaga

SEQ ID NO: 3053210 - RNA, 15 nt, Human
aggcuaccuuuguau

SEQ ID NO: 3053211 - RNA, 14 nt, Human
aggcuaccuuugua

SEQ ID NO: 3053212 - RNA, 13 nt, Human
aggcuaccuuugu

SEQ ID NO: 3053213 - RNA, 18 nt, Human
aggcuggguucugauccu

SEQ ID NO: 3053214 - RNA, 22 nt, Human
aggcccucugcccacucccugc

SEQ ID NO: 3053215 - RNA, 23 nt, Human
aggcccucugcccacucccugca

SEQ ID NO: 3053216 - RNA, 21 nt, Human
aggcccucugcccacucccug

SEQ ID NO: 3053217 - RNA, 21 nt, Human
aggccaugggcacugugggua

SEQ ID NO: 3053218 - RNA, 15 nt, Human
aggcccuucucucca

SEQ ID NO: 3053219 - RNA, 19 nt, Human
aggcccuucucuccagccc

SEQ ID NO: 3053220 - RNA, 12 nt, Human
aggcccuucucu

SEQ ID NO: 3053221 - RNA, 19 nt, Human
aggcauuccccaggaggcc

SEQ ID NO: 3053222 - RNA, 20 nt, Human
aggcauuccccaggaggcca

SEQ ID NO: 3053223 - RNA, 23 nt, Human
aggccagcugcuugggcuucauc

SEQ ID NO: 3053224 - RNA, 13 nt, Human
aggccaggcccuc

SEQ ID NO: 3053225 - RNA, 14 nt, Human
aggccaggcccucu

SEQ ID NO: 3053226 - RNA, 15 nt, Human
aggccaggcccucug

SEQ ID NO: 3053227 - RNA, 18 nt, Human
aggcauuccccaggaggc

SEQ ID NO: 3053228 - RNA, 17 nt, Human
aggcauuccccaggagg

SEQ ID NO: 3053229 - RNA, 12 nt, Human
aggcauguucuc

SEQ ID NO: 3053230 - RNA, 19 nt, Human
aggcauguucucugaggac

SEQ ID NO: 3053231 - RNA, 18 nt, Human
aggcauguucucugagga

SEQ ID NO: 3053232 - RNA, 19 nt, Human
aggcaugugaugagaggaa

SEQ ID NO: 3053233 - RNA, 20 nt, Human
aggcaugugaugagaggaaa

SEQ ID NO: 3053234 - RNA, 21 nt, Human
aggcaugugaugagaggaaau

SEQ ID NO: 3053235 - RNA, 17 nt, Human
aggcauguucucugagg

SEQ ID NO: 3053236 - RNA, 17 nt, Human
aggcaugugaugagagg

SEQ ID NO: 3053237 - RNA, 15 nt, Human
aggcaugguggccca

SEQ ID NO: 3053238 - RNA, 22 nt, Human
agggauuuucagcccucagaau

SEQ ID NO: 3053239 - RNA, 17 nt, Human
agggauuuucagcccuc

SEQ ID NO: 3053240 - RNA, 15 nt, Human
agggauuagggagag

SEQ ID NO: 3053241 - RNA, 12 nt, Human
agggccuggccu

SEQ ID NO: 3053242 - RNA, 13 nt, Human
agggccuggccug

SEQ ID NO: 3053243 - RNA, 15 nt, Human
agggccugcaaggga

SEQ ID NO: 3053244 - RNA, 14 nt, Human
agggccugcaaggg

SEQ ID NO: 3053245 - RNA, 16 nt, Human
agggauacccauccca

SEQ ID NO: 3053246 - RNA, 22 nt, Human
aggggcccaaauucuuucagug

SEQ ID NO: 3053247 - RNA, 16 nt, Human
agggucccugguggca

SEQ ID NO: 3053248 - RNA, 17 nt, Human
agggucccugguggcag

SEQ ID NO: 3053249 - RNA, 20 nt, Human
agggucccugguggcagcuc

SEQ ID NO: 3053250 - RNA, 22 nt, Human
agggucccugguggcagcucac

SEQ ID NO: 3053251 - RNA, 12 nt, Human
agggucccuggu

SEQ ID NO: 3053252 - RNA, 14 nt, Human
agggucccuggugg

SEQ ID NO: 3053253 - RNA, 13 nt, Human
aggguauuccaga

SEQ ID NO: 3053254 - RNA, 21 nt, Human
aggguaucuggugacuuuccu

SEQ ID NO: 3053255 - RNA, 15 nt, Human
aggguaucuggugac

SEQ ID NO: 3053256 - RNA, 23 nt, Human
aggucccuaauaaagcugugugg

SEQ ID NO: 3053257 - RNA, 14 nt, Human
agguacucuccugg

SEQ ID NO: 3053258 - RNA, 13 nt, Human
agguacucuccug

SEQ ID NO: 3053259 - RNA, 14 nt, Human
agguaacaggcaga

SEQ ID NO: 3053260 - RNA, 13 nt, Human
agguaacaggcag

SEQ ID NO: 3053261 - RNA, 16 nt, Human
agguaacaggcagaua

SEQ ID NO: 3053262 - RNA, 22 nt, Human
agguacgaaaagaggggaagag

SEQ ID NO: 3053263 - RNA, 23 nt, Human
aggguuuugccauguuggccagg

SEQ ID NO: 3053264 - RNA, 22 nt, Human
aggguuuugccauguuggccag

SEQ ID NO: 3053265 - RNA, 23 nt, Human
agcuaauguaauaacugugaagu

SEQ ID NO: 3053266 - RNA, 16 nt, Human
agcucaccagccccag

SEQ ID NO: 3053267 - RNA, 15 nt, Human
agcucaccucucccu

SEQ ID NO: 3053268 - RNA, 18 nt, Human
agcucaccucucccuugg

SEQ ID NO: 3053269 - RNA, 19 nt, Human
agcucaccucucccuugga

SEQ ID NO: 3053270 - RNA, 12 nt, Human
agcucaccucuc

SEQ ID NO: 3053271 - RNA, 15 nt, Human
agcucaccagcccca

SEQ ID NO: 3053272 - RNA, 20 nt, Human
agcucaccagccccagugcc

SEQ ID NO: 3053273 - RNA, 19 nt, Human
agcucaccagccccagugc

SEQ ID NO: 3053274 - RNA, 18 nt, Human
agcucagagaggguggga

SEQ ID NO: 3053275 - RNA, 14 nt, Human
agcucagagagggu

SEQ ID NO: 3053276 - RNA, 12 nt, Human
agcucagagagg

SEQ ID NO: 3053277 - RNA, 17 nt, Human
agccuggcuucaaauug

SEQ ID NO: 3053278 - RNA, 22 nt, Human
agccuggcuccaaacccucgag

SEQ ID NO: 3053279 - RNA, 18 nt, Human
agccuggcuucaaauugu

SEQ ID NO: 3053280 - RNA, 13 nt, Human
agccuggcuccaa

SEQ ID NO: 3053281 - RNA, 20 nt, Human
agccuggcuccaaacccucg

SEQ ID NO: 3053282 - RNA, 12 nt, Human
agccugggaggu

SEQ ID NO: 3053283 - RNA, 13 nt, Human
agcgagcccuggu

SEQ ID NO: 3053284 - RNA, 19 nt, Human
agcgagcccugguggcagu

SEQ ID NO: 3053285 - RNA, 17 nt, Human
agcgacagugagacucu

SEQ ID NO: 3053286 - RNA, 12 nt, Human
agcugcugacag

SEQ ID NO: 3053287 - RNA, 20 nt, Human
agcugcgguccacccaggag

SEQ ID NO: 3053288 - RNA, 19 nt, Human
agcugcgguccacccagga

SEQ ID NO: 3053289 - RNA, 18 nt, Human
agcugcgguccacccagg

SEQ ID NO: 3053290 - RNA, 17 nt, Human
agcugcgguccacccag

SEQ ID NO: 3053291 - RNA, 16 nt, Human
agcugcgguccaccca

SEQ ID NO: 3053292 - RNA, 13 nt, Human
agcugcgguccac

SEQ ID NO: 3053293 - RNA, 17 nt, Human
agcuggucccacucagu

SEQ ID NO: 3053294 - RNA, 16 nt, Human
agcuggucccacucag

SEQ ID NO: 3053295 - RNA, 14 nt, Human
agcugcugacagug

SEQ ID NO: 3053296 - RNA, 13 nt, Human
agcugcugacagu

SEQ ID NO: 3053297 - RNA, 18 nt, Human
agcuggucccacucaguc

SEQ ID NO: 3053298 - RNA, 19 nt, Human
agcugcugagauccuggac

SEQ ID NO: 3053299 - RNA, 16 nt, Human
agcugguugagguuuc

SEQ ID NO: 3053300 - RNA, 22 nt, Human
agcugguuuuuagcggagacgg

SEQ ID NO: 3053301 - RNA, 20 nt, Human
agcuccccucggagaagagc

SEQ ID NO: 3053302 - RNA, 19 nt, Human
agcuccccucggagaagag

SEQ ID NO: 3053303 - RNA, 17 nt, Human
agcuccccucggagaag

SEQ ID NO: 3053304 - RNA, 15 nt, Human
agcugaaccugggua

SEQ ID NO: 3053305 - RNA, 15 nt, Human
agcuuuuaugugaaa

SEQ ID NO: 3053306 - RNA, 12 nt, Human
aggaacaaggca

SEQ ID NO: 3053307 - RNA, 13 nt, Human
aggaacaaggcaa

SEQ ID NO: 3053308 - RNA, 16 nt, Human
aggaacaaggcaaggc

SEQ ID NO: 3053309 - RNA, 17 nt, Human
aggaacaaggcaaggcu

SEQ ID NO: 3053310 - RNA, 19 nt, Human
aggaacaaggcaaggcugu

SEQ ID NO: 3053311 - RNA, 20 nt, Human
aggaacaaggcaaggcuguc

SEQ ID NO: 3053312 - RNA, 21 nt, Human
aggaacuuaaauaaugugaaa

SEQ ID NO: 3053313 - RNA, 23 nt, Human
aggaaccgagggggcugcuccca

SEQ ID NO: 3053314 - RNA, 15 nt, Human
aggaauaccuguccc

SEQ ID NO: 3053315 - RNA, 18 nt, Human
aggaauaccugucccccu

SEQ ID NO: 3053316 - RNA, 22 nt, Human
aggaauaccugucccccugaca

SEQ ID NO: 3053317 - RNA, 13 nt, Human
aggaaguagagga

SEQ ID NO: 3053318 - RNA, 19 nt, Human
agcuucauuuccugugucu

SEQ ID NO: 3053319 - RNA, 22 nt, Human
agcuuuguuuguugucagcuga

SEQ ID NO: 3053320 - RNA, 23 nt, Human
agcuuuguuuguugucagcugaa

SEQ ID NO: 3053321 - RNA, 18 nt, Human
agcuucauuuccuguguc

SEQ ID NO: 3053322 - RNA, 20 nt, Human
agcuuauuuccucauuuuua

SEQ ID NO: 3053323 - RNA, 15 nt, Human
aggagaggagagggg

SEQ ID NO: 3053324 - RNA, 16 nt, Human
aggacccgucuccagc

SEQ ID NO: 3053325 - RNA, 18 nt, Human
augugaaaucauucauuu

SEQ ID NO: 3053326 - RNA, 17 nt, Human
augugaaaucauucauu

SEQ ID NO: 3053327 - RNA, 15 nt, Human
augugaacacaucag

SEQ ID NO: 3053328 - RNA, 14 nt, Human
augugaaacauguu

SEQ ID NO: 3053329 - RNA, 14 nt, Human
augugaaaucauuc

SEQ ID NO: 3053330 - RNA, 19 nt, Human
augucacaggcagguccag

SEQ ID NO: 3053331 - RNA, 17 nt, Human
augucacaggcaggucc

SEQ ID NO: 3053332 - RNA, 13 nt, Human
augucacaggcag

SEQ ID NO: 3053333 - RNA, 21 nt, Human
augucaaucagccuaguugau

SEQ ID NO: 3053334 - RNA, 16 nt, Human
augucaaucagccuag

SEQ ID NO: 3053335 - RNA, 23 nt, Human
auguaauuaaguacuauguauca

SEQ ID NO: 3053336 - RNA, 20 nt, Human
augggugcuuggaggaagga

SEQ ID NO: 3053337 - RNA, 21 nt, Human
augggugcuuggaggaaggaa

SEQ ID NO: 3053338 - RNA, 23 nt, Human
augggugcuuggaggaaggaaac

SEQ ID NO: 3053339 - RNA, 15 nt, Human
auguguaaaauguga

SEQ ID NO: 3053340 - RNA, 17 nt, Human
auguguaagacaaaaag

SEQ ID NO: 3053341 - RNA, 19 nt, Human
auguguaagacaaaaagcu

SEQ ID NO: 3053342 - RNA, 13 nt, Human
auguguaaguauu

SEQ ID NO: 3053343 - RNA, 16 nt, Human
auguuccuagugaaag

SEQ ID NO: 3053344 - RNA, 15 nt, Human
auguuccuagugaaa

SEQ ID NO: 3053345 - RNA, 16 nt, Human
auguucucucuucucc

SEQ ID NO: 3053346 - RNA, 17 nt, Human
auguuccuagugaaaga

SEQ ID NO: 3053347 - RNA, 17 nt, Human
auguucucucuucucca

SEQ ID NO: 3053348 - RNA, 13 nt, Human
auguucucugagg

SEQ ID NO: 3053349 - RNA, 14 nt, Human
auguucugggacac

SEQ ID NO: 3053350 - RNA, 15 nt, Human
auguucugggacaca

SEQ ID NO: 3053351 - RNA, 17 nt, Human
auguuugccucugccuc

SEQ ID NO: 3053352 - RNA, 15 nt, Human
auguuugccucugcc

SEQ ID NO: 3053353 - RNA, 14 nt, Human
auguuugccucugc

SEQ ID NO: 3053354 - RNA, 22 nt, Human
augcacaaauucugucucugga

SEQ ID NO: 3053355 - RNA, 15 nt, Human
augcacaaauucugu

SEQ ID NO: 3053356 - RNA, 23 nt, Human
augcacaaauucugucucuggau

SEQ ID NO: 3053357 - RNA, 18 nt, Human
augcacaaacagaggccg

SEQ ID NO: 3053358 - RNA, 18 nt, Human
augaugaaaugaggucag

SEQ ID NO: 3053359 - RNA, 23 nt, Human
augaugaaaugaggucagagccu

SEQ ID NO: 3053360 - RNA, 15 nt, Human
augaugauccuaggc

SEQ ID NO: 3053361 - RNA, 18 nt, Human
augaugaucuuuaaaaua

SEQ ID NO: 3053362 - RNA, 21 nt, Human
augaugaucuuuaaaauacac

SEQ ID NO: 3053363 - RNA, 21 nt, Human
augaucuuugcagacaggcaa

SEQ ID NO: 3053364 - RNA, 19 nt, Human
augaucuuugcagacaggc

SEQ ID NO: 3053365 - RNA, 18 nt, Human
augaucuuugcagacagg

SEQ ID NO: 3053366 - RNA, 18 nt, Human
augaucuucuuuauaauu

SEQ ID NO: 3053367 - RNA, 17 nt, Human
augaucuuugcagacag

SEQ ID NO: 3053368 - RNA, 16 nt, Human
augaucuuuaaaauac

SEQ ID NO: 3053369 - RNA, 19 nt, Human
augccuggauggggcugca

SEQ ID NO: 3053370 - RNA, 20 nt, Human
augccuggauggggcugcac

SEQ ID NO: 3053371 - RNA, 22 nt, Human
augcacagaguuguuacauuuu

SEQ ID NO: 3053372 - RNA, 21 nt, Human
augcacagaguuguuacauuu

SEQ ID NO: 3053373 - RNA, 19 nt, Human
augcacagaguuguuacau

SEQ ID NO: 3053374 - RNA, 14 nt, Human
augcacacauuuuu

SEQ ID NO: 3053375 - RNA, 13 nt, Human
augcacacauuuu

SEQ ID NO: 3053376 - RNA, 15 nt, Human
augcacacauuuuuu

SEQ ID NO: 3053377 - RNA, 18 nt, Human
auggauaggcacaggaaa

SEQ ID NO: 3053378 - RNA, 17 nt, Human
auggauaggcacaggaa

SEQ ID NO: 3053379 - RNA, 18 nt, Human
auggcuggagcuagaauu

SEQ ID NO: 3053380 - RNA, 15 nt, Human
augcuuguacauaau

SEQ ID NO: 3053381 - RNA, 16 nt, Human
augcuuguacauaaug

SEQ ID NO: 3053382 - RNA, 17 nt, Human
auggcuuuugugcauua

SEQ ID NO: 3053383 - RNA, 16 nt, Human
auggcuuuugugcauu

SEQ ID NO: 3053384 - RNA, 13 nt, Human
augcugcccugug

SEQ ID NO: 3053385 - RNA, 12 nt, Human
augcugcccugu

SEQ ID NO: 3053386 - RNA, 14 nt, Human
augcugcccuguga

SEQ ID NO: 3053387 - RNA, 15 nt, Human
augcugcccugugag

SEQ ID NO: 3053388 - RNA, 16 nt, Human
augcugcccugugagu

SEQ ID NO: 3053389 - RNA, 15 nt, Human
aucuaguaugaaauu

SEQ ID NO: 3053390 - RNA, 16 nt, Human
aucuaguaugaaauua

SEQ ID NO: 3053391 - RNA, 17 nt, Human
aucuaguaugaaauuau

SEQ ID NO: 3053392 - RNA, 18 nt, Human
aucuaguaugaaauuaua

SEQ ID NO: 3053393 - RNA, 19 nt, Human
aucuaguaugaaauuauau

SEQ ID NO: 3053394 - RNA, 14 nt, Human
aucuaguaugaaau

SEQ ID NO: 3053395 - RNA, 20 nt, Human
aucuccgucaacucauauuu

SEQ ID NO: 3053396 - RNA, 18 nt, Human
aucugggggccucuucug

SEQ ID NO: 3053397 - RNA, 17 nt, Human
augagggagaugccaug

SEQ ID NO: 3053398 - RNA, 16 nt, Human
augagggagaugccau

SEQ ID NO: 3053399 - RNA, 22 nt, Human
augaggcauuuguuugaacuga

SEQ ID NO: 3053400 - RNA, 21 nt, Human
augaggcauuuguuugaacug

SEQ ID NO: 3053401 - RNA, 14 nt, Human
augaggcauuuguu

SEQ ID NO: 3053402 - RNA, 13 nt, Human
augaggcauuugu

SEQ ID NO: 3053403 - RNA, 20 nt, Human
augaaguccaagcauuuaga

SEQ ID NO: 3053404 - RNA, 23 nt, Human
augaaguccaagcauuuagaugu

SEQ ID NO: 3053405 - RNA, 13 nt, Human
augaaguacucau

SEQ ID NO: 3053406 - RNA, 21 nt, Human
augaaguacucauacauguua

SEQ ID NO: 3053407 - RNA, 16 nt, Human
augaaaacacauuuuu

SEQ ID NO: 3053408 - RNA, 15 nt, Human
augaaaacacauuuu

SEQ ID NO: 3053409 - RNA, 14 nt, Human
augaaaacacauuu

SEQ ID NO: 3053410 - RNA, 12 nt, Human
aucaugugaaau

SEQ ID NO: 3053411 - RNA, 14 nt, Human
aucaugucuggcua

SEQ ID NO: 3053412 - RNA, 17 nt, Human
aucaugaauuaguuuua

SEQ ID NO: 3053413 - RNA, 13 nt, Human
aucagcuuauugu

SEQ ID NO: 3053414 - RNA, 22 nt, Human
aucagcuugcccuguuaaaaga

SEQ ID NO: 3053415 - RNA, 24 nt, Human
aucaaaagguuaauaaaguaauua

SEQ ID NO: 3053416 - RNA, 14 nt, Human
aucaaauauauuca

SEQ ID NO: 3053417 - RNA, 20 nt, Human
aucaaagagguuuuaaaaaa

SEQ ID NO: 3053418 - RNA, 23 nt, Human
aucaaagagguuuuaaaaaaauc

SEQ ID NO: 3053419 - RNA, 22 nt, Human
aucaaauauauucagccuggcu

SEQ ID NO: 3053420 - RNA, 14 nt, Human
aucaaauaugcaaa

SEQ ID NO: 3053421 - RNA, 13 nt, Human
aucaccagacagg

SEQ ID NO: 3053422 - RNA, 20 nt, Human
aucaccaacgucugugccau

SEQ ID NO: 3053423 - RNA, 19 nt, Human
auccucaguuuuugugaaa

SEQ ID NO: 3053424 - RNA, 19 nt, Human
aucccaugagccucagcau

SEQ ID NO: 3053425 - RNA, 19 nt, Human
auccagacccggcugcgug

SEQ ID NO: 3053426 - RNA, 17 nt, Human
auccucauacccacccc

SEQ ID NO: 3053427 - RNA, 21 nt, Human
aucgcuccaccuugcagcucu

SEQ ID NO: 3053428 - RNA, 17 nt, Human
aucgcuccaccuugcag

SEQ ID NO: 3053429 - RNA, 23 nt, Human
auauuucagauaaucacaauaca

SEQ ID NO: 3053430 - RNA, 22 nt, Human
auauuauuuuauguugcauaga

SEQ ID NO: 3053431 - RNA, 15 nt, Human
auauuauuuuauguu

SEQ ID NO: 3053432 - RNA, 14 nt, Human
auauuauuuuaugu

SEQ ID NO: 3053433 - RNA, 14 nt, Human
auauuauguuaaaa

SEQ ID NO: 3053434 - RNA, 19 nt, Human
auauucaggaagcucaggg

SEQ ID NO: 3053435 - RNA, 17 nt, Human
auauucaggaagcucag

SEQ ID NO: 3053436 - RNA, 17 nt, Human
auaugcucugcauguua

SEQ ID NO: 3053437 - RNA, 16 nt, Human
auaugcucugcauguu

SEQ ID NO: 3053438 - RNA, 22 nt, Human
auaugcacacauuuuuuaaaug

SEQ ID NO: 3053439 - RNA, 17 nt, Human
auauuauguguuuccau

SEQ ID NO: 3053440 - RNA, 13 nt, Human
auauuauguguuu

SEQ ID NO: 3053441 - RNA, 13 nt, Human
auauuauguuaaa

SEQ ID NO: 3053442 - RNA, 20 nt, Human
auaugcucugcauguuacau

SEQ ID NO: 3053443 - RNA, 18 nt, Human
auauauuuuuuucugaaa

SEQ ID NO: 3053444 - RNA, 17 nt, Human
auagccuaggugacaga

SEQ ID NO: 3053445 - RNA, 15 nt, Human
auagccuaggugaca

SEQ ID NO: 3053446 - RNA, 24 nt, Human
auagguuuggacaaaauggaauac

SEQ ID NO: 3053447 - RNA, 18 nt, Human
auagguuuggacaaaaug

SEQ ID NO: 3053448 - RNA, 17 nt, Human
auagcacagacccugcc

SEQ ID NO: 3053449 - RNA, 18 nt, Human
auagcacagacccugccc

SEQ ID NO: 3053450 - RNA, 15 nt, Human
auagcacagacccug

SEQ ID NO: 3053451 - RNA, 15 nt, Human
auagcagcuuauuca

SEQ ID NO: 3053452 - RNA, 22 nt, Human
auaaaaagccugcaauuucaua

SEQ ID NO: 3053453 - RNA, 20 nt, Human
auaaaaagccugcaauuuca

SEQ ID NO: 3053454 - RNA, 23 nt, Human
aguuugauuaaauucuugcaaag

SEQ ID NO: 3053455 - RNA, 20 nt, Human
aguuugagaucagccugggc

SEQ ID NO: 3053456 - RNA, 16 nt, Human
aguuugauuaaauucu

SEQ ID NO: 3053457 - RNA, 18 nt, Human
aguuugagaucagccugg

SEQ ID NO: 3053458 - RNA, 19 nt, Human
aguuugagaucagccuggg

SEQ ID NO: 3053459 - RNA, 22 nt, Human
aguuugauuaaauucuugcaaa

SEQ ID NO: 3053460 - RNA, 20 nt, Human
aguuugauuaaauucuugca

SEQ ID NO: 3053461 - RNA, 18 nt, Human
aguuugauuaaauucuug

SEQ ID NO: 3053462 - RNA, 17 nt, Human
aguuugauuaaauucuu

SEQ ID NO: 3053463 - RNA, 20 nt, Human
aguuguuacauuuuuaagug

SEQ ID NO: 3053464 - RNA, 19 nt, Human
aguuguuacauuuuuaagu

SEQ ID NO: 3053465 - RNA, 22 nt, Human
aguuguuacauuuuuaagugcu

SEQ ID NO: 3053466 - RNA, 14 nt, Human
auaacaaugaaagu

SEQ ID NO: 3053467 - RNA, 15 nt, Human
auaacaaugcuguau

SEQ ID NO: 3053468 - RNA, 17 nt, Human
auaacaaugcuguauuu

SEQ ID NO: 3053469 - RNA, 21 nt, Human
auaacaaugcuguauuuuaaa

SEQ ID NO: 3053470 - RNA, 19 nt, Human
auaacaaugcuguauuuua

SEQ ID NO: 3053471 - RNA, 20 nt, Human
auaacaaugcuguauuuuaa

SEQ ID NO: 3053472 - RNA, 18 nt, Human
auaacauguaauuaagua

SEQ ID NO: 3053473 - RNA, 13 nt, Human
auaacauguaauu

SEQ ID NO: 3053474 - RNA, 12 nt, Human
auaacauguaau

SEQ ID NO: 3053475 - RNA, 13 nt, Human
auaauggucagag

SEQ ID NO: 3053476 - RNA, 18 nt, Human
auaaggguaucuggugac

SEQ ID NO: 3053477 - RNA, 13 nt, Human
auaauguuucaaa

SEQ ID NO: 3053478 - RNA, 21 nt, Human
auaagccagacaucaacagau

SEQ ID NO: 3053479 - RNA, 22 nt, Human
auaagccagacaucaacagaua

SEQ ID NO: 3053480 - RNA, 14 nt, Human
auaagccagacauc

SEQ ID NO: 3053481 - RNA, 17 nt, Human
auacccagaaaguuauu

SEQ ID NO: 3053482 - RNA, 13 nt, Human
auacagaaaaguu

SEQ ID NO: 3053483 - RNA, 17 nt, Human
auacccacccccaccca

SEQ ID NO: 3053484 - RNA, 19 nt, Human
auaccccaagacucccaug

SEQ ID NO: 3053485 - RNA, 17 nt, Human
auaccccaagacuccca

SEQ ID NO: 3053486 - RNA, 14 nt, Human
auacccacccccac

SEQ ID NO: 3053487 - RNA, 16 nt, Human
auacccacccccaccc

SEQ ID NO: 3053488 - RNA, 13 nt, Human
auacccaccccca

SEQ ID NO: 3053489 - RNA, 22 nt, Human
auacacuuacacuuuaugcaca

SEQ ID NO: 3053490 - RNA, 13 nt, Human
auacacuuacacu

SEQ ID NO: 3053491 - RNA, 17 nt, Human
auacaaugcugugcccu

SEQ ID NO: 3053492 - RNA, 14 nt, Human
auacaaugcugugc

SEQ ID NO: 3053493 - RNA, 18 nt, Human
auaauguuucaaacauau

SEQ ID NO: 3053494 - RNA, 13 nt, Human
auaccuguccccc

SEQ ID NO: 3053495 - RNA, 14 nt, Human
auaccugucccccu

SEQ ID NO: 3053496 - RNA, 15 nt, Human
auaccugucccccug

SEQ ID NO: 3053497 - RNA, 16 nt, Human
auaccugucccccuga

SEQ ID NO: 3053498 - RNA, 15 nt, Human
aguucaucuugaauu

SEQ ID NO: 3053499 - RNA, 19 nt, Human
aguucaucuugaauuguaa

SEQ ID NO: 3053500 - RNA, 13 nt, Human
aguucaucuugaa

SEQ ID NO: 3053501 - RNA, 16 nt, Human
aguugauacuacaguu

SEQ ID NO: 3053502 - RNA, 18 nt, Human
aguugaaaagacuccaaa

SEQ ID NO: 3053503 - RNA, 14 nt, Human
aguugaaaagacuc

SEQ ID NO: 3053504 - RNA, 20 nt, Human
aguugaaaagacuccaaaga

SEQ ID NO: 3053505 - RNA, 19 nt, Human
aguugaaaagacuccaaag

SEQ ID NO: 3053506 - RNA, 20 nt, Human
agugcuaauuuugaaaaacu

SEQ ID NO: 3053507 - RNA, 18 nt, Human
agugcuaauuuugaaaaa

SEQ ID NO: 3053508 - RNA, 15 nt, Human
agugcuaauuuugaa

SEQ ID NO: 3053509 - RNA, 16 nt, Human
agugccuuauggaaca

SEQ ID NO: 3053510 - RNA, 10 nt, Human
agugccuuau

SEQ ID NO: 3053511 - RNA, 13 nt, Human
agugccuuaugga

SEQ ID NO: 3053512 - RNA, 14 nt, Human
agugccuuauggaa

SEQ ID NO: 3053513 - RNA, 15 nt, Human
agugccuuauggaac

SEQ ID NO: 3053514 - RNA, 24 nt, Human
agugauccucccaccucagccucc

SEQ ID NO: 3053515 - RNA, 23 nt, Human
agugauccucccaccucagccuc

SEQ ID NO: 3053516 - RNA, 18 nt, Human
agugauccucccaccuca

SEQ ID NO: 3053517 - RNA, 15 nt, Human
agugauccucccacc

SEQ ID NO: 3053518 - RNA, 14 nt, Human
agugauccucccac

SEQ ID NO: 3053519 - RNA, 17 nt, Human
agugauucuccugccuc

SEQ ID NO: 3053520 - RNA, 15 nt, Human
agugauucuccugcc

SEQ ID NO: 3053521 - RNA, 18 nt, Human
agugccuuacacaauggu

SEQ ID NO: 3053522 - RNA, 14 nt, Human
agugauucuccugc

SEQ ID NO: 3053523 - RNA, 19 nt, Human
agugucaaugcagccccca

SEQ ID NO: 3053524 - RNA, 16 nt, Human
agugggagcugccugu

SEQ ID NO: 3053525 - RNA, 22 nt, Human
aguaaaugcuagguuaauucca

SEQ ID NO: 3053526 - RNA, 11 nt, Human
aguaaaugcua

SEQ ID NO: 3053527 - RNA, 23 nt, Human
aguaaaugcuagguuaauuccaa

SEQ ID NO: 3053528 - RNA, 19 nt, Human
aguaacaaugaagauaaaa

SEQ ID NO: 3053529 - RNA, 15 nt, Human
aggucuguucuuucc

SEQ ID NO: 3053530 - RNA, 13 nt, Human
aggucuguucuuu

SEQ ID NO: 3053531 - RNA, 16 nt, Human
aggucuguucuuucca

SEQ ID NO: 3053532 - RNA, 14 nt, Human
aguacguugugcau

SEQ ID NO: 3053533 - RNA, 15 nt, Human
aguacguugugcauu

SEQ ID NO: 3053534 - RNA, 14 nt, Human
aguacuauguauca

SEQ ID NO: 3053535 - RNA, 12 nt, Human
aguacuauguau

SEQ ID NO: 3053536 - RNA, 22 nt, Human
aguacuucuccacccugcucuc

SEQ ID NO: 3053537 - RNA, 12 nt, Human
aguacuucuuuu

SEQ ID NO: 3053538 - RNA, 17 nt, Human
aguacuucuccacccug

SEQ ID NO: 3053539 - RNA, 19 nt, Human
aguacuacaguccucccau

SEQ ID NO: 3053540 - RNA, 22 nt, Human
aguacuacaguccucccaucuc

SEQ ID NO: 3053541 - RNA, 14 nt, Human
aguacuauaauuua

SEQ ID NO: 3053542 - RNA, 17 nt, Human
aguacguugugcauuug

SEQ ID NO: 3053543 - RNA, 16 nt, Human
aguacguugugcauuu

SEQ ID NO: 3053544 - RNA, 18 nt, Human
aguacguugugcauuugg

SEQ ID NO: 3053545 - RNA, 16 nt, Human
aguauuuuugacagaa

SEQ ID NO: 3053546 - RNA, 17 nt, Human
aguauuuuugacagaau

SEQ ID NO: 3053547 - RNA, 18 nt, Human
aguauuuuugacagaaua

SEQ ID NO: 3053548 - RNA, 13 nt, Human
aguauuuuugaca

SEQ ID NO: 3053549 - RNA, 17 nt, Human
aguauuuuguuucagug

SEQ ID NO: 3053550 - RNA, 17 nt, Human
aguaugaggcauuuguu

SEQ ID NO: 3053551 - RNA, 14 nt, Human
aguauuuuguuuca

SEQ ID NO: 3053552 - RNA, 23 nt, Human
aguaugaggcauuuguuugaacu

SEQ ID NO: 3053553 - RNA, 21 nt, Human
aguaugaggcauuuguuugaa

SEQ ID NO: 3053554 - RNA, 20 nt, Human
aguaugaggcauuuguuuga

SEQ ID NO: 3053555 - RNA, 22 nt, Human
agucacacaguauuacuucugc

SEQ ID NO: 3053556 - RNA, 20 nt, Human
agugaauucuugaaggaaaa

SEQ ID NO: 3053557 - RNA, 17 nt, Human
agucugaaggcuggguu

SEQ ID NO: 3053558 - RNA, 19 nt, Human
aguccuuaccagcagagca

SEQ ID NO: 3053559 - RNA, 19 nt, Human
aguccucuuuucugagagg

SEQ ID NO: 3053560 - RNA, 20 nt, Human
aguccuuaccagcagagcac

SEQ ID NO: 3053561 - RNA, 22 nt, Human
aguccucuuuucugagaggacu

SEQ ID NO: 3053562 - RNA, 13 nt, Human
cacaggaaaccag

SEQ ID NO: 3053563 - RNA, 17 nt, Human
cacaguucaauucucau

SEQ ID NO: 3053564 - RNA, 22 nt, Human
caaaauaauuuuaagaaaucaa

SEQ ID NO: 3053565 - RNA, 18 nt, Human
caaaauaauuuuaagaaa

SEQ ID NO: 3053566 - RNA, 20 nt, Human
caaaauaaaacuuuuuaaaa

SEQ ID NO: 3053567 - RNA, 16 nt, Human
caaaauaaaacuuuuu

SEQ ID NO: 3053568 - RNA, 14 nt, Human
caaaauaaaacuuu

SEQ ID NO: 3053569 - RNA, 21 nt, Human
caaaaucgaugcagugcuucc

SEQ ID NO: 3053570 - RNA, 23 nt, Human
caaaacucuccucugcugcuggc

SEQ ID NO: 3053571 - RNA, 14 nt, Human
caaaaguuucucuu

SEQ ID NO: 3053572 - RNA, 18 nt, Human
caaaacugcacugucaag

SEQ ID NO: 3053573 - RNA, 17 nt, Human
caaaacugcacugucaa

SEQ ID NO: 3053574 - RNA, 14 nt, Human
caaaacugcacugu

SEQ ID NO: 3053575 - RNA, 15 nt, Human
caaaacgguuuuacu

SEQ ID NO: 3053576 - RNA, 21 nt, Human
caaaacgguuuuacugcagcu

SEQ ID NO: 3053577 - RNA, 18 nt, Human
auuuuauuuuauuaugca

SEQ ID NO: 3053578 - RNA, 15 nt, Human
caaaacucuccucug

SEQ ID NO: 3053579 - RNA, 16 nt, Human
caaaacucuccucugc

SEQ ID NO: 3053580 - RNA, 17 nt, Human
caaacugacucuuaaga

SEQ ID NO: 3053581 - RNA, 21 nt, Human
caaacugacucuuaagaagac

SEQ ID NO: 3053582 - RNA, 16 nt, Human
caaacugacucuuaag

SEQ ID NO: 3053583 - RNA, 21 nt, Human
caaacucuugaccucagguga

SEQ ID NO: 3053584 - RNA, 20 nt, Human
caaacucuugaccucaggug

SEQ ID NO: 3053585 - RNA, 19 nt, Human
caaacucuugaccucaggu

SEQ ID NO: 3053586 - RNA, 17 nt, Human
caaacucuugaccucag

SEQ ID NO: 3053587 - RNA, 13 nt, Human
caaacagaggccg

SEQ ID NO: 3053588 - RNA, 11 nt, Human
caaaaugaaac

SEQ ID NO: 3053589 - RNA, 22 nt, Human
caaaaugaaacgcaaccaccac

SEQ ID NO: 3053590 - RNA, 23 nt, Human
caaauauauucagccuggcuuca

SEQ ID NO: 3053591 - RNA, 12 nt, Human
caaauaugcaaa

SEQ ID NO: 3053592 - RNA, 13 nt, Human
caaauaugcaaag

SEQ ID NO: 3053593 - RNA, 23 nt, Human
caaauggaaaugggcagagcaga

SEQ ID NO: 3053594 - RNA, 22 nt, Human
caaauggaaaugggcagagcag

SEQ ID NO: 3053595 - RNA, 14 nt, Human
caaauguucaucaa

SEQ ID NO: 3053596 - RNA, 18 nt, Human
caaauguucaucaaugaa

SEQ ID NO: 3053597 - RNA, 16 nt, Human
caaagagagaaaauaa

SEQ ID NO: 3053598 - RNA, 15 nt, Human
caaagaaauuaugug

SEQ ID NO: 3053599 - RNA, 19 nt, Human
caaagagagaaaauaaaga

SEQ ID NO: 3053600 - RNA, 19 nt, Human
caaagugcugggauuacaa

SEQ ID NO: 3053601 - RNA, 13 nt, Human
caaagugcuggga

SEQ ID NO: 3053602 - RNA, 18 nt, Human
caaauaaaaauauugugu

SEQ ID NO: 3053603 - RNA, 16 nt, Human
caaauaaaaauauugu

SEQ ID NO: 3053604 - RNA, 15 nt, Human
caaauaaaaauauug

SEQ ID NO: 3053605 - RNA, 23 nt, Human
caaagugcugggauuacaagcgu

SEQ ID NO: 3053606 - RNA, 19 nt, Human
caaaguggugagaggcauc

SEQ ID NO: 3053607 - RNA, 17 nt, Human
caacauacucccaucug

SEQ ID NO: 3053608 - RNA, 19 nt, Human
caacauacucccaucugug

SEQ ID NO: 3053609 - RNA, 12 nt, Human
caacaggcuggg

SEQ ID NO: 3053610 - RNA, 20 nt, Human
caacauacucccaucuguga

SEQ ID NO: 3053611 - RNA, 22 nt, Human
caaauuucuaaaucuccaaaau

SEQ ID NO: 3053612 - RNA, 15 nt, Human
caaauuucuaaaucu

SEQ ID NO: 3053613 - RNA, 13 nt, Human
caagaagcccagg

SEQ ID NO: 3053614 - RNA, 15 nt, Human
caagaaaugaaagca

SEQ ID NO: 3053615 - RNA, 17 nt, Human
caagaaaugaaagcagg

SEQ ID NO: 3053616 - RNA, 19 nt, Human
caagaaaugaaagcaggga

SEQ ID NO: 3053617 - RNA, 21 nt, Human
caagaccuucuccuucaccuu

SEQ ID NO: 3053618 - RNA, 23 nt, Human
caagaccuucuccuucaccuuug

SEQ ID NO: 3053619 - RNA, 13 nt, Human
caagacgcugugc

SEQ ID NO: 3053620 - RNA, 19 nt, Human
caauaauaaauauuuuugc

SEQ ID NO: 3053621 - RNA, 16 nt, Human
caauaggaaaaacuga

SEQ ID NO: 3053622 - RNA, 17 nt, Human
caauaggaaaaacugau

SEQ ID NO: 3053623 - RNA, 15 nt, Human
caauaggaaaaacug

SEQ ID NO: 3053624 - RNA, 17 nt, Human
caauagucaaauugugu

SEQ ID NO: 3053625 - RNA, 19 nt, Human
caauagucaaauuguguga

SEQ ID NO: 3053626 - RNA, 21 nt, Human
caagggugaugggaaagcauu

SEQ ID NO: 3053627 - RNA, 23 nt, Human
caagggugaugggaaagcauugu

SEQ ID NO: 3053628 - RNA, 20 nt, Human
caagcugcacccucaggcag

SEQ ID NO: 3053629 - RNA, 22 nt, Human
caagcugcacccucaggcaggu

SEQ ID NO: 3053630 - RNA, 21 nt, Human
caagcuggucccacucagucc

SEQ ID NO: 3053631 - RNA, 17 nt, Human
caagcgauucuucugcu

SEQ ID NO: 3053632 - RNA, 15 nt, Human
caagcgauucuucug

SEQ ID NO: 3053633 - RNA, 21 nt, Human
caagcugcacccucaggcagg

SEQ ID NO: 3053634 - RNA, 18 nt, Human
caagcgauucuucugcuu

SEQ ID NO: 3053635 - RNA, 20 nt, Human
caaggaaaaaauaacaauga

SEQ ID NO: 3053636 - RNA, 18 nt, Human
caaggaaaaaauaacaau

SEQ ID NO: 3053637 - RNA, 23 nt, Human
caagcuggucccacucaguccau

SEQ ID NO: 3053638 - RNA, 22 nt, Human
caagcuggucccacucagucca

SEQ ID NO: 3053639 - RNA, 17 nt, Human
caaggcugcagugagcc

SEQ ID NO: 3053640 - RNA, 22 nt, Human
caaggcugcagugagccgagau

SEQ ID NO: 3053641 - RNA, 20 nt, Human
caaggauccugagccagauu

SEQ ID NO: 3053642 - RNA, 18 nt, Human
caaggauccugagccaga

SEQ ID NO: 3053643 - RNA, 19 nt, Human
caaggauccugagccagau

SEQ ID NO: 3053644 - RNA, 16 nt, Human
caaggagauuuacaac

SEQ ID NO: 3053645 - RNA, 13 nt, Human
cacaaaggagagc

SEQ ID NO: 3053646 - RNA, 18 nt, Human
cacaagaaaugaaagcag

SEQ ID NO: 3053647 - RNA, 20 nt, Human
cacaagaaaugaaagcaggg

SEQ ID NO: 3053648 - RNA, 17 nt, Human
cacacacgcgugcacac

SEQ ID NO: 3053649 - RNA, 22 nt, Human
caaugugaaaagaaaaaugagc

SEQ ID NO: 3053650 - RNA, 19 nt, Human
caaugugaaaagaaaaaug

SEQ ID NO: 3053651 - RNA, 14 nt, Human
caauguucucucuu

SEQ ID NO: 3053652 - RNA, 17 nt, Human
caauuacaggaaguacu

SEQ ID NO: 3053653 - RNA, 18 nt, Human
caauuacaggaaguacug

SEQ ID NO: 3053654 - RNA, 14 nt, Human
cacaaacagaggcc

SEQ ID NO: 3053655 - RNA, 13 nt, Human
cacaaacagaggc

SEQ ID NO: 3053656 - RNA, 22 nt, Human
caauuuuucuuauuucauuucu

SEQ ID NO: 3053657 - RNA, 19 nt, Human
cacagcaggcugccagugc

SEQ ID NO: 3053658 - RNA, 20 nt, Human
cacagcaggcugccagugcc

SEQ ID NO: 3053659 - RNA, 21 nt, Human
cacagcaggcugccagugccu

SEQ ID NO: 3053660 - RNA, 22 nt, Human
cacagcaggcugccagugccug

SEQ ID NO: 3053661 - RNA, 21 nt, Human
cacagcaguugaaaagacucc

SEQ ID NO: 3053662 - RNA, 15 nt, Human
cacagcaggcugcca

SEQ ID NO: 3053663 - RNA, 16 nt, Human
cacagcaggcugccag

SEQ ID NO: 3053664 - RNA, 17 nt, Human
cacagcaggcugccagu

SEQ ID NO: 3053665 - RNA, 13 nt, Human
cacagcaggcugc

SEQ ID NO: 3053666 - RNA, 19 nt, Human
cacagcaguugaaaagacu

SEQ ID NO: 3053667 - RNA, 21 nt, Human
cacagcucuucuccaggcugu

SEQ ID NO: 3053668 - RNA, 14 nt, Human
cacagccccaucug

SEQ ID NO: 3053669 - RNA, 18 nt, Human
cacagccagacuggcaca

SEQ ID NO: 3053670 - RNA, 17 nt, Human
cacagccagacuggcac

SEQ ID NO: 3053671 - RNA, 12 nt, Human
cacagagaaagu

SEQ ID NO: 3053672 - RNA, 13 nt, Human
cacacugaagaag

SEQ ID NO: 3053673 - RNA, 20 nt, Human
cacagagaaaguacuucucc

SEQ ID NO: 3053674 - RNA, 19 nt, Human
cacagagaaaguacuucuc

SEQ ID NO: 3053675 - RNA, 13 nt, Human
cacagaggcugcc

SEQ ID NO: 3053676 - RNA, 22 nt, Human
cacagaguuguuacauuuuuaa

SEQ ID NO: 3053677 - RNA, 21 nt, Human
cacagaguuguuacauuuuua

SEQ ID NO: 3053678 - RNA, 23 nt, Human
cacagaugggugcuuggaggaag

SEQ ID NO: 3053679 - RNA, 12 nt, Human
uuucuaaaguaa

SEQ ID NO: 3053680 - RNA, 18 nt, Human
uuucuaaaggcuaccuuu

SEQ ID NO: 3053681 - RNA, 21 nt, Human
uuucuaaaggcuaccuuugua

SEQ ID NO: 3053682 - RNA, 20 nt, Human
uuucuaaaggcuaccuuugu

SEQ ID NO: 3053683 - RNA, 23 nt, Human
uuucuacucgaguuacagacaaa

SEQ ID NO: 3053684 - RNA, 20 nt, Human
uuucuguucuuucuggcuau

SEQ ID NO: 3053685 - RNA, 13 nt, Human
uuucugagaaaga

SEQ ID NO: 3053686 - RNA, 19 nt, Human
uuucugaaauuuccuggga

SEQ ID NO: 3053687 - RNA, 21 nt, Human
uuucugaaauuuccugggagc

SEQ ID NO: 3053688 - RNA, 15 nt, Human
uuucucugauacaga

SEQ ID NO: 3053689 - RNA, 16 nt, Human
uuucucugauacagaa

SEQ ID NO: 3053690 - RNA, 17 nt, Human
uuucucugauacagaaa

SEQ ID NO: 3053691 - RNA, 18 nt, Human
uuucucugauacagaaaa

SEQ ID NO: 3053692 - RNA, 23 nt, Human
uuacauuuuuaagugcugcauuu

SEQ ID NO: 3053693 - RNA, 17 nt, Human
uuaccacagacauacua

SEQ ID NO: 3053694 - RNA, 14 nt, Human
uuaccacagacaua

SEQ ID NO: 3053695 - RNA, 16 nt, Human
uuuccugaggcugggc

SEQ ID NO: 3053696 - RNA, 18 nt, Human
uuuccucauuuuuauaau

SEQ ID NO: 3053697 - RNA, 22 nt, Human
uuuccucaaaacuucagacaua

SEQ ID NO: 3053698 - RNA, 16 nt, Human
uuugaaucucauaauu

SEQ ID NO: 3053699 - RNA, 19 nt, Human
uuugaaucucauaauuuau

SEQ ID NO: 3053700 - RNA, 20 nt, Human
uuugaaucucauaauuuaua

SEQ ID NO: 3053701 - RNA, 21 nt, Human
uuugaaucucauaauuuauac

SEQ ID NO: 3053702 - RNA, 22 nt, Human
uuugaaucucauaauuuauaca

SEQ ID NO: 3053703 - RNA, 18 nt, Human
uuugaaucaucaagucuu

SEQ ID NO: 3053704 - RNA, 22 nt, Human
uuugaagaugccgcauuuggau

SEQ ID NO: 3053705 - RNA, 14 nt, Human
uuugaacucuucaa

SEQ ID NO: 3053706 - RNA, 15 nt, Human
uuugaacugauaaag

SEQ ID NO: 3053707 - RNA, 19 nt, Human
uuugaacugauaaagauga

SEQ ID NO: 3053708 - RNA, 17 nt, Human
uuugaacugauaaagau

SEQ ID NO: 3053709 - RNA, 12 nt, Human
uuucuucucccu

SEQ ID NO: 3053710 - RNA, 13 nt, Human
uuucuucucccuc

SEQ ID NO: 3053711 - RNA, 23 nt, Human
uuucuuagggaaggauacaaaag

SEQ ID NO: 3053712 - RNA, 18 nt, Human
uuucuuagggaaggauac

SEQ ID NO: 3053713 - RNA, 17 nt, Human
uuucuuauuucauuucu

SEQ ID NO: 3053714 - RNA, 15 nt, Human
uuugcaucugaaaau

SEQ ID NO: 3053715 - RNA, 16 nt, Human
uuugcuuugugauuuu

SEQ ID NO: 3053716 - RNA, 15 nt, Human
uuugcuuugugauuu

SEQ ID NO: 3053717 - RNA, 14 nt, Human
uuuggaauuuugug

SEQ ID NO: 3053718 - RNA, 17 nt, Human
uuuggucuacacugugc

SEQ ID NO: 3053719 - RNA, 21 nt, Human
uuuggaauuuugugcccccau

SEQ ID NO: 3053720 - RNA, 13 nt, Human
uuugguuucuagc

SEQ ID NO: 3053721 - RNA, 19 nt, Human
uuugguuuucacauuggaa

SEQ ID NO: 3053722 - RNA, 13 nt, Human
uuuguauaaaaua

SEQ ID NO: 3053723 - RNA, 14 nt, Human
uuuguauaaaauaa

SEQ ID NO: 3053724 - RNA, 15 nt, Human
uuuuaaaagaaugau

SEQ ID NO: 3053725 - RNA, 21 nt, Human
uuuuaaaagaaugauuaugaa

SEQ ID NO: 3053726 - RNA, 18 nt, Human
uuuuaaagacuuuuauga

SEQ ID NO: 3053727 - RNA, 17 nt, Human
uuuuaaagaaugcucuu

SEQ ID NO: 3053728 - RNA, 21 nt, Human
uuuguucuggcucuuccaggc

SEQ ID NO: 3053729 - RNA, 21 nt, Human
uuuuaaaugcaccuggaauau

SEQ ID NO: 3053730 - RNA, 12 nt, Human
uuuuaaaugcac

SEQ ID NO: 3053731 - RNA, 11 nt, Human
uuuuaaaugca

SEQ ID NO: 3053732 - RNA, 20 nt, Human
uuuuaauaauguuucaaaca

SEQ ID NO: 3053733 - RNA, 18 nt, Human
uuuucuaaaguaaaaaca

SEQ ID NO: 3053734 - RNA, 13 nt, Human
uuuuccugaaaac

SEQ ID NO: 3053735 - RNA, 14 nt, Human
uuuuccugaaaacc

SEQ ID NO: 3053736 - RNA, 20 nt, Human
uuuugaaucucauaauuuau

SEQ ID NO: 3053737 - RNA, 22 nt, Human
uuuucuuuugcuuuauggguuu

SEQ ID NO: 3053738 - RNA, 20 nt, Human
uuuugacaaggggcaguggu

SEQ ID NO: 3053739 - RNA, 14 nt, Human
uuuuggcugcugaa

SEQ ID NO: 3053740 - RNA, 15 nt, Human
uuuuggucuguguga

SEQ ID NO: 3053741 - RNA, 18 nt, Human
uuuuggucuggagggaag

SEQ ID NO: 3053742 - RNA, 18 nt, Human
uuuuguagcacugacaga

SEQ ID NO: 3053743 - RNA, 19 nt, Human
uuuuguagcacugacagau

SEQ ID NO: 3053744 - RNA, 19 nt, Human
uuuuguagagccagggucu

SEQ ID NO: 3053745 - RNA, 13 nt, Human
uuuuuaaagacuu

SEQ ID NO: 3053746 - RNA, 12 nt, Human
uuuuuaaagacu

SEQ ID NO: 3053747 - RNA, 18 nt, Human
uuuuuaaagacuuuuaug

SEQ ID NO: 3053748 - RNA, 16 nt, Human
uuuugucauauaagau

SEQ ID NO: 3053749 - RNA, 18 nt, Human
uuuuuaaaaaagaaacau

SEQ ID NO: 3053750 - RNA, 11 nt, Human
uuuuuccuuca

SEQ ID NO: 3053751 - RNA, 23 nt, Human
uuuuuaagaaaaaggaugcacag

SEQ ID NO: 3053752 - RNA, 19 nt, Human
uuuuuccuucagugccuua

SEQ ID NO: 3053753 - RNA, 23 nt, Human
uuuuucucugauacagaaaaguu

SEQ ID NO: 3053754 - RNA, 19 nt, Human
uuuuucucuaggaaauauu

SEQ ID NO: 3053755 - RNA, 16 nt, Human
uuaaugauaaguaaau

SEQ ID NO: 3053756 - RNA, 22 nt, Human
uuaauuaaaacacaacaucuuu

SEQ ID NO: 3053757 - RNA, 13 nt, Human
uuacauuguaaau

SEQ ID NO: 3053758 - RNA, 12 nt, Human
uuacauuguaaa

SEQ ID NO: 3053759 - RNA, 17 nt, Human
uuacauuuuuaagugcu

SEQ ID NO: 3053760 - RNA, 12 nt, Human
uuacauuuuuaa

SEQ ID NO: 3053761 - RNA, 20 nt, Human
uuacauuuguauaaaauaau

SEQ ID NO: 3053762 - RNA, 20 nt, Human
uuacacuuuaugcacaaaau

SEQ ID NO: 3053763 - RNA, 13 nt, Human
uuacacuuuaugc

SEQ ID NO: 3053764 - RNA, 12 nt, Human
uuaagaguaaaa

SEQ ID NO: 3053765 - RNA, 13 nt, Human
uuaaaugcccagc

SEQ ID NO: 3053766 - RNA, 13 nt, Human
uuaacuuuuauaa

SEQ ID NO: 3053767 - RNA, 12 nt, Human
uuaacuuuuaua

SEQ ID NO: 3053768 - RNA, 19 nt, Human
uguuuccauauuuuauagg

SEQ ID NO: 3053769 - RNA, 16 nt, Human
uguuuuaagaggcagg

SEQ ID NO: 3053770 - RNA, 23 nt, Human
uguuuuaaggaugcuuguacaua

SEQ ID NO: 3053771 - RNA, 22 nt, Human
uguuuuaaggaugcuuguacau

SEQ ID NO: 3053772 - RNA, 19 nt, Human
uguuuuaaggaugcuugua

SEQ ID NO: 3053773 - RNA, 17 nt, Human
uguuuuaagaggcaggg

SEQ ID NO: 3053774 - RNA, 22 nt, Human
uuaaaaaaaaaccugagcccca

SEQ ID NO: 3053775 - RNA, 14 nt, Human
uuaaaacccaagug

SEQ ID NO: 3053776 - RNA, 22 nt, Human
uuaaacuuaaucuaaauggaac

SEQ ID NO: 3053777 - RNA, 18 nt, Human
uuaaaauacacacucaaa

SEQ ID NO: 3053778 - RNA, 15 nt, Human
uuaaaugcccagccc

SEQ ID NO: 3053779 - RNA, 16 nt, Human
uuaaaugcccagcccc

SEQ ID NO: 3053780 - RNA, 14 nt, Human
uuaaaugcccagcc

SEQ ID NO: 3053781 - RNA, 12 nt, Human
uguuuaagagac

SEQ ID NO: 3053782 - RNA, 14 nt, Human
uguuuaaaaucauu

SEQ ID NO: 3053783 - RNA, 19 nt, Human
uguuggcugggggccucag

SEQ ID NO: 3053784 - RNA, 18 nt, Human
uguuuaaaaucauuucug

SEQ ID NO: 3053785 - RNA, 17 nt, Human
uguuuaaaaucauuucu

SEQ ID NO: 3053786 - RNA, 17 nt, Human
uguuggcugggggccuc

SEQ ID NO: 3053787 - RNA, 16 nt, Human
uguuggccaggcuggu

SEQ ID NO: 3053788 - RNA, 15 nt, Human
uguuggccaggcugg

SEQ ID NO: 3053789 - RNA, 19 nt, Human
uguuggagaagaacugaaa

SEQ ID NO: 3053790 - RNA, 14 nt, Human
uguuggagaagaac

SEQ ID NO: 3053791 - RNA, 16 nt, Human
uguuggagaagaacug

SEQ ID NO: 3053792 - RNA, 17 nt, Human
uguuggagaagaacuga

SEQ ID NO: 3053793 - RNA, 23 nt, Human
uguucuuucuggcuaugcauuug

SEQ ID NO: 3053794 - RNA, 17 nt, Human
uguucuggcucuuccag

SEQ ID NO: 3053795 - RNA, 20 nt, Human
uguucuggcucuuccaggcu

SEQ ID NO: 3053796 - RNA, 21 nt, Human
uguucuggcucuuccaggcug

SEQ ID NO: 3053797 - RNA, 20 nt, Human
uguugacaugggacauuugc

SEQ ID NO: 3053798 - RNA, 13 nt, Human
uguucucugcccu

SEQ ID NO: 3053799 - RNA, 14 nt, Human
uguucucugcccuc

SEQ ID NO: 3053800 - RNA, 15 nt, Human
uguucucugcccucc

SEQ ID NO: 3053801 - RNA, 16 nt, Human
uguucucugcccucca

SEQ ID NO: 3053802 - RNA, 13 nt, Human
uguucuggcucuu

SEQ ID NO: 3053803 - RNA, 16 nt, Human
uguucuggcucuucca

SEQ ID NO: 3053804 - RNA, 12 nt, Human
uguucuggcucu

SEQ ID NO: 3053805 - RNA, 19 nt, Human
uguucaucauccuaagcua

SEQ ID NO: 3053806 - RNA, 13 nt, Human
uguucaugaaaga

SEQ ID NO: 3053807 - RNA, 14 nt, Human
uguucaugaaagau

SEQ ID NO: 3053808 - RNA, 15 nt, Human
uguucucucuucucc

SEQ ID NO: 3053809 - RNA, 16 nt, Human
uguucucucuucucca

SEQ ID NO: 3053810 - RNA, 15 nt, Human
uguguuuuucauaaa

SEQ ID NO: 3053811 - RNA, 18 nt, Human
uguguuuuucauaaagca

SEQ ID NO: 3053812 - RNA, 13 nt, Human
uguguuuugcaag

SEQ ID NO: 3053813 - RNA, 19 nt, Human
uguguuuugcaagccagau

SEQ ID NO: 3053814 - RNA, 16 nt, Human
uguguuuauugucaaa

SEQ ID NO: 3053815 - RNA, 13 nt, Human
uguguuuauuguc

SEQ ID NO: 3053816 - RNA, 19 nt, Human
ugugugcacguacacacac

SEQ ID NO: 3053817 - RNA, 20 nt, Human
ugugugaaagguacuucaaa

SEQ ID NO: 3053818 - RNA, 21 nt, Human
ugugugaaagguacuucaaau

SEQ ID NO: 3053819 - RNA, 22 nt, Human
ugugugaaagguacuucaaauc

SEQ ID NO: 3053820 - RNA, 14 nt, Human
uguucauacauauu

SEQ ID NO: 3053821 - RNA, 23 nt, Human
uguucauacauauuuuuguagca

SEQ ID NO: 3053822 - RNA, 17 nt, Human
uguucauaaauaaaguu

SEQ ID NO: 3053823 - RNA, 12 nt, Human
uguucauacaua

SEQ ID NO: 3053824 - RNA, 18 nt, Human
uguucagcuccagcucac

SEQ ID NO: 3053825 - RNA, 21 nt, Human
uguucagcuccagcucaccag

SEQ ID NO: 3053826 - RNA, 20 nt, Human
uguucagcuccagcucacca

SEQ ID NO: 3053827 - RNA, 17 nt, Human
uguuaguaugaggcauu

SEQ ID NO: 3053828 - RNA, 20 nt, Human
uguuaguaugaggcauuugu

SEQ ID NO: 3053829 - RNA, 19 nt, Human
uguuaguaugaggcauuug

SEQ ID NO: 3053830 - RNA, 21 nt, Human
uguuaaaagaugaaaauauuu

SEQ ID NO: 3053831 - RNA, 14 nt, Human
uguuacuaaguuuu

SEQ ID NO: 3053832 - RNA, 21 nt, Human
ugugaauguugugauguauuc

SEQ ID NO: 3053833 - RNA, 18 nt, Human
ugugaagugaaugaaaca

SEQ ID NO: 3053834 - RNA, 15 nt, Human
ugugacauguuuuau

SEQ ID NO: 3053835 - RNA, 13 nt, Human
ugugaggaagccg

SEQ ID NO: 3053836 - RNA, 18 nt, Human
ugugaggaagccgcuggg

SEQ ID NO: 3053837 - RNA, 20 nt, Human
ugugaggaagccgcuggggc

SEQ ID NO: 3053838 - RNA, 12 nt, Human
ugugaggaagcc

SEQ ID NO: 3053839 - RNA, 16 nt, Human
ugugauauaagugugu

SEQ ID NO: 3053840 - RNA, 13 nt, Human
ugugauauaagug

SEQ ID NO: 3053841 - RNA, 17 nt, Human
ugugagucaccaagccc

SEQ ID NO: 3053842 - RNA, 15 nt, Human
ugugagucaccaagc

SEQ ID NO: 3053843 - RNA, 21 nt, Human
ugugagucaccaagcccaguu

SEQ ID NO: 3053844 - RNA, 19 nt, Human
ugugagucaccaagcccag

SEQ ID NO: 3053845 - RNA, 16 nt, Human
ugucuuuggacccuga

SEQ ID NO: 3053846 - RNA, 21 nt, Human
ugucuuuucuugcaugaggcu

SEQ ID NO: 3053847 - RNA, 14 nt, Human
ugucuuuggacccu

SEQ ID NO: 3053848 - RNA, 23 nt, Human
ugucuuuucuugcaugaggcuag

SEQ ID NO: 3053849 - RNA, 23 nt, Human
ugugaaaagaaaaaugagccugg

SEQ ID NO: 3053850 - RNA, 21 nt, Human
ugugaaaagaaaaaugagccu

SEQ ID NO: 3053851 - RNA, 12 nt, Human
uguguagggcgg

SEQ ID NO: 3053852 - RNA, 23 nt, Human
uguggcgcagcauauucaggaag

SEQ ID NO: 3053853 - RNA, 12 nt, Human
uguggcgagcca

SEQ ID NO: 3053854 - RNA, 22 nt, Human
uguggcgagccauuugucccaa

SEQ ID NO: 3053855 - RNA, 18 nt, Human
uguggacacagcucuucu

SEQ ID NO: 3053856 - RNA, 19 nt, Human
uguggacacagcucuucuc

SEQ ID NO: 3053857 - RNA, 16 nt, Human
uguggacacagcucuu

SEQ ID NO: 3053858 - RNA, 16 nt, Human
ugugcucaggagcccu

SEQ ID NO: 3053859 - RNA, 15 nt, Human
ugugcucaggagccc

SEQ ID NO: 3053860 - RNA, 17 nt, Human
ugugcucaggagcccug

SEQ ID NO: 3053861 - RNA, 14 nt, Human
ugugcgccuacagg

SEQ ID NO: 3053862 - RNA, 19 nt, Human
ugugcgccuacaggaguga

SEQ ID NO: 3053863 - RNA, 19 nt, Human
ugugcuaguaauuggaaag

SEQ ID NO: 3053864 - RNA, 21 nt, Human
ugugcauuaucuagauacugu

SEQ ID NO: 3053865 - RNA, 20 nt, Human
ugugcauuaucuagauacug

SEQ ID NO: 3053866 - RNA, 23 nt, Human
ugugcauuaucuagauacuguau

SEQ ID NO: 3053867 - RNA, 14 nt, Human
ugugcauuaucuag

SEQ ID NO: 3053868 - RNA, 19 nt, Human
ugugcauuaucuagauacu

SEQ ID NO: 3053869 - RNA, 16 nt, Human
ugugcauuaucuagau

SEQ ID NO: 3053870 - RNA, 14 nt, Human
ugugcacguacaca

SEQ ID NO: 3053871 - RNA, 18 nt, Human
uguagccccucuccugga

SEQ ID NO: 3053872 - RNA, 22 nt, Human
uguaguguuggagaagaacuga

SEQ ID NO: 3053873 - RNA, 14 nt, Human
uguacgaagaguau

SEQ ID NO: 3053874 - RNA, 22 nt, Human
uguacgaagaguauuuuugaca

SEQ ID NO: 3053875 - RNA, 15 nt, Human
uguacgucugacagg

SEQ ID NO: 3053876 - RNA, 19 nt, Human
uguacugcauaugaaagga

SEQ ID NO: 3053877 - RNA, 17 nt, Human
uguagauaauacaguuc

SEQ ID NO: 3053878 - RNA, 17 nt, Human
uguagcauccuggaaua

SEQ ID NO: 3053879 - RNA, 18 nt, Human
uguagcauccuggaauau

SEQ ID NO: 3053880 - RNA, 14 nt, Human
uguagcauccugga

SEQ ID NO: 3053881 - RNA, 16 nt, Human
uguagcauccuggaau

SEQ ID NO: 3053882 - RNA, 18 nt, Human
uguacagagcccacgccc

SEQ ID NO: 3053883 - RNA, 15 nt, Human
uguaccgcaauguga

SEQ ID NO: 3053884 - RNA, 16 nt, Human
uguaccgcaaugugac

SEQ ID NO: 3053885 - RNA, 16 nt, Human
uguacagagcccacgc

SEQ ID NO: 3053886 - RNA, 17 nt, Human
uguacagagcccacgcc

SEQ ID NO: 3053887 - RNA, 13 nt, Human
uguacagagccca

SEQ ID NO: 3053888 - RNA, 20 nt, Human
uguaauaaacucauuucuag

SEQ ID NO: 3053889 - RNA, 22 nt, Human
uguauaaaagggacugagaaau

SEQ ID NO: 3053890 - RNA, 15 nt, Human
uguaugauucccagc

SEQ ID NO: 3053891 - RNA, 22 nt, Human
uguauucucuccuguaccucuu

SEQ ID NO: 3053892 - RNA, 12 nt, Human
ugucacaggcag

SEQ ID NO: 3053893 - RNA, 17 nt, Human
ugucacacacuuuggcu

SEQ ID NO: 3053894 - RNA, 13 nt, Human
ugucacacacuuu

SEQ ID NO: 3053895 - RNA, 19 nt, Human
uguauuuuacuaauaaaau

SEQ ID NO: 3053896 - RNA, 16 nt, Human
uguccuacccacccuc

SEQ ID NO: 3053897 - RNA, 17 nt, Human
uguccuacucuguguca

SEQ ID NO: 3053898 - RNA, 12 nt, Human
uguccuacucug

SEQ ID NO: 3053899 - RNA, 16 nt, Human
uguccccgacccuugc

SEQ ID NO: 3053900 - RNA, 17 nt, Human
uguccccgacccuugcc

SEQ ID NO: 3053901 - RNA, 20 nt, Human
uguccuacccacccuccuuu

SEQ ID NO: 3053902 - RNA, 18 nt, Human
uguccccaccgcagacag

SEQ ID NO: 3053903 - RNA, 14 nt, Human
ugucccaagugcca

SEQ ID NO: 3053904 - RNA, 15 nt, Human
ugucccaagugccaa

SEQ ID NO: 3053905 - RNA, 12 nt, Human
ugucccaagugc

SEQ ID NO: 3053906 - RNA, 13 nt, Human
ugucccaagugcc

SEQ ID NO: 3053907 - RNA, 19 nt, Human
uguccccaccgcagacagg

SEQ ID NO: 3053908 - RNA, 22 nt, Human
uguccccaccgcagacaggacc

SEQ ID NO: 3053909 - RNA, 13 nt, Human
uguccccaccgca

SEQ ID NO: 3053910 - RNA, 23 nt, Human
ugucccaaaaagaaaggagggga

SEQ ID NO: 3053911 - RNA, 19 nt, Human
ugucauuugagcagggcuc

SEQ ID NO: 3053912 - RNA, 16 nt, Human
ugucauuugagcaggg

SEQ ID NO: 3053913 - RNA, 13 nt, Human
ugucaccugaaga

SEQ ID NO: 3053914 - RNA, 17 nt, Human
ugcucagagcaguguuu

SEQ ID NO: 3053915 - RNA, 16 nt, Human
ugcucacauaucuguc

SEQ ID NO: 3053916 - RNA, 15 nt, Human
ugcucacauaucugu

SEQ ID NO: 3053917 - RNA, 15 nt, Human
ugcuaagcauuccaa

SEQ ID NO: 3053918 - RNA, 19 nt, Human
ugcuaagcauuccaacuau

SEQ ID NO: 3053919 - RNA, 14 nt, Human
ugcuccucucccca

SEQ ID NO: 3053920 - RNA, 16 nt, Human
ugcucaguagucagac

SEQ ID NO: 3053921 - RNA, 17 nt, Human
ugcugaaacaacaaaua

SEQ ID NO: 3053922 - RNA, 17 nt, Human
ugcuccucuccccagca

SEQ ID NO: 3053923 - RNA, 18 nt, Human
ugcuccuuucuuguuuua

SEQ ID NO: 3053924 - RNA, 16 nt, Human
ugcugcaguugccagu

SEQ ID NO: 3053925 - RNA, 18 nt, Human
ugcugcaguugccaguca

SEQ ID NO: 3053926 - RNA, 23 nt, Human
ugcugcaguugccagucaccccg

SEQ ID NO: 3053927 - RNA, 13 nt, Human
ugcugcuggcugg

SEQ ID NO: 3053928 - RNA, 12 nt, Human
ugcugaaggcuc

SEQ ID NO: 3053929 - RNA, 13 nt, Human
ugcugaaggcucg

SEQ ID NO: 3053930 - RNA, 19 nt, Human
ugcugacagacacaggccc

SEQ ID NO: 3053931 - RNA, 23 nt, Human
ugcugacagacacaggcccggcu

SEQ ID NO: 3053932 - RNA, 22 nt, Human
ugcugacagacacaggcccggc

SEQ ID NO: 3053933 - RNA, 15 nt, Human
ugcugauggugcaau

SEQ ID NO: 3053934 - RNA, 17 nt, Human
ugcugauggugcaauga

SEQ ID NO: 3053935 - RNA, 13 nt, Human
ugcugauggugca

SEQ ID NO: 3053936 - RNA, 9 nt, Human
ugccucucu

SEQ ID NO: 3053937 - RNA, 20 nt, Human
ugccucucccugcugcuccu

SEQ ID NO: 3053938 - RNA, 17 nt, Human
ugccucucccugcugcu

SEQ ID NO: 3053939 - RNA, 19 nt, Human
ugccucgaacuggcugcaa

SEQ ID NO: 3053940 - RNA, 18 nt, Human
ugccucgaacuggcugca

SEQ ID NO: 3053941 - RNA, 20 nt, Human
ugccucgaacuggcugcaaa

SEQ ID NO: 3053942 - RNA, 18 nt, Human
ugccccuggcagccccug

SEQ ID NO: 3053943 - RNA, 15 nt, Human
ugccuggcggggugg

SEQ ID NO: 3053944 - RNA, 21 nt, Human
ugccugggaucccucauccuc

SEQ ID NO: 3053945 - RNA, 18 nt, Human
ugccugggcagaaggaag

SEQ ID NO: 3053946 - RNA, 16 nt, Human
ugccugguggcagcug

SEQ ID NO: 3053947 - RNA, 18 nt, Human
ugccuguaaucacagcua

SEQ ID NO: 3053948 - RNA, 15 nt, Human
ugccugguggcagcu

SEQ ID NO: 3053949 - RNA, 14 nt, Human
ugccugguggcagc

SEQ ID NO: 3053950 - RNA, 21 nt, Human
ugcgaucuggguucacugcaa

SEQ ID NO: 3053951 - RNA, 20 nt, Human
ugcgaucuggguucacugca

SEQ ID NO: 3053952 - RNA, 19 nt, Human
ugcgaucuggguucacugc

SEQ ID NO: 3053953 - RNA, 15 nt, Human
ugcgaucuggguuca

SEQ ID NO: 3053954 - RNA, 14 nt, Human
ugcgaucuggguuc

SEQ ID NO: 3053955 - RNA, 15 nt, Human
ugccuucucaacucc

SEQ ID NO: 3053956 - RNA, 16 nt, Human
ugcgccuacaggagug

SEQ ID NO: 3053957 - RNA, 14 nt, Human
ugcgccuacaggag

SEQ ID NO: 3053958 - RNA, 22 nt, Human
ugcgccuacaggagugagcacu

SEQ ID NO: 3053959 - RNA, 13 nt, Human
ugcgccuacagga

SEQ ID NO: 3053960 - RNA, 15 nt, Human
ugcuaaaugugaaug

SEQ ID NO: 3053961 - RNA, 21 nt, Human
ugcauauuuauaaaaauaaaa

SEQ ID NO: 3053962 - RNA, 20 nt, Human
ugcauauuuauaaaaauaaa

SEQ ID NO: 3053963 - RNA, 17 nt, Human
ugccaaauauaaauaaa

SEQ ID NO: 3053964 - RNA, 18 nt, Human
ugccaaauauaaauaaaa

SEQ ID NO: 3053965 - RNA, 19 nt, Human
ugccaaauauaaauaaaaa

SEQ ID NO: 3053966 - RNA, 22 nt, Human
ugccaaauauaaauaaaaauaa

SEQ ID NO: 3053967 - RNA, 14 nt, Human
ugcaucaagaugug

SEQ ID NO: 3053968 - RNA, 22 nt, Human
ugccagguuuuuggucugaccc

SEQ ID NO: 3053969 - RNA, 19 nt, Human
ugccagguuuuuggucuga

SEQ ID NO: 3053970 - RNA, 18 nt, Human
ugccagguuuuuggucug

SEQ ID NO: 3053971 - RNA, 19 nt, Human
ugccacccuggggagaaag

SEQ ID NO: 3053972 - RNA, 20 nt, Human
ugccacuaaauugacacuua

SEQ ID NO: 3053973 - RNA, 22 nt, Human
ugccacuacggaauaguuggcu

SEQ ID NO: 3053974 - RNA, 20 nt, Human
ugccauccagguucagcuug

SEQ ID NO: 3053975 - RNA, 21 nt, Human
ugccauccagguucagcuugu

SEQ ID NO: 3053976 - RNA, 13 nt, Human
ugcccacucccug

SEQ ID NO: 3053977 - RNA, 13 nt, Human
ugcccaccuggcc

SEQ ID NO: 3053978 - RNA, 14 nt, Human
ugcccacucccugc

SEQ ID NO: 3053979 - RNA, 15 nt, Human
ugcccacucccugca

SEQ ID NO: 3053980 - RNA, 16 nt, Human
ugcccacucccugcaa

SEQ ID NO: 3053981 - RNA, 11 nt, Human
ugcccaggcug

SEQ ID NO: 3053982 - RNA, 23 nt, Human
ugccccucaacucuccuccagag

SEQ ID NO: 3053983 - RNA, 17 nt, Human
ugccccuggcagccccu

SEQ ID NO: 3053984 - RNA, 19 nt, Human
ugccccucaacucuccucc

SEQ ID NO: 3053985 - RNA, 23 nt, Human
ugcagcaauaaagcagcguuucu

SEQ ID NO: 3053986 - RNA, 20 nt, Human
ugcagcaauaaagcagcguu

SEQ ID NO: 3053987 - RNA, 12 nt, Human
ugcacuuuguuc

SEQ ID NO: 3053988 - RNA, 14 nt, Human
ugcacuuuguucug

SEQ ID NO: 3053989 - RNA, 22 nt, Human
ugcaccgggccacagagaaagu

SEQ ID NO: 3053990 - RNA, 17 nt, Human
ugcaccgggccacagag

SEQ ID NO: 3053991 - RNA, 19 nt, Human
ugaguccccuguuuguuuc

SEQ ID NO: 3053992 - RNA, 23 nt, Human
ugcaccggcuggccuggccccuc

SEQ ID NO: 3053993 - RNA, 15 nt, Human
ugcaccgggccacag

SEQ ID NO: 3053994 - RNA, 14 nt, Human
ugcaccgggccaca

SEQ ID NO: 3053995 - RNA, 17 nt, Human
ugcacgcacacugucug

SEQ ID NO: 3053996 - RNA, 19 nt, Human
ugcacgcacacugucugcc

SEQ ID NO: 3053997 - RNA, 16 nt, Human
ugcagugcuuccaagg

SEQ ID NO: 3053998 - RNA, 19 nt, Human
ugcagugagccgagauugu

SEQ ID NO: 3053999 - RNA, 13 nt, Human
ugcaggcagccag

SEQ ID NO: 3054000 - RNA, 14 nt, Human
ugcaggcagccagg

SEQ ID NO: 3054001 - RNA, 19 nt, Human
ugcaggcagccaggccaca

SEQ ID NO: 3054002 - RNA, 15 nt, Human
ugcaggcagccaggc

SEQ ID NO: 3054003 - RNA, 22 nt, Human
ugcagugguaugaucacggcuc

SEQ ID NO: 3054004 - RNA, 14 nt, Human
ugcaguucugaaga

SEQ ID NO: 3054005 - RNA, 15 nt, Human
ugcaguucugaagaa

SEQ ID NO: 3054006 - RNA, 16 nt, Human
ugcaguucugaagaag

SEQ ID NO: 3054007 - RNA, 17 nt, Human
ugcaguucugaagaaga

SEQ ID NO: 3054008 - RNA, 18 nt, Human
ugcaguucugaagaagau

SEQ ID NO: 3054009 - RNA, 13 nt, Human
ugcaguugccagu

SEQ ID NO: 3054010 - RNA, 14 nt, Human
ugcaguugccaguc

SEQ ID NO: 3054011 - RNA, 19 nt, Human
ugcaguucugaagaagaug

SEQ ID NO: 3054012 - RNA, 22 nt, Human
ugcaguucugaagaagauggua

SEQ ID NO: 3054013 - RNA, 19 nt, Human
ugggguuuaucagaauucu

SEQ ID NO: 3054014 - RNA, 16 nt, Human
uggguaacuagggaag

SEQ ID NO: 3054015 - RNA, 15 nt, Human
uggguucuacccagg

SEQ ID NO: 3054016 - RNA, 16 nt, Human
uggguucuacccaggu

SEQ ID NO: 3054017 - RNA, 22 nt, Human
uggguucuacccaggugcuagg

SEQ ID NO: 3054018 - RNA, 14 nt, Human
uggguguggcgcag

SEQ ID NO: 3054019 - RNA, 23 nt, Human
ugguauuggcuagagguucaaag

SEQ ID NO: 3054020 - RNA, 21 nt, Human
ugguauguuuucaggcuagau

SEQ ID NO: 3054021 - RNA, 21 nt, Human
uggguuucuaaagcugccagc

SEQ ID NO: 3054022 - RNA, 17 nt, Human
uggguuucuaaagcugc

SEQ ID NO: 3054023 - RNA, 18 nt, Human
uggguuucuaaagcugcc

SEQ ID NO: 3054024 - RNA, 15 nt, Human
ugggggugcauuuga

SEQ ID NO: 3054025 - RNA, 12 nt, Human
ugggggugcauu

SEQ ID NO: 3054026 - RNA, 17 nt, Human
ugggggcugggcagagg

SEQ ID NO: 3054027 - RNA, 18 nt, Human
ugggggcugggcagagga

SEQ ID NO: 3054028 - RNA, 21 nt, Human
ugggggaucacagccucugaa

SEQ ID NO: 3054029 - RNA, 20 nt, Human
ugggggaucacagccucuga

SEQ ID NO: 3054030 - RNA, 15 nt, Human
ugggcuucaguggca

SEQ ID NO: 3054031 - RNA, 17 nt, Human
ugggcuucaguggcagc

SEQ ID NO: 3054032 - RNA, 16 nt, Human
ugggcagaggaaagca

SEQ ID NO: 3054033 - RNA, 22 nt, Human
ugggcuaagugauccucccacc

SEQ ID NO: 3054034 - RNA, 23 nt, Human
ugggcuggguucuacccaggugc

SEQ ID NO: 3054035 - RNA, 17 nt, Human
ugggcuggugucaccug

SEQ ID NO: 3054036 - RNA, 16 nt, Human
ugggcuaguugggcuu

SEQ ID NO: 3054037 - RNA, 14 nt, Human
ugggauccuccagg

SEQ ID NO: 3054038 - RNA, 15 nt, Human
ugggauccuccaggu

SEQ ID NO: 3054039 - RNA, 15 nt, Human
ugggagugagcuggu

SEQ ID NO: 3054040 - RNA, 14 nt, Human
ugggaguacaaaag

SEQ ID NO: 3054041 - RNA, 22 nt, Human
ugggagcugccuguucagcucc

SEQ ID NO: 3054042 - RNA, 21 nt, Human
ugggagcugccuguucagcuc

SEQ ID NO: 3054043 - RNA, 17 nt, Human
ugggagcugccuguuca

SEQ ID NO: 3054044 - RNA, 18 nt, Human
ugggauccuccaggugca

SEQ ID NO: 3054045 - RNA, 13 nt, Human
ugggauccuggag

SEQ ID NO: 3054046 - RNA, 16 nt, Human
ugggauuacaggugug

SEQ ID NO: 3054047 - RNA, 15 nt, Human
ugggcagaggaaagc

SEQ ID NO: 3054048 - RNA, 13 nt, Human
ugggagcaaaaga

SEQ ID NO: 3054049 - RNA, 14 nt, Human
ugggagcugccugu

SEQ ID NO: 3054050 - RNA, 13 nt, Human
ugggagcugccug

SEQ ID NO: 3054051 - RNA, 12 nt, Human
ugggagcugccu

SEQ ID NO: 3054052 - RNA, 12 nt, Human
ugggacacccug

SEQ ID NO: 3054053 - RNA, 14 nt, Human
uggcuuuugugcau

SEQ ID NO: 3054054 - RNA, 22 nt, Human
uggcuuccuaaaauucagugga

SEQ ID NO: 3054055 - RNA, 16 nt, Human
uggcuuccuggcaaua

SEQ ID NO: 3054056 - RNA, 21 nt, Human
uggcugggggccucagugcca

SEQ ID NO: 3054057 - RNA, 16 nt, Human
uggcugcuucaaggau

SEQ ID NO: 3054058 - RNA, 21 nt, Human
uggcugcuucaaggauccuga

SEQ ID NO: 3054059 - RNA, 19 nt, Human
uggcccagggcaucuggga

SEQ ID NO: 3054060 - RNA, 14 nt, Human
uggaaagaguacuc

SEQ ID NO: 3054061 - RNA, 20 nt, Human
uggaaagaguaggaagacuu

SEQ ID NO: 3054062 - RNA, 21 nt, Human
uggaacauaaaauacaauguu

SEQ ID NO: 3054063 - RNA, 20 nt, Human
uggaacauaaaauacaaugu

SEQ ID NO: 3054064 - RNA, 21 nt, Human
uggaaagacuuuuccaacccu

SEQ ID NO: 3054065 - RNA, 23 nt, Human
uggaaacuucagcgguuuauaua

SEQ ID NO: 3054066 - RNA, 17 nt, Human
uggaaacaagucaguca

SEQ ID NO: 3054067 - RNA, 17 nt, Human
uggaaaaauagccugcc

SEQ ID NO: 3054068 - RNA, 20 nt, Human
uggaaaaauagccugccucu

SEQ ID NO: 3054069 - RNA, 16 nt, Human
uggaaugcuguguuaa

SEQ ID NO: 3054070 - RNA, 16 nt, Human
uggacagaagcagcuc

SEQ ID NO: 3054071 - RNA, 15 nt, Human
uggacagaagcagcu

SEQ ID NO: 3054072 - RNA, 18 nt, Human
uggacagaagcagcucuu

SEQ ID NO: 3054073 - RNA, 17 nt, Human
uggacagaagcagcucu

SEQ ID NO: 3054074 - RNA, 13 nt, Human
uggacaugcacag

SEQ ID NO: 3054075 - RNA, 19 nt, Human
uggacaugcacagcuaaca

SEQ ID NO: 3054076 - RNA, 22 nt, Human
uggaauaauccuaaacauauga

SEQ ID NO: 3054077 - RNA, 17 nt, Human
uggaauaaggagaauga

SEQ ID NO: 3054078 - RNA, 16 nt, Human
uggaauauauaaccag

SEQ ID NO: 3054079 - RNA, 15 nt, Human
uggaauauauaacca

SEQ ID NO: 3054080 - RNA, 19 nt, Human
uggaauaacauguaauuaa

SEQ ID NO: 3054081 - RNA, 15 nt, Human
uggaauaacauguaa

SEQ ID NO: 3054082 - RNA, 14 nt, Human
uggaauaacaugua

SEQ ID NO: 3054083 - RNA, 12 nt, Human
uggaggaaggaa

SEQ ID NO: 3054084 - RNA, 18 nt, Human
uggaggaaggaaacccag

SEQ ID NO: 3054085 - RNA, 20 nt, Human
uggaggaaggaaacccagcu

SEQ ID NO: 3054086 - RNA, 11 nt, Human
uggagggaagc

SEQ ID NO: 3054087 - RNA, 24 nt, Human
uggauuuaacagaaauguacagca

SEQ ID NO: 3054088 - RNA, 20 nt, Human
uggauuuaacagaaauguac

SEQ ID NO: 3054089 - RNA, 17 nt, Human
uggauuuaacagaaaug

SEQ ID NO: 3054090 - RNA, 13 nt, Human
uggcagcugcuuu

SEQ ID NO: 3054091 - RNA, 21 nt, Human
uggcacccggccccugcuggu

SEQ ID NO: 3054092 - RNA, 21 nt, Human
uggccagaugcaccagcccuu

SEQ ID NO: 3054093 - RNA, 20 nt, Human
uggccagaugcaccagcccu

SEQ ID NO: 3054094 - RNA, 13 nt, Human
uggcccagggcau

SEQ ID NO: 3054095 - RNA, 14 nt, Human
uggcccagggcauc

SEQ ID NO: 3054096 - RNA, 20 nt, Human
uccuuaccagcagagcaccu

SEQ ID NO: 3054097 - RNA, 21 nt, Human
uccuuaccagcagagcaccuu

SEQ ID NO: 3054098 - RNA, 22 nt, Human
uccuugaaaacacuguucucug

SEQ ID NO: 3054099 - RNA, 23 nt, Human
uccuugaaaacacuguucucugc

SEQ ID NO: 3054100 - RNA, 18 nt, Human
uccuuggugucgggcaug

SEQ ID NO: 3054101 - RNA, 21 nt, Human
uccuuggugucgggcaugaca

SEQ ID NO: 3054102 - RNA, 17 nt, Human
uccuugcaucaauuuuu

SEQ ID NO: 3054103 - RNA, 15 nt, Human
uccuugcaucaauuu

SEQ ID NO: 3054104 - RNA, 18 nt, Human
uccuuugugaggaagccg

SEQ ID NO: 3054105 - RNA, 22 nt, Human
uccuuugugaggaagccgcugg

SEQ ID NO: 3054106 - RNA, 17 nt, Human
uccuuugugaggaagcc

SEQ ID NO: 3054107 - RNA, 18 nt, Human
uccuuuucgcaggauucu

SEQ ID NO: 3054108 - RNA, 22 nt, Human
uccuuuucgcaggauucuuccu

SEQ ID NO: 3054109 - RNA, 23 nt, Human
ucgcaggauucuuccucccuccc

SEQ ID NO: 3054110 - RNA, 21 nt, Human
ucgcaggauucuuccucccuc

SEQ ID NO: 3054111 - RNA, 17 nt, Human
ucgcaggauucuuccuc

SEQ ID NO: 3054112 - RNA, 18 nt, Human
ucggaaaacaugcuacac

SEQ ID NO: 3054113 - RNA, 15 nt, Human
ucggaaaacaugcua

SEQ ID NO: 3054114 - RNA, 23 nt, Human
ucgcccagucuggaaugcagugg

SEQ ID NO: 3054115 - RNA, 19 nt, Human
ucgcccagucuggaaugca

SEQ ID NO: 3054116 - RNA, 14 nt, Human
ucgcccagucugga

SEQ ID NO: 3054117 - RNA, 23 nt, Human
ucgucacugcuuaacuucacaua

SEQ ID NO: 3054118 - RNA, 18 nt, Human
ucggccccaccagugccu

SEQ ID NO: 3054119 - RNA, 19 nt, Human
ucggccccaccagugccuc

SEQ ID NO: 3054120 - RNA, 15 nt, Human
ucggccccaccagug

SEQ ID NO: 3054121 - RNA, 15 nt, Human
ucggccuccauccug

SEQ ID NO: 3054122 - RNA, 16 nt, Human
ucggccuccauccuga

SEQ ID NO: 3054123 - RNA, 15 nt, Human
ucggagcccugucuc

SEQ ID NO: 3054124 - RNA, 14 nt, Human
ucggagcccugucu

SEQ ID NO: 3054125 - RNA, 15 nt, Human
ucuagguaaauuaca

SEQ ID NO: 3054126 - RNA, 12 nt, Human
ucuagggaaaaa

SEQ ID NO: 3054127 - RNA, 13 nt, Human
ucuauauuuuaca

SEQ ID NO: 3054128 - RNA, 20 nt, Human
ucuacucgaguuacagacaa

SEQ ID NO: 3054129 - RNA, 21 nt, Human
ucuacucgaguuacagacaaa

SEQ ID NO: 3054130 - RNA, 18 nt, Human
ucuacucuagggaaaaac

SEQ ID NO: 3054131 - RNA, 18 nt, Human
ucuaggaggucucuaaga

SEQ ID NO: 3054132 - RNA, 14 nt, Human
ucuaauauguaaca

SEQ ID NO: 3054133 - RNA, 19 nt, Human
ucuacuaaaaauacaaaaa

SEQ ID NO: 3054134 - RNA, 15 nt, Human
ucuacuaaaaauaca

SEQ ID NO: 3054135 - RNA, 12 nt, Human
ucuacuaaaaau

SEQ ID NO: 3054136 - RNA, 16 nt, Human
ucucauaauuuauaca

SEQ ID NO: 3054137 - RNA, 22 nt, Human
ucucauaauuuauacaggucau

SEQ ID NO: 3054138 - RNA, 15 nt, Human
ucucacuguugccca

SEQ ID NO: 3054139 - RNA, 14 nt, Human
ucucacuguugccc

SEQ ID NO: 3054140 - RNA, 16 nt, Human
ucucaaauuucuaaau

SEQ ID NO: 3054141 - RNA, 14 nt, Human
ucucaaauuucuaa

SEQ ID NO: 3054142 - RNA, 13 nt, Human
ucucaaauuucua

SEQ ID NO: 3054143 - RNA, 18 nt, Human
ucucaaauuucuaaaucu

SEQ ID NO: 3054144 - RNA, 16 nt, Human
ucucacacaugagcau

SEQ ID NO: 3054145 - RNA, 20 nt, Human
ucucacugccaugccagcuu

SEQ ID NO: 3054146 - RNA, 22 nt, Human
ucucacucugucgcccagucug

SEQ ID NO: 3054147 - RNA, 21 nt, Human
ucucacacaugagcaucaggc

SEQ ID NO: 3054148 - RNA, 23 nt, Human
ucucacucugucgcccagucugg

SEQ ID NO: 3054149 - RNA, 13 nt, Human
ucccucuggggcu

SEQ ID NO: 3054150 - RNA, 17 nt, Human
ucccucuggggcuguuc

SEQ ID NO: 3054151 - RNA, 20 nt, Human
ucccugcacuugcagacucu

SEQ ID NO: 3054152 - RNA, 14 nt, Human
ucccugccaaugga

SEQ ID NO: 3054153 - RNA, 16 nt, Human
ucccugccaauggacu

SEQ ID NO: 3054154 - RNA, 18 nt, Human
ucccucccuuccucuuuc

SEQ ID NO: 3054155 - RNA, 19 nt, Human
ucccaugagggagaugcca

SEQ ID NO: 3054156 - RNA, 23 nt, Human
ucccaugagggagaugccaugag

SEQ ID NO: 3054157 - RNA, 22 nt, Human
ucccaugagccucagcauccug

SEQ ID NO: 3054158 - RNA, 21 nt, Human
uccgcuuucuacccagcgagc

SEQ ID NO: 3054159 - RNA, 22 nt, Human
uccgaaagggacuuggaagcuc

SEQ ID NO: 3054160 - RNA, 17 nt, Human
uccgaccagacaccuug

SEQ ID NO: 3054161 - RNA, 21 nt, Human
uccgaaagggacuuggaagcu

SEQ ID NO: 3054162 - RNA, 17 nt, Human
ucccuucccaccucucu

SEQ ID NO: 3054163 - RNA, 21 nt, Human
ucccuucccacuggaggcaug

SEQ ID NO: 3054164 - RNA, 14 nt, Human
ucccuucccaccuc

SEQ ID NO: 3054165 - RNA, 16 nt, Human
ucccuucccaccucuc

SEQ ID NO: 3054166 - RNA, 21 nt, Human
uccucuaggaggucucuaaga

SEQ ID NO: 3054167 - RNA, 17 nt, Human
uccucuaggaggucucu

SEQ ID NO: 3054168 - RNA, 21 nt, Human
uccuccuuuucacaguucucu

SEQ ID NO: 3054169 - RNA, 17 nt, Human
uccucugcugcuggcug

SEQ ID NO: 3054170 - RNA, 13 nt, Human
uccucuguacaga

SEQ ID NO: 3054171 - RNA, 15 nt, Human
uccucuggccugugu

SEQ ID NO: 3054172 - RNA, 15 nt, Human
uccugaggcugggcu

SEQ ID NO: 3054173 - RNA, 16 nt, Human
uccugaggcugggcuc

SEQ ID NO: 3054174 - RNA, 17 nt, Human
uccugaggcugggcucc

SEQ ID NO: 3054175 - RNA, 19 nt, Human
uccugaggcugggcucccu

SEQ ID NO: 3054176 - RNA, 12 nt, Human
uccugaggcugg

SEQ ID NO: 3054177 - RNA, 21 nt, Human
uccugaggcuccacuuggucu

SEQ ID NO: 3054178 - RNA, 16 nt, Human
uccugaggcuccacuu

SEQ ID NO: 3054179 - RNA, 18 nt, Human
uccugagccagauuucac

SEQ ID NO: 3054180 - RNA, 19 nt, Human
uccugagccagauuucacu

SEQ ID NO: 3054181 - RNA, 15 nt, Human
uccugaggcuccacu

SEQ ID NO: 3054182 - RNA, 14 nt, Human
uccugagccagauu

SEQ ID NO: 3054183 - RNA, 17 nt, Human
uccugagccagauuuca

SEQ ID NO: 3054184 - RNA, 23 nt, Human
uccucuguacagagcccacgccc

SEQ ID NO: 3054185 - RNA, 19 nt, Human
uccucuguacagagcccac

SEQ ID NO: 3054186 - RNA, 16 nt, Human
uccuaagcuauucagu

SEQ ID NO: 3054187 - RNA, 14 nt, Human
uccuaguuccacca

SEQ ID NO: 3054188 - RNA, 17 nt, Human
uccuaguuccaccauca

SEQ ID NO: 3054189 - RNA, 18 nt, Human
uccuaagcuauucaguaa

SEQ ID NO: 3054190 - RNA, 12 nt, Human
uccuaguuccac

SEQ ID NO: 3054191 - RNA, 21 nt, Human
uccuaguuccaccaucaagcc

SEQ ID NO: 3054192 - RNA, 14 nt, Human
uccuccaggugcac

SEQ ID NO: 3054193 - RNA, 18 nt, Human
uccuccaggugcacaagc

SEQ ID NO: 3054194 - RNA, 20 nt, Human
uccuccaggugcacaagcuc

SEQ ID NO: 3054195 - RNA, 22 nt, Human
uccuccaggugcacaagcucca

SEQ ID NO: 3054196 - RNA, 12 nt, Human
uccuccaggugc

SEQ ID NO: 3054197 - RNA, 13 nt, Human
uccuccaggugca

SEQ ID NO: 3054198 - RNA, 12 nt, Human
uccuccucagau

SEQ ID NO: 3054199 - RNA, 17 nt, Human
ucccaacucaccccagc

SEQ ID NO: 3054200 - RNA, 18 nt, Human
ucccaacucaccccagcc

SEQ ID NO: 3054201 - RNA, 19 nt, Human
ucccaacucaccccagccc

SEQ ID NO: 3054202 - RNA, 21 nt, Human
ucccaacucaccccagcccca

SEQ ID NO: 3054203 - RNA, 17 nt, Human
uccauagagagcaagac

SEQ ID NO: 3054204 - RNA, 20 nt, Human
uccauagagagcaagacgcu

SEQ ID NO: 3054205 - RNA, 17 nt, Human
ucccaggcauuccccag

SEQ ID NO: 3054206 - RNA, 18 nt, Human
ucccaggcauuccccagg

SEQ ID NO: 3054207 - RNA, 16 nt, Human
ucccaugagccucagc

SEQ ID NO: 3054208 - RNA, 15 nt, Human
ucccaugagccucag

SEQ ID NO: 3054209 - RNA, 14 nt, Human
ucccacucagucca

SEQ ID NO: 3054210 - RNA, 20 nt, Human
ucccaccucucucacuccuu

SEQ ID NO: 3054211 - RNA, 18 nt, Human
ucccaccuuggcugcagg

SEQ ID NO: 3054212 - RNA, 21 nt, Human
ucccaccuuggcugcagggag

SEQ ID NO: 3054213 - RNA, 19 nt, Human
ucccaccuuggcugcaggg

SEQ ID NO: 3054214 - RNA, 17 nt, Human
ucccaccucucucacuc

SEQ ID NO: 3054215 - RNA, 18 nt, Human
ucccaccucucucacucc

SEQ ID NO: 3054216 - RNA, 14 nt, Human
ucccaccucucuca

SEQ ID NO: 3054217 - RNA, 16 nt, Human
ucccaccucagccucc

SEQ ID NO: 3054218 - RNA, 18 nt, Human
ucccaccucagccucccg

SEQ ID NO: 3054219 - RNA, 20 nt, Human
uccacaagagcccaggccuc

SEQ ID NO: 3054220 - RNA, 19 nt, Human
uccacaagagcccaggccu

SEQ ID NO: 3054221 - RNA, 21 nt, Human
uccacaagagcccaggccucc

SEQ ID NO: 3054222 - RNA, 19 nt, Human
uccaagaccuucuccuuca

SEQ ID NO: 3054223 - RNA, 20 nt, Human
uccaagaccuucuccuucac

SEQ ID NO: 3054224 - RNA, 17 nt, Human
uccaagcaaaugugaau

SEQ ID NO: 3054225 - RNA, 15 nt, Human
uccaagcaaauguga

SEQ ID NO: 3054226 - RNA, 14 nt, Human
uccaagcaggacau

SEQ ID NO: 3054227 - RNA, 20 nt, Human
uccaagcauuuagauguaua

SEQ ID NO: 3054228 - RNA, 15 nt, Human
uccaagaagcccagg

SEQ ID NO: 3054229 - RNA, 16 nt, Human
uccaagaagcccagga

SEQ ID NO: 3054230 - RNA, 14 nt, Human
uccaagaagcccag

SEQ ID NO: 3054231 - RNA, 12 nt, Human
uccaagaagccc

SEQ ID NO: 3054232 - RNA, 15 nt, Human
uccacuuuaucuuga

SEQ ID NO: 3054233 - RNA, 22 nt, Human
uccacugugccaugugccaggu

SEQ ID NO: 3054234 - RNA, 14 nt, Human
uccacccugcucuc

SEQ ID NO: 3054235 - RNA, 13 nt, Human
uccacccugcucu

SEQ ID NO: 3054236 - RNA, 21 nt, Human
uccacccugcucuccgaccag

SEQ ID NO: 3054237 - RNA, 17 nt, Human
uccacuuuaucuugaau

SEQ ID NO: 3054238 - RNA, 14 nt, Human
uccacuuucuagcc

SEQ ID NO: 3054239 - RNA, 17 nt, Human
uccagagccccacagcc

SEQ ID NO: 3054240 - RNA, 18 nt, Human
uccagcugcugagauccu

SEQ ID NO: 3054241 - RNA, 21 nt, Human
uccagcugcugagauccugga

SEQ ID NO: 3054242 - RNA, 14 nt, Human
uccagcugcugaga

SEQ ID NO: 3054243 - RNA, 22 nt, Human
uccagcugcugagauccuggac

SEQ ID NO: 3054244 - RNA, 19 nt, Human
ucagugugucuaaauuuga

SEQ ID NO: 3054245 - RNA, 18 nt, Human
ucagugugacugaucucu

SEQ ID NO: 3054246 - RNA, 17 nt, Human
ucagucugauucccaag

SEQ ID NO: 3054247 - RNA, 15 nt, Human
ucaguccauagcaga

SEQ ID NO: 3054248 - RNA, 18 nt, Human
ucaguccaugaagaugua

SEQ ID NO: 3054249 - RNA, 17 nt, Human
ucagguggggucacucu

SEQ ID NO: 3054250 - RNA, 20 nt, Human
ucagguggggucacucuggc

SEQ ID NO: 3054251 - RNA, 15 nt, Human
ucaggugcugccauc

SEQ ID NO: 3054252 - RNA, 17 nt, Human
ucagguggggcagcuug

SEQ ID NO: 3054253 - RNA, 21 nt, Human
ucagguggggcagcuugaggg

SEQ ID NO: 3054254 - RNA, 16 nt, Human
ucagguggggcagcuu

SEQ ID NO: 3054255 - RNA, 15 nt, Human
ucagguggggcagcu

SEQ ID NO: 3054256 - RNA, 20 nt, Human
ucaggugcugccauccaggu

SEQ ID NO: 3054257 - RNA, 18 nt, Human
ucaggugcugccauccag

SEQ ID NO: 3054258 - RNA, 14 nt, Human
ucagguggggcagc

SEQ ID NO: 3054259 - RNA, 15 nt, Human
ucauacucaccucac

SEQ ID NO: 3054260 - RNA, 24 nt, Human
ucauggacuucugccagcauaaua

SEQ ID NO: 3054261 - RNA, 21 nt, Human
ucauggaauuggagcucgugg

SEQ ID NO: 3054262 - RNA, 19 nt, Human
ucauggaauuggagcucgu

SEQ ID NO: 3054263 - RNA, 13 nt, Human
ucaugaaagauuc

SEQ ID NO: 3054264 - RNA, 17 nt, Human
ucagauaugauucaaau

SEQ ID NO: 3054265 - RNA, 16 nt, Human
ucagauaugauucaaa

SEQ ID NO: 3054266 - RNA, 18 nt, Human
ucagauaugauucaaaug

SEQ ID NO: 3054267 - RNA, 17 nt, Human
ucagcacgauuucuguu

SEQ ID NO: 3054268 - RNA, 16 nt, Human
ucagcacgauuucugu

SEQ ID NO: 3054269 - RNA, 15 nt, Human
ucagcacgauuucug

SEQ ID NO: 3054270 - RNA, 12 nt, Human
ucagccucccaa

SEQ ID NO: 3054271 - RNA, 18 nt, Human
ucagcauccuggcacccg

SEQ ID NO: 3054272 - RNA, 17 nt, Human
ucagcauccuggcaccc

SEQ ID NO: 3054273 - RNA, 16 nt, Human
ucagcauccuggcacc

SEQ ID NO: 3054274 - RNA, 15 nt, Human
ucagcauccuggcac

SEQ ID NO: 3054275 - RNA, 22 nt, Human
ucaggagaguagaacagauaau

SEQ ID NO: 3054276 - RNA, 15 nt, Human
ucagcugcuacuacu

SEQ ID NO: 3054277 - RNA, 16 nt, Human
ucagcugcugaaacaa

SEQ ID NO: 3054278 - RNA, 22 nt, Human
ucagccucccaaagugcuggga

SEQ ID NO: 3054279 - RNA, 20 nt, Human
ucagccucccgaauagcugg

SEQ ID NO: 3054280 - RNA, 12 nt, Human
ucagccucccga

SEQ ID NO: 3054281 - RNA, 16 nt, Human
ucagccugcuccagcu

SEQ ID NO: 3054282 - RNA, 22 nt, Human
ucagcuccagcucaccagcccc

SEQ ID NO: 3054283 - RNA, 21 nt, Human
ucagcuccagcucaccagccc

SEQ ID NO: 3054284 - RNA, 18 nt, Human
ucagcuccagcucaccag

SEQ ID NO: 3054285 - RNA, 15 nt, Human
ucagcuccagcucac

SEQ ID NO: 3054286 - RNA, 21 nt, Human
ucagcuccccucggagaagag

SEQ ID NO: 3054287 - RNA, 22 nt, Human
ucagcuccccucggagaagagc

SEQ ID NO: 3054288 - RNA, 14 nt, Human
ucuggaauuugaaa

SEQ ID NO: 3054289 - RNA, 16 nt, Human
ucuggaaugcaguggu

SEQ ID NO: 3054290 - RNA, 14 nt, Human
ucugcugcuggcug

SEQ ID NO: 3054291 - RNA, 15 nt, Human
ucugcugcuggcugg

SEQ ID NO: 3054292 - RNA, 17 nt, Human
ucugcugcuggcugguu

SEQ ID NO: 3054293 - RNA, 20 nt, Human
ucugccugcccaggccccug

SEQ ID NO: 3054294 - RNA, 18 nt, Human
ucugccugcccaggcccc

SEQ ID NO: 3054295 - RNA, 17 nt, Human
ucugccugcccaggccc

SEQ ID NO: 3054296 - RNA, 16 nt, Human
ucugccugcccaggcc

SEQ ID NO: 3054297 - RNA, 21 nt, Human
ucugcuccucuccccagcaag

SEQ ID NO: 3054298 - RNA, 11 nt, Human
ucugcugcugg

SEQ ID NO: 3054299 - RNA, 13 nt, Human
ucugcugcuggcu

SEQ ID NO: 3054300 - RNA, 22 nt, Human
ucuggagcccacuguacuugcu

SEQ ID NO: 3054301 - RNA, 16 nt, Human
ucuggagcccacugua

SEQ ID NO: 3054302 - RNA, 12 nt, Human
ucuggagcccac

SEQ ID NO: 3054303 - RNA, 16 nt, Human
ucuggugacuuuccuc

SEQ ID NO: 3054304 - RNA, 13 nt, Human
ucugucuaggaau

SEQ ID NO: 3054305 - RNA, 16 nt, Human
ucugucgcccagucug

SEQ ID NO: 3054306 - RNA, 14 nt, Human
ucugucucagucca

SEQ ID NO: 3054307 - RNA, 17 nt, Human
ucugucgcccagucugg

SEQ ID NO: 3054308 - RNA, 12 nt, Human
ucuguccuggga

SEQ ID NO: 3054309 - RNA, 14 nt, Human
ucuguacagagccc

SEQ ID NO: 3054310 - RNA, 15 nt, Human
ucuguacagagccca

SEQ ID NO: 3054311 - RNA, 20 nt, Human
ucuguccuacucugugucag

SEQ ID NO: 3054312 - RNA, 18 nt, Human
ucugagaggacuuuucuu

SEQ ID NO: 3054313 - RNA, 19 nt, Human
ucugacccaugcugcccug

SEQ ID NO: 3054314 - RNA, 20 nt, Human
ucugacccaugcugcccugu

SEQ ID NO: 3054315 - RNA, 22 nt, Human
ucugacccaugcugcccuguga

SEQ ID NO: 3054316 - RNA, 23 nt, Human
ucugacccaugcugcccugugag

SEQ ID NO: 3054317 - RNA, 21 nt, Human
ucugcaagaauugaagcagga

SEQ ID NO: 3054318 - RNA, 21 nt, Human
ucugaggaauccagacccggc

SEQ ID NO: 3054319 - RNA, 18 nt, Human
ucugaggaauccagaccc

SEQ ID NO: 3054320 - RNA, 22 nt, Human
ucugaggaauccagacccggcu

SEQ ID NO: 3054321 - RNA, 13 nt, Human
ucugccucccauc

SEQ ID NO: 3054322 - RNA, 15 nt, Human
ucugccucccaucac

SEQ ID NO: 3054323 - RNA, 12 nt, Human
ucugccucccau

SEQ ID NO: 3054324 - RNA, 13 nt, Human
ucugcccacuccc

SEQ ID NO: 3054325 - RNA, 14 nt, Human
ucugcccacucccu

SEQ ID NO: 3054326 - RNA, 23 nt, Human
ucugccauauucuguuggccagu

SEQ ID NO: 3054327 - RNA, 22 nt, Human
ucugccauauucuguuggccag

SEQ ID NO: 3054328 - RNA, 12 nt, Human
ucugcccacucc

SEQ ID NO: 3054329 - RNA, 18 nt, Human
ucugccauauucuguugg

SEQ ID NO: 3054330 - RNA, 20 nt, Human
ucugccugaagucacacagu

SEQ ID NO: 3054331 - RNA, 19 nt, Human
ucugccugaagucacacag

SEQ ID NO: 3054332 - RNA, 22 nt, Human
ucugccucugacacacagcucu

SEQ ID NO: 3054333 - RNA, 21 nt, Human
ucugccucugacacacagcuc

SEQ ID NO: 3054334 - RNA, 23 nt, Human
ucugccucugacacacagcucug

SEQ ID NO: 3054335 - RNA, 16 nt, Human
ucugccucccaucacc

SEQ ID NO: 3054336 - RNA, 17 nt, Human
ucugccucccaucaccc

SEQ ID NO: 3054337 - RNA, 20 nt, Human
ucugccucccaucacccgcu

SEQ ID NO: 3054338 - RNA, 21 nt, Human
ucugccucccaucacccgcua

SEQ ID NO: 3054339 - RNA, 18 nt, Human
ucugccucugacacacag

SEQ ID NO: 3054340 - RNA, 15 nt, Human
ucugccucugacaca

SEQ ID NO: 3054341 - RNA, 22 nt, Human
ucuuauccaacaucaacaucuu

SEQ ID NO: 3054342 - RNA, 21 nt, Human
ucuucagagacuccugcaggc

SEQ ID NO: 3054343 - RNA, 14 nt, Human
ucuucagaucucua

SEQ ID NO: 3054344 - RNA, 14 nt, Human
ucuuagauguauau

SEQ ID NO: 3054345 - RNA, 15 nt, Human
ucuuagauguauaua

SEQ ID NO: 3054346 - RNA, 20 nt, Human
ucugugucagguggggcagc

SEQ ID NO: 3054347 - RNA, 17 nt, Human
ucugugucagguggggc

SEQ ID NO: 3054348 - RNA, 13 nt, Human
ucuuauaauuuaa

SEQ ID NO: 3054349 - RNA, 14 nt, Human
ucuuauaauuuaaa

SEQ ID NO: 3054350 - RNA, 20 nt, Human
ucuuagguuggcaaaaaggc

SEQ ID NO: 3054351 - RNA, 23 nt, Human
ucuuagguuggcaaaaaggcagg

SEQ ID NO: 3054352 - RNA, 22 nt, Human
ucuuaggguuaugauuaaguaa

SEQ ID NO: 3054353 - RNA, 21 nt, Human
ucuugaaauauaggaacuuaa

SEQ ID NO: 3054354 - RNA, 20 nt, Human
ucuugaaauauaggaacuua

SEQ ID NO: 3054355 - RNA, 15 nt, Human
ucuugcaugaggcua

SEQ ID NO: 3054356 - RNA, 13 nt, Human
ucuugaagacuuu

SEQ ID NO: 3054357 - RNA, 22 nt, Human
ucuugaagacuuuucuuucagc

SEQ ID NO: 3054358 - RNA, 16 nt, Human
ucuucuuggucucagu

SEQ ID NO: 3054359 - RNA, 18 nt, Human
ucuuguagcuuuaucaaa

SEQ ID NO: 3054360 - RNA, 23 nt, Human
ucuugcucugcugacagacacag

SEQ ID NO: 3054361 - RNA, 15 nt, Human
ucuugcucugcugac

SEQ ID NO: 3054362 - RNA, 19 nt, Human
ucuugccaaauauaaauaa

SEQ ID NO: 3054363 - RNA, 20 nt, Human
ucuugcaugguuuggagcug

SEQ ID NO: 3054364 - RNA, 15 nt, Human
ucuugcaugguuugg

SEQ ID NO: 3054365 - RNA, 19 nt, Human
ucuugcaugguuuggagcu

SEQ ID NO: 3054366 - RNA, 14 nt, Human
ucuugcucugcuga

SEQ ID NO: 3054367 - RNA, 15 nt, Human
ugaaacacuuugcau

SEQ ID NO: 3054368 - RNA, 23 nt, Human
ugaaacacucaguuguucaauaa

SEQ ID NO: 3054369 - RNA, 22 nt, Human
ugaaaauuauuuuguucauaca

SEQ ID NO: 3054370 - RNA, 23 nt, Human
ugaaaauuauuuuguucauacau

SEQ ID NO: 3054371 - RNA, 14 nt, Human
ugaaaauucagugg

SEQ ID NO: 3054372 - RNA, 18 nt, Human
ugaaaaccacauuggaga

SEQ ID NO: 3054373 - RNA, 19 nt, Human
ugaaaagaaaaaugagccu

SEQ ID NO: 3054374 - RNA, 15 nt, Human
ugaaaagaaaaauga

SEQ ID NO: 3054375 - RNA, 19 nt, Human
ugaaaauuauuuuguucau

SEQ ID NO: 3054376 - RNA, 20 nt, Human
ugaaaagaaaaaugagccug

SEQ ID NO: 3054377 - RNA, 22 nt, Human
ugaaaagaaaaaugagccuggc

SEQ ID NO: 3054378 - RNA, 22 nt, Human
ugaaaacacuguucucugcccu

SEQ ID NO: 3054379 - RNA, 23 nt, Human
ugaaaacacuguucucugcccuc

SEQ ID NO: 3054380 - RNA, 20 nt, Human
ugaaaacacauuuuucuuag

SEQ ID NO: 3054381 - RNA, 17 nt, Human
ugaaaacacuguucucu

SEQ ID NO: 3054382 - RNA, 20 nt, Human
ugaaaacacuguucucugcc

SEQ ID NO: 3054383 - RNA, 21 nt, Human
ugaaaacacuguucucugccc

SEQ ID NO: 3054384 - RNA, 21 nt, Human
ugaaaacacauuuuucuuagg

SEQ ID NO: 3054385 - RNA, 12 nt, Human
ucuuucccuccc

SEQ ID NO: 3054386 - RNA, 17 nt, Human
ucuuuccaaaguacacu

SEQ ID NO: 3054387 - RNA, 17 nt, Human
ucuuuccacagaagcuc

SEQ ID NO: 3054388 - RNA, 23 nt, Human
ucuuucccucccuuccucuuucc

SEQ ID NO: 3054389 - RNA, 13 nt, Human
ucuuucccucccu

SEQ ID NO: 3054390 - RNA, 23 nt, Human
ucuuuccaaaguacacuguuuca

SEQ ID NO: 3054391 - RNA, 13 nt, Human
ucuuguguguuua

SEQ ID NO: 3054392 - RNA, 14 nt, Human
ucuuuggacccuga

SEQ ID NO: 3054393 - RNA, 15 nt, Human
ucuuuggacccugag

SEQ ID NO: 3054394 - RNA, 13 nt, Human
ucuuuggacccug

SEQ ID NO: 3054395 - RNA, 22 nt, Human
ucuuuggacagaagcagcucuu

SEQ ID NO: 3054396 - RNA, 17 nt, Human
ucuuugcagacaggcaa

SEQ ID NO: 3054397 - RNA, 14 nt, Human
ucuuugcagacagg

SEQ ID NO: 3054398 - RNA, 23 nt, Human
ucuuugagugaagcugggagaac

SEQ ID NO: 3054399 - RNA, 13 nt, Human
ucuuugcagacag

SEQ ID NO: 3054400 - RNA, 13 nt, Human
ugaaucucauaau

SEQ ID NO: 3054401 - RNA, 20 nt, Human
ugaaucucauaauuuauaca

SEQ ID NO: 3054402 - RNA, 23 nt, Human
ugaaugaugauccuaggcauuug

SEQ ID NO: 3054403 - RNA, 15 nt, Human
ugaaugaauggcuaa

SEQ ID NO: 3054404 - RNA, 20 nt, Human
ugaaguuuacauuguaaaua

SEQ ID NO: 3054405 - RNA, 16 nt, Human
ugaaguuuacauugua

SEQ ID NO: 3054406 - RNA, 14 nt, Human
ugaaguuuacauug

SEQ ID NO: 3054407 - RNA, 20 nt, Human
ugaaggcuggguucugaucc

SEQ ID NO: 3054408 - RNA, 21 nt, Human
ugaaggcuggguucugauccu

SEQ ID NO: 3054409 - RNA, 16 nt, Human
ugaaacacuuugcaua

SEQ ID NO: 3054410 - RNA, 13 nt, Human
ugaaacauguuuc

SEQ ID NO: 3054411 - RNA, 23 nt, Human
ugaacuggguacuuguggacaca

SEQ ID NO: 3054412 - RNA, 20 nt, Human
ugaagacucauucuucugua

SEQ ID NO: 3054413 - RNA, 19 nt, Human
ugaagacucauucuucugu

SEQ ID NO: 3054414 - RNA, 19 nt, Human
ugaagagguuuuaaagcuu

SEQ ID NO: 3054415 - RNA, 20 nt, Human
ugaagagguuuuaaagcuuc

SEQ ID NO: 3054416 - RNA, 21 nt, Human
ugaagagguuuuaaagcuucc

SEQ ID NO: 3054417 - RNA, 21 nt, Human
ugaagcuuuuaugugaaacau

SEQ ID NO: 3054418 - RNA, 16 nt, Human
ugaagcuuuuauguga

SEQ ID NO: 3054419 - RNA, 15 nt, Human
ugaaggaaaaugaua

SEQ ID NO: 3054420 - RNA, 18 nt, Human
ugaaggccccgcccaggc

SEQ ID NO: 3054421 - RNA, 16 nt, Human
ugaaggcuggguucug

SEQ ID NO: 3054422 - RNA, 19 nt, Human
ugaaggccccgcccaggcu

SEQ ID NO: 3054423 - RNA, 20 nt, Human
ugaaggccccgcccaggcuu

SEQ ID NO: 3054424 - RNA, 20 nt, Human
ugacaaagguaaaucagacu

SEQ ID NO: 3054425 - RNA, 16 nt, Human
ugaauuuaaauagcuu

SEQ ID NO: 3054426 - RNA, 13 nt, Human
ugacaacacucau

SEQ ID NO: 3054427 - RNA, 23 nt, Human
ugacaacacucauugaccugagg

SEQ ID NO: 3054428 - RNA, 13 nt, Human
ugaauuguaagga

SEQ ID NO: 3054429 - RNA, 21 nt, Human
ugaauuguaaggaaugauuaa

SEQ ID NO: 3054430 - RNA, 14 nt, Human
ugaauuaaguuuuu

SEQ ID NO: 3054431 - RNA, 13 nt, Human
ugaauuacauuug

SEQ ID NO: 3054432 - RNA, 18 nt, Human
ugacagaauauguuucaa

SEQ ID NO: 3054433 - RNA, 15 nt, Human
ugacacacagcucug

SEQ ID NO: 3054434 - RNA, 14 nt, Human
ugacacacagcucu

SEQ ID NO: 3054435 - RNA, 21 nt, Human
ugacagaauauguuucaaacu

SEQ ID NO: 3054436 - RNA, 22 nt, Human
ugacagaauauguuucaaacuu

SEQ ID NO: 3054437 - RNA, 13 nt, Human
ugacagacacagg

SEQ ID NO: 3054438 - RNA, 16 nt, Human
ugacagacacaggccc

SEQ ID NO: 3054439 - RNA, 14 nt, Human
ugacagacacaggc

SEQ ID NO: 3054440 - RNA, 22 nt, Human
ugacaacuucccagugaauucu

SEQ ID NO: 3054441 - RNA, 23 nt, Human
ugacaaggauugcuacuguccua

SEQ ID NO: 3054442 - RNA, 23 nt, Human
ugacagaauauguuucaaacuuu

SEQ ID NO: 3054443 - RNA, 18 nt, Human
ugacagacacaggcccgg

SEQ ID NO: 3054444 - RNA, 17 nt, Human
ugacagacacaggcccg

SEQ ID NO: 3054445 - RNA, 22 nt, Human
ugacagagcaagugagacccug

SEQ ID NO: 3054446 - RNA, 23 nt, Human
ugacaucaacugcaucaagaugu

SEQ ID NO: 3054447 - RNA, 20 nt, Human
ugaccagcaccaucucuccu

SEQ ID NO: 3054448 - RNA, 16 nt, Human
ugaccacugcagaaga

SEQ ID NO: 3054449 - RNA, 17 nt, Human
ugaccacugcagaagac

SEQ ID NO: 3054450 - RNA, 17 nt, Human
ugaggaucagaguaauc

SEQ ID NO: 3054451 - RNA, 13 nt, Human
ugaggaucagagu

SEQ ID NO: 3054452 - RNA, 19 nt, Human
ugaggaucagaguaaucca

SEQ ID NO: 3054453 - RNA, 22 nt, Human
ugaggaugaaaaaauaacacug

SEQ ID NO: 3054454 - RNA, 22 nt, Human
ugagccgagaucacgccacugc

SEQ ID NO: 3054455 - RNA, 23 nt, Human
ugagcagggcucagcggggacag

SEQ ID NO: 3054456 - RNA, 22 nt, Human
ugagcagggcucagcggggaca

SEQ ID NO: 3054457 - RNA, 20 nt, Human
ugagcagggcucagcgggga

SEQ ID NO: 3054458 - RNA, 23 nt, Human
ugagccgagaucacgccacugca

SEQ ID NO: 3054459 - RNA, 14 nt, Human
ugagccgcccaagg

SEQ ID NO: 3054460 - RNA, 15 nt, Human
ugagccgcccaaggc

SEQ ID NO: 3054461 - RNA, 17 nt, Human
ugagccgcccaaggccu

SEQ ID NO: 3054462 - RNA, 18 nt, Human
ugagccgcccaaggccuu

SEQ ID NO: 3054463 - RNA, 19 nt, Human
ugagccgcccaaggccuuc

SEQ ID NO: 3054464 - RNA, 11 nt, Human
ugagcucagga

SEQ ID NO: 3054465 - RNA, 19 nt, Human
ugagcucaggaguuugaga

SEQ ID NO: 3054466 - RNA, 15 nt, Human
ugaggcugggcuccc

SEQ ID NO: 3054467 - RNA, 16 nt, Human
ugaggcugggcucccu

SEQ ID NO: 3054468 - RNA, 18 nt, Human
ugaggcucugcccuuggu

SEQ ID NO: 3054469 - RNA, 16 nt, Human
ugaggcucugcccuug

SEQ ID NO: 3054470 - RNA, 15 nt, Human
ugaggcucugcccuu

SEQ ID NO: 3054471 - RNA, 19 nt, Human
ugaggucagagccugcagu

SEQ ID NO: 3054472 - RNA, 18 nt, Human
ugaggucagagccugcag

SEQ ID NO: 3054473 - RNA, 21 nt, Human
ugaggcugggcucccuuccca

SEQ ID NO: 3054474 - RNA, 21 nt, Human
ugaggugggaggaucucuuga

SEQ ID NO: 3054475 - RNA, 21 nt, Human
ugacucuuucuauuguuucuu

SEQ ID NO: 3054476 - RNA, 16 nt, Human
ugacuuuccucuuugg

SEQ ID NO: 3054477 - RNA, 13 nt, Human
ugaccauucucca

SEQ ID NO: 3054478 - RNA, 14 nt, Human
ugaccauucuccac

SEQ ID NO: 3054479 - RNA, 16 nt, Human
ugacucuuaagaagac

SEQ ID NO: 3054480 - RNA, 14 nt, Human
ugacucuuaagaag

SEQ ID NO: 3054481 - RNA, 15 nt, Human
ugacucuuaagaaga

SEQ ID NO: 3054482 - RNA, 13 nt, Human
ugacucuuaagaa

SEQ ID NO: 3054483 - RNA, 15 nt, Human
ugagaaauaaaguuu

SEQ ID NO: 3054484 - RNA, 20 nt, Human
ugagaaagacuauucaaaca

SEQ ID NO: 3054485 - RNA, 22 nt, Human
ugacuuuucuguccgagcuuug

SEQ ID NO: 3054486 - RNA, 14 nt, Human
ugagaggggaacag

SEQ ID NO: 3054487 - RNA, 18 nt, Human
ugagaggggaacagacug

SEQ ID NO: 3054488 - RNA, 14 nt, Human
ugagaccaaccugg

SEQ ID NO: 3054489 - RNA, 15 nt, Human
ugagcaggauuuuaa

SEQ ID NO: 3054490 - RNA, 20 nt, Human
ugagcaggauuuuaaucuuu

SEQ ID NO: 3054491 - RNA, 16 nt, Human
uagccccucuccugga

SEQ ID NO: 3054492 - RNA, 17 nt, Human
uagcauggcauauuuuu

SEQ ID NO: 3054493 - RNA, 18 nt, Human
uagcauggcauauuuuuc

SEQ ID NO: 3054494 - RNA, 15 nt, Human
uagcauggcauauuu

SEQ ID NO: 3054495 - RNA, 16 nt, Human
uagcaugaagacagag

SEQ ID NO: 3054496 - RNA, 12 nt, Human
uagcucauucuc

SEQ ID NO: 3054497 - RNA, 21 nt, Human
uagcucaggugucccugcacu

SEQ ID NO: 3054498 - RNA, 20 nt, Human
uagcucaggugucccugcac

SEQ ID NO: 3054499 - RNA, 18 nt, Human
uagccugugccucuggga

SEQ ID NO: 3054500 - RNA, 17 nt, Human
uagcugggacuacaggc

SEQ ID NO: 3054501 - RNA, 15 nt, Human
uagcugggacuacag

SEQ ID NO: 3054502 - RNA, 12 nt, Human
uagcugggacua

SEQ ID NO: 3054503 - RNA, 16 nt, Human
uagauacuguaucaug

SEQ ID NO: 3054504 - RNA, 14 nt, Human
uagauaggccaugg

SEQ ID NO: 3054505 - RNA, 19 nt, Human
uagcauacguacacauuuu

SEQ ID NO: 3054506 - RNA, 18 nt, Human
uagcauacguacacauuu

SEQ ID NO: 3054507 - RNA, 17 nt, Human
uagcauacguacacauu

SEQ ID NO: 3054508 - RNA, 16 nt, Human
uagcauacguacacau

SEQ ID NO: 3054509 - RNA, 11 nt, Human
uagcagggaaa

SEQ ID NO: 3054510 - RNA, 18 nt, Human
uagcauccuggaauaucu

SEQ ID NO: 3054511 - RNA, 13 nt, Human
uagcauccuggaa

SEQ ID NO: 3054512 - RNA, 15 nt, Human
uagcauccuggaaua

SEQ ID NO: 3054513 - RNA, 16 nt, Human
uagcauccuggaauau

SEQ ID NO: 3054514 - RNA, 17 nt, Human
uagaguugauacuacag

SEQ ID NO: 3054515 - RNA, 14 nt, Human
uagaguugauacua

SEQ ID NO: 3054516 - RNA, 12 nt, Human
uagagugggagc

SEQ ID NO: 3054517 - RNA, 15 nt, Human
uagagguucaaagau

SEQ ID NO: 3054518 - RNA, 14 nt, Human
uagagguucaaaga

SEQ ID NO: 3054519 - RNA, 20 nt, Human
uagaagucuuagauguauau

SEQ ID NO: 3054520 - RNA, 23 nt, Human
uagaauaccacaggaaccacaag

SEQ ID NO: 3054521 - RNA, 23 nt, Human
uagaauuaguggcacuugcuuuu

SEQ ID NO: 3054522 - RNA, 18 nt, Human
uagaauuaacacaugauc

SEQ ID NO: 3054523 - RNA, 15 nt, Human
uagaauuaacacaug

SEQ ID NO: 3054524 - RNA, 16 nt, Human
uagaauuaacacauga

SEQ ID NO: 3054525 - RNA, 22 nt, Human
uagguuaauuccaauuauauga

SEQ ID NO: 3054526 - RNA, 13 nt, Human
uagguguggggga

SEQ ID NO: 3054527 - RNA, 17 nt, Human
uaggugugggggaagca

SEQ ID NO: 3054528 - RNA, 23 nt, Human
uaggugugacugaauuucuuuug

SEQ ID NO: 3054529 - RNA, 21 nt, Human
uaggugugacugaauuucuuu

SEQ ID NO: 3054530 - RNA, 19 nt, Human
uaggugugacugaauuucu

SEQ ID NO: 3054531 - RNA, 18 nt, Human
uaguaugaggcauuuguu

SEQ ID NO: 3054532 - RNA, 17 nt, Human
uaguaugaggcauuugu

SEQ ID NO: 3054533 - RNA, 15 nt, Human
uaggucucaauaccu

SEQ ID NO: 3054534 - RNA, 16 nt, Human
uaggugacagagugag

SEQ ID NO: 3054535 - RNA, 11 nt, Human
uaggugacaga

SEQ ID NO: 3054536 - RNA, 18 nt, Human
uaggugcuacaaaaacac

SEQ ID NO: 3054537 - RNA, 23 nt, Human
uaggugcuacaaaaacacagcaa

SEQ ID NO: 3054538 - RNA, 22 nt, Human
uaggugcuacaaaaacacagca

SEQ ID NO: 3054539 - RNA, 20 nt, Human
uaggugcuacaaaaacacag

SEQ ID NO: 3054540 - RNA, 22 nt, Human
uagcuggucuuauuuguaaagc

SEQ ID NO: 3054541 - RNA, 16 nt, Human
uaguuugauuaaauuc

SEQ ID NO: 3054542 - RNA, 15 nt, Human
uaguuugauuaaauu

SEQ ID NO: 3054543 - RNA, 14 nt, Human
uauaaacuuuaccu

SEQ ID NO: 3054544 - RNA, 13 nt, Human
uauaaacuuuacc

SEQ ID NO: 3054545 - RNA, 11 nt, Human
uauaaacuuua

SEQ ID NO: 3054546 - RNA, 18 nt, Human
uauaaaccgaacugaugu

SEQ ID NO: 3054547 - RNA, 16 nt, Human
uauaaacuuuaccuuu

SEQ ID NO: 3054548 - RNA, 15 nt, Human
uauaaacuuuaccuu

SEQ ID NO: 3054549 - RNA, 17 nt, Human
uauaaacuuuaccuuuu

SEQ ID NO: 3054550 - RNA, 15 nt, Human
uaguaugaggcauuu

SEQ ID NO: 3054551 - RNA, 16 nt, Human
uaguaugguggcuggg

SEQ ID NO: 3054552 - RNA, 17 nt, Human
uaguauuguccaggucu

SEQ ID NO: 3054553 - RNA, 20 nt, Human
uaguggcuuaaaacaacacu

SEQ ID NO: 3054554 - RNA, 20 nt, Human
uaguuguuugauucagacag

SEQ ID NO: 3054555 - RNA, 21 nt, Human
uaguuguuugauucagacagc

SEQ ID NO: 3054556 - RNA, 22 nt, Human
uaguuguuugauucagacagcu

SEQ ID NO: 3054557 - RNA, 14 nt, Human
uauaucuuguagcu

SEQ ID NO: 3054558 - RNA, 13 nt, Human
uauauaacaaugc

SEQ ID NO: 3054559 - RNA, 17 nt, Human
uauauaacaaugcugua

SEQ ID NO: 3054560 - RNA, 19 nt, Human
uauauaacaaugcuguauu

SEQ ID NO: 3054561 - RNA, 20 nt, Human
uauauuugaaauauugacuu

SEQ ID NO: 3054562 - RNA, 14 nt, Human
uauaugcuucuguu

SEQ ID NO: 3054563 - RNA, 16 nt, Human
uauaugcuucuguuuu

SEQ ID NO: 3054564 - RNA, 21 nt, Human
uauauuuuuuguuaaaugauu

SEQ ID NO: 3054565 - RNA, 19 nt, Human
uauauuuuuuguuaaauga

SEQ ID NO: 3054566 - RNA, 16 nt, Human
uauauuuuuuucugaa

SEQ ID NO: 3054567 - RNA, 19 nt, Human
uauauuuuuuucugaaauu

SEQ ID NO: 3054568 - RNA, 20 nt, Human
uauauuuuuuucugaaauuu

SEQ ID NO: 3054569 - RNA, 19 nt, Human
uaucaggugcugccaucca

SEQ ID NO: 3054570 - RNA, 14 nt, Human
uaucaaaagaaaga

SEQ ID NO: 3054571 - RNA, 20 nt, Human
uaucaggugcugccauccag

SEQ ID NO: 3054572 - RNA, 17 nt, Human
uaucaggugcugccauc

SEQ ID NO: 3054573 - RNA, 17 nt, Human
uaucaugacaaagacug

SEQ ID NO: 3054574 - RNA, 20 nt, Human
uacaggaugaugacuaugga

SEQ ID NO: 3054575 - RNA, 18 nt, Human
uacaguuccuagguauaa

SEQ ID NO: 3054576 - RNA, 23 nt, Human
uacaguucggugagcuacaaaug

SEQ ID NO: 3054577 - RNA, 14 nt, Human
uacaggaaguacug

SEQ ID NO: 3054578 - RNA, 15 nt, Human
uacaggaaguacugg

SEQ ID NO: 3054579 - RNA, 22 nt, Human
uacaggaaguacuggagaaaau

SEQ ID NO: 3054580 - RNA, 15 nt, Human
uacaggagugagcac

SEQ ID NO: 3054581 - RNA, 17 nt, Human
uacaguugaaaaacagc

SEQ ID NO: 3054582 - RNA, 19 nt, Human
uacaguugaaaaacagcug

SEQ ID NO: 3054583 - RNA, 20 nt, Human
uacaguugaaaaacagcuga

SEQ ID NO: 3054584 - RNA, 18 nt, Human
uacaguuuguuaguauga

SEQ ID NO: 3054585 - RNA, 18 nt, Human
uacaggaagguagaaaua

SEQ ID NO: 3054586 - RNA, 13 nt, Human
uacaggaaguacu

SEQ ID NO: 3054587 - RNA, 20 nt, Human
uacagcuugaccgugaggcc

SEQ ID NO: 3054588 - RNA, 16 nt, Human
uacacuuacacuuuau

SEQ ID NO: 3054589 - RNA, 22 nt, Human
uacacuguuucaaacuuuacua

SEQ ID NO: 3054590 - RNA, 22 nt, Human
uacacugugcugagucugaagg

SEQ ID NO: 3054591 - RNA, 23 nt, Human
uacacugugcugagucugaaggc

SEQ ID NO: 3054592 - RNA, 20 nt, Human
uacacuguuucaaacuuuac

SEQ ID NO: 3054593 - RNA, 21 nt, Human
uacaguuuguuaguaugaggc

SEQ ID NO: 3054594 - RNA, 19 nt, Human
uacaguuuguuaguaugag

SEQ ID NO: 3054595 - RNA, 16 nt, Human
uacauaaacaaguccu

SEQ ID NO: 3054596 - RNA, 23 nt, Human
uacaugaaaacacauuuuucuua

SEQ ID NO: 3054597 - RNA, 19 nt, Human
uacaugaaaacacauuuuu

SEQ ID NO: 3054598 - RNA, 18 nt, Human
uacaugaaaacacauuuu

SEQ ID NO: 3054599 - RNA, 17 nt, Human
uacaugaaaacacauuu

SEQ ID NO: 3054600 - RNA, 17 nt, Human
uacauaagauaaaugug

SEQ ID NO: 3054601 - RNA, 16 nt, Human
uacauaagauaaaugu

SEQ ID NO: 3054602 - RNA, 16 nt, Human
uacaugaaaacacauu

SEQ ID NO: 3054603 - RNA, 22 nt, Human
uacauggaauaacauguaauua

SEQ ID NO: 3054604 - RNA, 19 nt, Human
uacauggaauaacauguaa

SEQ ID NO: 3054605 - RNA, 18 nt, Human
uacauggaauaacaugua

SEQ ID NO: 3054606 - RNA, 14 nt, Human
uacauggaauaaca

SEQ ID NO: 3054607 - RNA, 22 nt, Human
uacauuuuuaagugcugcauuu

SEQ ID NO: 3054608 - RNA, 19 nt, Human
uacauuuuuaagugcugca

SEQ ID NO: 3054609 - RNA, 14 nt, Human
uacauuuuuaagug

SEQ ID NO: 3054610 - RNA, 21 nt, Human
uacauggcuggagcuagaauu

SEQ ID NO: 3054611 - RNA, 16 nt, Human
uacacacucaaaucaa

SEQ ID NO: 3054612 - RNA, 15 nt, Human
uacacacugcauguu

SEQ ID NO: 3054613 - RNA, 17 nt, Human
uacacacucaaaucaag

SEQ ID NO: 3054614 - RNA, 21 nt, Human
uacacugugcugagucugaag

SEQ ID NO: 3054615 - RNA, 14 nt, Human
uacacuccagugag

SEQ ID NO: 3054616 - RNA, 23 nt, Human
uacacaaugguuuucuugugugu

SEQ ID NO: 3054617 - RNA, 11 nt, Human
uacacacacac

SEQ ID NO: 3054618 - RNA, 18 nt, Human
uacaaaguagaagucuua

SEQ ID NO: 3054619 - RNA, 14 nt, Human
uacaaaguagaagu

SEQ ID NO: 3054620 - RNA, 13 nt, Human
uaauuuugugaag

SEQ ID NO: 3054621 - RNA, 18 nt, Human
uaauuuugugaagcaaaa

SEQ ID NO: 3054622 - RNA, 12 nt, Human
uaauuuuuauau

SEQ ID NO: 3054623 - RNA, 16 nt, Human
uaauuuuuauauuuga

SEQ ID NO: 3054624 - RNA, 15 nt, Human
uacuccccuccuuga

SEQ ID NO: 3054625 - RNA, 22 nt, Human
uacucgaguuacagacaaagcg

SEQ ID NO: 3054626 - RNA, 18 nt, Human
uacucgaguuacagacaa

SEQ ID NO: 3054627 - RNA, 22 nt, Human
uacuacaguccucccaucucac

SEQ ID NO: 3054628 - RNA, 20 nt, Human
uacuacaguccucccaucuc

SEQ ID NO: 3054629 - RNA, 14 nt, Human
uacuacaguuuguu

SEQ ID NO: 3054630 - RNA, 13 nt, Human
uacuacaguuugu

SEQ ID NO: 3054631 - RNA, 14 nt, Human
uacugccuauuuua

SEQ ID NO: 3054632 - RNA, 21 nt, Human
uacugccuauuuuaauaaaca

SEQ ID NO: 3054633 - RNA, 22 nt, Human
uacugccauccuggcccagggc

SEQ ID NO: 3054634 - RNA, 18 nt, Human
uacugccauccuggccca

SEQ ID NO: 3054635 - RNA, 19 nt, Human
uacugccauccuggcccag

SEQ ID NO: 3054636 - RNA, 15 nt, Human
uacugccauccuggc

SEQ ID NO: 3054637 - RNA, 17 nt, Human
uacugcauaugaaagga

SEQ ID NO: 3054638 - RNA, 13 nt, Human
uacuuaacuauuc

SEQ ID NO: 3054639 - RNA, 19 nt, Human
uacuugcucuugaugccug

SEQ ID NO: 3054640 - RNA, 18 nt, Human
uacuugcucuugaugccu

SEQ ID NO: 3054641 - RNA, 14 nt, Human
uacuugcucuugau

SEQ ID NO: 3054642 - RNA, 13 nt, Human
uacuugcucuuga

SEQ ID NO: 3054643 - RNA, 13 nt, Human
uacuuguggacac

SEQ ID NO: 3054644 - RNA, 16 nt, Human
uacuguccuacccacc

SEQ ID NO: 3054645 - RNA, 23 nt, Human
uacugucagcuccccucggagaa

SEQ ID NO: 3054646 - RNA, 21 nt, Human
uacugucuucaguaagccgug

SEQ ID NO: 3054647 - RNA, 14 nt, Human
uacccagaaaguua

SEQ ID NO: 3054648 - RNA, 15 nt, Human
uacccacugcucugg

SEQ ID NO: 3054649 - RNA, 22 nt, Human
uaccaaaaaucucaauauuuca

SEQ ID NO: 3054650 - RNA, 23 nt, Human
uacauuuuuaagugcugcauuua

SEQ ID NO: 3054651 - RNA, 22 nt, Human
uaccuaacgaaguauccuucag

SEQ ID NO: 3054652 - RNA, 15 nt, Human
uaccuacauacaauu

SEQ ID NO: 3054653 - RNA, 16 nt, Human
uaccuaucaucuuaag

SEQ ID NO: 3054654 - RNA, 22 nt, Human
uaccuuuuuuagaguugauacu

SEQ ID NO: 3054655 - RNA, 19 nt, Human
uaccuuuuuuagaguugau

SEQ ID NO: 3054656 - RNA, 13 nt, Human
uaccuuuuuuaga

SEQ ID NO: 3054657 - RNA, 23 nt, Human
uaccuuuguucccaaauuucaua

SEQ ID NO: 3054658 - RNA, 18 nt, Human
uaccucggugccuuccuc

SEQ ID NO: 3054659 - RNA, 18 nt, Human
uacgaaaagaggggaaga

SEQ ID NO: 3054660 - RNA, 21 nt, Human
uacgaaaagaggggaagagac

SEQ ID NO: 3054661 - RNA, 16 nt, Human
uaccuuuuuuauacau

SEQ ID NO: 3054662 - RNA, 13 nt, Human
uaccuuuuuuaua

SEQ ID NO: 3054663 - RNA, 17 nt, Human
uaccuuuuuuauacaua

SEQ ID NO: 3054664 - RNA, 22 nt, Human
uaccuuuuuuauacauaaacaa

SEQ ID NO: 3054665 - RNA, 21 nt, Human
uacuaauagacaauuuauuau

SEQ ID NO: 3054666 - RNA, 20 nt, Human
uacuaauagacaauuuauua

SEQ ID NO: 3054667 - RNA, 14 nt, Human
uacuaaggaaucuu

SEQ ID NO: 3054668 - RNA, 13 nt, Human
uacuaacuuuccu

SEQ ID NO: 3054669 - RNA, 18 nt, Human
uaacugugaaguuuacau

SEQ ID NO: 3054670 - RNA, 17 nt, Human
uaacugugaaguuuaca

SEQ ID NO: 3054671 - RNA, 13 nt, Human
uaacugugaaguu

SEQ ID NO: 3054672 - RNA, 15 nt, Human
uaacuggaaacuuca

SEQ ID NO: 3054673 - RNA, 23 nt, Human
uaagaaaaaggaugcacagaguu

SEQ ID NO: 3054674 - RNA, 19 nt, Human
uaagaaaaaggaugcacag

SEQ ID NO: 3054675 - RNA, 18 nt, Human
uaagaaaaaggaugcaca

SEQ ID NO: 3054676 - RNA, 16 nt, Human
uaagaaaaaggaugca

SEQ ID NO: 3054677 - RNA, 19 nt, Human
uaagaaaucaaagagagaa

SEQ ID NO: 3054678 - RNA, 21 nt, Human
uaagaaaauaucacuugucaa

SEQ ID NO: 3054679 - RNA, 19 nt, Human
uaagaaccuuuugagugcc

SEQ ID NO: 3054680 - RNA, 13 nt, Human
uaagagagaauga

SEQ ID NO: 3054681 - RNA, 14 nt, Human
uaagagagaaugag

SEQ ID NO: 3054682 - RNA, 13 nt, Human
uaaccagaucauu

SEQ ID NO: 3054683 - RNA, 16 nt, Human
uaaccacuucagcuga

SEQ ID NO: 3054684 - RNA, 23 nt, Human
uaaccaguguuguggauuuaaca

SEQ ID NO: 3054685 - RNA, 17 nt, Human
uaaccaggggccaugaa

SEQ ID NO: 3054686 - RNA, 11 nt, Human
uaacagaaaug

SEQ ID NO: 3054687 - RNA, 22 nt, Human
uaaauuugaauguuaagcagau

SEQ ID NO: 3054688 - RNA, 14 nt, Human
uaaauuugaauguu

SEQ ID NO: 3054689 - RNA, 22 nt, Human
uaaauuuaguauuuuguuucag

SEQ ID NO: 3054690 - RNA, 13 nt, Human
uaaauucuuucau

SEQ ID NO: 3054691 - RNA, 20 nt, Human
uaaauugacacuuaaaaaug

SEQ ID NO: 3054692 - RNA, 18 nt, Human
uaacaccaugauuaacca

SEQ ID NO: 3054693 - RNA, 16 nt, Human
uaaauucuugcaaagu

SEQ ID NO: 3054694 - RNA, 18 nt, Human
uaaauucuugcaaaguau

SEQ ID NO: 3054695 - RNA, 17 nt, Human
uaaauucuugcaaagua

SEQ ID NO: 3054696 - RNA, 22 nt, Human
uaaauucuugcaaaguaucccu

SEQ ID NO: 3054697 - RNA, 11 nt, Human
uaaauuauuuu

SEQ ID NO: 3054698 - RNA, 16 nt, Human
uaaaugugccuucauu

SEQ ID NO: 3054699 - RNA, 17 nt, Human
uaaaguugguaaaccuu

SEQ ID NO: 3054700 - RNA, 16 nt, Human
uaaaguugguaaaccu

SEQ ID NO: 3054701 - RNA, 13 nt, Human
uaaaugcccagcc

SEQ ID NO: 3054702 - RNA, 14 nt, Human
uaaaugcccagccc

SEQ ID NO: 3054703 - RNA, 15 nt, Human
uaaaugcccagcccc

SEQ ID NO: 3054704 - RNA, 16 nt, Human
uaaaugcccagccccu

SEQ ID NO: 3054705 - RNA, 17 nt, Human
uaaaugcccagccccuu

SEQ ID NO: 3054706 - RNA, 16 nt, Human
uaaauggaaccacucu

SEQ ID NO: 3054707 - RNA, 17 nt, Human
uaaaugggggugcauuu

SEQ ID NO: 3054708 - RNA, 14 nt, Human
uaaaugggggugca

SEQ ID NO: 3054709 - RNA, 20 nt, Human
uaaauggcuuccuggcaaua

SEQ ID NO: 3054710 - RNA, 19 nt, Human
uaaaugggggugcauuuga

SEQ ID NO: 3054711 - RNA, 18 nt, Human
uaaaugggggugcauuug

SEQ ID NO: 3054712 - RNA, 20 nt, Human
uaaaugucuaguuguaacac

SEQ ID NO: 3054713 - RNA, 22 nt, Human
uaaaugucucuuuaaugucaca

SEQ ID NO: 3054714 - RNA, 21 nt, Human
uaauaacugugaaguuuacau

SEQ ID NO: 3054715 - RNA, 12 nt, Human
uaauaaagcugu

SEQ ID NO: 3054716 - RNA, 11 nt, Human
uaauaaagcug

SEQ ID NO: 3054717 - RNA, 22 nt, Human
uaagugcugcauuuaaaagaua

SEQ ID NO: 3054718 - RNA, 18 nt, Human
uaagugcugcauuuaaaa

SEQ ID NO: 3054719 - RNA, 16 nt, Human
uaagugcugcauuuaa

SEQ ID NO: 3054720 - RNA, 15 nt, Human
uaagugcugcauuua

SEQ ID NO: 3054721 - RNA, 20 nt, Human
uaagugguacuaacuuuccu

SEQ ID NO: 3054722 - RNA, 22 nt, Human
uaagugauugcugguuuuaguu

SEQ ID NO: 3054723 - RNA, 12 nt, Human
uaagugagagag

SEQ ID NO: 3054724 - RNA, 23 nt, Human
uaagugaggaugaaaaaauaaca

SEQ ID NO: 3054725 - RNA, 14 nt, Human
uaagugcugcauuu

SEQ ID NO: 3054726 - RNA, 13 nt, Human
uaagugaaauaag

SEQ ID NO: 3054727 - RNA, 17 nt, Human
uaaggguaucuggugac

SEQ ID NO: 3054728 - RNA, 15 nt, Human
uaaggugugcucuga

SEQ ID NO: 3054729 - RNA, 20 nt, Human
uaagguggguacgggagggu

SEQ ID NO: 3054730 - RNA, 15 nt, Human
uaagaggcagggucu

SEQ ID NO: 3054731 - RNA, 12 nt, Human
uaagaggcaggg

SEQ ID NO: 3054732 - RNA, 18 nt, Human
uaagcuacugccauccug

SEQ ID NO: 3054733 - RNA, 15 nt, Human
uaagcuacugccauc

SEQ ID NO: 3054734 - RNA, 16 nt, Human
uaagcuacugccaucc

SEQ ID NO: 3054735 - RNA, 14 nt, Human
uaagcuacugccau

SEQ ID NO: 3054736 - RNA, 16 nt, Human
uaaggauguucuagca

SEQ ID NO: 3054737 - RNA, 18 nt, Human
uaauaugcacacauuuuu

SEQ ID NO: 3054738 - RNA, 17 nt, Human
uaauaugcacacauuuu

SEQ ID NO: 3054739 - RNA, 16 nt, Human
uaauaugcacacauuu

SEQ ID NO: 3054740 - RNA, 15 nt, Human
uaauaugcacacauu

SEQ ID NO: 3054741 - RNA, 19 nt, Human
uaauaugcacacauuuuuu

SEQ ID NO: 3054742 - RNA, 13 nt, Human
uaaucuaaaugga

SEQ ID NO: 3054743 - RNA, 12 nt, Human
uaaucuaaaugg

SEQ ID NO: 3054744 - RNA, 20 nt, Human
uaauauuaaggaagacaaug

SEQ ID NO: 3054745 - RNA, 17 nt, Human
uaauuaaguacuaugua

SEQ ID NO: 3054746 - RNA, 14 nt, Human
uaauuaaguacuau

SEQ ID NO: 3054747 - RNA, 22 nt, Human
uaauguuucaaacauauauaac

SEQ ID NO: 3054748 - RNA, 15 nt, Human
uaaugcgugcauacc

SEQ ID NO: 3054749 - RNA, 17 nt, Human
uaaugauaacuggaaac

SEQ ID NO: 3054750 - RNA, 22 nt, Human
uaaugauaacuggaaacuucag

SEQ ID NO: 3054751 - RNA, 22 nt, Human
uaaugcgugcauaccacuuuug

SEQ ID NO: 3054752 - RNA, 19 nt, Human
uaaugcgugcauaccacuu

SEQ ID NO: 3054753 - RNA, 23 nt, Human
uaaugcgugcauaccacuuuugu

SEQ ID NO: 3054754 - RNA, 16 nt, Human
uaaugauaacuggaaa

SEQ ID NO: 3054755 - RNA, 15 nt, Human
uaauggggcggugag

SEQ ID NO: 3054756 - RNA, 14 nt, Human
uaaaagauacaguu

SEQ ID NO: 3054757 - RNA, 20 nt, Human
uaaaagauacaguuacucag

SEQ ID NO: 3054758 - RNA, 17 nt, Human
uaaaagauacaguuacu

SEQ ID NO: 3054759 - RNA, 21 nt, Human
uaaaagauacaguuacucaga

SEQ ID NO: 3054760 - RNA, 12 nt, Human
uaaaaggugacc

SEQ ID NO: 3054761 - RNA, 13 nt, Human
uaaaaucauuucu

SEQ ID NO: 3054762 - RNA, 10 nt, Human
uaaaaucauu

SEQ ID NO: 3054763 - RNA, 15 nt, Human
uaaaauccauacauu

SEQ ID NO: 3054764 - RNA, 17 nt, Human
uaaaauccauacauuug

SEQ ID NO: 3054765 - RNA, 22 nt, Human
uaaaaucauuucugcaucagcu

SEQ ID NO: 3054766 - RNA, 18 nt, Human
uaaaaucauuucugcauc

SEQ ID NO: 3054767 - RNA, 21 nt, Human
uaaaagguaugcaaucaaauc

SEQ ID NO: 3054768 - RNA, 12 nt, Human
uaaaaggagcca

SEQ ID NO: 3054769 - RNA, 21 nt, Human
uaaaaagacauucuuccaaaa

SEQ ID NO: 3054770 - RNA, 19 nt, Human
uaaaaaugguuuaaauggu

SEQ ID NO: 3054771 - RNA, 15 nt, Human
uaaaaaugguuuaaa

SEQ ID NO: 3054772 - RNA, 18 nt, Human
uaaaaaugguuuaaaugg

SEQ ID NO: 3054773 - RNA, 17 nt, Human
uaaaaacaaagaaauua

SEQ ID NO: 3054774 - RNA, 21 nt, Human
uaaaaacaaagaaauuaugug

SEQ ID NO: 3054775 - RNA, 18 nt, Human
uaaaaacaacuuuauacc

SEQ ID NO: 3054776 - RNA, 19 nt, Human
uaaaaacaacuuuauaccc

SEQ ID NO: 3054777 - RNA, 13 nt, Human
uaaaaacaacuuu

SEQ ID NO: 3054778 - RNA, 22 nt, Human
uaaaacaagcacuaaacaaaga

SEQ ID NO: 3054779 - RNA, 15 nt, Human
uaaaacaacacucac

SEQ ID NO: 3054780 - RNA, 22 nt, Human
uaaaacacaacaucuuuuucua

SEQ ID NO: 3054781 - RNA, 23 nt, Human
uaaaacacaacaucuuuuucuac

SEQ ID NO: 3054782 - RNA, 17 nt, Human
uaaaacacaacaucuuu

SEQ ID NO: 3054783 - RNA, 17 nt, Human
uaaacacucuugaaaaa

SEQ ID NO: 3054784 - RNA, 15 nt, Human
uaaacacucuugaaa

SEQ ID NO: 3054785 - RNA, 18 nt, Human
uaaacacucuugaaaaau

SEQ ID NO: 3054786 - RNA, 19 nt, Human
uaaacaagaccacguuucu

SEQ ID NO: 3054787 - RNA, 20 nt, Human
uaaacaagaccacguuucua

SEQ ID NO: 3054788 - RNA, 22 nt, Human
uaaacaagaccacguuucuaaa

SEQ ID NO: 3054789 - RNA, 21 nt, Human
uaaacaagaccacguuucuaa

SEQ ID NO: 3054790 - RNA, 22 nt, Human
uaaacuugguuuuuaaaaaacu

SEQ ID NO: 3054791 - RNA, 14 nt, Human
uaaaguguuugaaa

SEQ ID NO: 3054792 - RNA, 17 nt, Human
uaaaggcuaccuuugua

SEQ ID NO: 3054793 - RNA, 15 nt, Human
uaaaggcuaccuuug

SEQ ID NO: 3054794 - RNA, 20 nt, Human
uaaagccugaguuugcuuuc

SEQ ID NO: 3054795 - RNA, 18 nt, Human
uaaagcaggcagaacuca

SEQ ID NO: 3054796 - RNA, 19 nt, Human
uaaagcagcguuucuauga

SEQ ID NO: 3054797 - RNA, 17 nt, Human
uaaagcagcguuucuau

SEQ ID NO: 3054798 - RNA, 16 nt, Human
uaaagcagcguuucua

SEQ ID NO: 3054799 - RNA, 12 nt, Human
uaaagaaaacug

SEQ ID NO: 3054800 - RNA, 18 nt, Human
guuucuuuguaaugaaaa

SEQ ID NO: 3054801 - RNA, 19 nt, Human
guuucuuuguaaugaaaac

SEQ ID NO: 3054802 - RNA, 23 nt, Human
guuugauuaaauucuugcaaagu

SEQ ID NO: 3054803 - RNA, 17 nt, Human
guuugagaucagccugg

SEQ ID NO: 3054804 - RNA, 18 nt, Human
guuuguuucugaaaggga

SEQ ID NO: 3054805 - RNA, 16 nt, Human
guuugauucagacagc

SEQ ID NO: 3054806 - RNA, 20 nt, Human
guuugauucagacagcugcc

SEQ ID NO: 3054807 - RNA, 21 nt, Human
guuugauucagacagcugccu

SEQ ID NO: 3054808 - RNA, 18 nt, Human
guuuggggaugagaaagg

SEQ ID NO: 3054809 - RNA, 20 nt, Human
guuuguaaauuaacuuuuau

SEQ ID NO: 3054810 - RNA, 20 nt, Human
guuuucaaaauuguuacaaa

SEQ ID NO: 3054811 - RNA, 17 nt, Human
guuuucaaaauaaaaau

SEQ ID NO: 3054812 - RNA, 12 nt, Human
guuuucacucuu

SEQ ID NO: 3054813 - RNA, 11 nt, Human
guuuucacucu

SEQ ID NO: 3054814 - RNA, 16 nt, Human
guuuuaaaaugagaaa

SEQ ID NO: 3054815 - RNA, 15 nt, Human
guuuuaaaaugagaa

SEQ ID NO: 3054816 - RNA, 20 nt, Human
guuuguuucugaaagggacg

SEQ ID NO: 3054817 - RNA, 20 nt, Human
guuuuccagguuuaagcugu

SEQ ID NO: 3054818 - RNA, 19 nt, Human
guuuuccaugaguccccug

SEQ ID NO: 3054819 - RNA, 20 nt, Human
guuuuccaugaguccccugu

SEQ ID NO: 3054820 - RNA, 19 nt, Human
guuuaggaacuacugagga

SEQ ID NO: 3054821 - RNA, 20 nt, Human
guuuagcuggaaaaguaugu

SEQ ID NO: 3054822 - RNA, 21 nt, Human
guuuagcuggaaaaguauguu

SEQ ID NO: 3054823 - RNA, 20 nt, Human
guuuauauaagcuuguauuc

SEQ ID NO: 3054824 - RNA, 17 nt, Human
guuuagaaagcuugccc

SEQ ID NO: 3054825 - RNA, 14 nt, Human
guuuagauaauaca

SEQ ID NO: 3054826 - RNA, 15 nt, Human
guuguuacauuuuua

SEQ ID NO: 3054827 - RNA, 14 nt, Human
guuguuacauuuuu

SEQ ID NO: 3054828 - RNA, 14 nt, Human
guugugaauguugu

SEQ ID NO: 3054829 - RNA, 19 nt, Human
guugucugcaacucugaag

SEQ ID NO: 3054830 - RNA, 22 nt, Human
guuguggauuuaacagaaaugu

SEQ ID NO: 3054831 - RNA, 14 nt, Human
guugugguuaaucu

SEQ ID NO: 3054832 - RNA, 12 nt, Human
guugucagcuga

SEQ ID NO: 3054833 - RNA, 19 nt, Human
guuggcugggggccucagu

SEQ ID NO: 3054834 - RNA, 12 nt, Human
guuggcuggggg

SEQ ID NO: 3054835 - RNA, 14 nt, Human
guuggccccugccc

SEQ ID NO: 3054836 - RNA, 13 nt, Human
guuggccccugcc

SEQ ID NO: 3054837 - RNA, 20 nt, Human
guuggccccugcccggcugc

SEQ ID NO: 3054838 - RNA, 17 nt, Human
guggucccaccccacac

SEQ ID NO: 3054839 - RNA, 18 nt, Human
gugguccuaaucuucuga

SEQ ID NO: 3054840 - RNA, 14 nt, Human
guggucccacccca

SEQ ID NO: 3054841 - RNA, 15 nt, Human
guggucccaccccac

SEQ ID NO: 3054842 - RNA, 16 nt, Human
guggucccaccccaca

SEQ ID NO: 3054843 - RNA, 19 nt, Human
gugguaugaucacggcuca

SEQ ID NO: 3054844 - RNA, 17 nt, Human
gugguagagugugccug

SEQ ID NO: 3054845 - RNA, 21 nt, Human
guggugagaggcauccaguau

SEQ ID NO: 3054846 - RNA, 17 nt, Human
guggugaccucugccug

SEQ ID NO: 3054847 - RNA, 14 nt, Human
guggugaccucugc

SEQ ID NO: 3054848 - RNA, 19 nt, Human
guggugcgaucuggguuca

SEQ ID NO: 3054849 - RNA, 17 nt, Human
guguaagacaaaaagcu

SEQ ID NO: 3054850 - RNA, 21 nt, Human
guguaaguauucuuauuuaau

SEQ ID NO: 3054851 - RNA, 21 nt, Human
guguaaguagauaggccaugg

SEQ ID NO: 3054852 - RNA, 15 nt, Human
guguacuuaacuauu

SEQ ID NO: 3054853 - RNA, 22 nt, Human
guguacauggaauaacauguaa

SEQ ID NO: 3054854 - RNA, 17 nt, Human
guguacauggaauaaca

SEQ ID NO: 3054855 - RNA, 18 nt, Human
gugucccugcacuugcag

SEQ ID NO: 3054856 - RNA, 16 nt, Human
gugucccugcacuugc

SEQ ID NO: 3054857 - RNA, 13 nt, Human
gugucccugcacu

SEQ ID NO: 3054858 - RNA, 23 nt, Human
guggcugcuucaaggauccugag

SEQ ID NO: 3054859 - RNA, 19 nt, Human
guggcuggguuggagggug

SEQ ID NO: 3054860 - RNA, 15 nt, Human
guggcugcuucaagg

SEQ ID NO: 3054861 - RNA, 16 nt, Human
guggcugcuucaagga

SEQ ID NO: 3054862 - RNA, 19 nt, Human
guggcugcuucaaggaucc

SEQ ID NO: 3054863 - RNA, 22 nt, Human
guggcugcuucaaggauccuga

SEQ ID NO: 3054864 - RNA, 22 nt, Human
guggcuuaaaacaacacucaca

SEQ ID NO: 3054865 - RNA, 15 nt, Human
gugcuaauuuugaaa

SEQ ID NO: 3054866 - RNA, 13 nt, Human
gugcuaauuuuga

SEQ ID NO: 3054867 - RNA, 20 nt, Human
gugcuacaaaaacacagcaa

SEQ ID NO: 3054868 - RNA, 15 nt, Human
gugcuacaaaaacac

SEQ ID NO: 3054869 - RNA, 14 nt, Human
guggcucacgccug

SEQ ID NO: 3054870 - RNA, 12 nt, Human
guggcugcuuca

SEQ ID NO: 3054871 - RNA, 14 nt, Human
guggcugcuucaag

SEQ ID NO: 3054872 - RNA, 17 nt, Human
gugggcccaaugcacuu

SEQ ID NO: 3054873 - RNA, 15 nt, Human
gugggcauucaaaug

SEQ ID NO: 3054874 - RNA, 15 nt, Human
gugggcuaguugggc

SEQ ID NO: 3054875 - RNA, 15 nt, Human
guggggaccucaggc

SEQ ID NO: 3054876 - RNA, 18 nt, Human
guggggaccucaggccug

SEQ ID NO: 3054877 - RNA, 13 nt, Human
guggggcagcuug

SEQ ID NO: 3054878 - RNA, 17 nt, Human
guggggcagcuugaggg

SEQ ID NO: 3054879 - RNA, 23 nt, Human
guggguuucuaaagcugccagcc

SEQ ID NO: 3054880 - RNA, 18 nt, Human
guguuuuucauaaagcag

SEQ ID NO: 3054881 - RNA, 14 nt, Human
guguguuuuucaua

SEQ ID NO: 3054882 - RNA, 16 nt, Human
guguguuuuaaaauga

SEQ ID NO: 3054883 - RNA, 13 nt, Human
guguguuuuaaaa

SEQ ID NO: 3054884 - RNA, 19 nt, Human
guguguuuuaaaaugagaa

SEQ ID NO: 3054885 - RNA, 12 nt, Human
guguuacuaagu

SEQ ID NO: 3054886 - RNA, 14 nt, Human
guguuacuaaguuu

SEQ ID NO: 3054887 - RNA, 18 nt, Human
guguuaugacuccagaau

SEQ ID NO: 3054888 - RNA, 16 nt, Human
guuaaaagaugaaaau

SEQ ID NO: 3054889 - RNA, 14 nt, Human
guuaaaagaugaaa

SEQ ID NO: 3054890 - RNA, 22 nt, Human
guuaaaauaccagccaguaaau

SEQ ID NO: 3054891 - RNA, 20 nt, Human
guuaaaagaugaaaauauuu

SEQ ID NO: 3054892 - RNA, 13 nt, Human
guuacagacaaag

SEQ ID NO: 3054893 - RNA, 16 nt, Human
guuacacuaaaaggug

SEQ ID NO: 3054894 - RNA, 15 nt, Human
guuacacuaaaaggu

SEQ ID NO: 3054895 - RNA, 17 nt, Human
gugugcucaggagcccu

SEQ ID NO: 3054896 - RNA, 16 nt, Human
gugugcucaggagccc

SEQ ID NO: 3054897 - RNA, 16 nt, Human
gugugcguccugucgg

SEQ ID NO: 3054898 - RNA, 14 nt, Human
gugugcguccuguc

SEQ ID NO: 3054899 - RNA, 19 nt, Human
gugugcucaggagcccugg

SEQ ID NO: 3054900 - RNA, 18 nt, Human
gugugcucaggagcccug

SEQ ID NO: 3054901 - RNA, 12 nt, Human
gugugcucugau

SEQ ID NO: 3054902 - RNA, 22 nt, Human
gugugcucugaucauccacugu

SEQ ID NO: 3054903 - RNA, 15 nt, Human
gugugcucugaucau

SEQ ID NO: 3054904 - RNA, 12 nt, Human
guguguuuuaaa

SEQ ID NO: 3054905 - RNA, 13 nt, Human
guguggagaagcg

SEQ ID NO: 3054906 - RNA, 21 nt, Human
guguggagaagcggcuggcag

SEQ ID NO: 3054907 - RNA, 15 nt, Human
gugucgggcaugaca

SEQ ID NO: 3054908 - RNA, 14 nt, Human
guguccggucccug

SEQ ID NO: 3054909 - RNA, 23 nt, Human
gugucccugcacuugcagacucu

SEQ ID NO: 3054910 - RNA, 14 nt, Human
gugucucuuggucc

SEQ ID NO: 3054911 - RNA, 17 nt, Human
gugucucccuucauccu

SEQ ID NO: 3054912 - RNA, 22 nt, Human
gugucucuugguccugcugcag

SEQ ID NO: 3054913 - RNA, 18 nt, Human
gugucucuugguccugcu

SEQ ID NO: 3054914 - RNA, 19 nt, Human
gugucucuugguccugcug

SEQ ID NO: 3054915 - RNA, 20 nt, Human
gugucucuugguccugcugc

SEQ ID NO: 3054916 - RNA, 21 nt, Human
gugucucuugguccugcugca

SEQ ID NO: 3054917 - RNA, 20 nt, Human
gugugagucaccaagcccag

SEQ ID NO: 3054918 - RNA, 18 nt, Human
guucaauaauaaauauuu

SEQ ID NO: 3054919 - RNA, 20 nt, Human
guucaagcgauucuucugcu

SEQ ID NO: 3054920 - RNA, 23 nt, Human
guucaauucucauuugucacaca

SEQ ID NO: 3054921 - RNA, 16 nt, Human
guucaauucucauuug

SEQ ID NO: 3054922 - RNA, 19 nt, Human
guuauuaaaaaucucaaau

SEQ ID NO: 3054923 - RNA, 19 nt, Human
guucaagcgauucuucugc

SEQ ID NO: 3054924 - RNA, 21 nt, Human
guuaugacuccagaauuuccc

SEQ ID NO: 3054925 - RNA, 23 nt, Human
guuaccucugccucagaaaacaa

SEQ ID NO: 3054926 - RNA, 23 nt, Human
guuaccauuuugggguacccacu

SEQ ID NO: 3054927 - RNA, 16 nt, Human
guuacccaaauuaaga

SEQ ID NO: 3054928 - RNA, 21 nt, Human
guuacauuuuuaagugcugca

SEQ ID NO: 3054929 - RNA, 19 nt, Human
guuacauaagauaaaugug

SEQ ID NO: 3054930 - RNA, 18 nt, Human
guuacauaagauaaaugu

SEQ ID NO: 3054931 - RNA, 15 nt, Human
guuacagacaaagcg

SEQ ID NO: 3054932 - RNA, 17 nt, Human
guuacagacaaagcgug

SEQ ID NO: 3054933 - RNA, 22 nt, Human
guuacuaaguuuuuauggcuuu

SEQ ID NO: 3054934 - RNA, 15 nt, Human
guuacucagaauucu

SEQ ID NO: 3054935 - RNA, 16 nt, Human
guuaguuucuccaagc

SEQ ID NO: 3054936 - RNA, 19 nt, Human
guuaguuucuccaagcagg

SEQ ID NO: 3054937 - RNA, 22 nt, Human
guuaguuucuccaagcaggaca

SEQ ID NO: 3054938 - RNA, 17 nt, Human
guuccaccaucaagcca

SEQ ID NO: 3054939 - RNA, 20 nt, Human
guuccaccaucaagccacca

SEQ ID NO: 3054940 - RNA, 14 nt, Human
guuccuaauccucu

SEQ ID NO: 3054941 - RNA, 22 nt, Human
guuccucauuagcauuuugcua

SEQ ID NO: 3054942 - RNA, 19 nt, Human
guucacugcaaccuccgcc

SEQ ID NO: 3054943 - RNA, 17 nt, Human
guucaucauccuaagcu

SEQ ID NO: 3054944 - RNA, 16 nt, Human
guucaucaaugaauga

SEQ ID NO: 3054945 - RNA, 12 nt, Human
guucaucuugaa

SEQ ID NO: 3054946 - RNA, 13 nt, Human
guucaucuugaau

SEQ ID NO: 3054947 - RNA, 18 nt, Human
guucaucuugaauuguaa

SEQ ID NO: 3054948 - RNA, 12 nt, Human
guucaugaaaga

SEQ ID NO: 3054949 - RNA, 16 nt, Human
guugcaacuuuguaua

SEQ ID NO: 3054950 - RNA, 14 nt, Human
guugcaacuuugua

SEQ ID NO: 3054951 - RNA, 15 nt, Human
guugcaggaccucag

SEQ ID NO: 3054952 - RNA, 16 nt, Human
guugaagacagagcua

SEQ ID NO: 3054953 - RNA, 18 nt, Human
guugaagagguuuuaaag

SEQ ID NO: 3054954 - RNA, 21 nt, Human
guugauggugguauguuuuca

SEQ ID NO: 3054955 - RNA, 20 nt, Human
guugauggugguauguuuuc

SEQ ID NO: 3054956 - RNA, 23 nt, Human
guuggccaaagccaaagcuaggc

SEQ ID NO: 3054957 - RNA, 14 nt, Human
guuggcaaaaaggc

SEQ ID NO: 3054958 - RNA, 18 nt, Human
guuggcaaaaaggcagga

SEQ ID NO: 3054959 - RNA, 13 nt, Human
guuggccaggcug

SEQ ID NO: 3054960 - RNA, 14 nt, Human
guuggccaggcugg

SEQ ID NO: 3054961 - RNA, 15 nt, Human
guuggccaggcuggu

SEQ ID NO: 3054962 - RNA, 14 nt, Human
guuggccaguguga

SEQ ID NO: 3054963 - RNA, 19 nt, Human
guuggccaggcuggucuca

SEQ ID NO: 3054964 - RNA, 17 nt, Human
guuggccaggcuggucu

SEQ ID NO: 3054965 - RNA, 14 nt, Human
guugcccaggcagg

SEQ ID NO: 3054966 - RNA, 12 nt, Human
guugcccaggca

SEQ ID NO: 3054967 - RNA, 16 nt, Human
guugccagucaccccg

SEQ ID NO: 3054968 - RNA, 17 nt, Human
guugccagucaccccgg

SEQ ID NO: 3054969 - RNA, 18 nt, Human
guugccagucaccccggc

SEQ ID NO: 3054970 - RNA, 23 nt, Human
guugccagucaccccggccaccu

SEQ ID NO: 3054971 - RNA, 13 nt, Human
guugccagucacc

SEQ ID NO: 3054972 - RNA, 14 nt, Human
guugccagucaccc

SEQ ID NO: 3054973 - RNA, 19 nt, Human
guucugauccuaguuccac

SEQ ID NO: 3054974 - RNA, 12 nt, Human
guucugaagaag

SEQ ID NO: 3054975 - RNA, 13 nt, Human
guucugaagaaga

SEQ ID NO: 3054976 - RNA, 14 nt, Human
guucugaagaagau

SEQ ID NO: 3054977 - RNA, 15 nt, Human
guucugaagaagaug

SEQ ID NO: 3054978 - RNA, 17 nt, Human
guugaaaaacagcugag

SEQ ID NO: 3054979 - RNA, 23 nt, Human
guugaaaagacuccaaagaaaug

SEQ ID NO: 3054980 - RNA, 22 nt, Human
guugaaaagacuccaaagaaau

SEQ ID NO: 3054981 - RNA, 17 nt, Human
guugaaaagacuccaaa

SEQ ID NO: 3054982 - RNA, 20 nt, Human
guucuuuccaaaguacacug

SEQ ID NO: 3054983 - RNA, 18 nt, Human
guucuuuccaaaguacac

SEQ ID NO: 3054984 - RNA, 14 nt, Human
guucuuuccaaagu

SEQ ID NO: 3054985 - RNA, 13 nt, Human
guucuuuccaaag

SEQ ID NO: 3054986 - RNA, 18 nt, Human
guucuuucacccuuuucu

SEQ ID NO: 3054987 - RNA, 16 nt, Human
guucugggacacaguu

SEQ ID NO: 3054988 - RNA, 15 nt, Human
guucugggacacagu

SEQ ID NO: 3054989 - RNA, 14 nt, Human
guucugggacacag

SEQ ID NO: 3054990 - RNA, 12 nt, Human
guucugggacac

SEQ ID NO: 3054991 - RNA, 11 nt, Human
guucugggaca

SEQ ID NO: 3054992 - RNA, 23 nt, Human
guucuggcagaguugaagacaga

SEQ ID NO: 3054993 - RNA, 16 nt, Human
guucuggcucuuccag

SEQ ID NO: 3054994 - RNA, 20 nt, Human
guucuggcucuuccaggcug

SEQ ID NO: 3054995 - RNA, 12 nt, Human
guucuggcucuu

SEQ ID NO: 3054996 - RNA, 13 nt, Human
guaugaaauuaua

SEQ ID NO: 3054997 - RNA, 23 nt, Human
guaugaaauuauauaaguauucu

SEQ ID NO: 3054998 - RNA, 15 nt, Human
guaugaggcauuugu

SEQ ID NO: 3054999 - RNA, 13 nt, Human
guaugaggcauuu

SEQ ID NO: 3055000 - RNA, 12 nt, Human
guaucugagcag

SEQ ID NO: 3055001 - RNA, 12 nt, Human
guaucuggugac

SEQ ID NO: 3055002 - RNA, 19 nt, Human
guaucuggugacuuuccuc

SEQ ID NO: 3055003 - RNA, 21 nt, Human
guaugaucacggcucacugca

SEQ ID NO: 3055004 - RNA, 17 nt, Human
guauguuagugcaaauu

SEQ ID NO: 3055005 - RNA, 20 nt, Human
guaugaggcauuuguuugaa

SEQ ID NO: 3055006 - RNA, 17 nt, Human
guaugaggcauuuguuu

SEQ ID NO: 3055007 - RNA, 20 nt, Human
guaugaucacggcucacugc

SEQ ID NO: 3055008 - RNA, 22 nt, Human
guauaugucaagccauaauugu

SEQ ID NO: 3055009 - RNA, 14 nt, Human
guagcacugacaga

SEQ ID NO: 3055010 - RNA, 15 nt, Human
guagcacugacagau

SEQ ID NO: 3055011 - RNA, 16 nt, Human
guagcauccuggaaua

SEQ ID NO: 3055012 - RNA, 15 nt, Human
guagagugugccuga

SEQ ID NO: 3055013 - RNA, 18 nt, Human
gcuauaggugcuacaaaa

SEQ ID NO: 3055014 - RNA, 22 nt, Human
guagggcgggaggauguucugg

SEQ ID NO: 3055015 - RNA, 21 nt, Human
guagggcgggaggauguucug

SEQ ID NO: 3055016 - RNA, 23 nt, Human
guagggcgggaggauguucuggg

SEQ ID NO: 3055017 - RNA, 16 nt, Human
guagggcgggaggaug

SEQ ID NO: 3055018 - RNA, 21 nt, Human
guagcauuuguguugaagagg

SEQ ID NO: 3055019 - RNA, 14 nt, Human
guagucaggugccu

SEQ ID NO: 3055020 - RNA, 16 nt, Human
guaggguuauaauaau

SEQ ID NO: 3055021 - RNA, 17 nt, Human
guauaauucacauugua

SEQ ID NO: 3055022 - RNA, 14 nt, Human
guaguguuggagaa

SEQ ID NO: 3055023 - RNA, 15 nt, Human
guaguguuggagaag

SEQ ID NO: 3055024 - RNA, 17 nt, Human
gucccuaauaaagcugu

SEQ ID NO: 3055025 - RNA, 16 nt, Human
gucccuaauaaagcug

SEQ ID NO: 3055026 - RNA, 15 nt, Human
gucccuaauaaagcu

SEQ ID NO: 3055027 - RNA, 23 nt, Human
gucccaccuuggcugcagggagu

SEQ ID NO: 3055028 - RNA, 20 nt, Human
gucccaccuuggcugcaggg

SEQ ID NO: 3055029 - RNA, 16 nt, Human
gucccugcacuugcag

SEQ ID NO: 3055030 - RNA, 21 nt, Human
gucccugcacuugcagacucu

SEQ ID NO: 3055031 - RNA, 19 nt, Human
gucccugcacuugcagacu

SEQ ID NO: 3055032 - RNA, 20 nt, Human
gucccuaauaaagcugugug

SEQ ID NO: 3055033 - RNA, 18 nt, Human
gucccuaauaaagcugug

SEQ ID NO: 3055034 - RNA, 23 nt, Human
gucagcuccccucggagaagagc

SEQ ID NO: 3055035 - RNA, 22 nt, Human
gucagcuccccucggagaagag

SEQ ID NO: 3055036 - RNA, 21 nt, Human
gucagcuccccucggagaaga

SEQ ID NO: 3055037 - RNA, 21 nt, Human
gucauucagauaugauucaaa

SEQ ID NO: 3055038 - RNA, 21 nt, Human
gucccaccuuggcugcaggga

SEQ ID NO: 3055039 - RNA, 12 nt, Human
guccacccagga

SEQ ID NO: 3055040 - RNA, 23 nt, Human
guccacccaggagccccgaggcc

SEQ ID NO: 3055041 - RNA, 16 nt, Human
gucagagccugcaguu

SEQ ID NO: 3055042 - RNA, 15 nt, Human
gucagagccugcagu

SEQ ID NO: 3055043 - RNA, 14 nt, Human
gucagagccugcag

SEQ ID NO: 3055044 - RNA, 19 nt, Human
gucagcuccccucggagaa

SEQ ID NO: 3055045 - RNA, 12 nt, Human
gucacucuggca

SEQ ID NO: 3055046 - RNA, 13 nt, Human
gucacucuggcag

SEQ ID NO: 3055047 - RNA, 14 nt, Human
gucacucuggcagc

SEQ ID NO: 3055048 - RNA, 16 nt, Human
gucacucuggcagcuc

SEQ ID NO: 3055049 - RNA, 17 nt, Human
gucacucuggcagcuca

SEQ ID NO: 3055050 - RNA, 19 nt, Human
gucacucuggcagcucaga

SEQ ID NO: 3055051 - RNA, 17 nt, Human
gucaccccggccaccug

SEQ ID NO: 3055052 - RNA, 18 nt, Human
gucaccccggccaccugc

SEQ ID NO: 3055053 - RNA, 22 nt, Human
gucaccccggccaccugcggug

SEQ ID NO: 3055054 - RNA, 14 nt, Human
guauuuuacuaaua

SEQ ID NO: 3055055 - RNA, 18 nt, Human
guauuuuaaaagaaugau

SEQ ID NO: 3055056 - RNA, 13 nt, Human
guauuuuaaucac

SEQ ID NO: 3055057 - RNA, 20 nt, Human
guauuuuaaaagaaugauua

SEQ ID NO: 3055058 - RNA, 15 nt, Human
gucaccccggccacc

SEQ ID NO: 3055059 - RNA, 15 nt, Human
gucaaugcagccccc

SEQ ID NO: 3055060 - RNA, 15 nt, Human
gucaagugaaaaagg

SEQ ID NO: 3055061 - RNA, 22 nt, Human
gucaauaaaauccauacauuug

SEQ ID NO: 3055062 - RNA, 23 nt, Human
gucaauaaaauccauacauuugu

SEQ ID NO: 3055063 - RNA, 19 nt, Human
guauuuuguuuuugucuua

SEQ ID NO: 3055064 - RNA, 18 nt, Human
gugaauucuugaaggaaa

SEQ ID NO: 3055065 - RNA, 21 nt, Human
gugaaugaugauccuaggcau

SEQ ID NO: 3055066 - RNA, 22 nt, Human
gugaauucuugaaggaaaauga

SEQ ID NO: 3055067 - RNA, 20 nt, Human
gugacaaggauugcuacugu

SEQ ID NO: 3055068 - RNA, 16 nt, Human
gugacaagcucacaga

SEQ ID NO: 3055069 - RNA, 13 nt, Human
gugaacacaucag

SEQ ID NO: 3055070 - RNA, 21 nt, Human
gugaacaaauuuacagagaca

SEQ ID NO: 3055071 - RNA, 14 nt, Human
gugaccucugccug

SEQ ID NO: 3055072 - RNA, 13 nt, Human
gugaccucugccu

SEQ ID NO: 3055073 - RNA, 15 nt, Human
gugacagaggcagcc

SEQ ID NO: 3055074 - RNA, 12 nt, Human
gugaccucugcc

SEQ ID NO: 3055075 - RNA, 14 nt, Human
gugacagaggcagc

SEQ ID NO: 3055076 - RNA, 13 nt, Human
gugacagaggcag

SEQ ID NO: 3055077 - RNA, 12 nt, Human
gugacagaggca

SEQ ID NO: 3055078 - RNA, 20 nt, Human
gugagccacugcaccgggcc

SEQ ID NO: 3055079 - RNA, 15 nt, Human
gugagccacugcacc

SEQ ID NO: 3055080 - RNA, 14 nt, Human
gugagccacugcac

SEQ ID NO: 3055081 - RNA, 18 nt, Human
gugaggagcuugaaaccc

SEQ ID NO: 3055082 - RNA, 17 nt, Human
gugaggaugaaaaaaua

SEQ ID NO: 3055083 - RNA, 19 nt, Human
gugagccgagaucacgcca

SEQ ID NO: 3055084 - RNA, 19 nt, Human
gugauauaaguguguguuu

SEQ ID NO: 3055085 - RNA, 22 nt, Human
gugauccacccaccucagccuc

SEQ ID NO: 3055086 - RNA, 17 nt, Human
gugaguugauagcacag

SEQ ID NO: 3055087 - RNA, 15 nt, Human
gugauacaaugcugu

SEQ ID NO: 3055088 - RNA, 17 nt, Human
gugauacaaugcugugc

SEQ ID NO: 3055089 - RNA, 21 nt, Human
gugcgaucuggguucacugca

SEQ ID NO: 3055090 - RNA, 16 nt, Human
gugccaugugccaggu

SEQ ID NO: 3055091 - RNA, 14 nt, Human
gugccaugugccag

SEQ ID NO: 3055092 - RNA, 14 nt, Human
gugcgccuacagga

SEQ ID NO: 3055093 - RNA, 14 nt, Human
gugcggccuuuggc

SEQ ID NO: 3055094 - RNA, 13 nt, Human
gugcguccugucg

SEQ ID NO: 3055095 - RNA, 13 nt, Human
gugcgggguacac

SEQ ID NO: 3055096 - RNA, 22 nt, Human
gugcacuaauguguaagacaaa

SEQ ID NO: 3055097 - RNA, 18 nt, Human
gugauuuuuguaauuuuu

SEQ ID NO: 3055098 - RNA, 13 nt, Human
gugauuuuuguaa

SEQ ID NO: 3055099 - RNA, 24 nt, Human
gugauccacccaccucagccuccc

SEQ ID NO: 3055100 - RNA, 23 nt, Human
gugauccacccaccucagccucc

SEQ ID NO: 3055101 - RNA, 23 nt, Human
gugcaguggugcgaucuggguuc

SEQ ID NO: 3055102 - RNA, 20 nt, Human
gugcaguggugcgaucuggg

SEQ ID NO: 3055103 - RNA, 22 nt, Human
gugcauaccacuuuuguucuug

SEQ ID NO: 3055104 - RNA, 21 nt, Human
gugcauaccacuuuuguucuu

SEQ ID NO: 3055105 - RNA, 17 nt, Human
gucucuggaauuugaaa

SEQ ID NO: 3055106 - RNA, 21 nt, Human
gucucuggauuauauuaugaa

SEQ ID NO: 3055107 - RNA, 13 nt, Human
gucugacuguuuc

SEQ ID NO: 3055108 - RNA, 22 nt, Human
gucucacucugucgcccagucu

SEQ ID NO: 3055109 - RNA, 19 nt, Human
gucucacucugucgcccag

SEQ ID NO: 3055110 - RNA, 18 nt, Human
gucucacucugucgccca

SEQ ID NO: 3055111 - RNA, 16 nt, Human
gucucacucugucgcc

SEQ ID NO: 3055112 - RNA, 15 nt, Human
gucucacucugucgc

SEQ ID NO: 3055113 - RNA, 18 nt, Human
gucgucaaagcugaaaug

SEQ ID NO: 3055114 - RNA, 21 nt, Human
gucuaagauaguaacaaugaa

SEQ ID NO: 3055115 - RNA, 13 nt, Human
gucuaaauuugaa

SEQ ID NO: 3055116 - RNA, 19 nt, Human
gucucacuauguugcccag

SEQ ID NO: 3055117 - RNA, 11 nt, Human
gucucacucug

SEQ ID NO: 3055118 - RNA, 18 nt, Human
gucucacuauguugccca

SEQ ID NO: 3055119 - RNA, 15 nt, Human
gucccugccaaugga

SEQ ID NO: 3055120 - RNA, 11 nt, Human
gucccugccaa

SEQ ID NO: 3055121 - RNA, 14 nt, Human
gucccugccaaugg

SEQ ID NO: 3055122 - RNA, 21 nt, Human
guccuuaccagcagagcaccu

SEQ ID NO: 3055123 - RNA, 18 nt, Human
guccuuaccagcagagca

SEQ ID NO: 3055124 - RNA, 19 nt, Human
guccuuaccagcagagcac

SEQ ID NO: 3055125 - RNA, 16 nt, Human
gucgggcaugacacga

SEQ ID NO: 3055126 - RNA, 23 nt, Human
gucggguuuuauuguuuaaaauc

SEQ ID NO: 3055127 - RNA, 16 nt, Human
gucggagcccugucuc

SEQ ID NO: 3055128 - RNA, 15 nt, Human
gucggccccaccagu

SEQ ID NO: 3055129 - RNA, 17 nt, Human
gucggccccaccagugc

SEQ ID NO: 3055130 - RNA, 19 nt, Human
gucggccccaccagugccu

SEQ ID NO: 3055131 - RNA, 22 nt, Human
gucggccccaccagugccucuc

SEQ ID NO: 3055132 - RNA, 21 nt, Human
gucggaaaacaugcuacacac

SEQ ID NO: 3055133 - RNA, 12 nt, Human
gucggagcccug

SEQ ID NO: 3055134 - RNA, 16 nt, Human
gucuuuuuucacuaca

SEQ ID NO: 3055135 - RNA, 21 nt, Human
gucuugcaauggcagccuugg

SEQ ID NO: 3055136 - RNA, 20 nt, Human
gucuugcaauggcagccuug

SEQ ID NO: 3055137 - RNA, 23 nt, Human
gucuugcaauggcagccuuggca

SEQ ID NO: 3055138 - RNA, 19 nt, Human
gucuugcaauggcagccuu

SEQ ID NO: 3055139 - RNA, 18 nt, Human
gucuugcaauggcagccu

SEQ ID NO: 3055140 - RNA, 17 nt, Human
gucuugcaauggcagcc

SEQ ID NO: 3055141 - RNA, 16 nt, Human
gucuugcaauggcagc

SEQ ID NO: 3055142 - RNA, 20 nt, Human
gucuugaacuccuggccuca

SEQ ID NO: 3055143 - RNA, 18 nt, Human
gucuugaacuccuggccu

SEQ ID NO: 3055144 - RNA, 21 nt, Human
gucuugaacuccuggccucaa

SEQ ID NO: 3055145 - RNA, 17 nt, Human
gucuugaacuccuggcc

SEQ ID NO: 3055146 - RNA, 16 nt, Human
gucuugaacuccuggc

SEQ ID NO: 3055147 - RNA, 21 nt, Human
gucuuaaaaaguggaaaaaua

SEQ ID NO: 3055148 - RNA, 17 nt, Human
gucuguucuuuccaaag

SEQ ID NO: 3055149 - RNA, 14 nt, Human
gucuguucuuucca

SEQ ID NO: 3055150 - RNA, 18 nt, Human
gucugugccauuuuguau

SEQ ID NO: 3055151 - RNA, 22 nt, Human
gucugugagaugcuagaacucc

SEQ ID NO: 3055152 - RNA, 23 nt, Human
gucugugagaugcuagaacuccc

SEQ ID NO: 3055153 - RNA, 15 nt, Human
gucugugagaugcua

SEQ ID NO: 3055154 - RNA, 16 nt, Human
gucugugagaugcuag

SEQ ID NO: 3055155 - RNA, 17 nt, Human
gucugugagaugcuaga

SEQ ID NO: 3055156 - RNA, 21 nt, Human
gucugugagaugcuagaacuc

SEQ ID NO: 3055157 - RNA, 13 nt, Human
gccugguggcagc

SEQ ID NO: 3055158 - RNA, 21 nt, Human
gccugguggcagcugcggucc

SEQ ID NO: 3055159 - RNA, 19 nt, Human
gccugguggcagcugcggu

SEQ ID NO: 3055160 - RNA, 18 nt, Human
gccugguggcagcugcgg

SEQ ID NO: 3055161 - RNA, 15 nt, Human
gccugcaauuucaua

SEQ ID NO: 3055162 - RNA, 21 nt, Human
gccugggggcugggcagagga

SEQ ID NO: 3055163 - RNA, 22 nt, Human
gccugggggcugggcagaggaa

SEQ ID NO: 3055164 - RNA, 13 nt, Human
gccuguuuaagag

SEQ ID NO: 3055165 - RNA, 12 nt, Human
gccuguuuaaga

SEQ ID NO: 3055166 - RNA, 21 nt, Human
gccuguugggccaggagccuc

SEQ ID NO: 3055167 - RNA, 16 nt, Human
gccuuacacaaugguu

SEQ ID NO: 3055168 - RNA, 20 nt, Human
gccuuacacaaugguuuucu

SEQ ID NO: 3055169 - RNA, 18 nt, Human
gccuuacccucauguucu

SEQ ID NO: 3055170 - RNA, 21 nt, Human
gccuuacacaaugguuuucuu

SEQ ID NO: 3055171 - RNA, 18 nt, Human
gccuuagaagucacacag

SEQ ID NO: 3055172 - RNA, 17 nt, Human
gccuuagaagucacaca

SEQ ID NO: 3055173 - RNA, 19 nt, Human
gccuuagaagucacacagu

SEQ ID NO: 3055174 - RNA, 10 nt, Human
gccuuaugga

SEQ ID NO: 3055175 - RNA, 14 nt, Human
gccuuauggaacac

SEQ ID NO: 3055176 - RNA, 13 nt, Human
gccuuuggcuuca

SEQ ID NO: 3055177 - RNA, 23 nt, Human
gcgacaaugcaaaccaucauuga

SEQ ID NO: 3055178 - RNA, 16 nt, Human
gccuuauggaacacuc

SEQ ID NO: 3055179 - RNA, 18 nt, Human
gccuuauggaacacucug

SEQ ID NO: 3055180 - RNA, 19 nt, Human
gccuuauggaacacucuga

SEQ ID NO: 3055181 - RNA, 20 nt, Human
gccuuauggaacacucugag

SEQ ID NO: 3055182 - RNA, 12 nt, Human
gccuuccagggg

SEQ ID NO: 3055183 - RNA, 15 nt, Human
gccuuccaggggugg

SEQ ID NO: 3055184 - RNA, 16 nt, Human
gccuuccagggguggg

SEQ ID NO: 3055185 - RNA, 13 nt, Human
gcuaagagggagg

SEQ ID NO: 3055186 - RNA, 14 nt, Human
gcuacacaggggaa

SEQ ID NO: 3055187 - RNA, 20 nt, Human
gcuacacacugcauguuugu

SEQ ID NO: 3055188 - RNA, 13 nt, Human
gcuacacacugca

SEQ ID NO: 3055189 - RNA, 20 nt, Human
gcuaagagggagggagggcu

SEQ ID NO: 3055190 - RNA, 15 nt, Human
gcuaggaacacuccu

SEQ ID NO: 3055191 - RNA, 13 nt, Human
gcuauaggugcua

SEQ ID NO: 3055192 - RNA, 16 nt, Human
gcuaccuuuguauucu

SEQ ID NO: 3055193 - RNA, 18 nt, Human
gcuagaacucccuuucaa

SEQ ID NO: 3055194 - RNA, 19 nt, Human
gcuagaacucccuuucaac

SEQ ID NO: 3055195 - RNA, 13 nt, Human
gcggacagccacg

SEQ ID NO: 3055196 - RNA, 11 nt, Human
gcggacagcca

SEQ ID NO: 3055197 - RNA, 15 nt, Human
gcgccuacaggagug

SEQ ID NO: 3055198 - RNA, 12 nt, Human
gcgacagugaga

SEQ ID NO: 3055199 - RNA, 19 nt, Human
gcgucucauacucaccuca

SEQ ID NO: 3055200 - RNA, 15 nt, Human
gcggacagccacggc

SEQ ID NO: 3055201 - RNA, 17 nt, Human
gccucccgaguagcugg

SEQ ID NO: 3055202 - RNA, 19 nt, Human
gccucccgaguagcuggga

SEQ ID NO: 3055203 - RNA, 18 nt, Human
gccucccgaguagcuggg

SEQ ID NO: 3055204 - RNA, 16 nt, Human
gccucccaacucaccc

SEQ ID NO: 3055205 - RNA, 17 nt, Human
gccucccaacucacccc

SEQ ID NO: 3055206 - RNA, 18 nt, Human
gccucccaacucacccca

SEQ ID NO: 3055207 - RNA, 19 nt, Human
gccucccaacucaccccag

SEQ ID NO: 3055208 - RNA, 14 nt, Human
gccucccaucaccc

SEQ ID NO: 3055209 - RNA, 16 nt, Human
gccucccaucacccgc

SEQ ID NO: 3055210 - RNA, 13 nt, Human
gccucccaacuca

SEQ ID NO: 3055211 - RNA, 19 nt, Human
gccucccaaagugcuggga

SEQ ID NO: 3055212 - RNA, 18 nt, Human
gccucccaaagugcuggg

SEQ ID NO: 3055213 - RNA, 16 nt, Human
gccucagcauccuggc

SEQ ID NO: 3055214 - RNA, 15 nt, Human
gccucagcauccugg

SEQ ID NO: 3055215 - RNA, 18 nt, Human
gccucacaguccuuacca

SEQ ID NO: 3055216 - RNA, 13 nt, Human
gccucucucaggc

SEQ ID NO: 3055217 - RNA, 14 nt, Human
gccucucucaggcc

SEQ ID NO: 3055218 - RNA, 16 nt, Human
gccucucucaggccaa

SEQ ID NO: 3055219 - RNA, 16 nt, Human
gccucugacacacagc

SEQ ID NO: 3055220 - RNA, 18 nt, Human
gccucugacacacagcuc

SEQ ID NO: 3055221 - RNA, 17 nt, Human
gccucugacacacagcu

SEQ ID NO: 3055222 - RNA, 14 nt, Human
gccucugcacuccc

SEQ ID NO: 3055223 - RNA, 21 nt, Human
gccucugacacacagcucugu

SEQ ID NO: 3055224 - RNA, 20 nt, Human
gccucugacacacagcucug

SEQ ID NO: 3055225 - RNA, 19 nt, Human
gccucugacacacagcucu

SEQ ID NO: 3055226 - RNA, 13 nt, Human
gccucugccucug

SEQ ID NO: 3055227 - RNA, 12 nt, Human
gccucugccucu

SEQ ID NO: 3055228 - RNA, 13 nt, Human
gccugcaagggag

SEQ ID NO: 3055229 - RNA, 15 nt, Human
gccugcaagggagug

SEQ ID NO: 3055230 - RNA, 22 nt, Human
gccgugugugugcguccugucg

SEQ ID NO: 3055231 - RNA, 13 nt, Human
gccucacaguccu

SEQ ID NO: 3055232 - RNA, 17 nt, Human
gccucacaguccuuacc

SEQ ID NO: 3055233 - RNA, 17 nt, Human
gccucaaccuccugggc

SEQ ID NO: 3055234 - RNA, 19 nt, Human
gccucaaccuccugggcua

SEQ ID NO: 3055235 - RNA, 18 nt, Human
gccucaaccuccugggcu

SEQ ID NO: 3055236 - RNA, 15 nt, Human
gccgucuaccugagg

SEQ ID NO: 3055237 - RNA, 16 nt, Human
gccgucuaccugaggg

SEQ ID NO: 3055238 - RNA, 17 nt, Human
gccgucuaccugagggg

SEQ ID NO: 3055239 - RNA, 20 nt, Human
gccguguaaccauggaccca

SEQ ID NO: 3055240 - RNA, 23 nt, Human
gccguggugauuuagcaggaagc

SEQ ID NO: 3055241 - RNA, 21 nt, Human
gccgggcgcgguggcucacgc

SEQ ID NO: 3055242 - RNA, 20 nt, Human
gccgggcgugguggugagug

SEQ ID NO: 3055243 - RNA, 18 nt, Human
gccgggaccccgagccug

SEQ ID NO: 3055244 - RNA, 23 nt, Human
gccgggaccccgagccuggcucc

SEQ ID NO: 3055245 - RNA, 19 nt, Human
gccgggaccccgagccugg

SEQ ID NO: 3055246 - RNA, 11 nt, Human
gccgcagcccu

SEQ ID NO: 3055247 - RNA, 12 nt, Human
gccgcagcccug

SEQ ID NO: 3055248 - RNA, 22 nt, Human
gccgagaucacgccacugcacu

SEQ ID NO: 3055249 - RNA, 21 nt, Human
gccgagaucacgccacugcac

SEQ ID NO: 3055250 - RNA, 20 nt, Human
gccgagaucacgccacugca

SEQ ID NO: 3055251 - RNA, 14 nt, Human
gcccuucucuccag

SEQ ID NO: 3055252 - RNA, 16 nt, Human
gcccuucucuccagcc

SEQ ID NO: 3055253 - RNA, 17 nt, Human
gcccuucucuccagccc

SEQ ID NO: 3055254 - RNA, 18 nt, Human
gcccuucucuccagcccc

SEQ ID NO: 3055255 - RNA, 16 nt, Human
gcccuugucggcccca

SEQ ID NO: 3055256 - RNA, 21 nt, Human
gcccuugucggccccaccagu

SEQ ID NO: 3055257 - RNA, 14 nt, Human
gccauccuggccca

SEQ ID NO: 3055258 - RNA, 20 nt, Human
gccauccuggcccagggcau

SEQ ID NO: 3055259 - RNA, 18 nt, Human
gccauccuggcccagggc

SEQ ID NO: 3055260 - RNA, 19 nt, Human
gccauccuggcccagggca

SEQ ID NO: 3055261 - RNA, 14 nt, Human
gccaugcuccuggc

SEQ ID NO: 3055262 - RNA, 20 nt, Human
gccaugaggaacaaggcaag

SEQ ID NO: 3055263 - RNA, 17 nt, Human
gccaggcugggucgccc

SEQ ID NO: 3055264 - RNA, 23 nt, Human
gccaggcugggucgcccuggacu

SEQ ID NO: 3055265 - RNA, 13 nt, Human
gccaggcuggucu

SEQ ID NO: 3055266 - RNA, 12 nt, Human
gccaguaaaugg

SEQ ID NO: 3055267 - RNA, 23 nt, Human
gccaguaaaugggggugcauuug

SEQ ID NO: 3055268 - RNA, 21 nt, Human
gccagucaccccggccaccug

SEQ ID NO: 3055269 - RNA, 14 nt, Human
gcccacuucugcca

SEQ ID NO: 3055270 - RNA, 16 nt, Human
gcccaccuuggcucaa

SEQ ID NO: 3055271 - RNA, 15 nt, Human
gcccaccuuggcuca

SEQ ID NO: 3055272 - RNA, 13 nt, Human
gcccaccuuggcu

SEQ ID NO: 3055273 - RNA, 17 nt, Human
gcccaccuggccucugc

SEQ ID NO: 3055274 - RNA, 20 nt, Human
gcccaccuggccucugcacu

SEQ ID NO: 3055275 - RNA, 21 nt, Human
gcccaccuggccucugcacuc

SEQ ID NO: 3055276 - RNA, 24 nt, Human
gcccaccuggccucugcacucccc

SEQ ID NO: 3055277 - RNA, 15 nt, Human
gcccaccuggccucu

SEQ ID NO: 3055278 - RNA, 16 nt, Human
gcccaccuggccucug

SEQ ID NO: 3055279 - RNA, 16 nt, Human
gccaugggccuccugu

SEQ ID NO: 3055280 - RNA, 15 nt, Human
gccaugggccuccug

SEQ ID NO: 3055281 - RNA, 19 nt, Human
gccaugggcacugugggua

SEQ ID NO: 3055282 - RNA, 16 nt, Human
gcccaaggccuucccc

SEQ ID NO: 3055283 - RNA, 13 nt, Human
gcccaaggccuuc

SEQ ID NO: 3055284 - RNA, 24 nt, Human
gccaaggccaaaggaagcacaugc

SEQ ID NO: 3055285 - RNA, 19 nt, Human
gccaaggccaaaggaagca

SEQ ID NO: 3055286 - RNA, 20 nt, Human
gccaaggccaaaggaagcac

SEQ ID NO: 3055287 - RNA, 21 nt, Human
gccagagacacaagccuucgg

SEQ ID NO: 3055288 - RNA, 22 nt, Human
gccagagacacaagccuucggc

SEQ ID NO: 3055289 - RNA, 19 nt, Human
gccacugcaccgggccaca

SEQ ID NO: 3055290 - RNA, 21 nt, Human
gccacugcaccgggccacaga

SEQ ID NO: 3055291 - RNA, 20 nt, Human
gccacugcaccgggccacag

SEQ ID NO: 3055292 - RNA, 14 nt, Human
gccagaugcaccag

SEQ ID NO: 3055293 - RNA, 24 nt, Human
gccagauucuuuccugaggcuggg

SEQ ID NO: 3055294 - RNA, 13 nt, Human
gccagauuucacu

SEQ ID NO: 3055295 - RNA, 20 nt, Human
gccagauucuuuccugaggc

SEQ ID NO: 3055296 - RNA, 15 nt, Human
gccagaugcaccagc

SEQ ID NO: 3055297 - RNA, 22 nt, Human
gccagccgagauagccaaggcc

SEQ ID NO: 3055298 - RNA, 21 nt, Human
gccagccgagauagccaaggc

SEQ ID NO: 3055299 - RNA, 19 nt, Human
gccagauucuuuccugagg

SEQ ID NO: 3055300 - RNA, 20 nt, Human
gccagcugcuugggcuucau

SEQ ID NO: 3055301 - RNA, 12 nt, Human
gccaggaagcca

SEQ ID NO: 3055302 - RNA, 13 nt, Human
gccaggaagccag

SEQ ID NO: 3055303 - RNA, 14 nt, Human
gccaggaagccagc

SEQ ID NO: 3055304 - RNA, 17 nt, Human
gccagcugcuugggcuu

SEQ ID NO: 3055305 - RNA, 18 nt, Human
gccagcugcuugggcuuc

SEQ ID NO: 3055306 - RNA, 16 nt, Human
gccagcugcuugggcu

SEQ ID NO: 3055307 - RNA, 19 nt, Human
gccaggagccuccugcccu

SEQ ID NO: 3055308 - RNA, 20 nt, Human
gccaggagccuccugcccuu

SEQ ID NO: 3055309 - RNA, 14 nt, Human
gccaggagccuccu

SEQ ID NO: 3055310 - RNA, 16 nt, Human
gccaggagccuccugc

SEQ ID NO: 3055311 - RNA, 20 nt, Human
gccaggaagccagcaggcuc

SEQ ID NO: 3055312 - RNA, 11 nt, Human
gccaggaagcc

SEQ ID NO: 3055313 - RNA, 20 nt, Human
gccccuucugacccaugcug

SEQ ID NO: 3055314 - RNA, 16 nt, Human
gccccucagggucccu

SEQ ID NO: 3055315 - RNA, 18 nt, Human
gccccucccacagcgcug

SEQ ID NO: 3055316 - RNA, 14 nt, Human
gccccucagggucc

SEQ ID NO: 3055317 - RNA, 18 nt, Human
gccccgaggccuucucug

SEQ ID NO: 3055318 - RNA, 23 nt, Human
gccccucaacucuccuccagagu

SEQ ID NO: 3055319 - RNA, 15 nt, Human
gccccgaggccuucu

SEQ ID NO: 3055320 - RNA, 17 nt, Human
gcccccuguggaugcug

SEQ ID NO: 3055321 - RNA, 13 nt, Human
gcccccuguggau

SEQ ID NO: 3055322 - RNA, 19 nt, Human
gcccuccaagaccuucucc

SEQ ID NO: 3055323 - RNA, 21 nt, Human
gcccuccaagaccuucuccuu

SEQ ID NO: 3055324 - RNA, 22 nt, Human
gcccuccaagaccuucuccuuc

SEQ ID NO: 3055325 - RNA, 23 nt, Human
gcccuccaagaccuucuccuuca

SEQ ID NO: 3055326 - RNA, 20 nt, Human
gcccuccagagccccacagc

SEQ ID NO: 3055327 - RNA, 22 nt, Human
gcccuccagagccccacagccc

SEQ ID NO: 3055328 - RNA, 14 nt, Human
gcccuccagagccc

SEQ ID NO: 3055329 - RNA, 16 nt, Human
gcccuccagagcccca

SEQ ID NO: 3055330 - RNA, 18 nt, Human
gcccuccagagccccaca

SEQ ID NO: 3055331 - RNA, 12 nt, Human
gcccuccagagc

SEQ ID NO: 3055332 - RNA, 15 nt, Human
gcccugcagagggca

SEQ ID NO: 3055333 - RNA, 14 nt, Human
gcccugcagagggc

SEQ ID NO: 3055334 - RNA, 13 nt, Human
gcccugcagaggg

SEQ ID NO: 3055335 - RNA, 13 nt, Human
gcccucugcccac

SEQ ID NO: 3055336 - RNA, 16 nt, Human
gcccucugcccacucc

SEQ ID NO: 3055337 - RNA, 18 nt, Human
gcccucugcccacucccu

SEQ ID NO: 3055338 - RNA, 19 nt, Human
gcccucugcccacucccug

SEQ ID NO: 3055339 - RNA, 12 nt, Human
gccccagugccc

SEQ ID NO: 3055340 - RNA, 18 nt, Human
gccccaucccaaacccuu

SEQ ID NO: 3055341 - RNA, 14 nt, Human
gccccagugcccac

SEQ ID NO: 3055342 - RNA, 13 nt, Human
gccccagugccca

SEQ ID NO: 3055343 - RNA, 21 nt, Human
gccccagugcccacaggauca

SEQ ID NO: 3055344 - RNA, 13 nt, Human
gccccauccucug

SEQ ID NO: 3055345 - RNA, 14 nt, Human
gccccauccucugu

SEQ ID NO: 3055346 - RNA, 22 nt, Human
gccccauccucuguacagagcc

SEQ ID NO: 3055347 - RNA, 14 nt, Human
gccccauucugccu

SEQ ID NO: 3055348 - RNA, 12 nt, Human
gcccaggcuggc

SEQ ID NO: 3055349 - RNA, 14 nt, Human
gcccagggcaucug

SEQ ID NO: 3055350 - RNA, 15 nt, Human
gcccagggcaucugg

SEQ ID NO: 3055351 - RNA, 18 nt, Human
gcccagggcaucugggag

SEQ ID NO: 3055352 - RNA, 22 nt, Human
gcccaggccccugccacccugg

SEQ ID NO: 3055353 - RNA, 13 nt, Human
gcccaggccuccu

SEQ ID NO: 3055354 - RNA, 23 nt, Human
gcccaggccccugccacccuggg

SEQ ID NO: 3055355 - RNA, 21 nt, Human
gcccagagaggguggugaccu

SEQ ID NO: 3055356 - RNA, 15 nt, Human
gcccagagagggugg

SEQ ID NO: 3055357 - RNA, 22 nt, Human
gcccaguuggguggaugccugg

SEQ ID NO: 3055358 - RNA, 20 nt, Human
gcccaggguggccacaccuc

SEQ ID NO: 3055359 - RNA, 15 nt, Human
gcccaggguggccac

SEQ ID NO: 3055360 - RNA, 16 nt, Human
gcaucugaaaauugau

SEQ ID NO: 3055361 - RNA, 12 nt, Human
gcaucagcugcu

SEQ ID NO: 3055362 - RNA, 18 nt, Human
gcaugcgggcuuccuccu

SEQ ID NO: 3055363 - RNA, 22 nt, Human
gcauguucucugaggacacuaa

SEQ ID NO: 3055364 - RNA, 13 nt, Human
gcauuauauuuau

SEQ ID NO: 3055365 - RNA, 21 nt, Human
gcauguucucugaggacacua

SEQ ID NO: 3055366 - RNA, 15 nt, Human
gcauguucucugagg

SEQ ID NO: 3055367 - RNA, 14 nt, Human
gcauguucucugag

SEQ ID NO: 3055368 - RNA, 17 nt, Human
gcauuaucuagauacug

SEQ ID NO: 3055369 - RNA, 19 nt, Human
gcauucaaauguauuacag

SEQ ID NO: 3055370 - RNA, 16 nt, Human
gcauuuguuugaacug

SEQ ID NO: 3055371 - RNA, 16 nt, Human
gcauuuguguugaaga

SEQ ID NO: 3055372 - RNA, 14 nt, Human
gcauuugcugaaua

SEQ ID NO: 3055373 - RNA, 13 nt, Human
gcauuugcugaau

SEQ ID NO: 3055374 - RNA, 21 nt, Human
gcauuugaggucuguucuuuc

SEQ ID NO: 3055375 - RNA, 14 nt, Human
gccaaacucaccug

SEQ ID NO: 3055376 - RNA, 16 nt, Human
gccaaacucaccugcc

SEQ ID NO: 3055377 - RNA, 18 nt, Human
gcauuuguuugaacugau

SEQ ID NO: 3055378 - RNA, 22 nt, Human
gccaaagcuaggccuggccaga

SEQ ID NO: 3055379 - RNA, 16 nt, Human
gccaaagcuaggccug

SEQ ID NO: 3055380 - RNA, 16 nt, Human
gccaaagccuccucca

SEQ ID NO: 3055381 - RNA, 19 nt, Human
gccaaagccuccuccagcc

SEQ ID NO: 3055382 - RNA, 20 nt, Human
gccaaagccaaagcuaggcc

SEQ ID NO: 3055383 - RNA, 13 nt, Human
gccaaagccaaag

SEQ ID NO: 3055384 - RNA, 14 nt, Human
gcauauuuuucaca

SEQ ID NO: 3055385 - RNA, 15 nt, Human
gcauauuuuucacau

SEQ ID NO: 3055386 - RNA, 16 nt, Human
gcauauuuuucacaua

SEQ ID NO: 3055387 - RNA, 19 nt, Human
gcauauuuuucacauaucu

SEQ ID NO: 3055388 - RNA, 20 nt, Human
gcauauuuuucacauaucua

SEQ ID NO: 3055389 - RNA, 19 nt, Human
gcauauuuauaaaaauaaa

SEQ ID NO: 3055390 - RNA, 17 nt, Human
gcauagguuuaauaauu

SEQ ID NO: 3055391 - RNA, 13 nt, Human
gcauagaaguaaa

SEQ ID NO: 3055392 - RNA, 14 nt, Human
gcaguucugaagaa

SEQ ID NO: 3055393 - RNA, 17 nt, Human
gcaguucugaagaagau

SEQ ID NO: 3055394 - RNA, 17 nt, Human
gcaguuauuaacacuaa

SEQ ID NO: 3055395 - RNA, 15 nt, Human
gcaguucugaagaag

SEQ ID NO: 3055396 - RNA, 15 nt, Human
gcagugggagcugcc

SEQ ID NO: 3055397 - RNA, 14 nt, Human
gcagugggagcugc

SEQ ID NO: 3055398 - RNA, 12 nt, Human
gcagugggagcu

SEQ ID NO: 3055399 - RNA, 13 nt, Human
gcagugggagcug

SEQ ID NO: 3055400 - RNA, 23 nt, Human
gcaguggugguuuucuguucuuu

SEQ ID NO: 3055401 - RNA, 22 nt, Human
gcaguggugguuuucuguucuu

SEQ ID NO: 3055402 - RNA, 20 nt, Human
gcaggucuugaacuccuggc

SEQ ID NO: 3055403 - RNA, 19 nt, Human
gcaggucuugaacuccugg

SEQ ID NO: 3055404 - RNA, 22 nt, Human
gcagguccaggguuugaguuca

SEQ ID NO: 3055405 - RNA, 15 nt, Human
gcagugcaugcuguc

SEQ ID NO: 3055406 - RNA, 16 nt, Human
gcagugcaugcugucc

SEQ ID NO: 3055407 - RNA, 14 nt, Human
gcagggcucagcgg

SEQ ID NO: 3055408 - RNA, 22 nt, Human
gcaggggaggguagagcggaga

SEQ ID NO: 3055409 - RNA, 18 nt, Human
gcagggucucacucuguc

SEQ ID NO: 3055410 - RNA, 17 nt, Human
gcagggucucacucugu

SEQ ID NO: 3055411 - RNA, 15 nt, Human
gcaggcagccaggcc

SEQ ID NO: 3055412 - RNA, 16 nt, Human
gcaggcagccaggcca

SEQ ID NO: 3055413 - RNA, 21 nt, Human
gcagggcucagcggggacagc

SEQ ID NO: 3055414 - RNA, 19 nt, Human
gcagggcucagcggggaca

SEQ ID NO: 3055415 - RNA, 16 nt, Human
gcacugcuuccaguga

SEQ ID NO: 3055416 - RNA, 18 nt, Human
gcacugcuuccagugagg

SEQ ID NO: 3055417 - RNA, 20 nt, Human
gcacugcuuccagugaggcu

SEQ ID NO: 3055418 - RNA, 12 nt, Human
gcagacaggacc

SEQ ID NO: 3055419 - RNA, 13 nt, Human
gcagacaggacca

SEQ ID NO: 3055420 - RNA, 15 nt, Human
gcagacaggaccagg

SEQ ID NO: 3055421 - RNA, 19 nt, Human
gcagacaggcaagcaccuc

SEQ ID NO: 3055422 - RNA, 23 nt, Human
gcagacaggcaagcaccuccugc

SEQ ID NO: 3055423 - RNA, 12 nt, Human
gcacgauuucug

SEQ ID NO: 3055424 - RNA, 18 nt, Human
gcaccuuagacagucccu

SEQ ID NO: 3055425 - RNA, 21 nt, Human
gcaccuggaauauauaaccag

SEQ ID NO: 3055426 - RNA, 18 nt, Human
gcaccuggaauauauaac

SEQ ID NO: 3055427 - RNA, 15 nt, Human
gcacccucaggcagg

SEQ ID NO: 3055428 - RNA, 14 nt, Human
gcaccuuagacagu

SEQ ID NO: 3055429 - RNA, 17 nt, Human
gcaccuuagacaguccc

SEQ ID NO: 3055430 - RNA, 22 nt, Human
gcaccuggaauauauaaccagu

SEQ ID NO: 3055431 - RNA, 19 nt, Human
gcacccggccccugcuggu

SEQ ID NO: 3055432 - RNA, 18 nt, Human
gcacccggccccugcugg

SEQ ID NO: 3055433 - RNA, 22 nt, Human
gcacccaccaucaugucuggcu

SEQ ID NO: 3055434 - RNA, 16 nt, Human
gcaccagcagccugga

SEQ ID NO: 3055435 - RNA, 21 nt, Human
gcaccacugcacuccagccug

SEQ ID NO: 3055436 - RNA, 22 nt, Human
gcaccacugcacuccagccugg

SEQ ID NO: 3055437 - RNA, 15 nt, Human
gcaccagcagccugg

SEQ ID NO: 3055438 - RNA, 14 nt, Human
gcaccagcagccug

SEQ ID NO: 3055439 - RNA, 13 nt, Human
gcaauggcagccu

SEQ ID NO: 3055440 - RNA, 12 nt, Human
gcaauggcagcc

SEQ ID NO: 3055441 - RNA, 20 nt, Human
gcaccacugcacuccagccu

SEQ ID NO: 3055442 - RNA, 14 nt, Human
gcaauggcagccuu

SEQ ID NO: 3055443 - RNA, 14 nt, Human
gcagcccugcagag

SEQ ID NO: 3055444 - RNA, 15 nt, Human
gcagcccugcagagg

SEQ ID NO: 3055445 - RNA, 16 nt, Human
gcagcccugcagaggg

SEQ ID NO: 3055446 - RNA, 17 nt, Human
gcagcccugcagagggc

SEQ ID NO: 3055447 - RNA, 15 nt, Human
gcagcucaccucucc

SEQ ID NO: 3055448 - RNA, 15 nt, Human
gcagccuuggcaaac

SEQ ID NO: 3055449 - RNA, 14 nt, Human
gcagcucaccucuc

SEQ ID NO: 3055450 - RNA, 23 nt, Human
gcaggaggaucacuugaguccag

SEQ ID NO: 3055451 - RNA, 20 nt, Human
gcaggaggaucacuugaguc

SEQ ID NO: 3055452 - RNA, 13 nt, Human
gcaggcagccagg

SEQ ID NO: 3055453 - RNA, 14 nt, Human
gcaggcagccaggc

SEQ ID NO: 3055454 - RNA, 12 nt, Human
gcaggcagccag

SEQ ID NO: 3055455 - RNA, 20 nt, Human
gcagaguugaagacagagcu

SEQ ID NO: 3055456 - RNA, 18 nt, Human
gcagauaaacaguaguga

SEQ ID NO: 3055457 - RNA, 21 nt, Human
gcagaguugaagacagagcua

SEQ ID NO: 3055458 - RNA, 17 nt, Human
gcagacaguuaagagaa

SEQ ID NO: 3055459 - RNA, 20 nt, Human
gcagaccauuggggcuccca

SEQ ID NO: 3055460 - RNA, 21 nt, Human
gcagaccauuggggcucccag

SEQ ID NO: 3055461 - RNA, 22 nt, Human
gcagaccauuggggcucccagc

SEQ ID NO: 3055462 - RNA, 23 nt, Human
gcagaccauuggggcucccagcc

SEQ ID NO: 3055463 - RNA, 12 nt, Human
gcagcaauaaag

SEQ ID NO: 3055464 - RNA, 22 nt, Human
gcagauacaggaaaagcugcug

SEQ ID NO: 3055465 - RNA, 24 nt, Human
gcagccccauucugccugcccagg

SEQ ID NO: 3055466 - RNA, 21 nt, Human
gcagccccauucugccugccc

SEQ ID NO: 3055467 - RNA, 19 nt, Human
gcagccccauucugccugc

SEQ ID NO: 3055468 - RNA, 18 nt, Human
gcagccccauucugccug

SEQ ID NO: 3055469 - RNA, 23 nt, Human
gcagcaauaaagcagcguuucua

SEQ ID NO: 3055470 - RNA, 16 nt, Human
gcagcaauaaagcagc

SEQ ID NO: 3055471 - RNA, 17 nt, Human
gcagccccauucugccu

SEQ ID NO: 3055472 - RNA, 20 nt, Human
gcagccccuguucuggcaga

SEQ ID NO: 3055473 - RNA, 21 nt, Human
gcagccccuguucuggcagag

SEQ ID NO: 3055474 - RNA, 20 nt, Human
gcagccccgugggguuccuc

SEQ ID NO: 3055475 - RNA, 13 nt, Human
gcagcccugcaga

SEQ ID NO: 3055476 - RNA, 18 nt, Human
gauucccaagcucugcuc

SEQ ID NO: 3055477 - RNA, 19 nt, Human
gauucauauuuacuucuua

SEQ ID NO: 3055478 - RNA, 18 nt, Human
gauucauauuuacuucuu

SEQ ID NO: 3055479 - RNA, 17 nt, Human
gauucauauuuacuucu

SEQ ID NO: 3055480 - RNA, 23 nt, Human
gauggggcugcaccggcuggccu

SEQ ID NO: 3055481 - RNA, 19 nt, Human
gauggggcugcaccggcug

SEQ ID NO: 3055482 - RNA, 13 nt, Human
gauucagcucugc

SEQ ID NO: 3055483 - RNA, 15 nt, Human
gauucagcucugcaa

SEQ ID NO: 3055484 - RNA, 19 nt, Human
gauucagacagcugccugg

SEQ ID NO: 3055485 - RNA, 20 nt, Human
gauucccaagcucugcuccu

SEQ ID NO: 3055486 - RNA, 19 nt, Human
gauucccaagcucugcucc

SEQ ID NO: 3055487 - RNA, 12 nt, Human
gauucuuuccug

SEQ ID NO: 3055488 - RNA, 16 nt, Human
gauucuuuccugaggc

SEQ ID NO: 3055489 - RNA, 17 nt, Human
gauucuuuccugaggcu

SEQ ID NO: 3055490 - RNA, 18 nt, Human
gauucuuuccugaggcug

SEQ ID NO: 3055491 - RNA, 20 nt, Human
gauugcaacaggcugggcuu

SEQ ID NO: 3055492 - RNA, 16 nt, Human
gauugcaccacugcac

SEQ ID NO: 3055493 - RNA, 23 nt, Human
gauugcaccacugcacuccagcc

SEQ ID NO: 3055494 - RNA, 21 nt, Human
gauugcaacaggcugggcuuc

SEQ ID NO: 3055495 - RNA, 22 nt, Human
gauuuggucaacacuaacauga

SEQ ID NO: 3055496 - RNA, 19 nt, Human
gauuucuguuuagauaaua

SEQ ID NO: 3055497 - RNA, 11 nt, Human
gauuucuguuu

SEQ ID NO: 3055498 - RNA, 15 nt, Human
gauuuccguuaaaau

SEQ ID NO: 3055499 - RNA, 19 nt, Human
gauuuucagcccucagaau

SEQ ID NO: 3055500 - RNA, 15 nt, Human
gauuuucagcccuca

SEQ ID NO: 3055501 - RNA, 11 nt, Human
gauuuucagcc

SEQ ID NO: 3055502 - RNA, 15 nt, Human
gauuuuccugaaaac

SEQ ID NO: 3055503 - RNA, 17 nt, Human
gcaagaauugaagcagg

SEQ ID NO: 3055504 - RNA, 14 nt, Human
gcaagacgcugugc

SEQ ID NO: 3055505 - RNA, 20 nt, Human
gcaagacgcugugcugcccu

SEQ ID NO: 3055506 - RNA, 21 nt, Human
gcaagacgcugugcugcccug

SEQ ID NO: 3055507 - RNA, 22 nt, Human
gcaagacgcugugcugcccugc

SEQ ID NO: 3055508 - RNA, 23 nt, Human
gcaagacgcugugcugcccugcc

SEQ ID NO: 3055509 - RNA, 17 nt, Human
gcaaaauugauguguuu

SEQ ID NO: 3055510 - RNA, 13 nt, Human
gcaaacagggccu

SEQ ID NO: 3055511 - RNA, 16 nt, Human
gcaaacagggccucug

SEQ ID NO: 3055512 - RNA, 17 nt, Human
gcaaacagggccucugc

SEQ ID NO: 3055513 - RNA, 18 nt, Human
gcaaacagggccucugcg

SEQ ID NO: 3055514 - RNA, 23 nt, Human
gcaaagcacugacuucuaaguaa

SEQ ID NO: 3055515 - RNA, 16 nt, Human
gcaaaguaucccuacu

SEQ ID NO: 3055516 - RNA, 11 nt, Human
gcaaggcuguc

SEQ ID NO: 3055517 - RNA, 14 nt, Human
gcaagggugauggg

SEQ ID NO: 3055518 - RNA, 18 nt, Human
gcaaggagauuuacaacu

SEQ ID NO: 3055519 - RNA, 10 nt, Human
gcaagccaga

SEQ ID NO: 3055520 - RNA, 15 nt, Human
gcaaugaccuuucaa

SEQ ID NO: 3055521 - RNA, 17 nt, Human
gcaaugaccuuucaaua

SEQ ID NO: 3055522 - RNA, 20 nt, Human
gcaaugaccuuucaauagga

SEQ ID NO: 3055523 - RNA, 22 nt, Human
gcaaugaccuuucaauaggaaa

SEQ ID NO: 3055524 - RNA, 15 nt, Human
gcaaucaaaucugcu

SEQ ID NO: 3055525 - RNA, 17 nt, Human
gcaaucaaaucugcuuu

SEQ ID NO: 3055526 - RNA, 23 nt, Human
gcaaugcuggcuguuggcugggg

SEQ ID NO: 3055527 - RNA, 22 nt, Human
gcaaugcuggcuguuggcuggg

SEQ ID NO: 3055528 - RNA, 14 nt, Human
gcaaugcuggcugu

SEQ ID NO: 3055529 - RNA, 13 nt, Human
gcaaugcuggcug

SEQ ID NO: 3055530 - RNA, 23 nt, Human
gcaaugaccuuucaauaggaaaa

SEQ ID NO: 3055531 - RNA, 17 nt, Human
gaugacaacuucccagu

SEQ ID NO: 3055532 - RNA, 22 nt, Human
gaugcacagaguuguuacauuu

SEQ ID NO: 3055533 - RNA, 21 nt, Human
gaugcacagaguuguuacauu

SEQ ID NO: 3055534 - RNA, 13 nt, Human
gaugcaccagccc

SEQ ID NO: 3055535 - RNA, 14 nt, Human
gaugcagccucaca

SEQ ID NO: 3055536 - RNA, 12 nt, Human
gaugcagccuca

SEQ ID NO: 3055537 - RNA, 17 nt, Human
gaugccugguggcagcu

SEQ ID NO: 3055538 - RNA, 22 nt, Human
gauggauuuccagccaaagccu

SEQ ID NO: 3055539 - RNA, 19 nt, Human
gaugccugguggcagcugc

SEQ ID NO: 3055540 - RNA, 18 nt, Human
gaugccugguggcagcug

SEQ ID NO: 3055541 - RNA, 20 nt, Human
gaugccugguggcagcugcg

SEQ ID NO: 3055542 - RNA, 14 nt, Human
gauggggcccugcc

SEQ ID NO: 3055543 - RNA, 22 nt, Human
gauggggcccugccuccuuugu

SEQ ID NO: 3055544 - RNA, 13 nt, Human
gauggggcccugc

SEQ ID NO: 3055545 - RNA, 21 nt, Human
gauggcuaguaucaaaagaaa

SEQ ID NO: 3055546 - RNA, 14 nt, Human
gaugaaaauauuug

SEQ ID NO: 3055547 - RNA, 17 nt, Human
gaucuuugcagacaggc

SEQ ID NO: 3055548 - RNA, 18 nt, Human
gaucuuugcagacaggca

SEQ ID NO: 3055549 - RNA, 21 nt, Human
gaucuuuggacagaagcagcu

SEQ ID NO: 3055550 - RNA, 13 nt, Human
gaucuuuggacag

SEQ ID NO: 3055551 - RNA, 21 nt, Human
gauccugagccagauuucacu

SEQ ID NO: 3055552 - RNA, 22 nt, Human
gauccugagccagauuucacuc

SEQ ID NO: 3055553 - RNA, 15 nt, Human
gaucccucauccuca

SEQ ID NO: 3055554 - RNA, 16 nt, Human
gaucccucauccucau

SEQ ID NO: 3055555 - RNA, 23 nt, Human
gauagauaggucagugcaaauac

SEQ ID NO: 3055556 - RNA, 11 nt, Human
gauacagaaaa

SEQ ID NO: 3055557 - RNA, 22 nt, Human
gauaauacaccacuacauucug

SEQ ID NO: 3055558 - RNA, 21 nt, Human
gauaauacaccacuacauucu

SEQ ID NO: 3055559 - RNA, 18 nt, Human
gauaauacaccacuacau

SEQ ID NO: 3055560 - RNA, 14 nt, Human
gauaauacaccacu

SEQ ID NO: 3055561 - RNA, 18 nt, Human
gauacaggaaaagcugcu

SEQ ID NO: 3055562 - RNA, 17 nt, Human
gauaggucagugcaaau

SEQ ID NO: 3055563 - RNA, 20 nt, Human
gauagcacagacccugcccu

SEQ ID NO: 3055564 - RNA, 21 nt, Human
gauagcacagacccugcccug

SEQ ID NO: 3055565 - RNA, 22 nt, Human
gauagcacagacccugcccugu

SEQ ID NO: 3055566 - RNA, 14 nt, Human
gauaaguucauaca

SEQ ID NO: 3055567 - RNA, 16 nt, Human
gauaaguucauacauu

SEQ ID NO: 3055568 - RNA, 12 nt, Human
gauaaguucaua

SEQ ID NO: 3055569 - RNA, 22 nt, Human
gauaaauaguuuaugauuccac

SEQ ID NO: 3055570 - RNA, 19 nt, Human
gauaaaguugguaaaccuu

SEQ ID NO: 3055571 - RNA, 13 nt, Human
gaggaaggaaacc

SEQ ID NO: 3055572 - RNA, 19 nt, Human
gaggaaggaaacccagcuc

SEQ ID NO: 3055573 - RNA, 20 nt, Human
gaggaaggaaacccagcucu

SEQ ID NO: 3055574 - RNA, 21 nt, Human
gaggaaggaaacccagcucug

SEQ ID NO: 3055575 - RNA, 14 nt, Human
gauagucuuucagu

SEQ ID NO: 3055576 - RNA, 15 nt, Human
gauaguaacaaugaa

SEQ ID NO: 3055577 - RNA, 22 nt, Human
gauagucuuucaguuaaggaga

SEQ ID NO: 3055578 - RNA, 18 nt, Human
gaucacgccacugcacua

SEQ ID NO: 3055579 - RNA, 16 nt, Human
gaucacgccacugcac

SEQ ID NO: 3055580 - RNA, 21 nt, Human
gaucaaguuauuuuuaauuug

SEQ ID NO: 3055581 - RNA, 12 nt, Human
gaucacggcuca

SEQ ID NO: 3055582 - RNA, 12 nt, Human
gaucagccuggg

SEQ ID NO: 3055583 - RNA, 15 nt, Human
gaucagccugggcaa

SEQ ID NO: 3055584 - RNA, 22 nt, Human
gaucagucugauucccaagcuc

SEQ ID NO: 3055585 - RNA, 14 nt, Human
gaucauugugaaau

SEQ ID NO: 3055586 - RNA, 20 nt, Human
gaucauugugaaauuauuca

SEQ ID NO: 3055587 - RNA, 21 nt, Human
gaucauccacugugccaugug

SEQ ID NO: 3055588 - RNA, 16 nt, Human
gaucauccacugugcc

SEQ ID NO: 3055589 - RNA, 19 nt, Human
gaucauccacugugccaug

SEQ ID NO: 3055590 - RNA, 17 nt, Human
gaucauccacugugcca

SEQ ID NO: 3055591 - RNA, 23 nt, Human
gaccugauuucugagcauuuaau

SEQ ID NO: 3055592 - RNA, 11 nt, Human
gaccucaggcc

SEQ ID NO: 3055593 - RNA, 12 nt, Human
gaccucaggccu

SEQ ID NO: 3055594 - RNA, 14 nt, Human
gaccugaggcccuu

SEQ ID NO: 3055595 - RNA, 15 nt, Human
gaccugaggcccuuc

SEQ ID NO: 3055596 - RNA, 18 nt, Human
gaccugaggcccuucucu

SEQ ID NO: 3055597 - RNA, 21 nt, Human
gaccugaggcccuucucucca

SEQ ID NO: 3055598 - RNA, 14 nt, Human
gaccgugaggccag

SEQ ID NO: 3055599 - RNA, 19 nt, Human
gaccgugaggccagagaca

SEQ ID NO: 3055600 - RNA, 11 nt, Human
gacccacugcu

SEQ ID NO: 3055601 - RNA, 22 nt, Human
gacccacaagaaaugaaagcag

SEQ ID NO: 3055602 - RNA, 16 nt, Human
gacccaugcugcccug

SEQ ID NO: 3055603 - RNA, 14 nt, Human
gacccaugcugccc

SEQ ID NO: 3055604 - RNA, 15 nt, Human
gacccaugcugcccu

SEQ ID NO: 3055605 - RNA, 13 nt, Human
gacccaugcugcc

SEQ ID NO: 3055606 - RNA, 23 nt, Human
gacccugucucaaaaaaagaaaa

SEQ ID NO: 3055607 - RNA, 16 nt, Human
gacccugcccuguggg

SEQ ID NO: 3055608 - RNA, 13 nt, Human
gacccugcccugu

SEQ ID NO: 3055609 - RNA, 15 nt, Human
gacccugcccugugg

SEQ ID NO: 3055610 - RNA, 19 nt, Human
gacccugaggcccagaggg

SEQ ID NO: 3055611 - RNA, 20 nt, Human
gacccugaggcccagagggc

SEQ ID NO: 3055612 - RNA, 12 nt, Human
gacccugcccug

SEQ ID NO: 3055613 - RNA, 21 nt, Human
gacccugaggcccagagggcc

SEQ ID NO: 3055614 - RNA, 18 nt, Human
gacccugaggcccagagg

SEQ ID NO: 3055615 - RNA, 13 nt, Human
gaccccuccaugu

SEQ ID NO: 3055616 - RNA, 20 nt, Human
gaccccgagccuggcuccaa

SEQ ID NO: 3055617 - RNA, 21 nt, Human
gaccuuucaauaggaaaaacu

SEQ ID NO: 3055618 - RNA, 23 nt, Human
gaccuugaacuggguacuugugg

SEQ ID NO: 3055619 - RNA, 15 nt, Human
gacguguuaugacuc

SEQ ID NO: 3055620 - RNA, 17 nt, Human
gacguguuaugacucca

SEQ ID NO: 3055621 - RNA, 20 nt, Human
gacguguuaugacuccagaa

SEQ ID NO: 3055622 - RNA, 21 nt, Human
gacggagucccaccuuggcug

SEQ ID NO: 3055623 - RNA, 18 nt, Human
gacggagucccaccuugg

SEQ ID NO: 3055624 - RNA, 14 nt, Human
gacggagucccacc

SEQ ID NO: 3055625 - RNA, 15 nt, Human
gacuccugcaggcag

SEQ ID NO: 3055626 - RNA, 16 nt, Human
gacuccugcaggcagc

SEQ ID NO: 3055627 - RNA, 14 nt, Human
gacuccugcaggca

SEQ ID NO: 3055628 - RNA, 18 nt, Human
gacucccaugagggagau

SEQ ID NO: 3055629 - RNA, 18 nt, Human
gacuccaaagaaauguaa

SEQ ID NO: 3055630 - RNA, 17 nt, Human
gacuacucccccaggug

SEQ ID NO: 3055631 - RNA, 12 nt, Human
gacuacaggcac

SEQ ID NO: 3055632 - RNA, 22 nt, Human
gacguguuaugacuccagaauu

SEQ ID NO: 3055633 - RNA, 19 nt, Human
gacagccaacuauggccug

SEQ ID NO: 3055634 - RNA, 22 nt, Human
gacagccaacuauggccugugg

SEQ ID NO: 3055635 - RNA, 12 nt, Human
gacagcugccug

SEQ ID NO: 3055636 - RNA, 13 nt, Human
gacagcugccugg

SEQ ID NO: 3055637 - RNA, 16 nt, Human
gacagacacaggcccg

SEQ ID NO: 3055638 - RNA, 15 nt, Human
gacagacacaggccc

SEQ ID NO: 3055639 - RNA, 21 nt, Human
gacacuaaccacgcuggaccu

SEQ ID NO: 3055640 - RNA, 20 nt, Human
gacacuaaccacgcuggacc

SEQ ID NO: 3055641 - RNA, 14 nt, Human
gacagacacaggcc

SEQ ID NO: 3055642 - RNA, 12 nt, Human
gacagacacagg

SEQ ID NO: 3055643 - RNA, 14 nt, Human
gacagcugccuggg

SEQ ID NO: 3055644 - RNA, 15 nt, Human
gacagcugccuggga

SEQ ID NO: 3055645 - RNA, 19 nt, Human
gacaggcauguucucugag

SEQ ID NO: 3055646 - RNA, 18 nt, Human
gacaggcauguucucuga

SEQ ID NO: 3055647 - RNA, 17 nt, Human
gacaggcaaugcuggcu

SEQ ID NO: 3055648 - RNA, 24 nt, Human
gacaggcaaugcuggcuguuggcu

SEQ ID NO: 3055649 - RNA, 16 nt, Human
gacaggcaaugcuggc

SEQ ID NO: 3055650 - RNA, 14 nt, Human
gacaggcaaugcug

SEQ ID NO: 3055651 - RNA, 21 nt, Human
gacaggcaagcaccuccugcc

SEQ ID NO: 3055652 - RNA, 17 nt, Human
gacaugucuuuucuugc

SEQ ID NO: 3055653 - RNA, 21 nt, Human
gacaugucuuuucuugcauga

SEQ ID NO: 3055654 - RNA, 17 nt, Human
gacaugggacauuugcu

SEQ ID NO: 3055655 - RNA, 22 nt, Human
gacaugggacauuugcucaugg

SEQ ID NO: 3055656 - RNA, 23 nt, Human
gacauacuaaccagcagaaaugc

SEQ ID NO: 3055657 - RNA, 16 nt, Human
gacauacuaaccagca

SEQ ID NO: 3055658 - RNA, 15 nt, Human
gacauacuaaccagc

SEQ ID NO: 3055659 - RNA, 22 nt, Human
gacacccugugauggggcccug

SEQ ID NO: 3055660 - RNA, 23 nt, Human
gacacccugugauggggcccugc

SEQ ID NO: 3055661 - RNA, 18 nt, Human
gacacaggcccggcucca

SEQ ID NO: 3055662 - RNA, 12 nt, Human
gacacccuguga

SEQ ID NO: 3055663 - RNA, 13 nt, Human
gacacccugugau

SEQ ID NO: 3055664 - RNA, 18 nt, Human
gacacuaaccacgcugga

SEQ ID NO: 3055665 - RNA, 17 nt, Human
gacacuaaccacgcugg

SEQ ID NO: 3055666 - RNA, 16 nt, Human
gacacuaaccacgcug

SEQ ID NO: 3055667 - RNA, 15 nt, Human
gacacuaaccacgcu

SEQ ID NO: 3055668 - RNA, 17 nt, Human
gacacgaauauugcuga

SEQ ID NO: 3055669 - RNA, 18 nt, Human
gacacgaauauugcugau

SEQ ID NO: 3055670 - RNA, 19 nt, Human
gacacgaauauugcugaug

SEQ ID NO: 3055671 - RNA, 17 nt, Human
gacaccuugacagggca

SEQ ID NO: 3055672 - RNA, 15 nt, Human
gacaccuugacaggg

SEQ ID NO: 3055673 - RNA, 20 nt, Human
gacaccuugacagggcacac

SEQ ID NO: 3055674 - RNA, 18 nt, Human
gacaccuugacagggcac

SEQ ID NO: 3055675 - RNA, 15 nt, Human
gacacgaauauugcu

SEQ ID NO: 3055676 - RNA, 21 nt, Human
gacaaugacuuacuguacaug

SEQ ID NO: 3055677 - RNA, 12 nt, Human
gacaaugcaaac

SEQ ID NO: 3055678 - RNA, 20 nt, Human
gacaaugacuuacuguacau

SEQ ID NO: 3055679 - RNA, 17 nt, Human
gacaaugacuuacugua

SEQ ID NO: 3055680 - RNA, 16 nt, Human
gacaaugcaaaccauc

SEQ ID NO: 3055681 - RNA, 18 nt, Human
gacaaugcaaaccaucau

SEQ ID NO: 3055682 - RNA, 12 nt, Human
gacaauuuauua

SEQ ID NO: 3055683 - RNA, 19 nt, Human
gacaauuuauuauggcaca

SEQ ID NO: 3055684 - RNA, 13 nt, Human
gacaauuuauuau

SEQ ID NO: 3055685 - RNA, 22 nt, Human
gacacaagccuucggcgccuua

SEQ ID NO: 3055686 - RNA, 17 nt, Human
gacacaggcccggcucc

SEQ ID NO: 3055687 - RNA, 15 nt, Human
gacacaggcccggcu

SEQ ID NO: 3055688 - RNA, 12 nt, Human
gacacaggcccg

SEQ ID NO: 3055689 - RNA, 16 nt, Human
gacaaugacccagugg

SEQ ID NO: 3055690 - RNA, 22 nt, Human
gacaaggauugcuacuguccua

SEQ ID NO: 3055691 - RNA, 21 nt, Human
gacaaggauugcuacuguccu

SEQ ID NO: 3055692 - RNA, 16 nt, Human
gaagucuuuguacaga

SEQ ID NO: 3055693 - RNA, 14 nt, Human
gaagucuuuguaca

SEQ ID NO: 3055694 - RNA, 17 nt, Human
gagauacagaauuuuau

SEQ ID NO: 3055695 - RNA, 19 nt, Human
gagagugaacaaauuuaca

SEQ ID NO: 3055696 - RNA, 15 nt, Human
gagagugaacaaauu

SEQ ID NO: 3055697 - RNA, 20 nt, Human
gagagggugggagugggccc

SEQ ID NO: 3055698 - RNA, 21 nt, Human
gagagggugggagugggccca

SEQ ID NO: 3055699 - RNA, 18 nt, Human
gagaggggaacagacugg

SEQ ID NO: 3055700 - RNA, 13 nt, Human
gagaggggaacag

SEQ ID NO: 3055701 - RNA, 13 nt, Human
gagagccuuccag

SEQ ID NO: 3055702 - RNA, 17 nt, Human
gagagaagagaaugcac

SEQ ID NO: 3055703 - RNA, 14 nt, Human
gagacagcccgggc

SEQ ID NO: 3055704 - RNA, 17 nt, Human
gagacagcccgggcucu

SEQ ID NO: 3055705 - RNA, 18 nt, Human
gagacagcccgggcucug

SEQ ID NO: 3055706 - RNA, 19 nt, Human
gagacagcccgggcucugc

SEQ ID NO: 3055707 - RNA, 20 nt, Human
gagacagcccgggcucugcc

SEQ ID NO: 3055708 - RNA, 21 nt, Human
gagacagcccgggcucugccu

SEQ ID NO: 3055709 - RNA, 22 nt, Human
gagacagcccgggcucugccuc

SEQ ID NO: 3055710 - RNA, 23 nt, Human
gagacagcccgggcucugccucc

SEQ ID NO: 3055711 - RNA, 24 nt, Human
gagacagcccgggcucugccuccc

SEQ ID NO: 3055712 - RNA, 13 nt, Human
gagacagcucugc

SEQ ID NO: 3055713 - RNA, 15 nt, Human
gagacagcucugcau

SEQ ID NO: 3055714 - RNA, 18 nt, Human
gagacagcucugcauacu

SEQ ID NO: 3055715 - RNA, 22 nt, Human
gagacuccugcaggcagccagg

SEQ ID NO: 3055716 - RNA, 16 nt, Human
gagacucgcgacaaug

SEQ ID NO: 3055717 - RNA, 13 nt, Human
gagacucugucuc

SEQ ID NO: 3055718 - RNA, 14 nt, Human
gagacucugucuca

SEQ ID NO: 3055719 - RNA, 21 nt, Human
gagaaugagagacacacugaa

SEQ ID NO: 3055720 - RNA, 20 nt, Human
gagaaugcacaaacagaggc

SEQ ID NO: 3055721 - RNA, 21 nt, Human
gagaaugcacaaacagaggcc

SEQ ID NO: 3055722 - RNA, 22 nt, Human
gagaaugcacaaacagaggccg

SEQ ID NO: 3055723 - RNA, 16 nt, Human
gagaagaacugaaauc

SEQ ID NO: 3055724 - RNA, 13 nt, Human
gagaagaacugaa

SEQ ID NO: 3055725 - RNA, 14 nt, Human
gagaagaacugaaa

SEQ ID NO: 3055726 - RNA, 13 nt, Human
gagaagagcuguu

SEQ ID NO: 3055727 - RNA, 22 nt, Human
gagaagagcuguucacagccag

SEQ ID NO: 3055728 - RNA, 15 nt, Human
gagaagagcuguuca

SEQ ID NO: 3055729 - RNA, 16 nt, Human
gagacagccaacuaug

SEQ ID NO: 3055730 - RNA, 12 nt, Human
gagacagcccgg

SEQ ID NO: 3055731 - RNA, 19 nt, Human
gagacagaguuuucacucu

SEQ ID NO: 3055732 - RNA, 15 nt, Human
gagacacaagccuuc

SEQ ID NO: 3055733 - RNA, 17 nt, Human
gagacacaagccuucgg

SEQ ID NO: 3055734 - RNA, 18 nt, Human
gagacacacugaagaagc

SEQ ID NO: 3055735 - RNA, 14 nt, Human
gagaaauuuauaaa

SEQ ID NO: 3055736 - RNA, 22 nt, Human
gagaaaguacuucuccacccug

SEQ ID NO: 3055737 - RNA, 23 nt, Human
gagaaaguacuucuccacccugc

SEQ ID NO: 3055738 - RNA, 18 nt, Human
gagaaagacuauucaaac

SEQ ID NO: 3055739 - RNA, 17 nt, Human
gagaaagacuauucaaa

SEQ ID NO: 3055740 - RNA, 15 nt, Human
gagaaagacuauuca

SEQ ID NO: 3055741 - RNA, 13 nt, Human
gagaaagacuauu

SEQ ID NO: 3055742 - RNA, 13 nt, Human
gacuuggaagcuc

SEQ ID NO: 3055743 - RNA, 21 nt, Human
gagaaaauggacguguuauga

SEQ ID NO: 3055744 - RNA, 17 nt, Human
gacuccugcaggcagcc

SEQ ID NO: 3055745 - RNA, 18 nt, Human
gacucgcgacaaugcaaa

SEQ ID NO: 3055746 - RNA, 19 nt, Human
gacucgcgacaaugcaaac

SEQ ID NO: 3055747 - RNA, 16 nt, Human
gacuuggaagcuccgc

SEQ ID NO: 3055748 - RNA, 15 nt, Human
gacuuggaagcuccg

SEQ ID NO: 3055749 - RNA, 14 nt, Human
gacuuggaagcucc

SEQ ID NO: 3055750 - RNA, 22 nt, Human
gagcuugaaacccguggcgcuu

SEQ ID NO: 3055751 - RNA, 20 nt, Human
gagcuuugaaaauucagugg

SEQ ID NO: 3055752 - RNA, 22 nt, Human
gagcuuucugcuaucaaagagg

SEQ ID NO: 3055753 - RNA, 16 nt, Human
gaggaaagcaaaggag

SEQ ID NO: 3055754 - RNA, 17 nt, Human
gaggaaagcaaaggaga

SEQ ID NO: 3055755 - RNA, 14 nt, Human
gagcuuuuguagaa

SEQ ID NO: 3055756 - RNA, 14 nt, Human
gaggaagccgcugg

SEQ ID NO: 3055757 - RNA, 17 nt, Human
gaggaagccgcuggggc

SEQ ID NO: 3055758 - RNA, 18 nt, Human
gaggaagccgcuggggcc

SEQ ID NO: 3055759 - RNA, 13 nt, Human
gaggaagccgcug

SEQ ID NO: 3055760 - RNA, 17 nt, Human
gaggaagagaaaaaaua

SEQ ID NO: 3055761 - RNA, 16 nt, Human
gaggaacaaggcaagg

SEQ ID NO: 3055762 - RNA, 14 nt, Human
gaggaacaaggcaa

SEQ ID NO: 3055763 - RNA, 16 nt, Human
gagcucgugggacagu

SEQ ID NO: 3055764 - RNA, 15 nt, Human
gagcugaguggggga

SEQ ID NO: 3055765 - RNA, 21 nt, Human
gagcugaucgcuucuccccca

SEQ ID NO: 3055766 - RNA, 16 nt, Human
gagcugaucgcuucuc

SEQ ID NO: 3055767 - RNA, 15 nt, Human
gagcuagcagcaggg

SEQ ID NO: 3055768 - RNA, 17 nt, Human
gagcuagcagcagggag

SEQ ID NO: 3055769 - RNA, 15 nt, Human
gagccugcaguuauu

SEQ ID NO: 3055770 - RNA, 21 nt, Human
gagcccacuguacuugcucuu

SEQ ID NO: 3055771 - RNA, 18 nt, Human
gagcccacuguacuugcu

SEQ ID NO: 3055772 - RNA, 18 nt, Human
gagcccacgcccccacug

SEQ ID NO: 3055773 - RNA, 20 nt, Human
gagccgagaucacgccacug

SEQ ID NO: 3055774 - RNA, 19 nt, Human
gagccgagaucacgccacu

SEQ ID NO: 3055775 - RNA, 22 nt, Human
gagccgagaucacgccacugca

SEQ ID NO: 3055776 - RNA, 21 nt, Human
gagccgagaucacgccacugc

SEQ ID NO: 3055777 - RNA, 16 nt, Human
gagccgcccaaggccu

SEQ ID NO: 3055778 - RNA, 13 nt, Human
gagccgcccaagg

SEQ ID NO: 3055779 - RNA, 13 nt, Human
gagccucagcauc

SEQ ID NO: 3055780 - RNA, 15 nt, Human
gagccucagcauccu

SEQ ID NO: 3055781 - RNA, 14 nt, Human
gagccucagcaucc

SEQ ID NO: 3055782 - RNA, 17 nt, Human
gagccucagcauccugg

SEQ ID NO: 3055783 - RNA, 12 nt, Human
gagccugcaguu

SEQ ID NO: 3055784 - RNA, 13 nt, Human
gagccuccugccc

SEQ ID NO: 3055785 - RNA, 18 nt, Human
gagccagauuucacucuc

SEQ ID NO: 3055786 - RNA, 19 nt, Human
gagccagauuucacucucc

SEQ ID NO: 3055787 - RNA, 15 nt, Human
gagccagauuucacu

SEQ ID NO: 3055788 - RNA, 13 nt, Human
gagccacugcacc

SEQ ID NO: 3055789 - RNA, 19 nt, Human
gagccacugcaccgggcca

SEQ ID NO: 3055790 - RNA, 18 nt, Human
gagccacugcaccgggcc

SEQ ID NO: 3055791 - RNA, 17 nt, Human
gagcccaccuuggcuca

SEQ ID NO: 3055792 - RNA, 15 nt, Human
gagcccaccuuggcu

SEQ ID NO: 3055793 - RNA, 13 nt, Human
gagcccaccuugg

SEQ ID NO: 3055794 - RNA, 13 nt, Human
gagccagauuuca

SEQ ID NO: 3055795 - RNA, 22 nt, Human
gagcagccacauuccugaugcu

SEQ ID NO: 3055796 - RNA, 21 nt, Human
gagcagccacauuccugaugc

SEQ ID NO: 3055797 - RNA, 19 nt, Human
gagcagagaccaucccuga

SEQ ID NO: 3055798 - RNA, 21 nt, Human
gagcagagaccaucccugaag

SEQ ID NO: 3055799 - RNA, 23 nt, Human
gagcagagaccaucccugaaggc

SEQ ID NO: 3055800 - RNA, 17 nt, Human
gagcagagaccaucccu

SEQ ID NO: 3055801 - RNA, 18 nt, Human
gagcagagaccaucccug

SEQ ID NO: 3055802 - RNA, 16 nt, Human
gagcagagaccauccc

SEQ ID NO: 3055803 - RNA, 19 nt, Human
gagauagccaaggccaaag

SEQ ID NO: 3055804 - RNA, 20 nt, Human
gagauagccaaggccaaagg

SEQ ID NO: 3055805 - RNA, 21 nt, Human
gagauagccaaggccaaagga

SEQ ID NO: 3055806 - RNA, 14 nt, Human
cuuuccaggaaggc

SEQ ID NO: 3055807 - RNA, 16 nt, Human
cuuuccaaaguacacu

SEQ ID NO: 3055808 - RNA, 16 nt, Human
cuuuccaaaugcccag

SEQ ID NO: 3055809 - RNA, 22 nt, Human
cuuuccaaaguacacuguuuca

SEQ ID NO: 3055810 - RNA, 19 nt, Human
cuuuauuuuguguuuagga

SEQ ID NO: 3055811 - RNA, 21 nt, Human
cuuuauuuucuauaauuuaaa

SEQ ID NO: 3055812 - RNA, 21 nt, Human
cuuguggacacagcucuucuc

SEQ ID NO: 3055813 - RNA, 17 nt, Human
cuuuccugaggcugggc

SEQ ID NO: 3055814 - RNA, 16 nt, Human
cuuuccugaggcuggg

SEQ ID NO: 3055815 - RNA, 20 nt, Human
cuuuccugaggcugggcucc

SEQ ID NO: 3055816 - RNA, 21 nt, Human
cuuuccugaggcugggcuccc

SEQ ID NO: 3055817 - RNA, 19 nt, Human
cuuuggaaagaguaggaag

SEQ ID NO: 3055818 - RNA, 23 nt, Human
cuuuggaaagaguaggaagacuu

SEQ ID NO: 3055819 - RNA, 15 nt, Human
cuuugcagacaggca

SEQ ID NO: 3055820 - RNA, 14 nt, Human
cuuugcagacaggc

SEQ ID NO: 3055821 - RNA, 19 nt, Human
cuuuuuuaucaugugaaau

SEQ ID NO: 3055822 - RNA, 18 nt, Human
cuuuuuuauacauaaaca

SEQ ID NO: 3055823 - RNA, 11 nt, Human
gaaaaagaaaa

SEQ ID NO: 3055824 - RNA, 16 nt, Human
gaaaaagaaaaaauau

SEQ ID NO: 3055825 - RNA, 17 nt, Human
cuuuuuuauacauaaac

SEQ ID NO: 3055826 - RNA, 16 nt, Human
cuuuuuuauacauaaa

SEQ ID NO: 3055827 - RNA, 15 nt, Human
cuuuuuuauacauaa

SEQ ID NO: 3055828 - RNA, 17 nt, Human
cuuuucuuucagccaag

SEQ ID NO: 3055829 - RNA, 16 nt, Human
cuuuucuuucagccaa

SEQ ID NO: 3055830 - RNA, 13 nt, Human
cuuuucuuuucuu

SEQ ID NO: 3055831 - RNA, 22 nt, Human
cuuuuuaauauugauaugcuua

SEQ ID NO: 3055832 - RNA, 16 nt, Human
cuuuggaacaagaugg

SEQ ID NO: 3055833 - RNA, 21 nt, Human
cuuuucgcaggauucuuccuc

SEQ ID NO: 3055834 - RNA, 20 nt, Human
cuuuucgcaggauucuuccu

SEQ ID NO: 3055835 - RNA, 13 nt, Human
cuuuuccaacccu

SEQ ID NO: 3055836 - RNA, 23 nt, Human
cuuuuccaacccucaucaccaac

SEQ ID NO: 3055837 - RNA, 22 nt, Human
cuuuucauuuaggugaggaagc

SEQ ID NO: 3055838 - RNA, 16 nt, Human
cuugaacuggguacuu

SEQ ID NO: 3055839 - RNA, 19 nt, Human
cuugaacuccuggccucaa

SEQ ID NO: 3055840 - RNA, 20 nt, Human
cuugaacuggguacuugugg

SEQ ID NO: 3055841 - RNA, 18 nt, Human
cuugaacuggguacuugu

SEQ ID NO: 3055842 - RNA, 15 nt, Human
cuugaacuuugaccu

SEQ ID NO: 3055843 - RNA, 18 nt, Human
cuugaacuccuggccuca

SEQ ID NO: 3055844 - RNA, 17 nt, Human
cuugaacuccuggccuc

SEQ ID NO: 3055845 - RNA, 15 nt, Human
cuugaacuccuggcc

SEQ ID NO: 3055846 - RNA, 14 nt, Human
cuugaacuccuggc

SEQ ID NO: 3055847 - RNA, 20 nt, Human
cuugaacccgggaggcagag

SEQ ID NO: 3055848 - RNA, 19 nt, Human
cuugaacccgggaggcaga

SEQ ID NO: 3055849 - RNA, 14 nt, Human
cuugaacccgggag

SEQ ID NO: 3055850 - RNA, 22 nt, Human
cuucuuuauaauucuacuuuga

SEQ ID NO: 3055851 - RNA, 13 nt, Human
cuucuuuccacag

SEQ ID NO: 3055852 - RNA, 19 nt, Human
cuucuuuccacagaagcuc

SEQ ID NO: 3055853 - RNA, 19 nt, Human
cuugaaauauaggaacuua

SEQ ID NO: 3055854 - RNA, 22 nt, Human
cuugagccuugaacuuugaccu

SEQ ID NO: 3055855 - RNA, 20 nt, Human
cuugagccuugaacuuugac

SEQ ID NO: 3055856 - RNA, 14 nt, Human
cuugagagggugga

SEQ ID NO: 3055857 - RNA, 21 nt, Human
cuugaccauucuccaccugcc

SEQ ID NO: 3055858 - RNA, 17 nt, Human
cuugaccauucuccacc

SEQ ID NO: 3055859 - RNA, 20 nt, Human
cuugaccauucuccaccugc

SEQ ID NO: 3055860 - RNA, 19 nt, Human
cuugagccuugaacuuuga

SEQ ID NO: 3055861 - RNA, 21 nt, Human
cuugcaugaggcuaguguggu

SEQ ID NO: 3055862 - RNA, 17 nt, Human
cuugcaugaggcuagug

SEQ ID NO: 3055863 - RNA, 18 nt, Human
cuugcaugguuuggagcu

SEQ ID NO: 3055864 - RNA, 19 nt, Human
cuugcaugguuuggagcug

SEQ ID NO: 3055865 - RNA, 21 nt, Human
cuugcaugguuuagaaagcuu

SEQ ID NO: 3055866 - RNA, 18 nt, Human
cuugcagacucuacagag

SEQ ID NO: 3055867 - RNA, 22 nt, Human
cuugcagcucuccccuucucug

SEQ ID NO: 3055868 - RNA, 14 nt, Human
cuugcaauggcagc

SEQ ID NO: 3055869 - RNA, 22 nt, Human
cuugcaaaguaucccuacugua

SEQ ID NO: 3055870 - RNA, 16 nt, Human
cuugagugcucaguag

SEQ ID NO: 3055871 - RNA, 17 nt, Human
cuugccaaauauaaaua

SEQ ID NO: 3055872 - RNA, 20 nt, Human
cuugcaugguuuggagcuga

SEQ ID NO: 3055873 - RNA, 22 nt, Human
cuugcaugguuuggagcugauc

SEQ ID NO: 3055874 - RNA, 15 nt, Human
cuugcuuuuaaaauc

SEQ ID NO: 3055875 - RNA, 13 nt, Human
cuugcuugcuuuu

SEQ ID NO: 3055876 - RNA, 13 nt, Human
cuuggauuguccc

SEQ ID NO: 3055877 - RNA, 23 nt, Human
cuuggcucaaguccucuuuucug

SEQ ID NO: 3055878 - RNA, 13 nt, Human
cuuggcugcaggg

SEQ ID NO: 3055879 - RNA, 12 nt, Human
cuuggcugcagg

SEQ ID NO: 3055880 - RNA, 20 nt, Human
cuugguuuguaaauuaacuu

SEQ ID NO: 3055881 - RNA, 21 nt, Human
cuuguaaauagcucagguguc

SEQ ID NO: 3055882 - RNA, 18 nt, Human
cuuggggaccagagcugc

SEQ ID NO: 3055883 - RNA, 19 nt, Human
cuuggggaccagagcugcc

SEQ ID NO: 3055884 - RNA, 17 nt, Human
cuuggggaccagagcug

SEQ ID NO: 3055885 - RNA, 16 nt, Human
cuuggggaccagagcu

SEQ ID NO: 3055886 - RNA, 13 nt, Human
cuuguauuaugug

SEQ ID NO: 3055887 - RNA, 18 nt, Human
cuuguauuauguguguuu

SEQ ID NO: 3055888 - RNA, 18 nt, Human
cuuguggacacagcucuu

SEQ ID NO: 3055889 - RNA, 17 nt, Human
cuuguggacacagcucu

SEQ ID NO: 3055890 - RNA, 16 nt, Human
cuuguggacacagcuc

SEQ ID NO: 3055891 - RNA, 23 nt, Human
gaaauuaguacuccccuccuuga

SEQ ID NO: 3055892 - RNA, 17 nt, Human
gaaauuauauaaguauu

SEQ ID NO: 3055893 - RNA, 23 nt, Human
gaaauuauauaaguauucuaaau

SEQ ID NO: 3055894 - RNA, 15 nt, Human
gaacacuccuucaca

SEQ ID NO: 3055895 - RNA, 16 nt, Human
gaacacuccuucacag

SEQ ID NO: 3055896 - RNA, 21 nt, Human
gaaauuuccugggagcuuuug

SEQ ID NO: 3055897 - RNA, 19 nt, Human
gaacagacuggaagcacag

SEQ ID NO: 3055898 - RNA, 20 nt, Human
gaacagacuggaagcacagc

SEQ ID NO: 3055899 - RNA, 17 nt, Human
gaacacuccuucacaga

SEQ ID NO: 3055900 - RNA, 18 nt, Human
gaacagauaaucagugug

SEQ ID NO: 3055901 - RNA, 22 nt, Human
gaacagacuggaagcacagcuu

SEQ ID NO: 3055902 - RNA, 17 nt, Human
gaacaggauauucucac

SEQ ID NO: 3055903 - RNA, 24 nt, Human
gaacaguuaccucugccucagaaa

SEQ ID NO: 3055904 - RNA, 20 nt, Human
gaacaguuguguuugaagca

SEQ ID NO: 3055905 - RNA, 14 nt, Human
gaacaucccuccug

SEQ ID NO: 3055906 - RNA, 22 nt, Human
gaacaguuguguuugaagcaca

SEQ ID NO: 3055907 - RNA, 17 nt, Human
gaaaugggcagagcaga

SEQ ID NO: 3055908 - RNA, 19 nt, Human
gaaaugggcagagcagaga

SEQ ID NO: 3055909 - RNA, 17 nt, Human
gaaauguacagcaagga

SEQ ID NO: 3055910 - RNA, 22 nt, Human
gaaauguaagggaaacugccag

SEQ ID NO: 3055911 - RNA, 16 nt, Human
gaaaugggcagagcag

SEQ ID NO: 3055912 - RNA, 15 nt, Human
gaaaugggcagagca

SEQ ID NO: 3055913 - RNA, 11 nt, Human
gaaaugagcug

SEQ ID NO: 3055914 - RNA, 18 nt, Human
gaaaugaggucagagccu

SEQ ID NO: 3055915 - RNA, 17 nt, Human
gaaauauaggaacuuaa

SEQ ID NO: 3055916 - RNA, 18 nt, Human
gaaauaaacgucuuaaau

SEQ ID NO: 3055917 - RNA, 21 nt, Human
gaaauaaacgucuuaaauauu

SEQ ID NO: 3055918 - RNA, 14 nt, Human
gaaauaaacgucuu

SEQ ID NO: 3055919 - RNA, 16 nt, Human
gaaauaaacgucuuaa

SEQ ID NO: 3055920 - RNA, 17 nt, Human
gaaauaaacgucuuaaa

SEQ ID NO: 3055921 - RNA, 19 nt, Human
gaaauaucugaaaauguau

SEQ ID NO: 3055922 - RNA, 18 nt, Human
gaaauaucugaaaaugua

SEQ ID NO: 3055923 - RNA, 13 nt, Human
gaaauauuuauuu

SEQ ID NO: 3055924 - RNA, 15 nt, Human
gaaauauuuauuuua

SEQ ID NO: 3055925 - RNA, 16 nt, Human
gaaauauuuauuuuaa

SEQ ID NO: 3055926 - RNA, 23 nt, Human
gaaaguuauugauaaguucauac

SEQ ID NO: 3055927 - RNA, 11 nt, Human
gaaaggaaaga

SEQ ID NO: 3055928 - RNA, 16 nt, Human
gaaaggaaagaggcuc

SEQ ID NO: 3055929 - RNA, 21 nt, Human
gaaagcuugcccuggugccuc

SEQ ID NO: 3055930 - RNA, 22 nt, Human
gaaaguacuucuccacccugcu

SEQ ID NO: 3055931 - RNA, 19 nt, Human
gaaacuaggugcauauuua

SEQ ID NO: 3055932 - RNA, 20 nt, Human
gaaacuaggugcauauuuau

SEQ ID NO: 3055933 - RNA, 16 nt, Human
gaaacugacacaugcu

SEQ ID NO: 3055934 - RNA, 15 nt, Human
gaaacugccagcaac

SEQ ID NO: 3055935 - RNA, 13 nt, Human
gaaacugccagca

SEQ ID NO: 3055936 - RNA, 16 nt, Human
gaaaaaugagccuggc

SEQ ID NO: 3055937 - RNA, 19 nt, Human
gaaagacuauucaaacagu

SEQ ID NO: 3055938 - RNA, 23 nt, Human
gaaagacuauucaaacagucuca

SEQ ID NO: 3055939 - RNA, 22 nt, Human
gaaagacuauucaaacagucuc

SEQ ID NO: 3055940 - RNA, 16 nt, Human
gaaagaucaaaagguu

SEQ ID NO: 3055941 - RNA, 16 nt, Human
gaaagaguaggaagac

SEQ ID NO: 3055942 - RNA, 13 nt, Human
gaaagcagaacag

SEQ ID NO: 3055943 - RNA, 22 nt, Human
gaagauugagauguguucacaa

SEQ ID NO: 3055944 - RNA, 17 nt, Human
gaagauugagauguguu

SEQ ID NO: 3055945 - RNA, 18 nt, Human
gaagcauuuacuuugugu

SEQ ID NO: 3055946 - RNA, 20 nt, Human
gaagaguauuuuugacagaa

SEQ ID NO: 3055947 - RNA, 23 nt, Human
gaagagcuguucacagccagacu

SEQ ID NO: 3055948 - RNA, 13 nt, Human
gaagagcuguuca

SEQ ID NO: 3055949 - RNA, 20 nt, Human
gaagagcuguucacagccag

SEQ ID NO: 3055950 - RNA, 15 nt, Human
gaagagcuguucaca

SEQ ID NO: 3055951 - RNA, 15 nt, Human
gaagacuucaucccu

SEQ ID NO: 3055952 - RNA, 16 nt, Human
gaagacuucaucccuc

SEQ ID NO: 3055953 - RNA, 12 nt, Human
gaagagccuugc

SEQ ID NO: 3055954 - RNA, 17 nt, Human
gaagacuucaucccucu

SEQ ID NO: 3055955 - RNA, 19 nt, Human
gaagacuucaucccucugg

SEQ ID NO: 3055956 - RNA, 22 nt, Human
gaacuuguaaaggaauuuaaaa

SEQ ID NO: 3055957 - RNA, 17 nt, Human
gaacuugggccacugug

SEQ ID NO: 3055958 - RNA, 18 nt, Human
gaacuuggcgcugccccu

SEQ ID NO: 3055959 - RNA, 17 nt, Human
gaacuuuccaggaaggc

SEQ ID NO: 3055960 - RNA, 22 nt, Human
gaacuuugaccucugcagcaau

SEQ ID NO: 3055961 - RNA, 16 nt, Human
gaacuuugaccucugc

SEQ ID NO: 3055962 - RNA, 14 nt, Human
gaagaagcucucuc

SEQ ID NO: 3055963 - RNA, 18 nt, Human
gaaccacaucuugcucug

SEQ ID NO: 3055964 - RNA, 14 nt, Human
gaaccacaagacug

SEQ ID NO: 3055965 - RNA, 15 nt, Human
gaaccacaagacugc

SEQ ID NO: 3055966 - RNA, 15 nt, Human
gaacucccuuucaac

SEQ ID NO: 3055967 - RNA, 16 nt, Human
gaacucccuuucaaca

SEQ ID NO: 3055968 - RNA, 17 nt, Human
gaacuuggcgcugcccc

SEQ ID NO: 3055969 - RNA, 14 nt, Human
gaacuuaaauaaug

SEQ ID NO: 3055970 - RNA, 17 nt, Human
gaacuuaaauaauguga

SEQ ID NO: 3055971 - RNA, 19 nt, Human
gaaggaagacuucaucccu

SEQ ID NO: 3055972 - RNA, 15 nt, Human
gaaggaacguccccu

SEQ ID NO: 3055973 - RNA, 21 nt, Human
gaaggaaacccagcucugguc

SEQ ID NO: 3055974 - RNA, 22 nt, Human
gaaggaaacccagcucuggucc

SEQ ID NO: 3055975 - RNA, 21 nt, Human
gaaggacauugcggacagcca

SEQ ID NO: 3055976 - RNA, 20 nt, Human
gaaggacauugcggacagcc

SEQ ID NO: 3055977 - RNA, 19 nt, Human
gaaggacauugcggacagc

SEQ ID NO: 3055978 - RNA, 18 nt, Human
gaagccgcuggggccagu

SEQ ID NO: 3055979 - RNA, 20 nt, Human
gaagccgcuggggccaguug

SEQ ID NO: 3055980 - RNA, 14 nt, Human
gaagccgcuggggc

SEQ ID NO: 3055981 - RNA, 19 nt, Human
gaaggaaacccagcucugg

SEQ ID NO: 3055982 - RNA, 20 nt, Human
gaaggaaacccagcucuggu

SEQ ID NO: 3055983 - RNA, 21 nt, Human
gaaggugaggagcuugaaacc

SEQ ID NO: 3055984 - RNA, 20 nt, Human
gaaguaauaugcacacauuu

SEQ ID NO: 3055985 - RNA, 19 nt, Human
gaaguaauaugcacacauu

SEQ ID NO: 3055986 - RNA, 13 nt, Human
gaagucacacagu

SEQ ID NO: 3055987 - RNA, 18 nt, Human
gaagucuuagauguauau

SEQ ID NO: 3055988 - RNA, 23 nt, Human
gaaguccaagcauuuagauguau

SEQ ID NO: 3055989 - RNA, 21 nt, Human
gaagucacauuccugaacagg

SEQ ID NO: 3055990 - RNA, 16 nt, Human
gaagucacauuccuga

SEQ ID NO: 3055991 - RNA, 20 nt, Human
gaagucacauuccugaacag

SEQ ID NO: 3055992 - RNA, 14 nt, Human
gaaggaugcugucu

SEQ ID NO: 3055993 - RNA, 13 nt, Human
gaagggggcuggg

SEQ ID NO: 3055994 - RNA, 22 nt, Human
cuguaccucuugagccuugaac

SEQ ID NO: 3055995 - RNA, 15 nt, Human
cuguaucccaugagc

SEQ ID NO: 3055996 - RNA, 14 nt, Human
cuguaucccaugag

SEQ ID NO: 3055997 - RNA, 18 nt, Human
cuguaucccaugagccuc

SEQ ID NO: 3055998 - RNA, 15 nt, Human
cuguaugauucccag

SEQ ID NO: 3055999 - RNA, 22 nt, Human
cugucccagugccgagaaggaa

SEQ ID NO: 3056000 - RNA, 23 nt, Human
cugucauuugagcagggcucagc

SEQ ID NO: 3056001 - RNA, 13 nt, Human
cuguauuuuaaaa

SEQ ID NO: 3056002 - RNA, 16 nt, Human
cuguauuuuaaaagaa

SEQ ID NO: 3056003 - RNA, 13 nt, Human
cugucccccugac

SEQ ID NO: 3056004 - RNA, 14 nt, Human
cugucccccugaca

SEQ ID NO: 3056005 - RNA, 20 nt, Human
cuguccuacucugugucagg

SEQ ID NO: 3056006 - RNA, 18 nt, Human
cuguccuacucuguguca

SEQ ID NO: 3056007 - RNA, 17 nt, Human
cuguccuacucuguguc

SEQ ID NO: 3056008 - RNA, 16 nt, Human
cuguccuacucugugu

SEQ ID NO: 3056009 - RNA, 22 nt, Human
cugucccuuacgugaguccugg

SEQ ID NO: 3056010 - RNA, 21 nt, Human
cuguccuacucugugucaggu

SEQ ID NO: 3056011 - RNA, 22 nt, Human
cugucucaaaaaaagaaaaaga

SEQ ID NO: 3056012 - RNA, 20 nt, Human
cugucuccucucucuguaau

SEQ ID NO: 3056013 - RNA, 17 nt, Human
cugucuccucucucugu

SEQ ID NO: 3056014 - RNA, 18 nt, Human
cugucucuacuaaaaaua

SEQ ID NO: 3056015 - RNA, 18 nt, Human
cuguaaggcaaucauggu

SEQ ID NO: 3056016 - RNA, 20 nt, Human
cugguucaggguuggccccu

SEQ ID NO: 3056017 - RNA, 13 nt, Human
cugguggcagcuc

SEQ ID NO: 3056018 - RNA, 14 nt, Human
cugguggcagcuca

SEQ ID NO: 3056019 - RNA, 12 nt, Human
cugguggcagcu

SEQ ID NO: 3056020 - RNA, 23 nt, Human
cuguacaugaaaacacauuuuuc

SEQ ID NO: 3056021 - RNA, 22 nt, Human
cuguacaugaaaacacauuuuu

SEQ ID NO: 3056022 - RNA, 21 nt, Human
cuguaccucuugagccuugaa

SEQ ID NO: 3056023 - RNA, 21 nt, Human
cuguaauuugugauacaaugc

SEQ ID NO: 3056024 - RNA, 23 nt, Human
cuguacagagcccacgcccccac

SEQ ID NO: 3056025 - RNA, 17 nt, Human
cuguaauuugugauaca

SEQ ID NO: 3056026 - RNA, 18 nt, Human
cuguaauuugugauacaa

SEQ ID NO: 3056027 - RNA, 18 nt, Human
cugggucgcccuggacug

SEQ ID NO: 3056028 - RNA, 17 nt, Human
cugggucgcccuggacu

SEQ ID NO: 3056029 - RNA, 22 nt, Human
cugggucgcccuggacugugug

SEQ ID NO: 3056030 - RNA, 15 nt, Human
cuggguuggagggug

SEQ ID NO: 3056031 - RNA, 16 nt, Human
cugggucgcccuggac

SEQ ID NO: 3056032 - RNA, 18 nt, Human
cuggguacuuguggacac

SEQ ID NO: 3056033 - RNA, 14 nt, Human
cuggguacuugugg

SEQ ID NO: 3056034 - RNA, 16 nt, Human
cuggguacuuguggac

SEQ ID NO: 3056035 - RNA, 19 nt, Human
cugggcucccuucccaccu

SEQ ID NO: 3056036 - RNA, 20 nt, Human
cugggcucccuucccaccuc

SEQ ID NO: 3056037 - RNA, 21 nt, Human
cugggcucccuucccaccucu

SEQ ID NO: 3056038 - RNA, 22 nt, Human
cugggcucccuucccaccucuc

SEQ ID NO: 3056039 - RNA, 21 nt, Human
cugguccauagagagcaagac

SEQ ID NO: 3056040 - RNA, 23 nt, Human
cuggucucaaacucuugaccuca

SEQ ID NO: 3056041 - RNA, 13 nt, Human
cuggucccacuca

SEQ ID NO: 3056042 - RNA, 20 nt, Human
cuggaagugcuaauuuugaa

SEQ ID NO: 3056043 - RNA, 18 nt, Human
cuggaauauauaaccagu

SEQ ID NO: 3056044 - RNA, 14 nt, Human
cuggcaagaaugug

SEQ ID NO: 3056045 - RNA, 22 nt, Human
cuggcacccggccccugcuggu

SEQ ID NO: 3056046 - RNA, 18 nt, Human
cuggcacccggccccugc

SEQ ID NO: 3056047 - RNA, 17 nt, Human
cuggcacccggccccug

SEQ ID NO: 3056048 - RNA, 16 nt, Human
cuggcacccggccccu

SEQ ID NO: 3056049 - RNA, 22 nt, Human
cuggccagaugcaccagcccuu

SEQ ID NO: 3056050 - RNA, 24 nt, Human
cuggcaugggaaugaaugucagug

SEQ ID NO: 3056051 - RNA, 16 nt, Human
cuggcaugggaaugaa

SEQ ID NO: 3056052 - RNA, 18 nt, Human
cuggcaugggaaugaaug

SEQ ID NO: 3056053 - RNA, 19 nt, Human
cuggcaugggaaugaaugu

SEQ ID NO: 3056054 - RNA, 22 nt, Human
cuggcaugggaaugaaugucag

SEQ ID NO: 3056055 - RNA, 16 nt, Human
cuggcacuauaaugua

SEQ ID NO: 3056056 - RNA, 15 nt, Human
cuggcacuauaaugu

SEQ ID NO: 3056057 - RNA, 16 nt, Human
cuggccuggccccuca

SEQ ID NO: 3056058 - RNA, 17 nt, Human
cuggccuggccccucag

SEQ ID NO: 3056059 - RNA, 14 nt, Human
cuggccugugucua

SEQ ID NO: 3056060 - RNA, 15 nt, Human
cuggccuucggccuc

SEQ ID NO: 3056061 - RNA, 16 nt, Human
cuggccuucggccucc

SEQ ID NO: 3056062 - RNA, 17 nt, Human
cuggccuucggccucca

SEQ ID NO: 3056063 - RNA, 18 nt, Human
cuggccuucggccuccau

SEQ ID NO: 3056064 - RNA, 21 nt, Human
cuggccuucggccuccauccu

SEQ ID NO: 3056065 - RNA, 15 nt, Human
cuggccugagcuggg

SEQ ID NO: 3056066 - RNA, 18 nt, Human
cuggccugagcugggaug

SEQ ID NO: 3056067 - RNA, 14 nt, Human
cuggccuggccccu

SEQ ID NO: 3056068 - RNA, 13 nt, Human
cuggccuggcccc

SEQ ID NO: 3056069 - RNA, 13 nt, Human
cuggccucugcac

SEQ ID NO: 3056070 - RNA, 14 nt, Human
cuggccucugcacu

SEQ ID NO: 3056071 - RNA, 16 nt, Human
cuggccugagcuggga

SEQ ID NO: 3056072 - RNA, 22 nt, Human
cuggccucaagugauucuccug

SEQ ID NO: 3056073 - RNA, 12 nt, Human
cuggccucugca

SEQ ID NO: 3056074 - RNA, 23 nt, Human
cuggccucaagugauucuccugc

SEQ ID NO: 3056075 - RNA, 21 nt, Human
cugggaggcucuggagcccac

SEQ ID NO: 3056076 - RNA, 20 nt, Human
cugggaggcucuggagccca

SEQ ID NO: 3056077 - RNA, 18 nt, Human
cugggaggcucuggagcc

SEQ ID NO: 3056078 - RNA, 17 nt, Human
cugggaggcucuggagc

SEQ ID NO: 3056079 - RNA, 19 nt, Human
cugggaggucaaggcugca

SEQ ID NO: 3056080 - RNA, 21 nt, Human
cugggaggucaaggcugcagu

SEQ ID NO: 3056081 - RNA, 20 nt, Human
cugggaucccucauccucau

SEQ ID NO: 3056082 - RNA, 18 nt, Human
cugggaugauuggagggg

SEQ ID NO: 3056083 - RNA, 20 nt, Human
cugggauuacaggugugaac

SEQ ID NO: 3056084 - RNA, 17 nt, Human
cugggauuacaggugug

SEQ ID NO: 3056085 - RNA, 17 nt, Human
cuggcuguuggcugggg

SEQ ID NO: 3056086 - RNA, 16 nt, Human
cuggcuguuggcuggg

SEQ ID NO: 3056087 - RNA, 22 nt, Human
cuggcuggguggcaccagcagc

SEQ ID NO: 3056088 - RNA, 20 nt, Human
cuggcugguuagagguuccc

SEQ ID NO: 3056089 - RNA, 19 nt, Human
cugggagagccuuccaggg

SEQ ID NO: 3056090 - RNA, 20 nt, Human
cugggagagccuuccagggg

SEQ ID NO: 3056091 - RNA, 21 nt, Human
cugggagagccuuccaggggu

SEQ ID NO: 3056092 - RNA, 17 nt, Human
cugggagagccuuccag

SEQ ID NO: 3056093 - RNA, 18 nt, Human
cugggagagccuuccagg

SEQ ID NO: 3056094 - RNA, 20 nt, Human
cugggaaagggauuuucagc

SEQ ID NO: 3056095 - RNA, 12 nt, Human
cugcucugguua

SEQ ID NO: 3056096 - RNA, 23 nt, Human
cugcugccugcuuuuuauggccu

SEQ ID NO: 3056097 - RNA, 14 nt, Human
cugcugccugcuuu

SEQ ID NO: 3056098 - RNA, 14 nt, Human
cugcugcaguugcc

SEQ ID NO: 3056099 - RNA, 10 nt, Human
cugcugcagu

SEQ ID NO: 3056100 - RNA, 13 nt, Human
cugcugcaguugc

SEQ ID NO: 3056101 - RNA, 15 nt, Human
cugcucuccgaccag

SEQ ID NO: 3056102 - RNA, 20 nt, Human
cugcuccucuccccagcaag

SEQ ID NO: 3056103 - RNA, 19 nt, Human
cugcuccucuccccagcaa

SEQ ID NO: 3056104 - RNA, 23 nt, Human
cugcuccucuccccagcaaguga

SEQ ID NO: 3056105 - RNA, 20 nt, Human
cugcggugcuaucuccccca

SEQ ID NO: 3056106 - RNA, 21 nt, Human
cugcggugcuaucucccccag

SEQ ID NO: 3056107 - RNA, 22 nt, Human
cugcggugcuaucucccccagc

SEQ ID NO: 3056108 - RNA, 23 nt, Human
cugcggugcuaucucccccagcc

SEQ ID NO: 3056109 - RNA, 16 nt, Human
cugcucccaccuggcu

SEQ ID NO: 3056110 - RNA, 21 nt, Human
cugcgggggcagugcucaccc

SEQ ID NO: 3056111 - RNA, 17 nt, Human
cugcucccaccuggcuc

SEQ ID NO: 3056112 - RNA, 20 nt, Human
cugcucccaccuggcucugu

SEQ ID NO: 3056113 - RNA, 18 nt, Human
cugcucccaccuggcucu

SEQ ID NO: 3056114 - RNA, 19 nt, Human
cugcucccaccuggcucug

SEQ ID NO: 3056115 - RNA, 22 nt, Human
cugccugcuuuuuauggccugu

SEQ ID NO: 3056116 - RNA, 18 nt, Human
cugcgggggcagugcuca

SEQ ID NO: 3056117 - RNA, 18 nt, Human
cugcggugcuaucucccc

SEQ ID NO: 3056118 - RNA, 19 nt, Human
cugcggugcuaucuccccc

SEQ ID NO: 3056119 - RNA, 23 nt, Human
cugcgguccacccaggagccccg

SEQ ID NO: 3056120 - RNA, 20 nt, Human
cugcccugcccaccuggccu

SEQ ID NO: 3056121 - RNA, 17 nt, Human
cugcccugcccaccugg

SEQ ID NO: 3056122 - RNA, 21 nt, Human
cugcccugcccaccuggccuc

SEQ ID NO: 3056123 - RNA, 16 nt, Human
cugccugaagucacac

SEQ ID NO: 3056124 - RNA, 18 nt, Human
cugccugaagucacacag

SEQ ID NO: 3056125 - RNA, 19 nt, Human
cugccugaagucacacagu

SEQ ID NO: 3056126 - RNA, 13 nt, Human
cugcuugaggcaa

SEQ ID NO: 3056127 - RNA, 20 nt, Human
cugcuugaggcaacucaucu

SEQ ID NO: 3056128 - RNA, 21 nt, Human
cugcuugaggcaacucaucuu

SEQ ID NO: 3056129 - RNA, 17 nt, Human
cugcuggguguggcgca

SEQ ID NO: 3056130 - RNA, 14 nt, Human
cugcuggguguggc

SEQ ID NO: 3056131 - RNA, 15 nt, Human
cugcuggguguggcg

SEQ ID NO: 3056132 - RNA, 12 nt, Human
cugcugcuggcu

SEQ ID NO: 3056133 - RNA, 13 nt, Human
cugcugcuggcug

SEQ ID NO: 3056134 - RNA, 17 nt, Human
cugcuuuuggucugugu

SEQ ID NO: 3056135 - RNA, 15 nt, Human
cugcuuuuggucugu

SEQ ID NO: 3056136 - RNA, 20 nt, Human
cugcuugcuugcuuuuuaau

SEQ ID NO: 3056137 - RNA, 22 nt, Human
cugcuugaggcaacucaucuua

SEQ ID NO: 3056138 - RNA, 13 nt, Human
cugcuugggcuuc

SEQ ID NO: 3056139 - RNA, 15 nt, Human
cugcuugggcuucau

SEQ ID NO: 3056140 - RNA, 17 nt, Human
cugcuugggcuucaucc

SEQ ID NO: 3056141 - RNA, 18 nt, Human
cugcuugggcuucauccu

SEQ ID NO: 3056142 - RNA, 19 nt, Human
cugcuugggcuucauccuc

SEQ ID NO: 3056143 - RNA, 19 nt, Human
cugcuugugaaaggaaaga

SEQ ID NO: 3056144 - RNA, 22 nt, Human
cugcaggucccuaauaaagcug

SEQ ID NO: 3056145 - RNA, 21 nt, Human
cugcaggucccuaauaaagcu

SEQ ID NO: 3056146 - RNA, 20 nt, Human
cugcaggucccuaauaaagc

SEQ ID NO: 3056147 - RNA, 19 nt, Human
cugcaggucccuaauaaag

SEQ ID NO: 3056148 - RNA, 23 nt, Human
cugcaggucccuaauaaagcugu

SEQ ID NO: 3056149 - RNA, 13 nt, Human
cugcaguugccag

SEQ ID NO: 3056150 - RNA, 16 nt, Human
cugcaguugccaguca

SEQ ID NO: 3056151 - RNA, 18 nt, Human
cugcaggucccuaauaaa

SEQ ID NO: 3056152 - RNA, 17 nt, Human
cugcaggucccuaauaa

SEQ ID NO: 3056153 - RNA, 16 nt, Human
cugcaggucccuaaua

SEQ ID NO: 3056154 - RNA, 15 nt, Human
cugcaggucccuaau

SEQ ID NO: 3056155 - RNA, 14 nt, Human
cugcaggucccuaa

SEQ ID NO: 3056156 - RNA, 13 nt, Human
cugcaggucccua

SEQ ID NO: 3056157 - RNA, 12 nt, Human
cugcaggucccu

SEQ ID NO: 3056158 - RNA, 11 nt, Human
cugcagguccc

SEQ ID NO: 3056159 - RNA, 17 nt, Human
cugcagcaauaaagcag

SEQ ID NO: 3056160 - RNA, 10 nt, Human
cugcagaggg

SEQ ID NO: 3056161 - RNA, 16 nt, Human
cugcagcaauaaagca

SEQ ID NO: 3056162 - RNA, 15 nt, Human
cugcagcaauaaagc

SEQ ID NO: 3056163 - RNA, 13 nt, Human
cugcagagggcac

SEQ ID NO: 3056164 - RNA, 21 nt, Human
cugcacuccccugcugggugu

SEQ ID NO: 3056165 - RNA, 18 nt, Human
cugcacuccccugcuggg

SEQ ID NO: 3056166 - RNA, 12 nt, Human
cugcacugucaa

SEQ ID NO: 3056167 - RNA, 19 nt, Human
cugcacuccccugcugggu

SEQ ID NO: 3056168 - RNA, 20 nt, Human
cugcacuccccugcugggug

SEQ ID NO: 3056169 - RNA, 13 nt, Human
cugcacuccccug

SEQ ID NO: 3056170 - RNA, 20 nt, Human
cugcacuccagccuggguga

SEQ ID NO: 3056171 - RNA, 18 nt, Human
cugcaccgggccacagag

SEQ ID NO: 3056172 - RNA, 22 nt, Human
cugaggcccuucucuccagccc

SEQ ID NO: 3056173 - RNA, 23 nt, Human
cugaggcccuucucuccagcccc

SEQ ID NO: 3056174 - RNA, 14 nt, Human
cugcaccggcuggc

SEQ ID NO: 3056175 - RNA, 15 nt, Human
cugcaccggcuggcc

SEQ ID NO: 3056176 - RNA, 15 nt, Human
cugcaccgggccaca

SEQ ID NO: 3056177 - RNA, 14 nt, Human
cugcaccgggccac

SEQ ID NO: 3056178 - RNA, 12 nt, Human
cugccacccugg

SEQ ID NO: 3056179 - RNA, 21 nt, Human
cugccacccuggggagaaagu

SEQ ID NO: 3056180 - RNA, 20 nt, Human
cugcaucaagaugugacaug

SEQ ID NO: 3056181 - RNA, 15 nt, Human
cugcauaugaaagga

SEQ ID NO: 3056182 - RNA, 22 nt, Human
cugccaggaagccagcaggcuc

SEQ ID NO: 3056183 - RNA, 15 nt, Human
cugccauccucccaa

SEQ ID NO: 3056184 - RNA, 21 nt, Human
cugccauccagguucagcuug

SEQ ID NO: 3056185 - RNA, 23 nt, Human
cugccauccuggcccagggcauc

SEQ ID NO: 3056186 - RNA, 21 nt, Human
cugccauccuggcccagggca

SEQ ID NO: 3056187 - RNA, 22 nt, Human
cugccauccuggcccagggcau

SEQ ID NO: 3056188 - RNA, 13 nt, Human
cugccauccuggc

SEQ ID NO: 3056189 - RNA, 16 nt, Human
cugccauccuggccca

SEQ ID NO: 3056190 - RNA, 17 nt, Human
cugccauccuggcccag

SEQ ID NO: 3056191 - RNA, 18 nt, Human
cugccauccuggcccagg

SEQ ID NO: 3056192 - RNA, 19 nt, Human
cugccauccuggcccaggg

SEQ ID NO: 3056193 - RNA, 20 nt, Human
cugccauccuggcccagggc

SEQ ID NO: 3056194 - RNA, 13 nt, Human
cugccaggaagcc

SEQ ID NO: 3056195 - RNA, 14 nt, Human
cugccaggaagcca

SEQ ID NO: 3056196 - RNA, 20 nt, Human
cugccaggaagccagcaggc

SEQ ID NO: 3056197 - RNA, 21 nt, Human
cugccaggaagccagcaggcu

SEQ ID NO: 3056198 - RNA, 15 nt, Human
cugccagcaacgcag

SEQ ID NO: 3056199 - RNA, 13 nt, Human
cugcccggcaggg

SEQ ID NO: 3056200 - RNA, 18 nt, Human
cugccccuggcagccccu

SEQ ID NO: 3056201 - RNA, 17 nt, Human
cugccccuggcagcccc

SEQ ID NO: 3056202 - RNA, 19 nt, Human
cugccccuggcagccccug

SEQ ID NO: 3056203 - RNA, 15 nt, Human
cugccauuucugaga

SEQ ID NO: 3056204 - RNA, 15 nt, Human
cugcccaggccccug

SEQ ID NO: 3056205 - RNA, 14 nt, Human
cugcccaggccccu

SEQ ID NO: 3056206 - RNA, 12 nt, Human
cugcccaccugg

SEQ ID NO: 3056207 - RNA, 13 nt, Human
cugcccaggcccc

SEQ ID NO: 3056208 - RNA, 20 nt, Human
cugcccaggccccugccacc

SEQ ID NO: 3056209 - RNA, 19 nt, Human
cugcccaggccccugccac

SEQ ID NO: 3056210 - RNA, 18 nt, Human
cugcccaggccccugcca

SEQ ID NO: 3056211 - RNA, 16 nt, Human
cugcccaggccccugc

SEQ ID NO: 3056212 - RNA, 18 nt, Human
cucacuauguugcccagg

SEQ ID NO: 3056213 - RNA, 18 nt, Human
cuccauccugaggcucca

SEQ ID NO: 3056214 - RNA, 14 nt, Human
cuccauccugaggc

SEQ ID NO: 3056215 - RNA, 16 nt, Human
cuccauccugaggcuc

SEQ ID NO: 3056216 - RNA, 13 nt, Human
cuccaugugggcu

SEQ ID NO: 3056217 - RNA, 17 nt, Human
cucccaaagugcuggga

SEQ ID NO: 3056218 - RNA, 21 nt, Human
cucccaucucacacaugagca

SEQ ID NO: 3056219 - RNA, 11 nt, Human
cucccaucugu

SEQ ID NO: 3056220 - RNA, 14 nt, Human
cucccaucugugaa

SEQ ID NO: 3056221 - RNA, 15 nt, Human
cucccaucugugaaa

SEQ ID NO: 3056222 - RNA, 18 nt, Human
cucccaucugugaaagga

SEQ ID NO: 3056223 - RNA, 23 nt, Human
cucccaucugugaaaggaaagag

SEQ ID NO: 3056224 - RNA, 16 nt, Human
cucccaacucacccca

SEQ ID NO: 3056225 - RNA, 17 nt, Human
cucccaacucaccccag

SEQ ID NO: 3056226 - RNA, 18 nt, Human
cucccaaagugcugggau

SEQ ID NO: 3056227 - RNA, 22 nt, Human
cucccaacucaccccagcccca

SEQ ID NO: 3056228 - RNA, 12 nt, Human
cuccccugcugg

SEQ ID NO: 3056229 - RNA, 20 nt, Human
cuccccagccccaucccaaa

SEQ ID NO: 3056230 - RNA, 20 nt, Human
cuccccagcaagugagagcu

SEQ ID NO: 3056231 - RNA, 12 nt, Human
cuccccagcaag

SEQ ID NO: 3056232 - RNA, 18 nt, Human
cucccaugagggagaugc

SEQ ID NO: 3056233 - RNA, 20 nt, Human
cucccaugagggagaugcca

SEQ ID NO: 3056234 - RNA, 22 nt, Human
cucccaugagggagaugccaug

SEQ ID NO: 3056235 - RNA, 17 nt, Human
cucccgaguagcuggga

SEQ ID NO: 3056236 - RNA, 16 nt, Human
cucccgaguagcuggg

SEQ ID NO: 3056237 - RNA, 18 nt, Human
cucccgaauagcugggac

SEQ ID NO: 3056238 - RNA, 15 nt, Human
cucccgaguagcugg

SEQ ID NO: 3056239 - RNA, 13 nt, Human
cuccccugcuggg

SEQ ID NO: 3056240 - RNA, 16 nt, Human
cucccgaauagcuggg

SEQ ID NO: 3056241 - RNA, 17 nt, Human
cucccgaauagcuggga

SEQ ID NO: 3056242 - RNA, 22 nt, Human
cuccucuccccagcaagugaga

SEQ ID NO: 3056243 - RNA, 22 nt, Human
cuccuccagccgccaugcuccu

SEQ ID NO: 3056244 - RNA, 17 nt, Human
cucccuuucuucccuac

SEQ ID NO: 3056245 - RNA, 18 nt, Human
cucccucagucuggcccu

SEQ ID NO: 3056246 - RNA, 15 nt, Human
cuccgaccagacacc

SEQ ID NO: 3056247 - RNA, 15 nt, Human
cuccugccucagccu

SEQ ID NO: 3056248 - RNA, 22 nt, Human
cuccugccucgaacuggcugca

SEQ ID NO: 3056249 - RNA, 19 nt, Human
cuccugugugugcgccuac

SEQ ID NO: 3056250 - RNA, 16 nt, Human
cuccugugugugcgcc

SEQ ID NO: 3056251 - RNA, 11 nt, Human
cuccugcaggc

SEQ ID NO: 3056252 - RNA, 16 nt, Human
cuccugcaggcagcca

SEQ ID NO: 3056253 - RNA, 17 nt, Human
cuccugcaggcagccag

SEQ ID NO: 3056254 - RNA, 14 nt, Human
cuccugccucagcc

SEQ ID NO: 3056255 - RNA, 13 nt, Human
cuccugccucagc

SEQ ID NO: 3056256 - RNA, 11 nt, Human
cuccugcccuu

SEQ ID NO: 3056257 - RNA, 18 nt, Human
cuccugcaggcagccagg

SEQ ID NO: 3056258 - RNA, 20 nt, Human
cuccugcaggcagccaggcc

SEQ ID NO: 3056259 - RNA, 13 nt, Human
cucuacccuggca

SEQ ID NO: 3056260 - RNA, 20 nt, Human
cucuaccauccccuguagag

SEQ ID NO: 3056261 - RNA, 23 nt, Human
cucuagggaaaaaccagcgugug

SEQ ID NO: 3056262 - RNA, 17 nt, Human
cucuaggaaauauuuau

SEQ ID NO: 3056263 - RNA, 15 nt, Human
cucuaggaaauauuu

SEQ ID NO: 3056264 - RNA, 16 nt, Human
cuccuucacagauggg

SEQ ID NO: 3056265 - RNA, 17 nt, Human
cuccuucacagaugggu

SEQ ID NO: 3056266 - RNA, 14 nt, Human
cuccugugugugcg

SEQ ID NO: 3056267 - RNA, 20 nt, Human
cuccugugugugcgccuaca

SEQ ID NO: 3056268 - RNA, 19 nt, Human
cuccuucacagaugggugc

SEQ ID NO: 3056269 - RNA, 13 nt, Human
cucuacaaaaagc

SEQ ID NO: 3056270 - RNA, 16 nt, Human
cucuacagaggccaug

SEQ ID NO: 3056271 - RNA, 14 nt, Human
cucuacagaggcca

SEQ ID NO: 3056272 - RNA, 19 nt, Human
cucuacagaggccaugggc

SEQ ID NO: 3056273 - RNA, 13 nt, Human
cucuacagaggcc

SEQ ID NO: 3056274 - RNA, 21 nt, Human
cucuccugauagucuuucagu

SEQ ID NO: 3056275 - RNA, 13 nt, Human
cucuccucugcug

SEQ ID NO: 3056276 - RNA, 14 nt, Human
cucuccucugcugc

SEQ ID NO: 3056277 - RNA, 15 nt, Human
cucuccucugcugcu

SEQ ID NO: 3056278 - RNA, 18 nt, Human
cucuccucugcugcuggc

SEQ ID NO: 3056279 - RNA, 13 nt, Human
cucuccccagcaa

SEQ ID NO: 3056280 - RNA, 19 nt, Human
cucuccagccccuggaugc

SEQ ID NO: 3056281 - RNA, 12 nt, Human
cucuccucugcu

SEQ ID NO: 3056282 - RNA, 24 nt, Human
cucuccccagcaagugagagcugg

SEQ ID NO: 3056283 - RNA, 22 nt, Human
cucuccccagcaagugagagcu

SEQ ID NO: 3056284 - RNA, 14 nt, Human
cucuccccagcaag

SEQ ID NO: 3056285 - RNA, 12 nt, Human
cucucucacucc

SEQ ID NO: 3056286 - RNA, 13 nt, Human
cucucucaggcca

SEQ ID NO: 3056287 - RNA, 14 nt, Human
cucuccagccccug

SEQ ID NO: 3056288 - RNA, 15 nt, Human
cucuccagccccugg

SEQ ID NO: 3056289 - RNA, 16 nt, Human
cucuccagccccugga

SEQ ID NO: 3056290 - RNA, 17 nt, Human
cucuccagccccuggau

SEQ ID NO: 3056291 - RNA, 18 nt, Human
cucuccagccccuggaug

SEQ ID NO: 3056292 - RNA, 17 nt, Human
cucucaggccagcugcu

SEQ ID NO: 3056293 - RNA, 18 nt, Human
cucucaggccagcugcuu

SEQ ID NO: 3056294 - RNA, 19 nt, Human
cucucaggccagcugcuug

SEQ ID NO: 3056295 - RNA, 21 nt, Human
cucucaggccagcugcuuggg

SEQ ID NO: 3056296 - RNA, 22 nt, Human
cucucaggccaaacucaccugc

SEQ ID NO: 3056297 - RNA, 23 nt, Human
cucucaggccaaacucaccugcc

SEQ ID NO: 3056298 - RNA, 13 nt, Human
cucucaggccagc

SEQ ID NO: 3056299 - RNA, 15 nt, Human
cucucaggccagcug

SEQ ID NO: 3056300 - RNA, 20 nt, Human
cucucaggccaaacucaccu

SEQ ID NO: 3056301 - RNA, 21 nt, Human
cucucaggccaaacucaccug

SEQ ID NO: 3056302 - RNA, 12 nt, Human
cucucaggccaa

SEQ ID NO: 3056303 - RNA, 21 nt, Human
cucuaguuugauuaaauucuu

SEQ ID NO: 3056304 - RNA, 20 nt, Human
cucuaguuugauuaaauucu

SEQ ID NO: 3056305 - RNA, 19 nt, Human
cucuaguuugauuaaauuc

SEQ ID NO: 3056306 - RNA, 15 nt, Human
cucuaguuugauuaa

SEQ ID NO: 3056307 - RNA, 11 nt, Human
cugacagauuu

SEQ ID NO: 3056308 - RNA, 15 nt, Human
cugacagauuuccau

SEQ ID NO: 3056309 - RNA, 21 nt, Human
cugacaggcaaugcuggcugu

SEQ ID NO: 3056310 - RNA, 21 nt, Human
cugacauuguuggccaaagcc

SEQ ID NO: 3056311 - RNA, 13 nt, Human
cugacccaugcug

SEQ ID NO: 3056312 - RNA, 14 nt, Human
cugacccacugcuu

SEQ ID NO: 3056313 - RNA, 13 nt, Human
cugacccacugcu

SEQ ID NO: 3056314 - RNA, 14 nt, Human
cugacccaugcugc

SEQ ID NO: 3056315 - RNA, 15 nt, Human
cugacccaugcugcc

SEQ ID NO: 3056316 - RNA, 16 nt, Human
cugacccaugcugccc

SEQ ID NO: 3056317 - RNA, 12 nt, Human
cugacccacugc

SEQ ID NO: 3056318 - RNA, 22 nt, Human
cugacauuguuggccaaagcca

SEQ ID NO: 3056319 - RNA, 15 nt, Human
cugacuaugacauaa

SEQ ID NO: 3056320 - RNA, 16 nt, Human
cugacuguuuucucuu

SEQ ID NO: 3056321 - RNA, 17 nt, Human
cugacucuuaagaagac

SEQ ID NO: 3056322 - RNA, 18 nt, Human
cugacuguuuucucuuga

SEQ ID NO: 3056323 - RNA, 15 nt, Human
cugacuucuaaguaa

SEQ ID NO: 3056324 - RNA, 13 nt, Human
cugacuucuaagu

SEQ ID NO: 3056325 - RNA, 16 nt, Human
cugacuucuaaguaaa

SEQ ID NO: 3056326 - RNA, 14 nt, Human
cugagaaauuuaua

SEQ ID NO: 3056327 - RNA, 11 nt, Human
cugagaaauuu

SEQ ID NO: 3056328 - RNA, 23 nt, Human
cugagaaagacuauucaaacagu

SEQ ID NO: 3056329 - RNA, 22 nt, Human
cugagaaagacuauucaaacag

SEQ ID NO: 3056330 - RNA, 14 nt, Human
cugagacagcccgg

SEQ ID NO: 3056331 - RNA, 15 nt, Human
cugagacagcccggg

SEQ ID NO: 3056332 - RNA, 17 nt, Human
cugaggaucagaguaau

SEQ ID NO: 3056333 - RNA, 19 nt, Human
cugaggaucagaguaaucc

SEQ ID NO: 3056334 - RNA, 12 nt, Human
cugaggcccaga

SEQ ID NO: 3056335 - RNA, 13 nt, Human
cugaggcccagag

SEQ ID NO: 3056336 - RNA, 14 nt, Human
cugaggcccagagg

SEQ ID NO: 3056337 - RNA, 15 nt, Human
cugaggcccagaggg

SEQ ID NO: 3056338 - RNA, 16 nt, Human
cugaggcccagagggc

SEQ ID NO: 3056339 - RNA, 17 nt, Human
cugaggcccagagggcc

SEQ ID NO: 3056340 - RNA, 18 nt, Human
cugaggcccagagggccu

SEQ ID NO: 3056341 - RNA, 19 nt, Human
cugaggcccagagggccug

SEQ ID NO: 3056342 - RNA, 21 nt, Human
cugaggcccagagggccugca

SEQ ID NO: 3056343 - RNA, 23 nt, Human
cugaggcccagagggccugcaag

SEQ ID NO: 3056344 - RNA, 14 nt, Human
cugaggcccuucuc

SEQ ID NO: 3056345 - RNA, 15 nt, Human
cugaggcccuucucu

SEQ ID NO: 3056346 - RNA, 18 nt, Human
cugaggcccuucucucca

SEQ ID NO: 3056347 - RNA, 19 nt, Human
cugaggcccuucucuccag

SEQ ID NO: 3056348 - RNA, 20 nt, Human
cugaggcccuucucuccagc

SEQ ID NO: 3056349 - RNA, 16 nt, Human
cugagacagcccgggc

SEQ ID NO: 3056350 - RNA, 17 nt, Human
cugagacagcccgggcu

SEQ ID NO: 3056351 - RNA, 18 nt, Human
cugagacagcccgggcuc

SEQ ID NO: 3056352 - RNA, 17 nt, Human
cugagccagauuucacu

SEQ ID NO: 3056353 - RNA, 18 nt, Human
cugagccagauuucacuc

SEQ ID NO: 3056354 - RNA, 19 nt, Human
cugagccagauuucacucu

SEQ ID NO: 3056355 - RNA, 20 nt, Human
cugagccagauuucacucuc

SEQ ID NO: 3056356 - RNA, 21 nt, Human
cugagccagauuucacucucc

SEQ ID NO: 3056357 - RNA, 15 nt, Human
cugagccagauuuca

SEQ ID NO: 3056358 - RNA, 16 nt, Human
cugagcgacagugaga

SEQ ID NO: 3056359 - RNA, 20 nt, Human
cugagcgacagugagacucu

SEQ ID NO: 3056360 - RNA, 19 nt, Human
cucuggagcccacuguacu

SEQ ID NO: 3056361 - RNA, 14 nt, Human
cucuggacaggcau

SEQ ID NO: 3056362 - RNA, 22 nt, Human
cucuggacaggcauguucucug

SEQ ID NO: 3056363 - RNA, 16 nt, Human
cucuggacaggcaugu

SEQ ID NO: 3056364 - RNA, 12 nt, Human
cucuggcagcuc

SEQ ID NO: 3056365 - RNA, 14 nt, Human
cucuggcagcucag

SEQ ID NO: 3056366 - RNA, 15 nt, Human
cucuggcagcucaga

SEQ ID NO: 3056367 - RNA, 16 nt, Human
cucuggcagcucagag

SEQ ID NO: 3056368 - RNA, 12 nt, Human
cucuggccuucg

SEQ ID NO: 3056369 - RNA, 19 nt, Human
cucuggccuucggccucca

SEQ ID NO: 3056370 - RNA, 15 nt, Human
cucuggacaggcaug

SEQ ID NO: 3056371 - RNA, 21 nt, Human
cucugccugaagucacacagu

SEQ ID NO: 3056372 - RNA, 10 nt, Human
cucugccuga

SEQ ID NO: 3056373 - RNA, 22 nt, Human
cucugccugaagucacacagug

SEQ ID NO: 3056374 - RNA, 13 nt, Human
cucucuccucccu

SEQ ID NO: 3056375 - RNA, 15 nt, Human
cucugugucaggugg

SEQ ID NO: 3056376 - RNA, 16 nt, Human
cucuguggcgagccau

SEQ ID NO: 3056377 - RNA, 13 nt, Human
cucuuagaaaaac

SEQ ID NO: 3056378 - RNA, 15 nt, Human
cucuuagaaaaacca

SEQ ID NO: 3056379 - RNA, 14 nt, Human
cucuuccaggcugg

SEQ ID NO: 3056380 - RNA, 15 nt, Human
cucuuccaggcuggg

SEQ ID NO: 3056381 - RNA, 13 nt, Human
cucuuccaggcug

SEQ ID NO: 3056382 - RNA, 19 nt, Human
cucuuggguucaagcgauu

SEQ ID NO: 3056383 - RNA, 21 nt, Human
cucuuggguucaagcgauucu

SEQ ID NO: 3056384 - RNA, 22 nt, Human
cucuugaaauauaggaacuuaa

SEQ ID NO: 3056385 - RNA, 22 nt, Human
cucuucuuuaaagggauggcaa

SEQ ID NO: 3056386 - RNA, 17 nt, Human
cucuuucccucccuucc

SEQ ID NO: 3056387 - RNA, 13 nt, Human
cucuuucccuccc

SEQ ID NO: 3056388 - RNA, 23 nt, Human
cucuuuaaugucacaggcagguc

SEQ ID NO: 3056389 - RNA, 22 nt, Human
cucuuuaaugucacaggcaggu

SEQ ID NO: 3056390 - RNA, 21 nt, Human
cucuuuaaugucacaggcagg

SEQ ID NO: 3056391 - RNA, 20 nt, Human
cucuuuaaugucacaggcag

SEQ ID NO: 3056392 - RNA, 13 nt, Human
cucuugguccugc

SEQ ID NO: 3056393 - RNA, 15 nt, Human
cucuugguccugcug

SEQ ID NO: 3056394 - RNA, 16 nt, Human
cucuugguccugcugc

SEQ ID NO: 3056395 - RNA, 18 nt, Human
cucuuuaaugucacaggc

SEQ ID NO: 3056396 - RNA, 19 nt, Human
cugaagaauugaaaaacca

SEQ ID NO: 3056397 - RNA, 14 nt, Human
cugaagaagauggu

SEQ ID NO: 3056398 - RNA, 23 nt, Human
cugaagaagcaccaaucaugaau

SEQ ID NO: 3056399 - RNA, 13 nt, Human
cugaaauuuccug

SEQ ID NO: 3056400 - RNA, 23 nt, Human
cugaaauuuccugggagcuuuug

SEQ ID NO: 3056401 - RNA, 16 nt, Human
cugaaauuuccuggga

SEQ ID NO: 3056402 - RNA, 15 nt, Human
cugaaagcccugagc

SEQ ID NO: 3056403 - RNA, 16 nt, Human
cugaaagcccugagcu

SEQ ID NO: 3056404 - RNA, 17 nt, Human
cugaaagcccugagcuu

SEQ ID NO: 3056405 - RNA, 18 nt, Human
cugaaagcccugagcuuu

SEQ ID NO: 3056406 - RNA, 19 nt, Human
cugaaagcccugagcuuuc

SEQ ID NO: 3056407 - RNA, 23 nt, Human
cugaaagcccugagcuuucugcu

SEQ ID NO: 3056408 - RNA, 21 nt, Human
cugaaauaaacgucuuaaaua

SEQ ID NO: 3056409 - RNA, 16 nt, Human
cgcccuggacugugug

SEQ ID NO: 3056410 - RNA, 22 nt, Human
cgcccaggcuuagucacugaga

SEQ ID NO: 3056411 - RNA, 21 nt, Human
cgccccucccacagcgcuggc

SEQ ID NO: 3056412 - RNA, 19 nt, Human
cgccccucccacagcgcug

SEQ ID NO: 3056413 - RNA, 23 nt, Human
cgccaggggaaaaucagccugcu

SEQ ID NO: 3056414 - RNA, 14 nt, Human
cgccaucccagccc

SEQ ID NO: 3056415 - RNA, 16 nt, Human
cgccaucccagcccca

SEQ ID NO: 3056416 - RNA, 17 nt, Human
ccucugcccacucccug

SEQ ID NO: 3056417 - RNA, 19 nt, Human
ccucugcccacucccugca

SEQ ID NO: 3056418 - RNA, 20 nt, Human
ccucugcccacucccugcaa

SEQ ID NO: 3056419 - RNA, 22 nt, Human
cgccagauucuuuccugaggcu

SEQ ID NO: 3056420 - RNA, 22 nt, Human
cgcugucagccauuccuguucc

SEQ ID NO: 3056421 - RNA, 18 nt, Human
cgcucucuggccuucggc

SEQ ID NO: 3056422 - RNA, 16 nt, Human
cgcugugcugcccugc

SEQ ID NO: 3056423 - RNA, 17 nt, Human
cgcugugcugcccugcc

SEQ ID NO: 3056424 - RNA, 15 nt, Human
cgcugugcugcccug

SEQ ID NO: 3056425 - RNA, 20 nt, Human
cggaaaacaugcuacacacu

SEQ ID NO: 3056426 - RNA, 15 nt, Human
cggaaaacaugcuac

SEQ ID NO: 3056427 - RNA, 16 nt, Human
cgcuacccgggaaggg

SEQ ID NO: 3056428 - RNA, 14 nt, Human
cgcucucuggccuu

SEQ ID NO: 3056429 - RNA, 15 nt, Human
cgcucucuggccuuc

SEQ ID NO: 3056430 - RNA, 22 nt, Human
cgcuaagagggagggagggcuc

SEQ ID NO: 3056431 - RNA, 21 nt, Human
cgcuaagagggagggagggcu

SEQ ID NO: 3056432 - RNA, 12 nt, Human
cggccuccaucc

SEQ ID NO: 3056433 - RNA, 24 nt, Human
cggccaggccagagggagugacag

SEQ ID NO: 3056434 - RNA, 19 nt, Human
cggccccugcugguucagg

SEQ ID NO: 3056435 - RNA, 18 nt, Human
cggccccugcugguucag

SEQ ID NO: 3056436 - RNA, 13 nt, Human
cggccccugcugg

SEQ ID NO: 3056437 - RNA, 13 nt, Human
cggaagagccuug

SEQ ID NO: 3056438 - RNA, 11 nt, Human
cggccaccugc

SEQ ID NO: 3056439 - RNA, 15 nt, Human
cggccaccugcggug

SEQ ID NO: 3056440 - RNA, 16 nt, Human
cggccaccugcggugc

SEQ ID NO: 3056441 - RNA, 17 nt, Human
cggccaccugcggugcu

SEQ ID NO: 3056442 - RNA, 17 nt, Human
cggugagcuacaaaugc

SEQ ID NO: 3056443 - RNA, 21 nt, Human
cggugagaggggaacagacug

SEQ ID NO: 3056444 - RNA, 20 nt, Human
cggugagaggggaacagacu

SEQ ID NO: 3056445 - RNA, 22 nt, Human
cggucggguuuuauuguuuaaa

SEQ ID NO: 3056446 - RNA, 20 nt, Human
cgguccacccaggagccccg

SEQ ID NO: 3056447 - RNA, 16 nt, Human
cgguccacccaggagc

SEQ ID NO: 3056448 - RNA, 15 nt, Human
cgguccacccaggag

SEQ ID NO: 3056449 - RNA, 14 nt, Human
cgguccacccagga

SEQ ID NO: 3056450 - RNA, 21 nt, Human
cggguuuuauuguuuaaaauc

SEQ ID NO: 3056451 - RNA, 23 nt, Human
cggcuggccuggccccucagggu

SEQ ID NO: 3056452 - RNA, 22 nt, Human
cggcuggccuggccccucaggg

SEQ ID NO: 3056453 - RNA, 19 nt, Human
cggcuggccuggccccuca

SEQ ID NO: 3056454 - RNA, 22 nt, Human
cgggcacucagaagacacugau

SEQ ID NO: 3056455 - RNA, 14 nt, Human
cgggcacucagaag

SEQ ID NO: 3056456 - RNA, 22 nt, Human
cggggacagcuccuucuguccu

SEQ ID NO: 3056457 - RNA, 18 nt, Human
cgggaggucgaggcagga

SEQ ID NO: 3056458 - RNA, 20 nt, Human
cgggaggucgaggcaggagg

SEQ ID NO: 3056459 - RNA, 15 nt, Human
cgggggcagagaggg

SEQ ID NO: 3056460 - RNA, 14 nt, Human
cgggggcagugcuc

SEQ ID NO: 3056461 - RNA, 22 nt, Human
cgggggcagugcucacccacac

SEQ ID NO: 3056462 - RNA, 23 nt, Human
cggggacagcuccuucuguccua

SEQ ID NO: 3056463 - RNA, 17 nt, Human
cguggcugcuucaagga

SEQ ID NO: 3056464 - RNA, 22 nt, Human
cggugcuaucucccccagcccc

SEQ ID NO: 3056465 - RNA, 20 nt, Human
cggugcuaucucccccagcc

SEQ ID NO: 3056466 - RNA, 21 nt, Human
cggugcuaucucccccagccc

SEQ ID NO: 3056467 - RNA, 18 nt, Human
cggugcuaucucccccag

SEQ ID NO: 3056468 - RNA, 16 nt, Human
cgucucauacucaccu

SEQ ID NO: 3056469 - RNA, 16 nt, Human
cgucuaccugaggggc

SEQ ID NO: 3056470 - RNA, 14 nt, Human
cgucuccagcugcu

SEQ ID NO: 3056471 - RNA, 16 nt, Human
cgugcacacaccagag

SEQ ID NO: 3056472 - RNA, 22 nt, Human
cgucugacaggcaaugcuggcu

SEQ ID NO: 3056473 - RNA, 21 nt, Human
cgucugacaggcaaugcuggc

SEQ ID NO: 3056474 - RNA, 20 nt, Human
cgucugacaggcaaugcugg

SEQ ID NO: 3056475 - RNA, 23 nt, Human
cgugcauaccacuuuuguucuug

SEQ ID NO: 3056476 - RNA, 21 nt, Human
cgugcaguggugcgaucuggg

SEQ ID NO: 3056477 - RNA, 19 nt, Human
cgugcacacaccagagccc

SEQ ID NO: 3056478 - RNA, 18 nt, Human
cgugcacacaccagagcc

SEQ ID NO: 3056479 - RNA, 14 nt, Human
cgugcacacaccag

SEQ ID NO: 3056480 - RNA, 18 nt, Human
cgugcacgcacacugucu

SEQ ID NO: 3056481 - RNA, 23 nt, Human
cuaaauuugaauguuaagcagau

SEQ ID NO: 3056482 - RNA, 15 nt, Human
cuaacaugauuuggg

SEQ ID NO: 3056483 - RNA, 15 nt, Human
cuaacauggaaguac

SEQ ID NO: 3056484 - RNA, 17 nt, Human
cuaacauggaaguacua

SEQ ID NO: 3056485 - RNA, 16 nt, Human
cuaaauguugaaagau

SEQ ID NO: 3056486 - RNA, 23 nt, Human
cuaaauugacacuuaaaaauggu

SEQ ID NO: 3056487 - RNA, 20 nt, Human
cuaaauauauuuuaagacga

SEQ ID NO: 3056488 - RNA, 18 nt, Human
cuaaauauauuuuaagac

SEQ ID NO: 3056489 - RNA, 17 nt, Human
cuaaauauauuuuaaga

SEQ ID NO: 3056490 - RNA, 18 nt, Human
cuaaauggaaccacucua

SEQ ID NO: 3056491 - RNA, 17 nt, Human
cuaaauggaaccacucu

SEQ ID NO: 3056492 - RNA, 16 nt, Human
cuaaauggaaccacuc

SEQ ID NO: 3056493 - RNA, 15 nt, Human
cuaaauggaaccacu

SEQ ID NO: 3056494 - RNA, 22 nt, Human
cuauuuuaauaaacacucuuga

SEQ ID NO: 3056495 - RNA, 18 nt, Human
cuauuuuaauaaacacuc

SEQ ID NO: 3056496 - RNA, 14 nt, Human
cuaugcauuugaaa

SEQ ID NO: 3056497 - RNA, 19 nt, Human
cucaacucuccuccagagu

SEQ ID NO: 3056498 - RNA, 20 nt, Human
cucaacucuccuccagaguc

SEQ ID NO: 3056499 - RNA, 21 nt, Human
cucaacucuccuccagaguca

SEQ ID NO: 3056500 - RNA, 17 nt, Human
cucacuauguugcccag

SEQ ID NO: 3056501 - RNA, 16 nt, Human
cucacuauguugccca

SEQ ID NO: 3056502 - RNA, 17 nt, Human
cucaccccuugccauaa

SEQ ID NO: 3056503 - RNA, 12 nt, Human
cucaccccagcc

SEQ ID NO: 3056504 - RNA, 13 nt, Human
cucaccccagccc

SEQ ID NO: 3056505 - RNA, 19 nt, Human
cucaccagccccagugccc

SEQ ID NO: 3056506 - RNA, 21 nt, Human
cucaccagccccagugcccac

SEQ ID NO: 3056507 - RNA, 20 nt, Human
cucaccagccccagugccca

SEQ ID NO: 3056508 - RNA, 20 nt, Human
cucaagugauucuccugccu

SEQ ID NO: 3056509 - RNA, 19 nt, Human
cucaagugauucuccugcc

SEQ ID NO: 3056510 - RNA, 18 nt, Human
cucaagugauucuccugc

SEQ ID NO: 3056511 - RNA, 23 nt, Human
cucacaguccuuaccagcagagc

SEQ ID NO: 3056512 - RNA, 21 nt, Human
cuaugacauaaaaacaacuuu

SEQ ID NO: 3056513 - RNA, 12 nt, Human
cuaugcauuuga

SEQ ID NO: 3056514 - RNA, 11 nt, Human
cuaugcauuug

SEQ ID NO: 3056515 - RNA, 20 nt, Human
cuaucaaguauuauaccuuu

SEQ ID NO: 3056516 - RNA, 22 nt, Human
cuauauuuuuuguuaaaugauu

SEQ ID NO: 3056517 - RNA, 18 nt, Human
cuaugacauaaaaacaac

SEQ ID NO: 3056518 - RNA, 14 nt, Human
cuaugacacaugca

SEQ ID NO: 3056519 - RNA, 13 nt, Human
cuaugaaauauua

SEQ ID NO: 3056520 - RNA, 23 nt, Human
cuauauuguuuucaguguacaug

SEQ ID NO: 3056521 - RNA, 20 nt, Human
cuauauuuuuuguuaaauga

SEQ ID NO: 3056522 - RNA, 22 nt, Human
cuauauuguuuucaguguacau

SEQ ID NO: 3056523 - RNA, 19 nt, Human
cuauauuguuugcuaagca

SEQ ID NO: 3056524 - RNA, 18 nt, Human
cuauauuguuugcuaagc

SEQ ID NO: 3056525 - RNA, 16 nt, Human
cuaguaugaaauuaua

SEQ ID NO: 3056526 - RNA, 23 nt, Human
cuaguaucaaaagaaagaaaauc

SEQ ID NO: 3056527 - RNA, 15 nt, Human
cuaguaucaaaagaa

SEQ ID NO: 3056528 - RNA, 17 nt, Human
cuaguaucaaaagaaag

SEQ ID NO: 3056529 - RNA, 22 nt, Human
cuaguauuucuaugaaauauua

SEQ ID NO: 3056530 - RNA, 19 nt, Human
cuaguauuucuaugaaaua

SEQ ID NO: 3056531 - RNA, 20 nt, Human
cuaguauuucuaugaaauau

SEQ ID NO: 3056532 - RNA, 21 nt, Human
cuaggcauuugcugaauacag

SEQ ID NO: 3056533 - RNA, 21 nt, Human
cuagugugguguuuccuggca

SEQ ID NO: 3056534 - RNA, 22 nt, Human
cuagugugguguuuccuggcac

SEQ ID NO: 3056535 - RNA, 23 nt, Human
cuagugugguguuuccuggcacu

SEQ ID NO: 3056536 - RNA, 19 nt, Human
cuagugugguguuuccugg

SEQ ID NO: 3056537 - RNA, 21 nt, Human
cuaggaagacuuuggaaagag

SEQ ID NO: 3056538 - RNA, 13 nt, Human
cuaggaacacucc

SEQ ID NO: 3056539 - RNA, 15 nt, Human
cuaggaacacuccuu

SEQ ID NO: 3056540 - RNA, 22 nt, Human
cuaggaaauauuuauuuuaaua

SEQ ID NO: 3056541 - RNA, 17 nt, Human
cuaggaggucucuaaga

SEQ ID NO: 3056542 - RNA, 22 nt, Human
cuaggaccccuccaugugggcu

SEQ ID NO: 3056543 - RNA, 20 nt, Human
cuaggacccgucuccagcug

SEQ ID NO: 3056544 - RNA, 21 nt, Human
cuaggacccgucuccagcugc

SEQ ID NO: 3056545 - RNA, 22 nt, Human
cuaggacccgucuccagcugcu

SEQ ID NO: 3056546 - RNA, 23 nt, Human
cuaggacccgucuccagcugcug

SEQ ID NO: 3056547 - RNA, 22 nt, Human
cuaggacugaauuaugaaacuu

SEQ ID NO: 3056548 - RNA, 21 nt, Human
cuacuguaaggcaaucauggu

SEQ ID NO: 3056549 - RNA, 16 nt, Human
cuacuguaauuuguga

SEQ ID NO: 3056550 - RNA, 17 nt, Human
cuacuguaauuugugau

SEQ ID NO: 3056551 - RNA, 14 nt, Human
cuacugaggugcua

SEQ ID NO: 3056552 - RNA, 14 nt, Human
cuacccgggaaggg

SEQ ID NO: 3056553 - RNA, 15 nt, Human
cuacccgggaagggg

SEQ ID NO: 3056554 - RNA, 20 nt, Human
cuacccgggaagggggcugg

SEQ ID NO: 3056555 - RNA, 21 nt, Human
cuacccgggaagggggcuggg

SEQ ID NO: 3056556 - RNA, 21 nt, Human
cuacucugugucagguggggc

SEQ ID NO: 3056557 - RNA, 16 nt, Human
cuacucugugucaggu

SEQ ID NO: 3056558 - RNA, 13 nt, Human
cuacucuguguca

SEQ ID NO: 3056559 - RNA, 22 nt, Human
cuacuuauuguagcauccugga

SEQ ID NO: 3056560 - RNA, 15 nt, Human
cuacuugggaggcug

SEQ ID NO: 3056561 - RNA, 18 nt, Human
cuacuugggaggcugaga

SEQ ID NO: 3056562 - RNA, 19 nt, Human
cuacuugggaggcugagau

SEQ ID NO: 3056563 - RNA, 17 nt, Human
cuagcacuuugggaggc

SEQ ID NO: 3056564 - RNA, 17 nt, Human
cuagagugaacuugggc

SEQ ID NO: 3056565 - RNA, 21 nt, Human
cuagagugaacuugggccacu

SEQ ID NO: 3056566 - RNA, 20 nt, Human
cuagacgagcaggcuucuuc

SEQ ID NO: 3056567 - RNA, 21 nt, Human
cuagacgagcaggcuucuucc

SEQ ID NO: 3056568 - RNA, 13 nt, Human
cuaauaaagcugu

SEQ ID NO: 3056569 - RNA, 18 nt, Human
cuaauauguaacaagcca

SEQ ID NO: 3056570 - RNA, 12 nt, Human
cuaauaaagcug

SEQ ID NO: 3056571 - RNA, 21 nt, Human
cuaauaaaauuuaaaagucuu

SEQ ID NO: 3056572 - RNA, 16 nt, Human
cuaaggugugcucuga

SEQ ID NO: 3056573 - RNA, 20 nt, Human
cuaauaaaauuuaaaagucu

SEQ ID NO: 3056574 - RNA, 19 nt, Human
cuaauguaauaacugugaa

SEQ ID NO: 3056575 - RNA, 14 nt, Human
cuaauguacugcau

SEQ ID NO: 3056576 - RNA, 16 nt, Human
cuaauguacugcauau

SEQ ID NO: 3056577 - RNA, 19 nt, Human
cuacccagcgagcccuggu

SEQ ID NO: 3056578 - RNA, 20 nt, Human
cuacccagcgagcccuggug

SEQ ID NO: 3056579 - RNA, 22 nt, Human
cuacccacccuccuuucaccac

SEQ ID NO: 3056580 - RNA, 13 nt, Human
cuacccacccucc

SEQ ID NO: 3056581 - RNA, 17 nt, Human
cuacccacccuccuuuc

SEQ ID NO: 3056582 - RNA, 15 nt, Human
cuacagaggccaugg

SEQ ID NO: 3056583 - RNA, 18 nt, Human
cuacacugugcugagucu

SEQ ID NO: 3056584 - RNA, 17 nt, Human
cuacacuccagugagac

SEQ ID NO: 3056585 - RNA, 16 nt, Human
cuacacuccagugaga

SEQ ID NO: 3056586 - RNA, 15 nt, Human
cuacacacugcaugu

SEQ ID NO: 3056587 - RNA, 13 nt, Human
cuacacacugcau

SEQ ID NO: 3056588 - RNA, 17 nt, Human
cuaaccagcagaaaugc

SEQ ID NO: 3056589 - RNA, 14 nt, Human
cuaagcaaaaugug

SEQ ID NO: 3056590 - RNA, 17 nt, Human
cuaaccacgcuggaccu

SEQ ID NO: 3056591 - RNA, 16 nt, Human
cuaaccagcagaaaug

SEQ ID NO: 3056592 - RNA, 15 nt, Human
cuaagcaaaauguga

SEQ ID NO: 3056593 - RNA, 18 nt, Human
cuaagcaaaaugugauau

SEQ ID NO: 3056594 - RNA, 21 nt, Human
cuaagcuauucaguaauaacu

SEQ ID NO: 3056595 - RNA, 19 nt, Human
cuaagcuauucaguaauaa

SEQ ID NO: 3056596 - RNA, 15 nt, Human
cuaaggugugcucug

SEQ ID NO: 3056597 - RNA, 16 nt, Human
ccaucaugucuggcua

SEQ ID NO: 3056598 - RNA, 14 nt, Human
ccaucaugucuggc

SEQ ID NO: 3056599 - RNA, 21 nt, Human
ccauccucuguacagagccca

SEQ ID NO: 3056600 - RNA, 15 nt, Human
ccauccugaggcucc

SEQ ID NO: 3056601 - RNA, 17 nt, Human
ccauccuggcccagggc

SEQ ID NO: 3056602 - RNA, 18 nt, Human
ccauccuggcccagggca

SEQ ID NO: 3056603 - RNA, 19 nt, Human
ccauccuggcccagggcau

SEQ ID NO: 3056604 - RNA, 20 nt, Human
ccauccuggcccagggcauc

SEQ ID NO: 3056605 - RNA, 22 nt, Human
ccauccuggcccagggcaucug

SEQ ID NO: 3056606 - RNA, 12 nt, Human
ccaucacccgcu

SEQ ID NO: 3056607 - RNA, 18 nt, Human
ccauauucuguuggccag

SEQ ID NO: 3056608 - RNA, 15 nt, Human
ccauauucuguuggc

SEQ ID NO: 3056609 - RNA, 19 nt, Human
ccauauuaccacagacaua

SEQ ID NO: 3056610 - RNA, 23 nt, Human
ccauagagagcaagacgcugugc

SEQ ID NO: 3056611 - RNA, 23 nt, Human
ccagggacagaggggguggccuc

SEQ ID NO: 3056612 - RNA, 14 nt, Human
ccagugccucuccc

SEQ ID NO: 3056613 - RNA, 16 nt, Human
ccagugccucucccug

SEQ ID NO: 3056614 - RNA, 11 nt, Human
ccagugccucu

SEQ ID NO: 3056615 - RNA, 19 nt, Human
ccagugccucucccugcug

SEQ ID NO: 3056616 - RNA, 21 nt, Human
ccagugccucucccugcugcu

SEQ ID NO: 3056617 - RNA, 13 nt, Human
ccagugccugggu

SEQ ID NO: 3056618 - RNA, 14 nt, Human
ccagugccugggug

SEQ ID NO: 3056619 - RNA, 16 nt, Human
ccagcugcuugggcuu

SEQ ID NO: 3056620 - RNA, 18 nt, Human
ccagcugcuugggcuuca

SEQ ID NO: 3056621 - RNA, 13 nt, Human
ccagcugcuuggg

SEQ ID NO: 3056622 - RNA, 15 nt, Human
ccagcugcuugggcu

SEQ ID NO: 3056623 - RNA, 21 nt, Human
ccagcugugcucuggacaggc

SEQ ID NO: 3056624 - RNA, 20 nt, Human
ccagcugugcucuggacagg

SEQ ID NO: 3056625 - RNA, 18 nt, Human
ccagcugugcucuggaca

SEQ ID NO: 3056626 - RNA, 15 nt, Human
ccagccuggaugcca

SEQ ID NO: 3056627 - RNA, 13 nt, Human
ccagccuggaugc

SEQ ID NO: 3056628 - RNA, 17 nt, Human
ccagccuggaugccauc

SEQ ID NO: 3056629 - RNA, 12 nt, Human
ccaggagcagcc

SEQ ID NO: 3056630 - RNA, 13 nt, Human
ccaggagcagcca

SEQ ID NO: 3056631 - RNA, 14 nt, Human
ccaggaagccagca

SEQ ID NO: 3056632 - RNA, 15 nt, Human
ccaggaagccagcag

SEQ ID NO: 3056633 - RNA, 17 nt, Human
ccaggaagccagcaggc

SEQ ID NO: 3056634 - RNA, 19 nt, Human
ccaggaagccagcaggcuc

SEQ ID NO: 3056635 - RNA, 23 nt, Human
ccagcugugcucuggacaggcau

SEQ ID NO: 3056636 - RNA, 22 nt, Human
ccagcugugcucuggacaggca

SEQ ID NO: 3056637 - RNA, 16 nt, Human
ccaggcccucugccca

SEQ ID NO: 3056638 - RNA, 17 nt, Human
ccaggcccucugcccac

SEQ ID NO: 3056639 - RNA, 18 nt, Human
ccaggcccucugcccacu

SEQ ID NO: 3056640 - RNA, 19 nt, Human
ccaggcccucugcccacuc

SEQ ID NO: 3056641 - RNA, 13 nt, Human
ccaggccuccuac

SEQ ID NO: 3056642 - RNA, 18 nt, Human
ccaggccuccuacagcuu

SEQ ID NO: 3056643 - RNA, 19 nt, Human
ccaggccuccuacagcuug

SEQ ID NO: 3056644 - RNA, 12 nt, Human
ccaggccagagg

SEQ ID NO: 3056645 - RNA, 14 nt, Human
ccaggagcagccac

SEQ ID NO: 3056646 - RNA, 21 nt, Human
ccaggccagagggagugacag

SEQ ID NO: 3056647 - RNA, 14 nt, Human
ccaggccagaggga

SEQ ID NO: 3056648 - RNA, 23 nt, Human
ccaggccccugccacccugggga

SEQ ID NO: 3056649 - RNA, 21 nt, Human
ccaggccccugccacccuggg

SEQ ID NO: 3056650 - RNA, 19 nt, Human
ccaggccccugccacccug

SEQ ID NO: 3056651 - RNA, 14 nt, Human
cccaggaggccagc

SEQ ID NO: 3056652 - RNA, 14 nt, Human
cccaggagccccga

SEQ ID NO: 3056653 - RNA, 13 nt, Human
cccaggagccccg

SEQ ID NO: 3056654 - RNA, 14 nt, Human
cccagcgagcccug

SEQ ID NO: 3056655 - RNA, 13 nt, Human
cccagcucugguc

SEQ ID NO: 3056656 - RNA, 14 nt, Human
cccagcucuggucc

SEQ ID NO: 3056657 - RNA, 12 nt, Human
cccagcucuggu

SEQ ID NO: 3056658 - RNA, 15 nt, Human
cccagcucuggucca

SEQ ID NO: 3056659 - RNA, 16 nt, Human
cccagcucugguccau

SEQ ID NO: 3056660 - RNA, 18 nt, Human
cccagcucugguccauag

SEQ ID NO: 3056661 - RNA, 23 nt, Human
cccagauugcaacaggcugggcu

SEQ ID NO: 3056662 - RNA, 17 nt, Human
cccagccccaaugaaca

SEQ ID NO: 3056663 - RNA, 11 nt, Human
cccagccccau

SEQ ID NO: 3056664 - RNA, 12 nt, Human
cccagccccauc

SEQ ID NO: 3056665 - RNA, 13 nt, Human
cccagccccaaug

SEQ ID NO: 3056666 - RNA, 18 nt, Human
cccagccccauccucugu

SEQ ID NO: 3056667 - RNA, 19 nt, Human
cccagccccauccucugua

SEQ ID NO: 3056668 - RNA, 18 nt, Human
cccagccccuucugaccc

SEQ ID NO: 3056669 - RNA, 13 nt, Human
cccagccccaucc

SEQ ID NO: 3056670 - RNA, 14 nt, Human
cccagccccauccc

SEQ ID NO: 3056671 - RNA, 14 nt, Human
cccagccccauccu

SEQ ID NO: 3056672 - RNA, 15 nt, Human
cccagccccauccuc

SEQ ID NO: 3056673 - RNA, 18 nt, Human
cccaggaggccagccuug

SEQ ID NO: 3056674 - RNA, 13 nt, Human
cccacgcccccac

SEQ ID NO: 3056675 - RNA, 14 nt, Human
cccacgcccccacu

SEQ ID NO: 3056676 - RNA, 19 nt, Human
cccaccuuggcugcaggga

SEQ ID NO: 3056677 - RNA, 17 nt, Human
cccaccuuggcugcagg

SEQ ID NO: 3056678 - RNA, 16 nt, Human
cccaccuuggcugcag

SEQ ID NO: 3056679 - RNA, 12 nt, Human
cccaccuggccu

SEQ ID NO: 3056680 - RNA, 15 nt, Human
cccaccuggccucug

SEQ ID NO: 3056681 - RNA, 15 nt, Human
ccauguuggccaggc

SEQ ID NO: 3056682 - RNA, 18 nt, Human
ccauguuggccaggcugg

SEQ ID NO: 3056683 - RNA, 21 nt, Human
ccauguuggccaggcuggucu

SEQ ID NO: 3056684 - RNA, 19 nt, Human
ccauguuggccaggcuggu

SEQ ID NO: 3056685 - RNA, 13 nt, Human
ccaugugccaggu

SEQ ID NO: 3056686 - RNA, 23 nt, Human
ccauggcacucuauguucuaaga

SEQ ID NO: 3056687 - RNA, 14 nt, Human
ccauguuggccagg

SEQ ID NO: 3056688 - RNA, 13 nt, Human
ccauguuggccag

SEQ ID NO: 3056689 - RNA, 13 nt, Human
ccaugcuccuggc

SEQ ID NO: 3056690 - RNA, 16 nt, Human
ccaugcugcccuguga

SEQ ID NO: 3056691 - RNA, 17 nt, Human
ccaugcugcccugugag

SEQ ID NO: 3056692 - RNA, 15 nt, Human
ccaugcuccuggccc

SEQ ID NO: 3056693 - RNA, 18 nt, Human
ccaugcuccuggcccacu

SEQ ID NO: 3056694 - RNA, 15 nt, Human
ccaugcugcccugug

SEQ ID NO: 3056695 - RNA, 16 nt, Human
cccaugagccucagca

SEQ ID NO: 3056696 - RNA, 15 nt, Human
cccaugagccucagc

SEQ ID NO: 3056697 - RNA, 20 nt, Human
cccaugagccucagcauccu

SEQ ID NO: 3056698 - RNA, 12 nt, Human
cccaugcugccc

SEQ ID NO: 3056699 - RNA, 13 nt, Human
cccaugcugcccu

SEQ ID NO: 3056700 - RNA, 14 nt, Human
cccaugcugcccug

SEQ ID NO: 3056701 - RNA, 12 nt, Human
cccaucugugaa

SEQ ID NO: 3056702 - RNA, 18 nt, Human
cccaucucacacaugagc

SEQ ID NO: 3056703 - RNA, 13 nt, Human
cccaucucacaca

SEQ ID NO: 3056704 - RNA, 20 nt, Human
cccaucugugaaaggaaaga

SEQ ID NO: 3056705 - RNA, 21 nt, Human
ccccaaauggaaaugggcaga

SEQ ID NO: 3056706 - RNA, 13 nt, Human
cccagguuucuau

SEQ ID NO: 3056707 - RNA, 15 nt, Human
cccaguccugcccgc

SEQ ID NO: 3056708 - RNA, 15 nt, Human
cccaggaggccagcc

SEQ ID NO: 3056709 - RNA, 16 nt, Human
cccaggaggccagccu

SEQ ID NO: 3056710 - RNA, 15 nt, Human
cccaggcauucccca

SEQ ID NO: 3056711 - RNA, 23 nt, Human
cccaggcaggucuugaacuccug

SEQ ID NO: 3056712 - RNA, 17 nt, Human
cccaggcauuccccagg

SEQ ID NO: 3056713 - RNA, 13 nt, Human
cccaggguggcca

SEQ ID NO: 3056714 - RNA, 14 nt, Human
cccaggguggccac

SEQ ID NO: 3056715 - RNA, 15 nt, Human
cccaggguggccaca

SEQ ID NO: 3056716 - RNA, 19 nt, Human
cccaggguggccacaccuc

SEQ ID NO: 3056717 - RNA, 19 nt, Human
cccagucuggaaugcagug

SEQ ID NO: 3056718 - RNA, 18 nt, Human
cccagucuggaaugcagu

SEQ ID NO: 3056719 - RNA, 10 nt, Human
cccagucugg

SEQ ID NO: 3056720 - RNA, 21 nt, Human
cccagugcccacaggaucagu

SEQ ID NO: 3056721 - RNA, 15 nt, Human
cccagugccgagaag

SEQ ID NO: 3056722 - RNA, 20 nt, Human
cccagugguuccuaauccuc

SEQ ID NO: 3056723 - RNA, 14 nt, Human
cccaguuagcucuc

SEQ ID NO: 3056724 - RNA, 17 nt, Human
cccaguguuuuaggagc

SEQ ID NO: 3056725 - RNA, 16 nt, Human
cccaguguuuuaggag

SEQ ID NO: 3056726 - RNA, 22 nt, Human
ccccagcuggggccaggcuggg

SEQ ID NO: 3056727 - RNA, 21 nt, Human
ccccagcuggggccaggcugg

SEQ ID NO: 3056728 - RNA, 13 nt, Human
ccccagccugcua

SEQ ID NO: 3056729 - RNA, 12 nt, Human
ccccacagcccc

SEQ ID NO: 3056730 - RNA, 16 nt, Human
ccccagccccauccca

SEQ ID NO: 3056731 - RNA, 15 nt, Human
ccccagccccauccu

SEQ ID NO: 3056732 - RNA, 13 nt, Human
ccccaccagugcc

SEQ ID NO: 3056733 - RNA, 14 nt, Human
ccccaccagugccu

SEQ ID NO: 3056734 - RNA, 22 nt, Human
ccccaggugguuauggagaggg

SEQ ID NO: 3056735 - RNA, 14 nt, Human
ccccaggugccagu

SEQ ID NO: 3056736 - RNA, 12 nt, Human
ccccuggcagcc

SEQ ID NO: 3056737 - RNA, 14 nt, Human
ccccuggcagcccc

SEQ ID NO: 3056738 - RNA, 15 nt, Human
ccccuggcagccccu

SEQ ID NO: 3056739 - RNA, 12 nt, Human
ccccaggaggcc

SEQ ID NO: 3056740 - RNA, 22 nt, Human
ccccuguccccgcacugggcuu

SEQ ID NO: 3056741 - RNA, 20 nt, Human
ccccuguucuggcagaguug

SEQ ID NO: 3056742 - RNA, 15 nt, Human
cccgaggccuucucu

SEQ ID NO: 3056743 - RNA, 20 nt, Human
cccgaggccuucucugaagg

SEQ ID NO: 3056744 - RNA, 18 nt, Human
cccuaauaaagcugugug

SEQ ID NO: 3056745 - RNA, 15 nt, Human
cccuaauaaagcugu

SEQ ID NO: 3056746 - RNA, 14 nt, Human
cccuaauaaagcug

SEQ ID NO: 3056747 - RNA, 13 nt, Human
cccuaauaaagcu

SEQ ID NO: 3056748 - RNA, 12 nt, Human
cccuaauaaagc

SEQ ID NO: 3056749 - RNA, 16 nt, Human
cccucagggucccugg

SEQ ID NO: 3056750 - RNA, 17 nt, Human
cccucagggucccuggu

SEQ ID NO: 3056751 - RNA, 18 nt, Human
cccucagggucccuggug

SEQ ID NO: 3056752 - RNA, 19 nt, Human
cccucagggucccuggugg

SEQ ID NO: 3056753 - RNA, 15 nt, Human
cccucagggucccug

SEQ ID NO: 3056754 - RNA, 16 nt, Human
cccggcaggguccuag

SEQ ID NO: 3056755 - RNA, 17 nt, Human
cccuaaaguguauuuuu

SEQ ID NO: 3056756 - RNA, 22 nt, Human
cccuaaaguguauuuuuuuacu

SEQ ID NO: 3056757 - RNA, 13 nt, Human
cccucccucuuuc

SEQ ID NO: 3056758 - RNA, 17 nt, Human
cccuccaugugggcuag

SEQ ID NO: 3056759 - RNA, 18 nt, Human
cccuccagagccccacag

SEQ ID NO: 3056760 - RNA, 19 nt, Human
cccuccagagccccacagc

SEQ ID NO: 3056761 - RNA, 21 nt, Human
cccuccagagccccacagccc

SEQ ID NO: 3056762 - RNA, 21 nt, Human
cccuccaagaccuucuccuuc

SEQ ID NO: 3056763 - RNA, 22 nt, Human
cccucauccucauacccacccc

SEQ ID NO: 3056764 - RNA, 17 nt, Human
cccucauccucauaccc

SEQ ID NO: 3056765 - RNA, 20 nt, Human
cccucauccucauacccacc

SEQ ID NO: 3056766 - RNA, 22 nt, Human
cccucaucaccaacgucugugc

SEQ ID NO: 3056767 - RNA, 20 nt, Human
cccucagucuggcccuuccu

SEQ ID NO: 3056768 - RNA, 21 nt, Human
cccucagggucccugguggca

SEQ ID NO: 3056769 - RNA, 18 nt, Human
cccugccucucugcaggu

SEQ ID NO: 3056770 - RNA, 11 nt, Human
cccugccucuc

SEQ ID NO: 3056771 - RNA, 16 nt, Human
cccugccuccuuugug

SEQ ID NO: 3056772 - RNA, 23 nt, Human
cccugccuccuuugugaggaagc

SEQ ID NO: 3056773 - RNA, 14 nt, Human
cccugccuccuuug

SEQ ID NO: 3056774 - RNA, 18 nt, Human
cccugccacccuggggag

SEQ ID NO: 3056775 - RNA, 17 nt, Human
cccugccacccugggga

SEQ ID NO: 3056776 - RNA, 15 nt, Human
cccugccacccuggg

SEQ ID NO: 3056777 - RNA, 14 nt, Human
cccugccacccugg

SEQ ID NO: 3056778 - RNA, 12 nt, Human
cccugccacccu

SEQ ID NO: 3056779 - RNA, 22 nt, Human
cccugcaaccugauugugucuc

SEQ ID NO: 3056780 - RNA, 16 nt, Human
cccugcaaccugauug

SEQ ID NO: 3056781 - RNA, 18 nt, Human
cccugcagagggcacaga

SEQ ID NO: 3056782 - RNA, 12 nt, Human
cccugcagaggg

SEQ ID NO: 3056783 - RNA, 22 nt, Human
cccugcacuugcagacucuaca

SEQ ID NO: 3056784 - RNA, 16 nt, Human
cccugggaggcucugg

SEQ ID NO: 3056785 - RNA, 15 nt, Human
cccugggaggcucug

SEQ ID NO: 3056786 - RNA, 18 nt, Human
cccugggaggcucuggag

SEQ ID NO: 3056787 - RNA, 17 nt, Human
cccugggaggcucugga

SEQ ID NO: 3056788 - RNA, 21 nt, Human
cccugguggcagugggagcug

SEQ ID NO: 3056789 - RNA, 22 nt, Human
cccugguggcagugggagcugc

SEQ ID NO: 3056790 - RNA, 21 nt, Human
cccuggacugugugcucagga

SEQ ID NO: 3056791 - RNA, 20 nt, Human
cccugcugguucaggguugg

SEQ ID NO: 3056792 - RNA, 19 nt, Human
cccugcugguucaggguug

SEQ ID NO: 3056793 - RNA, 22 nt, Human
cccugcuggguguggcgcagca

SEQ ID NO: 3056794 - RNA, 22 nt, Human
cccugccucucugcaggucccu

SEQ ID NO: 3056795 - RNA, 21 nt, Human
cccugccucucugcagguccc

SEQ ID NO: 3056796 - RNA, 16 nt, Human
cccugccucucugcag

SEQ ID NO: 3056797 - RNA, 13 nt, Human
cccugcugguuca

SEQ ID NO: 3056798 - RNA, 14 nt, Human
cccugguggcagcu

SEQ ID NO: 3056799 - RNA, 22 nt, Human
ccuagguauaauucacauugua

SEQ ID NO: 3056800 - RNA, 13 nt, Human
ccuaggugacaga

SEQ ID NO: 3056801 - RNA, 21 nt, Human
ccuagaaauuccccacccuga

SEQ ID NO: 3056802 - RNA, 19 nt, Human
ccuacuguaauuugugaua

SEQ ID NO: 3056803 - RNA, 18 nt, Human
ccuacccacccuccuuuc

SEQ ID NO: 3056804 - RNA, 13 nt, Human
ccuacccacccuc

SEQ ID NO: 3056805 - RNA, 21 nt, Human
ccuacaguugaaaaacagcug

SEQ ID NO: 3056806 - RNA, 19 nt, Human
ccuacagcuugaccgugag

SEQ ID NO: 3056807 - RNA, 22 nt, Human
ccuacaguugaaaaacagcuga

SEQ ID NO: 3056808 - RNA, 13 nt, Human
ccuaaacauauga

SEQ ID NO: 3056809 - RNA, 15 nt, Human
ccuaaaauucagugg

SEQ ID NO: 3056810 - RNA, 16 nt, Human
ccuaaaauucagugga

SEQ ID NO: 3056811 - RNA, 12 nt, Human
ccguuauuaaaa

SEQ ID NO: 3056812 - RNA, 13 nt, Human
cccuucccaccuc

SEQ ID NO: 3056813 - RNA, 12 nt, Human
cccuucccaccu

SEQ ID NO: 3056814 - RNA, 22 nt, Human
cccuugguuaggcauuguggga

SEQ ID NO: 3056815 - RNA, 23 nt, Human
cccuugguuaggcauugugggaa

SEQ ID NO: 3056816 - RNA, 19 nt, Human
cccuugucggccccaccag

SEQ ID NO: 3056817 - RNA, 22 nt, Human
cccuugucggccccaccagugc

SEQ ID NO: 3056818 - RNA, 22 nt, Human
cccuuguggucccaccccacac

SEQ ID NO: 3056819 - RNA, 20 nt, Human
cccuuguggucccaccccac

SEQ ID NO: 3056820 - RNA, 17 nt, Human
cccuuggauuguccccg

SEQ ID NO: 3056821 - RNA, 17 nt, Human
cccuucuuuccacagaa

SEQ ID NO: 3056822 - RNA, 17 nt, Human
ccgggaagggggcuggg

SEQ ID NO: 3056823 - RNA, 24 nt, Human
ccucacaguccuuaccagcagagc

SEQ ID NO: 3056824 - RNA, 23 nt, Human
ccucacaguccuuaccagcagag

SEQ ID NO: 3056825 - RNA, 16 nt, Human
ccuauuagagaagaga

SEQ ID NO: 3056826 - RNA, 17 nt, Human
ccuauuagagaagagau

SEQ ID NO: 3056827 - RNA, 15 nt, Human
ccuaggugacagagu

SEQ ID NO: 3056828 - RNA, 16 nt, Human
ccucagaucuucugug

SEQ ID NO: 3056829 - RNA, 20 nt, Human
ccucagaugcacaugagcug

SEQ ID NO: 3056830 - RNA, 16 nt, Human
ccucagggucccuggu

SEQ ID NO: 3056831 - RNA, 17 nt, Human
ccucagggucccuggug

SEQ ID NO: 3056832 - RNA, 20 nt, Human
ccucagggucccugguggca

SEQ ID NO: 3056833 - RNA, 23 nt, Human
ccucaggccugggggcugggcag

SEQ ID NO: 3056834 - RNA, 15 nt, Human
ccucuccccagcaag

SEQ ID NO: 3056835 - RNA, 20 nt, Human
ccucuccccagcaagugaga

SEQ ID NO: 3056836 - RNA, 13 nt, Human
ccucucccuugga

SEQ ID NO: 3056837 - RNA, 22 nt, Human
ccucucccuuggauuguccccg

SEQ ID NO: 3056838 - RNA, 23 nt, Human
ccucucccugcugcuccuaggac

SEQ ID NO: 3056839 - RNA, 15 nt, Human
ccucucccugcugcu

SEQ ID NO: 3056840 - RNA, 17 nt, Human
ccucucccugcugcucc

SEQ ID NO: 3056841 - RNA, 19 nt, Human
ccucucccugcugcuccua

SEQ ID NO: 3056842 - RNA, 14 nt, Human
ccucucccugcugc

SEQ ID NO: 3056843 - RNA, 21 nt, Human
ccuccuccagccgccaugcuc

SEQ ID NO: 3056844 - RNA, 18 nt, Human
ccucgguguggagaagcg

SEQ ID NO: 3056845 - RNA, 13 nt, Human
ccucugcccacuc

SEQ ID NO: 3056846 - RNA, 16 nt, Human
ccucugcccacucccu

SEQ ID NO: 3056847 - RNA, 18 nt, Human
ccucugcagcaauaaagc

SEQ ID NO: 3056848 - RNA, 14 nt, Human
ccucugcagcaaua

SEQ ID NO: 3056849 - RNA, 23 nt, Human
ccucugcacuccccugcugggug

SEQ ID NO: 3056850 - RNA, 18 nt, Human
ccucugcacuccccugcu

SEQ ID NO: 3056851 - RNA, 16 nt, Human
ccucugcacuccccug

SEQ ID NO: 3056852 - RNA, 17 nt, Human
ccucugcacuccccugc

SEQ ID NO: 3056853 - RNA, 15 nt, Human
ccucugcacuccccu

SEQ ID NO: 3056854 - RNA, 21 nt, Human
ccucugacacacagcucuguc

SEQ ID NO: 3056855 - RNA, 20 nt, Human
ccucugacacacagcucugu

SEQ ID NO: 3056856 - RNA, 19 nt, Human
ccucugacacacagcucug

SEQ ID NO: 3056857 - RNA, 14 nt, Human
ccucugacacacag

SEQ ID NO: 3056858 - RNA, 13 nt, Human
ccucugacacaca

SEQ ID NO: 3056859 - RNA, 17 nt, Human
ccucaggugagaagcag

SEQ ID NO: 3056860 - RNA, 18 nt, Human
ccucaggugagaagcaga

SEQ ID NO: 3056861 - RNA, 20 nt, Human
ccucaggugagaagcagagg

SEQ ID NO: 3056862 - RNA, 17 nt, Human
ccuccaggugcacaagc

SEQ ID NO: 3056863 - RNA, 11 nt, Human
ccuccaggugc

SEQ ID NO: 3056864 - RNA, 12 nt, Human
ccuccaggugca

SEQ ID NO: 3056865 - RNA, 14 nt, Human
ccucccaacucacc

SEQ ID NO: 3056866 - RNA, 17 nt, Human
ccucccaaagugcuggg

SEQ ID NO: 3056867 - RNA, 15 nt, Human
ccuccaugugggcua

SEQ ID NO: 3056868 - RNA, 12 nt, Human
ccuccauguggg

SEQ ID NO: 3056869 - RNA, 12 nt, Human
ccuccauccuga

SEQ ID NO: 3056870 - RNA, 13 nt, Human
ccuccauccugag

SEQ ID NO: 3056871 - RNA, 20 nt, Human
ccucccgaauagcugggacu

SEQ ID NO: 3056872 - RNA, 19 nt, Human
ccucccgaauagcugggac

SEQ ID NO: 3056873 - RNA, 21 nt, Human
ccucccgaauagcugggacua

SEQ ID NO: 3056874 - RNA, 18 nt, Human
ccucccgaguagcuggga

SEQ ID NO: 3056875 - RNA, 17 nt, Human
ccucccgaguagcuggg

SEQ ID NO: 3056876 - RNA, 12 nt, Human
ccuccuccagcc

SEQ ID NO: 3056877 - RNA, 11 nt, Human
ccuccucagau

SEQ ID NO: 3056878 - RNA, 13 nt, Human
ccucccucuuucc

SEQ ID NO: 3056879 - RNA, 18 nt, Human
ccucccgaauagcuggga

SEQ ID NO: 3056880 - RNA, 15 nt, Human
ccucccaacucaccc

SEQ ID NO: 3056881 - RNA, 22 nt, Human
cauggacuucugccagcauaau

SEQ ID NO: 3056882 - RNA, 18 nt, Human
cauggacaugaucuucuu

SEQ ID NO: 3056883 - RNA, 16 nt, Human
cauggaauaacaugua

SEQ ID NO: 3056884 - RNA, 20 nt, Human
cauggaaguacuauaauuua

SEQ ID NO: 3056885 - RNA, 22 nt, Human
cauggaaguacuauaauuuacc

SEQ ID NO: 3056886 - RNA, 17 nt, Human
caugcugucccuuacgu

SEQ ID NO: 3056887 - RNA, 20 nt, Human
caugcuguucaugaaagauu

SEQ ID NO: 3056888 - RNA, 22 nt, Human
caugcugucccuuacgugaguc

SEQ ID NO: 3056889 - RNA, 23 nt, Human
caugcugucuacacuaagagaga

SEQ ID NO: 3056890 - RNA, 17 nt, Human
caugcgggcuuccuccu

SEQ ID NO: 3056891 - RNA, 18 nt, Human
caugccuggauggggcug

SEQ ID NO: 3056892 - RNA, 21 nt, Human
caugccuggauggggcugcac

SEQ ID NO: 3056893 - RNA, 23 nt, Human
caugccuggauggggcugcaccg

SEQ ID NO: 3056894 - RNA, 17 nt, Human
cauggagguuugaagau

SEQ ID NO: 3056895 - RNA, 11 nt, Human
cauggacuuug

SEQ ID NO: 3056896 - RNA, 13 nt, Human
cauggacuuuguu

SEQ ID NO: 3056897 - RNA, 16 nt, Human
cauggaguauauguca

SEQ ID NO: 3056898 - RNA, 18 nt, Human
caugggaaugaaugucag

SEQ ID NO: 3056899 - RNA, 17 nt, Human
caugggccuccugugug

SEQ ID NO: 3056900 - RNA, 16 nt, Human
caugggccuccugugu

SEQ ID NO: 3056901 - RNA, 22 nt, Human
caugggaaugaaugucagugug

SEQ ID NO: 3056902 - RNA, 17 nt, Human
caugggacagggaggac

SEQ ID NO: 3056903 - RNA, 15 nt, Human
caugggccuccugug

SEQ ID NO: 3056904 - RNA, 16 nt, Human
caugccucucucaggc

SEQ ID NO: 3056905 - RNA, 17 nt, Human
caugccucucucaggcc

SEQ ID NO: 3056906 - RNA, 18 nt, Human
caugccucucucaggcca

SEQ ID NO: 3056907 - RNA, 19 nt, Human
caugccucucucaggccaa

SEQ ID NO: 3056908 - RNA, 13 nt, Human
caugccuggaugg

SEQ ID NO: 3056909 - RNA, 14 nt, Human
caugccucucucag

SEQ ID NO: 3056910 - RNA, 15 nt, Human
caugccucucucagg

SEQ ID NO: 3056911 - RNA, 13 nt, Human
caugccccugaac

SEQ ID NO: 3056912 - RNA, 19 nt, Human
caugccagcuuaucucagg

SEQ ID NO: 3056913 - RNA, 20 nt, Human
caugccagcuuaucucaggg

SEQ ID NO: 3056914 - RNA, 15 nt, Human
cauguuuuguuuacg

SEQ ID NO: 3056915 - RNA, 21 nt, Human
cauuaaagccugaguuugcuu

SEQ ID NO: 3056916 - RNA, 16 nt, Human
cauggucggaaaacau

SEQ ID NO: 3056917 - RNA, 17 nt, Human
caugugaaaucauucau

SEQ ID NO: 3056918 - RNA, 16 nt, Human
caugugaaaucauuca

SEQ ID NO: 3056919 - RNA, 15 nt, Human
caugugaaaucauuc

SEQ ID NO: 3056920 - RNA, 14 nt, Human
caugucuuuucuug

SEQ ID NO: 3056921 - RNA, 19 nt, Human
caugucuuuucuugcauga

SEQ ID NO: 3056922 - RNA, 21 nt, Human
caugucuuuucuugcaugagg

SEQ ID NO: 3056923 - RNA, 23 nt, Human
caugucuuuucuugcaugaggcu

SEQ ID NO: 3056924 - RNA, 21 nt, Human
cauguaauuaaguacuaugua

SEQ ID NO: 3056925 - RNA, 18 nt, Human
cauguaauuaaguacuau

SEQ ID NO: 3056926 - RNA, 21 nt, Human
cauguuucuuuguaaugaaaa

SEQ ID NO: 3056927 - RNA, 20 nt, Human
cauguuucuuuguaaugaaa

SEQ ID NO: 3056928 - RNA, 22 nt, Human
cauguuucuuuguaaugaaaac

SEQ ID NO: 3056929 - RNA, 15 nt, Human
cauguuugugauuga

SEQ ID NO: 3056930 - RNA, 15 nt, Human
caugugcacaugcac

SEQ ID NO: 3056931 - RNA, 21 nt, Human
caugugccagguuuuuggucu

SEQ ID NO: 3056932 - RNA, 14 nt, Human
ccaagacucccaug

SEQ ID NO: 3056933 - RNA, 15 nt, Human
ccaagacucccauga

SEQ ID NO: 3056934 - RNA, 19 nt, Human
ccaagacucccaugaggga

SEQ ID NO: 3056935 - RNA, 12 nt, Human
ccaagacuccca

SEQ ID NO: 3056936 - RNA, 13 nt, Human
ccaacccucauca

SEQ ID NO: 3056937 - RNA, 15 nt, Human
ccaacccucaucacc

SEQ ID NO: 3056938 - RNA, 15 nt, Human
ccaagaccuucuccu

SEQ ID NO: 3056939 - RNA, 22 nt, Human
ccaaauucuuucaguggcuacc

SEQ ID NO: 3056940 - RNA, 15 nt, Human
ccaaauucuuucagu

SEQ ID NO: 3056941 - RNA, 14 nt, Human
ccaacacgagcagg

SEQ ID NO: 3056942 - RNA, 16 nt, Human
ccaacaucaacaucuu

SEQ ID NO: 3056943 - RNA, 14 nt, Human
ccaacauacuccca

SEQ ID NO: 3056944 - RNA, 13 nt, Human
ccaacaucaacau

SEQ ID NO: 3056945 - RNA, 21 nt, Human
ccaacacgagcaggcuacugu

SEQ ID NO: 3056946 - RNA, 14 nt, Human
ccaaagaugcagcc

SEQ ID NO: 3056947 - RNA, 13 nt, Human
ccaaagaugcagc

SEQ ID NO: 3056948 - RNA, 23 nt, Human
ccaagcagagguugggaggccau

SEQ ID NO: 3056949 - RNA, 14 nt, Human
ccaagcaggacaug

SEQ ID NO: 3056950 - RNA, 12 nt, Human
ccaagcucccag

SEQ ID NO: 3056951 - RNA, 13 nt, Human
ccaagcucccagg

SEQ ID NO: 3056952 - RNA, 13 nt, Human
ccaaggccuuccc

SEQ ID NO: 3056953 - RNA, 19 nt, Human
ccaaggccuuccccuggca

SEQ ID NO: 3056954 - RNA, 18 nt, Human
ccaaggcuagaaccaccu

SEQ ID NO: 3056955 - RNA, 14 nt, Human
ccaaggcuggggga

SEQ ID NO: 3056956 - RNA, 18 nt, Human
ccaaggugggaggauugc

SEQ ID NO: 3056957 - RNA, 19 nt, Human
ccaaggcugauuaaaccaa

SEQ ID NO: 3056958 - RNA, 23 nt, Human
ccaagugccaaagaagcagacca

SEQ ID NO: 3056959 - RNA, 20 nt, Human
ccaauauucauagcagcuua

SEQ ID NO: 3056960 - RNA, 16 nt, Human
ccacaagacccuugug

SEQ ID NO: 3056961 - RNA, 13 nt, Human
ccacaagagccca

SEQ ID NO: 3056962 - RNA, 16 nt, Human
ccacaagaaaugaaag

SEQ ID NO: 3056963 - RNA, 22 nt, Human
ccacaagaaaugaaagcaggga

SEQ ID NO: 3056964 - RNA, 18 nt, Human
ccacaaaggagagcuagc

SEQ ID NO: 3056965 - RNA, 20 nt, Human
ccacaaguuaaauaaaucau

SEQ ID NO: 3056966 - RNA, 15 nt, Human
ccacaaguuaaauaa

SEQ ID NO: 3056967 - RNA, 16 nt, Human
ccacaagagcccaggc

SEQ ID NO: 3056968 - RNA, 17 nt, Human
ccacaagagcccaggcc

SEQ ID NO: 3056969 - RNA, 18 nt, Human
ccacaagagcccaggccu

SEQ ID NO: 3056970 - RNA, 19 nt, Human
ccacaagagcccaggccuc

SEQ ID NO: 3056971 - RNA, 20 nt, Human
ccacaagagcccaggccucc

SEQ ID NO: 3056972 - RNA, 21 nt, Human
ccacaagagcccaggccuccu

SEQ ID NO: 3056973 - RNA, 16 nt, Human
ccaaacccuucagugc

SEQ ID NO: 3056974 - RNA, 21 nt, Human
ccaaaauaaaacuuuuuaaaa

SEQ ID NO: 3056975 - RNA, 18 nt, Human
ccaaaauaaaacuuuuua

SEQ ID NO: 3056976 - RNA, 20 nt, Human
cauuuuuaguagagacaggg

SEQ ID NO: 3056977 - RNA, 17 nt, Human
ccaaagaaauguaaggg

SEQ ID NO: 3056978 - RNA, 21 nt, Human
cauuuuauuuuauuaugcaug

SEQ ID NO: 3056979 - RNA, 19 nt, Human
cauuuuauuuuauuaugca

SEQ ID NO: 3056980 - RNA, 16 nt, Human
cauuugcucauggaau

SEQ ID NO: 3056981 - RNA, 15 nt, Human
cauuugcucauggaa

SEQ ID NO: 3056982 - RNA, 14 nt, Human
cauuugcucaugga

SEQ ID NO: 3056983 - RNA, 20 nt, Human
cauuuuuaagugcugcauuu

SEQ ID NO: 3056984 - RNA, 15 nt, Human
cauuuuuaagugcug

SEQ ID NO: 3056985 - RNA, 18 nt, Human
cauuuuuaguagagacag

SEQ ID NO: 3056986 - RNA, 19 nt, Human
cauuuuuaguagagacagg

SEQ ID NO: 3056987 - RNA, 23 nt, Human
cauuuugggguacccacugcucu

SEQ ID NO: 3056988 - RNA, 18 nt, Human
cauuuugcuaaaugugaa

SEQ ID NO: 3056989 - RNA, 21 nt, Human
cauuuugcuaaaugugaauga

SEQ ID NO: 3056990 - RNA, 24 nt, Human
cauuuugcuaaaugugaaugauga

SEQ ID NO: 3056991 - RNA, 22 nt, Human
cauuuugggguacccacugcuc

SEQ ID NO: 3056992 - RNA, 21 nt, Human
cauuuugggguacccacugcu

SEQ ID NO: 3056993 - RNA, 20 nt, Human
cauuuugggguacccacugc

SEQ ID NO: 3056994 - RNA, 23 nt, Human
cauuucuuccacaagagcccagg

SEQ ID NO: 3056995 - RNA, 14 nt, Human
cauuugagcagggc

SEQ ID NO: 3056996 - RNA, 19 nt, Human
cauuugaggucuguucuuu

SEQ ID NO: 3056997 - RNA, 18 nt, Human
cauuugaggucuguucuu

SEQ ID NO: 3056998 - RNA, 17 nt, Human
cauuugaggucuguucu

SEQ ID NO: 3056999 - RNA, 21 nt, Human
cauuuacuuuguguucaccuu

SEQ ID NO: 3057000 - RNA, 17 nt, Human
cauuuacuuuguguuca

SEQ ID NO: 3057001 - RNA, 19 nt, Human
cauuuaaagcuuauuaaaa

SEQ ID NO: 3057002 - RNA, 12 nt, Human
cauuuccaagca

SEQ ID NO: 3057003 - RNA, 21 nt, Human
cauuuaaaagauacaguuacu

SEQ ID NO: 3057004 - RNA, 21 nt, Human
cauuucuuccacaagagccca

SEQ ID NO: 3057005 - RNA, 23 nt, Human
cauuucugcaucagcugcugaaa

SEQ ID NO: 3057006 - RNA, 19 nt, Human
cauugaaaucuuuuugcuu

SEQ ID NO: 3057007 - RNA, 13 nt, Human
cauugaccugagg

SEQ ID NO: 3057008 - RNA, 22 nt, Human
cauugaccugaggcccuucucu

SEQ ID NO: 3057009 - RNA, 14 nt, Human
cauacccaccccca

SEQ ID NO: 3057010 - RNA, 17 nt, Human
cauacccacccccaccc

SEQ ID NO: 3057011 - RNA, 18 nt, Human
cauacccacccccaccca

SEQ ID NO: 3057012 - RNA, 21 nt, Human
cauacccacccccacccaagg

SEQ ID NO: 3057013 - RNA, 21 nt, Human
cauacuaaccagcagaaaugc

SEQ ID NO: 3057014 - RNA, 14 nt, Human
cauacuaaccagca

SEQ ID NO: 3057015 - RNA, 18 nt, Human
cauacguacacauuuuau

SEQ ID NO: 3057016 - RNA, 17 nt, Human
cauacguacacauuuua

SEQ ID NO: 3057017 - RNA, 16 nt, Human
cauacguacacauuuu

SEQ ID NO: 3057018 - RNA, 15 nt, Human
cauacguacacauuu

SEQ ID NO: 3057019 - RNA, 13 nt, Human
cauacguacacau

SEQ ID NO: 3057020 - RNA, 15 nt, Human
cauaaaaacaacuuu

SEQ ID NO: 3057021 - RNA, 20 nt, Human
caguuuucugagaaagacua

SEQ ID NO: 3057022 - RNA, 19 nt, Human
caguuuucugagaaagacu

SEQ ID NO: 3057023 - RNA, 17 nt, Human
caguuguuagugugucu

SEQ ID NO: 3057024 - RNA, 15 nt, Human
caguuuucugagaaa

SEQ ID NO: 3057025 - RNA, 14 nt, Human
caguuuucugagaa

SEQ ID NO: 3057026 - RNA, 23 nt, Human
caguugccagucaccccggccac

SEQ ID NO: 3057027 - RNA, 16 nt, Human
caguuggguggaugcc

SEQ ID NO: 3057028 - RNA, 19 nt, Human
caguuggucccccuuccau

SEQ ID NO: 3057029 - RNA, 20 nt, Human
caguuggucccccuuccaug

SEQ ID NO: 3057030 - RNA, 21 nt, Human
caguuggucccccuuccaugg

SEQ ID NO: 3057031 - RNA, 22 nt, Human
caguuggucccccuuccaugga

SEQ ID NO: 3057032 - RNA, 19 nt, Human
caguuggguggaugccugg

SEQ ID NO: 3057033 - RNA, 18 nt, Human
caguuggguggaugccug

SEQ ID NO: 3057034 - RNA, 18 nt, Human
caguuggucccccuucca

SEQ ID NO: 3057035 - RNA, 23 nt, Human
caguugaaaagacuccaaagaaa

SEQ ID NO: 3057036 - RNA, 22 nt, Human
caguugaaaagacuccaaagaa

SEQ ID NO: 3057037 - RNA, 21 nt, Human
caguugaaaagacuccaaaga

SEQ ID NO: 3057038 - RNA, 18 nt, Human
caguugaaaagacuccaa

SEQ ID NO: 3057039 - RNA, 14 nt, Human
caguugaaaagacu

SEQ ID NO: 3057040 - RNA, 17 nt, Human
cauaaguaauucaagaa

SEQ ID NO: 3057041 - RNA, 16 nt, Human
cauaaguaauucaaga

SEQ ID NO: 3057042 - RNA, 20 nt, Human
cauaagcuacugccauccug

SEQ ID NO: 3057043 - RNA, 22 nt, Human
cauaaguaauucaagaaaacaa

SEQ ID NO: 3057044 - RNA, 18 nt, Human
cauaaguaauucaagaaa

SEQ ID NO: 3057045 - RNA, 14 nt, Human
cauaagauaaaugu

SEQ ID NO: 3057046 - RNA, 14 nt, Human
cauaagcuacugcc

SEQ ID NO: 3057047 - RNA, 16 nt, Human
cauaagcuacugccau

SEQ ID NO: 3057048 - RNA, 17 nt, Human
cauaagcuacugccauc

SEQ ID NO: 3057049 - RNA, 11 nt, Human
cauacauauuu

SEQ ID NO: 3057050 - RNA, 15 nt, Human
cauaauacuugcuuu

SEQ ID NO: 3057051 - RNA, 12 nt, Human
cauacauauuuu

SEQ ID NO: 3057052 - RNA, 19 nt, Human
cauacauauuuuuguagca

SEQ ID NO: 3057053 - RNA, 15 nt, Human
cauacauuguacgaa

SEQ ID NO: 3057054 - RNA, 17 nt, Human
cauaccaacacgagcag

SEQ ID NO: 3057055 - RNA, 18 nt, Human
cauaccacuuuuguucuu

SEQ ID NO: 3057056 - RNA, 15 nt, Human
cauaccacuuuuguu

SEQ ID NO: 3057057 - RNA, 14 nt, Human
cauaccacuuuugu

SEQ ID NO: 3057058 - RNA, 13 nt, Human
cauaccacuuuug

SEQ ID NO: 3057059 - RNA, 11 nt, Human
cauacccaccc

SEQ ID NO: 3057060 - RNA, 12 nt, Human
cauacccacccc

SEQ ID NO: 3057061 - RNA, 19 nt, Human
cauaccacuuuuguucuug

SEQ ID NO: 3057062 - RNA, 17 nt, Human
cauaaaaacaacuuuau

SEQ ID NO: 3057063 - RNA, 20 nt, Human
cauaaaaacaacuuuauacc

SEQ ID NO: 3057064 - RNA, 21 nt, Human
cauaaaaacaacuuuauaccc

SEQ ID NO: 3057065 - RNA, 23 nt, Human
cauaaaaacaacuuuauacccag

SEQ ID NO: 3057066 - RNA, 23 nt, Human
cauaaaaagccugcaauuucaua

SEQ ID NO: 3057067 - RNA, 21 nt, Human
cauaaaaauuagccaagugug

SEQ ID NO: 3057068 - RNA, 16 nt, Human
cauaaagcaggcagaa

SEQ ID NO: 3057069 - RNA, 14 nt, Human
cauaaagcaggcag

SEQ ID NO: 3057070 - RNA, 21 nt, Human
cauaaacaagaccacguuucu

SEQ ID NO: 3057071 - RNA, 20 nt, Human
cauaaacaagaccacguuuc

SEQ ID NO: 3057072 - RNA, 22 nt, Human
cauaaacaagaccacguuucua

SEQ ID NO: 3057073 - RNA, 16 nt, Human
cauaaccuagccuuag

SEQ ID NO: 3057074 - RNA, 19 nt, Human
cauaaauuuaguauuuugu

SEQ ID NO: 3057075 - RNA, 20 nt, Human
cauaaauuuaguauuuuguu

SEQ ID NO: 3057076 - RNA, 22 nt, Human
caguguuguggauuuaacagaa

SEQ ID NO: 3057077 - RNA, 20 nt, Human
caguguuguggauuuaacag

SEQ ID NO: 3057078 - RNA, 19 nt, Human
caguguuguggauuuaaca

SEQ ID NO: 3057079 - RNA, 16 nt, Human
caguguuuuaggagca

SEQ ID NO: 3057080 - RNA, 20 nt, Human
caguguuuuaggagcaugag

SEQ ID NO: 3057081 - RNA, 21 nt, Human
caguuaccucugccucagaaa

SEQ ID NO: 3057082 - RNA, 13 nt, Human
caguuaagagaaa

SEQ ID NO: 3057083 - RNA, 14 nt, Human
caguuaagagaaau

SEQ ID NO: 3057084 - RNA, 22 nt, Human
caguucggugagcuacaaaugc

SEQ ID NO: 3057085 - RNA, 14 nt, Human
caguucucuccuuc

SEQ ID NO: 3057086 - RNA, 15 nt, Human
caguucucuccuucu

SEQ ID NO: 3057087 - RNA, 13 nt, Human
caguucucuccuu

SEQ ID NO: 3057088 - RNA, 22 nt, Human
caguucugaagaagaugguacc

SEQ ID NO: 3057089 - RNA, 15 nt, Human
caguucugaagaaga

SEQ ID NO: 3057090 - RNA, 16 nt, Human
caguucugaagaagau

SEQ ID NO: 3057091 - RNA, 22 nt, Human
caguucucuccuucuucccccc

SEQ ID NO: 3057092 - RNA, 12 nt, Human
caguucugaaga

SEQ ID NO: 3057093 - RNA, 13 nt, Human
caguucugaagaa

SEQ ID NO: 3057094 - RNA, 14 nt, Human
caguucugaagaag

SEQ ID NO: 3057095 - RNA, 12 nt, Human
caguugaaaaac

SEQ ID NO: 3057096 - RNA, 18 nt, Human
caguugaaaaacagcuga

SEQ ID NO: 3057097 - RNA, 19 nt, Human
caguugaaaaacagcugag

SEQ ID NO: 3057098 - RNA, 22 nt, Human
cagugguuccuaauccucuagg

SEQ ID NO: 3057099 - RNA, 16 nt, Human
caguggcagcugcuuu

SEQ ID NO: 3057100 - RNA, 15 nt, Human
caguggcagcugcuu

SEQ ID NO: 3057101 - RNA, 14 nt, Human
caguggcagcugcu

SEQ ID NO: 3057102 - RNA, 13 nt, Human
caguggcagcugc

SEQ ID NO: 3057103 - RNA, 12 nt, Human
caguggcagcug

SEQ ID NO: 3057104 - RNA, 14 nt, Human
cagugugucuaaau

SEQ ID NO: 3057105 - RNA, 23 nt, Human
cagugugucuaaauuugaauguu

SEQ ID NO: 3057106 - RNA, 12 nt, Human
cagugugacuga

SEQ ID NO: 3057107 - RNA, 14 nt, Human
cagugugacaagga

SEQ ID NO: 3057108 - RNA, 23 nt, Human
caguguacauggaauaacaugua

SEQ ID NO: 3057109 - RNA, 20 nt, Human
caguguacauggaauaacau

SEQ ID NO: 3057110 - RNA, 16 nt, Human
caguguacauggaaua

SEQ ID NO: 3057111 - RNA, 14 nt, Human
cagugucaaugcag

SEQ ID NO: 3057112 - RNA, 20 nt, Human
cauagaauaaaauuuuuaau

SEQ ID NO: 3057113 - RNA, 14 nt, Human
cauagaauaaaauu

SEQ ID NO: 3057114 - RNA, 23 nt, Human
cauagagagcaagacgcugugcu

SEQ ID NO: 3057115 - RNA, 19 nt, Human
cauagagagcaagacgcug

SEQ ID NO: 3057116 - RNA, 21 nt, Human
cauagagagcaagacgcugug

SEQ ID NO: 3057117 - RNA, 16 nt, Human
cauacucccaucugug

SEQ ID NO: 3057118 - RNA, 15 nt, Human
cauacucccaucugu

SEQ ID NO: 3057119 - RNA, 18 nt, Human
cauacucccaucugugaa

SEQ ID NO: 3057120 - RNA, 20 nt, Human
cauacucccaucugugaaag

SEQ ID NO: 3057121 - RNA, 11 nt, Human
cauacucugcu

SEQ ID NO: 3057122 - RNA, 17 nt, Human
cauaugauguacaugua

SEQ ID NO: 3057123 - RNA, 15 nt, Human
cauaugauguacaug

SEQ ID NO: 3057124 - RNA, 21 nt, Human
cauaugauguacauguacuga

SEQ ID NO: 3057125 - RNA, 22 nt, Human
cauauauauguuuuaagaggca

SEQ ID NO: 3057126 - RNA, 20 nt, Human
cauauauaacaaugcuguau

SEQ ID NO: 3057127 - RNA, 22 nt, Human
cauaguggcuuaaaacaacacu

SEQ ID NO: 3057128 - RNA, 19 nt, Human
cauaguaugguggcugggu

SEQ ID NO: 3057129 - RNA, 18 nt, Human
cauaguaugguggcuggg

SEQ ID NO: 3057130 - RNA, 20 nt, Human
cauaguaugguggcuggguu

SEQ ID NO: 3057131 - RNA, 17 nt, Human
cauaguaugguggcugg

SEQ ID NO: 3057132 - RNA, 17 nt, Human
cauauuuauaaaaauaa

SEQ ID NO: 3057133 - RNA, 18 nt, Human
cauauuuuucacauaucu

SEQ ID NO: 3057134 - RNA, 12 nt, Human
cauauuuauaaa

SEQ ID NO: 3057135 - RNA, 20 nt, Human
cauauuuacuucuuauacau

SEQ ID NO: 3057136 - RNA, 17 nt, Human
cauauuuacuucuuaua

SEQ ID NO: 3057137 - RNA, 16 nt, Human
cauauuuacuucuuau

SEQ ID NO: 3057138 - RNA, 14 nt, Human
cauauuuacuucuu

SEQ ID NO: 3057139 - RNA, 21 nt, Human
cauauuuuucacauaucuagu

SEQ ID NO: 3057140 - RNA, 14 nt, Human
cauauuuuucacau

SEQ ID NO: 3057141 - RNA, 12 nt, Human
cauauuuucaug

SEQ ID NO: 3057142 - RNA, 22 nt, Human
caucaagucuuucacauuuaaa

SEQ ID NO: 3057143 - RNA, 14 nt, Human
caucaagaugugac

SEQ ID NO: 3057144 - RNA, 18 nt, Human
caucaaugaaugaaugaa

SEQ ID NO: 3057145 - RNA, 17 nt, Human
caucuagguaaauuaca

SEQ ID NO: 3057146 - RNA, 18 nt, Human
caucuagguaaauuacag

SEQ ID NO: 3057147 - RNA, 14 nt, Human
caucuagugagcag

SEQ ID NO: 3057148 - RNA, 12 nt, Human
caucuaggauuu

SEQ ID NO: 3057149 - RNA, 15 nt, Human
caucuacccuccgau

SEQ ID NO: 3057150 - RNA, 15 nt, Human
cauccucuguacaga

SEQ ID NO: 3057151 - RNA, 18 nt, Human
cauccucuguacagagcc

SEQ ID NO: 3057152 - RNA, 19 nt, Human
cauccucuguacagagccc

SEQ ID NO: 3057153 - RNA, 16 nt, Human
caucucacacaugagc

SEQ ID NO: 3057154 - RNA, 17 nt, Human
caucucacacaugagca

SEQ ID NO: 3057155 - RNA, 22 nt, Human
caucuagugagcagucaggaaa

SEQ ID NO: 3057156 - RNA, 20 nt, Human
caucucacacaugagcauca

SEQ ID NO: 3057157 - RNA, 15 nt, Human
cauccucauacccac

SEQ ID NO: 3057158 - RNA, 16 nt, Human
cauccucauacccacc

SEQ ID NO: 3057159 - RNA, 17 nt, Human
cauccucauacccaccc

SEQ ID NO: 3057160 - RNA, 18 nt, Human
cauccucauacccacccc

SEQ ID NO: 3057161 - RNA, 21 nt, Human
cauccucauacccacccccac

SEQ ID NO: 3057162 - RNA, 22 nt, Human
cauccucauacccacccccacc

SEQ ID NO: 3057163 - RNA, 13 nt, Human
cauccucccaagg

SEQ ID NO: 3057164 - RNA, 15 nt, Human
cauccuccucagauc

SEQ ID NO: 3057165 - RNA, 16 nt, Human
cauccuccucagaucu

SEQ ID NO: 3057166 - RNA, 18 nt, Human
cauccuccucagaucuuc

SEQ ID NO: 3057167 - RNA, 19 nt, Human
cauccuccucagaucuucu

SEQ ID NO: 3057168 - RNA, 11 nt, Human
cauccuccuca

SEQ ID NO: 3057169 - RNA, 12 nt, Human
cauccuccucag

SEQ ID NO: 3057170 - RNA, 22 nt, Human
caucuuccaaggguacuaagga

SEQ ID NO: 3057171 - RNA, 13 nt, Human
caucuugcucugc

SEQ ID NO: 3057172 - RNA, 14 nt, Human
caucuugcucugcu

SEQ ID NO: 3057173 - RNA, 19 nt, Human
caucuugcucugcugacag

SEQ ID NO: 3057174 - RNA, 20 nt, Human
caucuugcucugcugacaga

SEQ ID NO: 3057175 - RNA, 17 nt, Human
caucccugaaggccccg

SEQ ID NO: 3057176 - RNA, 18 nt, Human
caucccugaaggccccgc

SEQ ID NO: 3057177 - RNA, 19 nt, Human
caucccugaaggccccgcc

SEQ ID NO: 3057178 - RNA, 21 nt, Human
caucccugaaggccccgccca

SEQ ID NO: 3057179 - RNA, 11 nt, Human
caucccugaag

SEQ ID NO: 3057180 - RNA, 13 nt, Human
caucccugaaggc

SEQ ID NO: 3057181 - RNA, 19 nt, Human
caucccucuggggcuguuc

SEQ ID NO: 3057182 - RNA, 15 nt, Human
cauccagguucagcu

SEQ ID NO: 3057183 - RNA, 14 nt, Human
caucauugaaaucu

SEQ ID NO: 3057184 - RNA, 15 nt, Human
caucauugaaaucuu

SEQ ID NO: 3057185 - RNA, 20 nt, Human
caucauugaaaucuuuuugc

SEQ ID NO: 3057186 - RNA, 21 nt, Human
caucauugaaaucuuuuugcu

SEQ ID NO: 3057187 - RNA, 13 nt, Human
caucauugaaauc

SEQ ID NO: 3057188 - RNA, 15 nt, Human
caucaccaacgucug

SEQ ID NO: 3057189 - RNA, 17 nt, Human
aaaacacauuuuucuua

SEQ ID NO: 3057190 - RNA, 19 nt, Human
aaaacacuguucucugccc

SEQ ID NO: 3057191 - RNA, 11 nt, Human
aaaagaaaaag

SEQ ID NO: 3057192 - RNA, 20 nt, Human
aaaagacaaggaaaaaauaa

SEQ ID NO: 3057193 - RNA, 13 nt, Human
aaaagaauauuuu

SEQ ID NO: 3057194 - RNA, 13 nt, Human
aaaagacuccaaa

SEQ ID NO: 3057195 - RNA, 11 nt, Human
aaaagaaugau

SEQ ID NO: 3057196 - RNA, 12 nt, Human
aaaagaauauuu

SEQ ID NO: 3057197 - RNA, 17 nt, Human
aaaagaaagaaaaucag

SEQ ID NO: 3057198 - RNA, 14 nt, Human
aaaauaaaacuuuu

SEQ ID NO: 3057199 - RNA, 13 nt, Human
aaaaguugaauuu

SEQ ID NO: 3057200 - RNA, 18 nt, Human
aaaaguugaauuuuacau

SEQ ID NO: 3057201 - RNA, 13 nt, Human
aaaaucagccugc

SEQ ID NO: 3057202 - RNA, 17 nt, Human
aaaaucagccugcucca

SEQ ID NO: 3057203 - RNA, 21 nt, Human
aaaaucagccugcuccagcug

SEQ ID NO: 3057204 - RNA, 10 nt, Human
aaaaucauuu

SEQ ID NO: 3057205 - RNA, 12 nt, Human
aaaaucauuucu

SEQ ID NO: 3057206 - RNA, 11 nt, Human
aaaaucauuuc

SEQ ID NO: 3057207 - RNA, 18 nt, Human
aaagccugcaauuucaua

SEQ ID NO: 3057208 - RNA, 13 nt, Human
aaagccugcaauu

SEQ ID NO: 3057209 - RNA, 16 nt, Human
aaagccuccuccagcc

SEQ ID NO: 3057210 - RNA, 17 nt, Human
aaagcauuguaaaugug

SEQ ID NO: 3057211 - RNA, 15 nt, Human
aaagcauuguaaaug

SEQ ID NO: 3057212 - RNA, 20 nt, Human
aaagauauuuugcuuuguga

SEQ ID NO: 3057213 - RNA, 18 nt, Human
aaaaucucaaauuucuaa

SEQ ID NO: 3057214 - RNA, 16 nt, Human
aaaaucucaaauuucu

SEQ ID NO: 3057215 - RNA, 15 nt, Human
aaaaucucaaauuuc

SEQ ID NO: 3057216 - RNA, 21 nt, Human
aaaaucauuucugcaucagcu

SEQ ID NO: 3057217 - RNA, 15 nt, Human
aaaccgccaaggcug

SEQ ID NO: 3057218 - RNA, 16 nt, Human
aaaccgccaaggcugg

SEQ ID NO: 3057219 - RNA, 12 nt, Human
aaacccagcucu

SEQ ID NO: 3057220 - RNA, 16 nt, Human
aaacccagcucugguc

SEQ ID NO: 3057221 - RNA, 19 nt, Human
aaacccuugccaugugcua

SEQ ID NO: 3057222 - RNA, 22 nt, Human
aaaccgaacugauguaaguaaa

SEQ ID NO: 3057223 - RNA, 12 nt, Human
aaacucuuaaaa

SEQ ID NO: 3057224 - RNA, 23 nt, Human
aaacucuuaaaacccaagugccu

SEQ ID NO: 3057225 - RNA, 22 nt, Human
aaacugauuuuuuuuuccuuca

SEQ ID NO: 3057226 - RNA, 23 nt, Human
aaacugauuuuuuuuuccuucag

SEQ ID NO: 3057227 - RNA, 15 nt, Human
aaacugcacugucaa

SEQ ID NO: 3057228 - RNA, 23 nt, Human
aaaucucaaauuuggauugcuaa

SEQ ID NO: 3057229 - RNA, 19 nt, Human
aaaucucaaauuucuaaau

SEQ ID NO: 3057230 - RNA, 18 nt, Human
aaaucucaauauuucaga

SEQ ID NO: 3057231 - RNA, 13 nt, Human
aaaucuuuuugcu

SEQ ID NO: 3057232 - RNA, 14 nt, Human
aaaucuuuuugcuu

SEQ ID NO: 3057233 - RNA, 19 nt, Human
aaaugcuguaacuuucuga

SEQ ID NO: 3057234 - RNA, 21 nt, Human
aaauauuuauuuuaauaaugu

SEQ ID NO: 3057235 - RNA, 14 nt, Human
aaaggaugcacaga

SEQ ID NO: 3057236 - RNA, 20 nt, Human
aaaggaugcccaaagaugca

SEQ ID NO: 3057237 - RNA, 23 nt, Human
aaauguugacaugggacauuugc

SEQ ID NO: 3057238 - RNA, 13 nt, Human
aaauguucaucaa

SEQ ID NO: 3057239 - RNA, 22 nt, Human
aaauguugacaugggacauuug

SEQ ID NO: 3057240 - RNA, 18 nt, Human
aaccuuuguuugcaucug

SEQ ID NO: 3057241 - RNA, 16 nt, Human
aaccuuuugagugccu

SEQ ID NO: 3057242 - RNA, 23 nt, Human
aaccuuuugagugccuuacacaa

SEQ ID NO: 3057243 - RNA, 23 nt, Human
aacauggccuuugcuugaaagaa

SEQ ID NO: 3057244 - RNA, 22 nt, Human
aacauggccuuugcuugaaaga

SEQ ID NO: 3057245 - RNA, 11 nt, Human
aacaggcagau

SEQ ID NO: 3057246 - RNA, 15 nt, Human
aaauucuugcaaagu

SEQ ID NO: 3057247 - RNA, 23 nt, Human
aaauucuucuccacuuucuagcc

SEQ ID NO: 3057248 - RNA, 16 nt, Human
aaucucauaauuuaua

SEQ ID NO: 3057249 - RNA, 16 nt, Human
aaucucaauauuucag

SEQ ID NO: 3057250 - RNA, 14 nt, Human
aaugaagcaaugcu

SEQ ID NO: 3057251 - RNA, 20 nt, Human
aaugaaagacuguacaaagu

SEQ ID NO: 3057252 - RNA, 18 nt, Human
aaugaaagacuguacaaa

SEQ ID NO: 3057253 - RNA, 21 nt, Human
aaugaaagacuguacaaagua

SEQ ID NO: 3057254 - RNA, 20 nt, Human
aaugaagauacugaaauaaa

SEQ ID NO: 3057255 - RNA, 20 nt, Human
aaugaauacuuuauaaagga

SEQ ID NO: 3057256 - RNA, 20 nt, Human
aaugaugccaugaggaacaa

SEQ ID NO: 3057257 - RNA, 13 nt, Human
aauauuaagaaag

SEQ ID NO: 3057258 - RNA, 23 nt, Human
aauauguggaguucaucuugaau

SEQ ID NO: 3057259 - RNA, 23 nt, Human
aaucaccgaaaacguggcugcuu

SEQ ID NO: 3057260 - RNA, 21 nt, Human
aaucaccgaaaacguggcugc

SEQ ID NO: 3057261 - RNA, 16 nt, Human
aauaaacacucuugaa

SEQ ID NO: 3057262 - RNA, 11 nt, Human
aauaaacacuc

SEQ ID NO: 3057263 - RNA, 19 nt, Human
aauaaacacucuugaaaaa

SEQ ID NO: 3057264 - RNA, 22 nt, Human
aagugcugcauuuaaaagauac

SEQ ID NO: 3057265 - RNA, 14 nt, Human
aagugcugcauuua

SEQ ID NO: 3057266 - RNA, 12 nt, Human
aagugcugggau

SEQ ID NO: 3057267 - RNA, 16 nt, Human
aauaaugugaaacugg

SEQ ID NO: 3057268 - RNA, 14 nt, Human
aauaaagcagcguu

SEQ ID NO: 3057269 - RNA, 22 nt, Human
aauaaugugaaacuggauuaaa

SEQ ID NO: 3057270 - RNA, 17 nt, Human
aauaaugugaaacugga

SEQ ID NO: 3057271 - RNA, 19 nt, Human
aagaguauuuuugacagaa

SEQ ID NO: 3057272 - RNA, 16 nt, Human
aagaguaguaauagag

SEQ ID NO: 3057273 - RNA, 20 nt, Human
aagaguaggaagacuuugga

SEQ ID NO: 3057274 - RNA, 21 nt, Human
aagacaaggaaaaaauaacaa

SEQ ID NO: 3057275 - RNA, 20 nt, Human
aagaagacugcauuauauuu

SEQ ID NO: 3057276 - RNA, 15 nt, Human
aagaagacugcauua

SEQ ID NO: 3057277 - RNA, 20 nt, Human
aagacaaugugaaaagaaaa

SEQ ID NO: 3057278 - RNA, 19 nt, Human
aagacaaugugaaaagaaa

SEQ ID NO: 3057279 - RNA, 22 nt, Human
aagacaaugacuuacuguacau

SEQ ID NO: 3057280 - RNA, 15 nt, Human
aagaacugaaaucau

SEQ ID NO: 3057281 - RNA, 11 nt, Human
aagaacugaaa

SEQ ID NO: 3057282 - RNA, 12 nt, Human
aagaacugaaau

SEQ ID NO: 3057283 - RNA, 13 nt, Human
aagaacugaaauc

SEQ ID NO: 3057284 - RNA, 20 nt, Human
aacgcaggcccccaggugcc

SEQ ID NO: 3057285 - RNA, 14 nt, Human
aagagagaaaauaa

SEQ ID NO: 3057286 - RNA, 17 nt, Human
aagacuuuuccaacccu

SEQ ID NO: 3057287 - RNA, 13 nt, Human
aagagaaaaaaua

SEQ ID NO: 3057288 - RNA, 19 nt, Human
aagacuuuucuuucagcca

SEQ ID NO: 3057289 - RNA, 21 nt, Human
aagacuuuuccaacccucauc

SEQ ID NO: 3057290 - RNA, 12 nt, Human
aagacuuuucuu

SEQ ID NO: 3057291 - RNA, 17 nt, Human
aagaccacguuucuaaa

SEQ ID NO: 3057292 - RNA, 15 nt, Human
aagaccacguuucua

SEQ ID NO: 3057293 - RNA, 23 nt, Human
aagacagauacuccuccaagguu

SEQ ID NO: 3057294 - RNA, 22 nt, Human
aagacagagccccacccucaga

SEQ ID NO: 3057295 - RNA, 15 nt, Human
aagcgugagccacug

SEQ ID NO: 3057296 - RNA, 13 nt, Human
aagcuacuuauug

SEQ ID NO: 3057297 - RNA, 14 nt, Human
aagcggcuggcagc

SEQ ID NO: 3057298 - RNA, 17 nt, Human
aagauacaguuacucag

SEQ ID NO: 3057299 - RNA, 19 nt, Human
aagauaauauuaaggaaga

SEQ ID NO: 3057300 - RNA, 21 nt, Human
aagauaauauuaaggaagaca

SEQ ID NO: 3057301 - RNA, 14 nt, Human
aagauaaaugugcu

SEQ ID NO: 3057302 - RNA, 13 nt, Human
aagcugcacccuc

SEQ ID NO: 3057303 - RNA, 19 nt, Human
aagcugcacccucaggcag

SEQ ID NO: 3057304 - RNA, 13 nt, Human
aaggcaaggcugu

SEQ ID NO: 3057305 - RNA, 15 nt, Human
aaggcaaggcuguca

SEQ ID NO: 3057306 - RNA, 15 nt, Human
aauuauauaaguauu

SEQ ID NO: 3057307 - RNA, 16 nt, Human
aauuauauaaguauuc

SEQ ID NO: 3057308 - RNA, 17 nt, Human
aauuauauaaguauucu

SEQ ID NO: 3057309 - RNA, 19 nt, Human
aauuaugaguuauuuuuau

SEQ ID NO: 3057310 - RNA, 18 nt, Human
aauuaugaaacuuuugga

SEQ ID NO: 3057311 - RNA, 13 nt, Human
aauuaugaaacuu

SEQ ID NO: 3057312 - RNA, 15 nt, Human
aauuaugaaacuuuu

SEQ ID NO: 3057313 - RNA, 12 nt, Human
aauuaugaaacu

SEQ ID NO: 3057314 - RNA, 19 nt, Human
aauucucagaaucucaaau

SEQ ID NO: 3057315 - RNA, 14 nt, Human
aauucuacuuugag

SEQ ID NO: 3057316 - RNA, 17 nt, Human
aauucucuaguuugauu

SEQ ID NO: 3057317 - RNA, 15 nt, Human
aauucucuaguuuga

SEQ ID NO: 3057318 - RNA, 15 nt, Human
aauucucuuauccaa

SEQ ID NO: 3057319 - RNA, 21 nt, Human
aauucucauuugucacacacu

SEQ ID NO: 3057320 - RNA, 14 nt, Human
aauucuguuuuucu

SEQ ID NO: 3057321 - RNA, 18 nt, Human
aauucuguuuuucuaggc

SEQ ID NO: 3057322 - RNA, 15 nt, Human
aauuggagcucgugg

SEQ ID NO: 3057323 - RNA, 22 nt, Human
aauuguaaggaaugauuaauua

SEQ ID NO: 3057324 - RNA, 11 nt, Human
aauuguaauag

SEQ ID NO: 3057325 - RNA, 22 nt, Human
aauuucauaccuaucaucuuaa

SEQ ID NO: 3057326 - RNA, 18 nt, Human
aauuucauaugcuguaua

SEQ ID NO: 3057327 - RNA, 16 nt, Human
aauuucauaugcugua

SEQ ID NO: 3057328 - RNA, 15 nt, Human
aauuucccaaagcag

SEQ ID NO: 3057329 - RNA, 17 nt, Human
aauuucccaaagcagug

SEQ ID NO: 3057330 - RNA, 12 nt, Human
aauuuccuggga

SEQ ID NO: 3057331 - RNA, 15 nt, Human
aauuuccugggagcu

SEQ ID NO: 3057332 - RNA, 16 nt, Human
acacagcucuucucca

SEQ ID NO: 3057333 - RNA, 14 nt, Human
acacagcucuucuc

SEQ ID NO: 3057334 - RNA, 13 nt, Human
acaccagagccca

SEQ ID NO: 3057335 - RNA, 15 nt, Human
acaccaauauucaua

SEQ ID NO: 3057336 - RNA, 23 nt, Human
acaccagagcccaccuuggcuca

SEQ ID NO: 3057337 - RNA, 18 nt, Human
acaccagagcccaccuug

SEQ ID NO: 3057338 - RNA, 18 nt, Human
acacagcucuucuccagg

SEQ ID NO: 3057339 - RNA, 16 nt, Human
acaaggcaaggcuguc

SEQ ID NO: 3057340 - RNA, 17 nt, Human
acaaggcaaggcuguca

SEQ ID NO: 3057341 - RNA, 19 nt, Human
acaaggcaaggcugucaau

SEQ ID NO: 3057342 - RNA, 15 nt, Human
acaaggcaaggcugu

SEQ ID NO: 3057343 - RNA, 15 nt, Human
acaaguuaaauaaau

SEQ ID NO: 3057344 - RNA, 12 nt, Human
accaagcccagu

SEQ ID NO: 3057345 - RNA, 16 nt, Human
accacgcuggaccuug

SEQ ID NO: 3057346 - RNA, 14 nt, Human
accacgcuggaccu

SEQ ID NO: 3057347 - RNA, 18 nt, Human
accacgcuggaccuugaa

SEQ ID NO: 3057348 - RNA, 14 nt, Human
accacguuucuaaa

SEQ ID NO: 3057349 - RNA, 13 nt, Human
accacguuucuaa

SEQ ID NO: 3057350 - RNA, 14 nt, Human
accaacgucugugc

SEQ ID NO: 3057351 - RNA, 17 nt, Human
accaacgucugugccau

SEQ ID NO: 3057352 - RNA, 15 nt, Human
acauuugcucaugga

SEQ ID NO: 3057353 - RNA, 14 nt, Human
acauuuguauaaaa

SEQ ID NO: 3057354 - RNA, 16 nt, Human
acauuuguauaaaaua

SEQ ID NO: 3057355 - RNA, 19 nt, Human
acauuuguauaaaauaauu

SEQ ID NO: 3057356 - RNA, 14 nt, Human
accagagcugccac

SEQ ID NO: 3057357 - RNA, 16 nt, Human
accagagcugccaccu

SEQ ID NO: 3057358 - RNA, 13 nt, Human
accagagcugcca

SEQ ID NO: 3057359 - RNA, 12 nt, Human
accagagcugcc

SEQ ID NO: 3057360 - RNA, 23 nt, Human
acauguuucuuuguaaugaaaac

SEQ ID NO: 3057361 - RNA, 20 nt, Human
acauaaguauuuaauucaug

SEQ ID NO: 3057362 - RNA, 21 nt, Human
acauaaguaauucaagaaaac

SEQ ID NO: 3057363 - RNA, 20 nt, Human
acauaaguaauucaagaaaa

SEQ ID NO: 3057364 - RNA, 20 nt, Human
acauaaauuuaguauuuugu

SEQ ID NO: 3057365 - RNA, 16 nt, Human
acauacaauuccaaac

SEQ ID NO: 3057366 - RNA, 20 nt, Human
acauacaggaagguagaaau

SEQ ID NO: 3057367 - RNA, 20 nt, Human
acaugccucucucaggccaa

SEQ ID NO: 3057368 - RNA, 13 nt, Human
acaugcacgugug

SEQ ID NO: 3057369 - RNA, 23 nt, Human
acaugcacagcuaacauggaagu

SEQ ID NO: 3057370 - RNA, 14 nt, Human
acaggcaaugcugg

SEQ ID NO: 3057371 - RNA, 24 nt, Human
acaggaugguucccuugaugaaga

SEQ ID NO: 3057372 - RNA, 22 nt, Human
acaggaugguucccuugaugaa

SEQ ID NO: 3057373 - RNA, 17 nt, Human
acaggcaaugcuggcug

SEQ ID NO: 3057374 - RNA, 14 nt, Human
acaggcacccacca

SEQ ID NO: 3057375 - RNA, 16 nt, Human
acaggcaaugcuggcu

SEQ ID NO: 3057376 - RNA, 15 nt, Human
acaggcaaugcuggc

SEQ ID NO: 3057377 - RNA, 18 nt, Human
acagcucuucuccaggcu

SEQ ID NO: 3057378 - RNA, 20 nt, Human
acagcucuucuccaggcugu

SEQ ID NO: 3057379 - RNA, 19 nt, Human
acagcucuucuccaggcug

SEQ ID NO: 3057380 - RNA, 23 nt, Human
acaggcacccaccaucaugucug

SEQ ID NO: 3057381 - RNA, 23 nt, Human
acagugaucaaguuauuuuuaau

SEQ ID NO: 3057382 - RNA, 19 nt, Human
acagugauuaccagggacu

SEQ ID NO: 3057383 - RNA, 14 nt, Human
acuugaaaauuaac

SEQ ID NO: 3057384 - RNA, 12 nt, Human
acuugaaaauua

SEQ ID NO: 3057385 - RNA, 23 nt, Human
acuuggggggcugaggugggagg

SEQ ID NO: 3057386 - RNA, 21 nt, Human
acuucagacauagaauuaaca

SEQ ID NO: 3057387 - RNA, 18 nt, Human
acuguuucaaacuuuacu

SEQ ID NO: 3057388 - RNA, 15 nt, Human
acuguuucaaacuuu

SEQ ID NO: 3057389 - RNA, 13 nt, Human
acuguuucaaacu

SEQ ID NO: 3057390 - RNA, 19 nt, Human
acuguuucaaacuuuacua

SEQ ID NO: 3057391 - RNA, 17 nt, Human
acuucaaauccuugaag

SEQ ID NO: 3057392 - RNA, 12 nt, Human
acuucagacaua

SEQ ID NO: 3057393 - RNA, 18 nt, Human
acuucaaauccuugaaga

SEQ ID NO: 3057394 - RNA, 22 nt, Human
acuuaaaaaugguuuaaauggu

SEQ ID NO: 3057395 - RNA, 21 nt, Human
acuuaaaaaugguuuaaaugg

SEQ ID NO: 3057396 - RNA, 23 nt, Human
acugucuuuuuucuaaaguaaaa

SEQ ID NO: 3057397 - RNA, 22 nt, Human
acugucuuuuuucuaaaguaaa

SEQ ID NO: 3057398 - RNA, 16 nt, Human
acugugccaugugcca

SEQ ID NO: 3057399 - RNA, 18 nt, Human
acugugccaugugccagg

SEQ ID NO: 3057400 - RNA, 17 nt, Human
acugugccaugugccag

SEQ ID NO: 3057401 - RNA, 16 nt, Human
acugucuuuuuucuaa

SEQ ID NO: 3057402 - RNA, 17 nt, Human
acuguaaaauaauaacu

SEQ ID NO: 3057403 - RNA, 15 nt, Human
acugccuauuuuaau

SEQ ID NO: 3057404 - RNA, 14 nt, Human
acugccaugccagc

SEQ ID NO: 3057405 - RNA, 19 nt, Human
acugauaugggucuugaua

SEQ ID NO: 3057406 - RNA, 14 nt, Human
acugauuacugccu

SEQ ID NO: 3057407 - RNA, 23 nt, Human
acugaugggcaacccccagccug

SEQ ID NO: 3057408 - RNA, 17 nt, Human
acugauuuuuuuuuccu

SEQ ID NO: 3057409 - RNA, 18 nt, Human
acugauuuuuuuuuccuu

SEQ ID NO: 3057410 - RNA, 19 nt, Human
acugauuuuuuuuuccuuc

SEQ ID NO: 3057411 - RNA, 20 nt, Human
acugauuuuuuuuuccuuca

SEQ ID NO: 3057412 - RNA, 16 nt, Human
acugauuuuuuuuucc

SEQ ID NO: 3057413 - RNA, 16 nt, Human
acugacagauuuccau

SEQ ID NO: 3057414 - RNA, 18 nt, Human
acugacauuguuggccaa

SEQ ID NO: 3057415 - RNA, 17 nt, Human
acugacauuguuggcca

SEQ ID NO: 3057416 - RNA, 23 nt, Human
acugaauuucuuuugccguuauu

SEQ ID NO: 3057417 - RNA, 13 nt, Human
acugacacaugcu

SEQ ID NO: 3057418 - RNA, 22 nt, Human
acugaauggacuuugcacacuu

SEQ ID NO: 3057419 - RNA, 17 nt, Human
acugaauggacuuugca

SEQ ID NO: 3057420 - RNA, 12 nt, Human
acugaauuucuu

SEQ ID NO: 3057421 - RNA, 20 nt, Human
acugaauuaugaaacuuuug

SEQ ID NO: 3057422 - RNA, 13 nt, Human
acugaauuaugaa

SEQ ID NO: 3057423 - RNA, 14 nt, Human
acugaauuaugaaa

SEQ ID NO: 3057424 - RNA, 15 nt, Human
acugaauuaugaaac

SEQ ID NO: 3057425 - RNA, 22 nt, Human
acucccaucugugaaaggaaag

SEQ ID NO: 3057426 - RNA, 17 nt, Human
acucccaugagggagau

SEQ ID NO: 3057427 - RNA, 22 nt, Human
acucccaugagggagaugccau

SEQ ID NO: 3057428 - RNA, 23 nt, Human
acucccaugagggagaugccaug

SEQ ID NO: 3057429 - RNA, 16 nt, Human
acuccggcccuccaga

SEQ ID NO: 3057430 - RNA, 14 nt, Human
acucccuuucaaca

SEQ ID NO: 3057431 - RNA, 19 nt, Human
acuccggcccuccagagcc

SEQ ID NO: 3057432 - RNA, 15 nt, Human
acucuacagaggcca

SEQ ID NO: 3057433 - RNA, 14 nt, Human
acucguuaauuugu

SEQ ID NO: 3057434 - RNA, 19 nt, Human
acucguuaauuuguagugu

SEQ ID NO: 3057435 - RNA, 18 nt, Human
accgugaggccagagaca

SEQ ID NO: 3057436 - RNA, 11 nt, Human
accucagccuc

SEQ ID NO: 3057437 - RNA, 12 nt, Human
accucagccucc

SEQ ID NO: 3057438 - RNA, 23 nt, Human
accgugaggccagagacacaagc

SEQ ID NO: 3057439 - RNA, 17 nt, Human
acccugugauggggccc

SEQ ID NO: 3057440 - RNA, 19 nt, Human
acccugugauggggcccug

SEQ ID NO: 3057441 - RNA, 20 nt, Human
acccugugauggggcccugc

SEQ ID NO: 3057442 - RNA, 21 nt, Human
acccugugauggggcccugcc

SEQ ID NO: 3057443 - RNA, 16 nt, Human
accgggcacucagaag

SEQ ID NO: 3057444 - RNA, 20 nt, Human
accgggccacagagaaagua

SEQ ID NO: 3057445 - RNA, 14 nt, Human
accgggcacucaga

SEQ ID NO: 3057446 - RNA, 12 nt, Human
accgggcacuca

SEQ ID NO: 3057447 - RNA, 21 nt, Human
accucaggugauccacccacc

SEQ ID NO: 3057448 - RNA, 20 nt, Human
accucaggugauccacccac

SEQ ID NO: 3057449 - RNA, 11 nt, Human
accucaggccu

SEQ ID NO: 3057450 - RNA, 23 nt, Human
acccucaucaccaacgucugugc

SEQ ID NO: 3057451 - RNA, 23 nt, Human
acccuggcacuauaauguaagcu

SEQ ID NO: 3057452 - RNA, 15 nt, Human
acccucaggcaggug

SEQ ID NO: 3057453 - RNA, 16 nt, Human
acccucaggcaggugg

SEQ ID NO: 3057454 - RNA, 13 nt, Human
acccucaucacca

SEQ ID NO: 3057455 - RNA, 13 nt, Human
acccucaggcagg

SEQ ID NO: 3057456 - RNA, 14 nt, Human
acccucaggcaggu

SEQ ID NO: 3057457 - RNA, 20 nt, Human
acccucagaugcacaugagc

SEQ ID NO: 3057458 - RNA, 16 nt, Human
acccugugauggggcc

SEQ ID NO: 3057459 - RNA, 21 nt, Human
acccugucucuacuaaaaaua

SEQ ID NO: 3057460 - RNA, 16 nt, Human
acccuggggagaaagu

SEQ ID NO: 3057461 - RNA, 14 nt, Human
acccuauugcugcu

SEQ ID NO: 3057462 - RNA, 19 nt, Human
acccuauugcugcuugagg

SEQ ID NO: 3057463 - RNA, 13 nt, Human
acccuauugcugc

SEQ ID NO: 3057464 - RNA, 17 nt, Human
acccgucuccagcugcu

SEQ ID NO: 3057465 - RNA, 12 nt, Human
accucugccuga

SEQ ID NO: 3057466 - RNA, 20 nt, Human
accucugccucagaaaacaa

SEQ ID NO: 3057467 - RNA, 20 nt, Human
accucugccugaagucacac

SEQ ID NO: 3057468 - RNA, 19 nt, Human
accugccaggaagccagca

SEQ ID NO: 3057469 - RNA, 23 nt, Human
accugccaggaagccagcaggcu

SEQ ID NO: 3057470 - RNA, 21 nt, Human
accugccaggaagccagcagg

SEQ ID NO: 3057471 - RNA, 22 nt, Human
accugccaggaagccagcaggc

SEQ ID NO: 3057472 - RNA, 12 nt, Human
accugccccuca

SEQ ID NO: 3057473 - RNA, 15 nt, Human
accugccccucaacu

SEQ ID NO: 3057474 - RNA, 18 nt, Human
acuaauggggcggugaga

SEQ ID NO: 3057475 - RNA, 20 nt, Human
acuaauguguaagacaaaaa

SEQ ID NO: 3057476 - RNA, 22 nt, Human
acgcugugcugcccugcccacc

SEQ ID NO: 3057477 - RNA, 19 nt, Human
acgcugugcugcccugccc

SEQ ID NO: 3057478 - RNA, 12 nt, Human
acgucugugcca

SEQ ID NO: 3057479 - RNA, 13 nt, Human
acgucugugccau

SEQ ID NO: 3057480 - RNA, 13 nt, Human
acgucuuaaauau

SEQ ID NO: 3057481 - RNA, 14 nt, Human
acgucuuaaauauu

SEQ ID NO: 3057482 - RNA, 15 nt, Human
acggaauaguuggcu

SEQ ID NO: 3057483 - RNA, 19 nt, Human
acggaauaguuggcuagga

SEQ ID NO: 3057484 - RNA, 17 nt, Human
acggacacucaaaagcu

SEQ ID NO: 3057485 - RNA, 19 nt, Human
acgauuucuguuuagauaa

SEQ ID NO: 3057486 - RNA, 23 nt, Human
acgauuucuguuuagauaauaca

SEQ ID NO: 3057487 - RNA, 20 nt, Human
acgauuucuguuuagauaau

SEQ ID NO: 3057488 - RNA, 14 nt, Human
acgcacacugucug

SEQ ID NO: 3057489 - RNA, 13 nt, Human
agugaaugaaaca

SEQ ID NO: 3057490 - RNA, 14 nt, Human
agugacagaggcag

SEQ ID NO: 3057491 - RNA, 19 nt, Human
agugacagaggcagcccca

SEQ ID NO: 3057492 - RNA, 16 nt, Human
agugacagaggcagcc

SEQ ID NO: 3057493 - RNA, 19 nt, Human
agugccuuauggaacacuc

SEQ ID NO: 3057494 - RNA, 20 nt, Human
agugccuuauggaacacucu

SEQ ID NO: 3057495 - RNA, 21 nt, Human
agugccuuauggaacacucug

SEQ ID NO: 3057496 - RNA, 22 nt, Human
agugccuuauggaacacucuga

SEQ ID NO: 3057497 - RNA, 18 nt, Human
agugccuuauggaacacu

SEQ ID NO: 3057498 - RNA, 20 nt, Human
agugauucuccugccucagc

SEQ ID NO: 3057499 - RNA, 18 nt, Human
agugauucuccugccuca

SEQ ID NO: 3057500 - RNA, 19 nt, Human
agugauucuccugccucag

SEQ ID NO: 3057501 - RNA, 22 nt, Human
agugauccucccaccucagccu

SEQ ID NO: 3057502 - RNA, 20 nt, Human
agugauccucccaccucagc

SEQ ID NO: 3057503 - RNA, 19 nt, Human
agugauccucccaccucag

SEQ ID NO: 3057504 - RNA, 13 nt, Human
agugauuaccagg

SEQ ID NO: 3057505 - RNA, 19 nt, Human
agugaugucacuagggcag

SEQ ID NO: 3057506 - RNA, 16 nt, Human
aguccuuaccagcaga

SEQ ID NO: 3057507 - RNA, 18 nt, Human
aguccuuaccagcagagc

SEQ ID NO: 3057508 - RNA, 14 nt, Human
aguccucuuuucug

SEQ ID NO: 3057509 - RNA, 13 nt, Human
agucauuuaauaa

SEQ ID NO: 3057510 - RNA, 16 nt, Human
agucgaggacagggag

SEQ ID NO: 3057511 - RNA, 18 nt, Human
agucuggaaugcaguggu

SEQ ID NO: 3057512 - RNA, 20 nt, Human
agucugauucccaagcucug

SEQ ID NO: 3057513 - RNA, 22 nt, Human
agucugauucccaagcucugcu

SEQ ID NO: 3057514 - RNA, 21 nt, Human
agucugauucccaagcucugc

SEQ ID NO: 3057515 - RNA, 18 nt, Human
agucuggcccuuccuuuu

SEQ ID NO: 3057516 - RNA, 22 nt, Human
aguauauugauccagaaagaaa

SEQ ID NO: 3057517 - RNA, 21 nt, Human
aguacuucuccacccugcucu

SEQ ID NO: 3057518 - RNA, 19 nt, Human
aguacuucuccacccugcu

SEQ ID NO: 3057519 - RNA, 20 nt, Human
aguacuucuccacccugcuc

SEQ ID NO: 3057520 - RNA, 15 nt, Human
aguacuggagaaaau

SEQ ID NO: 3057521 - RNA, 13 nt, Human
aguacucauacau

SEQ ID NO: 3057522 - RNA, 18 nt, Human
aguaaaugggggugcauu

SEQ ID NO: 3057523 - RNA, 20 nt, Human
aguaaaugggggugcauuug

SEQ ID NO: 3057524 - RNA, 19 nt, Human
aguaaaugggggugcauuu

SEQ ID NO: 3057525 - RNA, 21 nt, Human
aguaaaugggggugcauuuga

SEQ ID NO: 3057526 - RNA, 17 nt, Human
aguaacuuacuuaggug

SEQ ID NO: 3057527 - RNA, 15 nt, Human
auaaguaaaugcuag

SEQ ID NO: 3057528 - RNA, 14 nt, Human
auaagcuacugcca

SEQ ID NO: 3057529 - RNA, 16 nt, Human
auaagcuacugccauc

SEQ ID NO: 3057530 - RNA, 17 nt, Human
auaaguaauucaagaaa

SEQ ID NO: 3057531 - RNA, 15 nt, Human
auacaccacuacauu

SEQ ID NO: 3057532 - RNA, 20 nt, Human
auacacacucaaaucaagaa

SEQ ID NO: 3057533 - RNA, 23 nt, Human
auacaaugcugugcccuaaagug

SEQ ID NO: 3057534 - RNA, 12 nt, Human
auaauguuaaca

SEQ ID NO: 3057535 - RNA, 21 nt, Human
auaaagaugagugagcaugcc

SEQ ID NO: 3057536 - RNA, 19 nt, Human
auacuugaaaauuaacaug

SEQ ID NO: 3057537 - RNA, 17 nt, Human
auacaccacuacauucu

SEQ ID NO: 3057538 - RNA, 20 nt, Human
aguuguucaauaauaaauau

SEQ ID NO: 3057539 - RNA, 17 nt, Human
aguuguuagugugucuu

SEQ ID NO: 3057540 - RNA, 22 nt, Human
aguuguuagugugucuuagugu

SEQ ID NO: 3057541 - RNA, 14 nt, Human
aguucauacccugu

SEQ ID NO: 3057542 - RNA, 18 nt, Human
aguuccaccaucaagcca

SEQ ID NO: 3057543 - RNA, 21 nt, Human
aguuccaccaucaagccacca

SEQ ID NO: 3057544 - RNA, 18 nt, Human
aguugaaaaacagcugag

SEQ ID NO: 3057545 - RNA, 16 nt, Human
aguugaagacagagcu

SEQ ID NO: 3057546 - RNA, 17 nt, Human
aguugaagacagagcua

SEQ ID NO: 3057547 - RNA, 17 nt, Human
aguugaaaaacagcuga

SEQ ID NO: 3057548 - RNA, 17 nt, Human
agugcucacccacacca

SEQ ID NO: 3057549 - RNA, 18 nt, Human
agugcucacccacaccau

SEQ ID NO: 3057550 - RNA, 14 nt, Human
auaaaaacaacuuu

SEQ ID NO: 3057551 - RNA, 20 nt, Human
auaaaaagacauucuuccaa

SEQ ID NO: 3057552 - RNA, 23 nt, Human
auaaaaauauuguguugugaaug

SEQ ID NO: 3057553 - RNA, 22 nt, Human
auaaaaauauuguguugugaau

SEQ ID NO: 3057554 - RNA, 16 nt, Human
auaaaagacagugaaa

SEQ ID NO: 3057555 - RNA, 15 nt, Human
auaaaagacagugaa

SEQ ID NO: 3057556 - RNA, 14 nt, Human
aguuugauuaaauu

SEQ ID NO: 3057557 - RNA, 11 nt, Human
aguuugcaguu

SEQ ID NO: 3057558 - RNA, 20 nt, Human
aucaaagggugaaaauuauu

SEQ ID NO: 3057559 - RNA, 18 nt, Human
aucaaagagagaaaauaa

SEQ ID NO: 3057560 - RNA, 19 nt, Human
aucaaagagguuuuaaaaa

SEQ ID NO: 3057561 - RNA, 20 nt, Human
aucaaaagguuaauaaagua

SEQ ID NO: 3057562 - RNA, 18 nt, Human
auauuuuuuucuuuucuu

SEQ ID NO: 3057563 - RNA, 16 nt, Human
auauuuuuuucugaaa

SEQ ID NO: 3057564 - RNA, 18 nt, Human
auauuuuuuucugaaauu

SEQ ID NO: 3057565 - RNA, 14 nt, Human
auauuuuuuucuga

SEQ ID NO: 3057566 - RNA, 14 nt, Human
aucaaaagaaagaa

SEQ ID NO: 3057567 - RNA, 19 nt, Human
auauuuuuuucugaaauuu

SEQ ID NO: 3057568 - RNA, 14 nt, Human
auagcacagacccu

SEQ ID NO: 3057569 - RNA, 23 nt, Human
auccacuuuaucuugaauaaugu

SEQ ID NO: 3057570 - RNA, 21 nt, Human
auccacugugccaugugccag

SEQ ID NO: 3057571 - RNA, 15 nt, Human
aucauccuaagcuau

SEQ ID NO: 3057572 - RNA, 20 nt, Human
aucaugacaaagacugagua

SEQ ID NO: 3057573 - RNA, 21 nt, Human
aucaugaauuaguuuuauaug

SEQ ID NO: 3057574 - RNA, 22 nt, Human
aucuaggaagacuuuggaaaga

SEQ ID NO: 3057575 - RNA, 12 nt, Human
auccuugaagau

SEQ ID NO: 3057576 - RNA, 15 nt, Human
augaccuuucaauag

SEQ ID NO: 3057577 - RNA, 13 nt, Human
augaccuuucaau

SEQ ID NO: 3057578 - RNA, 11 nt, Human
augagccuggc

SEQ ID NO: 3057579 - RNA, 19 nt, Human
augagccucagcauccugg

SEQ ID NO: 3057580 - RNA, 21 nt, Human
augagccucagcauccuggca

SEQ ID NO: 3057581 - RNA, 12 nt, Human
augaaagacugu

SEQ ID NO: 3057582 - RNA, 16 nt, Human
augaaacuuuuggaag

SEQ ID NO: 3057583 - RNA, 23 nt, Human
augaagcauuuacuuuguguuca

SEQ ID NO: 3057584 - RNA, 23 nt, Human
augaaguuuuuuuuauacaggau

SEQ ID NO: 3057585 - RNA, 21 nt, Human
augaaguaauaugcacacauu

SEQ ID NO: 3057586 - RNA, 14 nt, Human
augaaguaauaugc

SEQ ID NO: 3057587 - RNA, 23 nt, Human
augaaguaauaugcacacauuuu

SEQ ID NO: 3057588 - RNA, 19 nt, Human
aucuaggauuuuaagggaa

SEQ ID NO: 3057589 - RNA, 11 nt, Human
aucuaggauuu

SEQ ID NO: 3057590 - RNA, 23 nt, Human
aucuaggaagacuuuggaaagag

SEQ ID NO: 3057591 - RNA, 16 nt, Human
augcuuugaucccuuc

SEQ ID NO: 3057592 - RNA, 14 nt, Human
augcuucuucagag

SEQ ID NO: 3057593 - RNA, 17 nt, Human
augcuucuucagagacu

SEQ ID NO: 3057594 - RNA, 20 nt, Human
augcuucuucagagacuccu

SEQ ID NO: 3057595 - RNA, 21 nt, Human
augcuucuguuuuauaauuuu

SEQ ID NO: 3057596 - RNA, 19 nt, Human
augcucugcauguuacaua

SEQ ID NO: 3057597 - RNA, 18 nt, Human
augcucugcauguuacau

SEQ ID NO: 3057598 - RNA, 15 nt, Human
augcucugcauguua

SEQ ID NO: 3057599 - RNA, 21 nt, Human
augggaaugaaugucagugug

SEQ ID NO: 3057600 - RNA, 20 nt, Human
augggaaagcauuguaaaug

SEQ ID NO: 3057601 - RNA, 14 nt, Human
augggaaagcauug

SEQ ID NO: 3057602 - RNA, 15 nt, Human
augggacagggagga

SEQ ID NO: 3057603 - RNA, 20 nt, Human
augggacauuugcucaugga

SEQ ID NO: 3057604 - RNA, 23 nt, Human
auggcuuccuggcaauagucaaa

SEQ ID NO: 3057605 - RNA, 18 nt, Human
auggcuuuugugcauuau

SEQ ID NO: 3057606 - RNA, 24 nt, Human
augcauauuauuuuauguugcaua

SEQ ID NO: 3057607 - RNA, 20 nt, Human
augcauauuauuuuauguug

SEQ ID NO: 3057608 - RNA, 18 nt, Human
augccugguggcagcugc

SEQ ID NO: 3057609 - RNA, 19 nt, Human
augccugguggcagcugcg

SEQ ID NO: 3057610 - RNA, 13 nt, Human
augccugguggca

SEQ ID NO: 3057611 - RNA, 12 nt, Human
augccugguggc

SEQ ID NO: 3057612 - RNA, 11 nt, Human
augccuggugg

SEQ ID NO: 3057613 - RNA, 21 nt, Human
augccugguggcagcugcggu

SEQ ID NO: 3057614 - RNA, 23 nt, Human
agcaaaauugauguguuuauuua

SEQ ID NO: 3057615 - RNA, 19 nt, Human
agcaaauucuguuuuucua

SEQ ID NO: 3057616 - RNA, 19 nt, Human
agcaaaauugauguguuua

SEQ ID NO: 3057617 - RNA, 13 nt, Human
agcaaaauugaug

SEQ ID NO: 3057618 - RNA, 16 nt, Human
agauugcaccacugca

SEQ ID NO: 3057619 - RNA, 17 nt, Human
agauugcaacaggcugg

SEQ ID NO: 3057620 - RNA, 17 nt, Human
agauugagauguguuca

SEQ ID NO: 3057621 - RNA, 16 nt, Human
agauugcaacaggcug

SEQ ID NO: 3057622 - RNA, 15 nt, Human
agauucuuuccugag

SEQ ID NO: 3057623 - RNA, 16 nt, Human
agauucuuuccugagg

SEQ ID NO: 3057624 - RNA, 18 nt, Human
agaucucuaacuucacca

SEQ ID NO: 3057625 - RNA, 18 nt, Human
agaugacaucugucuagg

SEQ ID NO: 3057626 - RNA, 20 nt, Human
agaugggugcuuggaggaag

SEQ ID NO: 3057627 - RNA, 22 nt, Human
agaugggugcuuggaggaagga

SEQ ID NO: 3057628 - RNA, 14 nt, Human
agauucuuuccuga

SEQ ID NO: 3057629 - RNA, 20 nt, Human
agagggucugaggaauccag

SEQ ID NO: 3057630 - RNA, 23 nt, Human
agaggggguggccucccaacuca

SEQ ID NO: 3057631 - RNA, 20 nt, Human
agauagauaggucagugcaa

SEQ ID NO: 3057632 - RNA, 20 nt, Human
agauagccaaggccaaagga

SEQ ID NO: 3057633 - RNA, 13 nt, Human
agaguugaagaca

SEQ ID NO: 3057634 - RNA, 14 nt, Human
agaguugaagacag

SEQ ID NO: 3057635 - RNA, 15 nt, Human
agaguugaagacaga

SEQ ID NO: 3057636 - RNA, 15 nt, Human
agauaugauucaaau

SEQ ID NO: 3057637 - RNA, 14 nt, Human
agauaugauucaaa

SEQ ID NO: 3057638 - RNA, 17 nt, Human
agccaacuauggccugu

SEQ ID NO: 3057639 - RNA, 14 nt, Human
agccagauuucacu

SEQ ID NO: 3057640 - RNA, 17 nt, Human
agccagauuucacucuc

SEQ ID NO: 3057641 - RNA, 20 nt, Human
agccagauuucacucuccuu

SEQ ID NO: 3057642 - RNA, 22 nt, Human
agccagauuucacucuccuugg

SEQ ID NO: 3057643 - RNA, 19 nt, Human
agccauuugucccaagugc

SEQ ID NO: 3057644 - RNA, 22 nt, Human
agccagcaggcucucaggccag

SEQ ID NO: 3057645 - RNA, 21 nt, Human
agccagcaggcucucaggcca

SEQ ID NO: 3057646 - RNA, 23 nt, Human
agccagcaggcucucaggccagc

SEQ ID NO: 3057647 - RNA, 17 nt, Human
agcccacgcccccacug

SEQ ID NO: 3057648 - RNA, 18 nt, Human
agcccacgcccccacugg

SEQ ID NO: 3057649 - RNA, 15 nt, Human
agcccacgcccccac

SEQ ID NO: 3057650 - RNA, 19 nt, Human
agcccacgcccccacuggu

SEQ ID NO: 3057651 - RNA, 23 nt, Human
agcccaccccucaacaccucugc

SEQ ID NO: 3057652 - RNA, 13 nt, Human
agcccaccuuggc

SEQ ID NO: 3057653 - RNA, 16 nt, Human
agcaucuaugugagac

SEQ ID NO: 3057654 - RNA, 17 nt, Human
agcagugcaugcugucc

SEQ ID NO: 3057655 - RNA, 16 nt, Human
agcagccuggacccug

SEQ ID NO: 3057656 - RNA, 19 nt, Human
agcacugacuucuaaguaa

SEQ ID NO: 3057657 - RNA, 17 nt, Human
agcacugacuucuaagu

SEQ ID NO: 3057658 - RNA, 13 nt, Human
agcagugcaugcu

SEQ ID NO: 3057659 - RNA, 16 nt, Human
agcagugcaugcuguc

SEQ ID NO: 3057660 - RNA, 19 nt, Human
agcagcguuucuaugacac

SEQ ID NO: 3057661 - RNA, 18 nt, Human
agcagcguuucuaugaca

SEQ ID NO: 3057662 - RNA, 20 nt, Human
agcagccuggacccugugga

SEQ ID NO: 3057663 - RNA, 20 nt, Human
agcacuaaggugugcucuga

SEQ ID NO: 3057664 - RNA, 21 nt, Human
agcacagacccugcccugugg

SEQ ID NO: 3057665 - RNA, 23 nt, Human
agaaugcacaaacagaggccgcc

SEQ ID NO: 3057666 - RNA, 18 nt, Human
agaaugcucuuuacuuca

SEQ ID NO: 3057667 - RNA, 17 nt, Human
agaaucucaaauaacua

SEQ ID NO: 3057668 - RNA, 21 nt, Human
agaaccaaaaagaggcuaugu

SEQ ID NO: 3057669 - RNA, 18 nt, Human
agaagacugcauuauauu

SEQ ID NO: 3057670 - RNA, 21 nt, Human
agaagacugcauuauauuuau

SEQ ID NO: 3057671 - RNA, 15 nt, Human
agaagagaaugcaca

SEQ ID NO: 3057672 - RNA, 13 nt, Human
agaagagcuguuc

SEQ ID NO: 3057673 - RNA, 13 nt, Human
agaagauagcagg

SEQ ID NO: 3057674 - RNA, 20 nt, Human
agaagagcuguucacagcca

SEQ ID NO: 3057675 - RNA, 19 nt, Human
agaagucuuagauguauau

SEQ ID NO: 3057676 - RNA, 17 nt, Human
agaagucuuagauguau

SEQ ID NO: 3057677 - RNA, 14 nt, Human
agaagucacacagu

SEQ ID NO: 3057678 - RNA, 19 nt, Human
agaacagauaaucagugug

SEQ ID NO: 3057679 - RNA, 17 nt, Human
agaacaucccuccuggg

SEQ ID NO: 3057680 - RNA, 13 nt, Human
agaacaucccucc

SEQ ID NO: 3057681 - RNA, 17 nt, Human
agaaccaaaaagaggcu

SEQ ID NO: 3057682 - RNA, 18 nt, Human
agaaccaaaaagaggcua

SEQ ID NO: 3057683 - RNA, 22 nt, Human
agaacagugauuaccagggacu

SEQ ID NO: 3057684 - RNA, 18 nt, Human
agacgaaacauuuguucu

SEQ ID NO: 3057685 - RNA, 19 nt, Human
agaccauuggggcucccag

SEQ ID NO: 3057686 - RNA, 20 nt, Human
agaccauuggggcucccagc

SEQ ID NO: 3057687 - RNA, 22 nt, Human
agaccauuggggcucccagcca

SEQ ID NO: 3057688 - RNA, 23 nt, Human
agaccauuggggcucccagccag

SEQ ID NO: 3057689 - RNA, 14 nt, Human
agaccacguuucua

SEQ ID NO: 3057690 - RNA, 23 nt, Human
agaccaucccugaaggccccgcc

SEQ ID NO: 3057691 - RNA, 18 nt, Human
agaccauuggggcuccca

SEQ ID NO: 3057692 - RNA, 21 nt, Human
agacagcccgggcucugccuc

SEQ ID NO: 3057693 - RNA, 14 nt, Human
agacaauuuauuau

SEQ ID NO: 3057694 - RNA, 22 nt, Human
agacagcccgggcucugccucc

SEQ ID NO: 3057695 - RNA, 23 nt, Human
agacagcccgggcucugccuccc

SEQ ID NO: 3057696 - RNA, 18 nt, Human
agacgcugugcugcccug

SEQ ID NO: 3057697 - RNA, 19 nt, Human
agacgcugugcugcccugc

SEQ ID NO: 3057698 - RNA, 17 nt, Human
agacgcugugcugcccu

SEQ ID NO: 3057699 - RNA, 19 nt, Human
agacaaggaaaaaauaaca

SEQ ID NO: 3057700 - RNA, 23 nt, Human
agacaaugacuuacuguacauga

SEQ ID NO: 3057701 - RNA, 20 nt, Human
agacaaugugaaaagaaaaa

SEQ ID NO: 3057702 - RNA, 18 nt, Human
agagcccacgcccccacu

SEQ ID NO: 3057703 - RNA, 11 nt, Human
agagagcaaga

SEQ ID NO: 3057704 - RNA, 19 nt, Human
agagagcaagacgcugugc

SEQ ID NO: 3057705 - RNA, 17 nt, Human
agagcccacgcccccac

SEQ ID NO: 3057706 - RNA, 18 nt, Human
agagaaaguacuucucca

SEQ ID NO: 3057707 - RNA, 16 nt, Human
agacucuuuggacacu

SEQ ID NO: 3057708 - RNA, 18 nt, Human
aggaaaaaauaacaauga

SEQ ID NO: 3057709 - RNA, 23 nt, Human
agcuuuuuucucugauacagaaa

SEQ ID NO: 3057710 - RNA, 19 nt, Human
agcuuuuuucucugauaca

SEQ ID NO: 3057711 - RNA, 20 nt, Human
agcuuuuuucucugauacag

SEQ ID NO: 3057712 - RNA, 22 nt, Human
agcuuuuuucucugauacagaa

SEQ ID NO: 3057713 - RNA, 21 nt, Human
agcuuuguuuguugucagcug

SEQ ID NO: 3057714 - RNA, 15 nt, Human
aggaacacuccuuca

SEQ ID NO: 3057715 - RNA, 23 nt, Human
aggaacuuaaauaaugugaaacu

SEQ ID NO: 3057716 - RNA, 12 nt, Human
aggaacacuccu

SEQ ID NO: 3057717 - RNA, 23 nt, Human
aggaacaaggcaaggcugucaau

SEQ ID NO: 3057718 - RNA, 14 nt, Human
aggaagguagaaau

SEQ ID NO: 3057719 - RNA, 11 nt, Human
aggaaguacug

SEQ ID NO: 3057720 - RNA, 15 nt, Human
aggaaguacuggaga

SEQ ID NO: 3057721 - RNA, 17 nt, Human
agcuguaugauucccag

SEQ ID NO: 3057722 - RNA, 18 nt, Human
agcuguaugauucccagc

SEQ ID NO: 3057723 - RNA, 22 nt, Human
agcugccuguucagcuccagcu

SEQ ID NO: 3057724 - RNA, 20 nt, Human
agcugcugaaacaacaaaua

SEQ ID NO: 3057725 - RNA, 16 nt, Human
agcugcugaaacaaca

SEQ ID NO: 3057726 - RNA, 15 nt, Human
agcugcugaaacaac

SEQ ID NO: 3057727 - RNA, 14 nt, Human
agcugcugaaacaa

SEQ ID NO: 3057728 - RNA, 15 nt, Human
agcuggucccacuca

SEQ ID NO: 3057729 - RNA, 14 nt, Human
agcuguaugauucc

SEQ ID NO: 3057730 - RNA, 15 nt, Human
agcugacuuuucugu

SEQ ID NO: 3057731 - RNA, 21 nt, Human
agcugacuuuucuguccgagc

SEQ ID NO: 3057732 - RNA, 23 nt, Human
agcucaccagccccagugcccac

SEQ ID NO: 3057733 - RNA, 22 nt, Human
agcucaccagccccagugccca

SEQ ID NO: 3057734 - RNA, 17 nt, Human
agccugcugccugcuuu

SEQ ID NO: 3057735 - RNA, 14 nt, Human
agccuggacccugu

SEQ ID NO: 3057736 - RNA, 10 nt, Human
agccuggaug

SEQ ID NO: 3057737 - RNA, 11 nt, Human
agccuggaugc

SEQ ID NO: 3057738 - RNA, 13 nt, Human
agccuggaugcca

SEQ ID NO: 3057739 - RNA, 15 nt, Human
agccuggaugccauc

SEQ ID NO: 3057740 - RNA, 16 nt, Human
agccuggaugccaucc

SEQ ID NO: 3057741 - RNA, 18 nt, Human
agccugggcaaugugaua

SEQ ID NO: 3057742 - RNA, 20 nt, Human
agccugggaggucaaggcug

SEQ ID NO: 3057743 - RNA, 13 nt, Human
agcgacagugaga

SEQ ID NO: 3057744 - RNA, 15 nt, Human
agcgacagugagacu

SEQ ID NO: 3057745 - RNA, 15 nt, Human
agcgauucuucugcu

SEQ ID NO: 3057746 - RNA, 19 nt, Human
agcgauucuucugcuucag

SEQ ID NO: 3057747 - RNA, 17 nt, Human
agcgauucuucugcuuc

SEQ ID NO: 3057748 - RNA, 19 nt, Human
agcuaacauggaaguacua

SEQ ID NO: 3057749 - RNA, 20 nt, Human
agcuaacauggaaguacuau

SEQ ID NO: 3057750 - RNA, 12 nt, Human
agcuacaaaugc

SEQ ID NO: 3057751 - RNA, 15 nt, Human
agcuaaugggacacu

SEQ ID NO: 3057752 - RNA, 14 nt, Human
agcuaaugggacac

SEQ ID NO: 3057753 - RNA, 13 nt, Human
agcuaaugggaca

SEQ ID NO: 3057754 - RNA, 13 nt, Human
agcuacaaaugca

SEQ ID NO: 3057755 - RNA, 21 nt, Human
agcucaccagccccagugccc

SEQ ID NO: 3057756 - RNA, 14 nt, Human
agcucaccagcccc

SEQ ID NO: 3057757 - RNA, 13 nt, Human
agcucaccagccc

SEQ ID NO: 3057758 - RNA, 18 nt, Human
aggaguuucguuuucaaa

SEQ ID NO: 3057759 - RNA, 14 nt, Human
aggagugagcacua

SEQ ID NO: 3057760 - RNA, 12 nt, Human
aggagugagcac

SEQ ID NO: 3057761 - RNA, 15 nt, Human
aggaggucucuaaga

SEQ ID NO: 3057762 - RNA, 14 nt, Human
aggaggucucuaag

SEQ ID NO: 3057763 - RNA, 19 nt, Human
aggaaguacuggagaaaau

SEQ ID NO: 3057764 - RNA, 22 nt, Human
aggcagaacucaucuagguaaa

SEQ ID NO: 3057765 - RNA, 13 nt, Human
aggcagauacagg

SEQ ID NO: 3057766 - RNA, 20 nt, Human
aggcagagguugcagugagc

SEQ ID NO: 3057767 - RNA, 15 nt, Human
aggcagccaggccac

SEQ ID NO: 3057768 - RNA, 16 nt, Human
aggcagccaggccaca

SEQ ID NO: 3057769 - RNA, 14 nt, Human
aggcagccaggcca

SEQ ID NO: 3057770 - RNA, 23 nt, Human
aggccaugggcacuguggguaga

SEQ ID NO: 3057771 - RNA, 17 nt, Human
aggcccucugcccacuc

SEQ ID NO: 3057772 - RNA, 15 nt, Human
aggcccucugcccac

SEQ ID NO: 3057773 - RNA, 16 nt, Human
aggccaugggccuccu

SEQ ID NO: 3057774 - RNA, 14 nt, Human
aggccaugggccuc

SEQ ID NO: 3057775 - RNA, 13 nt, Human
aggccagcugcuu

SEQ ID NO: 3057776 - RNA, 14 nt, Human
aggccagcugcuug

SEQ ID NO: 3057777 - RNA, 16 nt, Human
aggccagcugcuuggg

SEQ ID NO: 3057778 - RNA, 16 nt, Human
aggccaggcccucugc

SEQ ID NO: 3057779 - RNA, 17 nt, Human
aggccaggcccucugcc

SEQ ID NO: 3057780 - RNA, 18 nt, Human
aggccaggcccucugccc

SEQ ID NO: 3057781 - RNA, 19 nt, Human
aggccaggcccucugccca

SEQ ID NO: 3057782 - RNA, 23 nt, Human
aggccaggcccucugcccacucc

SEQ ID NO: 3057783 - RNA, 23 nt, Human
aggcaugugaugagaggaaauca

SEQ ID NO: 3057784 - RNA, 24 nt, Human
aggcaugugaugagaggaaaucac

SEQ ID NO: 3057785 - RNA, 22 nt, Human
aggcauguucucugaggacacu

SEQ ID NO: 3057786 - RNA, 20 nt, Human
aggcauguucucugaggaca

SEQ ID NO: 3057787 - RNA, 21 nt, Human
aggcauuccccaggaggccag

SEQ ID NO: 3057788 - RNA, 22 nt, Human
aggcauuccccaggaggccagc

SEQ ID NO: 3057789 - RNA, 23 nt, Human
aggcauuccccaggaggccagcc

SEQ ID NO: 3057790 - RNA, 12 nt, Human
aggccagcugcu

SEQ ID NO: 3057791 - RNA, 14 nt, Human
agggacugagaaau

SEQ ID NO: 3057792 - RNA, 13 nt, Human
agggacugagaaa

SEQ ID NO: 3057793 - RNA, 15 nt, Human
agggacugagaaauu

SEQ ID NO: 3057794 - RNA, 20 nt, Human
agggauuagggagagaagau

SEQ ID NO: 3057795 - RNA, 18 nt, Human
agggccuggccugagcug

SEQ ID NO: 3057796 - RNA, 13 nt, Human
agggccuggcuca

SEQ ID NO: 3057797 - RNA, 14 nt, Human
agggccuggcucag

SEQ ID NO: 3057798 - RNA, 18 nt, Human
agggccuggcucaggugg

SEQ ID NO: 3057799 - RNA, 22 nt, Human
aggcucuggagcccacuguacu

SEQ ID NO: 3057800 - RNA, 17 nt, Human
aggcuagauguauguac

SEQ ID NO: 3057801 - RNA, 24 nt, Human
aggcuguaucccaugagccucagc

SEQ ID NO: 3057802 - RNA, 11 nt, Human
aggcugccagu

SEQ ID NO: 3057803 - RNA, 12 nt, Human
aggcugucaauu

SEQ ID NO: 3057804 - RNA, 17 nt, Human
aggcugcagugagccga

SEQ ID NO: 3057805 - RNA, 19 nt, Human
aggcugcagugagccgaga

SEQ ID NO: 3057806 - RNA, 23 nt, Human
aggcuguaucccaugagccucag

SEQ ID NO: 3057807 - RNA, 17 nt, Human
agggacaggauaagagg

SEQ ID NO: 3057808 - RNA, 19 nt, Human
aggcccucugcccacuccc

SEQ ID NO: 3057809 - RNA, 20 nt, Human
aggcccucugcccacucccu

SEQ ID NO: 3057810 - RNA, 12 nt, Human
ggcagaaggaag

SEQ ID NO: 3057811 - RNA, 14 nt, Human
ggcagccaggccac

SEQ ID NO: 3057812 - RNA, 10 nt, Human
ggcagagcag

SEQ ID NO: 3057813 - RNA, 15 nt, Human
ggcagccaggccaca

SEQ ID NO: 3057814 - RNA, 17 nt, Human
ggcagccaggccacaag

SEQ ID NO: 3057815 - RNA, 22 nt, Human
ggaugguucccuugaugaagaa

SEQ ID NO: 3057816 - RNA, 23 nt, Human
ggaugguucccuugaugaagaag

SEQ ID NO: 3057817 - RNA, 22 nt, Human
ggauguugaaaaaguucugcag

SEQ ID NO: 3057818 - RNA, 22 nt, Human
ggaugagaaagguugaagcacc

SEQ ID NO: 3057819 - RNA, 12 nt, Human
ggaugagaaagg

SEQ ID NO: 3057820 - RNA, 21 nt, Human
ggaugaauuccaaauucugcu

SEQ ID NO: 3057821 - RNA, 23 nt, Human
ggauuaaacuuaaucuaaaugga

SEQ ID NO: 3057822 - RNA, 21 nt, Human
ggauuuugauccaagcugguc

SEQ ID NO: 3057823 - RNA, 12 nt, Human
ggauuuucagcc

SEQ ID NO: 3057824 - RNA, 14 nt, Human
ggcaaacagggccu

SEQ ID NO: 3057825 - RNA, 17 nt, Human
ggcaaacagggccucug

SEQ ID NO: 3057826 - RNA, 18 nt, Human
ggcaaacagggccucugc

SEQ ID NO: 3057827 - RNA, 13 nt, Human
ggccucccaacuc

SEQ ID NO: 3057828 - RNA, 14 nt, Human
ggccucccaacuca

SEQ ID NO: 3057829 - RNA, 16 nt, Human
ggccuccauccugagg

SEQ ID NO: 3057830 - RNA, 12 nt, Human
ggcccagggcau

SEQ ID NO: 3057831 - RNA, 15 nt, Human
ggcccagggcaucug

SEQ ID NO: 3057832 - RNA, 16 nt, Human
ggccccaccagugccu

SEQ ID NO: 3057833 - RNA, 15 nt, Human
ggccccaccagugcc

SEQ ID NO: 3057834 - RNA, 16 nt, Human
ggcccagggcaucugg

SEQ ID NO: 3057835 - RNA, 23 nt, Human
ggcccuccagagccccacagccc

SEQ ID NO: 3057836 - RNA, 17 nt, Human
ggcccuccagagcccca

SEQ ID NO: 3057837 - RNA, 21 nt, Human
ggcccuccagagccccacagc

SEQ ID NO: 3057838 - RNA, 14 nt, Human
ggcccuccagagcc

SEQ ID NO: 3057839 - RNA, 15 nt, Human
ggcccuccagagccc

SEQ ID NO: 3057840 - RNA, 12 nt, Human
ggcauuguggga

SEQ ID NO: 3057841 - RNA, 21 nt, Human
ggccaaacucaccugccccuc

SEQ ID NO: 3057842 - RNA, 12 nt, Human
ggccaaaggaag

SEQ ID NO: 3057843 - RNA, 15 nt, Human
ggccaaagccaaagc

SEQ ID NO: 3057844 - RNA, 21 nt, Human
ggccaaaggaagcacaugccu

SEQ ID NO: 3057845 - RNA, 20 nt, Human
ggccagaugcaccagcccuu

SEQ ID NO: 3057846 - RNA, 19 nt, Human
ggccagaugcaccagcccu

SEQ ID NO: 3057847 - RNA, 17 nt, Human
ggccagaugcaccagcc

SEQ ID NO: 3057848 - RNA, 23 nt, Human
ggccagagggagugacagaggca

SEQ ID NO: 3057849 - RNA, 22 nt, Human
ggccagagggagugacagaggc

SEQ ID NO: 3057850 - RNA, 13 nt, Human
ggccaagguggga

SEQ ID NO: 3057851 - RNA, 15 nt, Human
ggagagcuagcagca

SEQ ID NO: 3057852 - RNA, 22 nt, Human
ggagagccuuccagggguggga

SEQ ID NO: 3057853 - RNA, 17 nt, Human
ggagagccuuccagggg

SEQ ID NO: 3057854 - RNA, 18 nt, Human
ggagagccuuccaggggu

SEQ ID NO: 3057855 - RNA, 13 nt, Human
ggagagccuucca

SEQ ID NO: 3057856 - RNA, 16 nt, Human
ggagagccuuccaggg

SEQ ID NO: 3057857 - RNA, 17 nt, Human
ggacuuggaagcuccgc

SEQ ID NO: 3057858 - RNA, 15 nt, Human
ggacuuggaagcucc

SEQ ID NO: 3057859 - RNA, 19 nt, Human
ggagaaaauggacguguua

SEQ ID NO: 3057860 - RNA, 9 nt, Human
ggacuuugu

SEQ ID NO: 3057861 - RNA, 18 nt, Human
ggagaaaugaaaaaauau

SEQ ID NO: 3057862 - RNA, 22 nt, Human
ggagaaccaaaaagaggcuaug

SEQ ID NO: 3057863 - RNA, 22 nt, Human
ggacugugugcucaggagcccu

SEQ ID NO: 3057864 - RNA, 23 nt, Human
ggacugugugcucaggagcccug

SEQ ID NO: 3057865 - RNA, 17 nt, Human
ggacugugugcucagga

SEQ ID NO: 3057866 - RNA, 20 nt, Human
ggacuacaggugugagucac

SEQ ID NO: 3057867 - RNA, 22 nt, Human
ggacucaaugcacugacauugu

SEQ ID NO: 3057868 - RNA, 18 nt, Human
ggacucaaugcacugaca

SEQ ID NO: 3057869 - RNA, 21 nt, Human
ggaccccgagccuggcuccaa

SEQ ID NO: 3057870 - RNA, 18 nt, Human
ggaccccgagccuggcuc

SEQ ID NO: 3057871 - RNA, 15 nt, Human
ggacccugaggccca

SEQ ID NO: 3057872 - RNA, 18 nt, Human
ggacccugaggcccagag

SEQ ID NO: 3057873 - RNA, 14 nt, Human
ggacccugaggccc

SEQ ID NO: 3057874 - RNA, 19 nt, Human
gcuuguacauaaugcgugc

SEQ ID NO: 3057875 - RNA, 15 nt, Human
ggagcccacuguacu

SEQ ID NO: 3057876 - RNA, 13 nt, Human
ggagcagccacau

SEQ ID NO: 3057877 - RNA, 21 nt, Human
ggagcagccacauuccugaug

SEQ ID NO: 3057878 - RNA, 18 nt, Human
ggaggucgaggcaggagg

SEQ ID NO: 3057879 - RNA, 15 nt, Human
ggaggcucuggagcc

SEQ ID NO: 3057880 - RNA, 21 nt, Human
ggaggcucuggagcccacugu

SEQ ID NO: 3057881 - RNA, 15 nt, Human
ggaggcugagauggg

SEQ ID NO: 3057882 - RNA, 19 nt, Human
ggaggcugagaugggagaa

SEQ ID NO: 3057883 - RNA, 15 nt, Human
ggaggucgaggcagg

SEQ ID NO: 3057884 - RNA, 16 nt, Human
ggaggucgaggcagga

SEQ ID NO: 3057885 - RNA, 14 nt, Human
ggaggucgaggcag

SEQ ID NO: 3057886 - RNA, 20 nt, Human
ggaggcucuggagcccacug

SEQ ID NO: 3057887 - RNA, 17 nt, Human
ggaggcucuggagccca

SEQ ID NO: 3057888 - RNA, 12 nt, Human
ggaggccagccu

SEQ ID NO: 3057889 - RNA, 18 nt, Human
ggaggccaaggugggagg

SEQ ID NO: 3057890 - RNA, 13 nt, Human
ggaggccagccuu

SEQ ID NO: 3057891 - RNA, 21 nt, Human
ggaggcaugugaugagaggaa

SEQ ID NO: 3057892 - RNA, 12 nt, Human
ggaggaagagaa

SEQ ID NO: 3057893 - RNA, 20 nt, Human
ggaggaaccgagggggcugc

SEQ ID NO: 3057894 - RNA, 18 nt, Human
ggagcccacuguacuugc

SEQ ID NO: 3057895 - RNA, 22 nt, Human
ggagcugccuguucagcuccag

SEQ ID NO: 3057896 - RNA, 13 nt, Human
aaaaaaacacaaa

SEQ ID NO: 3057897 - RNA, 23 nt, Human
gggaaaaucagccugcuccagcu

SEQ ID NO: 3057898 - RNA, 13 nt, Human
gggaaaaucagcc

SEQ ID NO: 3057899 - RNA, 16 nt, Human
ggcuucaguggcagcu

SEQ ID NO: 3057900 - RNA, 16 nt, Human
ggcuggugucaccuga

SEQ ID NO: 3057901 - RNA, 19 nt, Human
ggcuguaucccaugagccu

SEQ ID NO: 3057902 - RNA, 15 nt, Human
ggcugucaauuacag

SEQ ID NO: 3057903 - RNA, 23 nt, Human
ggcuguaucccaugagccucagc

SEQ ID NO: 3057904 - RNA, 22 nt, Human
ggcuguaucccaugagccucag

SEQ ID NO: 3057905 - RNA, 20 nt, Human
ggcuguaucccaugagccuc

SEQ ID NO: 3057906 - RNA, 15 nt, Human
ggcuucaguggcagc

SEQ ID NO: 3057907 - RNA, 15 nt, Human
ggcugccagugccug

SEQ ID NO: 3057908 - RNA, 17 nt, Human
ggcugccagugccuggg

SEQ ID NO: 3057909 - RNA, 18 nt, Human
ggcugccagugccugggu

SEQ ID NO: 3057910 - RNA, 17 nt, Human
ggcuggccuggccccuc

SEQ ID NO: 3057911 - RNA, 22 nt, Human
ggcuggccuggccccucagggu

SEQ ID NO: 3057912 - RNA, 20 nt, Human
ggcuggcgugcaguggugcg

SEQ ID NO: 3057913 - RNA, 16 nt, Human
ggcuggcgugcagugg

SEQ ID NO: 3057914 - RNA, 14 nt, Human
ggcuggcgugcagu

SEQ ID NO: 3057915 - RNA, 20 nt, Human
ggcucccuucccaccucucu

SEQ ID NO: 3057916 - RNA, 22 nt, Human
ggcucccuucccaccucucuca

SEQ ID NO: 3057917 - RNA, 17 nt, Human
ggcucccuucccaccuc

SEQ ID NO: 3057918 - RNA, 18 nt, Human
ggcucccuucccaccucu

SEQ ID NO: 3057919 - RNA, 16 nt, Human
ggcucccuucccaccu

SEQ ID NO: 3057920 - RNA, 20 nt, Human
ggcucuuccaggcugggaga

SEQ ID NO: 3057921 - RNA, 23 nt, Human
ggcucuuccaggcugggagagcc

SEQ ID NO: 3057922 - RNA, 24 nt, Human
ggcucuuccaggcugggagagccu

SEQ ID NO: 3057923 - RNA, 18 nt, Human
ggcucgagcaugccugga

SEQ ID NO: 3057924 - RNA, 17 nt, Human
ggcugcagggaguccga

SEQ ID NO: 3057925 - RNA, 20 nt, Human
ggcugcaugcgggcuuccuc

SEQ ID NO: 3057926 - RNA, 21 nt, Human
ggcugccaaugggagcucaug

SEQ ID NO: 3057927 - RNA, 14 nt, Human
ggcugccagugccu

SEQ ID NO: 3057928 - RNA, 19 nt, Human
aaaacugcucauaugaugu

SEQ ID NO: 3057929 - RNA, 18 nt, Human
aaaacugauuuuuuuuuc

SEQ ID NO: 3057930 - RNA, 22 nt, Human
aaaacugauuuuuuuuuccuuc

SEQ ID NO: 3057931 - RNA, 21 nt, Human
aaaacguggcugcuucaagga

SEQ ID NO: 3057932 - RNA, 14 nt, Human
aaaacguggcugcu

SEQ ID NO: 3057933 - RNA, 16 nt, Human
aaaacguggcugcuuc

SEQ ID NO: 3057934 - RNA, 17 nt, Human
aaaacguggcugcuuca

SEQ ID NO: 3057935 - RNA, 18 nt, Human
aaaacguggcugcuucaa

SEQ ID NO: 3057936 - RNA, 15 nt, Human
aaaaccaauguucuc

SEQ ID NO: 3057937 - RNA, 20 nt, Human
aaaaaucucaaauuucuaaa

SEQ ID NO: 3057938 - RNA, 19 nt, Human
aaaaaucucaaauuucuaa

SEQ ID NO: 3057939 - RNA, 17 nt, Human
aaaaaucucaaauuucu

SEQ ID NO: 3057940 - RNA, 22 nt, Human
gggaacagacuggaagcacagc

SEQ ID NO: 3057941 - RNA, 14 nt, Human
gggaacagacugga

SEQ ID NO: 3057942 - RNA, 22 nt, Human
aaaagcuccauuuuuagugaaa

SEQ ID NO: 3057943 - RNA, 14 nt, Human
aaaagcugggcagg

SEQ ID NO: 3057944 - RNA, 18 nt, Human
aaaagccuguuuaagaga

SEQ ID NO: 3057945 - RNA, 16 nt, Human
aaaagccuguuuaaga

SEQ ID NO: 3057946 - RNA, 19 nt, Human
aaaagccugcaauuucaua

SEQ ID NO: 3057947 - RNA, 22 nt, Human
aaaacuugauguguuaucucuu

SEQ ID NO: 3057948 - RNA, 21 nt, Human
aaaacuuuaugcuaagugaaa

SEQ ID NO: 3057949 - RNA, 11 nt, Human
gggagggcucc

SEQ ID NO: 3057950 - RNA, 13 nt, Human
gggagggcuccag

SEQ ID NO: 3057951 - RNA, 20 nt, Human
gggaggcagagguugcagug

SEQ ID NO: 3057952 - RNA, 11 nt, Human
gggaggcagag

SEQ ID NO: 3057953 - RNA, 14 nt, Human
aaaauauauuuaau

SEQ ID NO: 3057954 - RNA, 18 nt, Human
aaaauauauaucaaauau

SEQ ID NO: 3057955 - RNA, 12 nt, Human
aaaauagccugc

SEQ ID NO: 3057956 - RNA, 18 nt, Human
aaaauaguggugugauuu

SEQ ID NO: 3057957 - RNA, 12 nt, Human
aaaauaaauuau

SEQ ID NO: 3057958 - RNA, 20 nt, Human
aaaauaauuuuuauauuuga

SEQ ID NO: 3057959 - RNA, 14 nt, Human
aaaauaccagccag

SEQ ID NO: 3057960 - RNA, 21 nt, Human
aaaauaauuuuuauauuugaa

SEQ ID NO: 3057961 - RNA, 23 nt, Human
aaaauaauuuuuauauuugaaau

SEQ ID NO: 3057962 - RNA, 15 nt, Human
aaaauaccagccagu

SEQ ID NO: 3057963 - RNA, 14 nt, Human
aaaauaccaaggaa

SEQ ID NO: 3057964 - RNA, 16 nt, Human
aaaagggacugagaaa

SEQ ID NO: 3057965 - RNA, 15 nt, Human
gggauuuccaugaug

SEQ ID NO: 3057966 - RNA, 23 nt, Human
gggcagagcagagaccaucccug

SEQ ID NO: 3057967 - RNA, 21 nt, Human
gggauuuucagcccucagaau

SEQ ID NO: 3057968 - RNA, 13 nt, Human
aaaggaauuuaaa

SEQ ID NO: 3057969 - RNA, 11 nt, Human
aaaggaaagag

SEQ ID NO: 3057970 - RNA, 13 nt, Human
aaagcuuauuaaa

SEQ ID NO: 3057971 - RNA, 16 nt, Human
aaagcagugcaugcug

SEQ ID NO: 3057972 - RNA, 21 nt, Human
aaagcagugcaugcugucccu

SEQ ID NO: 3057973 - RNA, 22 nt, Human
aaagcagugcaugcugucccuu

SEQ ID NO: 3057974 - RNA, 18 nt, Human
aaagcuaggccuggccag

SEQ ID NO: 3057975 - RNA, 17 nt, Human
aaagcuaggccuggcca

SEQ ID NO: 3057976 - RNA, 16 nt, Human
aaagcuacuuauugua

SEQ ID NO: 3057977 - RNA, 17 nt, Human
aaagcuacuuauuguag

SEQ ID NO: 3057978 - RNA, 17 nt, Human
aaagcagugcaugcugu

SEQ ID NO: 3057979 - RNA, 21 nt, Human
aaagauuuucagaaaauauua

SEQ ID NO: 3057980 - RNA, 19 nt, Human
ggucuguucuuuccaaagu

SEQ ID NO: 3057981 - RNA, 17 nt, Human
ggucuguucuuuccaaa

SEQ ID NO: 3057982 - RNA, 22 nt, Human
ggucuugaacuccuggccucaa

SEQ ID NO: 3057983 - RNA, 21 nt, Human
ggucuugaacuccuggccuca

SEQ ID NO: 3057984 - RNA, 12 nt, Human
ggucuguucuuu

SEQ ID NO: 3057985 - RNA, 14 nt, Human
ggucugugagaugc

SEQ ID NO: 3057986 - RNA, 15 nt, Human
ggugccaguuauggc

SEQ ID NO: 3057987 - RNA, 16 nt, Human
ggugcacaagcuccaa

SEQ ID NO: 3057988 - RNA, 22 nt, Human
ggugcacaagcuccaagcuccc

SEQ ID NO: 3057989 - RNA, 20 nt, Human
ggugauuuagcaggaagcug

SEQ ID NO: 3057990 - RNA, 21 nt, Human
ggucauauuaauauauuucca

SEQ ID NO: 3057991 - RNA, 18 nt, Human
ggucauauuaauauauuu

SEQ ID NO: 3057992 - RNA, 23 nt, Human
gguauuggcuagagguucaaaga

SEQ ID NO: 3057993 - RNA, 19 nt, Human
gguccacccaggagccccg

SEQ ID NO: 3057994 - RNA, 14 nt, Human
aaacuuuaccuuuu

SEQ ID NO: 3057995 - RNA, 16 nt, Human
aaagaaugauuaugaa

SEQ ID NO: 3057996 - RNA, 12 nt, Human
ggucccacccca

SEQ ID NO: 3057997 - RNA, 22 nt, Human
gguccacccaggagccccgagg

SEQ ID NO: 3057998 - RNA, 20 nt, Human
gguccacccaggagccccga

SEQ ID NO: 3057999 - RNA, 15 nt, Human
aaagauuuucagaaa

SEQ ID NO: 3058000 - RNA, 14 nt, Human
aaagauuuucagaa

SEQ ID NO: 3058001 - RNA, 20 nt, Human
aaagaggcagcuugaaacug

SEQ ID NO: 3058002 - RNA, 13 nt, Human
aaagaggcuaugu

SEQ ID NO: 3058003 - RNA, 18 nt, Human
aaagaggcuaugugagca

SEQ ID NO: 3058004 - RNA, 15 nt, Human
aaagaugagugagca

SEQ ID NO: 3058005 - RNA, 18 nt, Human
aaagagaacuuccagauc

SEQ ID NO: 3058006 - RNA, 19 nt, Human
aaagacuuuuccaacccuc

SEQ ID NO: 3058007 - RNA, 15 nt, Human
aaagacuguacaaag

SEQ ID NO: 3058008 - RNA, 23 nt, Human
aaagacuauucaaacagucucag

SEQ ID NO: 3058009 - RNA, 13 nt, Human
aaagacuccaaag

SEQ ID NO: 3058010 - RNA, 22 nt, Human
aaagacuauucaaacagucuca

SEQ ID NO: 3058011 - RNA, 14 nt, Human
ggggccaggcuggg

SEQ ID NO: 3058012 - RNA, 13 nt, Human
ggggccaggcugg

SEQ ID NO: 3058013 - RNA, 16 nt, Human
ggggccaggcuggguc

SEQ ID NO: 3058014 - RNA, 17 nt, Human
ggggccaguuggucccc

SEQ ID NO: 3058015 - RNA, 16 nt, Human
ggggcccugccuccuu

SEQ ID NO: 3058016 - RNA, 15 nt, Human
ggggcccugccuccu

SEQ ID NO: 3058017 - RNA, 19 nt, Human
ggggcccugccuccuuugu

SEQ ID NO: 3058018 - RNA, 23 nt, Human
ggggcccugccuccuuugugagg

SEQ ID NO: 3058019 - RNA, 13 nt, Human
ggggaccucaggc

SEQ ID NO: 3058020 - RNA, 15 nt, Human
ggggaccucaggccu

SEQ ID NO: 3058021 - RNA, 16 nt, Human
ggggaccucaggccug

SEQ ID NO: 3058022 - RNA, 17 nt, Human
ggggaccucaggccugg

SEQ ID NO: 3058023 - RNA, 24 nt, Human
ggggaaaaucagccugcuccagcu

SEQ ID NO: 3058024 - RNA, 16 nt, Human
aaacaugcuacacacu

SEQ ID NO: 3058025 - RNA, 21 nt, Human
aaacauauauaacaaugcugu

SEQ ID NO: 3058026 - RNA, 22 nt, Human
aaacaugcuacacacugcaugu

SEQ ID NO: 3058027 - RNA, 13 nt, Human
aaacauauauaac

SEQ ID NO: 3058028 - RNA, 16 nt, Human
aaacauauauaacaau

SEQ ID NO: 3058029 - RNA, 19 nt, Human
aaacauauauaacaaugcu

SEQ ID NO: 3058030 - RNA, 19 nt, Human
aaacaagucagucauucag

SEQ ID NO: 3058031 - RNA, 14 nt, Human
aaacacaacuauau

SEQ ID NO: 3058032 - RNA, 19 nt, Human
aaacacaaacgggcucagc

SEQ ID NO: 3058033 - RNA, 13 nt, Human
aaacaaagaaauu

SEQ ID NO: 3058034 - RNA, 19 nt, Human
aaacaacuucaauauccaa

SEQ ID NO: 3058035 - RNA, 17 nt, Human
aaacaaggaugaauuaa

SEQ ID NO: 3058036 - RNA, 16 nt, Human
aaaauuuuuaaucuuu

SEQ ID NO: 3058037 - RNA, 15 nt, Human
aaaauuuuuaaucuu

SEQ ID NO: 3058038 - RNA, 19 nt, Human
aaaauuuuuaaucuuuaau

SEQ ID NO: 3058039 - RNA, 19 nt, Human
aaaauuuuuucucuaggaa

SEQ ID NO: 3058040 - RNA, 15 nt, Human
aaaauauuauguguu

SEQ ID NO: 3058041 - RNA, 14 nt, Human
aaaauauuaugugu

SEQ ID NO: 3058042 - RNA, 21 nt, Human
aaaauauuauguguuuccaua

SEQ ID NO: 3058043 - RNA, 20 nt, Human
aaaauggaagacagcucuua

SEQ ID NO: 3058044 - RNA, 21 nt, Human
aaaauggacguguuaugacuc

SEQ ID NO: 3058045 - RNA, 12 nt, Human
aaaauggaauac

SEQ ID NO: 3058046 - RNA, 21 nt, Human
aaaauguaggguuauaauaau

SEQ ID NO: 3058047 - RNA, 21 nt, Human
aaaccacauuggagauguuua

SEQ ID NO: 3058048 - RNA, 15 nt, Human
aaaccacagcaguug

SEQ ID NO: 3058049 - RNA, 16 nt, Human
aaaccacagcaguuga

SEQ ID NO: 3058050 - RNA, 16 nt, Human
aaacguggcugcuuca

SEQ ID NO: 3058051 - RNA, 15 nt, Human
aaacgucuuaaauau

SEQ ID NO: 3058052 - RNA, 17 nt, Human
aaacguggcugcuucaa

SEQ ID NO: 3058053 - RNA, 16 nt, Human
aaacuggauuaaacuu

SEQ ID NO: 3058054 - RNA, 16 nt, Human
aaacucauuucuagca

SEQ ID NO: 3058055 - RNA, 23 nt, Human
aaacauguuucuuuguaaugaaa

SEQ ID NO: 3058056 - RNA, 22 nt, Human
aaacauguuucuuuguaaugaa

SEQ ID NO: 3058057 - RNA, 19 nt, Human
aaacauguuucuuuguaau

SEQ ID NO: 3058058 - RNA, 23 nt, Human
gggucucacuauguugcccaggc

SEQ ID NO: 3058059 - RNA, 22 nt, Human
gggucucacuauguugcccagg

SEQ ID NO: 3058060 - RNA, 20 nt, Human
ggguaucaggugcugccauc

SEQ ID NO: 3058061 - RNA, 22 nt, Human
gggucacucuggcagcucagag

SEQ ID NO: 3058062 - RNA, 14 nt, Human
gcccugccuccuuu

SEQ ID NO: 3058063 - RNA, 16 nt, Human
gcccugccuccuuugu

SEQ ID NO: 3058064 - RNA, 22 nt, Human
gcccugccuccuuugugaggaa

SEQ ID NO: 3058065 - RNA, 21 nt, Human
gcccugugggcccccaaaugg

SEQ ID NO: 3058066 - RNA, 17 nt, Human
gcccuguuaaaagauga

SEQ ID NO: 3058067 - RNA, 14 nt, Human
gcccuguuaaaaga

SEQ ID NO: 3058068 - RNA, 13 nt, Human
gcccuguuaaaag

SEQ ID NO: 3058069 - RNA, 15 nt, Human
gccgccaugcuccug

SEQ ID NO: 3058070 - RNA, 16 nt, Human
gcccuuaccugccagg

SEQ ID NO: 3058071 - RNA, 20 nt, Human
gcccuuaccugccaggaagc

SEQ ID NO: 3058072 - RNA, 16 nt, Human
gccgccaugcuccugg

SEQ ID NO: 3058073 - RNA, 13 nt, Human
gccgcccaaggcc

SEQ ID NO: 3058074 - RNA, 16 nt, Human
gccccuggaugcagcc

SEQ ID NO: 3058075 - RNA, 18 nt, Human
gccccuggaugcagccuc

SEQ ID NO: 3058076 - RNA, 22 nt, Human
gccccuggaugcagccucacag

SEQ ID NO: 3058077 - RNA, 22 nt, Human
gcccuaaaguguauuuuuuuac

SEQ ID NO: 3058078 - RNA, 16 nt, Human
gcccccaggugccagu

SEQ ID NO: 3058079 - RNA, 18 nt, Human
gccccaaaacucuccucu

SEQ ID NO: 3058080 - RNA, 14 nt, Human
gccccugcccggcu

SEQ ID NO: 3058081 - RNA, 13 nt, Human
gccccugcccggc

SEQ ID NO: 3058082 - RNA, 14 nt, Human
gcccacucccugca

SEQ ID NO: 3058083 - RNA, 15 nt, Human
gcccacucccugcaa

SEQ ID NO: 3058084 - RNA, 19 nt, Human
gcccacucccugcaaccug

SEQ ID NO: 3058085 - RNA, 13 nt, Human
gcccacucccugc

SEQ ID NO: 3058086 - RNA, 16 nt, Human
gccugccucuucucua

SEQ ID NO: 3058087 - RNA, 15 nt, Human
gccuggccccucagg

SEQ ID NO: 3058088 - RNA, 16 nt, Human
gccuggccccucaggg

SEQ ID NO: 3058089 - RNA, 17 nt, Human
gccuggccccucagggu

SEQ ID NO: 3058090 - RNA, 18 nt, Human
gccugggaucccucaucc

SEQ ID NO: 3058091 - RNA, 22 nt, Human
gccugggaggucaaggcugcag

SEQ ID NO: 3058092 - RNA, 14 nt, Human
gccugggaucccuc

SEQ ID NO: 3058093 - RNA, 21 nt, Human
gccugggaggucaaggcugca

SEQ ID NO: 3058094 - RNA, 20 nt, Human
gccuggccccucaggguccc

SEQ ID NO: 3058095 - RNA, 22 nt, Human
gccuggccccucagggucccug

SEQ ID NO: 3058096 - RNA, 10 nt, Human
gccuggccug

SEQ ID NO: 3058097 - RNA, 12 nt, Human
gccucuucucua

SEQ ID NO: 3058098 - RNA, 23 nt, Human
gccucuucucuacucuagggaaa

SEQ ID NO: 3058099 - RNA, 19 nt, Human
gccugcccaggccccugcc

SEQ ID NO: 3058100 - RNA, 18 nt, Human
gccugcccaggccccugc

SEQ ID NO: 3058101 - RNA, 17 nt, Human
gccugcccaggccccug

SEQ ID NO: 3058102 - RNA, 12 nt, Human
gccucugggacu

SEQ ID NO: 3058103 - RNA, 18 nt, Human
gccuccugcccuuaccug

SEQ ID NO: 3058104 - RNA, 13 nt, Human
gccuccuccagcc

SEQ ID NO: 3058105 - RNA, 16 nt, Human
gccauaugaaaaggcu

SEQ ID NO: 3058106 - RNA, 20 nt, Human
gccauauucuguuggccagu

SEQ ID NO: 3058107 - RNA, 19 nt, Human
gccauauucuguuggccag

SEQ ID NO: 3058108 - RNA, 18 nt, Human
gccauguuggccaggcug

SEQ ID NO: 3058109 - RNA, 17 nt, Human
gccauguuggccaggcu

SEQ ID NO: 3058110 - RNA, 16 nt, Human
gccauguuggccaggc

SEQ ID NO: 3058111 - RNA, 15 nt, Human
gccauguuggccagg

SEQ ID NO: 3058112 - RNA, 14 nt, Human
gccauguuggccag

SEQ ID NO: 3058113 - RNA, 24 nt, Human
gccauguuggccaggcuggucuca

SEQ ID NO: 3058114 - RNA, 22 nt, Human
gccauguuggccaggcuggucu

SEQ ID NO: 3058115 - RNA, 20 nt, Human
gccauguuggccaggcuggu

SEQ ID NO: 3058116 - RNA, 19 nt, Human
gccauguuggccaggcugg

SEQ ID NO: 3058117 - RNA, 13 nt, Human
gcccacgccccca

SEQ ID NO: 3058118 - RNA, 14 nt, Human
gcccacgcccccac

SEQ ID NO: 3058119 - RNA, 18 nt, Human
gcccaccuuggcucaagu

SEQ ID NO: 3058120 - RNA, 17 nt, Human
gcccaccuuggcucaag

SEQ ID NO: 3058121 - RNA, 17 nt, Human
gcccacgcuggagugca

SEQ ID NO: 3058122 - RNA, 16 nt, Human
gcccacgcuggagugc

SEQ ID NO: 3058123 - RNA, 15 nt, Human
gcccacgcuggagug

SEQ ID NO: 3058124 - RNA, 15 nt, Human
gccaggcccucugcc

SEQ ID NO: 3058125 - RNA, 13 nt, Human
gccaggccagagg

SEQ ID NO: 3058126 - RNA, 16 nt, Human
gccaggcccucugccc

SEQ ID NO: 3058127 - RNA, 17 nt, Human
gccaggcccucugccca

SEQ ID NO: 3058128 - RNA, 19 nt, Human
gccaggcccucugcccacu

SEQ ID NO: 3058129 - RNA, 20 nt, Human
gccaggcccucugcccacuc

SEQ ID NO: 3058130 - RNA, 21 nt, Human
gccaggcccucugcccacucc

SEQ ID NO: 3058131 - RNA, 21 nt, Human
gccaggcccuugucggcccca

SEQ ID NO: 3058132 - RNA, 12 nt, Human
gccaggccagag

SEQ ID NO: 3058133 - RNA, 23 nt, Human
gccaggccacaagacccuugugg

SEQ ID NO: 3058134 - RNA, 19 nt, Human
gccagauuuuccugaaaac

SEQ ID NO: 3058135 - RNA, 22 nt, Human
gccagacaucaacagauaaaua

SEQ ID NO: 3058136 - RNA, 17 nt, Human
gccagcaggcucucagg

SEQ ID NO: 3058137 - RNA, 18 nt, Human
gccagcaggcucucaggc

SEQ ID NO: 3058138 - RNA, 19 nt, Human
gccagcaggcucucaggcc

SEQ ID NO: 3058139 - RNA, 20 nt, Human
gccagcaggcucucaggcca

SEQ ID NO: 3058140 - RNA, 21 nt, Human
gccagcaggcucucaggccag

SEQ ID NO: 3058141 - RNA, 13 nt, Human
gccagcaggcucu

SEQ ID NO: 3058142 - RNA, 16 nt, Human
gccagcaggcucucag

SEQ ID NO: 3058143 - RNA, 16 nt, Human
gccacauuccugaugc

SEQ ID NO: 3058144 - RNA, 20 nt, Human
gccacauuccugaugcuucu

SEQ ID NO: 3058145 - RNA, 22 nt, Human
gccaccaacauacucccaucug

SEQ ID NO: 3058146 - RNA, 20 nt, Human
gccaccaacauacucccauc

SEQ ID NO: 3058147 - RNA, 21 nt, Human
gccaccaacauacucccaucu

SEQ ID NO: 3058148 - RNA, 19 nt, Human
gccaccaacauacucccau

SEQ ID NO: 3058149 - RNA, 21 nt, Human
gccacuguuuugaaucucaua

SEQ ID NO: 3058150 - RNA, 19 nt, Human
gccacugugaagagaacca

SEQ ID NO: 3058151 - RNA, 18 nt, Human
gccacugugaagagaacc

SEQ ID NO: 3058152 - RNA, 23 nt, Human
gccacugcaccgggccacagaga

SEQ ID NO: 3058153 - RNA, 19 nt, Human
gccacccuggggagaaagu

SEQ ID NO: 3058154 - RNA, 13 nt, Human
gccacccugggga

SEQ ID NO: 3058155 - RNA, 21 nt, Human
gccacugcacuauagccuagg

SEQ ID NO: 3058156 - RNA, 22 nt, Human
gccacugcaccgggccacagag

SEQ ID NO: 3058157 - RNA, 13 nt, Human
gcugccaccugcc

SEQ ID NO: 3058158 - RNA, 19 nt, Human
gcugccagccgagauagcc

SEQ ID NO: 3058159 - RNA, 21 nt, Human
gcugccagccgagauagccaa

SEQ ID NO: 3058160 - RNA, 23 nt, Human
gcugccauccagguucagcuugu

SEQ ID NO: 3058161 - RNA, 21 nt, Human
gcugccauccagguucagcuu

SEQ ID NO: 3058162 - RNA, 14 nt, Human
gcugcaccggcugg

SEQ ID NO: 3058163 - RNA, 16 nt, Human
gcugcaccggcuggcc

SEQ ID NO: 3058164 - RNA, 17 nt, Human
gcugcaccggcuggccu

SEQ ID NO: 3058165 - RNA, 18 nt, Human
gcugcaccggcuggccug

SEQ ID NO: 3058166 - RNA, 19 nt, Human
gcugcaccggcuggccugg

SEQ ID NO: 3058167 - RNA, 22 nt, Human
gcugcaccggcuggccuggccc

SEQ ID NO: 3058168 - RNA, 13 nt, Human
gcugccugggauc

SEQ ID NO: 3058169 - RNA, 19 nt, Human
gcugccugggaucccucau

SEQ ID NO: 3058170 - RNA, 22 nt, Human
gcugcuccuaggacccgucucc

SEQ ID NO: 3058171 - RNA, 16 nt, Human
gcugccugggaucccu

SEQ ID NO: 3058172 - RNA, 18 nt, Human
gcugccugggaucccuca

SEQ ID NO: 3058173 - RNA, 13 nt, Human
gcugcugccccug

SEQ ID NO: 3058174 - RNA, 14 nt, Human
gcugcugccccugc

SEQ ID NO: 3058175 - RNA, 15 nt, Human
gcugcugccccugca

SEQ ID NO: 3058176 - RNA, 23 nt, Human
gcugcugccccugcacagcaggc

SEQ ID NO: 3058177 - RNA, 22 nt, Human
gcuggaccuugaacuggguacu

SEQ ID NO: 3058178 - RNA, 12 nt, Human
gcuggagugcag

SEQ ID NO: 3058179 - RNA, 17 nt, Human
gcuggagcucugcccau

SEQ ID NO: 3058180 - RNA, 14 nt, Human
gcuggagcucugcc

SEQ ID NO: 3058181 - RNA, 19 nt, Human
gcugggucgcccuggacug

SEQ ID NO: 3058182 - RNA, 15 nt, Human
gcuggguguggcgca

SEQ ID NO: 3058183 - RNA, 18 nt, Human
gcugggucgcccuggacu

SEQ ID NO: 3058184 - RNA, 17 nt, Human
gcugggucgcccuggac

SEQ ID NO: 3058185 - RNA, 16 nt, Human
gcugggucgcccugga

SEQ ID NO: 3058186 - RNA, 12 nt, Human
gcugggucgccc

SEQ ID NO: 3058187 - RNA, 19 nt, Human
gcugggcagaggaaagcaa

SEQ ID NO: 3058188 - RNA, 16 nt, Human
gcugggcagaggaaag

SEQ ID NO: 3058189 - RNA, 17 nt, Human
gcugggcagaggaaagc

SEQ ID NO: 3058190 - RNA, 12 nt, Human
gcugggcucccu

SEQ ID NO: 3058191 - RNA, 16 nt, Human
gcugggcucccuuccc

SEQ ID NO: 3058192 - RNA, 17 nt, Human
gcugggcucccuuccca

SEQ ID NO: 3058193 - RNA, 20 nt, Human
gcugggcucccuucccaccu

SEQ ID NO: 3058194 - RNA, 18 nt, Human
gcuggccuggccccucag

SEQ ID NO: 3058195 - RNA, 19 nt, Human
gcuggccuggccccucagg

SEQ ID NO: 3058196 - RNA, 16 nt, Human
gcugggauuacaggug

SEQ ID NO: 3058197 - RNA, 16 nt, Human
gcuggccuggccccuc

SEQ ID NO: 3058198 - RNA, 17 nt, Human
gcuggccuggccccuca

SEQ ID NO: 3058199 - RNA, 15 nt, Human
gcuggagugcaguga

SEQ ID NO: 3058200 - RNA, 14 nt, Human
gcuggagugcagug

SEQ ID NO: 3058201 - RNA, 14 nt, Human
gcugggcagaggaa

SEQ ID NO: 3058202 - RNA, 15 nt, Human
gcugggcagaggaaa

SEQ ID NO: 3058203 - RNA, 13 nt, Human
gcugggcagagga

SEQ ID NO: 3058204 - RNA, 18 nt, Human
gcugggauuacaggugug

SEQ ID NO: 3058205 - RNA, 19 nt, Human
gcugggauuacagguguga

SEQ ID NO: 3058206 - RNA, 20 nt, Human
gcuucacggaagagccuugc

SEQ ID NO: 3058207 - RNA, 22 nt, Human
gcuucaaggauccugagccaga

SEQ ID NO: 3058208 - RNA, 19 nt, Human
gcuucacggaagagccuug

SEQ ID NO: 3058209 - RNA, 19 nt, Human
gcugugcugcccugcccac

SEQ ID NO: 3058210 - RNA, 22 nt, Human
gcugugcugcccugcccaccug

SEQ ID NO: 3058211 - RNA, 22 nt, Human
gcuguuggcugggggccucagu

SEQ ID NO: 3058212 - RNA, 21 nt, Human
gcuguuggcugggggccucag

SEQ ID NO: 3058213 - RNA, 12 nt, Human
gcugugcugccc

SEQ ID NO: 3058214 - RNA, 21 nt, Human
gcugugcucuggacaggcaug

SEQ ID NO: 3058215 - RNA, 13 nt, Human
gcugugcugcccu

SEQ ID NO: 3058216 - RNA, 18 nt, Human
gcugugcucuggacaggc

SEQ ID NO: 3058217 - RNA, 15 nt, Human
gcuggguucuaccca

SEQ ID NO: 3058218 - RNA, 15 nt, Human
gcuggguucugaucc

SEQ ID NO: 3058219 - RNA, 21 nt, Human
gcuggguuggaggguguccca

SEQ ID NO: 3058220 - RNA, 14 nt, Human
gcuggguuggaggg

SEQ ID NO: 3058221 - RNA, 19 nt, Human
gcuguaucccaugagccuc

SEQ ID NO: 3058222 - RNA, 23 nt, Human
gcuguaucccaugagccucagca

SEQ ID NO: 3058223 - RNA, 20 nt, Human
gcuguaucccaugagccuca

SEQ ID NO: 3058224 - RNA, 22 nt, Human
gcuuccuucugugaaaguacau

SEQ ID NO: 3058225 - RNA, 16 nt, Human
gcuuguacauaaugcg

SEQ ID NO: 3058226 - RNA, 14 nt, Human
gcuuguacauaaug

SEQ ID NO: 3058227 - RNA, 18 nt, Human
gcucaggagcccugggag

SEQ ID NO: 3058228 - RNA, 15 nt, Human
gcucaggagcccugg

SEQ ID NO: 3058229 - RNA, 12 nt, Human
gcucagggccug

SEQ ID NO: 3058230 - RNA, 13 nt, Human
gcucagggccugg

SEQ ID NO: 3058231 - RNA, 16 nt, Human
gcucagggccuggcuc

SEQ ID NO: 3058232 - RNA, 14 nt, Human
gcucaggagcccug

SEQ ID NO: 3058233 - RNA, 18 nt, Human
gcucagagagggugggag

SEQ ID NO: 3058234 - RNA, 20 nt, Human
gcucagagagggugggagug

SEQ ID NO: 3058235 - RNA, 15 nt, Human
gcucagagagggugg

SEQ ID NO: 3058236 - RNA, 21 nt, Human
gcucagguggggucacucugg

SEQ ID NO: 3058237 - RNA, 22 nt, Human
gcucagguggggucacucuggc

SEQ ID NO: 3058238 - RNA, 19 nt, Human
gccuguucagcuccagcuc

SEQ ID NO: 3058239 - RNA, 20 nt, Human
gccuguucagcuccagcuca

SEQ ID NO: 3058240 - RNA, 19 nt, Human
gcuaggaacacuccuucac

SEQ ID NO: 3058241 - RNA, 21 nt, Human
gcuaggaacacuccuucacag

SEQ ID NO: 3058242 - RNA, 18 nt, Human
gcuaggaacacuccuuca

SEQ ID NO: 3058243 - RNA, 16 nt, Human
gcuaggaacacuccuu

SEQ ID NO: 3058244 - RNA, 15 nt, Human
gcuaggccuggccag

SEQ ID NO: 3058245 - RNA, 14 nt, Human
gcuaggccuggcca

SEQ ID NO: 3058246 - RNA, 22 nt, Human
gcuaggaccccuccaugugggc

SEQ ID NO: 3058247 - RNA, 16 nt, Human
gcuaguaucaaaagaa

SEQ ID NO: 3058248 - RNA, 21 nt, Human
gcuaguaauuggaaaggcagc

SEQ ID NO: 3058249 - RNA, 13 nt, Human
gcucucaggccag

SEQ ID NO: 3058250 - RNA, 14 nt, Human
gcucucaggccagc

SEQ ID NO: 3058251 - RNA, 15 nt, Human
gcucucaggccagcu

SEQ ID NO: 3058252 - RNA, 16 nt, Human
gcucucaggccagcug

SEQ ID NO: 3058253 - RNA, 20 nt, Human
gcucccaggcauuccccagg

SEQ ID NO: 3058254 - RNA, 21 nt, Human
gcucccaggcauuccccagga

SEQ ID NO: 3058255 - RNA, 14 nt, Human
gcuccccagcccca

SEQ ID NO: 3058256 - RNA, 22 nt, Human
gcucccaggcauuccccaggag

SEQ ID NO: 3058257 - RNA, 17 nt, Human
gcucccaggcauucccc

SEQ ID NO: 3058258 - RNA, 15 nt, Human
gcuccccucggagaa

SEQ ID NO: 3058259 - RNA, 23 nt, Human
gcucuggagcccacuguacuugc

SEQ ID NO: 3058260 - RNA, 16 nt, Human
gcucuguccugggagu

SEQ ID NO: 3058261 - RNA, 14 nt, Human
gcucuguccuggga

SEQ ID NO: 3058262 - RNA, 15 nt, Human
gcucuguccugggag

SEQ ID NO: 3058263 - RNA, 15 nt, Human
gcucuuccaggcugg

SEQ ID NO: 3058264 - RNA, 16 nt, Human
gcucuuccaggcuggg

SEQ ID NO: 3058265 - RNA, 12 nt, Human
gcucuuccaggc

SEQ ID NO: 3058266 - RNA, 22 nt, Human
gcugaauacagaggcaacugca

SEQ ID NO: 3058267 - RNA, 17 nt, Human
gcugaaugguuuucaaa

SEQ ID NO: 3058268 - RNA, 12 nt, Human
gcugaaggcucg

SEQ ID NO: 3058269 - RNA, 20 nt, Human
gcugaaggcucgagcaugcc

SEQ ID NO: 3058270 - RNA, 16 nt, Human
gcugacagacacaggc

SEQ ID NO: 3058271 - RNA, 15 nt, Human
gcugacagacacagg

SEQ ID NO: 3058272 - RNA, 14 nt, Human
gcugacagacacag

SEQ ID NO: 3058273 - RNA, 20 nt, Human
gagccuuccaggggugggac

SEQ ID NO: 3058274 - RNA, 13 nt, Human
gagccuugaacuu

SEQ ID NO: 3058275 - RNA, 23 nt, Human
gagccuuccaggggugggacacc

SEQ ID NO: 3058276 - RNA, 14 nt, Human
gaggcagggucuca

SEQ ID NO: 3058277 - RNA, 15 nt, Human
gaggacgcucucugg

SEQ ID NO: 3058278 - RNA, 22 nt, Human
gaggcagggucucacucugucg

SEQ ID NO: 3058279 - RNA, 15 nt, Human
gaggcagggucucac

SEQ ID NO: 3058280 - RNA, 17 nt, Human
gaggccaaggugggagg

SEQ ID NO: 3058281 - RNA, 22 nt, Human
gaggccaaggugggaggauugc

SEQ ID NO: 3058282 - RNA, 18 nt, Human
gaggcuacuguaaggcaa

SEQ ID NO: 3058283 - RNA, 19 nt, Human
gaggcuccacuuggucugu

SEQ ID NO: 3058284 - RNA, 18 nt, Human
gaggcuccacuuggucug

SEQ ID NO: 3058285 - RNA, 23 nt, Human
gaggcuccacuuggucugugaga

SEQ ID NO: 3058286 - RNA, 13 nt, Human
gaggccagagaca

SEQ ID NO: 3058287 - RNA, 14 nt, Human
gaggccagagacac

SEQ ID NO: 3058288 - RNA, 22 nt, Human
gaggcuagugugguguuuccug

SEQ ID NO: 3058289 - RNA, 22 nt, Human
gaguuguuacauuuuuaagugc

SEQ ID NO: 3058290 - RNA, 18 nt, Human
gaguugauucagcucugc

SEQ ID NO: 3058291 - RNA, 15 nt, Human
gaggucgaggcagga

SEQ ID NO: 3058292 - RNA, 23 nt, Human
gaggugaccccagguuucuaugu

SEQ ID NO: 3058293 - RNA, 17 nt, Human
gagucaccaagcccagu

SEQ ID NO: 3058294 - RNA, 16 nt, Human
gagucaccaagcccag

SEQ ID NO: 3058295 - RNA, 15 nt, Human
gagucaccaagccca

SEQ ID NO: 3058296 - RNA, 22 nt, Human
gagucagaaguuucugccgcag

SEQ ID NO: 3058297 - RNA, 18 nt, Human
gagugacagaggcagccc

SEQ ID NO: 3058298 - RNA, 12 nt, Human
gagucccaccuu

SEQ ID NO: 3058299 - RNA, 15 nt, Human
gaguugauucagcuc

SEQ ID NO: 3058300 - RNA, 16 nt, Human
gaguugauucagcucu

SEQ ID NO: 3058301 - RNA, 17 nt, Human
gaguugauucagcucug

SEQ ID NO: 3058302 - RNA, 22 nt, Human
gaguugauagcacagacccugc

SEQ ID NO: 3058303 - RNA, 20 nt, Human
gagugacagaggcagcccca

SEQ ID NO: 3058304 - RNA, 17 nt, Human
gcacuccccugcugggu

SEQ ID NO: 3058305 - RNA, 16 nt, Human
gcacucagaagacacu

SEQ ID NO: 3058306 - RNA, 13 nt, Human
gcacucagaagac

SEQ ID NO: 3058307 - RNA, 22 nt, Human
gcacuccccugcuggguguggc

SEQ ID NO: 3058308 - RNA, 16 nt, Human
gcacuccccugcuggg

SEQ ID NO: 3058309 - RNA, 16 nt, Human
gcacuugcagacucua

SEQ ID NO: 3058310 - RNA, 23 nt, Human
gcaccgggccacagagaaaguac

SEQ ID NO: 3058311 - RNA, 23 nt, Human
gcacaucagcacgauuucuguuu

SEQ ID NO: 3058312 - RNA, 22 nt, Human
gcacaucagcacgauuucuguu

SEQ ID NO: 3058313 - RNA, 14 nt, Human
gcaccgggccacag

SEQ ID NO: 3058314 - RNA, 18 nt, Human
gcaagucagaauagaaau

SEQ ID NO: 3058315 - RNA, 20 nt, Human
gcaaguauuagaauaccaca

SEQ ID NO: 3058316 - RNA, 19 nt, Human
gcaagugagagcugggugu

SEQ ID NO: 3058317 - RNA, 22 nt, Human
gcaauagucaaauugugugaaa

SEQ ID NO: 3058318 - RNA, 22 nt, Human
gcacaagcugcacccucaggca

SEQ ID NO: 3058319 - RNA, 14 nt, Human
gcacaccgggcacu

SEQ ID NO: 3058320 - RNA, 14 nt, Human
gcacacauuuuuua

SEQ ID NO: 3058321 - RNA, 23 nt, Human
gcacaguuuucugagaaagacua

SEQ ID NO: 3058322 - RNA, 22 nt, Human
gcacaguuuucugagaaagacu

SEQ ID NO: 3058323 - RNA, 20 nt, Human
gcacaguuuucugagaaaga

SEQ ID NO: 3058324 - RNA, 12 nt, Human
gauuauuggaaa

SEQ ID NO: 3058325 - RNA, 14 nt, Human
gauuauauuaugaa

SEQ ID NO: 3058326 - RNA, 14 nt, Human
gauucuccugccuc

SEQ ID NO: 3058327 - RNA, 18 nt, Human
gauucuccugccucagcc

SEQ ID NO: 3058328 - RNA, 17 nt, Human
gauucuccugccucagc

SEQ ID NO: 3058329 - RNA, 15 nt, Human
gauucuccugccuca

SEQ ID NO: 3058330 - RNA, 18 nt, Human
gauucuuccucccucccu

SEQ ID NO: 3058331 - RNA, 17 nt, Human
gauucuuccucccuccc

SEQ ID NO: 3058332 - RNA, 15 nt, Human
gauuuaccacuugug

SEQ ID NO: 3058333 - RNA, 16 nt, Human
gauuuaccacuugugu

SEQ ID NO: 3058334 - RNA, 16 nt, Human
gaugagugagcaugcc

SEQ ID NO: 3058335 - RNA, 21 nt, Human
gaugaucuaggaagacuuugg

SEQ ID NO: 3058336 - RNA, 16 nt, Human
gaugaucuuuaaaaua

SEQ ID NO: 3058337 - RNA, 15 nt, Human
gaugaucuaggaaga

SEQ ID NO: 3058338 - RNA, 14 nt, Human
gaugguucuagcau

SEQ ID NO: 3058339 - RNA, 22 nt, Human
gaugguucccuugaugaagaag

SEQ ID NO: 3058340 - RNA, 17 nt, Human
gauguagaggagaaacu

SEQ ID NO: 3058341 - RNA, 18 nt, Human
gauguagaggagaaacug

SEQ ID NO: 3058342 - RNA, 14 nt, Human
gaugauccuaggca

SEQ ID NO: 3058343 - RNA, 14 nt, Human
gaagcacaugccuc

SEQ ID NO: 3058344 - RNA, 15 nt, Human
gaagcagaggaagga

SEQ ID NO: 3058345 - RNA, 23 nt, Human
gaagcagaccauuggggcuccca

SEQ ID NO: 3058346 - RNA, 20 nt, Human
gaagcaaugcuucaucccuu

SEQ ID NO: 3058347 - RNA, 23 nt, Human
gaagcaacccaaauguucaucaa

SEQ ID NO: 3058348 - RNA, 17 nt, Human
gaagcacaugccucucu

SEQ ID NO: 3058349 - RNA, 20 nt, Human
gaagcacaugccucucucag

SEQ ID NO: 3058350 - RNA, 15 nt, Human
gaagcacaugccucu

SEQ ID NO: 3058351 - RNA, 23 nt, Human
gaagauuuugaaauuuuuauuaa

SEQ ID NO: 3058352 - RNA, 14 nt, Human
gaagcaaaauuuuu

SEQ ID NO: 3058353 - RNA, 23 nt, Human
gaagacaaugugaaaagaaaaau

SEQ ID NO: 3058354 - RNA, 22 nt, Human
gaagacaaugacuuacuguaca

SEQ ID NO: 3058355 - RNA, 16 nt, Human
gaagacaaugacuuac

SEQ ID NO: 3058356 - RNA, 12 nt, Human
gaacuggcugca

SEQ ID NO: 3058357 - RNA, 11 nt, Human
gaacuggcugc

SEQ ID NO: 3058358 - RNA, 20 nt, Human
gaaccgagggggcugcuccc

SEQ ID NO: 3058359 - RNA, 21 nt, Human
gaaccgagggggcugcuccca

SEQ ID NO: 3058360 - RNA, 15 nt, Human
gaacuccuggccuca

SEQ ID NO: 3058361 - RNA, 22 nt, Human
gaaccgagggggcugcucccac

SEQ ID NO: 3058362 - RNA, 14 nt, Human
gaacugaaaucaua

SEQ ID NO: 3058363 - RNA, 13 nt, Human
gaacugaaaucau

SEQ ID NO: 3058364 - RNA, 19 nt, Human
gaacccgggaggcagaggu

SEQ ID NO: 3058365 - RNA, 20 nt, Human
gaagcuaucguaaaauuaag

SEQ ID NO: 3058366 - RNA, 19 nt, Human
gaagcuccgcuuucuaccc

SEQ ID NO: 3058367 - RNA, 17 nt, Human
gaaggccccgcccaggc

SEQ ID NO: 3058368 - RNA, 22 nt, Human
gaagcuccgcuuucuacccagc

SEQ ID NO: 3058369 - RNA, 20 nt, Human
gaaggcuggguucugauccu

SEQ ID NO: 3058370 - RNA, 22 nt, Human
gaaggcuggguucugauccuag

SEQ ID NO: 3058371 - RNA, 15 nt, Human
gaaggcuggguucug

SEQ ID NO: 3058372 - RNA, 19 nt, Human
gaaggcuggguucugaucc

SEQ ID NO: 3058373 - RNA, 19 nt, Human
gaaggcucgagcaugccug

SEQ ID NO: 3058374 - RNA, 18 nt, Human
gaaggccccgcccaggcu

SEQ ID NO: 3058375 - RNA, 19 nt, Human
gaaggccccgcccaggcuu

SEQ ID NO: 3058376 - RNA, 21 nt, Human
gaaggcucgagcaugccugga

SEQ ID NO: 3058377 - RNA, 22 nt, Human
gaaggggagauaaggguaucug

SEQ ID NO: 3058378 - RNA, 14 nt, Human
gaauauguuucaaa

SEQ ID NO: 3058379 - RNA, 15 nt, Human
gaauauguuucaaac

SEQ ID NO: 3058380 - RNA, 20 nt, Human
gaauauguuucaaacuuugg

SEQ ID NO: 3058381 - RNA, 14 nt, Human
gaauauugcugaug

SEQ ID NO: 3058382 - RNA, 15 nt, Human
gaauauugcugaugg

SEQ ID NO: 3058383 - RNA, 19 nt, Human
gaauauugcugauggugca

SEQ ID NO: 3058384 - RNA, 20 nt, Human
gaauauugcugauggugcaa

SEQ ID NO: 3058385 - RNA, 22 nt, Human
gaauauugcuuuggucauauga

SEQ ID NO: 3058386 - RNA, 16 nt, Human
gacgcucucuggccuu

SEQ ID NO: 3058387 - RNA, 17 nt, Human
gacgcucucuggccuuc

SEQ ID NO: 3058388 - RNA, 16 nt, Human
gacgcuacccgggaag

SEQ ID NO: 3058389 - RNA, 18 nt, Human
gacgcuacccgggaaggg

SEQ ID NO: 3058390 - RNA, 19 nt, Human
gacgcuacccgggaagggg

SEQ ID NO: 3058391 - RNA, 15 nt, Human
gacgcucucuggccu

SEQ ID NO: 3058392 - RNA, 17 nt, Human
gacgccaucccagcccc

SEQ ID NO: 3058393 - RNA, 18 nt, Human
gacgccaucccagcccca

SEQ ID NO: 3058394 - RNA, 15 nt, Human
gacgccaucccagcc

SEQ ID NO: 3058395 - RNA, 14 nt, Human
gaccucugcagcaa

SEQ ID NO: 3058396 - RNA, 13 nt, Human
gaccucugccuga

SEQ ID NO: 3058397 - RNA, 20 nt, Human
gaccaucccugaaggccccg

SEQ ID NO: 3058398 - RNA, 11 nt, Human
gaccugaggcc

SEQ ID NO: 3058399 - RNA, 13 nt, Human
gaccugaggcccu

SEQ ID NO: 3058400 - RNA, 16 nt, Human
gacgccaucccagccc

SEQ ID NO: 3058401 - RNA, 22 nt, Human
gacugugugcucaggagcccug

SEQ ID NO: 3058402 - RNA, 14 nt, Human
gacugaauuucuuu

SEQ ID NO: 3058403 - RNA, 16 nt, Human
gacugaauggacuuug

SEQ ID NO: 3058404 - RNA, 14 nt, Human
gacugaauuaugaa

SEQ ID NO: 3058405 - RNA, 20 nt, Human
gacugaauuaugaaacuuuu

SEQ ID NO: 3058406 - RNA, 19 nt, Human
gacucugucucaaaaaaac

SEQ ID NO: 3058407 - RNA, 14 nt, Human
gacucuuaagaaga

SEQ ID NO: 3058408 - RNA, 18 nt, Human
gacucuuaagaagacugc

SEQ ID NO: 3058409 - RNA, 21 nt, Human
gacucuuaagaagacugcauu

SEQ ID NO: 3058410 - RNA, 14 nt, Human
gacacacugaagaa

SEQ ID NO: 3058411 - RNA, 15 nt, Human
gacacacugaagaag

SEQ ID NO: 3058412 - RNA, 16 nt, Human
gacacacugaagaagc

SEQ ID NO: 3058413 - RNA, 16 nt, Human
gacacagcucuucucc

SEQ ID NO: 3058414 - RNA, 14 nt, Human
gacacagcucuucu

SEQ ID NO: 3058415 - RNA, 13 nt, Human
gacacagcucuuc

SEQ ID NO: 3058416 - RNA, 23 nt, Human
gacacagcucuucuccaggcugu

SEQ ID NO: 3058417 - RNA, 22 nt, Human
gacacagcucuucuccaggcug

SEQ ID NO: 3058418 - RNA, 17 nt, Human
gacagcccgggcucugc

SEQ ID NO: 3058419 - RNA, 15 nt, Human
gacagaagcagcucu

SEQ ID NO: 3058420 - RNA, 21 nt, Human
gacagaaagcagaacagugau

SEQ ID NO: 3058421 - RNA, 12 nt, Human
gaccaucccuga

SEQ ID NO: 3058422 - RNA, 13 nt, Human
gaccaucccugaa

SEQ ID NO: 3058423 - RNA, 18 nt, Human
gaccaucccugaaggccc

SEQ ID NO: 3058424 - RNA, 19 nt, Human
gaccaucccugaaggcccc

SEQ ID NO: 3058425 - RNA, 20 nt, Human
gaccagggauuuccaugaug

SEQ ID NO: 3058426 - RNA, 18 nt, Human
gaccagggauuuccauga

SEQ ID NO: 3058427 - RNA, 16 nt, Human
gacauuugcucaugga

SEQ ID NO: 3058428 - RNA, 19 nt, Human
gacauuguuggccaaagcc

SEQ ID NO: 3058429 - RNA, 14 nt, Human
gacagugaaagaaa

SEQ ID NO: 3058430 - RNA, 18 nt, Human
gacagcccgggcucugcc

SEQ ID NO: 3058431 - RNA, 19 nt, Human
gacagcccgggcucugccu

SEQ ID NO: 3058432 - RNA, 21 nt, Human
gacagugagacucugucucag

SEQ ID NO: 3058433 - RNA, 15 nt, Human
gacauugcggacagc

SEQ ID NO: 3058434 - RNA, 14 nt, Human
gacauugcggacag

SEQ ID NO: 3058435 - RNA, 23 nt, Human
cuucugacccaugcugcccugug

SEQ ID NO: 3058436 - RNA, 20 nt, Human
cuucuucagagacuccugca

SEQ ID NO: 3058437 - RNA, 21 nt, Human
cuucuucagagacuccugcag

SEQ ID NO: 3058438 - RNA, 15 nt, Human
cuucuguuuuauaau

SEQ ID NO: 3058439 - RNA, 20 nt, Human
cuucuguuuuauaauuuugu

SEQ ID NO: 3058440 - RNA, 18 nt, Human
cuucuucagagacuccug

SEQ ID NO: 3058441 - RNA, 22 nt, Human
cuucuucagagacuccugcagg

SEQ ID NO: 3058442 - RNA, 20 nt, Human
cuugaaugaugccaugagga

SEQ ID NO: 3058443 - RNA, 23 nt, Human
cuugaaugaugccaugaggaaca

SEQ ID NO: 3058444 - RNA, 20 nt, Human
cuugccgucuaccugagggg

SEQ ID NO: 3058445 - RNA, 12 nt, Human
cuugacagggca

SEQ ID NO: 3058446 - RNA, 23 nt, Human
cuugccgucuaccugaggggccu

SEQ ID NO: 3058447 - RNA, 12 nt, Human
cuugcucugcug

SEQ ID NO: 3058448 - RNA, 15 nt, Human
cuuguggacacagcu

SEQ ID NO: 3058449 - RNA, 14 nt, Human
cuuguggacacagc

SEQ ID NO: 3058450 - RNA, 13 nt, Human
cuuguggacacag

SEQ ID NO: 3058451 - RNA, 20 nt, Human
cuuuaaagggauggcaagau

SEQ ID NO: 3058452 - RNA, 18 nt, Human
cuuucaauaggaaaaacu

SEQ ID NO: 3058453 - RNA, 20 nt, Human
cuuucaauaggaaaaacuga

SEQ ID NO: 3058454 - RNA, 21 nt, Human
cuuucaauaggaaaaacugau

SEQ ID NO: 3058455 - RNA, 22 nt, Human
cuuucaauaggaaaaacugauu

SEQ ID NO: 3058456 - RNA, 15 nt, Human
cuuuucaaaacauuu

SEQ ID NO: 3058457 - RNA, 15 nt, Human
cuuuuauaaacuuua

SEQ ID NO: 3058458 - RNA, 18 nt, Human
cuuuuauaaacuuuaccu

SEQ ID NO: 3058459 - RNA, 16 nt, Human
cuuuuauaaacuuuac

SEQ ID NO: 3058460 - RNA, 14 nt, Human
cuuuuauaaacuuu

SEQ ID NO: 3058461 - RNA, 16 nt, Human
cuuuggucuacacugu

SEQ ID NO: 3058462 - RNA, 20 nt, Human
cuuuggucuacacugugcug

SEQ ID NO: 3058463 - RNA, 21 nt, Human
cuuugagugucuuaauuaaaa

SEQ ID NO: 3058464 - RNA, 18 nt, Human
cuuugacgccaucccagc

SEQ ID NO: 3058465 - RNA, 19 nt, Human
cuuugacgccaucccagcc

SEQ ID NO: 3058466 - RNA, 21 nt, Human
cuuugacgccaucccagcccc

SEQ ID NO: 3058467 - RNA, 22 nt, Human
cuuugacgccaucccagcccca

SEQ ID NO: 3058468 - RNA, 13 nt, Human
cuuacacaauggu

SEQ ID NO: 3058469 - RNA, 17 nt, Human
cuguugggccaggagcc

SEQ ID NO: 3058470 - RNA, 20 nt, Human
cuguugggccaggagccucc

SEQ ID NO: 3058471 - RNA, 16 nt, Human
cuguugggccaggagc

SEQ ID NO: 3058472 - RNA, 19 nt, Human
cuuacccucauguucuuaa

SEQ ID NO: 3058473 - RNA, 18 nt, Human
cuuacccucauguucuua

SEQ ID NO: 3058474 - RNA, 17 nt, Human
cuuacccucauguucuu

SEQ ID NO: 3058475 - RNA, 13 nt, Human
cuuaccucggugc

SEQ ID NO: 3058476 - RNA, 19 nt, Human
cuuaccucggugccuuccu

SEQ ID NO: 3058477 - RNA, 21 nt, Human
cuuaccucggugccuuccucu

SEQ ID NO: 3058478 - RNA, 19 nt, Human
cuuagauguauauauuucc

SEQ ID NO: 3058479 - RNA, 20 nt, Human
cugugcugagucugaaggcu

SEQ ID NO: 3058480 - RNA, 22 nt, Human
cugugcugagucugaaggcugg

SEQ ID NO: 3058481 - RNA, 11 nt, Human
cugugcugccc

SEQ ID NO: 3058482 - RNA, 19 nt, Human
cugugcugagucugaaggc

SEQ ID NO: 3058483 - RNA, 14 nt, Human
cugugucucccuuc

SEQ ID NO: 3058484 - RNA, 19 nt, Human
cugugucucccuucauccu

SEQ ID NO: 3058485 - RNA, 14 nt, Human
cugugucuugcaau

SEQ ID NO: 3058486 - RNA, 21 nt, Human
cugugucagguggggcagcuu

SEQ ID NO: 3058487 - RNA, 20 nt, Human
cugugucagcauagaaguaa

SEQ ID NO: 3058488 - RNA, 19 nt, Human
cugugucagguggggcagc

SEQ ID NO: 3058489 - RNA, 19 nt, Human
cugugucuugcaauggcag

SEQ ID NO: 3058490 - RNA, 16 nt, Human
cugugucuugcaaugg

SEQ ID NO: 3058491 - RNA, 13 nt, Human
cuguucagcucca

SEQ ID NO: 3058492 - RNA, 21 nt, Human
cuuauggaacacucugagacu

SEQ ID NO: 3058493 - RNA, 14 nt, Human
cuuaugggcugggu

SEQ ID NO: 3058494 - RNA, 21 nt, Human
cuuaugggcuggguucuaccc

SEQ ID NO: 3058495 - RNA, 13 nt, Human
cuuauugcccacg

SEQ ID NO: 3058496 - RNA, 12 nt, Human
cuuauugcccac

SEQ ID NO: 3058497 - RNA, 22 nt, Human
cuuaugggcuggguucuaccca

SEQ ID NO: 3058498 - RNA, 23 nt, Human
cuuaugggcuggguucuacccag

SEQ ID NO: 3058499 - RNA, 18 nt, Human
cuuagcagggaaacagcu

SEQ ID NO: 3058500 - RNA, 18 nt, Human
cuuccagugaggcucugc

SEQ ID NO: 3058501 - RNA, 17 nt, Human
cuuccagugaggcucug

SEQ ID NO: 3058502 - RNA, 19 nt, Human
cuuccagugaggcucugcc

SEQ ID NO: 3058503 - RNA, 20 nt, Human
cuuccagugaggcucugccc

SEQ ID NO: 3058504 - RNA, 16 nt, Human
cuuccauggacuuugu

SEQ ID NO: 3058505 - RNA, 17 nt, Human
cuuccauggacuuuguu

SEQ ID NO: 3058506 - RNA, 18 nt, Human
cuucaucugacuaugaca

SEQ ID NO: 3058507 - RNA, 23 nt, Human
cuucaugcugucuacacuaagag

SEQ ID NO: 3058508 - RNA, 12 nt, Human
cuucaucugacu

SEQ ID NO: 3058509 - RNA, 16 nt, Human
cuucauccuccucaga

SEQ ID NO: 3058510 - RNA, 23 nt, Human
cuucagagacuccugcaggcagc

SEQ ID NO: 3058511 - RNA, 17 nt, Human
cuucaguggcagcugcu

SEQ ID NO: 3058512 - RNA, 18 nt, Human
cuucaguggcagcugcuu

SEQ ID NO: 3058513 - RNA, 13 nt, Human
cuucaucccucug

SEQ ID NO: 3058514 - RNA, 15 nt, Human
cuucauccuccucag

SEQ ID NO: 3058515 - RNA, 16 nt, Human
cuucagagacuccugc

SEQ ID NO: 3058516 - RNA, 21 nt, Human
cuucagagacuccugcaggca

SEQ ID NO: 3058517 - RNA, 22 nt, Human
cuucagagacuccugcaggcag

SEQ ID NO: 3058518 - RNA, 11 nt, Human
cuucagacaua

SEQ ID NO: 3058519 - RNA, 17 nt, Human
cuucaccuuugucccca

SEQ ID NO: 3058520 - RNA, 20 nt, Human
cuucaccuuuguccccaccg

SEQ ID NO: 3058521 - RNA, 18 nt, Human
cuuauugcccacgcugga

SEQ ID NO: 3058522 - RNA, 14 nt, Human
cuucaccuuugucc

SEQ ID NO: 3058523 - RNA, 14 nt, Human
cuggguguggcgca

SEQ ID NO: 3058524 - RNA, 21 nt, Human
cuggguggcaccagcagccug

SEQ ID NO: 3058525 - RNA, 15 nt, Human
cuggguguggcgcag

SEQ ID NO: 3058526 - RNA, 12 nt, Human
cuggugccucac

SEQ ID NO: 3058527 - RNA, 21 nt, Human
cuggugccucaccccuugcca

SEQ ID NO: 3058528 - RNA, 20 nt, Human
cugggcagguuggugggggc

SEQ ID NO: 3058529 - RNA, 20 nt, Human
cugggcagaggaaagcaaag

SEQ ID NO: 3058530 - RNA, 13 nt, Human
cugggcagaggaa

SEQ ID NO: 3058531 - RNA, 16 nt, Human
cugggcagaggaaagc

SEQ ID NO: 3058532 - RNA, 12 nt, Human
cugggcagagga

SEQ ID NO: 3058533 - RNA, 13 nt, Human
cuggggagaaagu

SEQ ID NO: 3058534 - RNA, 18 nt, Human
cuggguggcaccagcagc

SEQ ID NO: 3058535 - RNA, 20 nt, Human
cuggguggcaccagcagccu

SEQ ID NO: 3058536 - RNA, 16 nt, Human
cuggguggaugggcca

SEQ ID NO: 3058537 - RNA, 12 nt, Human
cuggcccuuccu

SEQ ID NO: 3058538 - RNA, 14 nt, Human
cuggcuaugcauuu

SEQ ID NO: 3058539 - RNA, 13 nt, Human
cuggcuaugcauu

SEQ ID NO: 3058540 - RNA, 16 nt, Human
cuggcuaugcauuuga

SEQ ID NO: 3058541 - RNA, 15 nt, Human
cuggcuaugcauuug

SEQ ID NO: 3058542 - RNA, 22 nt, Human
cuggcuaugcauuugaaaauuu

SEQ ID NO: 3058543 - RNA, 14 nt, Human
cuggcucacccagu

SEQ ID NO: 3058544 - RNA, 13 nt, Human
cuggcucacccag

SEQ ID NO: 3058545 - RNA, 16 nt, Human
cugggagaaaugaaaa

SEQ ID NO: 3058546 - RNA, 17 nt, Human
cugggagaaaugaaaaa

SEQ ID NO: 3058547 - RNA, 22 nt, Human
cugggagaaccaaaaagaggcu

SEQ ID NO: 3058548 - RNA, 15 nt, Human
cugggacuacaggca

SEQ ID NO: 3058549 - RNA, 13 nt, Human
cugggacuacagg

SEQ ID NO: 3058550 - RNA, 18 nt, Human
cugggacaugggaaaggg

SEQ ID NO: 3058551 - RNA, 22 nt, Human
cugggacaugggaaaggggaag

SEQ ID NO: 3058552 - RNA, 14 nt, Human
cugggacaugggaa

SEQ ID NO: 3058553 - RNA, 14 nt, Human
cugcucacauaucu

SEQ ID NO: 3058554 - RNA, 19 nt, Human
cugcucacauaucugucau

SEQ ID NO: 3058555 - RNA, 16 nt, Human
cugcucacauaucugu

SEQ ID NO: 3058556 - RNA, 12 nt, Human
cugcugaaggcu

SEQ ID NO: 3058557 - RNA, 13 nt, Human
cugcugaaggcuc

SEQ ID NO: 3058558 - RNA, 14 nt, Human
cugcugaaggcucg

SEQ ID NO: 3058559 - RNA, 15 nt, Human
cugcugaaggcucga

SEQ ID NO: 3058560 - RNA, 12 nt, Human
cugcugacagug

SEQ ID NO: 3058561 - RNA, 11 nt, Human
cugcugacagu

SEQ ID NO: 3058562 - RNA, 15 nt, Human
cugcugacaguguug

SEQ ID NO: 3058563 - RNA, 13 nt, Human
cugcugacagugu

SEQ ID NO: 3058564 - RNA, 20 nt, Human
cugcuuaacuucacauauug

SEQ ID NO: 3058565 - RNA, 22 nt, Human
cuggaugcagccucacaguccu

SEQ ID NO: 3058566 - RNA, 22 nt, Human
cuggaugcccccuguggaugcu

SEQ ID NO: 3058567 - RNA, 12 nt, Human
cuggaugccauc

SEQ ID NO: 3058568 - RNA, 17 nt, Human
cuggaugcccccugugg

SEQ ID NO: 3058569 - RNA, 18 nt, Human
cuggaugcccccugugga

SEQ ID NO: 3058570 - RNA, 19 nt, Human
cuggaugcccccuguggau

SEQ ID NO: 3058571 - RNA, 22 nt, Human
cuggacugugugcucaggagcc

SEQ ID NO: 3058572 - RNA, 19 nt, Human
cuggacugugugcucagga

SEQ ID NO: 3058573 - RNA, 23 nt, Human
cuggacugugugcucaggagccc

SEQ ID NO: 3058574 - RNA, 16 nt, Human
cuggaguucugguucc

SEQ ID NO: 3058575 - RNA, 17 nt, Human
cuggaguucugguuccu

SEQ ID NO: 3058576 - RNA, 15 nt, Human
cuggaguucugguuc

SEQ ID NO: 3058577 - RNA, 16 nt, Human
cugcccuuaccugcca

SEQ ID NO: 3058578 - RNA, 17 nt, Human
cugcccuuaccugccag

SEQ ID NO: 3058579 - RNA, 12 nt, Human
cugcccuuaccu

SEQ ID NO: 3058580 - RNA, 19 nt, Human
cugcccugugggcccccaa

SEQ ID NO: 3058581 - RNA, 17 nt, Human
cugcauuuaaaagauac

SEQ ID NO: 3058582 - RNA, 20 nt, Human
cugccagggacagagggggu

SEQ ID NO: 3058583 - RNA, 22 nt, Human
cugccagggacagagggggugg

SEQ ID NO: 3058584 - RNA, 23 nt, Human
cugccagggacagaggggguggc

SEQ ID NO: 3058585 - RNA, 17 nt, Human
cugccagugccugggug

SEQ ID NO: 3058586 - RNA, 13 nt, Human
cugccagugccug

SEQ ID NO: 3058587 - RNA, 16 nt, Human
cugccagugccugggu

SEQ ID NO: 3058588 - RNA, 12 nt, Human
cugccagugccu

SEQ ID NO: 3058589 - RNA, 19 nt, Human
cugccauccagguucagcu

SEQ ID NO: 3058590 - RNA, 18 nt, Human
cugccauccagguucagc

SEQ ID NO: 3058591 - RNA, 16 nt, Human
cugccauccagguuca

SEQ ID NO: 3058592 - RNA, 16 nt, Human
cugccauauucuguug

SEQ ID NO: 3058593 - RNA, 12 nt, Human
cugccauccagg

SEQ ID NO: 3058594 - RNA, 13 nt, Human
cugcauuggcuuu

SEQ ID NO: 3058595 - RNA, 14 nt, Human
cugcauuuaaaaga

SEQ ID NO: 3058596 - RNA, 12 nt, Human
cugcagcuuugu

SEQ ID NO: 3058597 - RNA, 13 nt, Human
cugcaggcagcca

SEQ ID NO: 3058598 - RNA, 14 nt, Human
cugcaggcagccag

SEQ ID NO: 3058599 - RNA, 15 nt, Human
cugcaggcagccagg

SEQ ID NO: 3058600 - RNA, 16 nt, Human
cugcaggcagccaggc

SEQ ID NO: 3058601 - RNA, 17 nt, Human
cugcaggcagccaggcc

SEQ ID NO: 3058602 - RNA, 18 nt, Human
cugcaggcagccaggcca

SEQ ID NO: 3058603 - RNA, 19 nt, Human
cugcaggcagccaggccac

SEQ ID NO: 3058604 - RNA, 20 nt, Human
cugcaggcagccaggccaca

SEQ ID NO: 3058605 - RNA, 15 nt, Human
cugcacuccagccug

SEQ ID NO: 3058606 - RNA, 16 nt, Human
cugcacuccagccuga

SEQ ID NO: 3058607 - RNA, 17 nt, Human
cugcacuccagccugag

SEQ ID NO: 3058608 - RNA, 20 nt, Human
cugcacuccagccugagcga

SEQ ID NO: 3058609 - RNA, 13 nt, Human
cugcacuccagcc

SEQ ID NO: 3058610 - RNA, 23 nt, Human
cugcacuauagccuaggugacag

SEQ ID NO: 3058611 - RNA, 22 nt, Human
cugcacuauagccuaggugaca

SEQ ID NO: 3058612 - RNA, 20 nt, Human
cugcacuauagccuagguga

SEQ ID NO: 3058613 - RNA, 18 nt, Human
cugcacuauagccuaggu

SEQ ID NO: 3058614 - RNA, 17 nt, Human
cugcacuauagccuagg

SEQ ID NO: 3058615 - RNA, 16 nt, Human
cugcacuauagccuag

SEQ ID NO: 3058616 - RNA, 17 nt, Human
cugcacuccagccuggg

SEQ ID NO: 3058617 - RNA, 16 nt, Human
cugcacuccagccugg

SEQ ID NO: 3058618 - RNA, 18 nt, Human
cugcacuccagccugggu

SEQ ID NO: 3058619 - RNA, 24 nt, Human
cugcagccucaaccuccugggcua

SEQ ID NO: 3058620 - RNA, 19 nt, Human
cugcacuccagccugggug

SEQ ID NO: 3058621 - RNA, 23 nt, Human
cugcagccucaaccuccugggcu

SEQ ID NO: 3058622 - RNA, 20 nt, Human
cugcaaccuccgccucuugg

SEQ ID NO: 3058623 - RNA, 19 nt, Human
cugcaaccugauugugucu

SEQ ID NO: 3058624 - RNA, 21 nt, Human
cugcaaccugauugugucucu

SEQ ID NO: 3058625 - RNA, 14 nt, Human
cugcaaccugauug

SEQ ID NO: 3058626 - RNA, 22 nt, Human
cugcaaccuccgccucuugggu

SEQ ID NO: 3058627 - RNA, 18 nt, Human
cugcaagaauugaagcag

SEQ ID NO: 3058628 - RNA, 22 nt, Human
cugcaaccugauugugucucuu

SEQ ID NO: 3058629 - RNA, 23 nt, Human
cugcaccgggccacagagaaagu

SEQ ID NO: 3058630 - RNA, 20 nt, Human
cugcaccgggccacagagaa

SEQ ID NO: 3058631 - RNA, 20 nt, Human
cugcaagaauugaagcagga

SEQ ID NO: 3058632 - RNA, 12 nt, Human
cugcaagggagu

SEQ ID NO: 3058633 - RNA, 16 nt, Human
cugaugcuucuucaga

SEQ ID NO: 3058634 - RNA, 17 nt, Human
cugaugcuucuucagag

SEQ ID NO: 3058635 - RNA, 14 nt, Human
cucuuaugggcugg

SEQ ID NO: 3058636 - RNA, 15 nt, Human
cucuuauaucuauau

SEQ ID NO: 3058637 - RNA, 18 nt, Human
cucuuauaucuauauuuu

SEQ ID NO: 3058638 - RNA, 15 nt, Human
cucuuaugggcuggg

SEQ ID NO: 3058639 - RNA, 21 nt, Human
cugaugggcaacccccagccu

SEQ ID NO: 3058640 - RNA, 18 nt, Human
cugaugggcaacccccag

SEQ ID NO: 3058641 - RNA, 18 nt, Human
cugaugcuucuucagaga

SEQ ID NO: 3058642 - RNA, 19 nt, Human
cugaugcuucuucagagac

SEQ ID NO: 3058643 - RNA, 20 nt, Human
cugaugcuucuucagagacu

SEQ ID NO: 3058644 - RNA, 22 nt, Human
cugcaaaggguaucaggugcug

SEQ ID NO: 3058645 - RNA, 21 nt, Human
cugcaaaggguaucaggugcu

SEQ ID NO: 3058646 - RNA, 23 nt, Human
cugaugggcaacccccagccugc

SEQ ID NO: 3058647 - RNA, 22 nt, Human
cugaugggcaacccccagccug

SEQ ID NO: 3058648 - RNA, 24 nt, Human
cugaugggcaacccccagccugcu

SEQ ID NO: 3058649 - RNA, 23 nt, Human
caguuguucaauaauaaauauuu

SEQ ID NO: 3058650 - RNA, 18 nt, Human
caguuguuagugugucuu

SEQ ID NO: 3058651 - RNA, 22 nt, Human
caguuguuagugugucuuagug

SEQ ID NO: 3058652 - RNA, 23 nt, Human
caguuuguuaguaugaggcauuu

SEQ ID NO: 3058653 - RNA, 21 nt, Human
caguuuguuaguaugaggcau

SEQ ID NO: 3058654 - RNA, 18 nt, Human
cauaauuauuauuuggcc

SEQ ID NO: 3058655 - RNA, 16 nt, Human
cauacaguuugcacuu

SEQ ID NO: 3058656 - RNA, 23 nt, Human
cauacaggaagguagaaauaucu

SEQ ID NO: 3058657 - RNA, 23 nt, Human
cauaaugcgugcauaccacuuuu

SEQ ID NO: 3058658 - RNA, 22 nt, Human
cauauuaccacagacauacuaa

SEQ ID NO: 3058659 - RNA, 23 nt, Human
cauagcagagaaugaaagggccc

SEQ ID NO: 3058660 - RNA, 19 nt, Human
cauagcagcuuauucacaa

SEQ ID NO: 3058661 - RNA, 18 nt, Human
cauccugaggcuccacuu

SEQ ID NO: 3058662 - RNA, 19 nt, Human
cauccugaggcuccacuug

SEQ ID NO: 3058663 - RNA, 11 nt, Human
caucccagccc

SEQ ID NO: 3058664 - RNA, 20 nt, Human
caucccaaacccuucagugc

SEQ ID NO: 3058665 - RNA, 21 nt, Human
cauccucuguacagagcccac

SEQ ID NO: 3058666 - RNA, 22 nt, Human
cauccucuguacagagcccacg

SEQ ID NO: 3058667 - RNA, 19 nt, Human
caucccaaacccuucagug

SEQ ID NO: 3058668 - RNA, 19 nt, Human
caucagcacgauuucuguu

SEQ ID NO: 3058669 - RNA, 21 nt, Human
caucagcacgauuucuguuua

SEQ ID NO: 3058670 - RNA, 22 nt, Human
caguuauuauauuuacaaaugg

SEQ ID NO: 3058671 - RNA, 17 nt, Human
caguuauuauauuuaca

SEQ ID NO: 3058672 - RNA, 21 nt, Human
caguuauuauauuuacaaaug

SEQ ID NO: 3058673 - RNA, 13 nt, Human
caguuauggcuau

SEQ ID NO: 3058674 - RNA, 20 nt, Human
caguuauggcuauaggugcu

SEQ ID NO: 3058675 - RNA, 19 nt, Human
caguuauggcuauaggugc

SEQ ID NO: 3058676 - RNA, 19 nt, Human
caguggugcgaucuggguu

SEQ ID NO: 3058677 - RNA, 14 nt, Human
caguuacucagaau

SEQ ID NO: 3058678 - RNA, 21 nt, Human
cagugguaugaucacggcuca

SEQ ID NO: 3058679 - RNA, 20 nt, Human
caguuacucagaauucucua

SEQ ID NO: 3058680 - RNA, 23 nt, Human
cagucugauucccaagcucugcu

SEQ ID NO: 3058681 - RNA, 22 nt, Human
cagugauuaccagggacugagg

SEQ ID NO: 3058682 - RNA, 22 nt, Human
cagugcccacaggaucagucug

SEQ ID NO: 3058683 - RNA, 18 nt, Human
cagugcccacaggaucag

SEQ ID NO: 3058684 - RNA, 21 nt, Human
cagugcccacaggaucagucu

SEQ ID NO: 3058685 - RNA, 20 nt, Human
cagugguaugaucacggcuc

SEQ ID NO: 3058686 - RNA, 18 nt, Human
cagugggagcugccuguu

SEQ ID NO: 3058687 - RNA, 17 nt, Human
cagugggagcugccugu

SEQ ID NO: 3058688 - RNA, 15 nt, Human
cagugggagcugccu

SEQ ID NO: 3058689 - RNA, 16 nt, Human
cagugggagcugccug

SEQ ID NO: 3058690 - RNA, 22 nt, Human
cagucugauucccaagcucugc

SEQ ID NO: 3058691 - RNA, 21 nt, Human
cagucugauucccaagcucug

SEQ ID NO: 3058692 - RNA, 21 nt, Human
caugaauauuuaguguucaua

SEQ ID NO: 3058693 - RNA, 16 nt, Human
caugaauuugugaagg

SEQ ID NO: 3058694 - RNA, 13 nt, Human
caugacaaagacu

SEQ ID NO: 3058695 - RNA, 12 nt, Human
caugcaagguca

SEQ ID NO: 3058696 - RNA, 21 nt, Human
cauggccucuucagaucucua

SEQ ID NO: 3058697 - RNA, 18 nt, Human
caugggaaaggggaaguu

SEQ ID NO: 3058698 - RNA, 14 nt, Human
caugcuccuggccc

SEQ ID NO: 3058699 - RNA, 16 nt, Human
caugcuccuggcccac

SEQ ID NO: 3058700 - RNA, 17 nt, Human
caugcuccuggcccacu

SEQ ID NO: 3058701 - RNA, 17 nt, Human
cauguuacauaagauaa

SEQ ID NO: 3058702 - RNA, 16 nt, Human
cauguuacauaagaua

SEQ ID NO: 3058703 - RNA, 15 nt, Human
cauguccaagaagcc

SEQ ID NO: 3058704 - RNA, 16 nt, Human
cauguucuuaauucuu

SEQ ID NO: 3058705 - RNA, 13 nt, Human
cauguucuuaauu

SEQ ID NO: 3058706 - RNA, 21 nt, Human
cauguuacauaagauaaaugu

SEQ ID NO: 3058707 - RNA, 17 nt, Human
cauguuggccaggcugg

SEQ ID NO: 3058708 - RNA, 18 nt, Human
cauguuggccaggcuggu

SEQ ID NO: 3058709 - RNA, 18 nt, Human
cauguucuuaauucuuag

SEQ ID NO: 3058710 - RNA, 19 nt, Human
cauuauauuuauuacugua

SEQ ID NO: 3058711 - RNA, 20 nt, Human
cauucuccuuguguuacuaa

SEQ ID NO: 3058712 - RNA, 17 nt, Human
cauucuccaccugccag

SEQ ID NO: 3058713 - RNA, 18 nt, Human
cauucuccaccugccagg

SEQ ID NO: 3058714 - RNA, 19 nt, Human
cauucuccaccugccaggg

SEQ ID NO: 3058715 - RNA, 21 nt, Human
cauucuccaccugccagggac

SEQ ID NO: 3058716 - RNA, 19 nt, Human
ccaauucgaacuuuuucca

SEQ ID NO: 3058717 - RNA, 22 nt, Human
ccaauuauaugagacguuuuug

SEQ ID NO: 3058718 - RNA, 23 nt, Human
ccaauggacuaacuugucuuugg

SEQ ID NO: 3058719 - RNA, 15 nt, Human
ccaacuauggccugu

SEQ ID NO: 3058720 - RNA, 14 nt, Human
ccaacuauggccug

SEQ ID NO: 3058721 - RNA, 16 nt, Human
ccaacuauggccugug

SEQ ID NO: 3058722 - RNA, 13 nt, Human
ccaacucacccca

SEQ ID NO: 3058723 - RNA, 23 nt, Human
ccaaaucagcugcuacuacuccu

SEQ ID NO: 3058724 - RNA, 15 nt, Human
ccaaaucagcugcua

SEQ ID NO: 3058725 - RNA, 21 nt, Human
ccaacucaccccagccccaaa

SEQ ID NO: 3058726 - RNA, 21 nt, Human
ccaacuccagaaagugacaag

SEQ ID NO: 3058727 - RNA, 15 nt, Human
ccaagcucugcuccu

SEQ ID NO: 3058728 - RNA, 14 nt, Human
ccaagcucugcucc

SEQ ID NO: 3058729 - RNA, 16 nt, Human
ccaagcucugcuccuc

SEQ ID NO: 3058730 - RNA, 22 nt, Human
ccaaaguacacuguuucaaacu

SEQ ID NO: 3058731 - RNA, 16 nt, Human
cauuggagauguuuag

SEQ ID NO: 3058732 - RNA, 15 nt, Human
cauuggggcucccag

SEQ ID NO: 3058733 - RNA, 16 nt, Human
cauuggggcucccagc

SEQ ID NO: 3058734 - RNA, 16 nt, Human
cauuuaggugaggaag

SEQ ID NO: 3058735 - RNA, 22 nt, Human
cauuggggcucccagccaggcc

SEQ ID NO: 3058736 - RNA, 17 nt, Human
cauuggggcucccagcc

SEQ ID NO: 3058737 - RNA, 18 nt, Human
cauuggggcucccagcca

SEQ ID NO: 3058738 - RNA, 19 nt, Human
cauuggggcucccagccag

SEQ ID NO: 3058739 - RNA, 21 nt, Human
cauuggggcucccagccaggc

SEQ ID NO: 3058740 - RNA, 18 nt, Human
cauuuaggugaggaagca

SEQ ID NO: 3058741 - RNA, 22 nt, Human
cauuuuuuuuaagaaaaaggau

SEQ ID NO: 3058742 - RNA, 23 nt, Human
cauuuuuuuuaagaaaaaggaug

SEQ ID NO: 3058743 - RNA, 20 nt, Human
cauuuguguugaagagguuu

SEQ ID NO: 3058744 - RNA, 14 nt, Human
cauuuguauaaaau

SEQ ID NO: 3058745 - RNA, 16 nt, Human
cauuuguauaaaauaa

SEQ ID NO: 3058746 - RNA, 14 nt, Human
ccaaaaggcagaag

SEQ ID NO: 3058747 - RNA, 13 nt, Human
cagauuuaugcau

SEQ ID NO: 3058748 - RNA, 20 nt, Human
cagauuucacucuccuuggu

SEQ ID NO: 3058749 - RNA, 20 nt, Human
cagauugcaacaggcugggc

SEQ ID NO: 3058750 - RNA, 19 nt, Human
cagauugcaacaggcuggg

SEQ ID NO: 3058751 - RNA, 19 nt, Human
cagcaccaucucuccuccu

SEQ ID NO: 3058752 - RNA, 17 nt, Human
cagcaccaucucuccuc

SEQ ID NO: 3058753 - RNA, 19 nt, Human
cagauuucacucuccuugg

SEQ ID NO: 3058754 - RNA, 18 nt, Human
cagauugcaacaggcugg

SEQ ID NO: 3058755 - RNA, 20 nt, Human
cagcacgauuucuguuuaga

SEQ ID NO: 3058756 - RNA, 15 nt, Human
cagcacgauuucugu

SEQ ID NO: 3058757 - RNA, 14 nt, Human
cagcacgauuucug

SEQ ID NO: 3058758 - RNA, 14 nt, Human
cagccagacuggca

SEQ ID NO: 3058759 - RNA, 22 nt, Human
cagccaggccacaagacccuug

SEQ ID NO: 3058760 - RNA, 12 nt, Human
cagccaggcccu

SEQ ID NO: 3058761 - RNA, 18 nt, Human
cagccagacuggcacagu

SEQ ID NO: 3058762 - RNA, 15 nt, Human
cagccagacuggcac

SEQ ID NO: 3058763 - RNA, 12 nt, Human
cagagagggugg

SEQ ID NO: 3058764 - RNA, 17 nt, Human
cagagaggguggugacc

SEQ ID NO: 3058765 - RNA, 22 nt, Human
cagagaggguggugaccucugc

SEQ ID NO: 3058766 - RNA, 20 nt, Human
cagagaggguggugaccucu

SEQ ID NO: 3058767 - RNA, 23 nt, Human
cagagacuccugcaggcagccag

SEQ ID NO: 3058768 - RNA, 17 nt, Human
cagaggaaagcaaagga

SEQ ID NO: 3058769 - RNA, 19 nt, Human
cagaggaaagcaaaggaga

SEQ ID NO: 3058770 - RNA, 13 nt, Human
cagaggggguggc

SEQ ID NO: 3058771 - RNA, 13 nt, Human
cagagcugccacc

SEQ ID NO: 3058772 - RNA, 20 nt, Human
cagagagguuaaggugggua

SEQ ID NO: 3058773 - RNA, 23 nt, Human
cagagaggguggugaccucugcc

SEQ ID NO: 3058774 - RNA, 23 nt, Human
cagagagggugggagugggccca

SEQ ID NO: 3058775 - RNA, 14 nt, Human
cagaggggguggcc

SEQ ID NO: 3058776 - RNA, 16 nt, Human
cagaggggguggccuc

SEQ ID NO: 3058777 - RNA, 19 nt, Human
cagauacuuggggggcuga

SEQ ID NO: 3058778 - RNA, 19 nt, Human
cagauagauauaugcucug

SEQ ID NO: 3058779 - RNA, 14 nt, Human
cagauaugauucaa

SEQ ID NO: 3058780 - RNA, 13 nt, Human
cagacagcugccu

SEQ ID NO: 3058781 - RNA, 14 nt, Human
cagacagcugccug

SEQ ID NO: 3058782 - RNA, 13 nt, Human
cagacaggaccag

SEQ ID NO: 3058783 - RNA, 15 nt, Human
cagacaggaccaggg

SEQ ID NO: 3058784 - RNA, 16 nt, Human
cagacaggaccaggga

SEQ ID NO: 3058785 - RNA, 15 nt, Human
cagacagcugccugg

SEQ ID NO: 3058786 - RNA, 16 nt, Human
cagacagcugccuggg

SEQ ID NO: 3058787 - RNA, 17 nt, Human
cagacagcugccuggga

SEQ ID NO: 3058788 - RNA, 18 nt, Human
cagacagcugccugggau

SEQ ID NO: 3058789 - RNA, 21 nt, Human
cagacaggcaagcaccuccug

SEQ ID NO: 3058790 - RNA, 20 nt, Human
cagacaggcaagcaccuccu

SEQ ID NO: 3058791 - RNA, 18 nt, Human
cagacaggcaagcaccuc

SEQ ID NO: 3058792 - RNA, 13 nt, Human
cagacaggcaagc

SEQ ID NO: 3058793 - RNA, 17 nt, Human
cagacaggaccagggau

SEQ ID NO: 3058794 - RNA, 24 nt, Human
cagacaggaccagggauuuccaug

SEQ ID NO: 3058795 - RNA, 11 nt, Human
cagacaggcaa

SEQ ID NO: 3058796 - RNA, 23 nt, Human
cagacaggcaagcaccuccugcc

SEQ ID NO: 3058797 - RNA, 22 nt, Human
cagacaggcaagcaccuccugc

SEQ ID NO: 3058798 - RNA, 17 nt, Human
cagacucuacagaggcc

SEQ ID NO: 3058799 - RNA, 21 nt, Human
cagacucuacagaggccaugg

SEQ ID NO: 3058800 - RNA, 20 nt, Human
cagacucuacagaggccaug

SEQ ID NO: 3058801 - RNA, 19 nt, Human
cagacucuacagaggccau

SEQ ID NO: 3058802 - RNA, 18 nt, Human
cagacucuacagaggcca

SEQ ID NO: 3058803 - RNA, 23 nt, Human
cagacucuacagaggccaugggc

SEQ ID NO: 3058804 - RNA, 18 nt, Human
cagacuggaagcacagcu

SEQ ID NO: 3058805 - RNA, 17 nt, Human
cagacuggaagcacagc

SEQ ID NO: 3058806 - RNA, 16 nt, Human
cagacuggaagcacag

SEQ ID NO: 3058807 - RNA, 14 nt, Human
cagacuggaagcac

SEQ ID NO: 3058808 - RNA, 13 nt, Human
cagacuggaagca

SEQ ID NO: 3058809 - RNA, 21 nt, Human
cagacuggaagcacagcuuca

SEQ ID NO: 3058810 - RNA, 20 nt, Human
cagacuggaagcacagcuuc

SEQ ID NO: 3058811 - RNA, 18 nt, Human
cagacuggcacaguuuuc

SEQ ID NO: 3058812 - RNA, 17 nt, Human
cagacuggcacaguuuu

SEQ ID NO: 3058813 - RNA, 19 nt, Human
cagacuggauaguccgucu

SEQ ID NO: 3058814 - RNA, 23 nt, Human
cagacuggcacaguuuucugaga

SEQ ID NO: 3058815 - RNA, 22 nt, Human
cagacuggcacaguuuucugag

SEQ ID NO: 3058816 - RNA, 12 nt, Human
caggccuccuac

SEQ ID NO: 3058817 - RNA, 14 nt, Human
caggccuccuacag

SEQ ID NO: 3058818 - RNA, 21 nt, Human
caggcugggagagccuuccag

SEQ ID NO: 3058819 - RNA, 20 nt, Human
caggcugggagagccuucca

SEQ ID NO: 3058820 - RNA, 11 nt, Human
caggcuacugu

SEQ ID NO: 3058821 - RNA, 14 nt, Human
caggggaaaagagg

SEQ ID NO: 3058822 - RNA, 16 nt, Human
caggggaaaagaggag

SEQ ID NO: 3058823 - RNA, 22 nt, Human
caggcugggagagccuuccagg

SEQ ID NO: 3058824 - RNA, 23 nt, Human
caggcugggagagccuuccaggg

SEQ ID NO: 3058825 - RNA, 21 nt, Human
caggaccagggauuuccauga

SEQ ID NO: 3058826 - RNA, 16 nt, Human
caggaccucaggugag

SEQ ID NO: 3058827 - RNA, 23 nt, Human
caggaccucaggugagaagcaga

SEQ ID NO: 3058828 - RNA, 16 nt, Human
caggcaaugcuggcug

SEQ ID NO: 3058829 - RNA, 15 nt, Human
caggcaaugcuggcu

SEQ ID NO: 3058830 - RNA, 14 nt, Human
caggcaaugcuggc

SEQ ID NO: 3058831 - RNA, 18 nt, Human
caggaggccagccuugac

SEQ ID NO: 3058832 - RNA, 19 nt, Human
caggaggccagccuugacc

SEQ ID NO: 3058833 - RNA, 22 nt, Human
caggaggccagccuugaccauu

SEQ ID NO: 3058834 - RNA, 19 nt, Human
caggaggaucacuugaguc

SEQ ID NO: 3058835 - RNA, 11 nt, Human
caggccaggcc

SEQ ID NO: 3058836 - RNA, 12 nt, Human
caggccaggccc

SEQ ID NO: 3058837 - RNA, 16 nt, Human
caggaaaggcuccagg

SEQ ID NO: 3058838 - RNA, 17 nt, Human
caggaaaggcuccagga

SEQ ID NO: 3058839 - RNA, 16 nt, Human
caggaaagagaacuuc

SEQ ID NO: 3058840 - RNA, 19 nt, Human
caggaaaggcuccaggagc

SEQ ID NO: 3058841 - RNA, 20 nt, Human
caggaaaggcuccaggagca

SEQ ID NO: 3058842 - RNA, 17 nt, Human
cagcuuauucacaagac

SEQ ID NO: 3058843 - RNA, 20 nt, Human
cagcuuauugucuagugaaa

SEQ ID NO: 3058844 - RNA, 20 nt, Human
cagcuguaugauucccagcc

SEQ ID NO: 3058845 - RNA, 14 nt, Human
cagcuuauugucua

SEQ ID NO: 3058846 - RNA, 21 nt, Human
cagcugacuuuucuguccgag

SEQ ID NO: 3058847 - RNA, 19 nt, Human
cagcuguaugauucccagc

SEQ ID NO: 3058848 - RNA, 15 nt, Human
cagcuaacauggaag

SEQ ID NO: 3058849 - RNA, 19 nt, Human
cagcguuucuaugacacau

SEQ ID NO: 3058850 - RNA, 20 nt, Human
cagcgcuggccgggaccccg

SEQ ID NO: 3058851 - RNA, 16 nt, Human
cagccugcuccagcug

SEQ ID NO: 3058852 - RNA, 17 nt, Human
cagccugcuccagcugu

SEQ ID NO: 3058853 - RNA, 19 nt, Human
cagccugcuccagcuguuc

SEQ ID NO: 3058854 - RNA, 15 nt, Human
cagccugcuccagcu

SEQ ID NO: 3058855 - RNA, 13 nt, Human
caacuauggccug

SEQ ID NO: 3058856 - RNA, 19 nt, Human
caacuauauuguuugcuaa

SEQ ID NO: 3058857 - RNA, 19 nt, Human
caacuaucucauuuccaag

SEQ ID NO: 3058858 - RNA, 16 nt, Human
caaccccuucgcuccu

SEQ ID NO: 3058859 - RNA, 14 nt, Human
caaccccuucgcuc

SEQ ID NO: 3058860 - RNA, 17 nt, Human
caaccccuucgcuccug

SEQ ID NO: 3058861 - RNA, 14 nt, Human
caacccccagccug

SEQ ID NO: 3058862 - RNA, 14 nt, Human
caacuauggccugu

SEQ ID NO: 3058863 - RNA, 15 nt, Human
caacuauuuuuccaa

SEQ ID NO: 3058864 - RNA, 12 nt, Human
caacuccagaaa

SEQ ID NO: 3058865 - RNA, 14 nt, Human
caagaagcccagga

SEQ ID NO: 3058866 - RNA, 15 nt, Human
caagaagcccaggaa

SEQ ID NO: 3058867 - RNA, 18 nt, Human
caagaagcccaggaaagg

SEQ ID NO: 3058868 - RNA, 17 nt, Human
caagaaggaugauucaa

SEQ ID NO: 3058869 - RNA, 19 nt, Human
caagcaaaugugaaucauu

SEQ ID NO: 3058870 - RNA, 17 nt, Human
caagcaaaugugaauca

SEQ ID NO: 3058871 - RNA, 15 nt, Human
caagcaaaugugaau

SEQ ID NO: 3058872 - RNA, 14 nt, Human
caagcaaguauuag

SEQ ID NO: 3058873 - RNA, 14 nt, Human
caagaccacguuuc

SEQ ID NO: 3058874 - RNA, 13 nt, Human
caagcaccuccug

SEQ ID NO: 3058875 - RNA, 20 nt, Human
caaggauugcuacuguccua

SEQ ID NO: 3058876 - RNA, 19 nt, Human
caaggauugcuacuguccu

SEQ ID NO: 3058877 - RNA, 14 nt, Human
caaggcaaggcugu

SEQ ID NO: 3058878 - RNA, 22 nt, Human
caaguauuauaccuuuuuuaga

SEQ ID NO: 3058879 - RNA, 17 nt, Human
caaguauuauaccuuuu

SEQ ID NO: 3058880 - RNA, 13 nt, Human
caaguauuauacc

SEQ ID NO: 3058881 - RNA, 17 nt, Human
caagcuccaagcuccca

SEQ ID NO: 3058882 - RNA, 18 nt, Human
caagcuccaagcucccag

SEQ ID NO: 3058883 - RNA, 19 nt, Human
caagcuccaagcucccagg

SEQ ID NO: 3058884 - RNA, 21 nt, Human
caagcuccaagcucccaggca

SEQ ID NO: 3058885 - RNA, 12 nt, Human
caagcucccagg

SEQ ID NO: 3058886 - RNA, 14 nt, Human
caagcucccaggca

SEQ ID NO: 3058887 - RNA, 15 nt, Human
caagcucccaggcau

SEQ ID NO: 3058888 - RNA, 17 nt, Human
caagcucccaggcauuc

SEQ ID NO: 3058889 - RNA, 16 nt, Human
caagcucugcuccucu

SEQ ID NO: 3058890 - RNA, 15 nt, Human
caagcucugcuccuc

SEQ ID NO: 3058891 - RNA, 20 nt, Human
caaguuauuuuuaauuuggu

SEQ ID NO: 3058892 - RNA, 21 nt, Human
caauauuucagauaaucacaa

SEQ ID NO: 3058893 - RNA, 14 nt, Human
caaucaaaucugcu

SEQ ID NO: 3058894 - RNA, 17 nt, Human
caaucagccuaguugau

SEQ ID NO: 3058895 - RNA, 15 nt, Human
caauggcagccuugg

SEQ ID NO: 3058896 - RNA, 14 nt, Human
caauggcagccuug

SEQ ID NO: 3058897 - RNA, 13 nt, Human
caauggcagccuu

SEQ ID NO: 3058898 - RNA, 13 nt, Human
caauuuauuaugg

SEQ ID NO: 3058899 - RNA, 20 nt, Human
caauuuauuauggcacauca

SEQ ID NO: 3058900 - RNA, 17 nt, Human
cacccuggggagaaagu

SEQ ID NO: 3058901 - RNA, 18 nt, Human
caccugccccucaacucu

SEQ ID NO: 3058902 - RNA, 21 nt, Human
caccugccccucaacucuccu

SEQ ID NO: 3058903 - RNA, 11 nt, Human
caccugccagg

SEQ ID NO: 3058904 - RNA, 12 nt, Human
caccugccaggg

SEQ ID NO: 3058905 - RNA, 12 nt, Human
cacccuccuuuc

SEQ ID NO: 3058906 - RNA, 12 nt, Human
cacccugcucuc

SEQ ID NO: 3058907 - RNA, 17 nt, Human
caccugcggugcuaucu

SEQ ID NO: 3058908 - RNA, 19 nt, Human
caccugcggugcuaucucc

SEQ ID NO: 3058909 - RNA, 16 nt, Human
caccugcggugcuauc

SEQ ID NO: 3058910 - RNA, 15 nt, Human
cacgcuggagugcag

SEQ ID NO: 3058911 - RNA, 20 nt, Human
cacgcuggagugcagugagc

SEQ ID NO: 3058912 - RNA, 18 nt, Human
cacgcuggagugcaguga

SEQ ID NO: 3058913 - RNA, 17 nt, Human
cacgcuggagugcagug

SEQ ID NO: 3058914 - RNA, 16 nt, Human
cacgcuggagugcagu

SEQ ID NO: 3058915 - RNA, 21 nt, Human
cacgcuggagugcagugagcc

SEQ ID NO: 3058916 - RNA, 14 nt, Human
cacuacauucuguu

SEQ ID NO: 3058917 - RNA, 13 nt, Human
cacuacauucugu

SEQ ID NO: 3058918 - RNA, 21 nt, Human
cacuacauuauaaaugucucu

SEQ ID NO: 3058919 - RNA, 16 nt, Human
cacggaagagccuugc

SEQ ID NO: 3058920 - RNA, 22 nt, Human
cacggaagagccuugcggaagg

SEQ ID NO: 3058921 - RNA, 15 nt, Human
cacuacauucuguua

SEQ ID NO: 3058922 - RNA, 11 nt, Human
cacugaagaag

SEQ ID NO: 3058923 - RNA, 23 nt, Human
cacugaagaagcaccaaucauga

SEQ ID NO: 3058924 - RNA, 16 nt, Human
cacuccagugagacag

SEQ ID NO: 3058925 - RNA, 21 nt, Human
cacuccagugagacagcucug

SEQ ID NO: 3058926 - RNA, 22 nt, Human
cacaucuugcucugcugacaga

SEQ ID NO: 3058927 - RNA, 21 nt, Human
cacaucuugcucugcugacag

SEQ ID NO: 3058928 - RNA, 20 nt, Human
cacaucuugcucugcugaca

SEQ ID NO: 3058929 - RNA, 15 nt, Human
cacaucuugcucugc

SEQ ID NO: 3058930 - RNA, 14 nt, Human
cacaucuugcucug

SEQ ID NO: 3058931 - RNA, 13 nt, Human
cacaucuugcucu

SEQ ID NO: 3058932 - RNA, 23 nt, Human
cacaucagcuugcccuguuaaaa

SEQ ID NO: 3058933 - RNA, 13 nt, Human
cacaucagcuugc

SEQ ID NO: 3058934 - RNA, 19 nt, Human
caccagcccuuagcaggga

SEQ ID NO: 3058935 - RNA, 16 nt, Human
caccagccccagugcc

SEQ ID NO: 3058936 - RNA, 22 nt, Human
caccagccccagugcccacagg

SEQ ID NO: 3058937 - RNA, 21 nt, Human
caccagccccagugcccacag

SEQ ID NO: 3058938 - RNA, 18 nt, Human
caccagccccagugccca

SEQ ID NO: 3058939 - RNA, 17 nt, Human
caccagccccagugccc

SEQ ID NO: 3058940 - RNA, 18 nt, Human
cacauuuauucugcucac

SEQ ID NO: 3058941 - RNA, 17 nt, Human
cacauuuauucugcuca

SEQ ID NO: 3058942 - RNA, 19 nt, Human
cacaucuugcucugcugac

SEQ ID NO: 3058943 - RNA, 23 nt, Human
cacaucuugcucugcugacagac

SEQ ID NO: 3058944 - RNA, 12 nt, Human
cacccagcccac

SEQ ID NO: 3058945 - RNA, 19 nt, Human
cacccaguccugcccgcca

SEQ ID NO: 3058946 - RNA, 21 nt, Human
auuaugugccagauuuaugca

SEQ ID NO: 3058947 - RNA, 13 nt, Human
auuaugugccaga

SEQ ID NO: 3058948 - RNA, 14 nt, Human
auucauauuuacuu

SEQ ID NO: 3058949 - RNA, 15 nt, Human
auucucuuauccaac

SEQ ID NO: 3058950 - RNA, 14 nt, Human
auucucuuauccaa

SEQ ID NO: 3058951 - RNA, 12 nt, Human
auucucuuaucc

SEQ ID NO: 3058952 - RNA, 23 nt, Human
auucucuaguuugauuaaauucu

SEQ ID NO: 3058953 - RNA, 19 nt, Human
auucucuaguuugauuaaa

SEQ ID NO: 3058954 - RNA, 20 nt, Human
auucucuaguuugauuaaau

SEQ ID NO: 3058955 - RNA, 22 nt, Human
auugaggacacugauauggguc

SEQ ID NO: 3058956 - RNA, 20 nt, Human
auuaaauuuugaguucuaca

SEQ ID NO: 3058957 - RNA, 22 nt, Human
auuacaagcgugagccacugca

SEQ ID NO: 3058958 - RNA, 16 nt, Human
auugauaaguucauac

SEQ ID NO: 3058959 - RNA, 17 nt, Human
auugauaaguucauaca

SEQ ID NO: 3058960 - RNA, 18 nt, Human
auugauaaguucauacau

SEQ ID NO: 3058961 - RNA, 19 nt, Human
auugauaaguucauacauu

SEQ ID NO: 3058962 - RNA, 12 nt, Human
auugauaaguuc

SEQ ID NO: 3058963 - RNA, 15 nt, Human
auugauaaguucaua

SEQ ID NO: 3058964 - RNA, 16 nt, Human
auuucagcagcugcag

SEQ ID NO: 3058965 - RNA, 12 nt, Human
auuucacucucc

SEQ ID NO: 3058966 - RNA, 16 nt, Human
auuuauccucuguuga

SEQ ID NO: 3058967 - RNA, 12 nt, Human
auuuauccucug

SEQ ID NO: 3058968 - RNA, 22 nt, Human
auuuaauagguuuggacaaaau

SEQ ID NO: 3058969 - RNA, 21 nt, Human
auuucuguuuagauaauacac

SEQ ID NO: 3058970 - RNA, 19 nt, Human
auuucuguuuagauaauac

SEQ ID NO: 3058971 - RNA, 20 nt, Human
auuucuguuuagauaauaca

SEQ ID NO: 3058972 - RNA, 19 nt, Human
auuuguucuauagcuuuuc

SEQ ID NO: 3058973 - RNA, 14 nt, Human
auuuguuauaauga

SEQ ID NO: 3058974 - RNA, 18 nt, Human
auuuguguugaagagguu

SEQ ID NO: 3058975 - RNA, 22 nt, Human
auuuguguugaagagguuuuaa

SEQ ID NO: 3058976 - RNA, 14 nt, Human
auuuguguugaaga

SEQ ID NO: 3058977 - RNA, 15 nt, Human
auuuguguugaagag

SEQ ID NO: 3058978 - RNA, 15 nt, Human
auuuugaaaaacugc

SEQ ID NO: 3058979 - RNA, 13 nt, Human
auuuugaaaaacu

SEQ ID NO: 3058980 - RNA, 17 nt, Human
auuuucuauaauuuaaa

SEQ ID NO: 3058981 - RNA, 18 nt, Human
auuuucuauaauuuaaau

SEQ ID NO: 3058982 - RNA, 19 nt, Human
auuuucuauaauuuaaaua

SEQ ID NO: 3058983 - RNA, 15 nt, Human
auuuuuuucugaauu

SEQ ID NO: 3058984 - RNA, 16 nt, Human
auuuuuuucugaaauu

SEQ ID NO: 3058985 - RNA, 17 nt, Human
auuuuuuucugaaauuu

SEQ ID NO: 3058986 - RNA, 16 nt, Human
auuuuuauuaaauuau

SEQ ID NO: 3058987 - RNA, 19 nt, Human
auuuuuauauuugaaauau

SEQ ID NO: 3058988 - RNA, 22 nt, Human
auuuuguuuuugucuuaaaaag

SEQ ID NO: 3058989 - RNA, 21 nt, Human
auuuuguuuuugucuuaaaaa

SEQ ID NO: 3058990 - RNA, 16 nt, Human
auuuuuauauuugaaa

SEQ ID NO: 3058991 - RNA, 13 nt, Human
caaaagcauguga

SEQ ID NO: 3058992 - RNA, 19 nt, Human
caaaagcaucuaugugaga

SEQ ID NO: 3058993 - RNA, 21 nt, Human
caaaagguauuuuaaucacca

SEQ ID NO: 3058994 - RNA, 20 nt, Human
caaaagguuaauaaaguaau

SEQ ID NO: 3058995 - RNA, 17 nt, Human
caaacauauauaacaau

SEQ ID NO: 3058996 - RNA, 17 nt, Human
caaaccaucauugaaau

SEQ ID NO: 3058997 - RNA, 14 nt, Human
caaaccaucauuga

SEQ ID NO: 3058998 - RNA, 16 nt, Human
caaaccaucauugaaa

SEQ ID NO: 3058999 - RNA, 21 nt, Human
ccacuuuuguucuugguuugu

SEQ ID NO: 3059000 - RNA, 15 nt, Human
ccacuuuuguucuug

SEQ ID NO: 3059001 - RNA, 14 nt, Human
ccacuuuuguucuu

SEQ ID NO: 3059002 - RNA, 16 nt, Human
ccagacccggcugcgu

SEQ ID NO: 3059003 - RNA, 17 nt, Human
ccagacccggcugcgug

SEQ ID NO: 3059004 - RNA, 20 nt, Human
ccacuuucuagccagaggag

SEQ ID NO: 3059005 - RNA, 18 nt, Human
ccacuuucuagccagagg

SEQ ID NO: 3059006 - RNA, 19 nt, Human
ccacuuucuagccagagga

SEQ ID NO: 3059007 - RNA, 13 nt, Human
ccacuuucuagcc

SEQ ID NO: 3059008 - RNA, 20 nt, Human
ccacuuggucugugagaugc

SEQ ID NO: 3059009 - RNA, 22 nt, Human
ccacuuggucugugagaugcua

SEQ ID NO: 3059010 - RNA, 15 nt, Human
ccacuuggucuguga

SEQ ID NO: 3059011 - RNA, 16 nt, Human
ccacuuggucugugag

SEQ ID NO: 3059012 - RNA, 17 nt, Human
ccacuuggucugugaga

SEQ ID NO: 3059013 - RNA, 19 nt, Human
ccacuuggucugugagaug

SEQ ID NO: 3059014 - RNA, 19 nt, Human
ccacugcaccgggccacag

SEQ ID NO: 3059015 - RNA, 17 nt, Human
ccacugcaccgggccac

SEQ ID NO: 3059016 - RNA, 14 nt, Human
ccacugcaccgggc

SEQ ID NO: 3059017 - RNA, 13 nt, Human
ccacugcaccggg

SEQ ID NO: 3059018 - RNA, 20 nt, Human
ccacugcacuauagccuagg

SEQ ID NO: 3059019 - RNA, 19 nt, Human
ccacugcacuauagccuag

SEQ ID NO: 3059020 - RNA, 12 nt, Human
ccacuuggucug

SEQ ID NO: 3059021 - RNA, 16 nt, Human
ccagagacacaagccu

SEQ ID NO: 3059022 - RNA, 18 nt, Human
ccagagacacaagccuuc

SEQ ID NO: 3059023 - RNA, 14 nt, Human
ccagaugcaccagc

SEQ ID NO: 3059024 - RNA, 13 nt, Human
ccagaugcaccag

SEQ ID NO: 3059025 - RNA, 20 nt, Human
ccagagggccugcaagggag

SEQ ID NO: 3059026 - RNA, 22 nt, Human
ccagcagaaaugccuuacccuc

SEQ ID NO: 3059027 - RNA, 17 nt, Human
ccagcagaaaugccuua

SEQ ID NO: 3059028 - RNA, 16 nt, Human
ccagcagaaaugccuu

SEQ ID NO: 3059029 - RNA, 11 nt, Human
ccagcagccug

SEQ ID NO: 3059030 - RNA, 12 nt, Human
ccagcagccugg

SEQ ID NO: 3059031 - RNA, 12 nt, Human
ccagcagaaaug

SEQ ID NO: 3059032 - RNA, 13 nt, Human
ccagccccuggau

SEQ ID NO: 3059033 - RNA, 14 nt, Human
ccagccccuggaug

SEQ ID NO: 3059034 - RNA, 15 nt, Human
ccagccccuggaugc

SEQ ID NO: 3059035 - RNA, 13 nt, Human
ccagcagccugga

SEQ ID NO: 3059036 - RNA, 23 nt, Human
ccagccccauccucuguacagag

SEQ ID NO: 3059037 - RNA, 18 nt, Human
ccagccccauccucugua

SEQ ID NO: 3059038 - RNA, 15 nt, Human
ccagccccuucugac

SEQ ID NO: 3059039 - RNA, 16 nt, Human
ccagccccuucugacc

SEQ ID NO: 3059040 - RNA, 17 nt, Human
ccagccccuucugaccc

SEQ ID NO: 3059041 - RNA, 18 nt, Human
ccagccccuucugaccca

SEQ ID NO: 3059042 - RNA, 21 nt, Human
ccagcgagcccugguggcagu

SEQ ID NO: 3059043 - RNA, 20 nt, Human
ccaggaaaggcuccaggagc

SEQ ID NO: 3059044 - RNA, 18 nt, Human
ccaggaaaggcuccagga

SEQ ID NO: 3059045 - RNA, 19 nt, Human
ccaggaaaggcuccaggag

SEQ ID NO: 3059046 - RNA, 17 nt, Human
ccaggaaaggcuccagg

SEQ ID NO: 3059047 - RNA, 19 nt, Human
ccaggggugggacacccug

SEQ ID NO: 3059048 - RNA, 15 nt, Human
ccaggggccaugaau

SEQ ID NO: 3059049 - RNA, 20 nt, Human
ccaggggugggacacccugu

SEQ ID NO: 3059050 - RNA, 21 nt, Human
ccaggggugggacacccugug

SEQ ID NO: 3059051 - RNA, 22 nt, Human
ccaggggugggacacccuguga

SEQ ID NO: 3059052 - RNA, 13 nt, Human
ccaguaucuugaa

SEQ ID NO: 3059053 - RNA, 19 nt, Human
ccaguaucuugaagacuuu

SEQ ID NO: 3059054 - RNA, 22 nt, Human
ccaguaucuugaagacuuuucu

SEQ ID NO: 3059055 - RNA, 16 nt, Human
ccagucaccccggcca

SEQ ID NO: 3059056 - RNA, 17 nt, Human
ccagucaccccggccac

SEQ ID NO: 3059057 - RNA, 18 nt, Human
ccagucaccccggccacc

SEQ ID NO: 3059058 - RNA, 16 nt, Human
ccaguccugcccgcca

SEQ ID NO: 3059059 - RNA, 13 nt, Human
ccagucaccccgg

SEQ ID NO: 3059060 - RNA, 22 nt, Human
ccauuggggcucccagccaggc

SEQ ID NO: 3059061 - RNA, 20 nt, Human
ccauuggggcucccagccag

SEQ ID NO: 3059062 - RNA, 21 nt, Human
ccauuggggcucccagccagg

SEQ ID NO: 3059063 - RNA, 19 nt, Human
ccauuggggcucccagcca

SEQ ID NO: 3059064 - RNA, 22 nt, Human
ccauuguggucacaggaaguag

SEQ ID NO: 3059065 - RNA, 13 nt, Human
ccauuuaaagcuu

SEQ ID NO: 3059066 - RNA, 17 nt, Human
cccaagcucugcuccuc

SEQ ID NO: 3059067 - RNA, 15 nt, Human
cccaagcucugcucc

SEQ ID NO: 3059068 - RNA, 15 nt, Human
cccacccaagggccu

SEQ ID NO: 3059069 - RNA, 18 nt, Human
cccaccaucaugucuggc

SEQ ID NO: 3059070 - RNA, 19 nt, Human
cccacuguacuugcucuug

SEQ ID NO: 3059071 - RNA, 18 nt, Human
cccacuguacuugcucuu

SEQ ID NO: 3059072 - RNA, 23 nt, Human
cccacuguacuugcucuugaugc

SEQ ID NO: 3059073 - RNA, 15 nt, Human
cccaccgcagacagg

SEQ ID NO: 3059074 - RNA, 18 nt, Human
cccaccgcagacaggacc

SEQ ID NO: 3059075 - RNA, 18 nt, Human
ccaugggcacugugggua

SEQ ID NO: 3059076 - RNA, 16 nt, Human
ccaugaggaacaaggc

SEQ ID NO: 3059077 - RNA, 17 nt, Human
ccaugaggaacaaggca

SEQ ID NO: 3059078 - RNA, 18 nt, Human
ccaugaggaacaaggcaa

SEQ ID NO: 3059079 - RNA, 17 nt, Human
ccaugggccuccugugu

SEQ ID NO: 3059080 - RNA, 20 nt, Human
cccagcuggggccaggcugg

SEQ ID NO: 3059081 - RNA, 23 nt, Human
cccagccccaaaacucuccucug

SEQ ID NO: 3059082 - RNA, 21 nt, Human
cccagccccaaaacucuccuc

SEQ ID NO: 3059083 - RNA, 19 nt, Human
cccagcccacuucugccau

SEQ ID NO: 3059084 - RNA, 17 nt, Human
cccagcccacuucugcc

SEQ ID NO: 3059085 - RNA, 23 nt, Human
cccagcuggggccaggcuggguc

SEQ ID NO: 3059086 - RNA, 22 nt, Human
cccagcuggggccaggcugggu

SEQ ID NO: 3059087 - RNA, 18 nt, Human
cccaggcuggcgugcagu

SEQ ID NO: 3059088 - RNA, 20 nt, Human
cccaggcuggcgugcagugg

SEQ ID NO: 3059089 - RNA, 19 nt, Human
cccaggcuggcgugcagug

SEQ ID NO: 3059090 - RNA, 14 nt, Human
cccauccucuguac

SEQ ID NO: 3059091 - RNA, 16 nt, Human
cccagggcaucuggga

SEQ ID NO: 3059092 - RNA, 17 nt, Human
cccagggcaucugggag

SEQ ID NO: 3059093 - RNA, 15 nt, Human
cccauccucuguaca

SEQ ID NO: 3059094 - RNA, 19 nt, Human
cccauccucuguacagagc

SEQ ID NO: 3059095 - RNA, 15 nt, Human
ccccauuguggucac

SEQ ID NO: 3059096 - RNA, 14 nt, Human
cccccuuccaugga

SEQ ID NO: 3059097 - RNA, 20 nt, Human
cccccuguggaugcugcugc

SEQ ID NO: 3059098 - RNA, 12 nt, Human
ccccgcccaggc

SEQ ID NO: 3059099 - RNA, 13 nt, Human
ccccggccaccug

SEQ ID NO: 3059100 - RNA, 14 nt, Human
ccccggccaccugc

SEQ ID NO: 3059101 - RNA, 18 nt, Human
ccccggccaccugcggug

SEQ ID NO: 3059102 - RNA, 14 nt, Human
ccccgcccaggcuu

SEQ ID NO: 3059103 - RNA, 18 nt, Human
ccccaaaacucuccucug

SEQ ID NO: 3059104 - RNA, 20 nt, Human
ccccaaaacucuccucugcu

SEQ ID NO: 3059105 - RNA, 14 nt, Human
ccccagccccaucc

SEQ ID NO: 3059106 - RNA, 14 nt, Human
ccccagccccaaaa

SEQ ID NO: 3059107 - RNA, 21 nt, Human
ccccauucugccugcccaggc

SEQ ID NO: 3059108 - RNA, 10 nt, Human
ccccagcccc

SEQ ID NO: 3059109 - RNA, 12 nt, Human
ccccagccccaa

SEQ ID NO: 3059110 - RNA, 23 nt, Human
cccauucugccugcccaggcccc

SEQ ID NO: 3059111 - RNA, 12 nt, Human
cccugaaggccc

SEQ ID NO: 3059112 - RNA, 16 nt, Human
cccugaaagcccugag

SEQ ID NO: 3059113 - RNA, 13 nt, Human
cccugaaggcccc

SEQ ID NO: 3059114 - RNA, 14 nt, Human
cccugaaggccccg

SEQ ID NO: 3059115 - RNA, 16 nt, Human
cccugaaggccccgcc

SEQ ID NO: 3059116 - RNA, 19 nt, Human
cccugaaggccccgcccag

SEQ ID NO: 3059117 - RNA, 16 nt, Human
cccugacaacacucau

SEQ ID NO: 3059118 - RNA, 22 nt, Human
cccugacaacacucauugaccu

SEQ ID NO: 3059119 - RNA, 20 nt, Human
cccugaauuuaaauagcuuu

SEQ ID NO: 3059120 - RNA, 20 nt, Human
cccugaaggccccgcccagg

SEQ ID NO: 3059121 - RNA, 22 nt, Human
cccugaaggccccgcccaggcu

SEQ ID NO: 3059122 - RNA, 14 nt, Human
cccugacaacacuc

SEQ ID NO: 3059123 - RNA, 18 nt, Human
cccugaaagcccugagcu

SEQ ID NO: 3059124 - RNA, 13 nt, Human
cccucggagaaga

SEQ ID NO: 3059125 - RNA, 23 nt, Human
cccucgaggcggaucuuuggaca

SEQ ID NO: 3059126 - RNA, 22 nt, Human
cccucgaggcggaucuuuggac

SEQ ID NO: 3059127 - RNA, 16 nt, Human
cccugagcuuucugcu

SEQ ID NO: 3059128 - RNA, 20 nt, Human
cccugcccaccuggccucug

SEQ ID NO: 3059129 - RNA, 14 nt, Human
cccugagcaggauu

SEQ ID NO: 3059130 - RNA, 17 nt, Human
cccugcccggcugcgga

SEQ ID NO: 3059131 - RNA, 14 nt, Human
cccugcccggcugc

SEQ ID NO: 3059132 - RNA, 22 nt, Human
cccugcccaccuggccucugca

SEQ ID NO: 3059133 - RNA, 17 nt, Human
cccuggaugcagccuca

SEQ ID NO: 3059134 - RNA, 21 nt, Human
cccuggaugcagccucacagu

SEQ ID NO: 3059135 - RNA, 13 nt, Human
cccuggaugcagc

SEQ ID NO: 3059136 - RNA, 16 nt, Human
cccuggcacuggcaaa

SEQ ID NO: 3059137 - RNA, 13 nt, Human
cccuggcacuggc

SEQ ID NO: 3059138 - RNA, 23 nt, Human
ccgaaggugaggagcuugaaacc

SEQ ID NO: 3059139 - RNA, 16 nt, Human
ccgaauagcugggacu

SEQ ID NO: 3059140 - RNA, 17 nt, Human
ccgaccagacaccuuga

SEQ ID NO: 3059141 - RNA, 13 nt, Human
ccgaccagacacc

SEQ ID NO: 3059142 - RNA, 15 nt, Human
ccgcagacaggacca

SEQ ID NO: 3059143 - RNA, 16 nt, Human
ccgaaaacguggcugc

SEQ ID NO: 3059144 - RNA, 17 nt, Human
ccgaaaacguggcugcu

SEQ ID NO: 3059145 - RNA, 19 nt, Human
ccgaaagggacuuggaagc

SEQ ID NO: 3059146 - RNA, 15 nt, Human
cccuuccucuuucca

SEQ ID NO: 3059147 - RNA, 16 nt, Human
ccgcagacaggaccag

SEQ ID NO: 3059148 - RNA, 17 nt, Human
ccgcagacaggaccagg

SEQ ID NO: 3059149 - RNA, 12 nt, Human
ccgcccaaggcc

SEQ ID NO: 3059150 - RNA, 13 nt, Human
ccgcccaaggccu

SEQ ID NO: 3059151 - RNA, 14 nt, Human
ccgcccaaggccuu

SEQ ID NO: 3059152 - RNA, 17 nt, Human
ccgcccaaggccuuccc

SEQ ID NO: 3059153 - RNA, 12 nt, Human
ccgcccaggcuu

SEQ ID NO: 3059154 - RNA, 21 nt, Human
cccugugauggggcccugccu

SEQ ID NO: 3059155 - RNA, 22 nt, Human
cccugugauggggcccugccuc

SEQ ID NO: 3059156 - RNA, 23 nt, Human
cccugugauggggcccugccucc

SEQ ID NO: 3059157 - RNA, 17 nt, Human
ccgucuaccugaggggc

SEQ ID NO: 3059158 - RNA, 12 nt, Human
ccgugaggccag

SEQ ID NO: 3059159 - RNA, 13 nt, Human
ccgugaggccaga

SEQ ID NO: 3059160 - RNA, 14 nt, Human
ccgugaggccagag

SEQ ID NO: 3059161 - RNA, 16 nt, Human
ccgugaggccagagac

SEQ ID NO: 3059162 - RNA, 20 nt, Human
ccuaacgaaguauccuucag

SEQ ID NO: 3059163 - RNA, 15 nt, Human
ccuaacgaaguaucc

SEQ ID NO: 3059164 - RNA, 14 nt, Human
ccgucuaccugagg

SEQ ID NO: 3059165 - RNA, 15 nt, Human
ccgucuaccugaggg

SEQ ID NO: 3059166 - RNA, 14 nt, Human
ccggcuccaggcuc

SEQ ID NO: 3059167 - RNA, 13 nt, Human
ccggcuccaggcu

SEQ ID NO: 3059168 - RNA, 12 nt, Human
ccggcuccaggc

SEQ ID NO: 3059169 - RNA, 14 nt, Human
ccuaaucuucugaa

SEQ ID NO: 3059170 - RNA, 20 nt, Human
ccuagccugugccucuggga

SEQ ID NO: 3059171 - RNA, 17 nt, Human
ccuagcacuuugggagg

SEQ ID NO: 3059172 - RNA, 19 nt, Human
ccuagcauacguacacauu

SEQ ID NO: 3059173 - RNA, 16 nt, Human
ccggccaccugcggug

SEQ ID NO: 3059174 - RNA, 15 nt, Human
ccggccccugcuggu

SEQ ID NO: 3059175 - RNA, 17 nt, Human
ccggcccuccagagccc

SEQ ID NO: 3059176 - RNA, 13 nt, Human
ccggcccuccaga

SEQ ID NO: 3059177 - RNA, 16 nt, Human
ccggcccuccagagcc

SEQ ID NO: 3059178 - RNA, 18 nt, Human
ccggcaggguccuagaaa

SEQ ID NO: 3059179 - RNA, 17 nt, Human
ccucucugcaggucccu

SEQ ID NO: 3059180 - RNA, 16 nt, Human
ccucucugcagguccc

SEQ ID NO: 3059181 - RNA, 19 nt, Human
ccucucugcaggucccuaa

SEQ ID NO: 3059182 - RNA, 18 nt, Human
ccucucugcaggucccua

SEQ ID NO: 3059183 - RNA, 20 nt, Human
ccucugccugaagucacaca

SEQ ID NO: 3059184 - RNA, 11 nt, Human
ccucugccuga

SEQ ID NO: 3059185 - RNA, 23 nt, Human
ccucugccucugacacacagcuc

SEQ ID NO: 3059186 - RNA, 21 nt, Human
ccucugccucugacacacagc

SEQ ID NO: 3059187 - RNA, 20 nt, Human
ccucugccucugacacacag

SEQ ID NO: 3059188 - RNA, 19 nt, Human
ccuccuuugugaggaagcc

SEQ ID NO: 3059189 - RNA, 18 nt, Human
ccuccuuugugaggaagc

SEQ ID NO: 3059190 - RNA, 15 nt, Human
ccucgaacuggcugc

SEQ ID NO: 3059191 - RNA, 16 nt, Human
ccucgaacuggcugca

SEQ ID NO: 3059192 - RNA, 17 nt, Human
ccucccaacucacccca

SEQ ID NO: 3059193 - RNA, 20 nt, Human
ccucccaacucaccccagcc

SEQ ID NO: 3059194 - RNA, 21 nt, Human
ccucccaacucaccccagccc

SEQ ID NO: 3059195 - RNA, 17 nt, Human
ccucccaccucagccuc

SEQ ID NO: 3059196 - RNA, 11 nt, Human
ccucaggcagg

SEQ ID NO: 3059197 - RNA, 17 nt, Human
ccugccucucugcaggu

SEQ ID NO: 3059198 - RNA, 23 nt, Human
ccugccuccuuugugaggaagcc

SEQ ID NO: 3059199 - RNA, 21 nt, Human
ccugccuccuuugugaggaag

SEQ ID NO: 3059200 - RNA, 22 nt, Human
ccugccuccuuugugaggaagc

SEQ ID NO: 3059201 - RNA, 13 nt, Human
ccugccuccuuug

SEQ ID NO: 3059202 - RNA, 15 nt, Human
ccugccuccuuugug

SEQ ID NO: 3059203 - RNA, 19 nt, Human
ccugccuccuuugugagga

SEQ ID NO: 3059204 - RNA, 20 nt, Human
ccugccuccuuugugaggaa

SEQ ID NO: 3059205 - RNA, 21 nt, Human
ccugccucucugcaggucccu

SEQ ID NO: 3059206 - RNA, 20 nt, Human
ccugccucucugcagguccc

SEQ ID NO: 3059207 - RNA, 15 nt, Human
ccugccucuucucua

SEQ ID NO: 3059208 - RNA, 12 nt, Human
ccugcugcaguu

SEQ ID NO: 3059209 - RNA, 16 nt, Human
ccugcugcaguugcca

SEQ ID NO: 3059210 - RNA, 11 nt, Human
ccugcugcagu

SEQ ID NO: 3059211 - RNA, 22 nt, Human
ccugcugcaguugccagucacc

SEQ ID NO: 3059212 - RNA, 21 nt, Human
ccugcugcaguugccagucac

SEQ ID NO: 3059213 - RNA, 15 nt, Human
ccugcaggcagccag

SEQ ID NO: 3059214 - RNA, 12 nt, Human
ccugcagagggc

SEQ ID NO: 3059215 - RNA, 16 nt, Human
ccugcaggcagccagg

SEQ ID NO: 3059216 - RNA, 17 nt, Human
ccugcaggcagccaggc

SEQ ID NO: 3059217 - RNA, 23 nt, Human
ccugcaggcagccaggccacaag

SEQ ID NO: 3059218 - RNA, 18 nt, Human
ccugcaggcagccaggcc

SEQ ID NO: 3059219 - RNA, 19 nt, Human
ccugcaggcagccaggcca

SEQ ID NO: 3059220 - RNA, 20 nt, Human
ccugcaggcagccaggccac

SEQ ID NO: 3059221 - RNA, 21 nt, Human
ccugcaggcagccaggccaca

SEQ ID NO: 3059222 - RNA, 16 nt, Human
ccugaggcugggcucc

SEQ ID NO: 3059223 - RNA, 17 nt, Human
ccugaggcugggcuccc

SEQ ID NO: 3059224 - RNA, 19 nt, Human
ccugaggcugggcucccuu

SEQ ID NO: 3059225 - RNA, 21 nt, Human
ccugaggcugggcucccuucc

SEQ ID NO: 3059226 - RNA, 16 nt, Human
ccugaggggccucuua

SEQ ID NO: 3059227 - RNA, 12 nt, Human
ccugaggggccu

SEQ ID NO: 3059228 - RNA, 16 nt, Human
ccucuuugagugaagc

SEQ ID NO: 3059229 - RNA, 19 nt, Human
ccucuuuggucuacacugu

SEQ ID NO: 3059230 - RNA, 23 nt, Human
cuaaaguaaaaacaaagaaauua

SEQ ID NO: 3059231 - RNA, 20 nt, Human
cuaacgaaguauccuucagc

SEQ ID NO: 3059232 - RNA, 14 nt, Human
cuaacuugucuuug

SEQ ID NO: 3059233 - RNA, 22 nt, Human
cuaacuugucuuuggacccuga

SEQ ID NO: 3059234 - RNA, 11 nt, Human
cuaaagcugcc

SEQ ID NO: 3059235 - RNA, 19 nt, Human
cgugaguccuggcauggga

SEQ ID NO: 3059236 - RNA, 18 nt, Human
cgugaguccuggcauggg

SEQ ID NO: 3059237 - RNA, 19 nt, Human
cguguuaugacuccagaau

SEQ ID NO: 3059238 - RNA, 15 nt, Human
cguguuaugacucca

SEQ ID NO: 3059239 - RNA, 12 nt, Human
cgugacaacacu

SEQ ID NO: 3059240 - RNA, 15 nt, Human
cgugacaacacuugu

SEQ ID NO: 3059241 - RNA, 14 nt, Human
cgugacaacacuug

SEQ ID NO: 3059242 - RNA, 20 nt, Human
cgugagccacugcaccgggc

SEQ ID NO: 3059243 - RNA, 15 nt, Human
cgugagccacugcac

SEQ ID NO: 3059244 - RNA, 14 nt, Human
cgugagccacugca

SEQ ID NO: 3059245 - RNA, 14 nt, Human
cgugaggccagaga

SEQ ID NO: 3059246 - RNA, 22 nt, Human
cgugagccacugcaccgggcca

SEQ ID NO: 3059247 - RNA, 19 nt, Human
cuacaaaaagcauaaaaau

SEQ ID NO: 3059248 - RNA, 20 nt, Human
cuacaaaaacacagcaaggg

SEQ ID NO: 3059249 - RNA, 14 nt, Human
cuaaguuuuuaugg

SEQ ID NO: 3059250 - RNA, 12 nt, Human
cgggcucugccu

SEQ ID NO: 3059251 - RNA, 19 nt, Human
cgggcucagcaaaagaugc

SEQ ID NO: 3059252 - RNA, 17 nt, Human
cgggccacagagaaagu

SEQ ID NO: 3059253 - RNA, 20 nt, Human
cgguggcucacgccuguaau

SEQ ID NO: 3059254 - RNA, 16 nt, Human
cguacacauuuuauuu

SEQ ID NO: 3059255 - RNA, 22 nt, Human
cguacacauuuuauuuuauuau

SEQ ID NO: 3059256 - RNA, 17 nt, Human
cggagacggagucccac

SEQ ID NO: 3059257 - RNA, 20 nt, Human
cggagacggagucccaccuu

SEQ ID NO: 3059258 - RNA, 15 nt, Human
cggagacggaguccc

SEQ ID NO: 3059259 - RNA, 22 nt, Human
cggagucccaccuuggcugcag

SEQ ID NO: 3059260 - RNA, 21 nt, Human
cggagucccaccuuggcugca

SEQ ID NO: 3059261 - RNA, 23 nt, Human
cggagucccaccuuggcugcagg

SEQ ID NO: 3059262 - RNA, 23 nt, Human
cgccaaggcugggggaagaagcu

SEQ ID NO: 3059263 - RNA, 23 nt, Human
cgagggggcugcucccaccuggc

SEQ ID NO: 3059264 - RNA, 15 nt, Human
cgagggggcugcucc

SEQ ID NO: 3059265 - RNA, 17 nt, Human
cgagggggcugcuccca

SEQ ID NO: 3059266 - RNA, 18 nt, Human
cgagggggcugcucccac

SEQ ID NO: 3059267 - RNA, 12 nt, Human
ccuuuucccaac

SEQ ID NO: 3059268 - RNA, 18 nt, Human
cgcuggagugcagugagc

SEQ ID NO: 3059269 - RNA, 17 nt, Human
cgcuggagugcagugag

SEQ ID NO: 3059270 - RNA, 19 nt, Human
cgcugccccuggcagcccc

SEQ ID NO: 3059271 - RNA, 20 nt, Human
cgcugccccuggcagccccu

SEQ ID NO: 3059272 - RNA, 14 nt, Human
ccuugcauaauggu

SEQ ID NO: 3059273 - RNA, 15 nt, Human
ccuuucaauaggaaa

SEQ ID NO: 3059274 - RNA, 17 nt, Human
ccuuucaauaggaaaaa

SEQ ID NO: 3059275 - RNA, 20 nt, Human
ccuucucuccagccccugga

SEQ ID NO: 3059276 - RNA, 16 nt, Human
ccuucucugaaggaca

SEQ ID NO: 3059277 - RNA, 14 nt, Human
ccuucucugaagga

SEQ ID NO: 3059278 - RNA, 21 nt, Human
ccuucucuccagccccuggau

SEQ ID NO: 3059279 - RNA, 23 nt, Human
ccuucucuccagccccuggaugc

SEQ ID NO: 3059280 - RNA, 13 nt, Human
ccuuccccuggca

SEQ ID NO: 3059281 - RNA, 21 nt, Human
ccuucuguccuacucuguguc

SEQ ID NO: 3059282 - RNA, 20 nt, Human
ccuucuguccuacucugugu

SEQ ID NO: 3059283 - RNA, 17 nt, Human
ccuucucuucacaguca

SEQ ID NO: 3059284 - RNA, 22 nt, Human
ccuucuguccuacucuguguca

SEQ ID NO: 3059285 - RNA, 13 nt, Human
ccuguucagcucc

SEQ ID NO: 3059286 - RNA, 12 nt, Human
ccuuauggaaca

SEQ ID NO: 3059287 - RNA, 22 nt, Human
ccuuauggaacacucugagacu

SEQ ID NO: 3059288 - RNA, 19 nt, Human
ccuuauggaacacucugag

SEQ ID NO: 3059289 - RNA, 20 nt, Human
ccuuauggaacacucugaga

SEQ ID NO: 3059290 - RNA, 14 nt, Human
ccuuauggaacacu

SEQ ID NO: 3059291 - RNA, 16 nt, Human
ccuuauggaacacucu

SEQ ID NO: 3059292 - RNA, 17 nt, Human
ccuuauggaacacucug

SEQ ID NO: 3059293 - RNA, 18 nt, Human
ccuuauggaacacucuga

SEQ ID NO: 3059294 - RNA, 14 nt, Human
ccuucccaccucuc

SEQ ID NO: 3059295 - RNA, 19 nt, Human
ccuucccaccucucucacu

SEQ ID NO: 3059296 - RNA, 12 nt, Human
ccuucccaccuc

SEQ ID NO: 3059297 - RNA, 20 nt, Human
ccuuagcagggaaacagcua

SEQ ID NO: 3059298 - RNA, 19 nt, Human
ccuuagcagggaaacagcu

SEQ ID NO: 3059299 - RNA, 16 nt, Human
ccuuagcaaauucugu

SEQ ID NO: 3059300 - RNA, 17 nt, Human
ccuguugggccaggagc

SEQ ID NO: 3059301 - RNA, 18 nt, Human
ccuguugggccaggagcc

SEQ ID NO: 3059302 - RNA, 19 nt, Human
ccuguugggccaggagccu

SEQ ID NO: 3059303 - RNA, 20 nt, Human
ccuguugggccaggagccuc

SEQ ID NO: 3059304 - RNA, 16 nt, Human
ccuguugggccaggag

SEQ ID NO: 3059305 - RNA, 19 nt, Human
ccuguucagcuccagcuca

SEQ ID NO: 3059306 - RNA, 16 nt, Human
ccuguucagcuccagc

SEQ ID NO: 3059307 - RNA, 15 nt, Human
ccuguucagcuccag

SEQ ID NO: 3059308 - RNA, 14 nt, Human
ccuguucagcucca

SEQ ID NO: 3059309 - RNA, 21 nt, Human
ccuguucagcuccagcucacc

SEQ ID NO: 3059310 - RNA, 20 nt, Human
ccuguucagcuccagcucac

SEQ ID NO: 3059311 - RNA, 23 nt, Human
ccuguucagcuccagcucaccag

SEQ ID NO: 3059312 - RNA, 12 nt, Human
ccuguucuggca

SEQ ID NO: 3059313 - RNA, 17 nt, Human
ccuguucuggcagaguu

SEQ ID NO: 3059314 - RNA, 18 nt, Human
ccuguucccaugagauga

SEQ ID NO: 3059315 - RNA, 22 nt, Human
cucagucuggcccuuccuuuuc

SEQ ID NO: 3059316 - RNA, 20 nt, Human
cucagucuggcccuuccuuu

SEQ ID NO: 3059317 - RNA, 16 nt, Human
cucaguccaugaagau

SEQ ID NO: 3059318 - RNA, 17 nt, Human
cucaguccauagcagag

SEQ ID NO: 3059319 - RNA, 15 nt, Human
cucaguccauagcag

SEQ ID NO: 3059320 - RNA, 23 nt, Human
cucaggugucccugcacuugcag

SEQ ID NO: 3059321 - RNA, 18 nt, Human
cucaguagucagacugga

SEQ ID NO: 3059322 - RNA, 22 nt, Human
cucaggccugggggcugggcag

SEQ ID NO: 3059323 - RNA, 11 nt, Human
cucaggccugg

SEQ ID NO: 3059324 - RNA, 18 nt, Human
cucaggccagcugcuugg

SEQ ID NO: 3059325 - RNA, 16 nt, Human
cucaggccagcugcuu

SEQ ID NO: 3059326 - RNA, 17 nt, Human
cucaggccagcugcuug

SEQ ID NO: 3059327 - RNA, 19 nt, Human
cucaggccaaacucaccug

SEQ ID NO: 3059328 - RNA, 20 nt, Human
cucaggccaaacucaccugc

SEQ ID NO: 3059329 - RNA, 21 nt, Human
cucaggccaaacucaccugcc

SEQ ID NO: 3059330 - RNA, 15 nt, Human
cucaggccagcugcu

SEQ ID NO: 3059331 - RNA, 22 nt, Human
cucagccucccgaauagcuggg

SEQ ID NO: 3059332 - RNA, 21 nt, Human
cucagccucccgaauagcugg

SEQ ID NO: 3059333 - RNA, 19 nt, Human
cucagccucccgaauagcu

SEQ ID NO: 3059334 - RNA, 23 nt, Human
cucagaagacacugaugggcaac

SEQ ID NO: 3059335 - RNA, 17 nt, Human
cucaccuuucccaucuu

SEQ ID NO: 3059336 - RNA, 22 nt, Human
cucagaagacacugaugggcaa

SEQ ID NO: 3059337 - RNA, 20 nt, Human
cucagaagacacugaugggc

SEQ ID NO: 3059338 - RNA, 17 nt, Human
cucagaagacacugaug

SEQ ID NO: 3059339 - RNA, 15 nt, Human
cucagaagacacuga

SEQ ID NO: 3059340 - RNA, 13 nt, Human
cucagaagacacu

SEQ ID NO: 3059341 - RNA, 23 nt, Human
cucaauuauuuugcauuuuuucu

SEQ ID NO: 3059342 - RNA, 21 nt, Human
cucaagugauucuccugccuc

SEQ ID NO: 3059343 - RNA, 13 nt, Human
cuaucucccccag

SEQ ID NO: 3059344 - RNA, 18 nt, Human
cuaucucauuuccaagca

SEQ ID NO: 3059345 - RNA, 14 nt, Human
cuaugugagaccau

SEQ ID NO: 3059346 - RNA, 23 nt, Human
cuaugucauuugcuggagcucug

SEQ ID NO: 3059347 - RNA, 22 nt, Human
cuauguugcccaggcaggucuu

SEQ ID NO: 3059348 - RNA, 21 nt, Human
cuauguugcccaggcaggucu

SEQ ID NO: 3059349 - RNA, 19 nt, Human
cuauguugcccaggcaggu

SEQ ID NO: 3059350 - RNA, 18 nt, Human
cuauguugcccaggcagg

SEQ ID NO: 3059351 - RNA, 18 nt, Human
cuauguucuaagaaguga

SEQ ID NO: 3059352 - RNA, 17 nt, Human
cucugcacuccccugcu

SEQ ID NO: 3059353 - RNA, 21 nt, Human
cucugcuccucuccccagcaa

SEQ ID NO: 3059354 - RNA, 20 nt, Human
cucugcuccucuccccagca

SEQ ID NO: 3059355 - RNA, 23 nt, Human
cucugcugacagacacaggcccg

SEQ ID NO: 3059356 - RNA, 13 nt, Human
cucugcugcuggc

SEQ ID NO: 3059357 - RNA, 20 nt, Human
cucugcugacagacacaggc

SEQ ID NO: 3059358 - RNA, 22 nt, Human
cucugcugacagacacaggccc

SEQ ID NO: 3059359 - RNA, 21 nt, Human
cucugcugacagacacaggcc

SEQ ID NO: 3059360 - RNA, 16 nt, Human
cucuguacagagccca

SEQ ID NO: 3059361 - RNA, 14 nt, Human
cucugcugcuggcu

SEQ ID NO: 3059362 - RNA, 15 nt, Human
cucugcugcuggcug

SEQ ID NO: 3059363 - RNA, 16 nt, Human
cucugcugcuggcugg

SEQ ID NO: 3059364 - RNA, 14 nt, Human
cucuguacagagcc

SEQ ID NO: 3059365 - RNA, 15 nt, Human
cucuguacagagccc

SEQ ID NO: 3059366 - RNA, 13 nt, Human
cucuguacagagc

SEQ ID NO: 3059367 - RNA, 20 nt, Human
cucugcacaagcugcacccu

SEQ ID NO: 3059368 - RNA, 21 nt, Human
cucugcacaagcugcacccuc

SEQ ID NO: 3059369 - RNA, 19 nt, Human
cucugcacaagcugcaccc

SEQ ID NO: 3059370 - RNA, 15 nt, Human
cucugcacuccccug

SEQ ID NO: 3059371 - RNA, 16 nt, Human
cucugcacuccccugc

SEQ ID NO: 3059372 - RNA, 14 nt, Human
cucugcacuccccu

SEQ ID NO: 3059373 - RNA, 21 nt, Human
cucucuguaauaaacucauuu

SEQ ID NO: 3059374 - RNA, 16 nt, Human
cucucuguaauaaacu

SEQ ID NO: 3059375 - RNA, 16 nt, Human
cucucccugcugcucc

SEQ ID NO: 3059376 - RNA, 19 nt, Human
cucucccugcugcuccuag

SEQ ID NO: 3059377 - RNA, 22 nt, Human
cucucuggccuucggccuccau

SEQ ID NO: 3059378 - RNA, 16 nt, Human
cucuccuccagaguca

SEQ ID NO: 3059379 - RNA, 13 nt, Human
cucucuggccuuc

SEQ ID NO: 3059380 - RNA, 14 nt, Human
cucucuggccuucg

SEQ ID NO: 3059381 - RNA, 16 nt, Human
cucucuggccuucggc

SEQ ID NO: 3059382 - RNA, 13 nt, Human
cucuccuccagag

SEQ ID NO: 3059383 - RNA, 15 nt, Human
cucuccuccagaguc

SEQ ID NO: 3059384 - RNA, 12 nt, Human
cucuccuccaga

SEQ ID NO: 3059385 - RNA, 13 nt, Human
cucucccugcugc

SEQ ID NO: 3059386 - RNA, 14 nt, Human
cucucccugcugcu

SEQ ID NO: 3059387 - RNA, 19 nt, Human
cucuauguucuaagaagug

SEQ ID NO: 3059388 - RNA, 16 nt, Human
cucuccccaugauguu

SEQ ID NO: 3059389 - RNA, 15 nt, Human
cucuccccaugaugu

SEQ ID NO: 3059390 - RNA, 16 nt, Human
cucgguguggagaagc

SEQ ID NO: 3059391 - RNA, 17 nt, Human
cucgguguggagaagcg

SEQ ID NO: 3059392 - RNA, 17 nt, Human
cuccuuugugaggaagc

SEQ ID NO: 3059393 - RNA, 18 nt, Human
cuccuuugugaggaagcc

SEQ ID NO: 3059394 - RNA, 20 nt, Human
cucccucuuucccucccuuc

SEQ ID NO: 3059395 - RNA, 22 nt, Human
cuccaggugcacaagcuccaag

SEQ ID NO: 3059396 - RNA, 20 nt, Human
cuccaggcuguaucccauga

SEQ ID NO: 3059397 - RNA, 23 nt, Human
cuccaggcuccuuuagcgcccag

SEQ ID NO: 3059398 - RNA, 15 nt, Human
cuccaggcuccuuua

SEQ ID NO: 3059399 - RNA, 23 nt, Human
cuccaggugcacaagcuccaagc

SEQ ID NO: 3059400 - RNA, 13 nt, Human
cuccucugcugcu

SEQ ID NO: 3059401 - RNA, 14 nt, Human
cuccucugcugcug

SEQ ID NO: 3059402 - RNA, 19 nt, Human
cuccuggcccacugcaucg

SEQ ID NO: 3059403 - RNA, 18 nt, Human
cuccugggcuaagugauc

SEQ ID NO: 3059404 - RNA, 19 nt, Human
cuccuggccucaagugauu

SEQ ID NO: 3059405 - RNA, 14 nt, Human
cuccuuguguuacu

SEQ ID NO: 3059406 - RNA, 15 nt, Human
cuccuuucaccacau

SEQ ID NO: 3059407 - RNA, 16 nt, Human
cuccuguaccucuuga

SEQ ID NO: 3059408 - RNA, 23 nt, Human
cuccgcuuucuacccagcgagcc

SEQ ID NO: 3059409 - RNA, 19 nt, Human
cuccggcccuccagagccc

SEQ ID NO: 3059410 - RNA, 16 nt, Human
auuuaaauagcuuuuu

SEQ ID NO: 3059411 - RNA, 22 nt, Human
auuuacaacugggggaggguga

SEQ ID NO: 3059412 - RNA, 22 nt, Human
auuuaccacuuguguuuugcaa

SEQ ID NO: 3059413 - RNA, 15 nt, Human
auuuaccacuugugu

SEQ ID NO: 3059414 - RNA, 17 nt, Human
auuguagcauccuggaa

SEQ ID NO: 3059415 - RNA, 16 nt, Human
auuguaguccuguaau

SEQ ID NO: 3059416 - RNA, 17 nt, Human
auuguuuucaguguaca

SEQ ID NO: 3059417 - RNA, 20 nt, Human
auuguagcauccuggaauau

SEQ ID NO: 3059418 - RNA, 19 nt, Human
auuguuuucaguguacaug

SEQ ID NO: 3059419 - RNA, 18 nt, Human
auuguuuucaguguacau

SEQ ID NO: 3059420 - RNA, 17 nt, Human
auuuaaaaaaaaaccug

SEQ ID NO: 3059421 - RNA, 17 nt, Human
auuuaguguucauaaau

SEQ ID NO: 3059422 - RNA, 23 nt, Human
auuuauaaaaauaaaaaacacug

SEQ ID NO: 3059423 - RNA, 16 nt, Human
auuuaguguucauaaa

SEQ ID NO: 3059424 - RNA, 20 nt, Human
auuuacuucuuauacauuug

SEQ ID NO: 3059425 - RNA, 19 nt, Human
auuuacuucuuauacauuu

SEQ ID NO: 3059426 - RNA, 15 nt, Human
auuuauaaacuuuuu

SEQ ID NO: 3059427 - RNA, 21 nt, Human
auuuccuaaauauauuuuaag

SEQ ID NO: 3059428 - RNA, 14 nt, Human
auuuccuaaauaua

SEQ ID NO: 3059429 - RNA, 17 nt, Human
auuuccguuaaaauacc

SEQ ID NO: 3059430 - RNA, 14 nt, Human
auuucccaaagcag

SEQ ID NO: 3059431 - RNA, 16 nt, Human
auuucccaaagcagug

SEQ ID NO: 3059432 - RNA, 21 nt, Human
auuuauuuuaauaauguuuca

SEQ ID NO: 3059433 - RNA, 19 nt, Human
auuuauuacuguaagaaaa

SEQ ID NO: 3059434 - RNA, 20 nt, Human
auuuauuacuguaagaaaau

SEQ ID NO: 3059435 - RNA, 18 nt, Human
auuugaauguuaagcaga

SEQ ID NO: 3059436 - RNA, 13 nt, Human
auuugaauguuaa

SEQ ID NO: 3059437 - RNA, 20 nt, Human
auuucuugagguaaaagcau

SEQ ID NO: 3059438 - RNA, 19 nt, Human
auuugaauguuaagcagau

SEQ ID NO: 3059439 - RNA, 18 nt, Human
auuugaggucuguucuuu

SEQ ID NO: 3059440 - RNA, 17 nt, Human
auuugaggucuguucuu

SEQ ID NO: 3059441 - RNA, 15 nt, Human
auuugaggucuguuc

SEQ ID NO: 3059442 - RNA, 15 nt, Human
auuugagcagggcuc

SEQ ID NO: 3059443 - RNA, 21 nt, Human
auuuggagacacaacuauuuu

SEQ ID NO: 3059444 - RNA, 21 nt, Human
auuugaggucuguucuuucca

SEQ ID NO: 3059445 - RNA, 19 nt, Human
auuugauaugugaacaguu

SEQ ID NO: 3059446 - RNA, 18 nt, Human
auuugauaugugaacagu

SEQ ID NO: 3059447 - RNA, 21 nt, Human
auuuggugguuucagaaaugu

SEQ ID NO: 3059448 - RNA, 12 nt, Human
auuugguuuuca

SEQ ID NO: 3059449 - RNA, 14 nt, Human
auuugguuuucaca

SEQ ID NO: 3059450 - RNA, 18 nt, Human
auugaugggauuugguca

SEQ ID NO: 3059451 - RNA, 12 nt, Human
auugauguguuu

SEQ ID NO: 3059452 - RNA, 19 nt, Human
auugauguguuuauuuaua

SEQ ID NO: 3059453 - RNA, 18 nt, Human
auugcaacaggcugggcu

SEQ ID NO: 3059454 - RNA, 17 nt, Human
auugcaacaggcugggc

SEQ ID NO: 3059455 - RNA, 12 nt, Human
auugcaccacug

SEQ ID NO: 3059456 - RNA, 19 nt, Human
auugcaacaggcugggcuu

SEQ ID NO: 3059457 - RNA, 16 nt, Human
auugcaacaggcuggg

SEQ ID NO: 3059458 - RNA, 24 nt, Human
auuccuagaaacugacacaugcug

SEQ ID NO: 3059459 - RNA, 17 nt, Human
auugaaggaugcugucu

SEQ ID NO: 3059460 - RNA, 17 nt, Human
auuguacgaagaguauu

SEQ ID NO: 3059461 - RNA, 14 nt, Human
auuggggcucccag

SEQ ID NO: 3059462 - RNA, 23 nt, Human
auuggcuagagguucaaagauau

SEQ ID NO: 3059463 - RNA, 22 nt, Human
auuggcuagagguucaaagaua

SEQ ID NO: 3059464 - RNA, 20 nt, Human
auuggcuagagguucaaaga

SEQ ID NO: 3059465 - RNA, 19 nt, Human
auuggcuagagguucaaag

SEQ ID NO: 3059466 - RNA, 16 nt, Human
auuggagcucguggaa

SEQ ID NO: 3059467 - RNA, 17 nt, Human
auuggagcucgugggac

SEQ ID NO: 3059468 - RNA, 14 nt, Human
auuggaaacaaguc

SEQ ID NO: 3059469 - RNA, 13 nt, Human
auuggaaacaagu

SEQ ID NO: 3059470 - RNA, 15 nt, Human
auucagccuggcuuc

SEQ ID NO: 3059471 - RNA, 14 nt, Human
auucagccuggcuu

SEQ ID NO: 3059472 - RNA, 20 nt, Human
auucagauaugauucaaaug

SEQ ID NO: 3059473 - RNA, 22 nt, Human
auucaggagaguagaacagaua

SEQ ID NO: 3059474 - RNA, 21 nt, Human
auucaggagaguagaacagau

SEQ ID NO: 3059475 - RNA, 17 nt, Human
auuccaagugauugaaa

SEQ ID NO: 3059476 - RNA, 17 nt, Human
auucccaagcucugcuc

SEQ ID NO: 3059477 - RNA, 19 nt, Human
auucccaagcucugcuccu

SEQ ID NO: 3059478 - RNA, 18 nt, Human
auucccaagcucugcucc

SEQ ID NO: 3059479 - RNA, 19 nt, Human
auuccccaggaggccagcc

SEQ ID NO: 3059480 - RNA, 20 nt, Human
auuccccaggaggccagccu

SEQ ID NO: 3059481 - RNA, 22 nt, Human
auuccccaggaggccagccuug

SEQ ID NO: 3059482 - RNA, 20 nt, Human
auuauauggcuugaguuuaa

SEQ ID NO: 3059483 - RNA, 22 nt, Human
auucaaacagucucaggaaauc

SEQ ID NO: 3059484 - RNA, 20 nt, Human
uuuuuguagcacugacagau

SEQ ID NO: 3059485 - RNA, 21 nt, Human
uuuuuguagcacugacagauu

SEQ ID NO: 3059486 - RNA, 17 nt, Human
uuuuuguagcacugaca

SEQ ID NO: 3059487 - RNA, 19 nt, Human
uuuuuguagcacugacaga

SEQ ID NO: 3059488 - RNA, 13 nt, Human
auuaaggaagaca

SEQ ID NO: 3059489 - RNA, 19 nt, Human
auuaaguacuauguaucaa

SEQ ID NO: 3059490 - RNA, 16 nt, Human
auuaaguacuauguau

SEQ ID NO: 3059491 - RNA, 18 nt, Human
auuaaguacuauguauca

SEQ ID NO: 3059492 - RNA, 15 nt, Human
uuuuugaagcuguau

SEQ ID NO: 3059493 - RNA, 12 nt, Human
uuuuugacagaa

SEQ ID NO: 3059494 - RNA, 13 nt, Human
uuuuugacagaau

SEQ ID NO: 3059495 - RNA, 16 nt, Human
uuuuguuuuugucuua

SEQ ID NO: 3059496 - RNA, 15 nt, Human
uuuuguuuucauuau

SEQ ID NO: 3059497 - RNA, 23 nt, Human
uuuuuauacauaaacaagaccac

SEQ ID NO: 3059498 - RNA, 23 nt, Human
uuuugugcauuaucuagauacug

SEQ ID NO: 3059499 - RNA, 14 nt, Human
uuuugugaagcaaa

SEQ ID NO: 3059500 - RNA, 13 nt, Human
auuacuucugcua

SEQ ID NO: 3059501 - RNA, 12 nt, Human
auuacuucugcu

SEQ ID NO: 3059502 - RNA, 14 nt, Human
auuacuucugcuac

SEQ ID NO: 3059503 - RNA, 15 nt, Human
auuacuguaagaaaa

SEQ ID NO: 3059504 - RNA, 16 nt, Human
auuacuguaagaaaau

SEQ ID NO: 3059505 - RNA, 12 nt, Human
auguuaagcaga

SEQ ID NO: 3059506 - RNA, 19 nt, Human
auguuacauaagauaaaug

SEQ ID NO: 3059507 - RNA, 20 nt, Human
auguuacauaagauaaaugu

SEQ ID NO: 3059508 - RNA, 15 nt, Human
auguugcccaggcag

SEQ ID NO: 3059509 - RNA, 14 nt, Human
auguugcccaggca

SEQ ID NO: 3059510 - RNA, 18 nt, Human
auguugaaagaucaaaag

SEQ ID NO: 3059511 - RNA, 13 nt, Human
auguugcccaggc

SEQ ID NO: 3059512 - RNA, 20 nt, Human
auguucuuucacccuuuucu

SEQ ID NO: 3059513 - RNA, 12 nt, Human
auguugaaagau

SEQ ID NO: 3059514 - RNA, 21 nt, Human
uuuuagacccuauugcugcuu

SEQ ID NO: 3059515 - RNA, 17 nt, Human
uuuuagaguugauacua

SEQ ID NO: 3059516 - RNA, 12 nt, Human
auguguuuccau

SEQ ID NO: 3059517 - RNA, 18 nt, Human
uuuuaaaaaacugcugac

SEQ ID NO: 3059518 - RNA, 21 nt, Human
augugcuaguaauuggaaagg

SEQ ID NO: 3059519 - RNA, 20 nt, Human
augugcuaguaauuggaaag

SEQ ID NO: 3059520 - RNA, 15 nt, Human
auguuuuuuuuuaaa

SEQ ID NO: 3059521 - RNA, 23 nt, Human
auuaaaaaucucaaauuucuaaa

SEQ ID NO: 3059522 - RNA, 22 nt, Human
auuaaaaaucucaaauuucuaa

SEQ ID NO: 3059523 - RNA, 19 nt, Human
auuaaaacacaacaucuuu

SEQ ID NO: 3059524 - RNA, 13 nt, Human
uuuucuguucuuu

SEQ ID NO: 3059525 - RNA, 16 nt, Human
auguuggccaggcugg

SEQ ID NO: 3059526 - RNA, 17 nt, Human
auguuggccaggcuggu

SEQ ID NO: 3059527 - RNA, 23 nt, Human
uuuucuacucgaguuacagacaa

SEQ ID NO: 3059528 - RNA, 16 nt, Human
uuuucucuaggaaaua

SEQ ID NO: 3059529 - RNA, 17 nt, Human
uuuucucugauacagaa

SEQ ID NO: 3059530 - RNA, 20 nt, Human
uuuucaggcuagauguaugu

SEQ ID NO: 3059531 - RNA, 21 nt, Human
uuuuauggcuuuugugcauua

SEQ ID NO: 3059532 - RNA, 12 nt, Human
uuuuauuaaauu

SEQ ID NO: 3059533 - RNA, 19 nt, Human
uuuuauggcuuuugugcau

SEQ ID NO: 3059534 - RNA, 18 nt, Human
uuuuauggcuuuugugca

SEQ ID NO: 3059535 - RNA, 22 nt, Human
uuuuauggcacuaguauuucua

SEQ ID NO: 3059536 - RNA, 15 nt, Human
uuuuaguagagacag

SEQ ID NO: 3059537 - RNA, 23 nt, Human
augucgucaaagcugaaauggac

SEQ ID NO: 3059538 - RNA, 13 nt, Human
augugagaccauu

SEQ ID NO: 3059539 - RNA, 14 nt, Human
augugagacugguu

SEQ ID NO: 3059540 - RNA, 12 nt, Human
auguaucaauga

SEQ ID NO: 3059541 - RNA, 19 nt, Human
auguauauuuuauaucaau

SEQ ID NO: 3059542 - RNA, 16 nt, Human
auguccaagaagccca

SEQ ID NO: 3059543 - RNA, 17 nt, Human
auguccaagaagcccag

SEQ ID NO: 3059544 - RNA, 14 nt, Human
uuuguacagacaac

SEQ ID NO: 3059545 - RNA, 16 nt, Human
uuuguaauuuuuuuau

SEQ ID NO: 3059546 - RNA, 23 nt, Human
uuugucuuaaaaaguggaaaaau

SEQ ID NO: 3059547 - RNA, 16 nt, Human
uuugugauacaaugcu

SEQ ID NO: 3059548 - RNA, 13 nt, Human
uuugucuuaaaaa

SEQ ID NO: 3059549 - RNA, 14 nt, Human
uuugucuuaaaaag

SEQ ID NO: 3059550 - RNA, 19 nt, Human
uuugugcauuaucuagaua

SEQ ID NO: 3059551 - RNA, 22 nt, Human
uuugugauacaaugcugugccc

SEQ ID NO: 3059552 - RNA, 15 nt, Human
uuugugauacaaugc

SEQ ID NO: 3059553 - RNA, 22 nt, Human
uuugugcauuaucuagauacug

SEQ ID NO: 3059554 - RNA, 14 nt, Human
uuuguuucugaaag

SEQ ID NO: 3059555 - RNA, 16 nt, Human
uuuguuucugaaaggg

SEQ ID NO: 3059556 - RNA, 21 nt, Human
uuugggguacccacugcucug

SEQ ID NO: 3059557 - RNA, 22 nt, Human
uuugggguacccacugcucugg

SEQ ID NO: 3059558 - RNA, 12 nt, Human
uuuggcugcuga

SEQ ID NO: 3059559 - RNA, 13 nt, Human
uuuggcugcugaa

SEQ ID NO: 3059560 - RNA, 19 nt, Human
uuugcuggggccgaaagaa

SEQ ID NO: 3059561 - RNA, 22 nt, Human
uuugcuggggccgaaagaacag

SEQ ID NO: 3059562 - RNA, 20 nt, Human
uuugcuggagcucugcccau

SEQ ID NO: 3059563 - RNA, 22 nt, Human
uuuggauuggaugaauuccaaa

SEQ ID NO: 3059564 - RNA, 18 nt, Human
uuugauucagacagcugc

SEQ ID NO: 3059565 - RNA, 18 nt, Human
uuugaccucugcagcaau

SEQ ID NO: 3059566 - RNA, 13 nt, Human
uuugagacagagu

SEQ ID NO: 3059567 - RNA, 13 nt, Human
uuugagaguucua

SEQ ID NO: 3059568 - RNA, 14 nt, Human
uuugauccaagcug

SEQ ID NO: 3059569 - RNA, 15 nt, Human
uuugauccaagcugg

SEQ ID NO: 3059570 - RNA, 23 nt, Human
uuugauuaaauucuugcaaagua

SEQ ID NO: 3059571 - RNA, 15 nt, Human
uuugauucagacagc

SEQ ID NO: 3059572 - RNA, 18 nt, Human
uuugacaaagguaaauca

SEQ ID NO: 3059573 - RNA, 14 nt, Human
uuugacaaggggca

SEQ ID NO: 3059574 - RNA, 18 nt, Human
uuugacagaauauguuuc

SEQ ID NO: 3059575 - RNA, 19 nt, Human
uuugacagaauauguuuca

SEQ ID NO: 3059576 - RNA, 20 nt, Human
uuugacagaauauguuucaa

SEQ ID NO: 3059577 - RNA, 21 nt, Human
uuugacagaauauguuucaaa

SEQ ID NO: 3059578 - RNA, 21 nt, Human
uuugaccucugcagcaauaaa

SEQ ID NO: 3059579 - RNA, 19 nt, Human
uuugaccucugcagcaaua

SEQ ID NO: 3059580 - RNA, 23 nt, Human
uuucccucccuuccucuuuccau

SEQ ID NO: 3059581 - RNA, 16 nt, Human
uucaaacuuuggaaca

SEQ ID NO: 3059582 - RNA, 15 nt, Human
uucaaacauauauaa

SEQ ID NO: 3059583 - RNA, 14 nt, Human
uucaaacauauaua

SEQ ID NO: 3059584 - RNA, 17 nt, Human
uucaaaauaaaaaugag

SEQ ID NO: 3059585 - RNA, 22 nt, Human
uucaagaaaacaacuucaauau

SEQ ID NO: 3059586 - RNA, 15 nt, Human
uucaaggauccugag

SEQ ID NO: 3059587 - RNA, 16 nt, Human
uucaaggauccugagc

SEQ ID NO: 3059588 - RNA, 18 nt, Human
uucaaggauccugagcca

SEQ ID NO: 3059589 - RNA, 19 nt, Human
uucaaggauccugagccag

SEQ ID NO: 3059590 - RNA, 21 nt, Human
uucaaggauccugagccagau

SEQ ID NO: 3059591 - RNA, 17 nt, Human
auaggcacaggaaacca

SEQ ID NO: 3059592 - RNA, 19 nt, Human
auaggaacuuaaauaaugu

SEQ ID NO: 3059593 - RNA, 21 nt, Human
auaggaauugacccacaagaa

SEQ ID NO: 3059594 - RNA, 19 nt, Human
uucacauuguauucagagu

SEQ ID NO: 3059595 - RNA, 13 nt, Human
uucacauuggaaa

SEQ ID NO: 3059596 - RNA, 20 nt, Human
uucacauaucuaguaugaaa

SEQ ID NO: 3059597 - RNA, 21 nt, Human
uucacauaucuaguaugaaau

SEQ ID NO: 3059598 - RNA, 17 nt, Human
uucacauauugauuucc

SEQ ID NO: 3059599 - RNA, 22 nt, Human
uucaccacaugugcacaugcac

SEQ ID NO: 3059600 - RNA, 14 nt, Human
uucacauuggaaac

SEQ ID NO: 3059601 - RNA, 14 nt, Human
auagcuacuaauuu

SEQ ID NO: 3059602 - RNA, 17 nt, Human
auagcuacuaauuuuaa

SEQ ID NO: 3059603 - RNA, 18 nt, Human
auagccugccucuucucu

SEQ ID NO: 3059604 - RNA, 17 nt, Human
auaagauaaaugugcug

SEQ ID NO: 3059605 - RNA, 13 nt, Human
auaagauaaaugu

SEQ ID NO: 3059606 - RNA, 18 nt, Human
auagcuacuaauuuuaaa

SEQ ID NO: 3059607 - RNA, 19 nt, Human
auagcucaggugucccugc

SEQ ID NO: 3059608 - RNA, 12 nt, Human
auagcugggacu

SEQ ID NO: 3059609 - RNA, 21 nt, Human
auagcucaggugucccugcac

SEQ ID NO: 3059610 - RNA, 20 nt, Human
auagcucaggugucccugca

SEQ ID NO: 3059611 - RNA, 22 nt, Human
auagcucaggugucccugcacu

SEQ ID NO: 3059612 - RNA, 16 nt, Human
uuauuuaguuccuuga

SEQ ID NO: 3059613 - RNA, 22 nt, Human
uuauuuaaugaaagacuguaca

SEQ ID NO: 3059614 - RNA, 18 nt, Human
uuauuuaaugaaagacug

SEQ ID NO: 3059615 - RNA, 14 nt, Human
uuauuuaaauuuua

SEQ ID NO: 3059616 - RNA, 22 nt, Human
auagcuggucuuauuuguaaag

SEQ ID NO: 3059617 - RNA, 17 nt, Human
auagcugggacuacagg

SEQ ID NO: 3059618 - RNA, 23 nt, Human
auagcuggucuuauuuguaaagc

SEQ ID NO: 3059619 - RNA, 17 nt, Human
uuauuguuuaaaaucau

SEQ ID NO: 3059620 - RNA, 19 nt, Human
auauaaguauucuaaauuu

SEQ ID NO: 3059621 - RNA, 14 nt, Human
auauauaacaaugc

SEQ ID NO: 3059622 - RNA, 17 nt, Human
auauauaacaaugcugu

SEQ ID NO: 3059623 - RNA, 18 nt, Human
auauauaacaaugcugua

SEQ ID NO: 3059624 - RNA, 17 nt, Human
auauaaguauucuaaau

SEQ ID NO: 3059625 - RNA, 19 nt, Human
auauaagcuuguauuccuu

SEQ ID NO: 3059626 - RNA, 12 nt, Human
auauaacaaugc

SEQ ID NO: 3059627 - RNA, 15 nt, Human
auauaacaaugcugu

SEQ ID NO: 3059628 - RNA, 17 nt, Human
auagucaaauuguguga

SEQ ID NO: 3059629 - RNA, 18 nt, Human
auagucaaauugugugaa

SEQ ID NO: 3059630 - RNA, 21 nt, Human
uucagaaaauauuauguguuu

SEQ ID NO: 3059631 - RNA, 20 nt, Human
uucagaaaauauuauguguu

SEQ ID NO: 3059632 - RNA, 14 nt, Human
uucagaaaauauua

SEQ ID NO: 3059633 - RNA, 13 nt, Human
uucagaaaauauu

SEQ ID NO: 3059634 - RNA, 17 nt, Human
uucagaucucuaacuuc

SEQ ID NO: 3059635 - RNA, 14 nt, Human
uucagccaagaauu

SEQ ID NO: 3059636 - RNA, 19 nt, Human
uucagccaagaauucuuaa

SEQ ID NO: 3059637 - RNA, 15 nt, Human
uucagcccucagaau

SEQ ID NO: 3059638 - RNA, 18 nt, Human
auauauucagccuggcuu

SEQ ID NO: 3059639 - RNA, 17 nt, Human
auaucuauauuuuacau

SEQ ID NO: 3059640 - RNA, 16 nt, Human
auaucuauauuuuaca

SEQ ID NO: 3059641 - RNA, 20 nt, Human
auaucuauauuuuacauaaa

SEQ ID NO: 3059642 - RNA, 22 nt, Human
auaucuauauuuuacauaaauu

SEQ ID NO: 3059643 - RNA, 21 nt, Human
uucaucauccuaagcuauuca

SEQ ID NO: 3059644 - RNA, 18 nt, Human
uucaucauccuaagcuau

SEQ ID NO: 3059645 - RNA, 14 nt, Human
uucaguaauaacuc

SEQ ID NO: 3059646 - RNA, 21 nt, Human
uucauauuuacuucuuauaca

SEQ ID NO: 3059647 - RNA, 16 nt, Human
uucauauuuacuucuu

SEQ ID NO: 3059648 - RNA, 22 nt, Human
auaucugaaaauguauguguaa

SEQ ID NO: 3059649 - RNA, 20 nt, Human
auaugauuuaaaucagccgu

SEQ ID NO: 3059650 - RNA, 13 nt, Human
auaugauucaaau

SEQ ID NO: 3059651 - RNA, 22 nt, Human
auaugauucaaaugucuauaaa

SEQ ID NO: 3059652 - RNA, 12 nt, Human
auaugauucaaa

SEQ ID NO: 3059653 - RNA, 14 nt, Human
auaugucaagccau

SEQ ID NO: 3059654 - RNA, 13 nt, Human
auaugugaacagu

SEQ ID NO: 3059655 - RNA, 23 nt, Human
auaugcaaagcacugacuucuaa

SEQ ID NO: 3059656 - RNA, 15 nt, Human
auaugcaaagcacug

SEQ ID NO: 3059657 - RNA, 16 nt, Human
auaugcaaagcacuga

SEQ ID NO: 3059658 - RNA, 23 nt, Human
auauuugaaauauugacuuuuua

SEQ ID NO: 3059659 - RNA, 14 nt, Human
auauuugaaauauu

SEQ ID NO: 3059660 - RNA, 19 nt, Human
auauuugaaauauugacuu

SEQ ID NO: 3059661 - RNA, 22 nt, Human
auauuuguaucacaaaucuuaa

SEQ ID NO: 3059662 - RNA, 12 nt, Human
auauuuuaacuu

SEQ ID NO: 3059663 - RNA, 18 nt, Human
auauuguguugugaaugu

SEQ ID NO: 3059664 - RNA, 17 nt, Human
auauuguguugugaaug

SEQ ID NO: 3059665 - RNA, 17 nt, Human
auauugcugauggugca

SEQ ID NO: 3059666 - RNA, 21 nt, Human
auauugcugauggugcaauga

SEQ ID NO: 3059667 - RNA, 20 nt, Human
auauuguuuucaguguacau

SEQ ID NO: 3059668 - RNA, 17 nt, Human
auauuguuuucagugua

SEQ ID NO: 3059669 - RNA, 13 nt, Human
auauuugaaauau

SEQ ID NO: 3059670 - RNA, 22 nt, Human
auauugauccagaaagaaaacu

SEQ ID NO: 3059671 - RNA, 15 nt, Human
auauugauccagaaa

SEQ ID NO: 3059672 - RNA, 22 nt, Human
auauugauuuccguuaaaauac

SEQ ID NO: 3059673 - RNA, 21 nt, Human
auauugauuuccguuaaaaua

SEQ ID NO: 3059674 - RNA, 19 nt, Human
auauugauuuccguuaaaa

SEQ ID NO: 3059675 - RNA, 16 nt, Human
auauucuguuggccag

SEQ ID NO: 3059676 - RNA, 21 nt, Human
auauucucacagcuccaagaa

SEQ ID NO: 3059677 - RNA, 22 nt, Human
auauucucacagcuccaagaau

SEQ ID NO: 3059678 - RNA, 23 nt, Human
auauucucacagcuccaagaauu

SEQ ID NO: 3059679 - RNA, 17 nt, Human
auauguuucaaacuuug

SEQ ID NO: 3059680 - RNA, 18 nt, Human
auauguuuuaagaggcag

SEQ ID NO: 3059681 - RNA, 20 nt, Human
auauguuuuaagaggcaggg

SEQ ID NO: 3059682 - RNA, 22 nt, Human
auauuaaggaagacaaugugaa

SEQ ID NO: 3059683 - RNA, 24 nt, Human
auauuaagaaagacuaucuaaaug

SEQ ID NO: 3059684 - RNA, 22 nt, Human
auauuaagaaagacuaucuaaa

SEQ ID NO: 3059685 - RNA, 22 nt, Human
aucacggcucacugcagccuca

SEQ ID NO: 3059686 - RNA, 19 nt, Human
aucaauuuuucuuauuuca

SEQ ID NO: 3059687 - RNA, 18 nt, Human
aucaaguauuauaccuuu

SEQ ID NO: 3059688 - RNA, 14 nt, Human
aucaaguauuauac

SEQ ID NO: 3059689 - RNA, 13 nt, Human
aucaaguauuaua

SEQ ID NO: 3059690 - RNA, 13 nt, Human
uuccuaauccucu

SEQ ID NO: 3059691 - RNA, 15 nt, Human
uuccuaauccucuag

SEQ ID NO: 3059692 - RNA, 11 nt, Human
uuccucuuucc

SEQ ID NO: 3059693 - RNA, 15 nt, Human
uuccugggagcuuuu

SEQ ID NO: 3059694 - RNA, 16 nt, Human
uuccugggagcuuuug

SEQ ID NO: 3059695 - RNA, 17 nt, Human
uuccuguucccaugaga

SEQ ID NO: 3059696 - RNA, 11 nt, Human
uuccuucagug

SEQ ID NO: 3059697 - RNA, 14 nt, Human
uuccuucagugccu

SEQ ID NO: 3059698 - RNA, 18 nt, Human
auauuuucaugcuguuca

SEQ ID NO: 3059699 - RNA, 21 nt, Human
auauuuucaugcuguucauga

SEQ ID NO: 3059700 - RNA, 16 nt, Human
auccagguucagcuug

SEQ ID NO: 3059701 - RNA, 15 nt, Human
auccagguucagcuu

SEQ ID NO: 3059702 - RNA, 20 nt, Human
aucauuucugcaucagcugc

SEQ ID NO: 3059703 - RNA, 17 nt, Human
aucccauaugccugggc

SEQ ID NO: 3059704 - RNA, 16 nt, Human
aucccauaugccuggg

SEQ ID NO: 3059705 - RNA, 15 nt, Human
uucugaaagggacgc

SEQ ID NO: 3059706 - RNA, 19 nt, Human
aucauugaaaucuuuuugc

SEQ ID NO: 3059707 - RNA, 23 nt, Human
uucugaacuuggcgcugccccug

SEQ ID NO: 3059708 - RNA, 21 nt, Human
uucugaaauuuccugggagcu

SEQ ID NO: 3059709 - RNA, 12 nt, Human
uucugaagaaga

SEQ ID NO: 3059710 - RNA, 13 nt, Human
uucugaagaagau

SEQ ID NO: 3059711 - RNA, 16 nt, Human
uucugcaucagcugcu

SEQ ID NO: 3059712 - RNA, 23 nt, Human
uucugcaucagcugcugaaacaa

SEQ ID NO: 3059713 - RNA, 23 nt, Human
uucugccgcagcccugcagaggg

SEQ ID NO: 3059714 - RNA, 16 nt, Human
uucugccgcagcccug

SEQ ID NO: 3059715 - RNA, 22 nt, Human
uucugggacacaguucaauucu

SEQ ID NO: 3059716 - RNA, 11 nt, Human
uucugggacac

SEQ ID NO: 3059717 - RNA, 10 nt, Human
uucugggaca

SEQ ID NO: 3059718 - RNA, 19 nt, Human
aucagugugucuaaauuug

SEQ ID NO: 3059719 - RNA, 20 nt, Human
aucagugugucuaaauuuga

SEQ ID NO: 3059720 - RNA, 18 nt, Human
aucagcacgauuucuguu

SEQ ID NO: 3059721 - RNA, 17 nt, Human
aucagcacgauuucugu

SEQ ID NO: 3059722 - RNA, 16 nt, Human
aucagcacgauuucug

SEQ ID NO: 3059723 - RNA, 15 nt, Human
aucagcacgauuucu

SEQ ID NO: 3059724 - RNA, 14 nt, Human
aucauucauuuucu

SEQ ID NO: 3059725 - RNA, 22 nt, Human
aucauuaaagccugaguuugcu

SEQ ID NO: 3059726 - RNA, 14 nt, Human
aucauugaaaucuu

SEQ ID NO: 3059727 - RNA, 15 nt, Human
aucauugaaaucuuu

SEQ ID NO: 3059728 - RNA, 13 nt, Human
aucauugaaaucu

SEQ ID NO: 3059729 - RNA, 23 nt, Human
uucuaggacugaauuaugaaacu

SEQ ID NO: 3059730 - RNA, 13 nt, Human
uucuaggccuggg

SEQ ID NO: 3059731 - RNA, 14 nt, Human
uucucaacuccaaa

SEQ ID NO: 3059732 - RNA, 18 nt, Human
uucucaacuccaaacuga

SEQ ID NO: 3059733 - RNA, 22 nt, Human
uucucagaaucucaaauaacua

SEQ ID NO: 3059734 - RNA, 19 nt, Human
uucucagaaucucaaauaa

SEQ ID NO: 3059735 - RNA, 13 nt, Human
uucucagaaucuc

SEQ ID NO: 3059736 - RNA, 23 nt, Human
uucucagaaucucaaauaacuaa

SEQ ID NO: 3059737 - RNA, 14 nt, Human
uuuaagagacagcc

SEQ ID NO: 3059738 - RNA, 12 nt, Human
uuuaagagaaau

SEQ ID NO: 3059739 - RNA, 21 nt, Human
uuuaagcuguuacugucuuca

SEQ ID NO: 3059740 - RNA, 19 nt, Human
uuuaaggaugcuuguacau

SEQ ID NO: 3059741 - RNA, 21 nt, Human
uuuaaggaugcuuguacauaa

SEQ ID NO: 3059742 - RNA, 20 nt, Human
uuuaaggaugcuuguacaua

SEQ ID NO: 3059743 - RNA, 22 nt, Human
uuuaaggaugcuuguacauaau

SEQ ID NO: 3059744 - RNA, 16 nt, Human
uuuaaugaaagacugu

SEQ ID NO: 3059745 - RNA, 18 nt, Human
uuuaaauauaugcuaagu

SEQ ID NO: 3059746 - RNA, 21 nt, Human
uuuaaauauaugcuaagucuu

SEQ ID NO: 3059747 - RNA, 20 nt, Human
uuuaagacgaaacauuuguu

SEQ ID NO: 3059748 - RNA, 11 nt, Human
uuuaaaugcac

SEQ ID NO: 3059749 - RNA, 18 nt, Human
uuuaaaaaaauuccaagu

SEQ ID NO: 3059750 - RNA, 23 nt, Human
augcacuuuguucuggcucuucc

SEQ ID NO: 3059751 - RNA, 21 nt, Human
augcacuuuguucuggcucuu

SEQ ID NO: 3059752 - RNA, 14 nt, Human
augcaaagcacuga

SEQ ID NO: 3059753 - RNA, 13 nt, Human
augcaaagcacug

SEQ ID NO: 3059754 - RNA, 12 nt, Human
augcaaagcacu

SEQ ID NO: 3059755 - RNA, 16 nt, Human
uuguucauacauauuu

SEQ ID NO: 3059756 - RNA, 18 nt, Human
uuguucauacauauuuuu

SEQ ID NO: 3059757 - RNA, 19 nt, Human
uuguucuugguuuguaaau

SEQ ID NO: 3059758 - RNA, 17 nt, Human
uuguucuugguuuguaa

SEQ ID NO: 3059759 - RNA, 13 nt, Human
augauuucauuca

SEQ ID NO: 3059760 - RNA, 13 nt, Human
uuguucauacaua

SEQ ID NO: 3059761 - RNA, 22 nt, Human
uuguucaauaauaaauauuuuu

SEQ ID NO: 3059762 - RNA, 20 nt, Human
uuguucaauaauaaauauuu

SEQ ID NO: 3059763 - RNA, 17 nt, Human
uugugaggaagccgcug

SEQ ID NO: 3059764 - RNA, 18 nt, Human
uugugaggaagccgcugg

SEQ ID NO: 3059765 - RNA, 20 nt, Human
uugugauacaaugcugugcc

SEQ ID NO: 3059766 - RNA, 19 nt, Human
uugugauacaaugcugugc

SEQ ID NO: 3059767 - RNA, 13 nt, Human
uugugaggaagcc

SEQ ID NO: 3059768 - RNA, 18 nt, Human
uuguccccaccgcagaca

SEQ ID NO: 3059769 - RNA, 20 nt, Human
uuguccccaccgcagacagg

SEQ ID NO: 3059770 - RNA, 15 nt, Human
uugucccaagugcca

SEQ ID NO: 3059771 - RNA, 15 nt, Human
uuguccccgacccuu

SEQ ID NO: 3059772 - RNA, 13 nt, Human
augaguccccugu

SEQ ID NO: 3059773 - RNA, 20 nt, Human
uugucaauaaaauccauaca

SEQ ID NO: 3059774 - RNA, 17 nt, Human
uugucacacacuuuggc

SEQ ID NO: 3059775 - RNA, 21 nt, Human
uugucauauaagauucauauu

SEQ ID NO: 3059776 - RNA, 16 nt, Human
uuguagcuuuaucaaa

SEQ ID NO: 3059777 - RNA, 17 nt, Human
uuguagcuuuaucaaag

SEQ ID NO: 3059778 - RNA, 15 nt, Human
augagguacugagag

SEQ ID NO: 3059779 - RNA, 17 nt, Human
augagguacugagagug

SEQ ID NO: 3059780 - RNA, 18 nt, Human
augagguacugagaguga

SEQ ID NO: 3059781 - RNA, 16 nt, Human
uuguagcauccuggaa

SEQ ID NO: 3059782 - RNA, 18 nt, Human
uuguagcauccuggaaua

SEQ ID NO: 3059783 - RNA, 18 nt, Human
augaggucagagccugca

SEQ ID NO: 3059784 - RNA, 16 nt, Human
augaggucagagccug

SEQ ID NO: 3059785 - RNA, 15 nt, Human
augaggucagagccu

SEQ ID NO: 3059786 - RNA, 20 nt, Human
augaggucagagccugcagu

SEQ ID NO: 3059787 - RNA, 19 nt, Human
augaggucagagccugcag

SEQ ID NO: 3059788 - RNA, 17 nt, Human
auggaaugcuguguuaa

SEQ ID NO: 3059789 - RNA, 21 nt, Human
auggaaugcuguguuaaauaa

SEQ ID NO: 3059790 - RNA, 17 nt, Human
uuucaaacauauauaac

SEQ ID NO: 3059791 - RNA, 22 nt, Human
uuucacauaucuaguaugaaau

SEQ ID NO: 3059792 - RNA, 12 nt, Human
uuucaaacuuua

SEQ ID NO: 3059793 - RNA, 19 nt, Human
uuucaaacauauauaacaa

SEQ ID NO: 3059794 - RNA, 14 nt, Human
uuucacauuggaaa

SEQ ID NO: 3059795 - RNA, 19 nt, Human
uuucacauuggaaacaagu

SEQ ID NO: 3059796 - RNA, 13 nt, Human
uuucacauuggaa

SEQ ID NO: 3059797 - RNA, 12 nt, Human
uuucagaaaugu

SEQ ID NO: 3059798 - RNA, 11 nt, Human
uuucagaaaug

SEQ ID NO: 3059799 - RNA, 21 nt, Human
uuucaugcuguucaugaaaga

SEQ ID NO: 3059800 - RNA, 19 nt, Human
uuucaugcuguucaugaaa

SEQ ID NO: 3059801 - RNA, 16 nt, Human
uuucccuauuagagaa

SEQ ID NO: 3059802 - RNA, 16 nt, Human
augcuucucacugcca

SEQ ID NO: 3059803 - RNA, 20 nt, Human
augcuucucacugccaugcc

SEQ ID NO: 3059804 - RNA, 17 nt, Human
auggaagacagcucuua

SEQ ID NO: 3059805 - RNA, 18 nt, Human
auggaagacagcucuuau

SEQ ID NO: 3059806 - RNA, 20 nt, Human
augcuggcuguuggcugggg

SEQ ID NO: 3059807 - RNA, 19 nt, Human
augcuggcuguuggcuggg

SEQ ID NO: 3059808 - RNA, 19 nt, Human
augcuguauuuuaaaagaa

SEQ ID NO: 3059809 - RNA, 22 nt, Human
augcuguauuuuaaaagaauga

SEQ ID NO: 3059810 - RNA, 23 nt, Human
augcuguucaugaaagauucaau

SEQ ID NO: 3059811 - RNA, 23 nt, Human
augcuguauuuuaaaagaaugau

SEQ ID NO: 3059812 - RNA, 18 nt, Human
augcuggcuguuggcugg

SEQ ID NO: 3059813 - RNA, 14 nt, Human
augcuccuggccca

SEQ ID NO: 3059814 - RNA, 14 nt, Human
uuuaucagaauucu

SEQ ID NO: 3059815 - RNA, 18 nt, Human
augcuacaggauuugaaa

SEQ ID NO: 3059816 - RNA, 22 nt, Human
augcgugcauaccacuuuuguu

SEQ ID NO: 3059817 - RNA, 20 nt, Human
augcgugcauaccacuuuug

SEQ ID NO: 3059818 - RNA, 15 nt, Human
augccucucucaggc

SEQ ID NO: 3059819 - RNA, 14 nt, Human
augccuuuucccaa

SEQ ID NO: 3059820 - RNA, 20 nt, Human
augccuuuucccaacuccag

SEQ ID NO: 3059821 - RNA, 22 nt, Human
augccuuuucccaacuccagaa

SEQ ID NO: 3059822 - RNA, 13 nt, Human
augccucucucag

SEQ ID NO: 3059823 - RNA, 14 nt, Human
augccucucucagg

SEQ ID NO: 3059824 - RNA, 23 nt, Human
uuuaaugaaagacuguacaaagu

SEQ ID NO: 3059825 - RNA, 21 nt, Human
uuuaaugaaagacuguacaaa

SEQ ID NO: 3059826 - RNA, 21 nt, Human
augccaugaggaacaaggcaa

SEQ ID NO: 3059827 - RNA, 16 nt, Human
augcccagccccuucu

SEQ ID NO: 3059828 - RNA, 15 nt, Human
augcccagccccuuc

SEQ ID NO: 3059829 - RNA, 17 nt, Human
augcccagccccuucug

SEQ ID NO: 3059830 - RNA, 15 nt, Human
augccccugaauuua

SEQ ID NO: 3059831 - RNA, 20 nt, Human
augccccugaauuuaaauag

SEQ ID NO: 3059832 - RNA, 18 nt, Human
uuuaccugaagucuuugu

SEQ ID NO: 3059833 - RNA, 16 nt, Human
uuuacugcagcuuugu

SEQ ID NO: 3059834 - RNA, 11 nt, Human
uuuacuuaaac

SEQ ID NO: 3059835 - RNA, 13 nt, Human
uuuacuucuuaua

SEQ ID NO: 3059836 - RNA, 14 nt, Human
uuuacuucuuauac

SEQ ID NO: 3059837 - RNA, 21 nt, Human
uuuauaugcuucuguuuuaua

SEQ ID NO: 3059838 - RNA, 19 nt, Human
uuuauaugcuucuguuuua

SEQ ID NO: 3059839 - RNA, 17 nt, Human
uugcaacuuuguauaaa

SEQ ID NO: 3059840 - RNA, 16 nt, Human
uugcaacuuuguauaa

SEQ ID NO: 3059841 - RNA, 18 nt, Human
uugcaacuuuguauaaaa

SEQ ID NO: 3059842 - RNA, 20 nt, Human
uugauuaaauucuugcaaag

SEQ ID NO: 3059843 - RNA, 16 nt, Human
uugauuaaauucuugc

SEQ ID NO: 3059844 - RNA, 15 nt, Human
uugauuaaauucuug

SEQ ID NO: 3059845 - RNA, 14 nt, Human
aucugacuaugaca

SEQ ID NO: 3059846 - RNA, 17 nt, Human
aucugacuaugacauaa

SEQ ID NO: 3059847 - RNA, 20 nt, Human
uugauguguuuauuuauaga

SEQ ID NO: 3059848 - RNA, 23 nt, Human
uugauguucuuucacccuuuucu

SEQ ID NO: 3059849 - RNA, 16 nt, Human
aucucuuguuuaaauu

SEQ ID NO: 3059850 - RNA, 17 nt, Human
aucucaaauuucuaaau

SEQ ID NO: 3059851 - RNA, 16 nt, Human
aucucaaauuucuaaa

SEQ ID NO: 3059852 - RNA, 23 nt, Human
aucucacacaugagcaucaggcc

SEQ ID NO: 3059853 - RNA, 18 nt, Human
aucucuugagccugggag

SEQ ID NO: 3059854 - RNA, 14 nt, Human
uugcaugaggcuag

SEQ ID NO: 3059855 - RNA, 12 nt, Human
uugcaugaggcu

SEQ ID NO: 3059856 - RNA, 19 nt, Human
uugcaugguuuggagcuga

SEQ ID NO: 3059857 - RNA, 14 nt, Human
uugcaauggcagcc

SEQ ID NO: 3059858 - RNA, 21 nt, Human
uugcaccacugcacuccagcc

SEQ ID NO: 3059859 - RNA, 11 nt, Human
uugcccaggca

SEQ ID NO: 3059860 - RNA, 23 nt, Human
uugcccaggcuggcgugcagugg

SEQ ID NO: 3059861 - RNA, 14 nt, Human
uugcccaggcuggc

SEQ ID NO: 3059862 - RNA, 12 nt, Human
uugcccaggcug

SEQ ID NO: 3059863 - RNA, 11 nt, Human
uugcccaggcu

SEQ ID NO: 3059864 - RNA, 18 nt, Human
uugcccaggcaggucuug

SEQ ID NO: 3059865 - RNA, 16 nt, Human
uugcccaggcaggucu

SEQ ID NO: 3059866 - RNA, 14 nt, Human
uugcccaggcaggu

SEQ ID NO: 3059867 - RNA, 13 nt, Human
uugcccaggcagg

SEQ ID NO: 3059868 - RNA, 21 nt, Human
aucucaaauaacuaaaaggua

SEQ ID NO: 3059869 - RNA, 14 nt, Human
aucucaaauaacua

SEQ ID NO: 3059870 - RNA, 23 nt, Human
aucucaaauaacuaaaagguaug

SEQ ID NO: 3059871 - RNA, 14 nt, Human
aucucaaauuucua

SEQ ID NO: 3059872 - RNA, 15 nt, Human
aucucaaaacugcac

SEQ ID NO: 3059873 - RNA, 20 nt, Human
aucucaaaacugcacuguca

SEQ ID NO: 3059874 - RNA, 19 nt, Human
aucucaaaacugcacuguc

SEQ ID NO: 3059875 - RNA, 17 nt, Human
aucuaggaagacuuugg

SEQ ID NO: 3059876 - RNA, 18 nt, Human
aucuaggaagacuuugga

SEQ ID NO: 3059877 - RNA, 19 nt, Human
aucuaggaagacuuuggaa

SEQ ID NO: 3059878 - RNA, 19 nt, Human
aucuagauacuguaucaug

SEQ ID NO: 3059879 - RNA, 18 nt, Human
aucuagauacuguaucau

SEQ ID NO: 3059880 - RNA, 23 nt, Human
aucuaauauguaacaagccaccc

SEQ ID NO: 3059881 - RNA, 20 nt, Human
aucuaauauguaacaagcca

SEQ ID NO: 3059882 - RNA, 17 nt, Human
uugauacuacaguuugu

SEQ ID NO: 3059883 - RNA, 15 nt, Human
uugauacuacaguuu

SEQ ID NO: 3059884 - RNA, 21 nt, Human
uugagugcugucuccauguuu

SEQ ID NO: 3059885 - RNA, 11 nt, Human
uugagugccuu

SEQ ID NO: 3059886 - RNA, 16 nt, Human
uugagcagggcucagc

SEQ ID NO: 3059887 - RNA, 12 nt, Human
uugagcagggcu

SEQ ID NO: 3059888 - RNA, 11 nt, Human
uugagacagag

SEQ ID NO: 3059889 - RNA, 12 nt, Human
uugacuuuuuau

SEQ ID NO: 3059890 - RNA, 13 nt, Human
uugacaucaacug

SEQ ID NO: 3059891 - RNA, 16 nt, Human
uugacaucaacugcau

SEQ ID NO: 3059892 - RNA, 13 nt, Human
uugacaugggaca

SEQ ID NO: 3059893 - RNA, 12 nt, Human
uugacagggcac

SEQ ID NO: 3059894 - RNA, 10 nt, Human
uugacagggc

SEQ ID NO: 3059895 - RNA, 19 nt, Human
uugacaggauuauuggaaa

SEQ ID NO: 3059896 - RNA, 22 nt, Human
augaaccacaucuugcucugcu

SEQ ID NO: 3059897 - RNA, 23 nt, Human
augaaccacaucuugcucugcug

SEQ ID NO: 3059898 - RNA, 14 nt, Human
augaagcaaugcuu

SEQ ID NO: 3059899 - RNA, 18 nt, Human
augaacuuguaaaggaau

SEQ ID NO: 3059900 - RNA, 15 nt, Human
augaagcaaugcuuc

SEQ ID NO: 3059901 - RNA, 17 nt, Human
augaaugaaacauuuug

SEQ ID NO: 3059902 - RNA, 20 nt, Human
uugguuuucacauuggaaac

SEQ ID NO: 3059903 - RNA, 14 nt, Human
uugguuuguaaauu

SEQ ID NO: 3059904 - RNA, 18 nt, Human
uuggugucgggcaugaca

SEQ ID NO: 3059905 - RNA, 19 nt, Human
uuggugucgggcaugacac

SEQ ID NO: 3059906 - RNA, 17 nt, Human
uuggugucgggcaugac

SEQ ID NO: 3059907 - RNA, 16 nt, Human
augaaugucaguguga

SEQ ID NO: 3059908 - RNA, 18 nt, Human
augaaugucagugugacu

SEQ ID NO: 3059909 - RNA, 19 nt, Human
uuggugguuucagaaaugu

SEQ ID NO: 3059910 - RNA, 18 nt, Human
uuggugguuucagaaaug

SEQ ID NO: 3059911 - RNA, 17 nt, Human
aucugucauuugagcag

SEQ ID NO: 3059912 - RNA, 12 nt, Human
aucugucauuug

SEQ ID NO: 3059913 - RNA, 14 nt, Human
aucuuauaauuuaa

SEQ ID NO: 3059914 - RNA, 16 nt, Human
aucuugcucugcugac

SEQ ID NO: 3059915 - RNA, 15 nt, Human
aucuugcucugcuga

SEQ ID NO: 3059916 - RNA, 15 nt, Human
aucuuauaauuuaaa

SEQ ID NO: 3059917 - RNA, 16 nt, Human
aucuuauaauuuaaaa

SEQ ID NO: 3059918 - RNA, 14 nt, Human
aucuugcucugcug

SEQ ID NO: 3059919 - RNA, 17 nt, Human
uugcucuugaugccugg

SEQ ID NO: 3059920 - RNA, 14 nt, Human
uugcucuugaugcc

SEQ ID NO: 3059921 - RNA, 18 nt, Human
uugcucuugaugccuggc

SEQ ID NO: 3059922 - RNA, 15 nt, Human
aucuuuaaaauacac

SEQ ID NO: 3059923 - RNA, 12 nt, Human
aucuuuaaaaua

SEQ ID NO: 3059924 - RNA, 15 nt, Human
uugcuuugugauuuu

SEQ ID NO: 3059925 - RNA, 18 nt, Human
uuggagacacaacuauuu

SEQ ID NO: 3059926 - RNA, 15 nt, Human
uuggagaagaacuga

SEQ ID NO: 3059927 - RNA, 17 nt, Human
uuggagaagaacugaaa

SEQ ID NO: 3059928 - RNA, 22 nt, Human
uuggagaagaacugaaaucaua

SEQ ID NO: 3059929 - RNA, 17 nt, Human
uuggaaaauaaauuauu

SEQ ID NO: 3059930 - RNA, 20 nt, Human
uugcuuugugauuuuuguaa

SEQ ID NO: 3059931 - RNA, 14 nt, Human
agugugucuaaauu

SEQ ID NO: 3059932 - RNA, 20 nt, Human
agugugucuuagugugugca

SEQ ID NO: 3059933 - RNA, 12 nt, Human
uguuauaaucuu

SEQ ID NO: 3059934 - RNA, 15 nt, Human
uguuauaaucuuuca

SEQ ID NO: 3059935 - RNA, 20 nt, Human
uguuccacaaguuaaauaaa

SEQ ID NO: 3059936 - RNA, 19 nt, Human
uguuccacaaguuaaauaa

SEQ ID NO: 3059937 - RNA, 16 nt, Human
uguucugggacacagu

SEQ ID NO: 3059938 - RNA, 18 nt, Human
uguuccuagugaaagagg

SEQ ID NO: 3059939 - RNA, 14 nt, Human
uguuccuagugaaa

SEQ ID NO: 3059940 - RNA, 18 nt, Human
uguucugugauauaagug

SEQ ID NO: 3059941 - RNA, 15 nt, Human
uguucugugauauaa

SEQ ID NO: 3059942 - RNA, 18 nt, Human
uguugcccaggcaggucu

SEQ ID NO: 3059943 - RNA, 17 nt, Human
uguugcccaggcagguc

SEQ ID NO: 3059944 - RNA, 16 nt, Human
uguugcccaggcaggu

SEQ ID NO: 3059945 - RNA, 15 nt, Human
uguugcccaggcagg

SEQ ID NO: 3059946 - RNA, 12 nt, Human
uguugcccaggc

SEQ ID NO: 3059947 - RNA, 13 nt, Human
uguugcccaggca

SEQ ID NO: 3059948 - RNA, 17 nt, Human
aguguacuuaacuauuc

SEQ ID NO: 3059949 - RNA, 16 nt, Human
agugugguguuuccug

SEQ ID NO: 3059950 - RNA, 19 nt, Human
agugugguguuuccuggca

SEQ ID NO: 3059951 - RNA, 17 nt, Human
agugugguguuuccugg

SEQ ID NO: 3059952 - RNA, 23 nt, Human
aguggugguuuucuguucuuucu

SEQ ID NO: 3059953 - RNA, 21 nt, Human
aguggugguuuucuguucuuu

SEQ ID NO: 3059954 - RNA, 20 nt, Human
aguggugguuuucuguucuu

SEQ ID NO: 3059955 - RNA, 19 nt, Human
aguggugguuuucuguucu

SEQ ID NO: 3059956 - RNA, 18 nt, Human
aguggugguuuucuguuc

SEQ ID NO: 3059957 - RNA, 17 nt, Human
aguggugguuuucuguu

SEQ ID NO: 3059958 - RNA, 21 nt, Human
agugguggugaacagaacaaa

SEQ ID NO: 3059959 - RNA, 17 nt, Human
aguggugcgaucugggu

SEQ ID NO: 3059960 - RNA, 16 nt, Human
aguggugcgaucuggg

SEQ ID NO: 3059961 - RNA, 16 nt, Human
uguuaaguauguguaa

SEQ ID NO: 3059962 - RNA, 15 nt, Human
uguuaaguaugugua

SEQ ID NO: 3059963 - RNA, 19 nt, Human
uguguuaaguauguguaaa

SEQ ID NO: 3059964 - RNA, 13 nt, Human
uguguugaagagg

SEQ ID NO: 3059965 - RNA, 19 nt, Human
uguguguuuauugucaaag

SEQ ID NO: 3059966 - RNA, 23 nt, Human
uguguguuuauugucaaaguggu

SEQ ID NO: 3059967 - RNA, 11 nt, Human
uguguguuuau

SEQ ID NO: 3059968 - RNA, 17 nt, Human
ugugucucuugguccug

SEQ ID NO: 3059969 - RNA, 20 nt, Human
ugugucucuugguccugcug

SEQ ID NO: 3059970 - RNA, 13 nt, Human
uguguaaguagau

SEQ ID NO: 3059971 - RNA, 21 nt, Human
ugugucucuugguccugcugc

SEQ ID NO: 3059972 - RNA, 20 nt, Human
ugugucuugcaauggcagcc

SEQ ID NO: 3059973 - RNA, 21 nt, Human
ugugucuugcaauggcagccu

SEQ ID NO: 3059974 - RNA, 16 nt, Human
ugugucucuugguccu

SEQ ID NO: 3059975 - RNA, 23 nt, Human
uguggguuucuaaagcugccagc

SEQ ID NO: 3059976 - RNA, 20 nt, Human
uguggucacaggaaguagag

SEQ ID NO: 3059977 - RNA, 21 nt, Human
uguggguuucuaaagcugcca

SEQ ID NO: 3059978 - RNA, 14 nt, Human
ugugguguuuccug

SEQ ID NO: 3059979 - RNA, 16 nt, Human
ugugguguuuccuggc

SEQ ID NO: 3059980 - RNA, 18 nt, Human
uguguaagacaaaaagcu

SEQ ID NO: 3059981 - RNA, 13 nt, Human
uguggucccaccc

SEQ ID NO: 3059982 - RNA, 15 nt, Human
uguggucccacccca

SEQ ID NO: 3059983 - RNA, 22 nt, Human
agugaguugauagcacagaccc

SEQ ID NO: 3059984 - RNA, 23 nt, Human
agugaguugauagcacagacccu

SEQ ID NO: 3059985 - RNA, 13 nt, Human
agugcugcauuua

SEQ ID NO: 3059986 - RNA, 12 nt, Human
agugcugcauuu

SEQ ID NO: 3059987 - RNA, 21 nt, Human
agugcugggauuacaggugug

SEQ ID NO: 3059988 - RNA, 17 nt, Human
agugcugcauuuaaaag

SEQ ID NO: 3059989 - RNA, 16 nt, Human
agugcugcauuuaaaa

SEQ ID NO: 3059990 - RNA, 19 nt, Human
agugcugcauuuaaaagau

SEQ ID NO: 3059991 - RNA, 20 nt, Human
agugcugggauuacaggugu

SEQ ID NO: 3059992 - RNA, 15 nt, Human
agugaaagaaaauaa

SEQ ID NO: 3059993 - RNA, 16 nt, Human
agugaacaaauuuaca

SEQ ID NO: 3059994 - RNA, 14 nt, Human
ugugauguauucua

SEQ ID NO: 3059995 - RNA, 19 nt, Human
ugugauggggcccugccuc

SEQ ID NO: 3059996 - RNA, 20 nt, Human
ugugauggggcccugccucc

SEQ ID NO: 3059997 - RNA, 18 nt, Human
ugugauggggcccugccu

SEQ ID NO: 3059998 - RNA, 18 nt, Human
ugugccagauuuaugcau

SEQ ID NO: 3059999 - RNA, 23 nt, Human
ugugcauuuggugguuucagaaa

SEQ ID NO: 3060000 - RNA, 20 nt, Human
ugugccagauuuaugcauau

SEQ ID NO: 3060001 - RNA, 20 nt, Human
ugugccagguuuuuggucug

SEQ ID NO: 3060002 - RNA, 16 nt, Human
ugugccaugugccagg

SEQ ID NO: 3060003 - RNA, 12 nt, Human
ugugccaugugc

SEQ ID NO: 3060004 - RNA, 21 nt, Human
uguggaguucaucuugaauug

SEQ ID NO: 3060005 - RNA, 17 nt, Human
uguggaguucaucuuga

SEQ ID NO: 3060006 - RNA, 21 nt, Human
ugugcccccauguaagcaccc

SEQ ID NO: 3060007 - RNA, 21 nt, Human
ugugcugcccugcccaccugg

SEQ ID NO: 3060008 - RNA, 15 nt, Human
agugaggcucugccc

SEQ ID NO: 3060009 - RNA, 14 nt, Human
agugaggcucugcc

SEQ ID NO: 3060010 - RNA, 16 nt, Human
agugaggcucugcccu

SEQ ID NO: 3060011 - RNA, 17 nt, Human
agugaggcucugcccuu

SEQ ID NO: 3060012 - RNA, 19 nt, Human
agugaggcucugcccuugg

SEQ ID NO: 3060013 - RNA, 20 nt, Human
agugaggcucugcccuuggu

SEQ ID NO: 3060014 - RNA, 21 nt, Human
agugaggcucugcccuugguu

SEQ ID NO: 3060015 - RNA, 21 nt, Human
agugaguugauagcacagacc

SEQ ID NO: 3060016 - RNA, 15 nt, Human
agugagucgaggaca

SEQ ID NO: 3060017 - RNA, 18 nt, Human
agucacuaccuucaugca

SEQ ID NO: 3060018 - RNA, 12 nt, Human
ugugaaauuauu

SEQ ID NO: 3060019 - RNA, 18 nt, Human
ugugaaaggaaagaggcu

SEQ ID NO: 3060020 - RNA, 21 nt, Human
ugugaaaggaaagagggaggu

SEQ ID NO: 3060021 - RNA, 15 nt, Human
ugugaaaggaaagag

SEQ ID NO: 3060022 - RNA, 20 nt, Human
ugugaacaguuguguuugaa

SEQ ID NO: 3060023 - RNA, 19 nt, Human
ugugaaccaccacacccag

SEQ ID NO: 3060024 - RNA, 21 nt, Human
ugugaaccaccacacccagcc

SEQ ID NO: 3060025 - RNA, 20 nt, Human
ugugaaccaccacacccagc

SEQ ID NO: 3060026 - RNA, 17 nt, Human
ugugaaccaccacaccc

SEQ ID NO: 3060027 - RNA, 18 nt, Human
agucuuucacauuuaaau

SEQ ID NO: 3060028 - RNA, 14 nt, Human
agucuuuguacaga

SEQ ID NO: 3060029 - RNA, 20 nt, Human
agugaaacucguuaauuugu

SEQ ID NO: 3060030 - RNA, 23 nt, Human
agucuuagauguauauauuuccu

SEQ ID NO: 3060031 - RNA, 15 nt, Human
ugugacugaauuucu

SEQ ID NO: 3060032 - RNA, 16 nt, Human
ugugacugaauuucuu

SEQ ID NO: 3060033 - RNA, 15 nt, Human
ugugagaugcuagaa

SEQ ID NO: 3060034 - RNA, 19 nt, Human
ugugagaugcuagaacucc

SEQ ID NO: 3060035 - RNA, 22 nt, Human
agucucaggaaaucaaauaugc

SEQ ID NO: 3060036 - RNA, 16 nt, Human
agucucaggaaaucaa

SEQ ID NO: 3060037 - RNA, 22 nt, Human
auaaaagggacugagaaauuua

SEQ ID NO: 3060038 - RNA, 15 nt, Human
auaaaauaauuuuua

SEQ ID NO: 3060039 - RNA, 16 nt, Human
auaaaauaauuuuuau

SEQ ID NO: 3060040 - RNA, 21 nt, Human
auaaaauaauuuuuauauuug

SEQ ID NO: 3060041 - RNA, 18 nt, Human
auaaaauccauacauuug

SEQ ID NO: 3060042 - RNA, 19 nt, Human
auaaaauccauacauuugu

SEQ ID NO: 3060043 - RNA, 18 nt, Human
uuaaguaaggaauuuuau

SEQ ID NO: 3060044 - RNA, 16 nt, Human
uuaagaggcagggucu

SEQ ID NO: 3060045 - RNA, 15 nt, Human
uuaagaggcaggguc

SEQ ID NO: 3060046 - RNA, 13 nt, Human
uuaagaggcaggg

SEQ ID NO: 3060047 - RNA, 20 nt, Human
uuaagaagacugcauuauau

SEQ ID NO: 3060048 - RNA, 22 nt, Human
uuaagaagacugcauuauauuu

SEQ ID NO: 3060049 - RNA, 17 nt, Human
uuaaguacuauguauca

SEQ ID NO: 3060050 - RNA, 18 nt, Human
uuaaguaaugauaacugg

SEQ ID NO: 3060051 - RNA, 22 nt, Human
uuaagugcugcauuuaaaagau

SEQ ID NO: 3060052 - RNA, 20 nt, Human
auaaaauuuuuaaucuuuaa

SEQ ID NO: 3060053 - RNA, 22 nt, Human
auaaacaagaccacguuucuaa

SEQ ID NO: 3060054 - RNA, 15 nt, Human
auaaacaagaccacg

SEQ ID NO: 3060055 - RNA, 23 nt, Human
auaaacaagaccacguuucuaaa

SEQ ID NO: 3060056 - RNA, 19 nt, Human
uuaauuuuuuugagacaga

SEQ ID NO: 3060057 - RNA, 17 nt, Human
uuaauuccaauuauaug

SEQ ID NO: 3060058 - RNA, 15 nt, Human
uuaauucuuagcuca

SEQ ID NO: 3060059 - RNA, 13 nt, Human
uuaauaaacacuc

SEQ ID NO: 3060060 - RNA, 17 nt, Human
uuaauaaacacucuuga

SEQ ID NO: 3060061 - RNA, 20 nt, Human
uuaaugaaagacuguacaaa

SEQ ID NO: 3060062 - RNA, 23 nt, Human
uuaaugaaagacuguacaaagua

SEQ ID NO: 3060063 - RNA, 11 nt, Human
uuagacagagu

SEQ ID NO: 3060064 - RNA, 14 nt, Human
uuagaaauauaauu

SEQ ID NO: 3060065 - RNA, 12 nt, Human
uuagaaauauaa

SEQ ID NO: 3060066 - RNA, 11 nt, Human
uuagaaauaua

SEQ ID NO: 3060067 - RNA, 15 nt, Human
uuacuguaagaaaau

SEQ ID NO: 3060068 - RNA, 23 nt, Human
uuacucagaauucucuaguuuga

SEQ ID NO: 3060069 - RNA, 18 nt, Human
uuacucagaauucucuag

SEQ ID NO: 3060070 - RNA, 19 nt, Human
uuacuauggcccuggccua

SEQ ID NO: 3060071 - RNA, 20 nt, Human
uuacauaagauaaaugugcu

SEQ ID NO: 3060072 - RNA, 14 nt, Human
uuaccuuacagaag

SEQ ID NO: 3060073 - RNA, 12 nt, Human
uuaccugggaaa

SEQ ID NO: 3060074 - RNA, 14 nt, Human
uuacaggaaguacu

SEQ ID NO: 3060075 - RNA, 16 nt, Human
auaacuaaaagguaug

SEQ ID NO: 3060076 - RNA, 19 nt, Human
uguugccuugcauaauggu

SEQ ID NO: 3060077 - RNA, 19 nt, Human
uguugcccaggcaggucuu

SEQ ID NO: 3060078 - RNA, 17 nt, Human
uguuuauugucaaagug

SEQ ID NO: 3060079 - RNA, 19 nt, Human
uguuuauugucaaaguggu

SEQ ID NO: 3060080 - RNA, 24 nt, Human
uguuuauuuauagaguguacuuaa

SEQ ID NO: 3060081 - RNA, 14 nt, Human
uguuuauuuauaga

SEQ ID NO: 3060082 - RNA, 19 nt, Human
uguuucuuuguaaugaaaa

SEQ ID NO: 3060083 - RNA, 18 nt, Human
uguuucuuuguaaugaaa

SEQ ID NO: 3060084 - RNA, 17 nt, Human
uguuugauucagacagc

SEQ ID NO: 3060085 - RNA, 22 nt, Human
uguuugauucagacagcugccu

SEQ ID NO: 3060086 - RNA, 19 nt, Human
uguuuugaaucucauaauu

SEQ ID NO: 3060087 - RNA, 20 nt, Human
uguuuuccaugaguccccug

SEQ ID NO: 3060088 - RNA, 19 nt, Human
uguuuucauuaucucaaaa

SEQ ID NO: 3060089 - RNA, 21 nt, Human
uguuuuauuuuaauucaguug

SEQ ID NO: 3060090 - RNA, 17 nt, Human
uguuuucaguguacaug

SEQ ID NO: 3060091 - RNA, 21 nt, Human
uguuuuauuuaaccucuaaau

SEQ ID NO: 3060092 - RNA, 14 nt, Human
aguucugguuccua

SEQ ID NO: 3060093 - RNA, 21 nt, Human
aguucugcagauaaacaguag

SEQ ID NO: 3060094 - RNA, 16 nt, Human
aguucugcagauaaac

SEQ ID NO: 3060095 - RNA, 16 nt, Human
aguucugaagaagaug

SEQ ID NO: 3060096 - RNA, 14 nt, Human
uguuuugcaagcca

SEQ ID NO: 3060097 - RNA, 20 nt, Human
uuaaagcuuccauuguuguc

SEQ ID NO: 3060098 - RNA, 20 nt, Human
uuaaauucuugcaaaguauc

SEQ ID NO: 3060099 - RNA, 16 nt, Human
aguuuagcuggaaaag

SEQ ID NO: 3060100 - RNA, 21 nt, Human
aguuguuugauucagacagcu

SEQ ID NO: 3060101 - RNA, 23 nt, Human
aguuguuugauucagacagcugc

SEQ ID NO: 3060102 - RNA, 18 nt, Human
aguuggucccccuuccau

SEQ ID NO: 3060103 - RNA, 21 nt, Human
aguuggguggaugccuggugg

SEQ ID NO: 3060104 - RNA, 17 nt, Human
aguuggguggaugccug

SEQ ID NO: 3060105 - RNA, 16 nt, Human
aguuggcuaggacccc

SEQ ID NO: 3060106 - RNA, 18 nt, Human
ugggucgcccuggacugu

SEQ ID NO: 3060107 - RNA, 16 nt, Human
ugggucgcccuggacu

SEQ ID NO: 3060108 - RNA, 15 nt, Human
agggugggagugggc

SEQ ID NO: 3060109 - RNA, 16 nt, Human
aggguggugaccucug

SEQ ID NO: 3060110 - RNA, 20 nt, Human
ugguagagugugccugaagu

SEQ ID NO: 3060111 - RNA, 17 nt, Human
uggguggcaccagcagc

SEQ ID NO: 3060112 - RNA, 20 nt, Human
uggguggcaccagcagccug

SEQ ID NO: 3060113 - RNA, 21 nt, Human
uggguggcaccagcagccugg

SEQ ID NO: 3060114 - RNA, 17 nt, Human
agggggccuggaugccc

SEQ ID NO: 3060115 - RNA, 15 nt, Human
agggggccuggaugc

SEQ ID NO: 3060116 - RNA, 14 nt, Human
agggggcugcuccc

SEQ ID NO: 3060117 - RNA, 15 nt, Human
agggggcugcuccca

SEQ ID NO: 3060118 - RNA, 16 nt, Human
agggggcugcucccac

SEQ ID NO: 3060119 - RNA, 19 nt, Human
agggggcugcucccaccug

SEQ ID NO: 3060120 - RNA, 22 nt, Human
agggggcugcucccaccuggcu

SEQ ID NO: 3060121 - RNA, 20 nt, Human
aggggaauguuugccucugc

SEQ ID NO: 3060122 - RNA, 19 nt, Human
aggggaauguuugccucug

SEQ ID NO: 3060123 - RNA, 21 nt, Human
aggggaauguuugccucugcc

SEQ ID NO: 3060124 - RNA, 18 nt, Human
aggggagcaugggaagug

SEQ ID NO: 3060125 - RNA, 16 nt, Human
agggucucacucuguc

SEQ ID NO: 3060126 - RNA, 15 nt, Human
agggucucacucugu

SEQ ID NO: 3060127 - RNA, 14 nt, Human
agggucucacucug

SEQ ID NO: 3060128 - RNA, 15 nt, Human
aggguaaggcugugg

SEQ ID NO: 3060129 - RNA, 20 nt, Human
aggggguggccucccaacuc

SEQ ID NO: 3060130 - RNA, 12 nt, Human
uggggcucccag

SEQ ID NO: 3060131 - RNA, 13 nt, Human
uggggcucccagc

SEQ ID NO: 3060132 - RNA, 15 nt, Human
uggggcucccagcca

SEQ ID NO: 3060133 - RNA, 18 nt, Human
uggggcucccagccaggc

SEQ ID NO: 3060134 - RNA, 22 nt, Human
uggggcugcaccggcuggccug

SEQ ID NO: 3060135 - RNA, 23 nt, Human
uggggcugcaccggcuggccugg

SEQ ID NO: 3060136 - RNA, 19 nt, Human
uggggcucccagccaggcc

SEQ ID NO: 3060137 - RNA, 20 nt, Human
uggggcucccagccaggccc

SEQ ID NO: 3060138 - RNA, 21 nt, Human
uggggcucccagccaggcccu

SEQ ID NO: 3060139 - RNA, 23 nt, Human
uggggcucccagccaggcccuug

SEQ ID NO: 3060140 - RNA, 21 nt, Human
uggggccaguuggucccccuu

SEQ ID NO: 3060141 - RNA, 12 nt, Human
uggggcccugcc

SEQ ID NO: 3060142 - RNA, 16 nt, Human
uggggaccucaggccu

SEQ ID NO: 3060143 - RNA, 17 nt, Human
uggggaccucaggccug

SEQ ID NO: 3060144 - RNA, 12 nt, Human
agggcuccagac

SEQ ID NO: 3060145 - RNA, 14 nt, Human
uggggaccucaggc

SEQ ID NO: 3060146 - RNA, 15 nt, Human
uggggaccucaggcc

SEQ ID NO: 3060147 - RNA, 22 nt, Human
uggggucacucuggcagcucag

SEQ ID NO: 3060148 - RNA, 16 nt, Human
uggggucacucuggca

SEQ ID NO: 3060149 - RNA, 20 nt, Human
uggggucacucuggcagcuc

SEQ ID NO: 3060150 - RNA, 13 nt, Human
uggggucacucug

SEQ ID NO: 3060151 - RNA, 14 nt, Human
uggggucacucugg

SEQ ID NO: 3060152 - RNA, 15 nt, Human
ugggguaugggagag

SEQ ID NO: 3060153 - RNA, 19 nt, Human
ugggguacccacugcucug

SEQ ID NO: 3060154 - RNA, 18 nt, Human
ugggguacccacugcucu

SEQ ID NO: 3060155 - RNA, 17 nt, Human
ugggguacccacugcuc

SEQ ID NO: 3060156 - RNA, 13 nt, Human
aggggaauguuug

SEQ ID NO: 3060157 - RNA, 18 nt, Human
aggggaaaaucagccugc

SEQ ID NO: 3060158 - RNA, 22 nt, Human
aggggaaaaucagccugcucca

SEQ ID NO: 3060159 - RNA, 14 nt, Human
aggggaacagacug

SEQ ID NO: 3060160 - RNA, 13 nt, Human
aggggaaaagagg

SEQ ID NO: 3060161 - RNA, 19 nt, Human
ugggccccugccucucugc

SEQ ID NO: 3060162 - RNA, 15 nt, Human
ugggccccugccucu

SEQ ID NO: 3060163 - RNA, 15 nt, Human
agggagggagggcuc

SEQ ID NO: 3060164 - RNA, 13 nt, Human
agggagggcucca

SEQ ID NO: 3060165 - RNA, 21 nt, Human
ugggcccccaaauggaaaugg

SEQ ID NO: 3060166 - RNA, 16 nt, Human
ugggcccccaaaugga

SEQ ID NO: 3060167 - RNA, 11 nt, Human
ugggcagagca

SEQ ID NO: 3060168 - RNA, 12 nt, Human
ugggcagagcag

SEQ ID NO: 3060169 - RNA, 18 nt, Human
ugggccaggagccuccug

SEQ ID NO: 3060170 - RNA, 12 nt, Human
ugggcagaagga

SEQ ID NO: 3060171 - RNA, 23 nt, Human
ugggcagaaggaagacuucaucc

SEQ ID NO: 3060172 - RNA, 20 nt, Human
ugggaggaucucuugagccu

SEQ ID NO: 3060173 - RNA, 21 nt, Human
ugggaggaucucuugagccug

SEQ ID NO: 3060174 - RNA, 19 nt, Human
ugggaggccaaggugggag

SEQ ID NO: 3060175 - RNA, 20 nt, Human
ugggaggccaaggugggagg

SEQ ID NO: 3060176 - RNA, 14 nt, Human
agggagggcuccag

SEQ ID NO: 3060177 - RNA, 15 nt, Human
agggagggcuccaga

SEQ ID NO: 3060178 - RNA, 16 nt, Human
agggagggcuccagac

SEQ ID NO: 3060179 - RNA, 23 nt, Human
agggcucagcggggacagcuccu

SEQ ID NO: 3060180 - RNA, 22 nt, Human
agggcucagcggggacagcucc

SEQ ID NO: 3060181 - RNA, 20 nt, Human
agggcucagcggggacagcu

SEQ ID NO: 3060182 - RNA, 19 nt, Human
agggcucagcggggacagc

SEQ ID NO: 3060183 - RNA, 22 nt, Human
ugggagaaccaaaaagaggcua

SEQ ID NO: 3060184 - RNA, 18 nt, Human
ugggacucaaugcacuga

SEQ ID NO: 3060185 - RNA, 20 nt, Human
ugggacucaaugcacugaca

SEQ ID NO: 3060186 - RNA, 19 nt, Human
ugggagagaagagaaugca

SEQ ID NO: 3060187 - RNA, 21 nt, Human
ugggagagaagagaaugcaca

SEQ ID NO: 3060188 - RNA, 18 nt, Human
ugggaggaucucuugagc

SEQ ID NO: 3060189 - RNA, 16 nt, Human
ugggagagccuuccag

SEQ ID NO: 3060190 - RNA, 16 nt, Human
ugggacuacaggcacc

SEQ ID NO: 3060191 - RNA, 15 nt, Human
ugggacuacaggcac

SEQ ID NO: 3060192 - RNA, 14 nt, Human
ugggacuacaggca

SEQ ID NO: 3060193 - RNA, 23 nt, Human
agggaggacgcucucuggccuuc

SEQ ID NO: 3060194 - RNA, 21 nt, Human
agggaggacgcucucuggccu

SEQ ID NO: 3060195 - RNA, 22 nt, Human
agggaggacgcucucuggccuu

SEQ ID NO: 3060196 - RNA, 13 nt, Human
agggaaauuucag

SEQ ID NO: 3060197 - RNA, 20 nt, Human
aggcccggcuccaggcuccu

SEQ ID NO: 3060198 - RNA, 18 nt, Human
aggcccggcuccaggcuc

SEQ ID NO: 3060199 - RNA, 21 nt, Human
aggcccggcuccaggcuccuu

SEQ ID NO: 3060200 - RNA, 22 nt, Human
agggaaggauacaaaagcaugu

SEQ ID NO: 3060201 - RNA, 20 nt, Human
aggugcauauuuauaaaaau

SEQ ID NO: 3060202 - RNA, 20 nt, Human
aggugauccacccaccucag

SEQ ID NO: 3060203 - RNA, 14 nt, Human
aggugauccaccca

SEQ ID NO: 3060204 - RNA, 16 nt, Human
aggugggauccuccag

SEQ ID NO: 3060205 - RNA, 17 nt, Human
aggugggauccuccagg

SEQ ID NO: 3060206 - RNA, 23 nt, Human
agguggggcagcuugaggguugg

SEQ ID NO: 3060207 - RNA, 16 nt, Human
agguggggcagcuuga

SEQ ID NO: 3060208 - RNA, 18 nt, Human
aggugccucaagagaagg

SEQ ID NO: 3060209 - RNA, 15 nt, Human
aggugggauccucca

SEQ ID NO: 3060210 - RNA, 20 nt, Human
aggugugcucugaucaucca

SEQ ID NO: 3060211 - RNA, 15 nt, Human
aggugugcucugauc

SEQ ID NO: 3060212 - RNA, 17 nt, Human
aggugugaaccaccaca

SEQ ID NO: 3060213 - RNA, 19 nt, Human
agguggggucacucuggca

SEQ ID NO: 3060214 - RNA, 20 nt, Human
aggugucccugcacuugcag

SEQ ID NO: 3060215 - RNA, 14 nt, Human
agguuuaagcuguu

SEQ ID NO: 3060216 - RNA, 12 nt, Human
aggugugcucug

SEQ ID NO: 3060217 - RNA, 16 nt, Human
uguaaauaguauuuga

SEQ ID NO: 3060218 - RNA, 16 nt, Human
uguaaauagcucaggu

SEQ ID NO: 3060219 - RNA, 15 nt, Human
uguaaauagcucagg

SEQ ID NO: 3060220 - RNA, 16 nt, Human
uguaaaggaauuuaaa

SEQ ID NO: 3060221 - RNA, 17 nt, Human
ugguuuucaaaauaaaa

SEQ ID NO: 3060222 - RNA, 15 nt, Human
ugguuuucaaaauaa

SEQ ID NO: 3060223 - RNA, 14 nt, Human
ugguuuucaaaaua

SEQ ID NO: 3060224 - RNA, 15 nt, Human
ugguuuguaaauuaa

SEQ ID NO: 3060225 - RNA, 15 nt, Human
uggucagauuugaac

SEQ ID NO: 3060226 - RNA, 16 nt, Human
uggucagauuugaacu

SEQ ID NO: 3060227 - RNA, 13 nt, Human
aggucagagccug

SEQ ID NO: 3060228 - RNA, 18 nt, Human
aggucagagccugcaguu

SEQ ID NO: 3060229 - RNA, 17 nt, Human
aggucagagccugcagu

SEQ ID NO: 3060230 - RNA, 15 nt, Human
aggucagagccugca

SEQ ID NO: 3060231 - RNA, 14 nt, Human
aggucagagccugc

SEQ ID NO: 3060232 - RNA, 16 nt, Human
aggucuugaacuccug

SEQ ID NO: 3060233 - RNA, 16 nt, Human
aggugagaagcagagg

SEQ ID NO: 3060234 - RNA, 21 nt, Human
aggugagaagcagaggaagga

SEQ ID NO: 3060235 - RNA, 23 nt, Human
aggugagaagcagaggaaggaga

SEQ ID NO: 3060236 - RNA, 15 nt, Human
aggugacagagugag

SEQ ID NO: 3060237 - RNA, 13 nt, Human
aggugacagagug

SEQ ID NO: 3060238 - RNA, 17 nt, Human
aggucuugaacuccugg

SEQ ID NO: 3060239 - RNA, 13 nt, Human
aggugaccccagg

SEQ ID NO: 3060240 - RNA, 22 nt, Human
aggugacagagugagacucugu

SEQ ID NO: 3060241 - RNA, 17 nt, Human
uggugcgaucuggguuc

SEQ ID NO: 3060242 - RNA, 16 nt, Human
uggugcgaucuggguu

SEQ ID NO: 3060243 - RNA, 19 nt, Human
uggugucgggcaugacacg

SEQ ID NO: 3060244 - RNA, 15 nt, Human
ugguggcagcugcgg

SEQ ID NO: 3060245 - RNA, 13 nt, Human
ugguggcagcugc

SEQ ID NO: 3060246 - RNA, 14 nt, Human
ugguggcagcugcg

SEQ ID NO: 3060247 - RNA, 18 nt, Human
ugguuaggcauuguggga

SEQ ID NO: 3060248 - RNA, 20 nt, Human
ugguuaggcauugugggaag

SEQ ID NO: 3060249 - RNA, 20 nt, Human
uguauucuagcuaauguaau

SEQ ID NO: 3060250 - RNA, 22 nt, Human
uguauuacaaauccaaugaaau

SEQ ID NO: 3060251 - RNA, 13 nt, Human
uguauuacaaauc

SEQ ID NO: 3060252 - RNA, 22 nt, Human
uguauucuagcuaauguaauaa

SEQ ID NO: 3060253 - RNA, 16 nt, Human
uguauuuuuuuacuaa

SEQ ID NO: 3060254 - RNA, 20 nt, Human
uguauucucuccuguaccuc

SEQ ID NO: 3060255 - RNA, 19 nt, Human
uguauucucuccuguaccu

SEQ ID NO: 3060256 - RNA, 17 nt, Human
uguaucaaugaguaaca

SEQ ID NO: 3060257 - RNA, 18 nt, Human
uguaucacaaaucuuaac

SEQ ID NO: 3060258 - RNA, 15 nt, Human
uguaucacaaaucuu

SEQ ID NO: 3060259 - RNA, 14 nt, Human
uguaguguuggaga

SEQ ID NO: 3060260 - RNA, 15 nt, Human
uguaguguuggagaa

SEQ ID NO: 3060261 - RNA, 16 nt, Human
aguaguaauagagcaa

SEQ ID NO: 3060262 - RNA, 17 nt, Human
ugucaauuacaggaagu

SEQ ID NO: 3060263 - RNA, 14 nt, Human
ugucaauuacagga

SEQ ID NO: 3060264 - RNA, 15 nt, Human
ugucaauuacaggaa

SEQ ID NO: 3060265 - RNA, 16 nt, Human
aguaugguggcugggu

SEQ ID NO: 3060266 - RNA, 15 nt, Human
aguaugguggcuggg

SEQ ID NO: 3060267 - RNA, 18 nt, Human
aguauuacuucugcuaca

SEQ ID NO: 3060268 - RNA, 18 nt, Human
aguauuagaauaccacag

SEQ ID NO: 3060269 - RNA, 17 nt, Human
aguaugguggcuggguu

SEQ ID NO: 3060270 - RNA, 15 nt, Human
aguauuacuucugcu

SEQ ID NO: 3060271 - RNA, 23 nt, Human
agucacacagugagucgaggaca

SEQ ID NO: 3060272 - RNA, 15 nt, Human
agucacacagugagu

SEQ ID NO: 3060273 - RNA, 19 nt, Human
agucaccccggccaccugc

SEQ ID NO: 3060274 - RNA, 17 nt, Human
agucaccucauggaauu

SEQ ID NO: 3060275 - RNA, 14 nt, Human
agucaccucaugga

SEQ ID NO: 3060276 - RNA, 15 nt, Human
agucaccucauggaa

SEQ ID NO: 3060277 - RNA, 23 nt, Human
agucacacaguauuacuucugcu

SEQ ID NO: 3060278 - RNA, 18 nt, Human
aguauuucuaugaaauau

SEQ ID NO: 3060279 - RNA, 17 nt, Human
aguauuucuaugaaaua

SEQ ID NO: 3060280 - RNA, 16 nt, Human
aguauuucuaugaaau

SEQ ID NO: 3060281 - RNA, 14 nt, Human
aguaugguggcugg

SEQ ID NO: 3060282 - RNA, 15 nt, Human
aguaauucaagaaaa

SEQ ID NO: 3060283 - RNA, 16 nt, Human
aguacauuuggagaca

SEQ ID NO: 3060284 - RNA, 20 nt, Human
aguagaagucuuagauguau

SEQ ID NO: 3060285 - RNA, 19 nt, Human
aguagaagucuuagaugua

SEQ ID NO: 3060286 - RNA, 21 nt, Human
aguagaagucuuagauguaua

SEQ ID NO: 3060287 - RNA, 17 nt, Human
aguagaagucuuagaug

SEQ ID NO: 3060288 - RNA, 17 nt, Human
uguaggcauaaagucag

SEQ ID NO: 3060289 - RNA, 20 nt, Human
uguaggcauaaagucagggg

SEQ ID NO: 3060290 - RNA, 11 nt, Human
aguagagacag

SEQ ID NO: 3060291 - RNA, 23 nt, Human
uguacuugcucuugaugccuggc

SEQ ID NO: 3060292 - RNA, 22 nt, Human
uguacuugcucuugaugccugg

SEQ ID NO: 3060293 - RNA, 19 nt, Human
uguacuugcucuugaugcc

SEQ ID NO: 3060294 - RNA, 18 nt, Human
uguagagccagggucuca

SEQ ID NO: 3060295 - RNA, 16 nt, Human
uguagagccagggucu

SEQ ID NO: 3060296 - RNA, 14 nt, Human
aguaauagagcaaa

SEQ ID NO: 3060297 - RNA, 15 nt, Human
aguaauaugcacaca

SEQ ID NO: 3060298 - RNA, 14 nt, Human
aguaauaugcacac

SEQ ID NO: 3060299 - RNA, 13 nt, Human
aguaaugauaacu

SEQ ID NO: 3060300 - RNA, 17 nt, Human
aguaaugauaacuggaa

SEQ ID NO: 3060301 - RNA, 18 nt, Human
aguaaugauaacuggaaa

SEQ ID NO: 3060302 - RNA, 20 nt, Human
aguaaugauaacuggaaacu

SEQ ID NO: 3060303 - RNA, 13 nt, Human
aguaaaauccaca

SEQ ID NO: 3060304 - RNA, 20 nt, Human
aguaaaaccacagcaguuga

SEQ ID NO: 3060305 - RNA, 16 nt, Human
ugcuuuuuauggccug

SEQ ID NO: 3060306 - RNA, 16 nt, Human
uggaagacagcucuua

SEQ ID NO: 3060307 - RNA, 15 nt, Human
uggaagacagcucuu

SEQ ID NO: 3060308 - RNA, 23 nt, Human
uggaaauuuguuauaaugaauga

SEQ ID NO: 3060309 - RNA, 21 nt, Human
uggaaauuuguuauaaugaau

SEQ ID NO: 3060310 - RNA, 18 nt, Human
ugcuuuuggucuguguga

SEQ ID NO: 3060311 - RNA, 23 nt, Human
ugcuuuuuaauauugauaugcuu

SEQ ID NO: 3060312 - RNA, 20 nt, Human
ugcuuuugucuaugggacuc

SEQ ID NO: 3060313 - RNA, 22 nt, Human
ugcuuugugauuuuuguaauuu

SEQ ID NO: 3060314 - RNA, 17 nt, Human
ugcuuugugauuuuugu

SEQ ID NO: 3060315 - RNA, 15 nt, Human
ugcuugagcucagga

SEQ ID NO: 3060316 - RNA, 13 nt, Human
aggaucagucuga

SEQ ID NO: 3060317 - RNA, 19 nt, Human
aggauucuuccucccuccc

SEQ ID NO: 3060318 - RNA, 17 nt, Human
aggauucuuccucccuc

SEQ ID NO: 3060319 - RNA, 22 nt, Human
aggaugaucuaggaagacuuug

SEQ ID NO: 3060320 - RNA, 23 nt, Human
aggaugaucuaggaagacuuugg

SEQ ID NO: 3060321 - RNA, 22 nt, Human
aggaugcacagaguuguuacau

SEQ ID NO: 3060322 - RNA, 16 nt, Human
aggauucuuccucccu

SEQ ID NO: 3060323 - RNA, 16 nt, Human
uggaagcacagcuuca

SEQ ID NO: 3060324 - RNA, 17 nt, Human
aggagaguagaacagau

SEQ ID NO: 3060325 - RNA, 12 nt, Human
aggagcagccac

SEQ ID NO: 3060326 - RNA, 13 nt, Human
aggagcagccaca

SEQ ID NO: 3060327 - RNA, 23 nt, Human
aggagcccugggaggcucuggag

SEQ ID NO: 3060328 - RNA, 17 nt, Human
aggagccccgaggccuu

SEQ ID NO: 3060329 - RNA, 16 nt, Human
aggagccuccugcccu

SEQ ID NO: 3060330 - RNA, 22 nt, Human
aggacuuuucuuuguggcuucc

SEQ ID NO: 3060331 - RNA, 17 nt, Human
aggagaaacuggaacuc

SEQ ID NO: 3060332 - RNA, 18 nt, Human
aggagaaacuggaacucu

SEQ ID NO: 3060333 - RNA, 19 nt, Human
aggagaaacuggaacucuc

SEQ ID NO: 3060334 - RNA, 19 nt, Human
aggacuuuucuuuguggcu

SEQ ID NO: 3060335 - RNA, 17 nt, Human
aggacuuuucuuugugg

SEQ ID NO: 3060336 - RNA, 13 nt, Human
aggacgcucucug

SEQ ID NO: 3060337 - RNA, 14 nt, Human
aggacgcucucugg

SEQ ID NO: 3060338 - RNA, 16 nt, Human
aggacgcucucuggcc

SEQ ID NO: 3060339 - RNA, 17 nt, Human
aggacgcucucuggccu

SEQ ID NO: 3060340 - RNA, 19 nt, Human
aggacgcucucuggccuuc

SEQ ID NO: 3060341 - RNA, 20 nt, Human
aggacgcucucuggccuucg

SEQ ID NO: 3060342 - RNA, 14 nt, Human
uggaguugaaaauc

SEQ ID NO: 3060343 - RNA, 14 nt, Human
uggagugcagugag

SEQ ID NO: 3060344 - RNA, 16 nt, Human
aggcauuugcugaaua

SEQ ID NO: 3060345 - RNA, 20 nt, Human
aggcauuugcugaauacaga

SEQ ID NO: 3060346 - RNA, 20 nt, Human
uggagguacgaaaagagggg

SEQ ID NO: 3060347 - RNA, 21 nt, Human
uggcacaucagcacgauuucu

SEQ ID NO: 3060348 - RNA, 23 nt, Human
uggcacaucagcacgauuucugu

SEQ ID NO: 3060349 - RNA, 23 nt, Human
uggaugccugguggcagcugcgg

SEQ ID NO: 3060350 - RNA, 21 nt, Human
uggaugccugguggcagcugc

SEQ ID NO: 3060351 - RNA, 20 nt, Human
uggaugccugguggcagcug

SEQ ID NO: 3060352 - RNA, 14 nt, Human
aggccccgcccagg

SEQ ID NO: 3060353 - RNA, 15 nt, Human
aggcccccaggugcc

SEQ ID NO: 3060354 - RNA, 17 nt, Human
aggcccggcuccaggcu

SEQ ID NO: 3060355 - RNA, 13 nt, Human
aggcccggcucca

SEQ ID NO: 3060356 - RNA, 13 nt, Human
aggcccagagggc

SEQ ID NO: 3060357 - RNA, 13 nt, Human
aggccagccuuga

SEQ ID NO: 3060358 - RNA, 15 nt, Human
aggccagccuugacc

SEQ ID NO: 3060359 - RNA, 23 nt, Human
uggcagcucaccucucccuugga

SEQ ID NO: 3060360 - RNA, 21 nt, Human
uggcagcucaccucucccuug

SEQ ID NO: 3060361 - RNA, 22 nt, Human
uggcagcucaccucucccuugg

SEQ ID NO: 3060362 - RNA, 20 nt, Human
uggcacccggccccugcugg

SEQ ID NO: 3060363 - RNA, 19 nt, Human
uggcacccggccccugcug

SEQ ID NO: 3060364 - RNA, 18 nt, Human
uggcacccggccccugcu

SEQ ID NO: 3060365 - RNA, 16 nt, Human
uggcacccggccccug

SEQ ID NO: 3060366 - RNA, 15 nt, Human
uggagcaaagcugau

SEQ ID NO: 3060367 - RNA, 18 nt, Human
aggauugcuacuguccua

SEQ ID NO: 3060368 - RNA, 17 nt, Human
aggauugcuacuguccu

SEQ ID NO: 3060369 - RNA, 15 nt, Human
aggauugcuacuguc

SEQ ID NO: 3060370 - RNA, 14 nt, Human
uggagaaaauggac

SEQ ID NO: 3060371 - RNA, 17 nt, Human
aggcaagcaccuccugc

SEQ ID NO: 3060372 - RNA, 17 nt, Human
uggagcucguggaacag

SEQ ID NO: 3060373 - RNA, 21 nt, Human
uggagcucguggaacaguuac

SEQ ID NO: 3060374 - RNA, 20 nt, Human
aggcaagcaccuccugccuc

SEQ ID NO: 3060375 - RNA, 14 nt, Human
uggagcucguggaa

SEQ ID NO: 3060376 - RNA, 19 nt, Human
aggcaagcaccuccugccu

SEQ ID NO: 3060377 - RNA, 18 nt, Human
aggcaagcaccuccugcc

SEQ ID NO: 3060378 - RNA, 17 nt, Human
aggcaaggcugucaauu

SEQ ID NO: 3060379 - RNA, 16 nt, Human
aggcaaggcugucaau

SEQ ID NO: 3060380 - RNA, 20 nt, Human
aggcagcucuaaaugucaau

SEQ ID NO: 3060381 - RNA, 15 nt, Human
aggcagcuugaaacu

SEQ ID NO: 3060382 - RNA, 22 nt, Human
aggcauaaagucagggguuccc

SEQ ID NO: 3060383 - RNA, 18 nt, Human
aggcauugugggaagggg

SEQ ID NO: 3060384 - RNA, 20 nt, Human
aggcauuuaggccaugggac

SEQ ID NO: 3060385 - RNA, 17 nt, Human
aggcaggugggauggau

SEQ ID NO: 3060386 - RNA, 15 nt, Human
aggcauaaagucagg

SEQ ID NO: 3060387 - RNA, 12 nt, Human
aggcagggucuc

SEQ ID NO: 3060388 - RNA, 22 nt, Human
aggcaggucuugaacuccuggc

SEQ ID NO: 3060389 - RNA, 21 nt, Human
ugccugcuuuuuauggccugu

SEQ ID NO: 3060390 - RNA, 20 nt, Human
ugccugcuuuuuauggccug

SEQ ID NO: 3060391 - RNA, 22 nt, Human
ugccugcuuuuuauggccugug

SEQ ID NO: 3060392 - RNA, 23 nt, Human
ugccugcccaggccccugccacc

SEQ ID NO: 3060393 - RNA, 22 nt, Human
ugccugcccaggccccugccac

SEQ ID NO: 3060394 - RNA, 20 nt, Human
ugccugcccaggccccugcc

SEQ ID NO: 3060395 - RNA, 17 nt, Human
ugccucugccucugaca

SEQ ID NO: 3060396 - RNA, 20 nt, Human
ugccucugccucugacacac

SEQ ID NO: 3060397 - RNA, 18 nt, Human
ugccucugccucugacac

SEQ ID NO: 3060398 - RNA, 14 nt, Human
ugccucagccuccc

SEQ ID NO: 3060399 - RNA, 16 nt, Human
ugccuggauggggcug

SEQ ID NO: 3060400 - RNA, 17 nt, Human
ugccuggauggggcugc

SEQ ID NO: 3060401 - RNA, 20 nt, Human
ugccuggauggggcugcacc

SEQ ID NO: 3060402 - RNA, 16 nt, Human
agcugccuguucagcu

SEQ ID NO: 3060403 - RNA, 14 nt, Human
agcugccuguucag

SEQ ID NO: 3060404 - RNA, 18 nt, Human
agcugccuguucagcucc

SEQ ID NO: 3060405 - RNA, 20 nt, Human
agcugcugagauccuggacu

SEQ ID NO: 3060406 - RNA, 16 nt, Human
agcugcuugggcuuca

SEQ ID NO: 3060407 - RNA, 21 nt, Human
agcugcugagauccuggacug

SEQ ID NO: 3060408 - RNA, 19 nt, Human
agcuguuacugucuucagu

SEQ ID NO: 3060409 - RNA, 14 nt, Human
agcuguucacagcc

SEQ ID NO: 3060410 - RNA, 16 nt, Human
ugccuguugggccagg

SEQ ID NO: 3060411 - RNA, 17 nt, Human
ugccuguugggccagga

SEQ ID NO: 3060412 - RNA, 20 nt, Human
ugccuuacccucauguucuu

SEQ ID NO: 3060413 - RNA, 16 nt, Human
ugccuuggggacaaga

SEQ ID NO: 3060414 - RNA, 21 nt, Human
ugccuuacccucauguucuua

SEQ ID NO: 3060415 - RNA, 18 nt, Human
agcuguuacugucuucag

SEQ ID NO: 3060416 - RNA, 14 nt, Human
agcuguuacugucu

SEQ ID NO: 3060417 - RNA, 23 nt, Human
agcugugcucuggacaggcaugu

SEQ ID NO: 3060418 - RNA, 18 nt, Human
agcugugcucuggacagg

SEQ ID NO: 3060419 - RNA, 17 nt, Human
agcugugcucuggacag

SEQ ID NO: 3060420 - RNA, 22 nt, Human
agcugggguggggaccucaggc

SEQ ID NO: 3060421 - RNA, 23 nt, Human
agcugggguggggaccucaggcc

SEQ ID NO: 3060422 - RNA, 20 nt, Human
agcugggguggggaccucag

SEQ ID NO: 3060423 - RNA, 16 nt, Human
agcugggacuacaggu

SEQ ID NO: 3060424 - RNA, 23 nt, Human
agcugggacuacaggcacccacc

SEQ ID NO: 3060425 - RNA, 20 nt, Human
agcugggacuacaggcaccc

SEQ ID NO: 3060426 - RNA, 23 nt, Human
agcucccaggcauuccccaggag

SEQ ID NO: 3060427 - RNA, 15 nt, Human
agcuccuucuguccu

SEQ ID NO: 3060428 - RNA, 13 nt, Human
agcucccaggcau

SEQ ID NO: 3060429 - RNA, 12 nt, Human
agcucuggucca

SEQ ID NO: 3060430 - RNA, 17 nt, Human
agcucugguccauagag

SEQ ID NO: 3060431 - RNA, 14 nt, Human
agcucuguccuggg

SEQ ID NO: 3060432 - RNA, 16 nt, Human
agcucucuccucccuu

SEQ ID NO: 3060433 - RNA, 21 nt, Human
agcuccuucuguccuacucug

SEQ ID NO: 3060434 - RNA, 16 nt, Human
agcuccuucuguccua

SEQ ID NO: 3060435 - RNA, 12 nt, Human
ugccgcagcccu

SEQ ID NO: 3060436 - RNA, 13 nt, Human
ugccucagccucc

SEQ ID NO: 3060437 - RNA, 12 nt, Human
ugccucagccuc

SEQ ID NO: 3060438 - RNA, 18 nt, Human
ugcccuuaccugccagga

SEQ ID NO: 3060439 - RNA, 19 nt, Human
ugcccuguuaaaagaugaa

SEQ ID NO: 3060440 - RNA, 20 nt, Human
ugcccuguuaaaagaugaaa

SEQ ID NO: 3060441 - RNA, 20 nt, Human
agcugccagccgagauagcc

SEQ ID NO: 3060442 - RNA, 14 nt, Human
agcugccagccgag

SEQ ID NO: 3060443 - RNA, 21 nt, Human
agcucuguccugggagugagc

SEQ ID NO: 3060444 - RNA, 16 nt, Human
agcucuguccugggag

SEQ ID NO: 3060445 - RNA, 14 nt, Human
ugcuaucuccccca

SEQ ID NO: 3060446 - RNA, 17 nt, Human
ugcuaucucccccagcc

SEQ ID NO: 3060447 - RNA, 13 nt, Human
ugcuaucuccccc

SEQ ID NO: 3060448 - RNA, 16 nt, Human
aggaaaagcugcugac

SEQ ID NO: 3060449 - RNA, 21 nt, Human
ugcuccagcuguucagcuggu

SEQ ID NO: 3060450 - RNA, 20 nt, Human
ugcuccagcuguucagcugg

SEQ ID NO: 3060451 - RNA, 15 nt, Human
ugcucccaccuggcu

SEQ ID NO: 3060452 - RNA, 15 nt, Human
ugcucugcugacaga

SEQ ID NO: 3060453 - RNA, 14 nt, Human
ugcucugcugacag

SEQ ID NO: 3060454 - RNA, 23 nt, Human
aggaaaggcuccaggagcagcca

SEQ ID NO: 3060455 - RNA, 14 nt, Human
ugcugagauccugg

SEQ ID NO: 3060456 - RNA, 18 nt, Human
ugcugagauccuggacug

SEQ ID NO: 3060457 - RNA, 19 nt, Human
aggaaaucaaauaugcaaa

SEQ ID NO: 3060458 - RNA, 20 nt, Human
aggaaaucaaauaugcaaag

SEQ ID NO: 3060459 - RNA, 22 nt, Human
aggaaaucaaauaugcaaagca

SEQ ID NO: 3060460 - RNA, 21 nt, Human
aggaaaucaaauaugcaaagc

SEQ ID NO: 3060461 - RNA, 13 nt, Human
aggaagcucaggg

SEQ ID NO: 3060462 - RNA, 14 nt, Human
aggaagcucagggc

SEQ ID NO: 3060463 - RNA, 12 nt, Human
aggaagcucagg

SEQ ID NO: 3060464 - RNA, 15 nt, Human
aggaagcucagggcc

SEQ ID NO: 3060465 - RNA, 14 nt, Human
aggaaaagcugcug

SEQ ID NO: 3060466 - RNA, 23 nt, Human
agcuugaccgugaggccagagac

SEQ ID NO: 3060467 - RNA, 22 nt, Human
agcuugaggguugggcuggugu

SEQ ID NO: 3060468 - RNA, 20 nt, Human
agcuugcccuggugccucac

SEQ ID NO: 3060469 - RNA, 20 nt, Human
agcuugaccgugaggccaga

SEQ ID NO: 3060470 - RNA, 22 nt, Human
agcuugaccgugaggccagaga

SEQ ID NO: 3060471 - RNA, 19 nt, Human
agcuugaccgugaggccag

SEQ ID NO: 3060472 - RNA, 19 nt, Human
agcuugcccuguuaaaaga

SEQ ID NO: 3060473 - RNA, 18 nt, Human
agcuugcccuguuaaaag

SEQ ID NO: 3060474 - RNA, 16 nt, Human
agcuugcccuguuaaa

SEQ ID NO: 3060475 - RNA, 20 nt, Human
ugcuaauuuugaaaaacugc

SEQ ID NO: 3060476 - RNA, 19 nt, Human
ugcuaauuuugaaaaacug

SEQ ID NO: 3060477 - RNA, 18 nt, Human
ugcuaauuuugaaaaacu

SEQ ID NO: 3060478 - RNA, 16 nt, Human
ugcuaauuuugaaaaa

SEQ ID NO: 3060479 - RNA, 11 nt, Human
ugcuacacacu

SEQ ID NO: 3060480 - RNA, 14 nt, Human
ugcuacaaaaacac

SEQ ID NO: 3060481 - RNA, 20 nt, Human
agcuuaaaggggcuagagug

SEQ ID NO: 3060482 - RNA, 17 nt, Human
ugccuuuucccaacucc

SEQ ID NO: 3060483 - RNA, 19 nt, Human
ugccuuuucccaacuccag

SEQ ID NO: 3060484 - RNA, 15 nt, Human
ugcgguccacccagg

SEQ ID NO: 3060485 - RNA, 14 nt, Human
ugcgguccacccag

SEQ ID NO: 3060486 - RNA, 13 nt, Human
ugauaaguucaua

SEQ ID NO: 3060487 - RNA, 15 nt, Human
ugauaaguucauaca

SEQ ID NO: 3060488 - RNA, 17 nt, Human
ugauaaguucauacauu

SEQ ID NO: 3060489 - RNA, 19 nt, Human
ugauaaguucauacauugu

SEQ ID NO: 3060490 - RNA, 16 nt, Human
ugauaaguaaaugcua

SEQ ID NO: 3060491 - RNA, 20 nt, Human
ugaguucuacauaaguaauu

SEQ ID NO: 3060492 - RNA, 15 nt, Human
ugaguucuacauaag

SEQ ID NO: 3060493 - RNA, 15 nt, Human
ugauacaaugcugug

SEQ ID NO: 3060494 - RNA, 14 nt, Human
ugauacaaugcugu

SEQ ID NO: 3060495 - RNA, 18 nt, Human
ugaguucauacccuguua

SEQ ID NO: 3060496 - RNA, 21 nt, Human
ugagugggggaucacagccuc

SEQ ID NO: 3060497 - RNA, 18 nt, Human
ugagugucuuaauuaaaa

SEQ ID NO: 3060498 - RNA, 17 nt, Human
ugagugcagcucuggag

SEQ ID NO: 3060499 - RNA, 13 nt, Human
ugagugccuuaca

SEQ ID NO: 3060500 - RNA, 14 nt, Human
ugagugccuuacac

SEQ ID NO: 3060501 - RNA, 20 nt, Human
ugaguacguugugcauuugg

SEQ ID NO: 3060502 - RNA, 18 nt, Human
ugagucaccaagcccagu

SEQ ID NO: 3060503 - RNA, 23 nt, Human
agcauaaaaauuagccaagugug

SEQ ID NO: 3060504 - RNA, 13 nt, Human
agcauaccaacac

SEQ ID NO: 3060505 - RNA, 22 nt, Human
agcauaccaacacgagcaggcu

SEQ ID NO: 3060506 - RNA, 19 nt, Human
agcauaccaacacgagcag

SEQ ID NO: 3060507 - RNA, 19 nt, Human
ugaguacguugugcauuug

SEQ ID NO: 3060508 - RNA, 18 nt, Human
ugaguacguugugcauuu

SEQ ID NO: 3060509 - RNA, 17 nt, Human
ugaguacguugugcauu

SEQ ID NO: 3060510 - RNA, 16 nt, Human
ugaguacguugugcau

SEQ ID NO: 3060511 - RNA, 20 nt, Human
agcaguuugguuucuagcau

SEQ ID NO: 3060512 - RNA, 19 nt, Human
agcauaaaaauuagccaag

SEQ ID NO: 3060513 - RNA, 23 nt, Human
agcaguuugguuucuagcaugaa

SEQ ID NO: 3060514 - RNA, 22 nt, Human
agcaguuugguuucuagcauga

SEQ ID NO: 3060515 - RNA, 19 nt, Human
agcagucaggaaagagaac

SEQ ID NO: 3060516 - RNA, 17 nt, Human
agcagucaggaaagaga

SEQ ID NO: 3060517 - RNA, 18 nt, Human
agcagucaggaaagagaa

SEQ ID NO: 3060518 - RNA, 22 nt, Human
agcagggcucagcggggacagc

SEQ ID NO: 3060519 - RNA, 20 nt, Human
agcagggagggcuucugcca

SEQ ID NO: 3060520 - RNA, 19 nt, Human
agcagggcauggcugggaa

SEQ ID NO: 3060521 - RNA, 15 nt, Human
agcagggcucagcgg

SEQ ID NO: 3060522 - RNA, 14 nt, Human
agcagggcucagcg

SEQ ID NO: 3060523 - RNA, 13 nt, Human
agcagggcucagc

SEQ ID NO: 3060524 - RNA, 17 nt, Human
agcaggcucgggcuccc

SEQ ID NO: 3060525 - RNA, 13 nt, Human
agcaggcucucag

SEQ ID NO: 3060526 - RNA, 14 nt, Human
agcaggcucucagg

SEQ ID NO: 3060527 - RNA, 15 nt, Human
agcaggcucucaggc

SEQ ID NO: 3060528 - RNA, 16 nt, Human
agcaggcucucaggcc

SEQ ID NO: 3060529 - RNA, 17 nt, Human
agcaggcucucaggcca

SEQ ID NO: 3060530 - RNA, 18 nt, Human
agcaggcucucaggccag

SEQ ID NO: 3060531 - RNA, 19 nt, Human
agcaggcucucaggccagc

SEQ ID NO: 3060532 - RNA, 21 nt, Human
agcaggcucucaggccagcug

SEQ ID NO: 3060533 - RNA, 22 nt, Human
agcaggcucucaggccagcugc

SEQ ID NO: 3060534 - RNA, 23 nt, Human
agcaggcucucaggccagcugcu

SEQ ID NO: 3060535 - RNA, 13 nt, Human
agcaggcugccag

SEQ ID NO: 3060536 - RNA, 14 nt, Human
agcaggcugccagu

SEQ ID NO: 3060537 - RNA, 17 nt, Human
agcaggcugccagugcc

SEQ ID NO: 3060538 - RNA, 18 nt, Human
agcaggcugccagugccu

SEQ ID NO: 3060539 - RNA, 20 nt, Human
agcaggcugccagugccugg

SEQ ID NO: 3060540 - RNA, 22 nt, Human
agcaggcugccagugccugggu

SEQ ID NO: 3060541 - RNA, 15 nt, Human
agcagggaaacagcu

SEQ ID NO: 3060542 - RNA, 14 nt, Human
agcagggaaacagc

SEQ ID NO: 3060543 - RNA, 13 nt, Human
agcagggaaacag

SEQ ID NO: 3060544 - RNA, 20 nt, Human
ugacccaugcugcccuguga

SEQ ID NO: 3060545 - RNA, 18 nt, Human
ugacccaugcugcccugu

SEQ ID NO: 3060546 - RNA, 19 nt, Human
ugacccaugcugcccugug

SEQ ID NO: 3060547 - RNA, 17 nt, Human
ugacccaugcugcccug

SEQ ID NO: 3060548 - RNA, 16 nt, Human
agcagcagggagggcu

SEQ ID NO: 3060549 - RNA, 11 nt, Human
agcagccacau

SEQ ID NO: 3060550 - RNA, 13 nt, Human
agcaggacaugga

SEQ ID NO: 3060551 - RNA, 20 nt, Human
agcaggaagcugugagagca

SEQ ID NO: 3060552 - RNA, 14 nt, Human
agcaggcuacuguc

SEQ ID NO: 3060553 - RNA, 20 nt, Human
agcaggcuacugucagcucc

SEQ ID NO: 3060554 - RNA, 19 nt, Human
agcaggcuacugucagcuc

SEQ ID NO: 3060555 - RNA, 17 nt, Human
agcaggcuacugucagc

SEQ ID NO: 3060556 - RNA, 16 nt, Human
agcaggcuacugucag

SEQ ID NO: 3060557 - RNA, 20 nt, Human
agcaucacaugaacuuguaa

SEQ ID NO: 3060558 - RNA, 21 nt, Human
agcauauucaggaagcucagg

SEQ ID NO: 3060559 - RNA, 17 nt, Human
agcauauucaggaagcu

SEQ ID NO: 3060560 - RNA, 19 nt, Human
agcauauucaggaagcuca

SEQ ID NO: 3060561 - RNA, 14 nt, Human
ugaucacggcucac

SEQ ID NO: 3060562 - RNA, 13 nt, Human
ugaucacggcuca

SEQ ID NO: 3060563 - RNA, 15 nt, Human
ugaucacggcucacu

SEQ ID NO: 3060564 - RNA, 21 nt, Human
ugauacagaaaaguugaauuu

SEQ ID NO: 3060565 - RNA, 13 nt, Human
agcauggcugcca

SEQ ID NO: 3060566 - RNA, 14 nt, Human
agcauccuggaaua

SEQ ID NO: 3060567 - RNA, 15 nt, Human
agcauccuggaauau

SEQ ID NO: 3060568 - RNA, 13 nt, Human
agcauccuggaau

SEQ ID NO: 3060569 - RNA, 16 nt, Human
agcauauucaggaagc

SEQ ID NO: 3060570 - RNA, 22 nt, Human
agcaucaggccaggcccucugc

SEQ ID NO: 3060571 - RNA, 21 nt, Human
agcaucaggccaggcccucug

SEQ ID NO: 3060572 - RNA, 23 nt, Human
agcaucaggccaggcccucugcc

SEQ ID NO: 3060573 - RNA, 15 nt, Human
agcauuuugcuaaau

SEQ ID NO: 3060574 - RNA, 22 nt, Human
agcauuuugcuaaaugugaaug

SEQ ID NO: 3060575 - RNA, 17 nt, Human
agcauuuguguugaaga

SEQ ID NO: 3060576 - RNA, 18 nt, Human
agcauuuguguugaagag

SEQ ID NO: 3060577 - RNA, 19 nt, Human
agcauggcugccaauggga

SEQ ID NO: 3060578 - RNA, 22 nt, Human
agcauuuagauguauagguuga

SEQ ID NO: 3060579 - RNA, 22 nt, Human
ugaugaaaugaggucagagccu

SEQ ID NO: 3060580 - RNA, 14 nt, Human
ugaucuaggaagac

SEQ ID NO: 3060581 - RNA, 15 nt, Human
ugaucuaggaagacu

SEQ ID NO: 3060582 - RNA, 17 nt, Human
ugaugaucuuuaaaaua

SEQ ID NO: 3060583 - RNA, 23 nt, Human
ugaugaaaugaggucagagccug

SEQ ID NO: 3060584 - RNA, 20 nt, Human
ugaugaucuuugcagacagg

SEQ ID NO: 3060585 - RNA, 19 nt, Human
ugaugaucuuugcagacag

SEQ ID NO: 3060586 - RNA, 21 nt, Human
ugaugaucuuugcagacaggc

SEQ ID NO: 3060587 - RNA, 13 nt, Human
ugauggggcccug

SEQ ID NO: 3060588 - RNA, 22 nt, Human
ugaugggcaacccccagccugc

SEQ ID NO: 3060589 - RNA, 21 nt, Human
ugaugggcaacccccagccug

SEQ ID NO: 3060590 - RNA, 22 nt, Human
ugauggggcccugccuccuuug

SEQ ID NO: 3060591 - RNA, 21 nt, Human
ugauguuuuaaggaugcuugu

SEQ ID NO: 3060592 - RNA, 17 nt, Human
ugauguuuuccaugagu

SEQ ID NO: 3060593 - RNA, 19 nt, Human
ugauguuuuccaugagucc

SEQ ID NO: 3060594 - RNA, 16 nt, Human
agccacggccaggcca

SEQ ID NO: 3060595 - RNA, 16 nt, Human
ugauuaaguaaugaua

SEQ ID NO: 3060596 - RNA, 15 nt, Human
ugauuaaguaaugau

SEQ ID NO: 3060597 - RNA, 16 nt, Human
ugauuaaauucuugca

SEQ ID NO: 3060598 - RNA, 13 nt, Human
ugauuaaauucuu

SEQ ID NO: 3060599 - RNA, 17 nt, Human
ugauuaaauucuugcaa

SEQ ID NO: 3060600 - RNA, 20 nt, Human
ugauuaaccacuucagcuga

SEQ ID NO: 3060601 - RNA, 23 nt, Human
ugauccagaaagaaaacuuguau

SEQ ID NO: 3060602 - RNA, 13 nt, Human
ugauccagaaaga

SEQ ID NO: 3060603 - RNA, 18 nt, Human
ugauccucccaccucagc

SEQ ID NO: 3060604 - RNA, 20 nt, Human
ugauccucccaccucagccu

SEQ ID NO: 3060605 - RNA, 19 nt, Human
ugauccucccaccucagcc

SEQ ID NO: 3060606 - RNA, 13 nt, Human
ugaucuaggaaga

SEQ ID NO: 3060607 - RNA, 16 nt, Human
ugauccucccaccuca

SEQ ID NO: 3060608 - RNA, 15 nt, Human
agccuguuuaagaga

SEQ ID NO: 3060609 - RNA, 20 nt, Human
agccuuagaagucacacagu

SEQ ID NO: 3060610 - RNA, 23 nt, Human
agccuugaacuuugaccucugca

SEQ ID NO: 3060611 - RNA, 19 nt, Human
agccuugcggaagguucua

SEQ ID NO: 3060612 - RNA, 21 nt, Human
agccuugaccauucuccaccu

SEQ ID NO: 3060613 - RNA, 18 nt, Human
agccuugaccauucucca

SEQ ID NO: 3060614 - RNA, 19 nt, Human
agccuugaccauucuccac

SEQ ID NO: 3060615 - RNA, 18 nt, Human
agccugugccucugggac

SEQ ID NO: 3060616 - RNA, 17 nt, Human
agccugugccucuggga

SEQ ID NO: 3060617 - RNA, 19 nt, Human
agccugagcgacagugaga

SEQ ID NO: 3060618 - RNA, 17 nt, Human
ugccagccgagauagcc

SEQ ID NO: 3060619 - RNA, 22 nt, Human
ugccagccgagauagccaaggc

SEQ ID NO: 3060620 - RNA, 17 nt, Human
ugccaguuauggcuaua

SEQ ID NO: 3060621 - RNA, 13 nt, Human
ugccauaauuacu

SEQ ID NO: 3060622 - RNA, 16 nt, Human
ugcauuuaaaagauac

SEQ ID NO: 3060623 - RNA, 13 nt, Human
ugccaauggacua

SEQ ID NO: 3060624 - RNA, 14 nt, Human
ugccaaugggagcu

SEQ ID NO: 3060625 - RNA, 17 nt, Human
ugcauagaauaaaauuu

SEQ ID NO: 3060626 - RNA, 20 nt, Human
ugcauagauucccugagcag

SEQ ID NO: 3060627 - RNA, 14 nt, Human
ugcauaccacuuuu

SEQ ID NO: 3060628 - RNA, 13 nt, Human
ugcauacucauua

SEQ ID NO: 3060629 - RNA, 19 nt, Human
ugcauacucauuaggaugg

SEQ ID NO: 3060630 - RNA, 20 nt, Human
ugcauaccacuuuuguucuu

SEQ ID NO: 3060631 - RNA, 18 nt, Human
ugcauaccacuuuuguuc

SEQ ID NO: 3060632 - RNA, 16 nt, Human
ugcauaccacuuuugu

SEQ ID NO: 3060633 - RNA, 19 nt, Human
ugcaugcugucccuuacgu

SEQ ID NO: 3060634 - RNA, 21 nt, Human
ugcaugcugucccuuacguga

SEQ ID NO: 3060635 - RNA, 18 nt, Human
ugcaugcugucccuuacg

SEQ ID NO: 3060636 - RNA, 17 nt, Human
ugcaucguuucaucuuc

SEQ ID NO: 3060637 - RNA, 22 nt, Human
ugcaggucccuaauaaagcugu

SEQ ID NO: 3060638 - RNA, 21 nt, Human
ugcaggucccuaauaaagcug

SEQ ID NO: 3060639 - RNA, 17 nt, Human
ugcagccucacaguccu

SEQ ID NO: 3060640 - RNA, 21 nt, Human
ugcagccucacaguccuuacc

SEQ ID NO: 3060641 - RNA, 18 nt, Human
ugcagccucacaguccuu

SEQ ID NO: 3060642 - RNA, 21 nt, Human
ugcagacaggcaagcaccucc

SEQ ID NO: 3060643 - RNA, 13 nt, Human
ugcagacaggcaa

SEQ ID NO: 3060644 - RNA, 12 nt, Human
ugcagacaggca

SEQ ID NO: 3060645 - RNA, 14 nt, Human
agccuccugcccuu

SEQ ID NO: 3060646 - RNA, 18 nt, Human
agccuccugcccuuaccu

SEQ ID NO: 3060647 - RNA, 13 nt, Human
agccuccugcccu

SEQ ID NO: 3060648 - RNA, 20 nt, Human
agcccugggaggcucuggag

SEQ ID NO: 3060649 - RNA, 18 nt, Human
agcccugggaggcucugg

SEQ ID NO: 3060650 - RNA, 17 nt, Human
agcccugggaggcucug

SEQ ID NO: 3060651 - RNA, 21 nt, Human
ugcaccacugcacuccagccu

SEQ ID NO: 3060652 - RNA, 13 nt, Human
ugcaccagcccuu

SEQ ID NO: 3060653 - RNA, 15 nt, Human
ugcaccacugcacuc

SEQ ID NO: 3060654 - RNA, 15 nt, Human
ugcacuccagccugg

SEQ ID NO: 3060655 - RNA, 17 nt, Human
ugcacuccagccugagc

SEQ ID NO: 3060656 - RNA, 16 nt, Human
ugcacuccagccuggg

SEQ ID NO: 3060657 - RNA, 22 nt, Human
ugcagaagacaguauggcagcu

SEQ ID NO: 3060658 - RNA, 14 nt, Human
ugcacuccagccug

SEQ ID NO: 3060659 - RNA, 15 nt, Human
ugcacuccagccuga

SEQ ID NO: 3060660 - RNA, 16 nt, Human
ugcaccggcuggccug

SEQ ID NO: 3060661 - RNA, 14 nt, Human
ugcaccggcuggcc

SEQ ID NO: 3060662 - RNA, 15 nt, Human
ugcaccggcuggccu

SEQ ID NO: 3060663 - RNA, 16 nt, Human
agcccgggcucugccu

SEQ ID NO: 3060664 - RNA, 14 nt, Human
agcccugcagaggg

SEQ ID NO: 3060665 - RNA, 15 nt, Human
agcccugcagagggc

SEQ ID NO: 3060666 - RNA, 16 nt, Human
agcccugcagagggca

SEQ ID NO: 3060667 - RNA, 19 nt, Human
agcccugcagagggcacag

SEQ ID NO: 3060668 - RNA, 19 nt, Human
agccccuucugacccaugc

SEQ ID NO: 3060669 - RNA, 13 nt, Human
agcccgggcucug

SEQ ID NO: 3060670 - RNA, 14 nt, Human
agcccgggcucugc

SEQ ID NO: 3060671 - RNA, 15 nt, Human
agcccgggcucugcc

SEQ ID NO: 3060672 - RNA, 15 nt, Human
agccccuucugaccc

SEQ ID NO: 3060673 - RNA, 16 nt, Human
agccccuucugaccca

SEQ ID NO: 3060674 - RNA, 14 nt, Human
agccccuucugacc

SEQ ID NO: 3060675 - RNA, 14 nt, Human
agccccgaggccuu

SEQ ID NO: 3060676 - RNA, 14 nt, Human
agcccaggccuccu

SEQ ID NO: 3060677 - RNA, 19 nt, Human
agcccaggccuccuacagc

SEQ ID NO: 3060678 - RNA, 22 nt, Human
agccccuggaugcagccucaca

SEQ ID NO: 3060679 - RNA, 13 nt, Human
ugcaacaggcugg

SEQ ID NO: 3060680 - RNA, 15 nt, Human
ugcaagccagauuuu

SEQ ID NO: 3060681 - RNA, 21 nt, Human
ugcaagccagauuuuccugaa

SEQ ID NO: 3060682 - RNA, 15 nt, Human
ugcaaggucauuuuu

SEQ ID NO: 3060683 - RNA, 12 nt, Human
agcccaggccuc

SEQ ID NO: 3060684 - RNA, 12 nt, Human
ugcaaaccauca

SEQ ID NO: 3060685 - RNA, 13 nt, Human
ugcaaaccaucau

SEQ ID NO: 3060686 - RNA, 18 nt, Human
agccacggccaggccaga

SEQ ID NO: 3060687 - RNA, 17 nt, Human
agccacggccaggccag

SEQ ID NO: 3060688 - RNA, 13 nt, Human
ugauuucauucaa

SEQ ID NO: 3060689 - RNA, 20 nt, Human
ugcaaaguaucccuacugua

SEQ ID NO: 3060690 - RNA, 21 nt, Human
ugcaaaggguaucaggugcug

SEQ ID NO: 3060691 - RNA, 18 nt, Human
ugcaaaccaucauugaaa

SEQ ID NO: 3060692 - RNA, 18 nt, Human
ugcaaagcacugacuucu

SEQ ID NO: 3060693 - RNA, 22 nt, Human
ugcaaagcacugacuucuaagu

SEQ ID NO: 3060694 - RNA, 20 nt, Human
ugcaaagcacugacuucuaa

SEQ ID NO: 3060695 - RNA, 21 nt, Human
agaauguguuuaaacuugguu

SEQ ID NO: 3060696 - RNA, 19 nt, Human
agaauuaguggcacuugcu

SEQ ID NO: 3060697 - RNA, 23 nt, Human
agaauuaacacaugauccugcaa

SEQ ID NO: 3060698 - RNA, 23 nt, Human
agaaccccaggguccuguagccc

SEQ ID NO: 3060699 - RNA, 14 nt, Human
agaauucucuaguu

SEQ ID NO: 3060700 - RNA, 20 nt, Human
agaauuauaauuaguuccuc

SEQ ID NO: 3060701 - RNA, 20 nt, Human
agaauucucagaaucucaaa

SEQ ID NO: 3060702 - RNA, 19 nt, Human
ucuguuuagauaauacacc

SEQ ID NO: 3060703 - RNA, 16 nt, Human
ucuguuuagauaauac

SEQ ID NO: 3060704 - RNA, 23 nt, Human
ucuguuuagauaauacaccacua

SEQ ID NO: 3060705 - RNA, 13 nt, Human
ucuguuuagauaa

SEQ ID NO: 3060706 - RNA, 18 nt, Human
ucuguacgucugacaggc

SEQ ID NO: 3060707 - RNA, 12 nt, Human
agacagaaaaaa

SEQ ID NO: 3060708 - RNA, 13 nt, Human
agacagcugccug

SEQ ID NO: 3060709 - RNA, 14 nt, Human
agacagcugccugg

SEQ ID NO: 3060710 - RNA, 21 nt, Human
agacacauguccaagaagccc

SEQ ID NO: 3060711 - RNA, 22 nt, Human
agacacauguccaagaagccca

SEQ ID NO: 3060712 - RNA, 16 nt, Human
agacacaggcccggcu

SEQ ID NO: 3060713 - RNA, 23 nt, Human
agacacaggcccggcuccaggcu

SEQ ID NO: 3060714 - RNA, 24 nt, Human
agacacauguccaagaagcccagg

SEQ ID NO: 3060715 - RNA, 19 nt, Human
agacaccuugacagggcac

SEQ ID NO: 3060716 - RNA, 22 nt, Human
agacaccuugacagggcacacc

SEQ ID NO: 3060717 - RNA, 20 nt, Human
agacacauguccaagaagcc

SEQ ID NO: 3060718 - RNA, 20 nt, Human
agacacaacuauuuuuccaa

SEQ ID NO: 3060719 - RNA, 19 nt, Human
agacacaacuauuuuucca

SEQ ID NO: 3060720 - RNA, 13 nt, Human
agacacaagccuu

SEQ ID NO: 3060721 - RNA, 14 nt, Human
agacacaagccuuc

SEQ ID NO: 3060722 - RNA, 15 nt, Human
agacacacaugaagu

SEQ ID NO: 3060723 - RNA, 19 nt, Human
agaauucucuaguuugauu

SEQ ID NO: 3060724 - RNA, 18 nt, Human
agaauucucuaguuugau

SEQ ID NO: 3060725 - RNA, 17 nt, Human
agaauucucuuauccaa

SEQ ID NO: 3060726 - RNA, 17 nt, Human
agacacaggcccggcuc

SEQ ID NO: 3060727 - RNA, 17 nt, Human
agacacacugaagaagc

SEQ ID NO: 3060728 - RNA, 16 nt, Human
agacacacugaagaag

SEQ ID NO: 3060729 - RNA, 22 nt, Human
agacacaggcccggcuccaggc

SEQ ID NO: 3060730 - RNA, 21 nt, Human
agacacaggcccggcuccagg

SEQ ID NO: 3060731 - RNA, 20 nt, Human
agacacaggcccggcuccag

SEQ ID NO: 3060732 - RNA, 19 nt, Human
agacacaggcccggcucca

SEQ ID NO: 3060733 - RNA, 19 nt, Human
ucuuacugucuuuuuucua

SEQ ID NO: 3060734 - RNA, 12 nt, Human
ucuuagauguau

SEQ ID NO: 3060735 - RNA, 23 nt, Human
ucuuagaugcaguucugaagaag

SEQ ID NO: 3060736 - RNA, 22 nt, Human
ucuuagaugcaguucugaagaa

SEQ ID NO: 3060737 - RNA, 18 nt, Human
ucuuaugggcuggguucu

SEQ ID NO: 3060738 - RNA, 12 nt, Human
agacagucccug

SEQ ID NO: 3060739 - RNA, 15 nt, Human
agacagcugccuggg

SEQ ID NO: 3060740 - RNA, 16 nt, Human
agacagcugccuggga

SEQ ID NO: 3060741 - RNA, 13 nt, Human
agacagucccugc

SEQ ID NO: 3060742 - RNA, 19 nt, Human
agacagucccugccaaugg

SEQ ID NO: 3060743 - RNA, 23 nt, Human
agacauacuaaccagcagaaaug

SEQ ID NO: 3060744 - RNA, 20 nt, Human
ucuucuguacgucugacagg

SEQ ID NO: 3060745 - RNA, 17 nt, Human
ucuuauuuaaugaaaga

SEQ ID NO: 3060746 - RNA, 15 nt, Human
ucuuauuucauuucu

SEQ ID NO: 3060747 - RNA, 16 nt, Human
ucuuauuucauuucuu

SEQ ID NO: 3060748 - RNA, 22 nt, Human
ucuucuguacgucugacaggca

SEQ ID NO: 3060749 - RNA, 21 nt, Human
ucuucuguacgucugacaggc

SEQ ID NO: 3060750 - RNA, 19 nt, Human
ucuucugcuucagccuccc

SEQ ID NO: 3060751 - RNA, 22 nt, Human
ucuucugcuucagccucccgag

SEQ ID NO: 3060752 - RNA, 14 nt, Human
agacccggcugcgu

SEQ ID NO: 3060753 - RNA, 16 nt, Human
ucuugagccuugaacu

SEQ ID NO: 3060754 - RNA, 17 nt, Human
ucuugagccuugaacuu

SEQ ID NO: 3060755 - RNA, 19 nt, Human
ucuugagccuugaacuuug

SEQ ID NO: 3060756 - RNA, 18 nt, Human
ucuugagccuugaacuuu

SEQ ID NO: 3060757 - RNA, 23 nt, Human
agacuauucaaacagucucagga

SEQ ID NO: 3060758 - RNA, 16 nt, Human
agacuguacaaaguag

SEQ ID NO: 3060759 - RNA, 15 nt, Human
agacuguacaaagua

SEQ ID NO: 3060760 - RNA, 14 nt, Human
agacuguacaaagu

SEQ ID NO: 3060761 - RNA, 20 nt, Human
agacucgcgacaaugcaaac

SEQ ID NO: 3060762 - RNA, 24 nt, Human
agagacagaaagcagaacagugau

SEQ ID NO: 3060763 - RNA, 15 nt, Human
agagacagaaagcag

SEQ ID NO: 3060764 - RNA, 19 nt, Human
agacuuuucuuucagccaa

SEQ ID NO: 3060765 - RNA, 22 nt, Human
agagaaaaaauauuuuccugcc

SEQ ID NO: 3060766 - RNA, 14 nt, Human
ucuugguuuguaaa

SEQ ID NO: 3060767 - RNA, 14 nt, Human
ucuuuaauuuuaca

SEQ ID NO: 3060768 - RNA, 22 nt, Human
ucuuuaaugucacaggcagguc

SEQ ID NO: 3060769 - RNA, 19 nt, Human
ucuuuaaugucacaggcag

SEQ ID NO: 3060770 - RNA, 20 nt, Human
ucuuuaaugucacaggcagg

SEQ ID NO: 3060771 - RNA, 16 nt, Human
ucuugguuuguaaauu

SEQ ID NO: 3060772 - RNA, 18 nt, Human
ucuuucuggcuaugcauu

SEQ ID NO: 3060773 - RNA, 20 nt, Human
ucuuuauaauucuacuuuga

SEQ ID NO: 3060774 - RNA, 13 nt, Human
ucuuucugcuuug

SEQ ID NO: 3060775 - RNA, 15 nt, Human
agacucgcgacaaug

SEQ ID NO: 3060776 - RNA, 17 nt, Human
agacucgcgacaaugca

SEQ ID NO: 3060777 - RNA, 18 nt, Human
agacucgcgacaaugcaa

SEQ ID NO: 3060778 - RNA, 19 nt, Human
agacucgcgacaaugcaaa

SEQ ID NO: 3060779 - RNA, 23 nt, Human
agacuccugcaggcagccaggcc

SEQ ID NO: 3060780 - RNA, 17 nt, Human
ugacauaaaaacaacuu

SEQ ID NO: 3060781 - RNA, 20 nt, Human
ugacagggcacaccgggcac

SEQ ID NO: 3060782 - RNA, 16 nt, Human
ugacagggcacaccgg

SEQ ID NO: 3060783 - RNA, 11 nt, Human
ugacagggcac

SEQ ID NO: 3060784 - RNA, 21 nt, Human
ugacacacagcucuguccugg

SEQ ID NO: 3060785 - RNA, 20 nt, Human
ugacaggcaaugcuggcugu

SEQ ID NO: 3060786 - RNA, 18 nt, Human
ugacauaaaaacaacuuu

SEQ ID NO: 3060787 - RNA, 20 nt, Human
ugacauaaaaacaacuuuau

SEQ ID NO: 3060788 - RNA, 21 nt, Human
ugacauuguuggccaaagcca

SEQ ID NO: 3060789 - RNA, 20 nt, Human
ugacauuguuggccaaagcc

SEQ ID NO: 3060790 - RNA, 18 nt, Human
ugaccaaugauggucacc

SEQ ID NO: 3060791 - RNA, 13 nt, Human
agaucagccuggg

SEQ ID NO: 3060792 - RNA, 15 nt, Human
agaucagccugggca

SEQ ID NO: 3060793 - RNA, 15 nt, Human
agaugcuucucacug

SEQ ID NO: 3060794 - RNA, 23 nt, Human
ugaccauucuccaccugccaggg

SEQ ID NO: 3060795 - RNA, 17 nt, Human
ugacccacaagaaauga

SEQ ID NO: 3060796 - RNA, 13 nt, Human
ugacccacugcuu

SEQ ID NO: 3060797 - RNA, 12 nt, Human
ugacccacugcu

SEQ ID NO: 3060798 - RNA, 15 nt, Human
agaugcaccagcccu

SEQ ID NO: 3060799 - RNA, 14 nt, Human
agaugcaccagccc

SEQ ID NO: 3060800 - RNA, 17 nt, Human
agaugcaguucugaaga

SEQ ID NO: 3060801 - RNA, 18 nt, Human
agaugcaguucugaagaa

SEQ ID NO: 3060802 - RNA, 19 nt, Human
agaugcaguucugaagaag

SEQ ID NO: 3060803 - RNA, 14 nt, Human
agaugcuagaacuc

SEQ ID NO: 3060804 - RNA, 17 nt, Human
agauaaagguucaugca

SEQ ID NO: 3060805 - RNA, 12 nt, Human
agauaaaugugc

SEQ ID NO: 3060806 - RNA, 12 nt, Human
agauacugaaau

SEQ ID NO: 3060807 - RNA, 13 nt, Human
agauacugaaaua

SEQ ID NO: 3060808 - RNA, 15 nt, Human
agauacugaaauaaa

SEQ ID NO: 3060809 - RNA, 16 nt, Human
agaucacgccacugca

SEQ ID NO: 3060810 - RNA, 15 nt, Human
agaucacgccacugc

SEQ ID NO: 3060811 - RNA, 14 nt, Human
agaucacgccacug

SEQ ID NO: 3060812 - RNA, 16 nt, Human
agauaugauucaaaug

SEQ ID NO: 3060813 - RNA, 18 nt, Human
agaucacgccacugcacu

SEQ ID NO: 3060814 - RNA, 17 nt, Human
agaucacgccacugcac

SEQ ID NO: 3060815 - RNA, 15 nt, Human
ugaauuucuuuugcc

SEQ ID NO: 3060816 - RNA, 16 nt, Human
ugaauuuuacauggcu

SEQ ID NO: 3060817 - RNA, 20 nt, Human
ugacacacagcucuguccug

SEQ ID NO: 3060818 - RNA, 20 nt, Human
agaguugaugguuguacaua

SEQ ID NO: 3060819 - RNA, 12 nt, Human
agaguuguuaca

SEQ ID NO: 3060820 - RNA, 21 nt, Human
agaguuguuacauuuuuaagu

SEQ ID NO: 3060821 - RNA, 16 nt, Human
agaguuuagcuggaaa

SEQ ID NO: 3060822 - RNA, 17 nt, Human
agaguuuagcuggaaaa

SEQ ID NO: 3060823 - RNA, 22 nt, Human
agaguugauacuacaguuuguu

SEQ ID NO: 3060824 - RNA, 20 nt, Human
agaguugauacuacaguuug

SEQ ID NO: 3060825 - RNA, 17 nt, Human
agaguugauacuacagu

SEQ ID NO: 3060826 - RNA, 22 nt, Human
agagucagaaguuucugccgca

SEQ ID NO: 3060827 - RNA, 20 nt, Human
ugaaugguuuucaaaauaaa

SEQ ID NO: 3060828 - RNA, 19 nt, Human
ugaaugucagugugacuga

SEQ ID NO: 3060829 - RNA, 15 nt, Human
ugaaauuguauuaca

SEQ ID NO: 3060830 - RNA, 23 nt, Human
ugaaauuuccugggagcuuuugu

SEQ ID NO: 3060831 - RNA, 18 nt, Human
agagcugccaccugccug

SEQ ID NO: 3060832 - RNA, 14 nt, Human
ugaaauaagccaga

SEQ ID NO: 3060833 - RNA, 17 nt, Human
ugaaauaagccagacau

SEQ ID NO: 3060834 - RNA, 18 nt, Human
ugaaauaagccagacauc

SEQ ID NO: 3060835 - RNA, 20 nt, Human
ugaaauaagccagacaucaa

SEQ ID NO: 3060836 - RNA, 23 nt, Human
ugaaauaagccagacaucaacag

SEQ ID NO: 3060837 - RNA, 21 nt, Human
agagccuugcggaagguucua

SEQ ID NO: 3060838 - RNA, 11 nt, Human
agagccuugcg

SEQ ID NO: 3060839 - RNA, 17 nt, Human
agagcagagaccauccc

SEQ ID NO: 3060840 - RNA, 18 nt, Human
agagcagagaccaucccu

SEQ ID NO: 3060841 - RNA, 20 nt, Human
agagcagagaccaucccuga

SEQ ID NO: 3060842 - RNA, 14 nt, Human
agagcaaaauugau

SEQ ID NO: 3060843 - RNA, 12 nt, Human
agagcagagacc

SEQ ID NO: 3060844 - RNA, 17 nt, Human
ucuuuggacccugaggc

SEQ ID NO: 3060845 - RNA, 21 nt, Human
ucuuuggacccugaggcccag

SEQ ID NO: 3060846 - RNA, 16 nt, Human
ucuuuggacccugagg

SEQ ID NO: 3060847 - RNA, 16 nt, Human
agagauugugguuuca

SEQ ID NO: 3060848 - RNA, 21 nt, Human
ugaacuaggauuguaguccca

SEQ ID NO: 3060849 - RNA, 23 nt, Human
ugaacuagaguuuagcuggaaaa

SEQ ID NO: 3060850 - RNA, 12 nt, Human
ugaacuccuggc

SEQ ID NO: 3060851 - RNA, 11 nt, Human
ugaacuccugg

SEQ ID NO: 3060852 - RNA, 15 nt, Human
ugaacuccuggccuc

SEQ ID NO: 3060853 - RNA, 14 nt, Human
ugaacuccuggccu

SEQ ID NO: 3060854 - RNA, 15 nt, Human
ugaaauuuuuauuaa

SEQ ID NO: 3060855 - RNA, 18 nt, Human
ugaacaaauuuacagaga

SEQ ID NO: 3060856 - RNA, 19 nt, Human
ugaacaaauuuacagagac

SEQ ID NO: 3060857 - RNA, 20 nt, Human
ugaacaaauuuacagagaca

SEQ ID NO: 3060858 - RNA, 22 nt, Human
ugaaccgaugagaaauaaaguu

SEQ ID NO: 3060859 - RNA, 19 nt, Human
agagcuguucacagccaga

SEQ ID NO: 3060860 - RNA, 21 nt, Human
agagcuguucacagccagacu

SEQ ID NO: 3060861 - RNA, 22 nt, Human
ugaacuuugaccucugcagcaa

SEQ ID NO: 3060862 - RNA, 17 nt, Human
ugaacuuugaccucugc

SEQ ID NO: 3060863 - RNA, 20 nt, Human
ugaacuuugaccucugcagc

SEQ ID NO: 3060864 - RNA, 19 nt, Human
ugaacuuugaccucugcag

SEQ ID NO: 3060865 - RNA, 22 nt, Human
agaguaauccaagcaaauguga

SEQ ID NO: 3060866 - RNA, 12 nt, Human
agagguuuuaaa

SEQ ID NO: 3060867 - RNA, 22 nt, Human
ugaagcacagugaucaaguuau

SEQ ID NO: 3060868 - RNA, 15 nt, Human
agagguugcagugag

SEQ ID NO: 3060869 - RNA, 19 nt, Human
agaggccaugggccuccug

SEQ ID NO: 3060870 - RNA, 17 nt, Human
agaggcuaugugagcac

SEQ ID NO: 3060871 - RNA, 13 nt, Human
agaggcagggucu

SEQ ID NO: 3060872 - RNA, 10 nt, Human
agaggcaggg

SEQ ID NO: 3060873 - RNA, 19 nt, Human
agaggcagccccauucugc

SEQ ID NO: 3060874 - RNA, 13 nt, Human
agaggcagcccca

SEQ ID NO: 3060875 - RNA, 24 nt, Human
agaggcagccccauucugccugcc

SEQ ID NO: 3060876 - RNA, 21 nt, Human
acugugugcucaggagcccug

SEQ ID NO: 3060877 - RNA, 20 nt, Human
acugugugcucaggagcccu

SEQ ID NO: 3060878 - RNA, 19 nt, Human
acugugugcucaggagccc

SEQ ID NO: 3060879 - RNA, 15 nt, Human
acugugugcucagga

SEQ ID NO: 3060880 - RNA, 12 nt, Human
acugugugcuca

SEQ ID NO: 3060881 - RNA, 13 nt, Human
acuguggguagac

SEQ ID NO: 3060882 - RNA, 18 nt, Human
acuguggguagacacaca

SEQ ID NO: 3060883 - RNA, 16 nt, Human
acugggagaaaugaaa

SEQ ID NO: 3060884 - RNA, 18 nt, Human
acugggacaggggagaac

SEQ ID NO: 3060885 - RNA, 21 nt, Human
acugucagcuccccucggaga

SEQ ID NO: 3060886 - RNA, 17 nt, Human
acuguccuacccacccu

SEQ ID NO: 3060887 - RNA, 18 nt, Human
acuguccuacccacccuc

SEQ ID NO: 3060888 - RNA, 22 nt, Human
acugugcugagucugaaggcug

SEQ ID NO: 3060889 - RNA, 13 nt, Human
ucguaaaauuaag

SEQ ID NO: 3060890 - RNA, 16 nt, Human
ucguaaaauuaagaaa

SEQ ID NO: 3060891 - RNA, 22 nt, Human
ucguuuucaaaauuguuacaaa

SEQ ID NO: 3060892 - RNA, 11 nt, Human
ucgggcaugac

SEQ ID NO: 3060893 - RNA, 12 nt, Human
ucgggcaugaca

SEQ ID NO: 3060894 - RNA, 22 nt, Human
ucggguuuuauuguuuaaaauc

SEQ ID NO: 3060895 - RNA, 19 nt, Human
ucgggaggucgaggcagga

SEQ ID NO: 3060896 - RNA, 21 nt, Human
ucgggaggucgaggcaggagg

SEQ ID NO: 3060897 - RNA, 17 nt, Human
ucgggaggucgaggcag

SEQ ID NO: 3060898 - RNA, 22 nt, Human
ucuacauaaguaauucaagaaa

SEQ ID NO: 3060899 - RNA, 17 nt, Human
ucuaccaaaaaucucaa

SEQ ID NO: 3060900 - RNA, 14 nt, Human
acuguucucugccc

SEQ ID NO: 3060901 - RNA, 20 nt, Human
acuguucucugcccuccaag

SEQ ID NO: 3060902 - RNA, 21 nt, Human
acuguucucugcccuccaaga

SEQ ID NO: 3060903 - RNA, 19 nt, Human
acuguucucugcccuccaa

SEQ ID NO: 3060904 - RNA, 20 nt, Human
ucuacauaaguaauucaaga

SEQ ID NO: 3060905 - RNA, 17 nt, Human
ucuacauaaguaauuca

SEQ ID NO: 3060906 - RNA, 16 nt, Human
ucuacauacuauggaa

SEQ ID NO: 3060907 - RNA, 23 nt, Human
ucuaaguaaaaccacagcaguug

SEQ ID NO: 3060908 - RNA, 20 nt, Human
ucuaaguaaaaccacagcag

SEQ ID NO: 3060909 - RNA, 22 nt, Human
ucuaaguaaaaccacagcaguu

SEQ ID NO: 3060910 - RNA, 21 nt, Human
ucuaaguaaaaccacagcagu

SEQ ID NO: 3060911 - RNA, 20 nt, Human
ucuaaagccauuguaguccu

SEQ ID NO: 3060912 - RNA, 13 nt, Human
ucuaaagcugcca

SEQ ID NO: 3060913 - RNA, 14 nt, Human
ucuaaagcugccag

SEQ ID NO: 3060914 - RNA, 15 nt, Human
ucuaaagcugccagc

SEQ ID NO: 3060915 - RNA, 15 nt, Human
acuuaaauaauguga

SEQ ID NO: 3060916 - RNA, 16 nt, Human
acuuaaauaaugugaa

SEQ ID NO: 3060917 - RNA, 18 nt, Human
acuuaaauaaugugaaac

SEQ ID NO: 3060918 - RNA, 17 nt, Human
acuuaaauaaugugaaa

SEQ ID NO: 3060919 - RNA, 14 nt, Human
acuguugcccaggc

SEQ ID NO: 3060920 - RNA, 13 nt, Human
acuguugcccagg

SEQ ID NO: 3060921 - RNA, 12 nt, Human
acuguugcccag

SEQ ID NO: 3060922 - RNA, 18 nt, Human
acuguugcccaggcuggc

SEQ ID NO: 3060923 - RNA, 17 nt, Human
acuguugcccaggcugg

SEQ ID NO: 3060924 - RNA, 16 nt, Human
acuuaaucuaaaugga

SEQ ID NO: 3060925 - RNA, 15 nt, Human
acuuaaucuaaaugg

SEQ ID NO: 3060926 - RNA, 13 nt, Human
acuuaaucuaaau

SEQ ID NO: 3060927 - RNA, 13 nt, Human
acugccuucucaa

SEQ ID NO: 3060928 - RNA, 19 nt, Human
acugccuucucaacuccaa

SEQ ID NO: 3060929 - RNA, 18 nt, Human
acugcuuaacuucacaua

SEQ ID NO: 3060930 - RNA, 15 nt, Human
acuggauuaaacuua

SEQ ID NO: 3060931 - RNA, 13 nt, Human
acuggcacaguuu

SEQ ID NO: 3060932 - RNA, 20 nt, Human
acuggcacaguuuucugaga

SEQ ID NO: 3060933 - RNA, 19 nt, Human
acuggcacaguuuucugag

SEQ ID NO: 3060934 - RNA, 21 nt, Human
acugcuugugaaaggaaagag

SEQ ID NO: 3060935 - RNA, 17 nt, Human
acugcuuccagugaggc

SEQ ID NO: 3060936 - RNA, 20 nt, Human
acugcuuaacuucacauauu

SEQ ID NO: 3060937 - RNA, 21 nt, Human
acugccuauuuuaauaaacac

SEQ ID NO: 3060938 - RNA, 16 nt, Human
acugccuauuuuaaua

SEQ ID NO: 3060939 - RNA, 15 nt, Human
acugcauuauauuua

SEQ ID NO: 3060940 - RNA, 14 nt, Human
acugcauuauauuu

SEQ ID NO: 3060941 - RNA, 16 nt, Human
acugcauaugaaagga

SEQ ID NO: 3060942 - RNA, 21 nt, Human
uccuagaaauuccccacccug

SEQ ID NO: 3060943 - RNA, 22 nt, Human
uccuagaaauuccccacccuga

SEQ ID NO: 3060944 - RNA, 16 nt, Human
acugcauguuugugau

SEQ ID NO: 3060945 - RNA, 15 nt, Human
acugcauguuuguga

SEQ ID NO: 3060946 - RNA, 20 nt, Human
acugcaucaagaugugacau

SEQ ID NO: 3060947 - RNA, 22 nt, Human
acugcaucaagaugugacaugu

SEQ ID NO: 3060948 - RNA, 14 nt, Human
uccuucagugccuu

SEQ ID NO: 3060949 - RNA, 15 nt, Human
uccuucagugccuua

SEQ ID NO: 3060950 - RNA, 16 nt, Human
uccuucagugccuuau

SEQ ID NO: 3060951 - RNA, 17 nt, Human
uccuucagugccuuaug

SEQ ID NO: 3060952 - RNA, 22 nt, Human
uccuuggugucgggcaugacac

SEQ ID NO: 3060953 - RNA, 23 nt, Human
uccuuguguuacuaaguuuuuau

SEQ ID NO: 3060954 - RNA, 14 nt, Human
uccuuguguuacua

SEQ ID NO: 3060955 - RNA, 19 nt, Human
uccuuuagcgcccaguugg

SEQ ID NO: 3060956 - RNA, 15 nt, Human
uccuuuagcgcccag

SEQ ID NO: 3060957 - RNA, 22 nt, Human
uccuuucuaacaaaaaaauaua

SEQ ID NO: 3060958 - RNA, 22 nt, Human
uccuuuagcgcccaguugggug

SEQ ID NO: 3060959 - RNA, 16 nt, Human
ucgagcaugccuggau

SEQ ID NO: 3060960 - RNA, 18 nt, Human
ucgagcaugccuggaugg

SEQ ID NO: 3060961 - RNA, 15 nt, Human
ucgagcaugccugga

SEQ ID NO: 3060962 - RNA, 16 nt, Human
ucgcgacaaugcaaac

SEQ ID NO: 3060963 - RNA, 14 nt, Human
ucgcgacaaugcaa

SEQ ID NO: 3060964 - RNA, 19 nt, Human
ucgcgacaaugcaaaccau

SEQ ID NO: 3060965 - RNA, 18 nt, Human
ucgcuccaccuugcagcu

SEQ ID NO: 3060966 - RNA, 15 nt, Human
ucucuggaauuugaa

SEQ ID NO: 3060967 - RNA, 19 nt, Human
ucucuggaauuugaaacac

SEQ ID NO: 3060968 - RNA, 12 nt, Human
ucucuggccuuc

SEQ ID NO: 3060969 - RNA, 11 nt, Human
ucucugcccuc

SEQ ID NO: 3060970 - RNA, 15 nt, Human
ucucugcccuccaag

SEQ ID NO: 3060971 - RNA, 16 nt, Human
ucucugcccuccaaga

SEQ ID NO: 3060972 - RNA, 17 nt, Human
ucucugcccuccaagac

SEQ ID NO: 3060973 - RNA, 14 nt, Human
ucucuccuguaccu

SEQ ID NO: 3060974 - RNA, 16 nt, Human
ucucuccuguaccucu

SEQ ID NO: 3060975 - RNA, 16 nt, Human
acuuugaccucugcag

SEQ ID NO: 3060976 - RNA, 15 nt, Human
acuuugaccucugca

SEQ ID NO: 3060977 - RNA, 18 nt, Human
acuuugaccucugcagca

SEQ ID NO: 3060978 - RNA, 13 nt, Human
ucucucacuccuu

SEQ ID NO: 3060979 - RNA, 15 nt, Human
ucucucacuccuuga

SEQ ID NO: 3060980 - RNA, 21 nt, Human
ucucucaggccaaacucaccu

SEQ ID NO: 3060981 - RNA, 17 nt, Human
ucucucacuuguuuuau

SEQ ID NO: 3060982 - RNA, 17 nt, Human
ucucuccagccccugga

SEQ ID NO: 3060983 - RNA, 16 nt, Human
ucucuccagccccugg

SEQ ID NO: 3060984 - RNA, 18 nt, Human
ucucuccagccccuggau

SEQ ID NO: 3060985 - RNA, 19 nt, Human
ucucuccagccccuggaug

SEQ ID NO: 3060986 - RNA, 19 nt, Human
agaaaacuuguauuaugug

SEQ ID NO: 3060987 - RNA, 21 nt, Human
agaaaacuuguauuaugugug

SEQ ID NO: 3060988 - RNA, 17 nt, Human
agaaaaaggaugcacag

SEQ ID NO: 3060989 - RNA, 23 nt, Human
agaaacuuaagguuaccuuuguu

SEQ ID NO: 3060990 - RNA, 17 nt, Human
ucucuugagccugggag

SEQ ID NO: 3060991 - RNA, 21 nt, Human
ucucuggccuucggccuccau

SEQ ID NO: 3060992 - RNA, 22 nt, Human
ucucuggccuucggccuccauc

SEQ ID NO: 3060993 - RNA, 14 nt, Human
ucucuugauucaua

SEQ ID NO: 3060994 - RNA, 16 nt, Human
ucucuugauucauaau

SEQ ID NO: 3060995 - RNA, 18 nt, Human
ucucuugagccugggagg

SEQ ID NO: 3060996 - RNA, 21 nt, Human
ucucuuuaaugucacaggcag

SEQ ID NO: 3060997 - RNA, 20 nt, Human
ucucuuuaaugucacaggca

SEQ ID NO: 3060998 - RNA, 13 nt, Human
agaaaaagaaaaa

SEQ ID NO: 3060999 - RNA, 23 nt, Human
agaaaugaaaaaauauauaucaa

SEQ ID NO: 3061000 - RNA, 18 nt, Human
agaaaugaaaaaauauau

SEQ ID NO: 3061001 - RNA, 16 nt, Human
agaaaugaaaaaauau

SEQ ID NO: 3061002 - RNA, 21 nt, Human
ucugaacuuggcgcugccccu

SEQ ID NO: 3061003 - RNA, 12 nt, Human
ucugaagaagau

SEQ ID NO: 3061004 - RNA, 12 nt, Human
agaaaucuaaaa

SEQ ID NO: 3061005 - RNA, 17 nt, Human
agaaaugaaaaaauaua

SEQ ID NO: 3061006 - RNA, 17 nt, Human
agaaaucaaagagagaa

SEQ ID NO: 3061007 - RNA, 20 nt, Human
agaaauaucugaaaauguau

SEQ ID NO: 3061008 - RNA, 19 nt, Human
agaaauaucugaaaaugua

SEQ ID NO: 3061009 - RNA, 14 nt, Human
agaaauauaauuga

SEQ ID NO: 3061010 - RNA, 21 nt, Human
agaaauuaugugccagauuua

SEQ ID NO: 3061011 - RNA, 13 nt, Human
agaaauuaugugc

SEQ ID NO: 3061012 - RNA, 18 nt, Human
ucugcaggucccuaauaa

SEQ ID NO: 3061013 - RNA, 14 nt, Human
ucugcaggucccua

SEQ ID NO: 3061014 - RNA, 12 nt, Human
agaaauuaugug

SEQ ID NO: 3061015 - RNA, 17 nt, Human
agaaauuuauaaacuuu

SEQ ID NO: 3061016 - RNA, 16 nt, Human
agaaauuuauaaacuu

SEQ ID NO: 3061017 - RNA, 22 nt, Human
agaaauuaugugccagauuuau

SEQ ID NO: 3061018 - RNA, 17 nt, Human
ucugcaggucccuaaua

SEQ ID NO: 3061019 - RNA, 16 nt, Human
ucugcaggucccuaau

SEQ ID NO: 3061020 - RNA, 15 nt, Human
ucugcaggucccuaa

SEQ ID NO: 3061021 - RNA, 20 nt, Human
ucugcacuccccugcugggu

SEQ ID NO: 3061022 - RNA, 18 nt, Human
ucugcagcaauaaagcag

SEQ ID NO: 3061023 - RNA, 14 nt, Human
ucugacuaugacau

SEQ ID NO: 3061024 - RNA, 16 nt, Human
ucugacuaugacauaa

SEQ ID NO: 3061025 - RNA, 22 nt, Human
ucugagacucgcgacaaugcaa

SEQ ID NO: 3061026 - RNA, 23 nt, Human
ucugagacucgcgacaaugcaaa

SEQ ID NO: 3061027 - RNA, 18 nt, Human
ucugcacuccccugcugg

SEQ ID NO: 3061028 - RNA, 19 nt, Human
ucugcacuccccugcuggg

SEQ ID NO: 3061029 - RNA, 17 nt, Human
ucugcacuccccugcug

SEQ ID NO: 3061030 - RNA, 14 nt, Human
ucucagggccuggu

SEQ ID NO: 3061031 - RNA, 15 nt, Human
ucucagggccugguc

SEQ ID NO: 3061032 - RNA, 19 nt, Human
ucucagggccuggucguuu

SEQ ID NO: 3061033 - RNA, 15 nt, Human
acuuguggacacagc

SEQ ID NO: 3061034 - RNA, 12 nt, Human
ucucagggccug

SEQ ID NO: 3061035 - RNA, 13 nt, Human
ucucagggccugg

SEQ ID NO: 3061036 - RNA, 16 nt, Human
ucuccaggcuguaucc

SEQ ID NO: 3061037 - RNA, 13 nt, Human
ucuccaaaauaaa

SEQ ID NO: 3061038 - RNA, 22 nt, Human
ucuccaaaauaaaacuuuuuaa

SEQ ID NO: 3061039 - RNA, 19 nt, Human
ucuccaaaauaaaacuuuu

SEQ ID NO: 3061040 - RNA, 17 nt, Human
ucuccaaaauaaaacuu

SEQ ID NO: 3061041 - RNA, 11 nt, Human
ucuccaggcug

SEQ ID NO: 3061042 - RNA, 16 nt, Human
ucuccauguuugaugu

SEQ ID NO: 3061043 - RNA, 16 nt, Human
acuuucuagccagagg

SEQ ID NO: 3061044 - RNA, 17 nt, Human
acuuucuagccagagga

SEQ ID NO: 3061045 - RNA, 14 nt, Human
acuuugaccucugc

SEQ ID NO: 3061046 - RNA, 21 nt, Human
ucuccuccuuuucacaguucu

SEQ ID NO: 3061047 - RNA, 16 nt, Human
acuuguguuuugcaag

SEQ ID NO: 3061048 - RNA, 16 nt, Human
acuuguggacacagcu

SEQ ID NO: 3061049 - RNA, 18 nt, Human
acuuguggacacagcucu

SEQ ID NO: 3061050 - RNA, 17 nt, Human
acuuguggacacagcuc

SEQ ID NO: 3061051 - RNA, 16 nt, Human
acuugucaauaaaauc

SEQ ID NO: 3061052 - RNA, 16 nt, Human
acuucuccacccugcu

SEQ ID NO: 3061053 - RNA, 15 nt, Human
acuucuccacccugc

SEQ ID NO: 3061054 - RNA, 21 nt, Human
acuugaacccauauuuguaca

SEQ ID NO: 3061055 - RNA, 19 nt, Human
acuugaacccgggaggcag

SEQ ID NO: 3061056 - RNA, 20 nt, Human
acuugaacccgggaggcaga

SEQ ID NO: 3061057 - RNA, 19 nt, Human
acuugagcccagagugaac

SEQ ID NO: 3061058 - RNA, 19 nt, Human
acuugagaauuacccuuuu

SEQ ID NO: 3061059 - RNA, 14 nt, Human
acuucuccacccug

SEQ ID NO: 3061060 - RNA, 21 nt, Human
acuucuaaguaaaaccacagc

SEQ ID NO: 3061061 - RNA, 23 nt, Human
acuucuaaguaaaaccacagcag

SEQ ID NO: 3061062 - RNA, 12 nt, Human
ucucacucuguc

SEQ ID NO: 3061063 - RNA, 13 nt, Human
ucucacuccuuga

SEQ ID NO: 3061064 - RNA, 22 nt, Human
acuucgggaggucgaggcagga

SEQ ID NO: 3061065 - RNA, 11 nt, Human
ucucacuccuu

SEQ ID NO: 3061066 - RNA, 11 nt, Human
acuucagcuga

SEQ ID NO: 3061067 - RNA, 16 nt, Human
acuucagcugacuuuu

SEQ ID NO: 3061068 - RNA, 23 nt, Human
ucucacacaugagcaucaggcca

SEQ ID NO: 3061069 - RNA, 20 nt, Human
acauaucuaguaugaaauua

SEQ ID NO: 3061070 - RNA, 22 nt, Human
acauaucuaguaugaaauuaua

SEQ ID NO: 3061071 - RNA, 23 nt, Human
acauaucuaguaugaaauuauau

SEQ ID NO: 3061072 - RNA, 17 nt, Human
acauaucuaguaugaaa

SEQ ID NO: 3061073 - RNA, 22 nt, Human
acauauugauuuccguuaaaau

SEQ ID NO: 3061074 - RNA, 18 nt, Human
acauauugauuuccguua

SEQ ID NO: 3061075 - RNA, 23 nt, Human
acauauugauuuccguuaaaaua

SEQ ID NO: 3061076 - RNA, 16 nt, Human
acauauugauuuccgu

SEQ ID NO: 3061077 - RNA, 14 nt, Human
acauauugauuucc

SEQ ID NO: 3061078 - RNA, 14 nt, Human
acauagaauuaaca

SEQ ID NO: 3061079 - RNA, 18 nt, Human
acauagaauuaacacaug

SEQ ID NO: 3061080 - RNA, 19 nt, Human
acauauauaacaaugcugu

SEQ ID NO: 3061081 - RNA, 18 nt, Human
acaucaacaucuugguca

SEQ ID NO: 3061082 - RNA, 16 nt, Human
acaucaacaucuuggu

SEQ ID NO: 3061083 - RNA, 13 nt, Human
acaucaacagaua

SEQ ID NO: 3061084 - RNA, 19 nt, Human
acaucuugcucugcugaca

SEQ ID NO: 3061085 - RNA, 18 nt, Human
acaucuugcucugcugac

SEQ ID NO: 3061086 - RNA, 17 nt, Human
acaugaaaacacauuuu

SEQ ID NO: 3061087 - RNA, 21 nt, Human
acaucuugcucugcugacaga

SEQ ID NO: 3061088 - RNA, 19 nt, Human
acaugaaaacacauuuuuc

SEQ ID NO: 3061089 - RNA, 18 nt, Human
acaugaaaacacauuuuu

SEQ ID NO: 3061090 - RNA, 16 nt, Human
acaugaaaacacauuu

SEQ ID NO: 3061091 - RNA, 13 nt, Human
acaucuugcucug

SEQ ID NO: 3061092 - RNA, 21 nt, Human
uauuuccauuaaaaaaucagu

SEQ ID NO: 3061093 - RNA, 13 nt, Human
uauuucauuucuu

SEQ ID NO: 3061094 - RNA, 22 nt, Human
uauuucccucaccuuucccauc

SEQ ID NO: 3061095 - RNA, 23 nt, Human
uauuuccuauauuguuuucagug

SEQ ID NO: 3061096 - RNA, 15 nt, Human
acaguugaaaaacag

SEQ ID NO: 3061097 - RNA, 16 nt, Human
acaguugaaaaacagc

SEQ ID NO: 3061098 - RNA, 20 nt, Human
acaguugaaaaacagcugag

SEQ ID NO: 3061099 - RNA, 16 nt, Human
acauaaaaacaacuuu

SEQ ID NO: 3061100 - RNA, 19 nt, Human
acauaaaaacaacuuuaua

SEQ ID NO: 3061101 - RNA, 21 nt, Human
acauaaaaacaacuuuauacc

SEQ ID NO: 3061102 - RNA, 21 nt, Human
acaguuuucugagaaagacua

SEQ ID NO: 3061103 - RNA, 20 nt, Human
acaguuuucugagaaagacu

SEQ ID NO: 3061104 - RNA, 19 nt, Human
acaguuuucugagaaagac

SEQ ID NO: 3061105 - RNA, 18 nt, Human
acaguuuucugagaaaga

SEQ ID NO: 3061106 - RNA, 20 nt, Human
acaguuuguuaguaugaggc

SEQ ID NO: 3061107 - RNA, 16 nt, Human
acaguuuguuaguaug

SEQ ID NO: 3061108 - RNA, 15 nt, Human
acaguuuucugagaa

SEQ ID NO: 3061109 - RNA, 17 nt, Human
acaguuuucugagaaag

SEQ ID NO: 3061110 - RNA, 16 nt, Human
acaguuuucugagaaa

SEQ ID NO: 3061111 - RNA, 13 nt, Human
acauacucccauc

SEQ ID NO: 3061112 - RNA, 22 nt, Human
acauacuaaccagcagaaaugc

SEQ ID NO: 3061113 - RNA, 21 nt, Human
acauacuaaccagcagaaaug

SEQ ID NO: 3061114 - RNA, 13 nt, Human
acauacuaaccag

SEQ ID NO: 3061115 - RNA, 14 nt, Human
acauacucugcuua

SEQ ID NO: 3061116 - RNA, 17 nt, Human
acauacucccaucugug

SEQ ID NO: 3061117 - RNA, 19 nt, Human
ucaaaauuguuacaaauug

SEQ ID NO: 3061118 - RNA, 16 nt, Human
ucaaaauuguuacaaa

SEQ ID NO: 3061119 - RNA, 14 nt, Human
ucaaaaugucuaag

SEQ ID NO: 3061120 - RNA, 21 nt, Human
ucaaaauaccaugccauuuaa

SEQ ID NO: 3061121 - RNA, 21 nt, Human
ucaaaauaugccccauucaac

SEQ ID NO: 3061122 - RNA, 23 nt, Human
ucaaaauaccaugccauuuaaag

SEQ ID NO: 3061123 - RNA, 14 nt, Human
uauuuuugacagaa

SEQ ID NO: 3061124 - RNA, 15 nt, Human
uauuuuugacagaau

SEQ ID NO: 3061125 - RNA, 13 nt, Human
uauuuuugacaga

SEQ ID NO: 3061126 - RNA, 19 nt, Human
uauuuuugacagaauaugu

SEQ ID NO: 3061127 - RNA, 23 nt, Human
uauuuuugacagaauauguuuca

SEQ ID NO: 3061128 - RNA, 13 nt, Human
ucaaaacugcacu

SEQ ID NO: 3061129 - RNA, 18 nt, Human
ucaaaagaaagaaaauca

SEQ ID NO: 3061130 - RNA, 17 nt, Human
ucaaagggugaaaauua

SEQ ID NO: 3061131 - RNA, 14 nt, Human
ucaaagcugaaaug

SEQ ID NO: 3061132 - RNA, 17 nt, Human
acaugagcaucaggcca

SEQ ID NO: 3061133 - RNA, 18 nt, Human
acaugagcaucaggccag

SEQ ID NO: 3061134 - RNA, 19 nt, Human
acaugagcaucaggccagg

SEQ ID NO: 3061135 - RNA, 19 nt, Human
acaugauccugcaauucca

SEQ ID NO: 3061136 - RNA, 17 nt, Human
acaugaucuucuuuaua

SEQ ID NO: 3061137 - RNA, 15 nt, Human
acaugaucuucuuua

SEQ ID NO: 3061138 - RNA, 22 nt, Human
acaugcuacacacugcauguuu

SEQ ID NO: 3061139 - RNA, 18 nt, Human
ucaaauaacuaaaaggua

SEQ ID NO: 3061140 - RNA, 16 nt, Human
ucaacagguuuuccug

SEQ ID NO: 3061141 - RNA, 17 nt, Human
ucaaauuucuaaaucuc

SEQ ID NO: 3061142 - RNA, 14 nt, Human
ucaaauuucuaaau

SEQ ID NO: 3061143 - RNA, 15 nt, Human
acauucuguuaauca

SEQ ID NO: 3061144 - RNA, 16 nt, Human
ucaaauuucuaaaucu

SEQ ID NO: 3061145 - RNA, 15 nt, Human
ucaaauuucuaaauc

SEQ ID NO: 3061146 - RNA, 12 nt, Human
acauucuguuaa

SEQ ID NO: 3061147 - RNA, 21 nt, Human
acaugcugaacaucacagcuu

SEQ ID NO: 3061148 - RNA, 14 nt, Human
acaugcugaacauc

SEQ ID NO: 3061149 - RNA, 21 nt, Human
acauguccaagaagcccagga

SEQ ID NO: 3061150 - RNA, 19 nt, Human
acauguccaagaagcccag

SEQ ID NO: 3061151 - RNA, 21 nt, Human
ucaaguauuauaccuuuuuua

SEQ ID NO: 3061152 - RNA, 16 nt, Human
ucaaguauuauaccuu

SEQ ID NO: 3061153 - RNA, 23 nt, Human
ucaaguauuauaccuuuuuuaga

SEQ ID NO: 3061154 - RNA, 15 nt, Human
ucaaguauuauaccu

SEQ ID NO: 3061155 - RNA, 11 nt, Human
ucaaguauuau

SEQ ID NO: 3061156 - RNA, 22 nt, Human
ucaagaugaugaugaucuuuaa

SEQ ID NO: 3061157 - RNA, 15 nt, Human
ucaauucuugccaaa

SEQ ID NO: 3061158 - RNA, 23 nt, Human
ucaauuuuucuuauuucauuucu

SEQ ID NO: 3061159 - RNA, 20 nt, Human
ucaauuuuucuuauuucauu

SEQ ID NO: 3061160 - RNA, 17 nt, Human
accaacauacucccauc

SEQ ID NO: 3061161 - RNA, 19 nt, Human
accaacauacucccaucug

SEQ ID NO: 3061162 - RNA, 21 nt, Human
accaacauacucccaucugug

SEQ ID NO: 3061163 - RNA, 22 nt, Human
accaacauacucccaucuguga

SEQ ID NO: 3061164 - RNA, 23 nt, Human
ucaagugaaaaaggaggaagaga

SEQ ID NO: 3061165 - RNA, 15 nt, Human
ucaagugaaaaagga

SEQ ID NO: 3061166 - RNA, 15 nt, Human
accaauguucucucu

SEQ ID NO: 3061167 - RNA, 15 nt, Human
accaaucaugaauua

SEQ ID NO: 3061168 - RNA, 13 nt, Human
accaaucaugaau

SEQ ID NO: 3061169 - RNA, 17 nt, Human
ucacauaucuaguauga

SEQ ID NO: 3061170 - RNA, 21 nt, Human
ucacauaucuaguaugaaauu

SEQ ID NO: 3061171 - RNA, 22 nt, Human
ucacauaucuaguaugaaauua

SEQ ID NO: 3061172 - RNA, 15 nt, Human
ucacaguucucuccu

SEQ ID NO: 3061173 - RNA, 15 nt, Human
ucacauaucugucau

SEQ ID NO: 3061174 - RNA, 12 nt, Human
ucacauaucugu

SEQ ID NO: 3061175 - RNA, 15 nt, Human
ucaccccggccaccu

SEQ ID NO: 3061176 - RNA, 14 nt, Human
ucaccccagcccca

SEQ ID NO: 3061177 - RNA, 20 nt, Human
ucaccccagccccaaaacuc

SEQ ID NO: 3061178 - RNA, 13 nt, Human
ucaccccagcccc

SEQ ID NO: 3061179 - RNA, 19 nt, Human
ucacccaguccugcccgcc

SEQ ID NO: 3061180 - RNA, 13 nt, Human
ucacccaguccug

SEQ ID NO: 3061181 - RNA, 22 nt, Human
accacuuuuguucuugguuugu

SEQ ID NO: 3061182 - RNA, 16 nt, Human
accagagcccaccuug

SEQ ID NO: 3061183 - RNA, 14 nt, Human
accagagcccaccu

SEQ ID NO: 3061184 - RNA, 12 nt, Human
accagagcccac

SEQ ID NO: 3061185 - RNA, 11 nt, Human
accagacaggu

SEQ ID NO: 3061186 - RNA, 14 nt, Human
accagacaccuuga

SEQ ID NO: 3061187 - RNA, 21 nt, Human
accacuuuuguucuugguuug

SEQ ID NO: 3061188 - RNA, 16 nt, Human
accacuuuuguucuug

SEQ ID NO: 3061189 - RNA, 15 nt, Human
accacuuuuguucuu

SEQ ID NO: 3061190 - RNA, 18 nt, Human
accacuuguguuuugcaa

SEQ ID NO: 3061191 - RNA, 17 nt, Human
accacugcacuccagcc

SEQ ID NO: 3061192 - RNA, 20 nt, Human
accacugcacuccagccugg

SEQ ID NO: 3061193 - RNA, 17 nt, Human
ucaccccggccaccugc

SEQ ID NO: 3061194 - RNA, 18 nt, Human
ucaccccggccaccugcg

SEQ ID NO: 3061195 - RNA, 21 nt, Human
accacugcacuccagccuggg

SEQ ID NO: 3061196 - RNA, 17 nt, Human
ucacuaccuucaugcau

SEQ ID NO: 3061197 - RNA, 19 nt, Human
ucacuauguugcccaggca

SEQ ID NO: 3061198 - RNA, 17 nt, Human
ucacuauguugcccagg

SEQ ID NO: 3061199 - RNA, 18 nt, Human
ucacuauguugcccaggc

SEQ ID NO: 3061200 - RNA, 15 nt, Human
ucaccucucccuugg

SEQ ID NO: 3061201 - RNA, 13 nt, Human
ucaccugccccuc

SEQ ID NO: 3061202 - RNA, 15 nt, Human
ucaccugccccucaa

SEQ ID NO: 3061203 - RNA, 23 nt, Human
ucacucuuauugcccacgcugga

SEQ ID NO: 3061204 - RNA, 21 nt, Human
ucacucuuauugcccacgcug

SEQ ID NO: 3061205 - RNA, 22 nt, Human
accauggucggaaaacaugcua

SEQ ID NO: 3061206 - RNA, 16 nt, Human
accauuggggcuccca

SEQ ID NO: 3061207 - RNA, 17 nt, Human
accauuggggcucccag

SEQ ID NO: 3061208 - RNA, 18 nt, Human
accauuggggcucccagc

SEQ ID NO: 3061209 - RNA, 23 nt, Human
accauuucuugagguaaaagcau

SEQ ID NO: 3061210 - RNA, 11 nt, Human
acccacugcuc

SEQ ID NO: 3061211 - RNA, 10 nt, Human
acccacugcu

SEQ ID NO: 3061212 - RNA, 11 nt, Human
acccacugcuu

SEQ ID NO: 3061213 - RNA, 15 nt, Human
acccacugcucuggu

SEQ ID NO: 3061214 - RNA, 14 nt, Human
acccacugcucugg

SEQ ID NO: 3061215 - RNA, 13 nt, Human
acccacugcucug

SEQ ID NO: 3061216 - RNA, 19 nt, Human
ucagaaguuucugccgcag

SEQ ID NO: 3061217 - RNA, 22 nt, Human
ucagaaguuucugccgcagccc

SEQ ID NO: 3061218 - RNA, 14 nt, Human
ucagaagacacuga

SEQ ID NO: 3061219 - RNA, 18 nt, Human
ucagagccugcaguuauu

SEQ ID NO: 3061220 - RNA, 15 nt, Human
ucagagccugcaguu

SEQ ID NO: 3061221 - RNA, 14 nt, Human
ucagagccugcagu

SEQ ID NO: 3061222 - RNA, 13 nt, Human
ucagagccugcag

SEQ ID NO: 3061223 - RNA, 16 nt, Human
ucagagagggugggag

SEQ ID NO: 3061224 - RNA, 21 nt, Human
ucagagagggugggagugggc

SEQ ID NO: 3061225 - RNA, 23 nt, Human
ucagagagggugggagugggccc

SEQ ID NO: 3061226 - RNA, 12 nt, Human
ucagagccugca

SEQ ID NO: 3061227 - RNA, 17 nt, Human
ucagagacuccugcagg

SEQ ID NO: 3061228 - RNA, 20 nt, Human
ucagagacuccugcaggcag

SEQ ID NO: 3061229 - RNA, 21 nt, Human
ucagagacuccugcaggcagc

SEQ ID NO: 3061230 - RNA, 16 nt, Human
ucagagacuccugcag

SEQ ID NO: 3061231 - RNA, 19 nt, Human
ucagaaucucaaauaacua

SEQ ID NO: 3061232 - RNA, 18 nt, Human
ucagaaucucaaauaacu

SEQ ID NO: 3061233 - RNA, 23 nt, Human
ucagccguguaaccauggaccca

SEQ ID NO: 3061234 - RNA, 23 nt, Human
acccagcgagcccugguggcagu

SEQ ID NO: 3061235 - RNA, 19 nt, Human
acccagcgagcccuggugg

SEQ ID NO: 3061236 - RNA, 22 nt, Human
ucagccaagaauucuuaaauau

SEQ ID NO: 3061237 - RNA, 23 nt, Human
accccagcuggggccaggcuggg

SEQ ID NO: 3061238 - RNA, 24 nt, Human
acccagcgagcccugguggcagug

SEQ ID NO: 3061239 - RNA, 13 nt, Human
ucaggaaagagaa

SEQ ID NO: 3061240 - RNA, 19 nt, Human
ucaggaaagagaacuucca

SEQ ID NO: 3061241 - RNA, 21 nt, Human
ucaggaaaucaaauaugcaaa

SEQ ID NO: 3061242 - RNA, 20 nt, Human
ucaggaaaucaaauaugcaa

SEQ ID NO: 3061243 - RNA, 20 nt, Human
ucagcuuguaaauagcucag

SEQ ID NO: 3061244 - RNA, 14 nt, Human
ucagcggggacagc

SEQ ID NO: 3061245 - RNA, 12 nt, Human
acccccacccaa

SEQ ID NO: 3061246 - RNA, 15 nt, Human
accccuucgcuccug

SEQ ID NO: 3061247 - RNA, 14 nt, Human
accccuucgcuccu

SEQ ID NO: 3061248 - RNA, 16 nt, Human
accccuucgcuccugu

SEQ ID NO: 3061249 - RNA, 18 nt, Human
ucaucuagguaaauuaca

SEQ ID NO: 3061250 - RNA, 14 nt, Human
ucaucuaggauuuu

SEQ ID NO: 3061251 - RNA, 22 nt, Human
ucauccuucuggaauaaggaga

SEQ ID NO: 3061252 - RNA, 16 nt, Human
ucaugaauuaguuuua

SEQ ID NO: 3061253 - RNA, 13 nt, Human
ucauccuccucag

SEQ ID NO: 3061254 - RNA, 19 nt, Human
ucauccuccucagaucuuc

SEQ ID NO: 3061255 - RNA, 18 nt, Human
ucauccucauacccaccc

SEQ ID NO: 3061256 - RNA, 14 nt, Human
ucauccuucuggaa

SEQ ID NO: 3061257 - RNA, 12 nt, Human
accuccugccuc

SEQ ID NO: 3061258 - RNA, 13 nt, Human
accuccugccucg

SEQ ID NO: 3061259 - RNA, 15 nt, Human
ucauccuaagcuauu

SEQ ID NO: 3061260 - RNA, 23 nt, Human
accuccugccucgaacuggcugc

SEQ ID NO: 3061261 - RNA, 19 nt, Human
accucaaaaugucuaagau

SEQ ID NO: 3061262 - RNA, 16 nt, Human
accucaaaaugucuaa

SEQ ID NO: 3061263 - RNA, 16 nt, Human
accuagggugauauua

SEQ ID NO: 3061264 - RNA, 21 nt, Human
accuagggugauauuaaccag

SEQ ID NO: 3061265 - RNA, 12 nt, Human
ucaggaagcuca

SEQ ID NO: 3061266 - RNA, 23 nt, Human
ucaggaaaucaaauaugcaaagc

SEQ ID NO: 3061267 - RNA, 22 nt, Human
ucaggaaaucaaauaugcaaag

SEQ ID NO: 3061268 - RNA, 13 nt, Human
ucaggaagcucag

SEQ ID NO: 3061269 - RNA, 14 nt, Human
ucaggaagcucagg

SEQ ID NO: 3061270 - RNA, 15 nt, Human
ucaggaagcucaggg

SEQ ID NO: 3061271 - RNA, 15 nt, Human
accgccuugcccagc

SEQ ID NO: 3061272 - RNA, 22 nt, Human
accgccuugcccagccuggaug

SEQ ID NO: 3061273 - RNA, 16 nt, Human
accgccuugcccagcc

SEQ ID NO: 3061274 - RNA, 17 nt, Human
accgccuugcccagccu

SEQ ID NO: 3061275 - RNA, 14 nt, Human
accugaggcccuuc

SEQ ID NO: 3061276 - RNA, 21 nt, Human
accucuugagccuugaacuuu

SEQ ID NO: 3061277 - RNA, 15 nt, Human
accugaggcccuucu

SEQ ID NO: 3061278 - RNA, 16 nt, Human
accugaggcccuucuc

SEQ ID NO: 3061279 - RNA, 20 nt, Human
accugaggcccuucucucca

SEQ ID NO: 3061280 - RNA, 21 nt, Human
accugaggcccuucucuccag

SEQ ID NO: 3061281 - RNA, 22 nt, Human
accugaggcccuucucuccagc

SEQ ID NO: 3061282 - RNA, 16 nt, Human
accugaggggccucuu

SEQ ID NO: 3061283 - RNA, 15 nt, Human
accugauugugucuc

SEQ ID NO: 3061284 - RNA, 17 nt, Human
accugauugugucucuu

SEQ ID NO: 3061285 - RNA, 18 nt, Human
accugauugugucucuug

SEQ ID NO: 3061286 - RNA, 14 nt, Human
accugauugugucu

SEQ ID NO: 3061287 - RNA, 19 nt, Human
accucggugccuuccucuu

SEQ ID NO: 3061288 - RNA, 13 nt, Human
accuccugggcua

SEQ ID NO: 3061289 - RNA, 22 nt, Human
ucauugaaaucuuuuugcuuug

SEQ ID NO: 3061290 - RNA, 12 nt, Human
ucauugaccuga

SEQ ID NO: 3061291 - RNA, 14 nt, Human
ucauugaccugagg

SEQ ID NO: 3061292 - RNA, 15 nt, Human
ucauugaccugaggc

SEQ ID NO: 3061293 - RNA, 12 nt, Human
ucauugaaaucu

SEQ ID NO: 3061294 - RNA, 13 nt, Human
ucauugaaaucuu

SEQ ID NO: 3061295 - RNA, 12 nt, Human
ucauucuucugu

SEQ ID NO: 3061296 - RNA, 14 nt, Human
uccaggcuguaucc

SEQ ID NO: 3061297 - RNA, 12 nt, Human
uccagccccugg

SEQ ID NO: 3061298 - RNA, 13 nt, Human
uccagccccugga

SEQ ID NO: 3061299 - RNA, 14 nt, Human
acgagaaaacaaua

SEQ ID NO: 3061300 - RNA, 21 nt, Human
accuuuuuuauacauaaacaa

SEQ ID NO: 3061301 - RNA, 20 nt, Human
accuuuuuuauacauaaaca

SEQ ID NO: 3061302 - RNA, 19 nt, Human
accuuuuuuauacauaaac

SEQ ID NO: 3061303 - RNA, 21 nt, Human
uccaggcuguaucccaugagc

SEQ ID NO: 3061304 - RNA, 19 nt, Human
acgccagauucuuuccuga

SEQ ID NO: 3061305 - RNA, 17 nt, Human
acgccagauucuuuccu

SEQ ID NO: 3061306 - RNA, 16 nt, Human
acgagcaggcuucuuc

SEQ ID NO: 3061307 - RNA, 20 nt, Human
acgagcaggcuacugucagc

SEQ ID NO: 3061308 - RNA, 19 nt, Human
acgagcaggcuacugucag

SEQ ID NO: 3061309 - RNA, 14 nt, Human
uccagacccggcug

SEQ ID NO: 3061310 - RNA, 20 nt, Human
uccagaauuucccaaagcag

SEQ ID NO: 3061311 - RNA, 22 nt, Human
uccagaauuucccaaagcagug

SEQ ID NO: 3061312 - RNA, 16 nt, Human
uccagaauuucccaaa

SEQ ID NO: 3061313 - RNA, 18 nt, Human
uccagacccggcugcgug

SEQ ID NO: 3061314 - RNA, 15 nt, Human
uccagacccggcugc

SEQ ID NO: 3061315 - RNA, 19 nt, Human
uccagacccggcugcgugg

SEQ ID NO: 3061316 - RNA, 17 nt, Human
accuuuugagugccuua

SEQ ID NO: 3061317 - RNA, 20 nt, Human
accuuuugagugccuuacac

SEQ ID NO: 3061318 - RNA, 14 nt, Human
accuuuugagugcc

SEQ ID NO: 3061319 - RNA, 23 nt, Human
uccaacccucaucaccaacgucu

SEQ ID NO: 3061320 - RNA, 16 nt, Human
uccaacccucaucacc

SEQ ID NO: 3061321 - RNA, 17 nt, Human
uccaacccucaucacca

SEQ ID NO: 3061322 - RNA, 14 nt, Human
uccaacccucauca

SEQ ID NO: 3061323 - RNA, 12 nt, Human
accugccaggaa

SEQ ID NO: 3061324 - RNA, 14 nt, Human
accugccaggaagc

SEQ ID NO: 3061325 - RNA, 20 nt, Human
uccaagcuggucccacucag

SEQ ID NO: 3061326 - RNA, 16 nt, Human
uccaagcuggucccac

SEQ ID NO: 3061327 - RNA, 21 nt, Human
uccaacuaucucauuuccaag

SEQ ID NO: 3061328 - RNA, 18 nt, Human
uccaaggguacuaaggaa

SEQ ID NO: 3061329 - RNA, 21 nt, Human
uccaagcuggucccacucagu

SEQ ID NO: 3061330 - RNA, 19 nt, Human
accuuagacagucccugcc

SEQ ID NO: 3061331 - RNA, 20 nt, Human
accuuagacagucccugcca

SEQ ID NO: 3061332 - RNA, 18 nt, Human
accuuagacagucccugc

SEQ ID NO: 3061333 - RNA, 19 nt, Human
accuguuucugcagccacu

SEQ ID NO: 3061334 - RNA, 23 nt, Human
accuggccucugcacuccccugc

SEQ ID NO: 3061335 - RNA, 14 nt, Human
accuggcucugugg

SEQ ID NO: 3061336 - RNA, 23 nt, Human
accuggcucuguggcgagccauu

SEQ ID NO: 3061337 - RNA, 18 nt, Human
accuggccucugcacucc

SEQ ID NO: 3061338 - RNA, 20 nt, Human
accuggccucugcacucccc

SEQ ID NO: 3061339 - RNA, 16 nt, Human
accuggccucugcacu

SEQ ID NO: 3061340 - RNA, 17 nt, Human
accuggccucugcacuc

SEQ ID NO: 3061341 - RNA, 14 nt, Human
accuggccucugca

SEQ ID NO: 3061342 - RNA, 15 nt, Human
uccacccaggagccc

SEQ ID NO: 3061343 - RNA, 14 nt, Human
uccacccaggagcc

SEQ ID NO: 3061344 - RNA, 12 nt, Human
uccacccaggag

SEQ ID NO: 3061345 - RNA, 19 nt, Human
uccacccaccucagccucc

SEQ ID NO: 3061346 - RNA, 18 nt, Human
uccacccaccucagccuc

SEQ ID NO: 3061347 - RNA, 17 nt, Human
uccacccaccucagccu

SEQ ID NO: 3061348 - RNA, 22 nt, Human
acguauaaaagccuguuuaaga

SEQ ID NO: 3061349 - RNA, 15 nt, Human
acgguuuuacugcag

SEQ ID NO: 3061350 - RNA, 23 nt, Human
acguggcugcuucaaggauccug

SEQ ID NO: 3061351 - RNA, 17 nt, Human
acgugggcauucaaaug

SEQ ID NO: 3061352 - RNA, 20 nt, Human
acgugggcauucaaauguau

SEQ ID NO: 3061353 - RNA, 15 nt, Human
ucccaccccacacac

SEQ ID NO: 3061354 - RNA, 20 nt, Human
ucccaccccacacacgccag

SEQ ID NO: 3061355 - RNA, 16 nt, Human
ucccacaaaggagagc

SEQ ID NO: 3061356 - RNA, 12 nt, Human
ucccaagugcca

SEQ ID NO: 3061357 - RNA, 13 nt, Human
ucccaagugccaa

SEQ ID NO: 3061358 - RNA, 15 nt, Human
ucccaagugccaaag

SEQ ID NO: 3061359 - RNA, 23 nt, Human
ucccaagugccaaagaagcagac

SEQ ID NO: 3061360 - RNA, 20 nt, Human
acgggaggguaaggcugugg

SEQ ID NO: 3061361 - RNA, 13 nt, Human
ucccacagcgcug

SEQ ID NO: 3061362 - RNA, 22 nt, Human
acgccagauucuuuccugaggc

SEQ ID NO: 3061363 - RNA, 23 nt, Human
acgccagauucuuuccugaggcu

SEQ ID NO: 3061364 - RNA, 20 nt, Human
uccauccugaggcuccacuu

SEQ ID NO: 3061365 - RNA, 21 nt, Human
uccauccugaggcuccacuug

SEQ ID NO: 3061366 - RNA, 19 nt, Human
uccauccugaggcuccacu

SEQ ID NO: 3061367 - RNA, 13 nt, Human
uccaugaagaugu

SEQ ID NO: 3061368 - RNA, 21 nt, Human
uccaugaagauguagaggaga

SEQ ID NO: 3061369 - RNA, 21 nt, Human
ucccaaagcagugcaugcugu

SEQ ID NO: 3061370 - RNA, 17 nt, Human
ucccaaagcagugcaug

SEQ ID NO: 3061371 - RNA, 18 nt, Human
ucccaaagcagugcaugc

SEQ ID NO: 3061372 - RNA, 14 nt, Human
ucccaaagugcugg

SEQ ID NO: 3061373 - RNA, 13 nt, Human
ucccaaagugcug

SEQ ID NO: 3061374 - RNA, 18 nt, Human
ucccaaacccuucagugc

SEQ ID NO: 3061375 - RNA, 16 nt, Human
ucccaaagcagugcau

SEQ ID NO: 3061376 - RNA, 15 nt, Human
ucccaucacccgcua

SEQ ID NO: 3061377 - RNA, 16 nt, Human
ucccauaugccugggc

SEQ ID NO: 3061378 - RNA, 22 nt, Human
ucccauaugccugggcagaagg

SEQ ID NO: 3061379 - RNA, 22 nt, Human
ucccagucauuuaauaaaugug

SEQ ID NO: 3061380 - RNA, 14 nt, Human
ucccagucauuuaa

SEQ ID NO: 3061381 - RNA, 18 nt, Human
uccccaccgcagacagga

SEQ ID NO: 3061382 - RNA, 21 nt, Human
uccccaccgcagacaggacca

SEQ ID NO: 3061383 - RNA, 17 nt, Human
uccccaccgcagacagg

SEQ ID NO: 3061384 - RNA, 15 nt, Human
acuacauucuguuaa

SEQ ID NO: 3061385 - RNA, 17 nt, Human
ucccagcugugcucugg

SEQ ID NO: 3061386 - RNA, 13 nt, Human
ucccagccaggcc

SEQ ID NO: 3061387 - RNA, 14 nt, Human
ucccagccaggccc

SEQ ID NO: 3061388 - RNA, 15 nt, Human
ucccagccaggcccu

SEQ ID NO: 3061389 - RNA, 13 nt, Human
acuacauucuguu

SEQ ID NO: 3061390 - RNA, 12 nt, Human
acuacauucugu

SEQ ID NO: 3061391 - RNA, 11 nt, Human
acuacauucug

SEQ ID NO: 3061392 - RNA, 15 nt, Human
acuacaguuuguuag

SEQ ID NO: 3061393 - RNA, 14 nt, Human
acuacauucuguua

SEQ ID NO: 3061394 - RNA, 14 nt, Human
acuacaguuuguua

SEQ ID NO: 3061395 - RNA, 13 nt, Human
acuacaguuuguu

SEQ ID NO: 3061396 - RNA, 17 nt, Human
acuacaguccucccauc

SEQ ID NO: 3061397 - RNA, 15 nt, Human
acuacaggcacccac

SEQ ID NO: 3061398 - RNA, 11 nt, Human
acuacaggcac

SEQ ID NO: 3061399 - RNA, 21 nt, Human
acuacuagggaaaugccuuug

SEQ ID NO: 3061400 - RNA, 14 nt, Human
acuacuagggaaau

SEQ ID NO: 3061401 - RNA, 17 nt, Human
acuacucccccaggugg

SEQ ID NO: 3061402 - RNA, 21 nt, Human
acucacauuuauucugcucac

SEQ ID NO: 3061403 - RNA, 12 nt, Human
acucaccccagc

SEQ ID NO: 3061404 - RNA, 17 nt, Human
ucccgaguagcugggac

SEQ ID NO: 3061405 - RNA, 16 nt, Human
ucccgaguagcuggga

SEQ ID NO: 3061406 - RNA, 18 nt, Human
ucccgaguagcugggacu

SEQ ID NO: 3061407 - RNA, 15 nt, Human
ucccgaguagcuggg

SEQ ID NO: 3061408 - RNA, 20 nt, Human
ucccgaauagcugggacuac

SEQ ID NO: 3061409 - RNA, 17 nt, Human
uccccucggagaagagc

SEQ ID NO: 3061410 - RNA, 16 nt, Human
uccccucggagaagag

SEQ ID NO: 3061411 - RNA, 16 nt, Human
ucccugaaggccccgc

SEQ ID NO: 3061412 - RNA, 11 nt, Human
ucccugagcag

SEQ ID NO: 3061413 - RNA, 21 nt, Human
ucccucuuucccucccuuccu

SEQ ID NO: 3061414 - RNA, 11 nt, Human
ucccugaaggc

SEQ ID NO: 3061415 - RNA, 15 nt, Human
ucccugaaggccccg

SEQ ID NO: 3061416 - RNA, 20 nt, Human
ucccucuuucccucccuucc

SEQ ID NO: 3061417 - RNA, 18 nt, Human
ucccucuuucccucccuu

SEQ ID NO: 3061418 - RNA, 14 nt, Human
ucccucuuucccuc

SEQ ID NO: 3061419 - RNA, 16 nt, Human
ucccggcuuuggugcg

SEQ ID NO: 3061420 - RNA, 19 nt, Human
uccuaaauauauuuuaaga

SEQ ID NO: 3061421 - RNA, 17 nt, Human
uccggucccugucccag

SEQ ID NO: 3061422 - RNA, 16 nt, Human
uccuagaaauucccca

SEQ ID NO: 3061423 - RNA, 19 nt, Human
ucccuuucugcuuguguua

SEQ ID NO: 3061424 - RNA, 12 nt, Human
ucccuuuuccuu

SEQ ID NO: 3061425 - RNA, 21 nt, Human
acuccugcaggcagccaggcc

SEQ ID NO: 3061426 - RNA, 12 nt, Human
ucccugucccag

SEQ ID NO: 3061427 - RNA, 15 nt, Human
ucccugguggcagcu

SEQ ID NO: 3061428 - RNA, 17 nt, Human
ucccuuacgugaguccu

SEQ ID NO: 3061429 - RNA, 13 nt, Human
acuccagccuggg

SEQ ID NO: 3061430 - RNA, 12 nt, Human
acuccagccugg

SEQ ID NO: 3061431 - RNA, 23 nt, Human
acuccagaauuucccaaagcagu

SEQ ID NO: 3061432 - RNA, 18 nt, Human
acuccugcaggcagccag

SEQ ID NO: 3061433 - RNA, 19 nt, Human
acuccugcaggcagccagg

SEQ ID NO: 3061434 - RNA, 17 nt, Human
acuccugcaggcagcca

SEQ ID NO: 3061435 - RNA, 14 nt, Human
acucauugaccuga

SEQ ID NO: 3061436 - RNA, 15 nt, Human
acucauucuucugua

SEQ ID NO: 3061437 - RNA, 15 nt, Human
acucauugaccugag

SEQ ID NO: 3061438 - RNA, 14 nt, Human
acuccaaagaaaug

SEQ ID NO: 3061439 - RNA, 18 nt, Human
acuccaaagaaauguaag

SEQ ID NO: 3061440 - RNA, 15 nt, Human
acuccaaagaaaugu

SEQ ID NO: 3061441 - RNA, 15 nt, Human
acuccagaauuuccc

SEQ ID NO: 3061442 - RNA, 17 nt, Human
acuccagaauuucccaa

SEQ ID NO: 3061443 - RNA, 18 nt, Human
acuccagaaagugacaag

SEQ ID NO: 3061444 - RNA, 17 nt, Human
uaauuuauacaggucau

SEQ ID NO: 3061445 - RNA, 13 nt, Human
uaauucaagaaaa

SEQ ID NO: 3061446 - RNA, 14 nt, Human
aaugagccuggcaa

SEQ ID NO: 3061447 - RNA, 15 nt, Human
uacaaaaagcauaaa

SEQ ID NO: 3061448 - RNA, 15 nt, Human
uacaaaaacacagca

SEQ ID NO: 3061449 - RNA, 20 nt, Human
uacaaaaagcauaaaaauua

SEQ ID NO: 3061450 - RNA, 15 nt, Human
uacaaaagcauguga

SEQ ID NO: 3061451 - RNA, 14 nt, Human
uacaaaaacacagc

SEQ ID NO: 3061452 - RNA, 13 nt, Human
uacaaaaacacag

SEQ ID NO: 3061453 - RNA, 20 nt, Human
aaugcccagccccuucugac

SEQ ID NO: 3061454 - RNA, 22 nt, Human
aaugcccagccccuucugaccc

SEQ ID NO: 3061455 - RNA, 23 nt, Human
aaugcccagccccuucugaccca

SEQ ID NO: 3061456 - RNA, 24 nt, Human
aaugcccagccccuucugacccau

SEQ ID NO: 3061457 - RNA, 21 nt, Human
aaugcugugcccuaaagugua

SEQ ID NO: 3061458 - RNA, 20 nt, Human
aaugcugugcccuaaagugu

SEQ ID NO: 3061459 - RNA, 13 nt, Human
aaugcugugcccu

SEQ ID NO: 3061460 - RNA, 21 nt, Human
aaugccccugaauuuaaauag

SEQ ID NO: 3061461 - RNA, 16 nt, Human
aauggacguguuauga

SEQ ID NO: 3061462 - RNA, 18 nt, Human
aauggaagacagcucuua

SEQ ID NO: 3061463 - RNA, 14 nt, Human
aaugcccagccccu

SEQ ID NO: 3061464 - RNA, 15 nt, Human
aaugcccagccccuu

SEQ ID NO: 3061465 - RNA, 13 nt, Human
aaugcccagcccc

SEQ ID NO: 3061466 - RNA, 21 nt, Human
uacaagcgugagccacugcac

SEQ ID NO: 3061467 - RNA, 19 nt, Human
aauggacuuuuguacauag

SEQ ID NO: 3061468 - RNA, 18 nt, Human
aauggacuuugcacacuu

SEQ ID NO: 3061469 - RNA, 23 nt, Human
aauggacuuugcacacuuuggcc

SEQ ID NO: 3061470 - RNA, 23 nt, Human
uacacauuuuauuuuauuaugca

SEQ ID NO: 3061471 - RNA, 18 nt, Human
uacaccacuacauucugu

SEQ ID NO: 3061472 - RNA, 17 nt, Human
uacaccacuacauucug

SEQ ID NO: 3061473 - RNA, 16 nt, Human
uacaccacuacauucu

SEQ ID NO: 3061474 - RNA, 15 nt, Human
uacaccacuacauuc

SEQ ID NO: 3061475 - RNA, 20 nt, Human
uacaccacuacauucuguua

SEQ ID NO: 3061476 - RNA, 19 nt, Human
uacaccacuacauucuguu

SEQ ID NO: 3061477 - RNA, 23 nt, Human
uacagagcccacgcccccacugg

SEQ ID NO: 3061478 - RNA, 18 nt, Human
uacacuaagagagaauga

SEQ ID NO: 3061479 - RNA, 19 nt, Human
uacacuaagagagaaugag

SEQ ID NO: 3061480 - RNA, 19 nt, Human
uacauauaagugauugcug

SEQ ID NO: 3061481 - RNA, 17 nt, Human
uacauauuuuuguagca

SEQ ID NO: 3061482 - RNA, 18 nt, Human
uacauauuuuuguagcac

SEQ ID NO: 3061483 - RNA, 12 nt, Human
aauguacugcau

SEQ ID NO: 3061484 - RNA, 15 nt, Human
uacaguaucucaggg

SEQ ID NO: 3061485 - RNA, 17 nt, Human
uacauaaugcgugcaua

SEQ ID NO: 3061486 - RNA, 20 nt, Human
uacauaaugcgugcauacca

SEQ ID NO: 3061487 - RNA, 19 nt, Human
uacauaaugcgugcauacc

SEQ ID NO: 3061488 - RNA, 15 nt, Human
uacauaaugcgugca

SEQ ID NO: 3061489 - RNA, 18 nt, Human
aauguacugcauaugaaa

SEQ ID NO: 3061490 - RNA, 14 nt, Human
aauguacugcauau

SEQ ID NO: 3061491 - RNA, 14 nt, Human
aauguauguguaag

SEQ ID NO: 3061492 - RNA, 12 nt, Human
aauguaugugua

SEQ ID NO: 3061493 - RNA, 11 nt, Human
aaugugauaug

SEQ ID NO: 3061494 - RNA, 15 nt, Human
aaugaaaaccacauu

SEQ ID NO: 3061495 - RNA, 15 nt, Human
aaugagccuggcaag

SEQ ID NO: 3061496 - RNA, 21 nt, Human
aaugagagacacacugaagaa

SEQ ID NO: 3061497 - RNA, 17 nt, Human
aaugacuuacuguacau

SEQ ID NO: 3061498 - RNA, 14 nt, Human
aaugacuuacugua

SEQ ID NO: 3061499 - RNA, 18 nt, Human
aaugacuuacuguacaug

SEQ ID NO: 3061500 - RNA, 14 nt, Human
uaaugguguuuuaa

SEQ ID NO: 3061501 - RNA, 13 nt, Human
uaaugaggaaacu

SEQ ID NO: 3061502 - RNA, 23 nt, Human
uaaugaaagacuguacaaaguag

SEQ ID NO: 3061503 - RNA, 22 nt, Human
uaaugaaagacuguacaaagua

SEQ ID NO: 3061504 - RNA, 15 nt, Human
uaaugacuuaagcac

SEQ ID NO: 3061505 - RNA, 21 nt, Human
uaaugacuuaagcacacuuga

SEQ ID NO: 3061506 - RNA, 19 nt, Human
uaaugaaagacuguacaaa

SEQ ID NO: 3061507 - RNA, 18 nt, Human
uaaugaaagacuguacaa

SEQ ID NO: 3061508 - RNA, 17 nt, Human
uaaugaaagacuguaca

SEQ ID NO: 3061509 - RNA, 14 nt, Human
uaaugaaagacugu

SEQ ID NO: 3061510 - RNA, 23 nt, Human
uaaucagugugucuaaauuugaa

SEQ ID NO: 3061511 - RNA, 14 nt, Human
uaauagguuuggac

SEQ ID NO: 3061512 - RNA, 19 nt, Human
uaauagguuuggacaaaau

SEQ ID NO: 3061513 - RNA, 13 nt, Human
aaucuucugaacu

SEQ ID NO: 3061514 - RNA, 20 nt, Human
aaucuucugaacuuggcgcu

SEQ ID NO: 3061515 - RNA, 15 nt, Human
aaucaucaagucuuu

SEQ ID NO: 3061516 - RNA, 17 nt, Human
aaucauggugcucagag

SEQ ID NO: 3061517 - RNA, 23 nt, Human
aaucaugaauuaguuuuauaugc

SEQ ID NO: 3061518 - RNA, 19 nt, Human
aaucaugaauuaguuuuau

SEQ ID NO: 3061519 - RNA, 17 nt, Human
aaucaugaauuaguuuu

SEQ ID NO: 3061520 - RNA, 17 nt, Human
aaucagacuaugaaguu

SEQ ID NO: 3061521 - RNA, 14 nt, Human
aaucagacuaugaa

SEQ ID NO: 3061522 - RNA, 20 nt, Human
uaaguauguguaaaauguga

SEQ ID NO: 3061523 - RNA, 19 nt, Human
uaaguacuauguaucaaug

SEQ ID NO: 3061524 - RNA, 12 nt, Human
uaaguucauaca

SEQ ID NO: 3061525 - RNA, 13 nt, Human
uaaguucauacau

SEQ ID NO: 3061526 - RNA, 20 nt, Human
uaaguuuuuauggcuuuugu

SEQ ID NO: 3061527 - RNA, 14 nt, Human
aaucuuauaauuua

SEQ ID NO: 3061528 - RNA, 15 nt, Human
aaucucaaauaacua

SEQ ID NO: 3061529 - RNA, 12 nt, Human
aaucucaaauuu

SEQ ID NO: 3061530 - RNA, 14 nt, Human
aaucucaaauuucu

SEQ ID NO: 3061531 - RNA, 13 nt, Human
aaucucaaauaac

SEQ ID NO: 3061532 - RNA, 12 nt, Human
aaucuaaaugga

SEQ ID NO: 3061533 - RNA, 13 nt, Human
aauccuugaagau

SEQ ID NO: 3061534 - RNA, 15 nt, Human
aaucuaaauggaacc

SEQ ID NO: 3061535 - RNA, 13 nt, Human
aaucuaaauggaa

SEQ ID NO: 3061536 - RNA, 18 nt, Human
aaucuaaauggaaccacu

SEQ ID NO: 3061537 - RNA, 15 nt, Human
aauaguauuugagag

SEQ ID NO: 3061538 - RNA, 12 nt, Human
aauaucacuugu

SEQ ID NO: 3061539 - RNA, 15 nt, Human
aauaucacuugucaa

SEQ ID NO: 3061540 - RNA, 14 nt, Human
uaacaugauuuggg

SEQ ID NO: 3061541 - RNA, 14 nt, Human
uaacauggaaguac

SEQ ID NO: 3061542 - RNA, 14 nt, Human
uaacuaaaagguau

SEQ ID NO: 3061543 - RNA, 15 nt, Human
uaacuaaaagguaug

SEQ ID NO: 3061544 - RNA, 15 nt, Human
uaacauggaaguacu

SEQ ID NO: 3061545 - RNA, 16 nt, Human
uaaccucuaaauucuu

SEQ ID NO: 3061546 - RNA, 19 nt, Human
uaaauuuugaguucuacau

SEQ ID NO: 3061547 - RNA, 18 nt, Human
uaaauuuugaguucuaca

SEQ ID NO: 3061548 - RNA, 20 nt, Human
uaaauuuugucuuuaacuca

SEQ ID NO: 3061549 - RNA, 18 nt, Human
aauagacaauuuauuaug

SEQ ID NO: 3061550 - RNA, 23 nt, Human
aauagacaauuuauuauggcaca

SEQ ID NO: 3061551 - RNA, 14 nt, Human
aauagcugggacua

SEQ ID NO: 3061552 - RNA, 13 nt, Human
aauagcugggacu

SEQ ID NO: 3061553 - RNA, 18 nt, Human
aauaggcguaacuaauuu

SEQ ID NO: 3061554 - RNA, 15 nt, Human
aauaggaaaaacuga

SEQ ID NO: 3061555 - RNA, 16 nt, Human
aauaggaaaaacugau

SEQ ID NO: 3061556 - RNA, 17 nt, Human
aauaggaaaaacugauu

SEQ ID NO: 3061557 - RNA, 18 nt, Human
aauaggaaaaacugauuu

SEQ ID NO: 3061558 - RNA, 19 nt, Human
aauaggaaaaacugauuuu

SEQ ID NO: 3061559 - RNA, 24 nt, Human
aauagcuuuuuucucugauacaga

SEQ ID NO: 3061560 - RNA, 18 nt, Human
uaacuuuuauaaacuuua

SEQ ID NO: 3061561 - RNA, 17 nt, Human
uaacuuuuauaaacuuu

SEQ ID NO: 3061562 - RNA, 15 nt, Human
uaacuuuuauaaacu

SEQ ID NO: 3061563 - RNA, 20 nt, Human
aauaucugaaaauguaugug

SEQ ID NO: 3061564 - RNA, 19 nt, Human
aauaucuuuuuuuuaauaa

SEQ ID NO: 3061565 - RNA, 19 nt, Human
aauaucugaaaauguaugu

SEQ ID NO: 3061566 - RNA, 18 nt, Human
aauaucugaaaauguaug

SEQ ID NO: 3061567 - RNA, 17 nt, Human
aauaucugaaaauguau

SEQ ID NO: 3061568 - RNA, 16 nt, Human
aauaucugaaaaugua

SEQ ID NO: 3061569 - RNA, 16 nt, Human
aauaucuccgucaacu

SEQ ID NO: 3061570 - RNA, 21 nt, Human
aauaucuccgucaacucauau

SEQ ID NO: 3061571 - RNA, 18 nt, Human
aauauuguguugugaaug

SEQ ID NO: 3061572 - RNA, 20 nt, Human
aauauugcuuuggucauaug

SEQ ID NO: 3061573 - RNA, 14 nt, Human
aauauuucagauaa

SEQ ID NO: 3061574 - RNA, 15 nt, Human
aauauuucagauaau

SEQ ID NO: 3061575 - RNA, 11 nt, Human
aauauugcuga

SEQ ID NO: 3061576 - RNA, 12 nt, Human
aauauugcugau

SEQ ID NO: 3061577 - RNA, 13 nt, Human
aauauugcugaug

SEQ ID NO: 3061578 - RNA, 15 nt, Human
aauauugcugauggu

SEQ ID NO: 3061579 - RNA, 18 nt, Human
aauauugcugauggugca

SEQ ID NO: 3061580 - RNA, 21 nt, Human
aauauugcugauggugcaaug

SEQ ID NO: 3061581 - RNA, 22 nt, Human
aauauugcugauggugcaauga

SEQ ID NO: 3061582 - RNA, 15 nt, Human
aauaugcacacauuu

SEQ ID NO: 3061583 - RNA, 24 nt, Human
aauaugcaaagcacugacuucuaa

SEQ ID NO: 3061584 - RNA, 18 nt, Human
aauauugauaugcuuaua

SEQ ID NO: 3061585 - RNA, 17 nt, Human
aauauugauaugcuuau

SEQ ID NO: 3061586 - RNA, 17 nt, Human
aauaugcaaagcacuga

SEQ ID NO: 3061587 - RNA, 15 nt, Human
aauaugcaaagcacu

SEQ ID NO: 3061588 - RNA, 24 nt, Human
uaaauguuuuuuuuuaaagacuuu

SEQ ID NO: 3061589 - RNA, 14 nt, Human
uaaauuaacuuuua

SEQ ID NO: 3061590 - RNA, 12 nt, Human
uaaauuaacuuu

SEQ ID NO: 3061591 - RNA, 17 nt, Human
uaaauuuugaguucuac

SEQ ID NO: 3061592 - RNA, 17 nt, Human
uaaauuaacuuuuauaa

SEQ ID NO: 3061593 - RNA, 16 nt, Human
uaaauuaacuuuuaua

SEQ ID NO: 3061594 - RNA, 15 nt, Human
uaaauuaacuuuuau

SEQ ID NO: 3061595 - RNA, 23 nt, Human
uaaauguuuuuuuuuaaagacuu

SEQ ID NO: 3061596 - RNA, 20 nt, Human
uaaauguugaaagaucaaaa

SEQ ID NO: 3061597 - RNA, 15 nt, Human
uaaauguugaaagau

SEQ ID NO: 3061598 - RNA, 23 nt, Human
uaaaugcaccuggaauauauaac

SEQ ID NO: 3061599 - RNA, 22 nt, Human
uaaaucuccaaaauaaaacuuu

SEQ ID NO: 3061600 - RNA, 15 nt, Human
uaaaucuccaaaaua

SEQ ID NO: 3061601 - RNA, 14 nt, Human
uaaaucuccaaaau

SEQ ID NO: 3061602 - RNA, 16 nt, Human
aauaacugugaaguuu

SEQ ID NO: 3061603 - RNA, 14 nt, Human
aauaacugugaagu

SEQ ID NO: 3061604 - RNA, 20 nt, Human
aauaacugugaaguuuacau

SEQ ID NO: 3061605 - RNA, 21 nt, Human
aauaauuuuaagaaaucaaag

SEQ ID NO: 3061606 - RNA, 17 nt, Human
aauaauuuuuauauuug

SEQ ID NO: 3061607 - RNA, 19 nt, Human
aauaauuuuuauauuugaa

SEQ ID NO: 3061608 - RNA, 16 nt, Human
aauaauuuuuauauuu

SEQ ID NO: 3061609 - RNA, 21 nt, Human
uaaauaaaguuuguugaaaca

SEQ ID NO: 3061610 - RNA, 12 nt, Human
uaaauaaaguuu

SEQ ID NO: 3061611 - RNA, 20 nt, Human
aauaauuuuuauauuugaaa

SEQ ID NO: 3061612 - RNA, 19 nt, Human
uaaauaaugugaaacugga

SEQ ID NO: 3061613 - RNA, 21 nt, Human
aauaacaaugaaaguugauaa

SEQ ID NO: 3061614 - RNA, 13 nt, Human
aauaacugugaag

SEQ ID NO: 3061615 - RNA, 22 nt, Human
aauaacauguaauuaaguacua

SEQ ID NO: 3061616 - RNA, 16 nt, Human
aauaaaucauaaaacu

SEQ ID NO: 3061617 - RNA, 15 nt, Human
aauaaaacuuuuuaa

SEQ ID NO: 3061618 - RNA, 14 nt, Human
aauaaaacuuuuua

SEQ ID NO: 3061619 - RNA, 12 nt, Human
aauaaaacuuuu

SEQ ID NO: 3061620 - RNA, 18 nt, Human
aauaaaacuuuuuaaaau

SEQ ID NO: 3061621 - RNA, 22 nt, Human
uaaaguaaaaacaaagaaauua

SEQ ID NO: 3061622 - RNA, 21 nt, Human
uaaaguaaaaacaaagaaauu

SEQ ID NO: 3061623 - RNA, 19 nt, Human
uaaaguaaaaacaaagaaa

SEQ ID NO: 3061624 - RNA, 22 nt, Human
uaaagguucaugcaaacuuuau

SEQ ID NO: 3061625 - RNA, 20 nt, Human
aaguuuuuauggcuuuugug

SEQ ID NO: 3061626 - RNA, 23 nt, Human
uacuguacagacagaaaaaacug

SEQ ID NO: 3061627 - RNA, 19 nt, Human
uacuguacagacagaaaaa

SEQ ID NO: 3061628 - RNA, 23 nt, Human
uacuguaauuugugauacaaugc

SEQ ID NO: 3061629 - RNA, 18 nt, Human
aauugaggacacugauau

SEQ ID NO: 3061630 - RNA, 23 nt, Human
uacugggaaagggauuuucagcc

SEQ ID NO: 3061631 - RNA, 17 nt, Human
uacuguaauuugugaua

SEQ ID NO: 3061632 - RNA, 16 nt, Human
uacuguaauuugugau

SEQ ID NO: 3061633 - RNA, 15 nt, Human
uacuguaauuuguga

SEQ ID NO: 3061634 - RNA, 19 nt, Human
uacugaaauaaacgucuua

SEQ ID NO: 3061635 - RNA, 22 nt, Human
uacugaaauaaacgucuuaaau

SEQ ID NO: 3061636 - RNA, 17 nt, Human
uacugagagugaacaaa

SEQ ID NO: 3061637 - RNA, 18 nt, Human
uacuagggaaaugccuuu

SEQ ID NO: 3061638 - RNA, 16 nt, Human
uacucuacccucuuag

SEQ ID NO: 3061639 - RNA, 22 nt, Human
uacucuacccucuuagaaaaac

SEQ ID NO: 3061640 - RNA, 13 nt, Human
uacgugaguccug

SEQ ID NO: 3061641 - RNA, 14 nt, Human
uacuaaaaauacaa

SEQ ID NO: 3061642 - RNA, 16 nt, Human
uacgucugacaggcaa

SEQ ID NO: 3061643 - RNA, 18 nt, Human
uacuaaaaauacaaaaaa

SEQ ID NO: 3061644 - RNA, 15 nt, Human
uacgucugacaggca

SEQ ID NO: 3061645 - RNA, 22 nt, Human
aauuuauaaacuuuuuucuuac

SEQ ID NO: 3061646 - RNA, 16 nt, Human
aauuuauacaggucau

SEQ ID NO: 3061647 - RNA, 17 nt, Human
aauuuauacaggucaua

SEQ ID NO: 3061648 - RNA, 14 nt, Human
aauuuauuauggca

SEQ ID NO: 3061649 - RNA, 13 nt, Human
aauuuauuauggc

SEQ ID NO: 3061650 - RNA, 17 nt, Human
aauuucuaggacugaau

SEQ ID NO: 3061651 - RNA, 18 nt, Human
aauuucuaggacugaauu

SEQ ID NO: 3061652 - RNA, 22 nt, Human
aauuucuaggacugaauuauga

SEQ ID NO: 3061653 - RNA, 23 nt, Human
aauuucuaggacugaauuaugaa

SEQ ID NO: 3061654 - RNA, 15 nt, Human
aauuuaccugaaguc

SEQ ID NO: 3061655 - RNA, 17 nt, Human
aauuuaccugaagucuu

SEQ ID NO: 3061656 - RNA, 17 nt, Human
aauuuacagagacagaa

SEQ ID NO: 3061657 - RNA, 18 nt, Human
aauuuacagagacagaaa

SEQ ID NO: 3061658 - RNA, 13 nt, Human
aauuuaguauuuu

SEQ ID NO: 3061659 - RNA, 15 nt, Human
uacuugaaaauuaac

SEQ ID NO: 3061660 - RNA, 16 nt, Human
uacuucuuauacauuu

SEQ ID NO: 3061661 - RNA, 15 nt, Human
uacuucuuauacauu

SEQ ID NO: 3061662 - RNA, 14 nt, Human
uacuucuuauacau

SEQ ID NO: 3061663 - RNA, 15 nt, Human
uacuucugcuacaua

SEQ ID NO: 3061664 - RNA, 19 nt, Human
uacuucuuaggguuaugau

SEQ ID NO: 3061665 - RNA, 20 nt, Human
uacuucuccacccugcucuc

SEQ ID NO: 3061666 - RNA, 18 nt, Human
uacuucuccacccugcuc

SEQ ID NO: 3061667 - RNA, 13 nt, Human
uacuucuccaccc

SEQ ID NO: 3061668 - RNA, 16 nt, Human
uacuucaugcugucua

SEQ ID NO: 3061669 - RNA, 22 nt, Human
aauuuuuaaucuuuaauuuuac

SEQ ID NO: 3061670 - RNA, 21 nt, Human
aauuuuucuuauuucauuucu

SEQ ID NO: 3061671 - RNA, 22 nt, Human
aauuuuuucucuaggaaauauu

SEQ ID NO: 3061672 - RNA, 20 nt, Human
aauuugugauacaaugcugu

SEQ ID NO: 3061673 - RNA, 15 nt, Human
aauuugguuuucaca

SEQ ID NO: 3061674 - RNA, 21 nt, Human
aauuugguuuucacauuggaa

SEQ ID NO: 3061675 - RNA, 16 nt, Human
aauuuguuauaaugaa

SEQ ID NO: 3061676 - RNA, 13 nt, Human
aauuugguuuuca

SEQ ID NO: 3061677 - RNA, 18 nt, Human
aauuugggggaaaauuua

SEQ ID NO: 3061678 - RNA, 22 nt, Human
uagauaggucagugcaaauacu

SEQ ID NO: 3061679 - RNA, 17 nt, Human
uagauaggccaugggca

SEQ ID NO: 3061680 - RNA, 21 nt, Human
uagaugcaguucugaagaaga

SEQ ID NO: 3061681 - RNA, 20 nt, Human
uagaugcaguucugaagaag

SEQ ID NO: 3061682 - RNA, 14 nt, Human
acaaaacuuuucua

SEQ ID NO: 3061683 - RNA, 21 nt, Human
acaaagcgugguggacaugca

SEQ ID NO: 3061684 - RNA, 18 nt, Human
acaaugaagauaaaaaga

SEQ ID NO: 3061685 - RNA, 16 nt, Human
uagcuacuaauuuuaa

SEQ ID NO: 3061686 - RNA, 16 nt, Human
uagcucaggugucccu

SEQ ID NO: 3061687 - RNA, 15 nt, Human
acaagcuccaagcuc

SEQ ID NO: 3061688 - RNA, 16 nt, Human
acaagcuccaagcucc

SEQ ID NO: 3061689 - RNA, 17 nt, Human
acaagcuccaagcuccc

SEQ ID NO: 3061690 - RNA, 19 nt, Human
acaagcuccaagcucccag

SEQ ID NO: 3061691 - RNA, 22 nt, Human
acaagcuccaagcucccaggca

SEQ ID NO: 3061692 - RNA, 21 nt, Human
acaaauucugucucuggauua

SEQ ID NO: 3061693 - RNA, 18 nt, Human
acaaauucugucucugga

SEQ ID NO: 3061694 - RNA, 17 nt, Human
acaaauuuacagagaca

SEQ ID NO: 3061695 - RNA, 17 nt, Human
acaacaucuuuuucuac

SEQ ID NO: 3061696 - RNA, 17 nt, Human
acaagaugguucuagca

SEQ ID NO: 3061697 - RNA, 22 nt, Human
acaagagcccaggccuccuaca

SEQ ID NO: 3061698 - RNA, 18 nt, Human
acaagagcccaggccucc

SEQ ID NO: 3061699 - RNA, 17 nt, Human
acaagaccacguuucua

SEQ ID NO: 3061700 - RNA, 16 nt, Human
acaagaccacguuucu

SEQ ID NO: 3061701 - RNA, 13 nt, Human
acaagcuccaagc

SEQ ID NO: 3061702 - RNA, 22 nt, Human
acaagcucacagaccuuugaac

SEQ ID NO: 3061703 - RNA, 17 nt, Human
acaagcgugagccacug

SEQ ID NO: 3061704 - RNA, 16 nt, Human
uauaaguauucuaaau

SEQ ID NO: 3061705 - RNA, 22 nt, Human
acacucacauuuauucugcuca

SEQ ID NO: 3061706 - RNA, 13 nt, Human
acacuccuucaca

SEQ ID NO: 3061707 - RNA, 14 nt, Human
acacuccagugaga

SEQ ID NO: 3061708 - RNA, 11 nt, Human
acacucugaga

SEQ ID NO: 3061709 - RNA, 13 nt, Human
acacucugagacu

SEQ ID NO: 3061710 - RNA, 22 nt, Human
acacuguucucugcccuccaag

SEQ ID NO: 3061711 - RNA, 23 nt, Human
acacuguucucugcccuccaaga

SEQ ID NO: 3061712 - RNA, 16 nt, Human
acacuguucucugccc

SEQ ID NO: 3061713 - RNA, 17 nt, Human
acacuguucucugcccu

SEQ ID NO: 3061714 - RNA, 18 nt, Human
acacuguucucugcccuc

SEQ ID NO: 3061715 - RNA, 20 nt, Human
acacuguucucugcccucca

SEQ ID NO: 3061716 - RNA, 14 nt, Human
acacuguucucugc

SEQ ID NO: 3061717 - RNA, 15 nt, Human
acacuguucucugcc

SEQ ID NO: 3061718 - RNA, 12 nt, Human
acacugaagaag

SEQ ID NO: 3061719 - RNA, 14 nt, Human
acacugaagaagca

SEQ ID NO: 3061720 - RNA, 15 nt, Human
uauauuuaaugauaa

SEQ ID NO: 3061721 - RNA, 12 nt, Human
uauauuuacaaa

SEQ ID NO: 3061722 - RNA, 15 nt, Human
acagacacaggcccg

SEQ ID NO: 3061723 - RNA, 17 nt, Human
acagacacaggcccggc

SEQ ID NO: 3061724 - RNA, 22 nt, Human
acagacacaggcccggcuccag

SEQ ID NO: 3061725 - RNA, 18 nt, Human
acagacacaggcccggcu

SEQ ID NO: 3061726 - RNA, 19 nt, Human
acagacuggaagcacagcu

SEQ ID NO: 3061727 - RNA, 17 nt, Human
acagacuggaagcacag

SEQ ID NO: 3061728 - RNA, 21 nt, Human
acagacuggaagcacagcuuc

SEQ ID NO: 3061729 - RNA, 18 nt, Human
acagaaaauucuucucca

SEQ ID NO: 3061730 - RNA, 17 nt, Human
acacuuuggcccagggu

SEQ ID NO: 3061731 - RNA, 18 nt, Human
acacuuuggcccagggug

SEQ ID NO: 3061732 - RNA, 15 nt, Human
acacuguuucaaacu

SEQ ID NO: 3061733 - RNA, 13 nt, Human
acacuuaaaaaug

SEQ ID NO: 3061734 - RNA, 15 nt, Human
acacuuaaaaauggu

SEQ ID NO: 3061735 - RNA, 23 nt, Human
acacuguuucaaacuuuacuaug

SEQ ID NO: 3061736 - RNA, 16 nt, Human
uaucuuguagcuuuau

SEQ ID NO: 3061737 - RNA, 19 nt, Human
acagcccuucuuuccacag

SEQ ID NO: 3061738 - RNA, 23 nt, Human
acagcccgggcucugccucccau

SEQ ID NO: 3061739 - RNA, 20 nt, Human
acagcccuucuuuccacaga

SEQ ID NO: 3061740 - RNA, 21 nt, Human
acagcccuucuuuccacagaa

SEQ ID NO: 3061741 - RNA, 21 nt, Human
acagcccgggcucugccuccc

SEQ ID NO: 3061742 - RNA, 22 nt, Human
acagcccgggcucugccuccca

SEQ ID NO: 3061743 - RNA, 20 nt, Human
acagcccgggcucugccucc

SEQ ID NO: 3061744 - RNA, 14 nt, Human
acagauaaucagug

SEQ ID NO: 3061745 - RNA, 15 nt, Human
acagaguuguuacau

SEQ ID NO: 3061746 - RNA, 22 nt, Human
acagaguuguuacauuuuuaag

SEQ ID NO: 3061747 - RNA, 21 nt, Human
acagaguuguuacauuuuuaa

SEQ ID NO: 3061748 - RNA, 20 nt, Human
acagauacuccuccaagguu

SEQ ID NO: 3061749 - RNA, 20 nt, Human
acagauagauauaugcucug

SEQ ID NO: 3061750 - RNA, 23 nt, Human
acagaugggugcuuggaggaagg

SEQ ID NO: 3061751 - RNA, 21 nt, Human
acagagcaagugagacccugu

SEQ ID NO: 3061752 - RNA, 18 nt, Human
acagagcuacacagggga

SEQ ID NO: 3061753 - RNA, 20 nt, Human
acagaguuguuacauuuuua

SEQ ID NO: 3061754 - RNA, 19 nt, Human
acagaguuguuacauuuuu

SEQ ID NO: 3061755 - RNA, 18 nt, Human
acagaguuguuacauuuu

SEQ ID NO: 3061756 - RNA, 17 nt, Human
acagaguuguuacauuu

SEQ ID NO: 3061757 - RNA, 16 nt, Human
acagaguuguuacauu

SEQ ID NO: 3061758 - RNA, 20 nt, Human
uaucccuacuguaauuugug

SEQ ID NO: 3061759 - RNA, 19 nt, Human
uaucccuacuguaauuugu

SEQ ID NO: 3061760 - RNA, 15 nt, Human
uauauuuauuacugu

SEQ ID NO: 3061761 - RNA, 19 nt, Human
uauauuuauuacuguaaga

SEQ ID NO: 3061762 - RNA, 13 nt, Human
uaucucagggccu

SEQ ID NO: 3061763 - RNA, 15 nt, Human
uaucucagggccugg

SEQ ID NO: 3061764 - RNA, 17 nt, Human
uaucucaaaacugcacu

SEQ ID NO: 3061765 - RNA, 13 nt, Human
uaguguucauaaa

SEQ ID NO: 3061766 - RNA, 12 nt, Human
uaguguuggaga

SEQ ID NO: 3061767 - RNA, 16 nt, Human
uaguguuggagaagaa

SEQ ID NO: 3061768 - RNA, 20 nt, Human
uaguaauagagcaaaauuga

SEQ ID NO: 3061769 - RNA, 13 nt, Human
uaguagagacagg

SEQ ID NO: 3061770 - RNA, 14 nt, Human
uaguaauagagcaa

SEQ ID NO: 3061771 - RNA, 21 nt, Human
uagguuggcaaaaaggcagga

SEQ ID NO: 3061772 - RNA, 22 nt, Human
acacagcucuucuccaggcugu

SEQ ID NO: 3061773 - RNA, 14 nt, Human
acacacugaagaag

SEQ ID NO: 3061774 - RNA, 11 nt, Human
acacagugagu

SEQ ID NO: 3061775 - RNA, 22 nt, Human
acacaguauuacuucugcuaca

SEQ ID NO: 3061776 - RNA, 18 nt, Human
acacaacuauuuuuccaa

SEQ ID NO: 3061777 - RNA, 21 nt, Human
acaaugguuuucuuguguguu

SEQ ID NO: 3061778 - RNA, 14 nt, Human
acacaacuauauug

SEQ ID NO: 3061779 - RNA, 17 nt, Human
acacaacuauauuguuu

SEQ ID NO: 3061780 - RNA, 15 nt, Human
acaaugguuuucuug

SEQ ID NO: 3061781 - RNA, 14 nt, Human
acaaugcuguauuu

SEQ ID NO: 3061782 - RNA, 17 nt, Human
acaaugcuguauuuuaa

SEQ ID NO: 3061783 - RNA, 13 nt, Human
acacacugaagaa

SEQ ID NO: 3061784 - RNA, 20 nt, Human
acacacucaaaucaagaaac

SEQ ID NO: 3061785 - RNA, 19 nt, Human
acacacagcucuguccugg

SEQ ID NO: 3061786 - RNA, 12 nt, Human
acacacagcucu

SEQ ID NO: 3061787 - RNA, 11 nt, Human
acacacagcuc

SEQ ID NO: 3061788 - RNA, 21 nt, Human
uauaaaaauaaaaaacacugg

SEQ ID NO: 3061789 - RNA, 20 nt, Human
uauaaaaauaaaaaacacug

SEQ ID NO: 3061790 - RNA, 23 nt, Human
uauaaaauaauuuuuauauuuga

SEQ ID NO: 3061791 - RNA, 18 nt, Human
acacaugcugaacaucac

SEQ ID NO: 3061792 - RNA, 18 nt, Human
acacauguccaagaagcc

SEQ ID NO: 3061793 - RNA, 19 nt, Human
acacauguccaagaagccc

SEQ ID NO: 3061794 - RNA, 13 nt, Human
acacauguccaag

SEQ ID NO: 3061795 - RNA, 21 nt, Human
acacauguccaagaagcccag

SEQ ID NO: 3061796 - RNA, 22 nt, Human
acacauguccaagaagcccagg

SEQ ID NO: 3061797 - RNA, 13 nt, Human
acacccagcccac

SEQ ID NO: 3061798 - RNA, 12 nt, Human
acacccagccca

SEQ ID NO: 3061799 - RNA, 18 nt, Human
acaccucugcacaagcug

SEQ ID NO: 3061800 - RNA, 16 nt, Human
acaccuugacagggca

SEQ ID NO: 3061801 - RNA, 15 nt, Human
acaccuugacagggc

SEQ ID NO: 3061802 - RNA, 14 nt, Human
acaccuugacaggg

SEQ ID NO: 3061803 - RNA, 19 nt, Human
acacuaaccacgcuggacc

SEQ ID NO: 3061804 - RNA, 17 nt, Human
acacuaagagagaauga

SEQ ID NO: 3061805 - RNA, 17 nt, Human
acacuaaccacgcugga

SEQ ID NO: 3061806 - RNA, 16 nt, Human
acacuaaccacgcugg

SEQ ID NO: 3061807 - RNA, 14 nt, Human
acacuaagagagaa

SEQ ID NO: 3061808 - RNA, 18 nt, Human
acacuaagagagaaugag

SEQ ID NO: 3061809 - RNA, 22 nt, Human
uauaaccaguguuguggauuua

SEQ ID NO: 3061810 - RNA, 16 nt, Human
guuuaaaaucauuucu

SEQ ID NO: 3061811 - RNA, 10 nt, Human
guuuaaaauc

SEQ ID NO: 3061812 - RNA, 18 nt, Human
guuguaccgcaaugugac

SEQ ID NO: 3061813 - RNA, 18 nt, Human
guuggucccccuuccaug

SEQ ID NO: 3061814 - RNA, 13 nt, Human
guuggguggaugc

SEQ ID NO: 3061815 - RNA, 19 nt, Human
aaggcuaccuuuguauucu

SEQ ID NO: 3061816 - RNA, 16 nt, Human
aaggccaaaggaagca

SEQ ID NO: 3061817 - RNA, 18 nt, Human
aaggccaaaggaagcaca

SEQ ID NO: 3061818 - RNA, 17 nt, Human
guugcccaggcuggcgu

SEQ ID NO: 3061819 - RNA, 15 nt, Human
guugcccaggcaggu

SEQ ID NO: 3061820 - RNA, 21 nt, Human
guugcccaggcuggcgugcag

SEQ ID NO: 3061821 - RNA, 18 nt, Human
guugcccaggcaggucuu

SEQ ID NO: 3061822 - RNA, 14 nt, Human
aaggcuccaggagc

SEQ ID NO: 3061823 - RNA, 17 nt, Human
guugcccaggcaggucu

SEQ ID NO: 3061824 - RNA, 15 nt, Human
aaggauccugagcca

SEQ ID NO: 3061825 - RNA, 17 nt, Human
aaggauccugagccaga

SEQ ID NO: 3061826 - RNA, 18 nt, Human
aaggaugaucuaggaaga

SEQ ID NO: 3061827 - RNA, 23 nt, Human
aaggaugaucuaggaagacuuug

SEQ ID NO: 3061828 - RNA, 14 nt, Human
aaggauccugagcc

SEQ ID NO: 3061829 - RNA, 13 nt, Human
aaggauccugagc

SEQ ID NO: 3061830 - RNA, 23 nt, Human
guugaugaucuuugcagacaggc

SEQ ID NO: 3061831 - RNA, 16 nt, Human
aaggaugcuuguacau

SEQ ID NO: 3061832 - RNA, 15 nt, Human
aaggaugcuuguaca

SEQ ID NO: 3061833 - RNA, 19 nt, Human
aaggaugcccaaagaugca

SEQ ID NO: 3061834 - RNA, 18 nt, Human
aaggaugcacagaguugu

SEQ ID NO: 3061835 - RNA, 19 nt, Human
aaggaugcuuguacauaau

SEQ ID NO: 3061836 - RNA, 17 nt, Human
aaggaugcuuguacaua

SEQ ID NO: 3061837 - RNA, 20 nt, Human
guuuucuuaaccagaucauu

SEQ ID NO: 3061838 - RNA, 19 nt, Human
guuuucuguucuuucuggc

SEQ ID NO: 3061839 - RNA, 11 nt, Human
guuuucuguuc

SEQ ID NO: 3061840 - RNA, 23 nt, Human
guuuucugagaaagacuauucaa

SEQ ID NO: 3061841 - RNA, 19 nt, Human
guuugcaucugaaaauuga

SEQ ID NO: 3061842 - RNA, 16 nt, Human
guuugccucugccucu

SEQ ID NO: 3061843 - RNA, 13 nt, Human
guuugccucugcc

SEQ ID NO: 3061844 - RNA, 23 nt, Human
guuucuaaaggcuaccuuuguau

SEQ ID NO: 3061845 - RNA, 22 nt, Human
guuucuaaaggcuaccuuugua

SEQ ID NO: 3061846 - RNA, 22 nt, Human
guuugauucagacagcugccug

SEQ ID NO: 3061847 - RNA, 20 nt, Human
aaguaaaaacaaagaaauua

SEQ ID NO: 3061848 - RNA, 13 nt, Human
aaguaaaaacaaa

SEQ ID NO: 3061849 - RNA, 12 nt, Human
aaguaauaugca

SEQ ID NO: 3061850 - RNA, 19 nt, Human
guuucuaaaggcuaccuuu

SEQ ID NO: 3061851 - RNA, 20 nt, Human
guuucuaaagcugccagccg

SEQ ID NO: 3061852 - RNA, 16 nt, Human
aaguaauaugcacaca

SEQ ID NO: 3061853 - RNA, 15 nt, Human
aaguaauaugcacac

SEQ ID NO: 3061854 - RNA, 16 nt, Human
aaggguaucaggugcu

SEQ ID NO: 3061855 - RNA, 23 nt, Human
aaggggaauguuugccucugccu

SEQ ID NO: 3061856 - RNA, 22 nt, Human
aaggggaauguuugccucugcc

SEQ ID NO: 3061857 - RNA, 19 nt, Human
aagggccuggccugagcug

SEQ ID NO: 3061858 - RNA, 14 nt, Human
aagggccuggccug

SEQ ID NO: 3061859 - RNA, 17 nt, Human
aagggccuggccugagc

SEQ ID NO: 3061860 - RNA, 13 nt, Human
aagggccuggccu

SEQ ID NO: 3061861 - RNA, 21 nt, Human
guuucaaacauauauaacaau

SEQ ID NO: 3061862 - RNA, 17 nt, Human
aagcuaucguaaaauua

SEQ ID NO: 3061863 - RNA, 22 nt, Human
aagcuauucaguaauaacucua

SEQ ID NO: 3061864 - RNA, 18 nt, Human
aagcuuauuaaaacucau

SEQ ID NO: 3061865 - RNA, 23 nt, Human
aagcuuguauuccuuuuucucuc

SEQ ID NO: 3061866 - RNA, 20 nt, Human
guucccauuugcuccuuucu

SEQ ID NO: 3061867 - RNA, 16 nt, Human
guucccauuugcuccu

SEQ ID NO: 3061868 - RNA, 20 nt, Human
guuccauggccucuucagau

SEQ ID NO: 3061869 - RNA, 18 nt, Human
guucuagcauggcauauu

SEQ ID NO: 3061870 - RNA, 20 nt, Human
guucccuuugacgccauccc

SEQ ID NO: 3061871 - RNA, 21 nt, Human
guucccuuugacgccauccca

SEQ ID NO: 3061872 - RNA, 22 nt, Human
guucccuuugacgccaucccag

SEQ ID NO: 3061873 - RNA, 16 nt, Human
guucuacccaggugcu

SEQ ID NO: 3061874 - RNA, 23 nt, Human
guucugggacacaguucaauucu

SEQ ID NO: 3061875 - RNA, 22 nt, Human
guugaugaucuuugcagacagg

SEQ ID NO: 3061876 - RNA, 14 nt, Human
guugacaugggaca

SEQ ID NO: 3061877 - RNA, 18 nt, Human
guugacaugggacauuug

SEQ ID NO: 3061878 - RNA, 17 nt, Human
guucuuaguuugcaguu

SEQ ID NO: 3061879 - RNA, 21 nt, Human
guucuugguuuguaaauuaac

SEQ ID NO: 3061880 - RNA, 13 nt, Human
guugacaugggac

SEQ ID NO: 3061881 - RNA, 10 nt, Human
guucauacau

SEQ ID NO: 3061882 - RNA, 13 nt, Human
guucauacauauu

SEQ ID NO: 3061883 - RNA, 14 nt, Human
guucauacauauuu

SEQ ID NO: 3061884 - RNA, 23 nt, Human
guucauacauauuuuuguagcac

SEQ ID NO: 3061885 - RNA, 9 nt, Human
guucauaca

SEQ ID NO: 3061886 - RNA, 19 nt, Human
guucaggguuggccccugc

SEQ ID NO: 3061887 - RNA, 18 nt, Human
guucaggguuggccccug

SEQ ID NO: 3061888 - RNA, 17 nt, Human
guucaggguuggccccu

SEQ ID NO: 3061889 - RNA, 17 nt, Human
guucagcuccagcucac

SEQ ID NO: 3061890 - RNA, 16 nt, Human
guucagcuccagcuca

SEQ ID NO: 3061891 - RNA, 18 nt, Human
guucagcuccagcucacc

SEQ ID NO: 3061892 - RNA, 15 nt, Human
guucagcuccagcuc

SEQ ID NO: 3061893 - RNA, 11 nt, Human
guucauacauu

SEQ ID NO: 3061894 - RNA, 14 nt, Human
guucauacauugua

SEQ ID NO: 3061895 - RNA, 19 nt, Human
aagccuccuccagccgcca

SEQ ID NO: 3061896 - RNA, 16 nt, Human
aagcuaggccuggcca

SEQ ID NO: 3061897 - RNA, 18 nt, Human
aagcuaggccuggccaga

SEQ ID NO: 3061898 - RNA, 17 nt, Human
aagcuaggccuggccag

SEQ ID NO: 3061899 - RNA, 18 nt, Human
guguuuuaaaaugagaaa

SEQ ID NO: 3061900 - RNA, 14 nt, Human
guuaaguaugugua

SEQ ID NO: 3061901 - RNA, 18 nt, Human
guuaaucauuagguguga

SEQ ID NO: 3061902 - RNA, 18 nt, Human
guuaaugauagcuacugu

SEQ ID NO: 3061903 - RNA, 17 nt, Human
guuaguaugaggcauuu

SEQ ID NO: 3061904 - RNA, 20 nt, Human
guuaguaugaggcauuuguu

SEQ ID NO: 3061905 - RNA, 18 nt, Human
guguuuccauauuuuaua

SEQ ID NO: 3061906 - RNA, 23 nt, Human
guguuuccuggcacugcuuccag

SEQ ID NO: 3061907 - RNA, 18 nt, Human
gugucuugcaauggcagc

SEQ ID NO: 3061908 - RNA, 17 nt, Human
gugucuugcaauggcag

SEQ ID NO: 3061909 - RNA, 17 nt, Human
gugugacuacuccccca

SEQ ID NO: 3061910 - RNA, 21 nt, Human
gugugaccacugcagaagaca

SEQ ID NO: 3061911 - RNA, 18 nt, Human
gugucuuuuuucacuaca

SEQ ID NO: 3061912 - RNA, 17 nt, Human
gugguuuucuguucuuu

SEQ ID NO: 3061913 - RNA, 18 nt, Human
aagagguuuuaaaaaaau

SEQ ID NO: 3061914 - RNA, 14 nt, Human
aagagguuuuaaag

SEQ ID NO: 3061915 - RNA, 18 nt, Human
aagagguuuuaaagcuuc

SEQ ID NO: 3061916 - RNA, 12 nt, Human
aagaugcagccg

SEQ ID NO: 3061917 - RNA, 12 nt, Human
aagcaaaggaga

SEQ ID NO: 3061918 - RNA, 13 nt, Human
aagcaaaggagau

SEQ ID NO: 3061919 - RNA, 14 nt, Human
aagaugugacaugu

SEQ ID NO: 3061920 - RNA, 18 nt, Human
aagaugugacauguuuua

SEQ ID NO: 3061921 - RNA, 13 nt, Human
gugggauccucca

SEQ ID NO: 3061922 - RNA, 13 nt, Human
gugggagugggcc

SEQ ID NO: 3061923 - RNA, 14 nt, Human
gugggagugggccc

SEQ ID NO: 3061924 - RNA, 23 nt, Human
gugggaggaucucuugagccugg

SEQ ID NO: 3061925 - RNA, 22 nt, Human
gugggacacccugugauggggc

SEQ ID NO: 3061926 - RNA, 21 nt, Human
gugggacagucaccucaugga

SEQ ID NO: 3061927 - RNA, 22 nt, Human
guggcgcagcauauucaggaag

SEQ ID NO: 3061928 - RNA, 23 nt, Human
guggcgcagcauauucaggaagc

SEQ ID NO: 3061929 - RNA, 14 nt, Human
guggugguuuucug

SEQ ID NO: 3061930 - RNA, 16 nt, Human
gugguuucagaaaugu

SEQ ID NO: 3061931 - RNA, 20 nt, Human
gugggggaucacagccucug

SEQ ID NO: 3061932 - RNA, 14 nt, Human
guggguacgggagg

SEQ ID NO: 3061933 - RNA, 16 nt, Human
aagacuguacaaagua

SEQ ID NO: 3061934 - RNA, 21 nt, Human
aagacugaguacguugugcau

SEQ ID NO: 3061935 - RNA, 17 nt, Human
aagacuguacaaaguag

SEQ ID NO: 3061936 - RNA, 17 nt, Human
aagacugaguacguugu

SEQ ID NO: 3061937 - RNA, 18 nt, Human
aagacuaucuaaauguug

SEQ ID NO: 3061938 - RNA, 17 nt, Human
aagacuaucuaaauguu

SEQ ID NO: 3061939 - RNA, 16 nt, Human
aagacuaucuaaaugu

SEQ ID NO: 3061940 - RNA, 18 nt, Human
aagacccuugugguccca

SEQ ID NO: 3061941 - RNA, 21 nt, Human
aagacccuuguggucccaccc

SEQ ID NO: 3061942 - RNA, 22 nt, Human
aagacccuuguggucccacccc

SEQ ID NO: 3061943 - RNA, 19 nt, Human
aagagcuguucacagccag

SEQ ID NO: 3061944 - RNA, 16 nt, Human
aacuuguauuaugugu

SEQ ID NO: 3061945 - RNA, 15 nt, Human
aacuuguauuaugug

SEQ ID NO: 3061946 - RNA, 18 nt, Human
aacuugucuuuggacccu

SEQ ID NO: 3061947 - RNA, 11 nt, Human
gugccuuaugg

SEQ ID NO: 3061948 - RNA, 17 nt, Human
aacuuggcgcugccccu

SEQ ID NO: 3061949 - RNA, 13 nt, Human
aacuuuaccuuuu

SEQ ID NO: 3061950 - RNA, 21 nt, Human
gugccuuauggaacacucuga

SEQ ID NO: 3061951 - RNA, 23 nt, Human
gugccuuauggaacacucugaga

SEQ ID NO: 3061952 - RNA, 14 nt, Human
gugccuuauggaac

SEQ ID NO: 3061953 - RNA, 13 nt, Human
gugccucugggac

SEQ ID NO: 3061954 - RNA, 12 nt, Human
gugccucuggga

SEQ ID NO: 3061955 - RNA, 22 nt, Human
gugccgagaaggaagccuccca

SEQ ID NO: 3061956 - RNA, 21 nt, Human
gugaaccaccacacccagccc

SEQ ID NO: 3061957 - RNA, 15 nt, Human
gugccucaagagaag

SEQ ID NO: 3061958 - RNA, 13 nt, Human
aagaaauauaccu

SEQ ID NO: 3061959 - RNA, 22 nt, Human
aagaaagacuaucuaaauguug

SEQ ID NO: 3061960 - RNA, 20 nt, Human
aagaaagacuaucuaaaugu

SEQ ID NO: 3061961 - RNA, 18 nt, Human
aagaaaaaggaugcacag

SEQ ID NO: 3061962 - RNA, 17 nt, Human
aagaaaaaggaugcaca

SEQ ID NO: 3061963 - RNA, 15 nt, Human
aagaaaaaggaugca

SEQ ID NO: 3061964 - RNA, 21 nt, Human
gugcuaucucccccagcccca

SEQ ID NO: 3061965 - RNA, 22 nt, Human
gugcuaggaacacuccuucaca

SEQ ID NO: 3061966 - RNA, 17 nt, Human
gugcuaggaacacuccu

SEQ ID NO: 3061967 - RNA, 18 nt, Human
gugcuaggaacacuccuu

SEQ ID NO: 3061968 - RNA, 16 nt, Human
aagaagugaaaaucua

SEQ ID NO: 3061969 - RNA, 22 nt, Human
aagaagugaaaaucuacacucc

SEQ ID NO: 3061970 - RNA, 15 nt, Human
gugcucaggagcccu

SEQ ID NO: 3061971 - RNA, 12 nt, Human
gugcuauguucu

SEQ ID NO: 3061972 - RNA, 19 nt, Human
gugcuaucucccccagccc

SEQ ID NO: 3061973 - RNA, 22 nt, Human
gugcuaucucccccagccccau

SEQ ID NO: 3061974 - RNA, 20 nt, Human
gugcugggauuacaggugug

SEQ ID NO: 3061975 - RNA, 22 nt, Human
gugcugggauuacaagcgugag

SEQ ID NO: 3061976 - RNA, 21 nt, Human
gugcugggauuacaagcguga

SEQ ID NO: 3061977 - RNA, 17 nt, Human
guggacacagcucuucu

SEQ ID NO: 3061978 - RNA, 23 nt, Human
guggacacagcucuucuccaggc

SEQ ID NO: 3061979 - RNA, 22 nt, Human
guggacacagcucuucuccagg

SEQ ID NO: 3061980 - RNA, 18 nt, Human
guggacacagcucuucuc

SEQ ID NO: 3061981 - RNA, 21 nt, Human
guggaugccugguggcagcug

SEQ ID NO: 3061982 - RNA, 20 nt, Human
guggaugcugcugccccugc

SEQ ID NO: 3061983 - RNA, 20 nt, Human
aagacaaaaagcuacuuauu

SEQ ID NO: 3061984 - RNA, 23 nt, Human
aagacaaaaagcuacuuauugua

SEQ ID NO: 3061985 - RNA, 16 nt, Human
aagacaaaaagcuacu

SEQ ID NO: 3061986 - RNA, 16 nt, Human
aagaauugaagcagga

SEQ ID NO: 3061987 - RNA, 18 nt, Human
aagaaugauuaugaauua

SEQ ID NO: 3061988 - RNA, 18 nt, Human
guggcaccagcagccugg

SEQ ID NO: 3061989 - RNA, 19 nt, Human
guggauuuaacagaaaugu

SEQ ID NO: 3061990 - RNA, 18 nt, Human
guggauuuaacagaaaug

SEQ ID NO: 3061991 - RNA, 19 nt, Human
guggcaccagcagccugga

SEQ ID NO: 3061992 - RNA, 14 nt, Human
guggcagcucaccu

SEQ ID NO: 3061993 - RNA, 16 nt, Human
guggcagcucaccucu

SEQ ID NO: 3061994 - RNA, 20 nt, Human
guggcagcucaccucucccu

SEQ ID NO: 3061995 - RNA, 16 nt, Human
aagaaugauuaugaau

SEQ ID NO: 3061996 - RNA, 13 nt, Human
aaaugcauguugc

SEQ ID NO: 3061997 - RNA, 22 nt, Human
aaaugcaccuggaauauauaac

SEQ ID NO: 3061998 - RNA, 18 nt, Human
aaaugcaccuggaauaua

SEQ ID NO: 3061999 - RNA, 14 nt, Human
aaaugcaccuggaa

SEQ ID NO: 3062000 - RNA, 14 nt, Human
aaaugcauuucuaa

SEQ ID NO: 3062001 - RNA, 13 nt, Human
aaaugcccagccc

SEQ ID NO: 3062002 - RNA, 13 nt, Human
aaaugcccagcuu

SEQ ID NO: 3062003 - RNA, 18 nt, Human
aaaugcccagccccuucu

SEQ ID NO: 3062004 - RNA, 14 nt, Human
aaaugcccagcccc

SEQ ID NO: 3062005 - RNA, 15 nt, Human
aaaugcccagccccu

SEQ ID NO: 3062006 - RNA, 18 nt, Human
aaaugggcagagcagaga

SEQ ID NO: 3062007 - RNA, 20 nt, Human
aaaugggcagagcagagacc

SEQ ID NO: 3062008 - RNA, 15 nt, Human
aaaugggcagagcag

SEQ ID NO: 3062009 - RNA, 19 nt, Human
aaauggcuuccuggcaaua

SEQ ID NO: 3062010 - RNA, 18 nt, Human
aaauggcuuccuggcaau

SEQ ID NO: 3062011 - RNA, 11 nt, Human
aaaugagaaau

SEQ ID NO: 3062012 - RNA, 21 nt, Human
aaaugaaagcagggacuugaa

SEQ ID NO: 3062013 - RNA, 22 nt, Human
aaaugaaagcagggacuugaac

SEQ ID NO: 3062014 - RNA, 14 nt, Human
aaaugagaaaucua

SEQ ID NO: 3062015 - RNA, 13 nt, Human
aaaugagaaaucu

SEQ ID NO: 3062016 - RNA, 16 nt, Human
aaaugagaaaucuaaa

SEQ ID NO: 3062017 - RNA, 13 nt, Human
aaaugagccuggc

SEQ ID NO: 3062018 - RNA, 19 nt, Human
aaaugagccuggcaagaau

SEQ ID NO: 3062019 - RNA, 23 nt, Human
aaaugagguacucuccuggaaau

SEQ ID NO: 3062020 - RNA, 16 nt, Human
aaaugagguacucucc

SEQ ID NO: 3062021 - RNA, 19 nt, Human
aaaugaggucagagccugc

SEQ ID NO: 3062022 - RNA, 17 nt, Human
aaaugaggucagagccu

SEQ ID NO: 3062023 - RNA, 18 nt, Human
aaauccauacauuugugu

SEQ ID NO: 3062024 - RNA, 15 nt, Human
guaggaagacuuugg

SEQ ID NO: 3062025 - RNA, 18 nt, Human
guaggaagguuaauguuc

SEQ ID NO: 3062026 - RNA, 21 nt, Human
guagcugggacuacaggcacc

SEQ ID NO: 3062027 - RNA, 19 nt, Human
guagcugggacuacaggca

SEQ ID NO: 3062028 - RNA, 18 nt, Human
guagcugggacuacaggc

SEQ ID NO: 3062029 - RNA, 12 nt, Human
guagcugggacu

SEQ ID NO: 3062030 - RNA, 22 nt, Human
guagcucuaggagggcuggcaa

SEQ ID NO: 3062031 - RNA, 19 nt, Human
aaaucuacacuccagugag

SEQ ID NO: 3062032 - RNA, 14 nt, Human
aaaugaaaaaauau

SEQ ID NO: 3062033 - RNA, 17 nt, Human
aaaugaaaaucgugaca

SEQ ID NO: 3062034 - RNA, 17 nt, Human
aaaucucaaauuucuaa

SEQ ID NO: 3062035 - RNA, 16 nt, Human
aaaucucaaauuucua

SEQ ID NO: 3062036 - RNA, 15 nt, Human
aaaucucaaauuucu

SEQ ID NO: 3062037 - RNA, 15 nt, Human
aaaucccauuuaaaa

SEQ ID NO: 3062038 - RNA, 18 nt, Human
aaaucccuuaccucggug

SEQ ID NO: 3062039 - RNA, 13 nt, Human
aaaucgaugcagu

SEQ ID NO: 3062040 - RNA, 14 nt, Human
aaauccuugaagau

SEQ ID NO: 3062041 - RNA, 17 nt, Human
aaauuucagcagcugca

SEQ ID NO: 3062042 - RNA, 18 nt, Human
aaauuucagcagcugcag

SEQ ID NO: 3062043 - RNA, 20 nt, Human
aaauuuaguauuuuguuuca

SEQ ID NO: 3062044 - RNA, 20 nt, Human
guauuuuugacagaauaugu

SEQ ID NO: 3062045 - RNA, 16 nt, Human
guauuuuugacagaau

SEQ ID NO: 3062046 - RNA, 22 nt, Human
aaauuuccugggagcuuuugua

SEQ ID NO: 3062047 - RNA, 15 nt, Human
guauuuuuuuacuaa

SEQ ID NO: 3062048 - RNA, 14 nt, Human
guauuuuuuuacua

SEQ ID NO: 3062049 - RNA, 19 nt, Human
gucaaaguggugagaggca

SEQ ID NO: 3062050 - RNA, 18 nt, Human
gucaaaguggugagaggc

SEQ ID NO: 3062051 - RNA, 21 nt, Human
guauuuuuuuacuaauagaca

SEQ ID NO: 3062052 - RNA, 17 nt, Human
guauuuuuuuacuaaua

SEQ ID NO: 3062053 - RNA, 20 nt, Human
gucacacaguauuacuucug

SEQ ID NO: 3062054 - RNA, 16 nt, Human
gucacacacuuuggcu

SEQ ID NO: 3062055 - RNA, 19 nt, Human
gucaacucauauuuucaug

SEQ ID NO: 3062056 - RNA, 17 nt, Human
aaauuauuuuguucaua

SEQ ID NO: 3062057 - RNA, 19 nt, Human
aaauuauuuuguucauaca

SEQ ID NO: 3062058 - RNA, 22 nt, Human
aaauuauauaaguauucuaaau

SEQ ID NO: 3062059 - RNA, 16 nt, Human
aaauuauauaaguauu

SEQ ID NO: 3062060 - RNA, 18 nt, Human
aaauuauauaaguauucu

SEQ ID NO: 3062061 - RNA, 20 nt, Human
aaauuauuuuguucauacau

SEQ ID NO: 3062062 - RNA, 21 nt, Human
aaauuauuuuguucauacaua

SEQ ID NO: 3062063 - RNA, 22 nt, Human
aaauuauuuuguucauacauau

SEQ ID NO: 3062064 - RNA, 14 nt, Human
aaauucaugcugcu

SEQ ID NO: 3062065 - RNA, 16 nt, Human
aaauuccccacccuga

SEQ ID NO: 3062066 - RNA, 16 nt, Human
guauuuaauucauguu

SEQ ID NO: 3062067 - RNA, 22 nt, Human
guauuggcuagagguucaaaga

SEQ ID NO: 3062068 - RNA, 20 nt, Human
guauuuaauagguuuggaca

SEQ ID NO: 3062069 - RNA, 23 nt, Human
aaauuaacuuuuauaaacuuuac

SEQ ID NO: 3062070 - RNA, 22 nt, Human
aaauuaacuuuuauaaacuuua

SEQ ID NO: 3062071 - RNA, 21 nt, Human
aaauuaacuuuuauaaacuuu

SEQ ID NO: 3062072 - RNA, 19 nt, Human
aaauuaacuuuuauaaacu

SEQ ID NO: 3062073 - RNA, 21 nt, Human
guauaaaagccuguuuaagag

SEQ ID NO: 3062074 - RNA, 18 nt, Human
guauaaaagccuguuuaa

SEQ ID NO: 3062075 - RNA, 22 nt, Human
guauauugauccagaaagaaaa

SEQ ID NO: 3062076 - RNA, 17 nt, Human
guauaaaagccuguuua

SEQ ID NO: 3062077 - RNA, 16 nt, Human
aaaugggggugcauuu

SEQ ID NO: 3062078 - RNA, 15 nt, Human
aaaugggggugcauu

SEQ ID NO: 3062079 - RNA, 18 nt, Human
aaaugggggugcauuuga

SEQ ID NO: 3062080 - RNA, 17 nt, Human
aaaugggggugcauuug

SEQ ID NO: 3062081 - RNA, 22 nt, Human
aaauguaagggaaacugccagc

SEQ ID NO: 3062082 - RNA, 15 nt, Human
guaugggagagaaga

SEQ ID NO: 3062083 - RNA, 21 nt, Human
guauucucuccuguaccucuu

SEQ ID NO: 3062084 - RNA, 15 nt, Human
guauucuuauuuaau

SEQ ID NO: 3062085 - RNA, 14 nt, Human
guaugggagagaag

SEQ ID NO: 3062086 - RNA, 14 nt, Human
guaugauucccagc

SEQ ID NO: 3062087 - RNA, 21 nt, Human
guaucccaugagccucagcau

SEQ ID NO: 3062088 - RNA, 22 nt, Human
guaugaucacggcucacugcag

SEQ ID NO: 3062089 - RNA, 15 nt, Human
guaucccuacuguaa

SEQ ID NO: 3062090 - RNA, 17 nt, Human
aaccucaaaaugucuaa

SEQ ID NO: 3062091 - RNA, 17 nt, Human
aaccuagggugauauua

SEQ ID NO: 3062092 - RNA, 20 nt, Human
aaccuagggugauauuaacc

SEQ ID NO: 3062093 - RNA, 15 nt, Human
aacccccagccugcu

SEQ ID NO: 3062094 - RNA, 14 nt, Human
aacccccagccugc

SEQ ID NO: 3062095 - RNA, 13 nt, Human
aacccccagccug

SEQ ID NO: 3062096 - RNA, 14 nt, Human
aaccuccugggcua

SEQ ID NO: 3062097 - RNA, 24 nt, Human
aaccucuaaauucuuucauuuuag

SEQ ID NO: 3062098 - RNA, 17 nt, Human
aaccuccgccucuuggg

SEQ ID NO: 3062099 - RNA, 23 nt, Human
aaccauuuugcugucccuuuucc

SEQ ID NO: 3062100 - RNA, 13 nt, Human
aacccaaauguuc

SEQ ID NO: 3062101 - RNA, 13 nt, Human
aacccagcucugg

SEQ ID NO: 3062102 - RNA, 14 nt, Human
aacccagcucuggu

SEQ ID NO: 3062103 - RNA, 11 nt, Human
aacccagcucu

SEQ ID NO: 3062104 - RNA, 18 nt, Human
aacccaaauguucaucaa

SEQ ID NO: 3062105 - RNA, 17 nt, Human
aacccagcucuggucca

SEQ ID NO: 3062106 - RNA, 20 nt, Human
aacccauauuuguacaccaa

SEQ ID NO: 3062107 - RNA, 18 nt, Human
aaccacaucuugcucugc

SEQ ID NO: 3062108 - RNA, 12 nt, Human
aaccacagcagu

SEQ ID NO: 3062109 - RNA, 21 nt, Human
aaccaucauugaaaucuuuuu

SEQ ID NO: 3062110 - RNA, 19 nt, Human
aaccaucauugaaaucuuu

SEQ ID NO: 3062111 - RNA, 20 nt, Human
aaccaucauugaaaucuuuu

SEQ ID NO: 3062112 - RNA, 22 nt, Human
aaccacaucuugcucugcugac

SEQ ID NO: 3062113 - RNA, 20 nt, Human
aaccacaucuugcucugcug

SEQ ID NO: 3062114 - RNA, 16 nt, Human
aacauuuugucauaua

SEQ ID NO: 3062115 - RNA, 13 nt, Human
gucuccauguuug

SEQ ID NO: 3062116 - RNA, 22 nt, Human
gucuuaauuaaaagaauauuuu

SEQ ID NO: 3062117 - RNA, 21 nt, Human
gucuuaauuaaaagaauauuu

SEQ ID NO: 3062118 - RNA, 19 nt, Human
gucuuaauuaaaagaauau

SEQ ID NO: 3062119 - RNA, 14 nt, Human
gucuuuggacccug

SEQ ID NO: 3062120 - RNA, 15 nt, Human
gucuuuggacccuga

SEQ ID NO: 3062121 - RNA, 17 nt, Human
gucuuuggacccugagg

SEQ ID NO: 3062122 - RNA, 14 nt, Human
gucuuuucuugcau

SEQ ID NO: 3062123 - RNA, 19 nt, Human
gucuuuucuugcaugaggc

SEQ ID NO: 3062124 - RNA, 24 nt, Human
gucuuuucuugcaugaggcuagug

SEQ ID NO: 3062125 - RNA, 15 nt, Human
gucuuagauguauau

SEQ ID NO: 3062126 - RNA, 18 nt, Human
aacucguuaauuuguagu

SEQ ID NO: 3062127 - RNA, 13 nt, Human
aacucccuuucaa

SEQ ID NO: 3062128 - RNA, 14 nt, Human
aacucccuuucaac

SEQ ID NO: 3062129 - RNA, 19 nt, Human
gugaaccaccacacccagc

SEQ ID NO: 3062130 - RNA, 15 nt, Human
gugaacacaucagcu

SEQ ID NO: 3062131 - RNA, 21 nt, Human
aacuccagaaagugacaagcu

SEQ ID NO: 3062132 - RNA, 14 nt, Human
aacuccagaaagug

SEQ ID NO: 3062133 - RNA, 22 nt, Human
aacguggcugcuucaaggaucc

SEQ ID NO: 3062134 - RNA, 16 nt, Human
aacguggcugcuucaa

SEQ ID NO: 3062135 - RNA, 19 nt, Human
aacguggcugcuucaagga

SEQ ID NO: 3062136 - RNA, 15 nt, Human
aacguggcugcuuca

SEQ ID NO: 3062137 - RNA, 20 nt, Human
aacauuuguucuauagcuuu

SEQ ID NO: 3062138 - RNA, 18 nt, Human
aacauuugguaaggggaa

SEQ ID NO: 3062139 - RNA, 14 nt, Human
aacauacucccauc

SEQ ID NO: 3062140 - RNA, 15 nt, Human
aacauacucccaucu

SEQ ID NO: 3062141 - RNA, 15 nt, Human
aacagaaauguacag

SEQ ID NO: 3062142 - RNA, 10 nt, Human
aacagaaaug

SEQ ID NO: 3062143 - RNA, 21 nt, Human
aacagaaauguacagcaagga

SEQ ID NO: 3062144 - RNA, 21 nt, Human
guccggucccugucccagugc

SEQ ID NO: 3062145 - RNA, 13 nt, Human
guccgagcuuuga

SEQ ID NO: 3062146 - RNA, 19 nt, Human
aacaguuguguuugaagca

SEQ ID NO: 3062147 - RNA, 13 nt, Human
aacaggcugggcu

SEQ ID NO: 3062148 - RNA, 22 nt, Human
aacaggcugggcuucaguggca

SEQ ID NO: 3062149 - RNA, 19 nt, Human
aacagacuggaagcacagc

SEQ ID NO: 3062150 - RNA, 23 nt, Human
aacaggcugggcuucaguggcag

SEQ ID NO: 3062151 - RNA, 19 nt, Human
aacagguuuuccugaagaa

SEQ ID NO: 3062152 - RNA, 22 nt, Human
aacaguagugauaguuguaccg

SEQ ID NO: 3062153 - RNA, 14 nt, Human
aacaaugaagauaa

SEQ ID NO: 3062154 - RNA, 18 nt, Human
aacaaugaagauaaaaag

SEQ ID NO: 3062155 - RNA, 23 nt, Human
aacaaggcaaggcugucaauuac

SEQ ID NO: 3062156 - RNA, 18 nt, Human
aacaagucagucauucag

SEQ ID NO: 3062157 - RNA, 15 nt, Human
aacaagucagucauu

SEQ ID NO: 3062158 - RNA, 23 nt, Human
aaauuuuuaaucuuuaauuuuac

SEQ ID NO: 3062159 - RNA, 15 nt, Human
gucacaggcaggucc

SEQ ID NO: 3062160 - RNA, 13 nt, Human
gucacaggcaggu

SEQ ID NO: 3062161 - RNA, 16 nt, Human
gucacaggcaggucca

SEQ ID NO: 3062162 - RNA, 12 nt, Human
gucacaggcagg

SEQ ID NO: 3062163 - RNA, 21 nt, Human
aacaagccuccuuuuaaagua

SEQ ID NO: 3062164 - RNA, 15 nt, Human
aacaaggaugaauua

SEQ ID NO: 3062165 - RNA, 17 nt, Human
aacaagaccacguuucu

SEQ ID NO: 3062166 - RNA, 16 nt, Human
aacaagaccacguuuc

SEQ ID NO: 3062167 - RNA, 19 nt, Human
aacaagaccacguuucuaa

SEQ ID NO: 3062168 - RNA, 15 nt, Human
aacacuguucucugc

SEQ ID NO: 3062169 - RNA, 20 nt, Human
aacacuguucucugcccucc

SEQ ID NO: 3062170 - RNA, 17 nt, Human
aacacucauugaccuga

SEQ ID NO: 3062171 - RNA, 21 nt, Human
aacacucauugaccugaggcc

SEQ ID NO: 3062172 - RNA, 12 nt, Human
aacacuccuuca

SEQ ID NO: 3062173 - RNA, 11 nt, Human
aacacucugag

SEQ ID NO: 3062174 - RNA, 12 nt, Human
aacacucugaga

SEQ ID NO: 3062175 - RNA, 13 nt, Human
aacacucugagac

SEQ ID NO: 3062176 - RNA, 14 nt, Human
aacacucugagacu

SEQ ID NO: 3062177 - RNA, 22 nt, Human
gucauuugagcagggcucagcg

SEQ ID NO: 3062178 - RNA, 24 nt, Human
guccaagcauaccaacacgagcag

SEQ ID NO: 3062179 - RNA, 21 nt, Human
gucauuugagcagggcucagc

SEQ ID NO: 3062180 - RNA, 21 nt, Human
aacacuguucucugcccucca

SEQ ID NO: 3062181 - RNA, 21 nt, Human
guccaagcauuuagauguaua

SEQ ID NO: 3062182 - RNA, 16 nt, Human
caagcauuuagaugua

SEQ ID NO: 3062183 - RNA, 19 nt, Human
caagcauuuagauguauag

SEQ ID NO: 3062184 - RNA, 21 nt, Human
caagcauaccaacacgagcag

SEQ ID NO: 3062185 - RNA, 16 nt, Human
caagcauaccaacacg

SEQ ID NO: 3062186 - RNA, 14 nt, Human
caaggauccugagc

SEQ ID NO: 3062187 - RNA, 15 nt, Human
caaggauccugagcc

SEQ ID NO: 3062188 - RNA, 16 nt, Human
caaggauccugagcca

SEQ ID NO: 3062189 - RNA, 17 nt, Human
caaggauccugagccag

SEQ ID NO: 3062190 - RNA, 18 nt, Human
caaggcugggggaagaag

SEQ ID NO: 3062191 - RNA, 21 nt, Human
caaggcugggggaagaagcuc

SEQ ID NO: 3062192 - RNA, 13 nt, Human
caaggcugucaau

SEQ ID NO: 3062193 - RNA, 14 nt, Human
caaggcugucaauu

SEQ ID NO: 3062194 - RNA, 17 nt, Human
caagagcccaggccucc

SEQ ID NO: 3062195 - RNA, 17 nt, Human
caagagggucugaggaa

SEQ ID NO: 3062196 - RNA, 16 nt, Human
caagagggucugagga

SEQ ID NO: 3062197 - RNA, 12 nt, Human
caagagggucug

SEQ ID NO: 3062198 - RNA, 13 nt, Human
caagaccuucucc

SEQ ID NO: 3062199 - RNA, 19 nt, Human
caagacgcugugcugcccu

SEQ ID NO: 3062200 - RNA, 20 nt, Human
caagacgcugugcugcccug

SEQ ID NO: 3062201 - RNA, 21 nt, Human
caagacgcugugcugcccugc

SEQ ID NO: 3062202 - RNA, 22 nt, Human
caagacgcugugcugcccugcc

SEQ ID NO: 3062203 - RNA, 19 nt, Human
caagacugcacaucaaaau

SEQ ID NO: 3062204 - RNA, 23 nt, Human
caagacccuuguggucccacccc

SEQ ID NO: 3062205 - RNA, 13 nt, Human
caagaaaugaaag

SEQ ID NO: 3062206 - RNA, 23 nt, Human
caaggggaauguuugccucugcc

SEQ ID NO: 3062207 - RNA, 13 nt, Human
caagggccuggcc

SEQ ID NO: 3062208 - RNA, 14 nt, Human
caagggccuggccu

SEQ ID NO: 3062209 - RNA, 15 nt, Human
caagggccuggccug

SEQ ID NO: 3062210 - RNA, 21 nt, Human
caaggggaauguuugccucug

SEQ ID NO: 3062211 - RNA, 20 nt, Human
caagugauucuccugccuca

SEQ ID NO: 3062212 - RNA, 15 nt, Human
caagugagacccugu

SEQ ID NO: 3062213 - RNA, 19 nt, Human
caagugagacccugucuca

SEQ ID NO: 3062214 - RNA, 18 nt, Human
caagugauucuccugccu

SEQ ID NO: 3062215 - RNA, 19 nt, Human
caagugauucuccugccuc

SEQ ID NO: 3062216 - RNA, 22 nt, Human
caagugaaaaaggaggaagaga

SEQ ID NO: 3062217 - RNA, 23 nt, Human
caagugaaaaaggaggaagagaa

SEQ ID NO: 3062218 - RNA, 14 nt, Human
caagugagacccug

SEQ ID NO: 3062219 - RNA, 14 nt, Human
caacaggcugggcu

SEQ ID NO: 3062220 - RNA, 23 nt, Human
caaauuuacagagacagaaagca

SEQ ID NO: 3062221 - RNA, 16 nt, Human
caaauuuacagagaca

SEQ ID NO: 3062222 - RNA, 17 nt, Human
caaauuuacagagacag

SEQ ID NO: 3062223 - RNA, 17 nt, Human
caacaggcugggcuuca

SEQ ID NO: 3062224 - RNA, 13 nt, Human
caacaggcugggc

SEQ ID NO: 3062225 - RNA, 16 nt, Human
caacauacucccaucu

SEQ ID NO: 3062226 - RNA, 14 nt, Human
caacauacucccau

SEQ ID NO: 3062227 - RNA, 15 nt, Human
caacauacucccauc

SEQ ID NO: 3062228 - RNA, 19 nt, Human
caaccugauugugucucuu

SEQ ID NO: 3062229 - RNA, 21 nt, Human
caaccugauugugucucuugg

SEQ ID NO: 3062230 - RNA, 17 nt, Human
caaccugauugugucuc

SEQ ID NO: 3062231 - RNA, 20 nt, Human
caacugcaucaagaugugac

SEQ ID NO: 3062232 - RNA, 23 nt, Human
caacugcaucaagaugugacaug

SEQ ID NO: 3062233 - RNA, 17 nt, Human
caacugcaucaagaugu

SEQ ID NO: 3062234 - RNA, 13 nt, Human
caaagaaauuaug

SEQ ID NO: 3062235 - RNA, 12 nt, Human
caaagaaauuau

SEQ ID NO: 3062236 - RNA, 14 nt, Human
caaagaaauguaag

SEQ ID NO: 3062237 - RNA, 14 nt, Human
caaagagguuuuaa

SEQ ID NO: 3062238 - RNA, 21 nt, Human
caaagagguuuuaaaaaaauc

SEQ ID NO: 3062239 - RNA, 18 nt, Human
auuuuaauaauguuucaa

SEQ ID NO: 3062240 - RNA, 19 nt, Human
auuuuaauaauguuucaaa

SEQ ID NO: 3062241 - RNA, 16 nt, Human
auuuuaauaauguuuc

SEQ ID NO: 3062242 - RNA, 18 nt, Human
caaauucugucucuggau

SEQ ID NO: 3062243 - RNA, 14 nt, Human
caaaggagauugga

SEQ ID NO: 3062244 - RNA, 20 nt, Human
caaaggagauuggaaggaac

SEQ ID NO: 3062245 - RNA, 16 nt, Human
caaaguggugagaggc

SEQ ID NO: 3062246 - RNA, 17 nt, Human
caaaguggugagaggca

SEQ ID NO: 3062247 - RNA, 23 nt, Human
caaaggguaucaggugcugccau

SEQ ID NO: 3062248 - RNA, 21 nt, Human
caaaggguaucaggugcugcc

SEQ ID NO: 3062249 - RNA, 20 nt, Human
caaaggguaucaggugcugc

SEQ ID NO: 3062250 - RNA, 20 nt, Human
caacaggcugggcuucagug

SEQ ID NO: 3062251 - RNA, 14 nt, Human
cacacacuuuggcu

SEQ ID NO: 3062252 - RNA, 21 nt, Human
cacacagaggcugccucuccc

SEQ ID NO: 3062253 - RNA, 20 nt, Human
cacacaccagagcccaccuu

SEQ ID NO: 3062254 - RNA, 16 nt, Human
cacacaccagagccca

SEQ ID NO: 3062255 - RNA, 15 nt, Human
cacacaccagagccc

SEQ ID NO: 3062256 - RNA, 13 nt, Human
cacacccagccca

SEQ ID NO: 3062257 - RNA, 22 nt, Human
cacaccagagcccaccuuggcu

SEQ ID NO: 3062258 - RNA, 21 nt, Human
cacaccagagcccaccuuggc

SEQ ID NO: 3062259 - RNA, 15 nt, Human
cacacagcucugucc

SEQ ID NO: 3062260 - RNA, 14 nt, Human
cacacagcucuguc

SEQ ID NO: 3062261 - RNA, 13 nt, Human
cacacagcucugu

SEQ ID NO: 3062262 - RNA, 20 nt, Human
cacacccagcccacuucugc

SEQ ID NO: 3062263 - RNA, 14 nt, Human
cacacccagcccac

SEQ ID NO: 3062264 - RNA, 17 nt, Human
cacaccgggcacucaga

SEQ ID NO: 3062265 - RNA, 18 nt, Human
caaugguuuucuugugug

SEQ ID NO: 3062266 - RNA, 14 nt, Human
caaugcacuuuguu

SEQ ID NO: 3062267 - RNA, 15 nt, Human
cacaaacagaggccg

SEQ ID NO: 3062268 - RNA, 17 nt, Human
cacaaacgggcucagca

SEQ ID NO: 3062269 - RNA, 17 nt, Human
cacaaagguagcuuuuc

SEQ ID NO: 3062270 - RNA, 15 nt, Human
cacaagaaaugaaag

SEQ ID NO: 3062271 - RNA, 21 nt, Human
cacaagaaaugaaagcaggga

SEQ ID NO: 3062272 - RNA, 13 nt, Human
cacaagaaaugaa

SEQ ID NO: 3062273 - RNA, 23 nt, Human
cacaagaaaugaaagcagggacu

SEQ ID NO: 3062274 - RNA, 15 nt, Human
caaugaccuuucaau

SEQ ID NO: 3062275 - RNA, 16 nt, Human
caaugaccuuucaaua

SEQ ID NO: 3062276 - RNA, 13 nt, Human
caaugauggucac

SEQ ID NO: 3062277 - RNA, 14 nt, Human
caaugaccuuucaa

SEQ ID NO: 3062278 - RNA, 13 nt, Human
caaugaccuuuca

SEQ ID NO: 3062279 - RNA, 21 nt, Human
caaugcaaaccaucauugaaa

SEQ ID NO: 3062280 - RNA, 22 nt, Human
caaugcaaaccaucauugaaau

SEQ ID NO: 3062281 - RNA, 14 nt, Human
caaugauggucacc

SEQ ID NO: 3062282 - RNA, 13 nt, Human
caaugcacuuugu

SEQ ID NO: 3062283 - RNA, 14 nt, Human
caaugcacugacau

SEQ ID NO: 3062284 - RNA, 23 nt, Human
caaugcaaaccaucauugaaauc

SEQ ID NO: 3062285 - RNA, 20 nt, Human
caaugcaaaccaucauugaa

SEQ ID NO: 3062286 - RNA, 17 nt, Human
caccacacccagcccac

SEQ ID NO: 3062287 - RNA, 19 nt, Human
caccacacccagcccacuu

SEQ ID NO: 3062288 - RNA, 15 nt, Human
caccagagcccaccu

SEQ ID NO: 3062289 - RNA, 22 nt, Human
caccagagcccaccuuggcuca

SEQ ID NO: 3062290 - RNA, 20 nt, Human
caccagagcccaccuuggcu

SEQ ID NO: 3062291 - RNA, 18 nt, Human
caccagagcccaccuugg

SEQ ID NO: 3062292 - RNA, 17 nt, Human
caccagagcccaccuug

SEQ ID NO: 3062293 - RNA, 18 nt, Human
cacauguccaagaagccc

SEQ ID NO: 3062294 - RNA, 19 nt, Human
cacauguccaagaagccca

SEQ ID NO: 3062295 - RNA, 21 nt, Human
cacauguccaagaagcccagg

SEQ ID NO: 3062296 - RNA, 22 nt, Human
cacauguccaagaagcccagga

SEQ ID NO: 3062297 - RNA, 16 nt, Human
caccaacgucugugcc

SEQ ID NO: 3062298 - RNA, 17 nt, Human
caccaacgucugugcca

SEQ ID NO: 3062299 - RNA, 13 nt, Human
caccaagcccagu

SEQ ID NO: 3062300 - RNA, 12 nt, Human
caccaagcccag

SEQ ID NO: 3062301 - RNA, 21 nt, Human
caccauauuaccacagacaua

SEQ ID NO: 3062302 - RNA, 20 nt, Human
caccauaagcuacugccauc

SEQ ID NO: 3062303 - RNA, 21 nt, Human
caccauaagcuacugccaucc

SEQ ID NO: 3062304 - RNA, 16 nt, Human
caccauaagcuacugc

SEQ ID NO: 3062305 - RNA, 18 nt, Human
caccauaagcuacugcca

SEQ ID NO: 3062306 - RNA, 19 nt, Human
caccauaagcuacugccau

SEQ ID NO: 3062307 - RNA, 14 nt, Human
caccaucaagccac

SEQ ID NO: 3062308 - RNA, 15 nt, Human
caccaucaagccacc

SEQ ID NO: 3062309 - RNA, 13 nt, Human
caccaucaagcca

SEQ ID NO: 3062310 - RNA, 12 nt, Human
caccagugccuc

SEQ ID NO: 3062311 - RNA, 13 nt, Human
caccagugccucu

SEQ ID NO: 3062312 - RNA, 14 nt, Human
caccagugccucuc

SEQ ID NO: 3062313 - RNA, 17 nt, Human
caccagugccucucccu

SEQ ID NO: 3062314 - RNA, 11 nt, Human
caccagugccu

SEQ ID NO: 3062315 - RNA, 16 nt, Human
caccaucaagccacca

SEQ ID NO: 3062316 - RNA, 17 nt, Human
caccaucaagccaccaa

SEQ ID NO: 3062317 - RNA, 19 nt, Human
caccaucaagccaccaaca

SEQ ID NO: 3062318 - RNA, 24 nt, Human
caccaucaagccaccaacauacuc

SEQ ID NO: 3062319 - RNA, 17 nt, Human
caccaucaugucuggcu

SEQ ID NO: 3062320 - RNA, 15 nt, Human
caccaucaugucugg

SEQ ID NO: 3062321 - RNA, 18 nt, Human
caccaucaugucuggcua

SEQ ID NO: 3062322 - RNA, 22 nt, Human
cacacggacacucaaaagcugg

SEQ ID NO: 3062323 - RNA, 18 nt, Human
cacagcucuucuccaggc

SEQ ID NO: 3062324 - RNA, 19 nt, Human
cacaggcagguccaggguu

SEQ ID NO: 3062325 - RNA, 23 nt, Human
cacaguccuuaccagcagagcac

SEQ ID NO: 3062326 - RNA, 14 nt, Human
cacaggcccggcuc

SEQ ID NO: 3062327 - RNA, 20 nt, Human
cacagcucuucuccaggcug

SEQ ID NO: 3062328 - RNA, 19 nt, Human
cacagcucuucuccaggcu

SEQ ID NO: 3062329 - RNA, 17 nt, Human
cacaggaucagucugau

SEQ ID NO: 3062330 - RNA, 13 nt, Human
cacaugagcauca

SEQ ID NO: 3062331 - RNA, 17 nt, Human
cacaugagcaucaggcc

SEQ ID NO: 3062332 - RNA, 18 nt, Human
cacaugagcaucaggcca

SEQ ID NO: 3062333 - RNA, 19 nt, Human
cacaugagcaucaggccag

SEQ ID NO: 3062334 - RNA, 20 nt, Human
cacaugagcaucaggccagg

SEQ ID NO: 3062335 - RNA, 21 nt, Human
cacaugagcaucaggccaggc

SEQ ID NO: 3062336 - RNA, 22 nt, Human
cacaguuuucugagaaagacua

SEQ ID NO: 3062337 - RNA, 21 nt, Human
cacaguuuucugagaaagacu

SEQ ID NO: 3062338 - RNA, 17 nt, Human
cacaugaaguccaagca

SEQ ID NO: 3062339 - RNA, 20 nt, Human
cacaugaaguccaagcauuu

SEQ ID NO: 3062340 - RNA, 16 nt, Human
cacaugaaguccaagc

SEQ ID NO: 3062341 - RNA, 20 nt, Human
cacaguuuucugagaaagac

SEQ ID NO: 3062342 - RNA, 19 nt, Human
cacaugcaaggucauuuuu

SEQ ID NO: 3062343 - RNA, 17 nt, Human
cacaugcaaggucauuu

SEQ ID NO: 3062344 - RNA, 20 nt, Human
cacaugcaaggucauuuuuu

SEQ ID NO: 3062345 - RNA, 18 nt, Human
cacaugcacgugugugca

SEQ ID NO: 3062346 - RNA, 16 nt, Human
cacauguccaagaagc

SEQ ID NO: 3062347 - RNA, 17 nt, Human
cacauguccaagaagcc

SEQ ID NO: 3062348 - RNA, 20 nt, Human
cacaugccucucucaggcca

SEQ ID NO: 3062349 - RNA, 21 nt, Human
cacaugccucucucaggccaa

SEQ ID NO: 3062350 - RNA, 13 nt, Human
cacccaagggccu

SEQ ID NO: 3062351 - RNA, 13 nt, Human
uuuuuucuuacug

SEQ ID NO: 3062352 - RNA, 23 nt, Human
uuugcauaacguauaaaagccug

SEQ ID NO: 3062353 - RNA, 19 nt, Human
uuugcauaacguauaaaag

SEQ ID NO: 3062354 - RNA, 14 nt, Human
uuugcagacaggca

SEQ ID NO: 3062355 - RNA, 23 nt, Human
uuuggaacaagaugguucuagca

SEQ ID NO: 3062356 - RNA, 18 nt, Human
uuugccauguuggccagg

SEQ ID NO: 3062357 - RNA, 21 nt, Human
uuugcauagauucccugagca

SEQ ID NO: 3062358 - RNA, 22 nt, Human
uuugaggucuguucuuuccaaa

SEQ ID NO: 3062359 - RNA, 17 nt, Human
uuugaggucuguucuuu

SEQ ID NO: 3062360 - RNA, 22 nt, Human
uuucuuacugucuuuuuucuaa

SEQ ID NO: 3062361 - RNA, 15 nt, Human
uuugagcagggcuca

SEQ ID NO: 3062362 - RNA, 16 nt, Human
uuuguucauacauauu

SEQ ID NO: 3062363 - RNA, 13 nt, Human
uuuguucauacau

SEQ ID NO: 3062364 - RNA, 16 nt, Human
uuuguugucagcugaa

SEQ ID NO: 3062365 - RNA, 13 nt, Human
uuuguccccaccg

SEQ ID NO: 3062366 - RNA, 21 nt, Human
uuuguccccaccgcagacagg

SEQ ID NO: 3062367 - RNA, 16 nt, Human
uuugucccaagugcca

SEQ ID NO: 3062368 - RNA, 21 nt, Human
uuuguauaaaauaauuuuuau

SEQ ID NO: 3062369 - RNA, 19 nt, Human
uuuguauaaaauaauuuuu

SEQ ID NO: 3062370 - RNA, 15 nt, Human
uuuguaaauuaacuu

SEQ ID NO: 3062371 - RNA, 17 nt, Human
uuuguaaauuaacuuuu

SEQ ID NO: 3062372 - RNA, 16 nt, Human
uuuguaaauuaacuuu

SEQ ID NO: 3062373 - RNA, 19 nt, Human
uuuggugguuucagaaaug

SEQ ID NO: 3062374 - RNA, 13 nt, Human
uuuucacauaucu

SEQ ID NO: 3062375 - RNA, 15 nt, Human
uuuucagaaaauauu

SEQ ID NO: 3062376 - RNA, 15 nt, Human
uuuucacaguucucu

SEQ ID NO: 3062377 - RNA, 16 nt, Human
uuuucagaaaauauua

SEQ ID NO: 3062378 - RNA, 18 nt, Human
uuuuccaugaguccccug

SEQ ID NO: 3062379 - RNA, 19 nt, Human
uuuuccaugaguccccugu

SEQ ID NO: 3062380 - RNA, 14 nt, Human
uuuucuucucccuc

SEQ ID NO: 3062381 - RNA, 17 nt, Human
uuuucuugcaugaggcu

SEQ ID NO: 3062382 - RNA, 16 nt, Human
uuuucuugcaugguuu

SEQ ID NO: 3062383 - RNA, 15 nt, Human
uuuuccuucagugcc

SEQ ID NO: 3062384 - RNA, 15 nt, Human
uuuuaaaaugagaaa

SEQ ID NO: 3062385 - RNA, 22 nt, Human
uuuuaaaaugagaaaucuaaaa

SEQ ID NO: 3062386 - RNA, 22 nt, Human
uuuuacauaaauuuaguauuuu

SEQ ID NO: 3062387 - RNA, 21 nt, Human
uuuuaauuugguuuucacauu

SEQ ID NO: 3062388 - RNA, 17 nt, Human
uuuuaauuugguuuuca

SEQ ID NO: 3062389 - RNA, 14 nt, Human
uuuuacuguacaga

SEQ ID NO: 3062390 - RNA, 20 nt, Human
uuuuauaucaauuuaaaaaa

SEQ ID NO: 3062391 - RNA, 15 nt, Human
uuuuauaugcuucug

SEQ ID NO: 3062392 - RNA, 20 nt, Human
uuuuauaugcuucuguuuua

SEQ ID NO: 3062393 - RNA, 20 nt, Human
uuuuaugauacuugaaaauu

SEQ ID NO: 3062394 - RNA, 16 nt, Human
uuuuaugauacuugaa

SEQ ID NO: 3062395 - RNA, 18 nt, Human
uuuuaucgucacugcuua

SEQ ID NO: 3062396 - RNA, 10 nt, Human
uuuuauauuu

SEQ ID NO: 3062397 - RNA, 15 nt, Human
uuucagcagcugcag

SEQ ID NO: 3062398 - RNA, 15 nt, Human
uuucagauaaucaca

SEQ ID NO: 3062399 - RNA, 20 nt, Human
uuucaauaggaaaaacugau

SEQ ID NO: 3062400 - RNA, 22 nt, Human
uuucaauaggaaaaacugauuu

SEQ ID NO: 3062401 - RNA, 19 nt, Human
uuucaauaggaaaaacuga

SEQ ID NO: 3062402 - RNA, 14 nt, Human
uuuccaaaauaauu

SEQ ID NO: 3062403 - RNA, 15 nt, Human
uuuccaaaguacacu

SEQ ID NO: 3062404 - RNA, 12 nt, Human
uuuccaaaguac

SEQ ID NO: 3062405 - RNA, 13 nt, Human
uuuccaggaaggc

SEQ ID NO: 3062406 - RNA, 22 nt, Human
uuucauugcugggcuugucugu

SEQ ID NO: 3062407 - RNA, 15 nt, Human
uuucagccaagaauu

SEQ ID NO: 3062408 - RNA, 15 nt, Human
uuucuagccagagga

SEQ ID NO: 3062409 - RNA, 16 nt, Human
uuucuaggacugaauu

SEQ ID NO: 3062410 - RNA, 22 nt, Human
uuucugagaaagacuauucaaa

SEQ ID NO: 3062411 - RNA, 15 nt, Human
uuucugagaaagacu

SEQ ID NO: 3062412 - RNA, 14 nt, Human
uuucuaaagcugcc

SEQ ID NO: 3062413 - RNA, 17 nt, Human
uuucuaaagcugccagc

SEQ ID NO: 3062414 - RNA, 14 nt, Human
uuucuaaaggcuac

SEQ ID NO: 3062415 - RNA, 21 nt, Human
uuuccucuuuggucuacacug

SEQ ID NO: 3062416 - RNA, 20 nt, Human
uuuagaaacacaacuauauu

SEQ ID NO: 3062417 - RNA, 13 nt, Human
uuuacauuguaaa

SEQ ID NO: 3062418 - RNA, 22 nt, Human
uuuacauggcuggagcuagaau

SEQ ID NO: 3062419 - RNA, 15 nt, Human
uuuacauuguaaaua

SEQ ID NO: 3062420 - RNA, 15 nt, Human
uuuacuuuguguuca

SEQ ID NO: 3062421 - RNA, 12 nt, Human
uuuagaaacaca

SEQ ID NO: 3062422 - RNA, 17 nt, Human
uuuacauggcuggagcu

SEQ ID NO: 3062423 - RNA, 16 nt, Human
uuuacauggcuggagc

SEQ ID NO: 3062424 - RNA, 14 nt, Human
uuuaugcauauuau

SEQ ID NO: 3062425 - RNA, 14 nt, Human
uuuauugucaaagu

SEQ ID NO: 3062426 - RNA, 16 nt, Human
uuuauugucaaagugg

SEQ ID NO: 3062427 - RNA, 19 nt, Human
uuuauuuaguuccuugagu

SEQ ID NO: 3062428 - RNA, 22 nt, Human
uuuaugauacuugaaaauuaac

SEQ ID NO: 3062429 - RNA, 14 nt, Human
uuuauaaacuuuac

SEQ ID NO: 3062430 - RNA, 16 nt, Human
uuuauaaacuuuaccu

SEQ ID NO: 3062431 - RNA, 16 nt, Human
uuuaucgucacugcuu

SEQ ID NO: 3062432 - RNA, 21 nt, Human
uuuaucgucacugcuuaacuu

SEQ ID NO: 3062433 - RNA, 13 nt, Human
uuuugaaaaacug

SEQ ID NO: 3062434 - RNA, 20 nt, Human
uuuuuuauacaggaugauga

SEQ ID NO: 3062435 - RNA, 12 nt, Human
uuuuuuacuaau

SEQ ID NO: 3062436 - RNA, 17 nt, Human
uuuuuuccuucagugcc

SEQ ID NO: 3062437 - RNA, 12 nt, Human
uuuuuucugaaa

SEQ ID NO: 3062438 - RNA, 20 nt, Human
uuccuucugugaaaguacau

SEQ ID NO: 3062439 - RNA, 17 nt, Human
uuccuucugugaaagua

SEQ ID NO: 3062440 - RNA, 15 nt, Human
uuccuucagugccuu

SEQ ID NO: 3062441 - RNA, 19 nt, Human
uuccuucauucaacccacc

SEQ ID NO: 3062442 - RNA, 23 nt, Human
uuccuucagugccuuauggaaca

SEQ ID NO: 3062443 - RNA, 16 nt, Human
uuccuucagugccuua

SEQ ID NO: 3062444 - RNA, 19 nt, Human
uuccuucagugccuuaugg

SEQ ID NO: 3062445 - RNA, 16 nt, Human
uucuaaaggcuaccuu

SEQ ID NO: 3062446 - RNA, 18 nt, Human
uucuaaaggcuaccuuug

SEQ ID NO: 3062447 - RNA, 17 nt, Human
uucuaaaggcuaccuuu

SEQ ID NO: 3062448 - RNA, 18 nt, Human
uucggccuccauccugag

SEQ ID NO: 3062449 - RNA, 19 nt, Human
uucggccuccauccugagg

SEQ ID NO: 3062450 - RNA, 19 nt, Human
uucccuuugacgccauccc

SEQ ID NO: 3062451 - RNA, 18 nt, Human
uucccuugaugaagaagu

SEQ ID NO: 3062452 - RNA, 22 nt, Human
uuccccacuugagaauuacccu

SEQ ID NO: 3062453 - RNA, 20 nt, Human
uuccuagguauaauucacau

SEQ ID NO: 3062454 - RNA, 12 nt, Human
uuccuagugaaa

SEQ ID NO: 3062455 - RNA, 23 nt, Human
uuccucauaguaugguggcuggg

SEQ ID NO: 3062456 - RNA, 22 nt, Human
uuccucccucccucuuucccuc

SEQ ID NO: 3062457 - RNA, 21 nt, Human
uuccucccucccucuuucccu

SEQ ID NO: 3062458 - RNA, 19 nt, Human
uuccucccucccucuuucc

SEQ ID NO: 3062459 - RNA, 12 nt, Human
uuccucccuccc

SEQ ID NO: 3062460 - RNA, 17 nt, Human
uucuaugacacaugcaa

SEQ ID NO: 3062461 - RNA, 16 nt, Human
uucuaugacacaugca

SEQ ID NO: 3062462 - RNA, 21 nt, Human
uucuaugaaauauuauguuaa

SEQ ID NO: 3062463 - RNA, 14 nt, Human
uucuauuguuucuu

SEQ ID NO: 3062464 - RNA, 16 nt, Human
uucugacccaugcugc

SEQ ID NO: 3062465 - RNA, 18 nt, Human
uucugacccaugcugccc

SEQ ID NO: 3062466 - RNA, 20 nt, Human
uucugacccaugcugcccug

SEQ ID NO: 3062467 - RNA, 21 nt, Human
uucugacccaugcugcccugu

SEQ ID NO: 3062468 - RNA, 21 nt, Human
uucugacccugcuucaaauau

SEQ ID NO: 3062469 - RNA, 15 nt, Human
uucucugauacagaa

SEQ ID NO: 3062470 - RNA, 16 nt, Human
uucucugauacagaaa

SEQ ID NO: 3062471 - RNA, 14 nt, Human
uucucugauacaga

SEQ ID NO: 3062472 - RNA, 17 nt, Human
uucucugauacagaaaa

SEQ ID NO: 3062473 - RNA, 17 nt, Human
uucucugcccuccaaga

SEQ ID NO: 3062474 - RNA, 22 nt, Human
uucucuccuguaccucuugagc

SEQ ID NO: 3062475 - RNA, 18 nt, Human
uucucuccagccccugga

SEQ ID NO: 3062476 - RNA, 16 nt, Human
uucucuccagccccug

SEQ ID NO: 3062477 - RNA, 16 nt, Human
uucuccaagcaggaca

SEQ ID NO: 3062478 - RNA, 13 nt, Human
uucuccacccugc

SEQ ID NO: 3062479 - RNA, 11 nt, Human
uucuccaggcu

SEQ ID NO: 3062480 - RNA, 15 nt, Human
uucaucuaggauuuu

SEQ ID NO: 3062481 - RNA, 13 nt, Human
uucauaaugacuu

SEQ ID NO: 3062482 - RNA, 23 nt, Human
uucauaaugacuuaagcacacuu

SEQ ID NO: 3062483 - RNA, 19 nt, Human
uucagugccuuauggaaca

SEQ ID NO: 3062484 - RNA, 21 nt, Human
uucagugccuuauggaacacu

SEQ ID NO: 3062485 - RNA, 18 nt, Human
uucagugccuuauggaac

SEQ ID NO: 3062486 - RNA, 20 nt, Human
uucaucugacuaugacauaa

SEQ ID NO: 3062487 - RNA, 12 nt, Human
uucaucuugaau

SEQ ID NO: 3062488 - RNA, 18 nt, Human
uucaugaaagauucaaug

SEQ ID NO: 3062489 - RNA, 17 nt, Human
uucaucugacuaugaca

SEQ ID NO: 3062490 - RNA, 20 nt, Human
uucaucuuccaacucaaacu

SEQ ID NO: 3062491 - RNA, 11 nt, Human
uucaucuugaa

SEQ ID NO: 3062492 - RNA, 19 nt, Human
uucauuuaggugaggaagc

SEQ ID NO: 3062493 - RNA, 18 nt, Human
uucauuuaggugaggaag

SEQ ID NO: 3062494 - RNA, 21 nt, Human
uuccauccuagucacuaccuu

SEQ ID NO: 3062495 - RNA, 19 nt, Human
uuccacuuauaggaauuga

SEQ ID NO: 3062496 - RNA, 17 nt, Human
uuccaugaguccccugu

SEQ ID NO: 3062497 - RNA, 23 nt, Human
uucaaauuguaagcaugcacaaa

SEQ ID NO: 3062498 - RNA, 13 nt, Human
uucaaagauauuu

SEQ ID NO: 3062499 - RNA, 13 nt, Human
uuacgugaguccu

SEQ ID NO: 3062500 - RNA, 14 nt, Human
uuacgugaguccug

SEQ ID NO: 3062501 - RNA, 18 nt, Human
uucaauucucauuuguca

SEQ ID NO: 3062502 - RNA, 19 nt, Human
uucaaugccccugaauuua

SEQ ID NO: 3062503 - RNA, 14 nt, Human
uucacucuccuugg

SEQ ID NO: 3062504 - RNA, 22 nt, Human
uucagcuccagcucaccagccc

SEQ ID NO: 3062505 - RNA, 15 nt, Human
uucagagacuccugc

SEQ ID NO: 3062506 - RNA, 15 nt, Human
uucaggaagcucagg

SEQ ID NO: 3062507 - RNA, 20 nt, Human
uucaggaagcucagggccug

SEQ ID NO: 3062508 - RNA, 17 nt, Human
uucaggaagcucagggc

SEQ ID NO: 3062509 - RNA, 19 nt, Human
uucaggaagcucagggccu

SEQ ID NO: 3062510 - RNA, 18 nt, Human
uucagcugcauacaguuu

SEQ ID NO: 3062511 - RNA, 17 nt, Human
uucagcugacuuuucug

SEQ ID NO: 3062512 - RNA, 16 nt, Human
uucaggaagcucaggg

SEQ ID NO: 3062513 - RNA, 17 nt, Human
uucagcucugcaagaau

SEQ ID NO: 3062514 - RNA, 24 nt, Human
uucagcucugcaagaauugaagca

SEQ ID NO: 3062515 - RNA, 23 nt, Human
uucagcuccagcucaccagcccc

SEQ ID NO: 3062516 - RNA, 20 nt, Human
uugaccgugaggccagagac

SEQ ID NO: 3062517 - RNA, 21 nt, Human
uugaccgugaggccagagaca

SEQ ID NO: 3062518 - RNA, 15 nt, Human
uugaccucaggugau

SEQ ID NO: 3062519 - RNA, 16 nt, Human
uugaccucugcagcaa

SEQ ID NO: 3062520 - RNA, 14 nt, Human
uugacgccauccca

SEQ ID NO: 3062521 - RNA, 22 nt, Human
uugacgccaucccagccccaau

SEQ ID NO: 3062522 - RNA, 12 nt, Human
uugaccugaggc

SEQ ID NO: 3062523 - RNA, 19 nt, Human
uugaccugaggcccuucuc

SEQ ID NO: 3062524 - RNA, 22 nt, Human
uugaccugaggcccuucucucc

SEQ ID NO: 3062525 - RNA, 19 nt, Human
uugauagcacagacccugc

SEQ ID NO: 3062526 - RNA, 20 nt, Human
uugauagcacagacccugcc

SEQ ID NO: 3062527 - RNA, 15 nt, Human
uugaggacacugaua

SEQ ID NO: 3062528 - RNA, 14 nt, Human
uugaggacacugau

SEQ ID NO: 3062529 - RNA, 20 nt, Human
uugacgccaucccagcccca

SEQ ID NO: 3062530 - RNA, 14 nt, Human
uugcauagaauaaa

SEQ ID NO: 3062531 - RNA, 18 nt, Human
uugcauagauucccugag

SEQ ID NO: 3062532 - RNA, 16 nt, Human
uugcagacaggcaagc

SEQ ID NO: 3062533 - RNA, 18 nt, Human
uugauuuccguuaaaaua

SEQ ID NO: 3062534 - RNA, 17 nt, Human
uugcaacaggcugggcu

SEQ ID NO: 3062535 - RNA, 14 nt, Human
uugcaacaggcugg

SEQ ID NO: 3062536 - RNA, 18 nt, Human
uugauagcacagacccug

SEQ ID NO: 3062537 - RNA, 21 nt, Human
uugauagcacagacccugccc

SEQ ID NO: 3062538 - RNA, 12 nt, Human
uugaugaagaag

SEQ ID NO: 3062539 - RNA, 15 nt, Human
uugaaaaaugcaugu

SEQ ID NO: 3062540 - RNA, 19 nt, Human
uugaaaacacuguucucug

SEQ ID NO: 3062541 - RNA, 21 nt, Human
uugaaaacacuguucucugcc

SEQ ID NO: 3062542 - RNA, 18 nt, Human
uucuuuauaauucuacuu

SEQ ID NO: 3062543 - RNA, 23 nt, Human
uugaaacugagaugugaacacau

SEQ ID NO: 3062544 - RNA, 23 nt, Human
uugaaaagacuccaaagaaaugu

SEQ ID NO: 3062545 - RNA, 22 nt, Human
uugaaaagacuccaaagaaaug

SEQ ID NO: 3062546 - RNA, 18 nt, Human
uugaaaagacuccaaaga

SEQ ID NO: 3062547 - RNA, 16 nt, Human
uugaaaagacuccaaa

SEQ ID NO: 3062548 - RNA, 16 nt, Human
uugaacugauaaagau

SEQ ID NO: 3062549 - RNA, 19 nt, Human
uugaacucuucaaucucuu

SEQ ID NO: 3062550 - RNA, 20 nt, Human
uugaacuuugaccucugcag

SEQ ID NO: 3062551 - RNA, 22 nt, Human
uugaacuuugaccucugcagca

SEQ ID NO: 3062552 - RNA, 21 nt, Human
uugaaucucauaauuuauaca

SEQ ID NO: 3062553 - RNA, 15 nt, Human
uugaaucucauaauu

SEQ ID NO: 3062554 - RNA, 17 nt, Human
uugaagacagagcuaca

SEQ ID NO: 3062555 - RNA, 19 nt, Human
uugaagacuuuucuuucag

SEQ ID NO: 3062556 - RNA, 14 nt, Human
uucugagcauuuaa

SEQ ID NO: 3062557 - RNA, 15 nt, Human
uucugagaaagacua

SEQ ID NO: 3062558 - RNA, 17 nt, Human
uucuguccgagcuuuga

SEQ ID NO: 3062559 - RNA, 21 nt, Human
uucuguccgagcuuugaaaau

SEQ ID NO: 3062560 - RNA, 23 nt, Human
uucuguggguuucuaaagcugcc

SEQ ID NO: 3062561 - RNA, 17 nt, Human
uucuguccuacucugug

SEQ ID NO: 3062562 - RNA, 18 nt, Human
uucuugguuuguaaauua

SEQ ID NO: 3062563 - RNA, 17 nt, Human
uucuugguuuguaaauu

SEQ ID NO: 3062564 - RNA, 23 nt, Human
uucuugguuuguaaauuaacuuu

SEQ ID NO: 3062565 - RNA, 16 nt, Human
uucuugguuuguaaau

SEQ ID NO: 3062566 - RNA, 13 nt, Human
uucuugguuugua

SEQ ID NO: 3062567 - RNA, 23 nt, Human
uucuuauuuaaugaaagacugua

SEQ ID NO: 3062568 - RNA, 19 nt, Human
uucuuauuuaaugaaagac

SEQ ID NO: 3062569 - RNA, 15 nt, Human
uucuuauuucauuuc

SEQ ID NO: 3062570 - RNA, 16 nt, Human
uuguaaaggaauuuaa

SEQ ID NO: 3062571 - RNA, 12 nt, Human
uugguccugcug

SEQ ID NO: 3062572 - RNA, 22 nt, Human
uuggucccccuuccauggacuu

SEQ ID NO: 3062573 - RNA, 16 nt, Human
uuggucccccuuccau

SEQ ID NO: 3062574 - RNA, 12 nt, Human
uuguacagacaa

SEQ ID NO: 3062575 - RNA, 13 nt, Human
uuguacagacaac

SEQ ID NO: 3062576 - RNA, 18 nt, Human
uuguaaaugugcuuuuaa

SEQ ID NO: 3062577 - RNA, 14 nt, Human
uuguaaaugugcuu

SEQ ID NO: 3062578 - RNA, 11 nt, Human
uuguaaaugug

SEQ ID NO: 3062579 - RNA, 14 nt, Human
uuguauuacaaauc

SEQ ID NO: 3062580 - RNA, 14 nt, Human
uuguauucagaguu

SEQ ID NO: 3062581 - RNA, 21 nt, Human
uuguauucucuccuguaccuc

SEQ ID NO: 3062582 - RNA, 15 nt, Human
uuguagagccagggu

SEQ ID NO: 3062583 - RNA, 14 nt, Human
uuguagagccaggg

SEQ ID NO: 3062584 - RNA, 19 nt, Human
uuguaucacaaaucuuaac

SEQ ID NO: 3062585 - RNA, 13 nt, Human
uuggcauucccca

SEQ ID NO: 3062586 - RNA, 24 nt, Human
uuggccaaagccaaagcuaggccu

SEQ ID NO: 3062587 - RNA, 14 nt, Human
uuggccaggcuggu

SEQ ID NO: 3062588 - RNA, 22 nt, Human
uuggcugggggccucagugcca

SEQ ID NO: 3062589 - RNA, 21 nt, Human
uuggcugggggccucagugcc

SEQ ID NO: 3062590 - RNA, 18 nt, Human
uuggcugggggccucagu

SEQ ID NO: 3062591 - RNA, 16 nt, Human
uuggcugcugaaggcu

SEQ ID NO: 3062592 - RNA, 14 nt, Human
uugguaaaccuuuu

SEQ ID NO: 3062593 - RNA, 12 nt, Human
uugguaaaccuu

SEQ ID NO: 3062594 - RNA, 16 nt, Human
uuggguggaugccugg

SEQ ID NO: 3062595 - RNA, 16 nt, Human
uugggaggccauuugu

SEQ ID NO: 3062596 - RNA, 12 nt, Human
uugggaggcuga

SEQ ID NO: 3062597 - RNA, 22 nt, Human
uuggcuuuggguugcaggaccu

SEQ ID NO: 3062598 - RNA, 17 nt, Human
uuggcaaaaaggcagga

SEQ ID NO: 3062599 - RNA, 14 nt, Human
uuggauuguccccg

SEQ ID NO: 3062600 - RNA, 11 nt, Human
uuggaaggaac

SEQ ID NO: 3062601 - RNA, 19 nt, Human
uuggaaggaacguccccug

SEQ ID NO: 3062602 - RNA, 20 nt, Human
uugcuggggccgaaagaaca

SEQ ID NO: 3062603 - RNA, 23 nt, Human
uuggaaagaguaggaagacuuug

SEQ ID NO: 3062604 - RNA, 18 nt, Human
uugccucugccucugaca

SEQ ID NO: 3062605 - RNA, 16 nt, Human
uugccucugccucuga

SEQ ID NO: 3062606 - RNA, 14 nt, Human
uugccucugccucu

SEQ ID NO: 3062607 - RNA, 11 nt, Human
uugccucugcc

SEQ ID NO: 3062608 - RNA, 15 nt, Human
uugcccagccuggau

SEQ ID NO: 3062609 - RNA, 18 nt, Human
uugccagucaccccggcc

SEQ ID NO: 3062610 - RNA, 13 nt, Human
uugccagucaccc

SEQ ID NO: 3062611 - RNA, 23 nt, Human
uugcccacgcuggagugcaguga

SEQ ID NO: 3062612 - RNA, 22 nt, Human
uugcugauggugcaaugaccuu

SEQ ID NO: 3062613 - RNA, 20 nt, Human
uugcugauggugcaaugacc

SEQ ID NO: 3062614 - RNA, 19 nt, Human
uugcugauggugcaaugac

SEQ ID NO: 3062615 - RNA, 23 nt, Human
uguuuuaaaaugagaaaucuaaa

SEQ ID NO: 3062616 - RNA, 13 nt, Human
uguuuuugucuua

SEQ ID NO: 3062617 - RNA, 12 nt, Human
uguuuuaaaaaa

SEQ ID NO: 3062618 - RNA, 18 nt, Human
uguuuuaaaaugagaaau

SEQ ID NO: 3062619 - RNA, 17 nt, Human
uguuuguugucagcuga

SEQ ID NO: 3062620 - RNA, 16 nt, Human
uguuuguugucagcug

SEQ ID NO: 3062621 - RNA, 20 nt, Human
uguuuccuggcacugcuucc

SEQ ID NO: 3062622 - RNA, 21 nt, Human
uguuuccuggcacugcuucca

SEQ ID NO: 3062623 - RNA, 22 nt, Human
uguuuccuggcacugcuuccag

SEQ ID NO: 3062624 - RNA, 15 nt, Human
uguuuccuggcacug

SEQ ID NO: 3062625 - RNA, 14 nt, Human
uuaaagacuuuuau

SEQ ID NO: 3062626 - RNA, 20 nt, Human
uuaaacuuaaucuaaaugga

SEQ ID NO: 3062627 - RNA, 20 nt, Human
uuaaagcuuauuaaaacuca

SEQ ID NO: 3062628 - RNA, 18 nt, Human
uuaaacuuaaucuaaaug

SEQ ID NO: 3062629 - RNA, 16 nt, Human
uuaaacuuaaucuaaa

SEQ ID NO: 3062630 - RNA, 13 nt, Human
uuaaaagaaugau

SEQ ID NO: 3062631 - RNA, 19 nt, Human
uuaaaagaaugauuaugaa

SEQ ID NO: 3062632 - RNA, 11 nt, Human
uuaaaugcacc

SEQ ID NO: 3062633 - RNA, 16 nt, Human
uuaaaugcaccuggaa

SEQ ID NO: 3062634 - RNA, 18 nt, Human
uuaaaugcaccuggaaua

SEQ ID NO: 3062635 - RNA, 17 nt, Human
uuaaaugcaccuggaau

SEQ ID NO: 3062636 - RNA, 19 nt, Human
uuaaauagcuuuuuucucu

SEQ ID NO: 3062637 - RNA, 15 nt, Human
uuaaagcuuccauug

SEQ ID NO: 3062638 - RNA, 17 nt, Human
uuaaaugcccagccccu

SEQ ID NO: 3062639 - RNA, 18 nt, Human
uuaaaugcccagccccuu

SEQ ID NO: 3062640 - RNA, 14 nt, Human
uuacauuuccuaaa

SEQ ID NO: 3062641 - RNA, 14 nt, Human
uuacauuuguauaa

SEQ ID NO: 3062642 - RNA, 15 nt, Human
uuacauuuguauaaa

SEQ ID NO: 3062643 - RNA, 23 nt, Human
uuacauggcuggagcuagaauuu

SEQ ID NO: 3062644 - RNA, 22 nt, Human
uuacauggcuggagcuagaauu

SEQ ID NO: 3062645 - RNA, 20 nt, Human
uuacagagacagaaagcaga

SEQ ID NO: 3062646 - RNA, 22 nt, Human
uuacauuuuuaagugcugcauu

SEQ ID NO: 3062647 - RNA, 21 nt, Human
uuacauuuuuaagugcugcau

SEQ ID NO: 3062648 - RNA, 20 nt, Human
uuacauuuuuaagugcugca

SEQ ID NO: 3062649 - RNA, 21 nt, Human
uuaccacuuguguuuugcaag

SEQ ID NO: 3062650 - RNA, 20 nt, Human
uuaccuuuuuuauacauaaa

SEQ ID NO: 3062651 - RNA, 19 nt, Human
uuaccuuuuuuauacauaa

SEQ ID NO: 3062652 - RNA, 22 nt, Human
uuaccuuuuuuauacauaaaca

SEQ ID NO: 3062653 - RNA, 20 nt, Human
uuacgguuuuccagguuuaa

SEQ ID NO: 3062654 - RNA, 16 nt, Human
uuacggaacucaaaua

SEQ ID NO: 3062655 - RNA, 22 nt, Human
uuaaugucaauucuugccaaau

SEQ ID NO: 3062656 - RNA, 17 nt, Human
uuaaugucacaggcagg

SEQ ID NO: 3062657 - RNA, 18 nt, Human
uuaaugucacaggcaggu

SEQ ID NO: 3062658 - RNA, 21 nt, Human
uuaauagguuuggacaaaaug

SEQ ID NO: 3062659 - RNA, 22 nt, Human
uuaaggaugcuuguacauaaug

SEQ ID NO: 3062660 - RNA, 16 nt, Human
uuaauaauguuucaaa

SEQ ID NO: 3062661 - RNA, 16 nt, Human
uuaauagguuuggaca

SEQ ID NO: 3062662 - RNA, 18 nt, Human
uuaauaauguuucaaaca

SEQ ID NO: 3062663 - RNA, 20 nt, Human
uuaaggaugcuuguacauaa

SEQ ID NO: 3062664 - RNA, 19 nt, Human
uuaaggaugcuuguacaua

SEQ ID NO: 3062665 - RNA, 18 nt, Human
uuaaggaugcuuguacau

SEQ ID NO: 3062666 - RNA, 17 nt, Human
uuaaggaugcuuguaca

SEQ ID NO: 3062667 - RNA, 21 nt, Human
uuaaggaagacaaugugaaaa

SEQ ID NO: 3062668 - RNA, 13 nt, Human
uguucauaaauaa

SEQ ID NO: 3062669 - RNA, 20 nt, Human
uguucaugaaagauucaaug

SEQ ID NO: 3062670 - RNA, 12 nt, Human
uguucuauagcu

SEQ ID NO: 3062671 - RNA, 12 nt, Human
uguucucugccc

SEQ ID NO: 3062672 - RNA, 18 nt, Human
uguucucugaggacacua

SEQ ID NO: 3062673 - RNA, 16 nt, Human
uguucucugaggacac

SEQ ID NO: 3062674 - RNA, 13 nt, Human
uguucucugagga

SEQ ID NO: 3062675 - RNA, 15 nt, Human
uguucugacccugcu

SEQ ID NO: 3062676 - RNA, 19 nt, Human
uguucucugcccuccaaga

SEQ ID NO: 3062677 - RNA, 18 nt, Human
uguucugacccugcuuca

SEQ ID NO: 3062678 - RNA, 14 nt, Human
uguucuuucuggcu

SEQ ID NO: 3062679 - RNA, 22 nt, Human
uguucuuucuggcuaugcauuu

SEQ ID NO: 3062680 - RNA, 20 nt, Human
uguucuuucuggcuaugcau

SEQ ID NO: 3062681 - RNA, 20 nt, Human
uguucuuuccaaaguacacu

SEQ ID NO: 3062682 - RNA, 11 nt, Human
uguugaaagau

SEQ ID NO: 3062683 - RNA, 13 nt, Human
uguuuaaaaucau

SEQ ID NO: 3062684 - RNA, 14 nt, Human
uguuggccaggcug

SEQ ID NO: 3062685 - RNA, 11 nt, Human
uguuggccagg

SEQ ID NO: 3062686 - RNA, 15 nt, Human
uguuggccaaagcca

SEQ ID NO: 3062687 - RNA, 21 nt, Human
uguuggagaagaacugaaauc

SEQ ID NO: 3062688 - RNA, 20 nt, Human
uguuggagaagaacugaaau

SEQ ID NO: 3062689 - RNA, 19 nt, Human
uguugaagagguuuuaaag

SEQ ID NO: 3062690 - RNA, 22 nt, Human
uguguuuaggaacuacugagga

SEQ ID NO: 3062691 - RNA, 13 nt, Human
uguguuugaagca

SEQ ID NO: 3062692 - RNA, 19 nt, Human
ugugugcguccugucggag

SEQ ID NO: 3062693 - RNA, 16 nt, Human
uguguagggcgggagg

SEQ ID NO: 3062694 - RNA, 18 nt, Human
ugugugaauaccccaaga

SEQ ID NO: 3062695 - RNA, 14 nt, Human
uguuagugcaaauu

SEQ ID NO: 3062696 - RNA, 14 nt, Human
uguucagcuccagc

SEQ ID NO: 3062697 - RNA, 16 nt, Human
uguucacagccagacu

SEQ ID NO: 3062698 - RNA, 11 nt, Human
uguucagcugg

SEQ ID NO: 3062699 - RNA, 22 nt, Human
uguucagcuccagcucaccagc

SEQ ID NO: 3062700 - RNA, 16 nt, Human
uguucagcuccagcuc

SEQ ID NO: 3062701 - RNA, 15 nt, Human
uguucagcuccagcu

SEQ ID NO: 3062702 - RNA, 13 nt, Human
uguuacauuuuua

SEQ ID NO: 3062703 - RNA, 22 nt, Human
uguuacauuuuuaagugcugca

SEQ ID NO: 3062704 - RNA, 15 nt, Human
uguuacugucuucag

SEQ ID NO: 3062705 - RNA, 16 nt, Human
uguuacugucuucagu

SEQ ID NO: 3062706 - RNA, 12 nt, Human
ugugggaagggg

SEQ ID NO: 3062707 - RNA, 22 nt, Human
ugugggcuaguugggcuuccuc

SEQ ID NO: 3062708 - RNA, 13 nt, Human
uguggacacagcu

SEQ ID NO: 3062709 - RNA, 14 nt, Human
uguggacacagcuc

SEQ ID NO: 3062710 - RNA, 12 nt, Human
uguggagaagcg

SEQ ID NO: 3062711 - RNA, 21 nt, Human
uguggagaagcggcuggcagc

SEQ ID NO: 3062712 - RNA, 15 nt, Human
uguggacacagcucu

SEQ ID NO: 3062713 - RNA, 16 nt, Human
ugugccucugggacug

SEQ ID NO: 3062714 - RNA, 15 nt, Human
ugugccucugggacu

SEQ ID NO: 3062715 - RNA, 13 nt, Human
ugugccucuggga

SEQ ID NO: 3062716 - RNA, 22 nt, Human
ugugcacaugcacgugugugca

SEQ ID NO: 3062717 - RNA, 16 nt, Human
ugugcacaugcacgug

SEQ ID NO: 3062718 - RNA, 17 nt, Human
ugugccucugggacugg

SEQ ID NO: 3062719 - RNA, 20 nt, Human
ugugcgugcauguguguuca

SEQ ID NO: 3062720 - RNA, 14 nt, Human
ugugcguccugucg

SEQ ID NO: 3062721 - RNA, 21 nt, Human
ugucucaguccaugaagaugu

SEQ ID NO: 3062722 - RNA, 13 nt, Human
ugugaaacauguu

SEQ ID NO: 3062723 - RNA, 14 nt, Human
ugugaaguuuacau

SEQ ID NO: 3062724 - RNA, 20 nt, Human
ugugaaguuuacauuguaaa

SEQ ID NO: 3062725 - RNA, 14 nt, Human
ugugaaaggaaaga

SEQ ID NO: 3062726 - RNA, 13 nt, Human
ugugaaaggaaag

SEQ ID NO: 3062727 - RNA, 14 nt, Human
ugucuuuuuucuaa

SEQ ID NO: 3062728 - RNA, 16 nt, Human
ugucuuuuuucacuac

SEQ ID NO: 3062729 - RNA, 19 nt, Human
ugucuuuggacccugaggc

SEQ ID NO: 3062730 - RNA, 22 nt, Human
ugucuuuggacccugaggccca

SEQ ID NO: 3062731 - RNA, 17 nt, Human
ugucuuuggacccugag

SEQ ID NO: 3062732 - RNA, 18 nt, Human
ugucuuuggacccugagg

SEQ ID NO: 3062733 - RNA, 18 nt, Human
ugugaguacuacaguccu

SEQ ID NO: 3062734 - RNA, 19 nt, Human
ugugaguacuacaguccuc

SEQ ID NO: 3062735 - RNA, 20 nt, Human
ugugaguacuacaguccucc

SEQ ID NO: 3062736 - RNA, 23 nt, Human
ugugaguacuacaguccucccau

SEQ ID NO: 3062737 - RNA, 21 nt, Human
ugugauacaaugcugugcccu

SEQ ID NO: 3062738 - RNA, 16 nt, Human
ugugaaucauuuuacc

SEQ ID NO: 3062739 - RNA, 16 nt, Human
ugugaauaccccaaga

SEQ ID NO: 3062740 - RNA, 21 nt, Human
ugugacaaggauugcuacugu

SEQ ID NO: 3062741 - RNA, 22 nt, Human
ugugaccacugcagaagacagu

SEQ ID NO: 3062742 - RNA, 14 nt, Human
uguaaucacagcua

SEQ ID NO: 3062743 - RNA, 15 nt, Human
uguaaucacagcuac

SEQ ID NO: 3062744 - RNA, 20 nt, Human
uguaaaaugugaagugaaug

SEQ ID NO: 3062745 - RNA, 17 nt, Human
uguaaauuaacuuuuau

SEQ ID NO: 3062746 - RNA, 16 nt, Human
uguaaauuaacuuuua

SEQ ID NO: 3062747 - RNA, 15 nt, Human
uguaaauuaacuuuu

SEQ ID NO: 3062748 - RNA, 14 nt, Human
uguaaauuaacuuu

SEQ ID NO: 3062749 - RNA, 13 nt, Human
uguaaauuaacuu

SEQ ID NO: 3062750 - RNA, 14 nt, Human
uguagagugggagc

SEQ ID NO: 3062751 - RNA, 16 nt, Human
uguacgucugacaggc

SEQ ID NO: 3062752 - RNA, 17 nt, Human
uguacgucugacaggca

SEQ ID NO: 3062753 - RNA, 14 nt, Human
uguaccucuugagc

SEQ ID NO: 3062754 - RNA, 22 nt, Human
uguaccucuugagccuugaacu

SEQ ID NO: 3062755 - RNA, 23 nt, Human
uguaccucuugagccuugaacuu

SEQ ID NO: 3062756 - RNA, 16 nt, Human
uguagcacugacagau

SEQ ID NO: 3062757 - RNA, 17 nt, Human
uguagcacugacagauu

SEQ ID NO: 3062758 - RNA, 22 nt, Human
uguagcacugacagauuuccau

SEQ ID NO: 3062759 - RNA, 23 nt, Human
uguaucccaugagccucagcauc

SEQ ID NO: 3062760 - RNA, 19 nt, Human
uguaucccaugagccucag

SEQ ID NO: 3062761 - RNA, 16 nt, Human
uguaucccaugagccu

SEQ ID NO: 3062762 - RNA, 16 nt, Human
uguaugauucccagcc

SEQ ID NO: 3062763 - RNA, 12 nt, Human
ugucagugugac

SEQ ID NO: 3062764 - RNA, 20 nt, Human
ugucagugugacugaucucu

SEQ ID NO: 3062765 - RNA, 23 nt, Human
ugcuagguuaauuccaauuauau

SEQ ID NO: 3062766 - RNA, 16 nt, Human
ugcuagguuaauucca

SEQ ID NO: 3062767 - RNA, 14 nt, Human
ugcucaggagcccu

SEQ ID NO: 3062768 - RNA, 19 nt, Human
ugcuccucuccccagcaag

SEQ ID NO: 3062769 - RNA, 18 nt, Human
ugcuccucuccccagcaa

SEQ ID NO: 3062770 - RNA, 15 nt, Human
ugcgugcauaccacu

SEQ ID NO: 3062771 - RNA, 19 nt, Human
ugcuagaacucccuuucaa

SEQ ID NO: 3062772 - RNA, 18 nt, Human
ugcuagaacucccuuuca

SEQ ID NO: 3062773 - RNA, 17 nt, Human
ugcuaggaacacuccuu

SEQ ID NO: 3062774 - RNA, 19 nt, Human
ugcuaggaacacuccuuca

SEQ ID NO: 3062775 - RNA, 16 nt, Human
ugcuaggaacacuccu

SEQ ID NO: 3062776 - RNA, 20 nt, Human
ugcuagaacucccuuucaac

SEQ ID NO: 3062777 - RNA, 21 nt, Human
ugcuagaacucccuuucaaca

SEQ ID NO: 3062778 - RNA, 16 nt, Human
ugcugacagacacagg

SEQ ID NO: 3062779 - RNA, 23 nt, Human
ugcugagucugaaggcuggguuc

SEQ ID NO: 3062780 - RNA, 15 nt, Human
ugcugacagacacag

SEQ ID NO: 3062781 - RNA, 18 nt, Human
ugcugauggugcaaugac

SEQ ID NO: 3062782 - RNA, 20 nt, Human
ugcugauggugcaaugaccu

SEQ ID NO: 3062783 - RNA, 23 nt, Human
ugcugauggugcaaugaccuuuc

SEQ ID NO: 3062784 - RNA, 15 nt, Human
ugcugcaguugccag

SEQ ID NO: 3062785 - RNA, 19 nt, Human
ugcuccuggcccacugcau

SEQ ID NO: 3062786 - RNA, 22 nt, Human
ugcugaaugguuuucaaaauaa

SEQ ID NO: 3062787 - RNA, 18 nt, Human
ugcugaaugguuuucaaa

SEQ ID NO: 3062788 - RNA, 17 nt, Human
ugcugaaugguuuucaa

SEQ ID NO: 3062789 - RNA, 18 nt, Human
ugcugaauacagaggcaa

SEQ ID NO: 3062790 - RNA, 23 nt, Human
ugcugaauacagaggcaacugca

SEQ ID NO: 3062791 - RNA, 21 nt, Human
ugcugaaggcucgagcaugcc

SEQ ID NO: 3062792 - RNA, 21 nt, Human
ugcggugcuaucucccccagc

SEQ ID NO: 3062793 - RNA, 23 nt, Human
ugcggugcuaucucccccagccc

SEQ ID NO: 3062794 - RNA, 17 nt, Human
ugccuucucaacuccaa

SEQ ID NO: 3062795 - RNA, 22 nt, Human
ugccuucucaacuccaaacuga

SEQ ID NO: 3062796 - RNA, 18 nt, Human
ugccuuauggaacacucu

SEQ ID NO: 3062797 - RNA, 20 nt, Human
ugccuuauggaacacucuga

SEQ ID NO: 3062798 - RNA, 21 nt, Human
ugccuuauggaacacucugag

SEQ ID NO: 3062799 - RNA, 22 nt, Human
ugccuuauggaacacucugaga

SEQ ID NO: 3062800 - RNA, 21 nt, Human
ugccuggauggggcugcaccg

SEQ ID NO: 3062801 - RNA, 17 nt, Human
ugccugaagucacacag

SEQ ID NO: 3062802 - RNA, 18 nt, Human
ugccugaagucacacagu

SEQ ID NO: 3062803 - RNA, 22 nt, Human
ugccugaagucacacagugagu

SEQ ID NO: 3062804 - RNA, 17 nt, Human
ugccuccuuugugagga

SEQ ID NO: 3062805 - RNA, 18 nt, Human
ugccuccuuugugaggaa

SEQ ID NO: 3062806 - RNA, 16 nt, Human
ugccuccuuugugagg

SEQ ID NO: 3062807 - RNA, 14 nt, Human
ugccucugggacug

SEQ ID NO: 3062808 - RNA, 11 nt, Human
ugcccagcccc

SEQ ID NO: 3062809 - RNA, 23 nt, Human
ugcccaggcuggcgugcaguggu

SEQ ID NO: 3062810 - RNA, 14 nt, Human
ugcaggaccucagg

SEQ ID NO: 3062811 - RNA, 15 nt, Human
ugcaggaccucaggu

SEQ ID NO: 3062812 - RNA, 16 nt, Human
ugcaggaccucaggug

SEQ ID NO: 3062813 - RNA, 18 nt, Human
ugcaggaccucaggugag

SEQ ID NO: 3062814 - RNA, 16 nt, Human
ugcagcaauaaagcag

SEQ ID NO: 3062815 - RNA, 15 nt, Human
ugcagcaauaaagca

SEQ ID NO: 3062816 - RNA, 14 nt, Human
ugcagcaauaaagc

SEQ ID NO: 3062817 - RNA, 15 nt, Human
ugcacuuuguucugg

SEQ ID NO: 3062818 - RNA, 18 nt, Human
ugcacuuuguucuggcuc

SEQ ID NO: 3062819 - RNA, 19 nt, Human
ugcacuuuguucuggcucu

SEQ ID NO: 3062820 - RNA, 16 nt, Human
ugcagauaaacaguag

SEQ ID NO: 3062821 - RNA, 16 nt, Human
ugcacguacacacaca

SEQ ID NO: 3062822 - RNA, 16 nt, Human
ugcacuugcagacucu

SEQ ID NO: 3062823 - RNA, 21 nt, Human
ugcacuugcagacucuacaga

SEQ ID NO: 3062824 - RNA, 21 nt, Human
ugcacacuuuggcccagggug

SEQ ID NO: 3062825 - RNA, 20 nt, Human
ugcacagaguuguuacauuu

SEQ ID NO: 3062826 - RNA, 22 nt, Human
ugcacagaguuguuacauuuuu

SEQ ID NO: 3062827 - RNA, 21 nt, Human
ugcacagaguuguuacauuuu

SEQ ID NO: 3062828 - RNA, 23 nt, Human
ugcacagaguuguuacauuuuua

SEQ ID NO: 3062829 - RNA, 18 nt, Human
ugcacagcaggcugccag

SEQ ID NO: 3062830 - RNA, 17 nt, Human
ugcacagcuaacaugga

SEQ ID NO: 3062831 - RNA, 21 nt, Human
ugcacagcaggcugccagugc

SEQ ID NO: 3062832 - RNA, 22 nt, Human
ugcacagcaggcugccagugcc

SEQ ID NO: 3062833 - RNA, 23 nt, Human
ugcacagcaggcugccagugccu

SEQ ID NO: 3062834 - RNA, 17 nt, Human
ugaagucuuuguacaga

SEQ ID NO: 3062835 - RNA, 20 nt, Human
ugaagucuuuguacagacaa

SEQ ID NO: 3062836 - RNA, 22 nt, Human
ugaagucuuuguacagacaaca

SEQ ID NO: 3062837 - RNA, 17 nt, Human
ugcacacuuuggcccag

SEQ ID NO: 3062838 - RNA, 18 nt, Human
ugcacacuuuggcccagg

SEQ ID NO: 3062839 - RNA, 19 nt, Human
ugcacacuuuggcccaggg

SEQ ID NO: 3062840 - RNA, 20 nt, Human
ugcacacuuuggcccagggu

SEQ ID NO: 3062841 - RNA, 16 nt, Human
ugcacacuuuggccca

SEQ ID NO: 3062842 - RNA, 13 nt, Human
ugcacacuuuggc

SEQ ID NO: 3062843 - RNA, 18 nt, Human
ugcacagcuaacauggaa

SEQ ID NO: 3062844 - RNA, 20 nt, Human
ugcacagcuaacauggaagu

SEQ ID NO: 3062845 - RNA, 23 nt, Human
ugcacagcuaacauggaaguacu

SEQ ID NO: 3062846 - RNA, 15 nt, Human
ugcacaucaaaauau

SEQ ID NO: 3062847 - RNA, 15 nt, Human
ugccauccuggccca

SEQ ID NO: 3062848 - RNA, 16 nt, Human
ugccauccuggcccag

SEQ ID NO: 3062849 - RNA, 18 nt, Human
ugccauccuggcccaggg

SEQ ID NO: 3062850 - RNA, 21 nt, Human
ugccauccuggcccagggcau

SEQ ID NO: 3062851 - RNA, 15 nt, Human
ugcccaccuggccuc

SEQ ID NO: 3062852 - RNA, 17 nt, Human
ugcccaccuggccucug

SEQ ID NO: 3062853 - RNA, 18 nt, Human
ugcccaccuggccucugc

SEQ ID NO: 3062854 - RNA, 14 nt, Human
ugcccaccuggccu

SEQ ID NO: 3062855 - RNA, 10 nt, Human
ugcccagccc

SEQ ID NO: 3062856 - RNA, 14 nt, Human
ugccagucaccccg

SEQ ID NO: 3062857 - RNA, 24 nt, Human
ugccagguuuuuggucugacccac

SEQ ID NO: 3062858 - RNA, 13 nt, Human
ugccauccuggcc

SEQ ID NO: 3062859 - RNA, 11 nt, Human
ugccagggaca

SEQ ID NO: 3062860 - RNA, 22 nt, Human
ugccagggacagaggggguggc

SEQ ID NO: 3062861 - RNA, 17 nt, Human
ugcaggcagccaggcca

SEQ ID NO: 3062862 - RNA, 18 nt, Human
ugcaggcagccaggccac

SEQ ID NO: 3062863 - RNA, 22 nt, Human
ugcaucagcugcugaaacaaca

SEQ ID NO: 3062864 - RNA, 19 nt, Human
ugcaucagcugcugaaaca

SEQ ID NO: 3062865 - RNA, 16 nt, Human
ugcaggcagccaggcc

SEQ ID NO: 3062866 - RNA, 15 nt, Human
ugcaucguuucaucu

SEQ ID NO: 3062867 - RNA, 19 nt, Human
ugcauguuacauaagauaa

SEQ ID NO: 3062868 - RNA, 15 nt, Human
ugcauuauauuuauu

SEQ ID NO: 3062869 - RNA, 14 nt, Human
ugcauuauauuuau

SEQ ID NO: 3062870 - RNA, 20 nt, Human
ugcauuauauuuauuacugu

SEQ ID NO: 3062871 - RNA, 22 nt, Human
ugggguggggggggugcugggc

SEQ ID NO: 3062872 - RNA, 21 nt, Human
ugggguggggggggugcuggg

SEQ ID NO: 3062873 - RNA, 17 nt, Human
uggguagacacacauga

SEQ ID NO: 3062874 - RNA, 16 nt, Human
uggguagacacacaug

SEQ ID NO: 3062875 - RNA, 19 nt, Human
ugggguggggggggugcug

SEQ ID NO: 3062876 - RNA, 17 nt, Human
ugggguggggaccucag

SEQ ID NO: 3062877 - RNA, 23 nt, Human
ugggugucaagagggucugagga

SEQ ID NO: 3062878 - RNA, 21 nt, Human
ugggugucaagagggucugag

SEQ ID NO: 3062879 - RNA, 16 nt, Human
uggguucacugcaacc

SEQ ID NO: 3062880 - RNA, 23 nt, Human
uggguucaagcgauucuucugcu

SEQ ID NO: 3062881 - RNA, 19 nt, Human
ugggcuucaguggcagcug

SEQ ID NO: 3062882 - RNA, 18 nt, Human
ugggcuucaguggcagcu

SEQ ID NO: 3062883 - RNA, 13 nt, Human
uggggcagcuuga

SEQ ID NO: 3062884 - RNA, 21 nt, Human
ugggcuuggggaccagagcug

SEQ ID NO: 3062885 - RNA, 16 nt, Human
uggggcagcuugaggg

SEQ ID NO: 3062886 - RNA, 19 nt, Human
ugggcuuggggaccagagc

SEQ ID NO: 3062887 - RNA, 20 nt, Human
ugggcuucaguggcagcugc

SEQ ID NO: 3062888 - RNA, 24 nt, Human
ugggagcugccuguucagcuccag

SEQ ID NO: 3062889 - RNA, 16 nt, Human
ugggagcuuuuguaga

SEQ ID NO: 3062890 - RNA, 22 nt, Human
ugggccuccugugugugcgccu

SEQ ID NO: 3062891 - RNA, 16 nt, Human
ugggccuccugugugu

SEQ ID NO: 3062892 - RNA, 14 nt, Human
ugggccuccugugu

SEQ ID NO: 3062893 - RNA, 15 nt, Human
uggccagaugcacca

SEQ ID NO: 3062894 - RNA, 17 nt, Human
uggccuucggccuccau

SEQ ID NO: 3062895 - RNA, 18 nt, Human
uggccuucggccuccauc

SEQ ID NO: 3062896 - RNA, 14 nt, Human
uggccuucggccuc

SEQ ID NO: 3062897 - RNA, 14 nt, Human
uggcgcugccccug

SEQ ID NO: 3062898 - RNA, 22 nt, Human
uggcgugcaguggugcgaucug

SEQ ID NO: 3062899 - RNA, 14 nt, Human
uggcgagccauuug

SEQ ID NO: 3062900 - RNA, 19 nt, Human
uggcgagccauuuguccca

SEQ ID NO: 3062901 - RNA, 13 nt, Human
uggcucuuccagg

SEQ ID NO: 3062902 - RNA, 15 nt, Human
uggcucuuccaggcu

SEQ ID NO: 3062903 - RNA, 12 nt, Human
uggcugggggcc

SEQ ID NO: 3062904 - RNA, 16 nt, Human
uggcucuuccaggcug

SEQ ID NO: 3062905 - RNA, 20 nt, Human
uggcucagguggggucacuc

SEQ ID NO: 3062906 - RNA, 22 nt, Human
uggcucagguggggucacucug

SEQ ID NO: 3062907 - RNA, 20 nt, Human
uggcuccaaacccucgaggc

SEQ ID NO: 3062908 - RNA, 18 nt, Human
uggcuccaaacccucgag

SEQ ID NO: 3062909 - RNA, 16 nt, Human
uggcuccaaacccucg

SEQ ID NO: 3062910 - RNA, 16 nt, Human
ugggacaugggaaagg

SEQ ID NO: 3062911 - RNA, 19 nt, Human
ugggacauuugcucaugga

SEQ ID NO: 3062912 - RNA, 20 nt, Human
ugggacauuugcucauggaa

SEQ ID NO: 3062913 - RNA, 23 nt, Human
ugggagcugccuguucagcucca

SEQ ID NO: 3062914 - RNA, 21 nt, Human
ugggaaugaaugucaguguga

SEQ ID NO: 3062915 - RNA, 22 nt, Human
ugggaaugaaugucagugugac

SEQ ID NO: 3062916 - RNA, 18 nt, Human
ugggacagucaccucaug

SEQ ID NO: 3062917 - RNA, 20 nt, Human
ugggacagucaccucaugga

SEQ ID NO: 3062918 - RNA, 21 nt, Human
ugggacagucaccucauggaa

SEQ ID NO: 3062919 - RNA, 22 nt, Human
uggcugguuagagguucccuuu

SEQ ID NO: 3062920 - RNA, 14 nt, Human
uggcugggggccuc

SEQ ID NO: 3062921 - RNA, 13 nt, Human
uggagauguuuag

SEQ ID NO: 3062922 - RNA, 16 nt, Human
uggacaggcauguucu

SEQ ID NO: 3062923 - RNA, 12 nt, Human
uggacaggcaug

SEQ ID NO: 3062924 - RNA, 22 nt, Human
uggaggcaugugaugagaggaa

SEQ ID NO: 3062925 - RNA, 22 nt, Human
uggcagcugcgguccacccagg

SEQ ID NO: 3062926 - RNA, 21 nt, Human
uggcagcugcgguccacccag

SEQ ID NO: 3062927 - RNA, 23 nt, Human
uggcagcugcgguccacccagga

SEQ ID NO: 3062928 - RNA, 19 nt, Human
uggcagcugcgguccaccc

SEQ ID NO: 3062929 - RNA, 14 nt, Human
uggaugccuggugg

SEQ ID NO: 3062930 - RNA, 14 nt, Human
uggcacugcuucca

SEQ ID NO: 3062931 - RNA, 16 nt, Human
uggcacugcuuccagu

SEQ ID NO: 3062932 - RNA, 18 nt, Human
uggcacugcuuccaguga

SEQ ID NO: 3062933 - RNA, 19 nt, Human
uggcagugggagcugccug

SEQ ID NO: 3062934 - RNA, 16 nt, Human
uggcagugggagcugc

SEQ ID NO: 3062935 - RNA, 15 nt, Human
uggcagugggagcug

SEQ ID NO: 3062936 - RNA, 14 nt, Human
uggcagugggagcu

SEQ ID NO: 3062937 - RNA, 13 nt, Human
uggcagugggagc

SEQ ID NO: 3062938 - RNA, 20 nt, Human
uggcagugggagcugccugu

SEQ ID NO: 3062939 - RNA, 16 nt, Human
uggaauaucuccguca

SEQ ID NO: 3062940 - RNA, 14 nt, Human
uggaagacagcucu

SEQ ID NO: 3062941 - RNA, 16 nt, Human
uggaauacucuuauau

SEQ ID NO: 3062942 - RNA, 11 nt, Human
uggaagacagc

SEQ ID NO: 3062943 - RNA, 12 nt, Human
uggaagacagcu

SEQ ID NO: 3062944 - RNA, 14 nt, Human
uggaacucucgagc

SEQ ID NO: 3062945 - RNA, 16 nt, Human
uggaaaauaaauuauu

SEQ ID NO: 3062946 - RNA, 15 nt, Human
uggaaaauaaauuau

SEQ ID NO: 3062947 - RNA, 22 nt, Human
uggaaaaguauguuagugcaaa

SEQ ID NO: 3062948 - RNA, 16 nt, Human
ugcuucuucagagacu

SEQ ID NO: 3062949 - RNA, 14 nt, Human
ugcuucuguuuuau

SEQ ID NO: 3062950 - RNA, 19 nt, Human
ugcuuccagugaggcucug

SEQ ID NO: 3062951 - RNA, 20 nt, Human
ugcuuccagugaggcucugc

SEQ ID NO: 3062952 - RNA, 18 nt, Human
ugcuuccagugaggcucu

SEQ ID NO: 3062953 - RNA, 18 nt, Human
ucuuaaaaaguggaaaaa

SEQ ID NO: 3062954 - RNA, 22 nt, Human
ucuguuuuauaauuuugugaag

SEQ ID NO: 3062955 - RNA, 20 nt, Human
ucuguuuuauaauuuuguga

SEQ ID NO: 3062956 - RNA, 23 nt, Human
ucuguggguuucuaaagcugcca

SEQ ID NO: 3062957 - RNA, 22 nt, Human
ucugugucagguggggcagcuu

SEQ ID NO: 3062958 - RNA, 17 nt, Human
ucuguacgucugacagg

SEQ ID NO: 3062959 - RNA, 22 nt, Human
ucuguggguuucuaaagcugcc

SEQ ID NO: 3062960 - RNA, 19 nt, Human
ucuguccgagcuuugaaaa

SEQ ID NO: 3062961 - RNA, 23 nt, Human
ucuggagcccacuguacuugcuc

SEQ ID NO: 3062962 - RNA, 14 nt, Human
ucuggcuaugcauu

SEQ ID NO: 3062963 - RNA, 23 nt, Human
ucuggccuucggccuccauccug

SEQ ID NO: 3062964 - RNA, 12 nt, Human
ucugggacacag

SEQ ID NO: 3062965 - RNA, 15 nt, Human
ucuggcucuuccagg

SEQ ID NO: 3062966 - RNA, 16 nt, Human
ucuggcucuuccaggc

SEQ ID NO: 3062967 - RNA, 17 nt, Human
ucuggcucuuccaggcu

SEQ ID NO: 3062968 - RNA, 23 nt, Human
ucuguacagagcccacgccccca

SEQ ID NO: 3062969 - RNA, 24 nt, Human
ucuguaauaaacucauuucuagca

SEQ ID NO: 3062970 - RNA, 23 nt, Human
ucuguaauaaacucauuucuagc

SEQ ID NO: 3062971 - RNA, 19 nt, Human
ucuguaauaaacucauuuc

SEQ ID NO: 3062972 - RNA, 21 nt, Human
ucuugaauuguaaggaaugau

SEQ ID NO: 3062973 - RNA, 12 nt, Human
ucuucuccaggc

SEQ ID NO: 3062974 - RNA, 14 nt, Human
ucuucuccaggcug

SEQ ID NO: 3062975 - RNA, 13 nt, Human
ucuucuccaggcu

SEQ ID NO: 3062976 - RNA, 18 nt, Human
ucuugaacuccuggccuc

SEQ ID NO: 3062977 - RNA, 17 nt, Human
ucuugaacuccuggccu

SEQ ID NO: 3062978 - RNA, 16 nt, Human
ucuugaacuccuggcc

SEQ ID NO: 3062979 - RNA, 11 nt, Human
ucuugcucugc

SEQ ID NO: 3062980 - RNA, 13 nt, Human
ucuugcucugcug

SEQ ID NO: 3062981 - RNA, 12 nt, Human
ucuugcucugcu

SEQ ID NO: 3062982 - RNA, 16 nt, Human
ucuucaguaagccgug

SEQ ID NO: 3062983 - RNA, 21 nt, Human
ucuuccacaagagcccaggcc

SEQ ID NO: 3062984 - RNA, 14 nt, Human
ucuuccaggcuggg

SEQ ID NO: 3062985 - RNA, 19 nt, Human
ucuucuccacuuucuagcc

SEQ ID NO: 3062986 - RNA, 21 nt, Human
ucuucuccacuuucuagccag

SEQ ID NO: 3062987 - RNA, 14 nt, Human
ucuuauacauuuga

SEQ ID NO: 3062988 - RNA, 15 nt, Human
ucuuauacauuugau

SEQ ID NO: 3062989 - RNA, 16 nt, Human
ucuuaguggauguucu

SEQ ID NO: 3062990 - RNA, 14 nt, Human
ucuuagugugugca

SEQ ID NO: 3062991 - RNA, 13 nt, Human
ucuuaaaaagugg

SEQ ID NO: 3062992 - RNA, 15 nt, Human
ucuucaguaagccgu

SEQ ID NO: 3062993 - RNA, 15 nt, Human
ugaacugauaaagau

SEQ ID NO: 3062994 - RNA, 13 nt, Human
ugaacugauaaag

SEQ ID NO: 3062995 - RNA, 15 nt, Human
ugaacucuucaaucu

SEQ ID NO: 3062996 - RNA, 22 nt, Human
ugaaccacaucuugcucugcug

SEQ ID NO: 3062997 - RNA, 21 nt, Human
ugaaccacaucuugcucugcu

SEQ ID NO: 3062998 - RNA, 20 nt, Human
ugaaccacaucuugcucugc

SEQ ID NO: 3062999 - RNA, 18 nt, Human
ugaacucuucaaucucuu

SEQ ID NO: 3063000 - RNA, 19 nt, Human
ugaaccacaucuugcucug

SEQ ID NO: 3063001 - RNA, 14 nt, Human
ugaacacaucagcu

SEQ ID NO: 3063002 - RNA, 14 nt, Human
ugaagacagagcua

SEQ ID NO: 3063003 - RNA, 16 nt, Human
ugaagacagagcuaca

SEQ ID NO: 3063004 - RNA, 13 nt, Human
ugaagacagagcu

SEQ ID NO: 3063005 - RNA, 14 nt, Human
ugaacuuggcgcug

SEQ ID NO: 3063006 - RNA, 12 nt, Human
ugaacuugguuc

SEQ ID NO: 3063007 - RNA, 19 nt, Human
ugaacuggguacuugugga

SEQ ID NO: 3063008 - RNA, 17 nt, Human
ugaagacuuuucuuuca

SEQ ID NO: 3063009 - RNA, 22 nt, Human
ugaagacuuuucuuucagccaa

SEQ ID NO: 3063010 - RNA, 14 nt, Human
ugaagacuuuucuu

SEQ ID NO: 3063011 - RNA, 21 nt, Human
ugaaggcucgagcaugccugg

SEQ ID NO: 3063012 - RNA, 21 nt, Human
ugaaguccaagcauuuagaug

SEQ ID NO: 3063013 - RNA, 22 nt, Human
ugaaguccaagcauuuagaugu

SEQ ID NO: 3063014 - RNA, 20 nt, Human
ugaaggcucgagcaugccug

SEQ ID NO: 3063015 - RNA, 15 nt, Human
ugaaaucauucauuu

SEQ ID NO: 3063016 - RNA, 17 nt, Human
ugaaaucuuuuugcuuu

SEQ ID NO: 3063017 - RNA, 17 nt, Human
ugaaagggcccagagag

SEQ ID NO: 3063018 - RNA, 16 nt, Human
ugaaagggcccagaga

SEQ ID NO: 3063019 - RNA, 15 nt, Human
ugaaagggcccagag

SEQ ID NO: 3063020 - RNA, 22 nt, Human
ugaaaugaggucagagccugca

SEQ ID NO: 3063021 - RNA, 21 nt, Human
ugaaaugaggucagagccugc

SEQ ID NO: 3063022 - RNA, 23 nt, Human
ugaaaugaggucagagccugcag

SEQ ID NO: 3063023 - RNA, 20 nt, Human
ugaaaugaggucagagccug

SEQ ID NO: 3063024 - RNA, 19 nt, Human
ugaaaugaggucagagccu

SEQ ID NO: 3063025 - RNA, 22 nt, Human
ugaaaagacuccaaagaaaugu

SEQ ID NO: 3063026 - RNA, 18 nt, Human
ugaaacccugucucuacu

SEQ ID NO: 3063027 - RNA, 17 nt, Human
ugaaaggaaagaggcuc

SEQ ID NO: 3063028 - RNA, 12 nt, Human
ugaaaggaaaga

SEQ ID NO: 3063029 - RNA, 13 nt, Human
ugaaagauucaau

SEQ ID NO: 3063030 - RNA, 18 nt, Human
ugaaagcagggacuugaa

SEQ ID NO: 3063031 - RNA, 19 nt, Human
ugaaagcagggacuugaac

SEQ ID NO: 3063032 - RNA, 19 nt, Human
ucuuuugccguuauuaaaa

SEQ ID NO: 3063033 - RNA, 17 nt, Human
ucuuuugccguuauuaa

SEQ ID NO: 3063034 - RNA, 16 nt, Human
ucuuuuugcuuugcuu

SEQ ID NO: 3063035 - RNA, 19 nt, Human
ugaaaacuuuaugcuaagu

SEQ ID NO: 3063036 - RNA, 19 nt, Human
ugaaaagacuccaaagaaa

SEQ ID NO: 3063037 - RNA, 17 nt, Human
ugaaaagacuccaaaga

SEQ ID NO: 3063038 - RNA, 16 nt, Human
ugaaaagacuccaaag

SEQ ID NO: 3063039 - RNA, 15 nt, Human
ugaaaagacuccaaa

SEQ ID NO: 3063040 - RNA, 21 nt, Human
ucucagugucaaugcagcccc

SEQ ID NO: 3063041 - RNA, 15 nt, Human
ucucccccagcccca

SEQ ID NO: 3063042 - RNA, 17 nt, Human
ucucccccagccccauc

SEQ ID NO: 3063043 - RNA, 14 nt, Human
ucucccccagcccc

SEQ ID NO: 3063044 - RNA, 22 nt, Human
ucucccccagccccauccucug

SEQ ID NO: 3063045 - RNA, 13 nt, Human
ucucccccagccc

SEQ ID NO: 3063046 - RNA, 18 nt, Human
ucucccccagccccaucc

SEQ ID NO: 3063047 - RNA, 20 nt, Human
ucucccccagccccauccuc

SEQ ID NO: 3063048 - RNA, 19 nt, Human
ucuccugccucagccuccc

SEQ ID NO: 3063049 - RNA, 22 nt, Human
ucuccugccucagccucccaaa

SEQ ID NO: 3063050 - RNA, 15 nt, Human
ucucucgugaguaua

SEQ ID NO: 3063051 - RNA, 13 nt, Human
ucucugaggacac

SEQ ID NO: 3063052 - RNA, 19 nt, Human
ucucuaguuugauuaaauu

SEQ ID NO: 3063053 - RNA, 18 nt, Human
ucucuaguuugauuaaau

SEQ ID NO: 3063054 - RNA, 16 nt, Human
ucucuaguuugauuaa

SEQ ID NO: 3063055 - RNA, 13 nt, Human
ucucuaggaaaua

SEQ ID NO: 3063056 - RNA, 15 nt, Human
ucucuacaaaaagca

SEQ ID NO: 3063057 - RNA, 11 nt, Human
ucucugcaggu

SEQ ID NO: 3063058 - RNA, 18 nt, Human
ucucuucacagucacauu

SEQ ID NO: 3063059 - RNA, 13 nt, Human
ucugaaagggacg

SEQ ID NO: 3063060 - RNA, 23 nt, Human
ucugaaaauguauguguaaguau

SEQ ID NO: 3063061 - RNA, 14 nt, Human
ucugaaaauguaug

SEQ ID NO: 3063062 - RNA, 14 nt, Human
ucugaaauuuccug

SEQ ID NO: 3063063 - RNA, 16 nt, Human
ucucuuuucaaaacau

SEQ ID NO: 3063064 - RNA, 15 nt, Human
ucucuuuucaaaaca

SEQ ID NO: 3063065 - RNA, 16 nt, Human
ucugaaaauguaugug

SEQ ID NO: 3063066 - RNA, 23 nt, Human
ucugaggacacuaaccacgcugg

SEQ ID NO: 3063067 - RNA, 20 nt, Human
ucugaggacacuaaccacgc

SEQ ID NO: 3063068 - RNA, 17 nt, Human
ucugaggaauccagacc

SEQ ID NO: 3063069 - RNA, 16 nt, Human
ucugaggaauccagac

SEQ ID NO: 3063070 - RNA, 23 nt, Human
ucugauucccaagcucugcuccu

SEQ ID NO: 3063071 - RNA, 14 nt, Human
ucugcacaagcugc

SEQ ID NO: 3063072 - RNA, 19 nt, Human
ucugcacaagcugcacccu

SEQ ID NO: 3063073 - RNA, 15 nt, Human
ucugacccaugcugc

SEQ ID NO: 3063074 - RNA, 16 nt, Human
ucugacccaugcugcc

SEQ ID NO: 3063075 - RNA, 17 nt, Human
ucugacccaugcugccc

SEQ ID NO: 3063076 - RNA, 18 nt, Human
ucugacccaugcugcccu

SEQ ID NO: 3063077 - RNA, 24 nt, Human
ucugagaucaaaacgguuuuacug

SEQ ID NO: 3063078 - RNA, 20 nt, Human
ucugaacuuggcgcugcccc

SEQ ID NO: 3063079 - RNA, 15 nt, Human
ucugacccacugcuu

SEQ ID NO: 3063080 - RNA, 14 nt, Human
ucugacccaugcug

SEQ ID NO: 3063081 - RNA, 15 nt, Human
ucuaguaugaaauua

SEQ ID NO: 3063082 - RNA, 17 nt, Human
ucuaguaugaaauuaua

SEQ ID NO: 3063083 - RNA, 21 nt, Human
ucucaaauuuggauugcuaau

SEQ ID NO: 3063084 - RNA, 21 nt, Human
ucucaaacucuugaccucagg

SEQ ID NO: 3063085 - RNA, 13 nt, Human
ucucaaacucuug

SEQ ID NO: 3063086 - RNA, 22 nt, Human
ucucaaacucuugaccucaggu

SEQ ID NO: 3063087 - RNA, 17 nt, Human
ucucacucugucgccca

SEQ ID NO: 3063088 - RNA, 16 nt, Human
ucucacucugucgccc

SEQ ID NO: 3063089 - RNA, 18 nt, Human
ucucacucugucgcccag

SEQ ID NO: 3063090 - RNA, 21 nt, Human
ucucacuguugcccaggcugg

SEQ ID NO: 3063091 - RNA, 20 nt, Human
ucucacuguugcccaggcug

SEQ ID NO: 3063092 - RNA, 19 nt, Human
ucucacuguugcccaggcu

SEQ ID NO: 3063093 - RNA, 18 nt, Human
ucucacuguugcccaggc

SEQ ID NO: 3063094 - RNA, 21 nt, Human
ucucagaaucucaaauaacua

SEQ ID NO: 3063095 - RNA, 17 nt, Human
ucucagaaucucaaaua

SEQ ID NO: 3063096 - RNA, 17 nt, Human
ucucacuguugcccagg

SEQ ID NO: 3063097 - RNA, 18 nt, Human
ucuaaauuuuauaucuug

SEQ ID NO: 3063098 - RNA, 23 nt, Human
ucuaaauuuuauaucuuguagcu

SEQ ID NO: 3063099 - RNA, 23 nt, Human
ucuaaauuugaauguuaagcaga

SEQ ID NO: 3063100 - RNA, 22 nt, Human
ucuaaauuugaauguuaagcag

SEQ ID NO: 3063101 - RNA, 19 nt, Human
ucuaacaaaaaaauauauu

SEQ ID NO: 3063102 - RNA, 17 nt, Human
ucuaaauuugaauguua

SEQ ID NO: 3063103 - RNA, 13 nt, Human
ucuaaauuugaau

SEQ ID NO: 3063104 - RNA, 16 nt, Human
ucuaaauucuuucauu

SEQ ID NO: 3063105 - RNA, 22 nt, Human
ucuaaaucuccaaaauaaaacu

SEQ ID NO: 3063106 - RNA, 16 nt, Human
ucuaacuucaccauau

SEQ ID NO: 3063107 - RNA, 15 nt, Human
ucuaacuucaccaua

SEQ ID NO: 3063108 - RNA, 21 nt, Human
ucuacacuaagagagaaugag

SEQ ID NO: 3063109 - RNA, 12 nt, Human
ucuacacugugc

SEQ ID NO: 3063110 - RNA, 14 nt, Human
ucuacacugugcug

SEQ ID NO: 3063111 - RNA, 17 nt, Human
ucuacacuaagagagaa

SEQ ID NO: 3063112 - RNA, 17 nt, Human
ucuacacuccagugaga

SEQ ID NO: 3063113 - RNA, 19 nt, Human
ucuacugaggugcuauguu

SEQ ID NO: 3063114 - RNA, 18 nt, Human
ucuacugaggugcuaugu

SEQ ID NO: 3063115 - RNA, 15 nt, Human
ucuacacugugcuga

SEQ ID NO: 3063116 - RNA, 22 nt, Human
ucuacugaggugcuauguucuu

SEQ ID NO: 3063117 - RNA, 22 nt, Human
ucuagggaaaaaccagcgugug

SEQ ID NO: 3063118 - RNA, 19 nt, Human
ucuagggaaaaaccagcgu

SEQ ID NO: 3063119 - RNA, 20 nt, Human
uccuucugugaaaguacauu

SEQ ID NO: 3063120 - RNA, 19 nt, Human
uccuucuguccuacucugu

SEQ ID NO: 3063121 - RNA, 12 nt, Human
uccuucuguccu

SEQ ID NO: 3063122 - RNA, 10 nt, Human
ucccucccuu

SEQ ID NO: 3063123 - RNA, 22 nt, Human
uccuggcaugggaaugaauguc

SEQ ID NO: 3063124 - RNA, 17 nt, Human
uccuggcccacugcauc

SEQ ID NO: 3063125 - RNA, 23 nt, Human
uccugguccccucagcucugccu

SEQ ID NO: 3063126 - RNA, 15 nt, Human
uccugguguggaaga

SEQ ID NO: 3063127 - RNA, 15 nt, Human
ucgaguuacagacaa

SEQ ID NO: 3063128 - RNA, 17 nt, Human
ucgaguuacagacaaag

SEQ ID NO: 3063129 - RNA, 23 nt, Human
ucgcugugucagcauagaaguaa

SEQ ID NO: 3063130 - RNA, 13 nt, Human
ucaguuguacagu

SEQ ID NO: 3063131 - RNA, 13 nt, Human
ucauaaugacuua

SEQ ID NO: 3063132 - RNA, 15 nt, Human
ucauaauuauuauuu

SEQ ID NO: 3063133 - RNA, 15 nt, Human
ucauaauuuauacag

SEQ ID NO: 3063134 - RNA, 13 nt, Human
ucauacauuguac

SEQ ID NO: 3063135 - RNA, 15 nt, Human
ucauacauuguacga

SEQ ID NO: 3063136 - RNA, 16 nt, Human
ucauacauuguacgaa

SEQ ID NO: 3063137 - RNA, 13 nt, Human
ucauacccacccc

SEQ ID NO: 3063138 - RNA, 17 nt, Human
ucagugugacugaucuc

SEQ ID NO: 3063139 - RNA, 13 nt, Human
ucagugugacuga

SEQ ID NO: 3063140 - RNA, 11 nt, Human
ucaguguacau

SEQ ID NO: 3063141 - RNA, 23 nt, Human
ucagugguuggcaauuguuucaa

SEQ ID NO: 3063142 - RNA, 15 nt, Human
ucagucuggcccuuc

SEQ ID NO: 3063143 - RNA, 24 nt, Human
ucagucugauucccaagcucugcu

SEQ ID NO: 3063144 - RNA, 21 nt, Human
ucauuaggugugacugaauuu

SEQ ID NO: 3063145 - RNA, 18 nt, Human
ucauuaggugugacugaa

SEQ ID NO: 3063146 - RNA, 16 nt, Human
ucauuaggugugacug

SEQ ID NO: 3063147 - RNA, 20 nt, Human
ucauacccacccccacccaa

SEQ ID NO: 3063148 - RNA, 14 nt, Human
ucauacccaccccc

SEQ ID NO: 3063149 - RNA, 15 nt, Human
ucauacccaccccca

SEQ ID NO: 3063150 - RNA, 13 nt, Human
uccaagcaaaugu

SEQ ID NO: 3063151 - RNA, 17 nt, Human
uccaagcauuuagaugu

SEQ ID NO: 3063152 - RNA, 23 nt, Human
uccaagcauaccaacacgagcag

SEQ ID NO: 3063153 - RNA, 20 nt, Human
uccaagaagcccaggaaagg

SEQ ID NO: 3063154 - RNA, 22 nt, Human
uccaagaagcccaggaaaggcu

SEQ ID NO: 3063155 - RNA, 19 nt, Human
uccaagaagcccaggaaag

SEQ ID NO: 3063156 - RNA, 14 nt, Human
uccaagaauuucua

SEQ ID NO: 3063157 - RNA, 16 nt, Human
uccaaaauaaaacuuu

SEQ ID NO: 3063158 - RNA, 17 nt, Human
uccaaaauaaaacuuuu

SEQ ID NO: 3063159 - RNA, 12 nt, Human
uccaaagaaaug

SEQ ID NO: 3063160 - RNA, 23 nt, Human
uccaaacugacucuuaagaagac

SEQ ID NO: 3063161 - RNA, 22 nt, Human
ucauucagauaugauucaaaug

SEQ ID NO: 3063162 - RNA, 14 nt, Human
ucauuucuuugagu

SEQ ID NO: 3063163 - RNA, 22 nt, Human
ucauuucugcaucagcugcuga

SEQ ID NO: 3063164 - RNA, 16 nt, Human
ucauuucugcaucagc

SEQ ID NO: 3063165 - RNA, 12 nt, Human
uccaccugccag

SEQ ID NO: 3063166 - RNA, 14 nt, Human
uccaccuacaugag

SEQ ID NO: 3063167 - RNA, 22 nt, Human
uccaagcaggacauggacaagg

SEQ ID NO: 3063168 - RNA, 14 nt, Human
uccacaagagccca

SEQ ID NO: 3063169 - RNA, 13 nt, Human
uccaccugccagg

SEQ ID NO: 3063170 - RNA, 12 nt, Human
uccacuuggucu

SEQ ID NO: 3063171 - RNA, 13 nt, Human
uccacuuggucug

SEQ ID NO: 3063172 - RNA, 14 nt, Human
uccagauccuggaa

SEQ ID NO: 3063173 - RNA, 16 nt, Human
uccagauccuggaaau

SEQ ID NO: 3063174 - RNA, 17 nt, Human
uccagauccuggaaauc

SEQ ID NO: 3063175 - RNA, 22 nt, Human
uccccacuugagaauuacccuu

SEQ ID NO: 3063176 - RNA, 20 nt, Human
ucccaucucacacaugagca

SEQ ID NO: 3063177 - RNA, 23 nt, Human
ucccaucucacacaugagcauca

SEQ ID NO: 3063178 - RNA, 22 nt, Human
ucccaggcauuccccaggaggc

SEQ ID NO: 3063179 - RNA, 19 nt, Human
ucccaggcauuccccagga

SEQ ID NO: 3063180 - RNA, 20 nt, Human
ucccaggcauuccccaggag

SEQ ID NO: 3063181 - RNA, 21 nt, Human
ucccaggcauuccccaggagg

SEQ ID NO: 3063182 - RNA, 15 nt, Human
ucccaccucagccuc

SEQ ID NO: 3063183 - RNA, 14 nt, Human
ucccaccucagccu

SEQ ID NO: 3063184 - RNA, 13 nt, Human
ucccaccucagcc

SEQ ID NO: 3063185 - RNA, 13 nt, Human
ucccaacucaccc

SEQ ID NO: 3063186 - RNA, 16 nt, Human
ucccaaauuucauacc

SEQ ID NO: 3063187 - RNA, 14 nt, Human
ucccaacucacccc

SEQ ID NO: 3063188 - RNA, 15 nt, Human
ucccaacucacccca

SEQ ID NO: 3063189 - RNA, 16 nt, Human
ucccaacucaccccag

SEQ ID NO: 3063190 - RNA, 15 nt, Human
ucccaagcucugcuc

SEQ ID NO: 3063191 - RNA, 14 nt, Human
ucccaagcucugcu

SEQ ID NO: 3063192 - RNA, 13 nt, Human
ucccaagcucugc

SEQ ID NO: 3063193 - RNA, 12 nt, Human
ucccaagcucug

SEQ ID NO: 3063194 - RNA, 17 nt, Human
ucccaagcucugcuccu

SEQ ID NO: 3063195 - RNA, 13 nt, Human
uccauggacuuug

SEQ ID NO: 3063196 - RNA, 20 nt, Human
uccaugggccauaugaaaag

SEQ ID NO: 3063197 - RNA, 14 nt, Human
uccauggacuuugu

SEQ ID NO: 3063198 - RNA, 15 nt, Human
uccauggacuuuguu

SEQ ID NO: 3063199 - RNA, 21 nt, Human
ucccaaagugcugggauuaca

SEQ ID NO: 3063200 - RNA, 23 nt, Human
uccagcucaccagccccagugcc

SEQ ID NO: 3063201 - RNA, 12 nt, Human
ucccuaauaaag

SEQ ID NO: 3063202 - RNA, 11 nt, Human
ucccuaauaaa

SEQ ID NO: 3063203 - RNA, 13 nt, Human
ucccuaauaaagc

SEQ ID NO: 3063204 - RNA, 15 nt, Human
ucccuacuguaauuu

SEQ ID NO: 3063205 - RNA, 17 nt, Human
ucccucccucuuucccu

SEQ ID NO: 3063206 - RNA, 15 nt, Human
ucccucccucuuucc

SEQ ID NO: 3063207 - RNA, 14 nt, Human
uccccugcugggug

SEQ ID NO: 3063208 - RNA, 15 nt, Human
uccccugcugggugu

SEQ ID NO: 3063209 - RNA, 20 nt, Human
uccccugcuggguguggcgc

SEQ ID NO: 3063210 - RNA, 21 nt, Human
uccccugcuggguguggcgca

SEQ ID NO: 3063211 - RNA, 22 nt, Human
uccccuguagagugggagcuga

SEQ ID NO: 3063212 - RNA, 23 nt, Human
uccccuguccccgcacugggcuu

SEQ ID NO: 3063213 - RNA, 24 nt, Human
uccccugcuggguguggcgcagca

SEQ ID NO: 3063214 - RNA, 19 nt, Human
uccccuguagagugggagc

SEQ ID NO: 3063215 - RNA, 15 nt, Human
uccccuggcacuggc

SEQ ID NO: 3063216 - RNA, 22 nt, Human
ucccccagccccauccucugua

SEQ ID NO: 3063217 - RNA, 20 nt, Human
uccccgcacugggcuugggg

SEQ ID NO: 3063218 - RNA, 21 nt, Human
ucccccuuccauggacuuugu

SEQ ID NO: 3063219 - RNA, 16 nt, Human
uauuuuauguugcaua

SEQ ID NO: 3063220 - RNA, 15 nt, Human
uauuuuauguugcau

SEQ ID NO: 3063221 - RNA, 15 nt, Human
uauuuuuuuacuaau

SEQ ID NO: 3063222 - RNA, 16 nt, Human
uauuuuuuucugaaau

SEQ ID NO: 3063223 - RNA, 17 nt, Human
uauuuuuuucugaaauu

SEQ ID NO: 3063224 - RNA, 22 nt, Human
ucaaaacgguuuuacugcagcu

SEQ ID NO: 3063225 - RNA, 14 nt, Human
ucaaacucuuaaaa

SEQ ID NO: 3063226 - RNA, 16 nt, Human
uauuugagaguucuaa

SEQ ID NO: 3063227 - RNA, 15 nt, Human
uauuugagaguucua

SEQ ID NO: 3063228 - RNA, 19 nt, Human
uauuugagaguucuaaauu

SEQ ID NO: 3063229 - RNA, 18 nt, Human
uauuugagaguucuaaau

SEQ ID NO: 3063230 - RNA, 23 nt, Human
uauuuauuaaaugcccagccccu

SEQ ID NO: 3063231 - RNA, 15 nt, Human
uaucugaaaauguau

SEQ ID NO: 3063232 - RNA, 14 nt, Human
uaucugaaaaugua

SEQ ID NO: 3063233 - RNA, 20 nt, Human
uaucugaaaauguaugugua

SEQ ID NO: 3063234 - RNA, 22 nt, Human
uauuucuaugaaauauuauguu

SEQ ID NO: 3063235 - RNA, 21 nt, Human
uauuucuaugaaauauuaugu

SEQ ID NO: 3063236 - RNA, 16 nt, Human
ucaaacuuuacuaugg

SEQ ID NO: 3063237 - RNA, 13 nt, Human
ucaaacuuuacua

SEQ ID NO: 3063238 - RNA, 15 nt, Human
ucaaacuuuacuaug

SEQ ID NO: 3063239 - RNA, 22 nt, Human
ucaaacucuugaccucagguga

SEQ ID NO: 3063240 - RNA, 14 nt, Human
ucaaccuccugggc

SEQ ID NO: 3063241 - RNA, 13 nt, Human
ucaaccuccuggg

SEQ ID NO: 3063242 - RNA, 16 nt, Human
ucaagcgauucuucug

SEQ ID NO: 3063243 - RNA, 20 nt, Human
ucaaggauccugagccagau

SEQ ID NO: 3063244 - RNA, 21 nt, Human
ucaagugauucuccugccuca

SEQ ID NO: 3063245 - RNA, 17 nt, Human
ucaaggauccugagcca

SEQ ID NO: 3063246 - RNA, 22 nt, Human
ucaagugauucuccugccucag

SEQ ID NO: 3063247 - RNA, 18 nt, Human
ucaaggauccugagccag

SEQ ID NO: 3063248 - RNA, 19 nt, Human
ucaaggauccugagccaga

SEQ ID NO: 3063249 - RNA, 13 nt, Human
ucaauuacaggaa

SEQ ID NO: 3063250 - RNA, 18 nt, Human
ucaauuacaggaaguacu

SEQ ID NO: 3063251 - RNA, 18 nt, Human
ucaaugcacugacauugu

SEQ ID NO: 3063252 - RNA, 22 nt, Human
ucaaugccccugaauuuaaaua

SEQ ID NO: 3063253 - RNA, 14 nt, Human
ucaauaggaaaaac

SEQ ID NO: 3063254 - RNA, 14 nt, Human
ucaaugcacugaca

SEQ ID NO: 3063255 - RNA, 13 nt, Human
ucaauaggaaaaa

SEQ ID NO: 3063256 - RNA, 11 nt, Human
ucacaggcagg

SEQ ID NO: 3063257 - RNA, 23 nt, Human
ucacaggacagcccuucuuucca

SEQ ID NO: 3063258 - RNA, 14 nt, Human
ucacaggaaguaga

SEQ ID NO: 3063259 - RNA, 19 nt, Human
ucacaggaaguagaggagg

SEQ ID NO: 3063260 - RNA, 23 nt, Human
ucacacagugagucgaggacagg

SEQ ID NO: 3063261 - RNA, 22 nt, Human
ucacacagugagucgaggacag

SEQ ID NO: 3063262 - RNA, 21 nt, Human
ucacacaugagcaucaggcca

SEQ ID NO: 3063263 - RNA, 13 nt, Human
ucacacagugagu

SEQ ID NO: 3063264 - RNA, 22 nt, Human
ucacacaguauuacuucugcua

SEQ ID NO: 3063265 - RNA, 21 nt, Human
ucacacaguauuacuucugcu

SEQ ID NO: 3063266 - RNA, 19 nt, Human
ucaauuacaggaaguacug

SEQ ID NO: 3063267 - RNA, 17 nt, Human
ucagaaaauauuaugug

SEQ ID NO: 3063268 - RNA, 20 nt, Human
ucagaaaauauuauguguuu

SEQ ID NO: 3063269 - RNA, 19 nt, Human
ucagaaaauauuauguguu

SEQ ID NO: 3063270 - RNA, 18 nt, Human
ucacugcuuaacuucaca

SEQ ID NO: 3063271 - RNA, 17 nt, Human
ucacugcuuaacuucac

SEQ ID NO: 3063272 - RNA, 15 nt, Human
ucacugcuuaacuuc

SEQ ID NO: 3063273 - RNA, 16 nt, Human
ucacucugucgcccag

SEQ ID NO: 3063274 - RNA, 12 nt, Human
ucacucugucgc

SEQ ID NO: 3063275 - RNA, 19 nt, Human
ucacucugucgcccagucu

SEQ ID NO: 3063276 - RNA, 17 nt, Human
ucacuugucaauaaaau

SEQ ID NO: 3063277 - RNA, 22 nt, Human
ucagaguugaugguuguacaua

SEQ ID NO: 3063278 - RNA, 19 nt, Human
ucagcacgauuucuguuua

SEQ ID NO: 3063279 - RNA, 18 nt, Human
ucagcacgauuucuguuu

SEQ ID NO: 3063280 - RNA, 15 nt, Human
ucagacagcugccug

SEQ ID NO: 3063281 - RNA, 16 nt, Human
ucagacagcugccugg

SEQ ID NO: 3063282 - RNA, 17 nt, Human
ucagacagcugccuggg

SEQ ID NO: 3063283 - RNA, 18 nt, Human
ucagacagcugccuggga

SEQ ID NO: 3063284 - RNA, 19 nt, Human
ucagacagcugccugggau

SEQ ID NO: 3063285 - RNA, 20 nt, Human
ucagacagcugccugggauc

SEQ ID NO: 3063286 - RNA, 14 nt, Human
ucagacagcugccu

SEQ ID NO: 3063287 - RNA, 19 nt, Human
ucagacauagaauuaacac

SEQ ID NO: 3063288 - RNA, 22 nt, Human
ucagacauagaauuaacacaug

SEQ ID NO: 3063289 - RNA, 16 nt, Human
ucacgccacugcacua

SEQ ID NO: 3063290 - RNA, 14 nt, Human
ucacgccacugcac

SEQ ID NO: 3063291 - RNA, 13 nt, Human
ucacgccacugca

SEQ ID NO: 3063292 - RNA, 20 nt, Human
ucacgccuguaauccuagca

SEQ ID NO: 3063293 - RNA, 19 nt, Human
ucacgccuguaauccuagc

SEQ ID NO: 3063294 - RNA, 14 nt, Human
ucaccuuugucccc

SEQ ID NO: 3063295 - RNA, 15 nt, Human
ucaccuuugucccca

SEQ ID NO: 3063296 - RNA, 17 nt, Human
ucaccuuuguccccacc

SEQ ID NO: 3063297 - RNA, 18 nt, Human
ucaccuuuguccccaccg

SEQ ID NO: 3063298 - RNA, 22 nt, Human
ucaccuuuguccccaccgcaga

SEQ ID NO: 3063299 - RNA, 15 nt, Human
ucacaggcaggucca

SEQ ID NO: 3063300 - RNA, 12 nt, Human
ucacaggcaggu

SEQ ID NO: 3063301 - RNA, 19 nt, Human
ucacaggcagguccagggu

SEQ ID NO: 3063302 - RNA, 14 nt, Human
ucaccuuucccauc

SEQ ID NO: 3063303 - RNA, 12 nt, Human
ucaccuuugucc

SEQ ID NO: 3063304 - RNA, 14 nt, Human
ucacucuggcagcu

SEQ ID NO: 3063305 - RNA, 15 nt, Human
ucacucuggcagcuc

SEQ ID NO: 3063306 - RNA, 16 nt, Human
ucacucuggcagcuca

SEQ ID NO: 3063307 - RNA, 17 nt, Human
ucacucuggcagcucag

SEQ ID NO: 3063308 - RNA, 18 nt, Human
ucacucuggcagcucaga

SEQ ID NO: 3063309 - RNA, 19 nt, Human
ucacucuggcagcucagag

SEQ ID NO: 3063310 - RNA, 20 nt, Human
ucacucuggcagcucagaga

SEQ ID NO: 3063311 - RNA, 22 nt, Human
ucacucuggcagcucagagagg

SEQ ID NO: 3063312 - RNA, 12 nt, Human
ucacucuccuug

SEQ ID NO: 3063313 - RNA, 14 nt, Human
ucacucuccuuggu

SEQ ID NO: 3063314 - RNA, 12 nt, Human
ucacucuggcag

SEQ ID NO: 3063315 - RNA, 13 nt, Human
ucacucuggcagc

SEQ ID NO: 3063316 - RNA, 23 nt, Human
ucacucuccuuggugucgggcau

SEQ ID NO: 3063317 - RNA, 13 nt, Human
ucacuccuugaaa

SEQ ID NO: 3063318 - RNA, 20 nt, Human
ucacggcucacugcagccuc

SEQ ID NO: 3063319 - RNA, 15 nt, Human
ucacggcucacugca

SEQ ID NO: 3063320 - RNA, 13 nt, Human
ucacggcucacug

SEQ ID NO: 3063321 - RNA, 16 nt, Human
ucacggaagagccuug

SEQ ID NO: 3063322 - RNA, 17 nt, Human
ucacggaagagccuugc

SEQ ID NO: 3063323 - RNA, 14 nt, Human
ucacggaagagccu

SEQ ID NO: 3063324 - RNA, 14 nt, Human
uaaaagaugaaaau

SEQ ID NO: 3063325 - RNA, 21 nt, Human
uaaaagggacugagaaauuua

SEQ ID NO: 3063326 - RNA, 20 nt, Human
uaaaagggacugagaaauuu

SEQ ID NO: 3063327 - RNA, 19 nt, Human
uaaaagggacugagaaauu

SEQ ID NO: 3063328 - RNA, 17 nt, Human
uaaaagggacugagaaa

SEQ ID NO: 3063329 - RNA, 13 nt, Human
uaaaaugagaaau

SEQ ID NO: 3063330 - RNA, 16 nt, Human
uaaaaugagaaaucua

SEQ ID NO: 3063331 - RNA, 15 nt, Human
uaaaaugagaaaucu

SEQ ID NO: 3063332 - RNA, 19 nt, Human
uaaaauccauacauuugug

SEQ ID NO: 3063333 - RNA, 18 nt, Human
uaaaauccauacauuugu

SEQ ID NO: 3063334 - RNA, 21 nt, Human
uaaacacucuugaaaaaugca

SEQ ID NO: 3063335 - RNA, 23 nt, Human
uaaacaagaccacguuucuaaag

SEQ ID NO: 3063336 - RNA, 18 nt, Human
uaaacaagaccacguuuc

SEQ ID NO: 3063337 - RNA, 19 nt, Human
uaaacuuaaucuaaaugga

SEQ ID NO: 3063338 - RNA, 18 nt, Human
uaaacuuaaucuaaaugg

SEQ ID NO: 3063339 - RNA, 13 nt, Human
uaaacuuaaucua

SEQ ID NO: 3063340 - RNA, 14 nt, Human
uaaacuuaaucuaa

SEQ ID NO: 3063341 - RNA, 22 nt, Human
uaaacuuuaccuuuuuuauaca

SEQ ID NO: 3063342 - RNA, 16 nt, Human
uaaacuuuaccuuuuu

SEQ ID NO: 3063343 - RNA, 22 nt, Human
uaaauaaaccucaaaaugucua

SEQ ID NO: 3063344 - RNA, 18 nt, Human
uaaauauaugcuaagucu

SEQ ID NO: 3063345 - RNA, 22 nt, Human
uaaauauauuuuaagacgaaac

SEQ ID NO: 3063346 - RNA, 16 nt, Human
uaaauauauuuuaaga

SEQ ID NO: 3063347 - RNA, 20 nt, Human
uaaaucagacuaugaaguuu

SEQ ID NO: 3063348 - RNA, 19 nt, Human
uaaaucagccguguaacca

SEQ ID NO: 3063349 - RNA, 20 nt, Human
uaaacuuuuuucuuacuguc

SEQ ID NO: 3063350 - RNA, 14 nt, Human
uaaaggaauuuaaa

SEQ ID NO: 3063351 - RNA, 17 nt, Human
uaaauaaaaauaauccu

SEQ ID NO: 3063352 - RNA, 14 nt, Human
uaaaguuuguugaa

SEQ ID NO: 3063353 - RNA, 13 nt, Human
uaaaguuucuguu

SEQ ID NO: 3063354 - RNA, 20 nt, Human
uaaaguguauuuuuuuacua

SEQ ID NO: 3063355 - RNA, 23 nt, Human
uaaaguguauuuuuuuacuaaua

SEQ ID NO: 3063356 - RNA, 22 nt, Human
uaaaguguauuuuuuuacuaau

SEQ ID NO: 3063357 - RNA, 21 nt, Human
uaaaguguauuuuuuuacuaa

SEQ ID NO: 3063358 - RNA, 11 nt, Human
uaaaaaacacu

SEQ ID NO: 3063359 - RNA, 16 nt, Human
uaaaaaagaaacauuu

SEQ ID NO: 3063360 - RNA, 12 nt, Human
uaaaaaacacug

SEQ ID NO: 3063361 - RNA, 20 nt, Human
uaaaaaacugcugacuguuu

SEQ ID NO: 3063362 - RNA, 23 nt, Human
uaaaaaacugcugacuguuuucu

SEQ ID NO: 3063363 - RNA, 16 nt, Human
guuuucaguguacaug

SEQ ID NO: 3063364 - RNA, 18 nt, Human
guuuucaggcuagaugua

SEQ ID NO: 3063365 - RNA, 17 nt, Human
guuuucaguguacaugg

SEQ ID NO: 3063366 - RNA, 16 nt, Human
guuuucauuaucucaa

SEQ ID NO: 3063367 - RNA, 13 nt, Human
guuuuccugaaga

SEQ ID NO: 3063368 - RNA, 23 nt, Human
guuuuuauggcuuuugugcauua

SEQ ID NO: 3063369 - RNA, 22 nt, Human
guuuuuauggcuuuugugcauu

SEQ ID NO: 3063370 - RNA, 19 nt, Human
guuuuuauggcuuuugugc

SEQ ID NO: 3063371 - RNA, 12 nt, Human
guuuucucuuga

SEQ ID NO: 3063372 - RNA, 19 nt, Human
guuuucucuugagagggug

SEQ ID NO: 3063373 - RNA, 16 nt, Human
guuuaguaaucauauu

SEQ ID NO: 3063374 - RNA, 13 nt, Human
guuuagcaguaua

SEQ ID NO: 3063375 - RNA, 20 nt, Human
guuuaggauguugaaaaagu

SEQ ID NO: 3063376 - RNA, 15 nt, Human
guuuagauaauacac

SEQ ID NO: 3063377 - RNA, 13 nt, Human
guuuagaaagcuu

SEQ ID NO: 3063378 - RNA, 21 nt, Human
gguuggccccugcccggcugc

SEQ ID NO: 3063379 - RNA, 18 nt, Human
gguuggcaaaaaggcagg

SEQ ID NO: 3063380 - RNA, 16 nt, Human
guuuccuuauauuaug

SEQ ID NO: 3063381 - RNA, 21 nt, Human
guuuccuggcacugcuuccag

SEQ ID NO: 3063382 - RNA, 22 nt, Human
guuuccuggcacugcuuccagu

SEQ ID NO: 3063383 - RNA, 16 nt, Human
guuuccuggcacugcu

SEQ ID NO: 3063384 - RNA, 20 nt, Human
guuuccuggcacugcuucca

SEQ ID NO: 3063385 - RNA, 18 nt, Human
guuucagaaauguguuau

SEQ ID NO: 3063386 - RNA, 14 nt, Human
guuucagaaaugug

SEQ ID NO: 3063387 - RNA, 17 nt, Human
guuucuuuguaaugaaa

SEQ ID NO: 3063388 - RNA, 14 nt, Human
guuucuuuguaaug

SEQ ID NO: 3063389 - RNA, 16 nt, Human
guuugaaccaagaacu

SEQ ID NO: 3063390 - RNA, 18 nt, Human
guuugagaucagccuggg

SEQ ID NO: 3063391 - RNA, 14 nt, Human
guuucuaaagcugc

SEQ ID NO: 3063392 - RNA, 15 nt, Human
guuucuaaagcugcc

SEQ ID NO: 3063393 - RNA, 16 nt, Human
guuucuaaagcugcca

SEQ ID NO: 3063394 - RNA, 19 nt, Human
guuuguaaauuaacuuuua

SEQ ID NO: 3063395 - RNA, 17 nt, Human
guuuguaaauuaacuuu

SEQ ID NO: 3063396 - RNA, 19 nt, Human
guuugauuaaauucuugca

SEQ ID NO: 3063397 - RNA, 17 nt, Human
guuugauuaaauucuug

SEQ ID NO: 3063398 - RNA, 22 nt, Human
guuugauuaaauucuugcaaag

SEQ ID NO: 3063399 - RNA, 13 nt, Human
uaauuuuaagaaa

SEQ ID NO: 3063400 - RNA, 22 nt, Human
uaauuugugauacaaugcugug

SEQ ID NO: 3063401 - RNA, 19 nt, Human
uaauuugugauacaaugcu

SEQ ID NO: 3063402 - RNA, 18 nt, Human
uaauuugugauacaaugc

SEQ ID NO: 3063403 - RNA, 15 nt, Human
uaauuugugauacaa

SEQ ID NO: 3063404 - RNA, 14 nt, Human
uaauuugugauaca

SEQ ID NO: 3063405 - RNA, 23 nt, Human
uaauuuguaguguuggagaagaa

SEQ ID NO: 3063406 - RNA, 15 nt, Human
uaauuugguuuucac

SEQ ID NO: 3063407 - RNA, 17 nt, Human
uaauuugguuuucacau

SEQ ID NO: 3063408 - RNA, 18 nt, Human
uaauuugguuuucacauu

SEQ ID NO: 3063409 - RNA, 20 nt, Human
uaauuuguaguguuggagaa

SEQ ID NO: 3063410 - RNA, 22 nt, Human
uaauuggaaaggcagcucuaaa

SEQ ID NO: 3063411 - RNA, 23 nt, Human
uaauuaaauuuugaguucuacau

SEQ ID NO: 3063412 - RNA, 17 nt, Human
uaauuaaaacacaacau

SEQ ID NO: 3063413 - RNA, 20 nt, Human
uaauuaaaagaauauuuuaa

SEQ ID NO: 3063414 - RNA, 20 nt, Human
uaauuaaguacuauguauca

SEQ ID NO: 3063415 - RNA, 14 nt, Human
uaaugcgugcauac

SEQ ID NO: 3063416 - RNA, 14 nt, Human
uaauguuucaaaca

SEQ ID NO: 3063417 - RNA, 15 nt, Human
uaauguuucaaacau

SEQ ID NO: 3063418 - RNA, 20 nt, Human
uaauugacaggauuauugga

SEQ ID NO: 3063419 - RNA, 22 nt, Human
uaauugacaggauuauuggaaa

SEQ ID NO: 3063420 - RNA, 18 nt, Human
uaauucuuagcucauucu

SEQ ID NO: 3063421 - RNA, 19 nt, Human
uaaugauaaguaaaugcua

SEQ ID NO: 3063422 - RNA, 23 nt, Human
uaaugauaacuggaaacuucagc

SEQ ID NO: 3063423 - RNA, 19 nt, Human
uaaugccacuaaauugaca

SEQ ID NO: 3063424 - RNA, 11 nt, Human
uaaucuaaaug

SEQ ID NO: 3063425 - RNA, 14 nt, Human
uaauauauuuccau

SEQ ID NO: 3063426 - RNA, 20 nt, Human
uaauccucuaggaggucucu

SEQ ID NO: 3063427 - RNA, 15 nt, Human
uaauaacugugaagu

SEQ ID NO: 3063428 - RNA, 19 nt, Human
uaauaaauauuuuugccau

SEQ ID NO: 3063429 - RNA, 21 nt, Human
uaauaguucagguaacaggca

SEQ ID NO: 3063430 - RNA, 15 nt, Human
uaauaauguuucaaa

SEQ ID NO: 3063431 - RNA, 14 nt, Human
uaauaauguuucaa

SEQ ID NO: 3063432 - RNA, 15 nt, Human
uaagcaugcacaaau

SEQ ID NO: 3063433 - RNA, 20 nt, Human
uaagcauuccaacuaucuca

SEQ ID NO: 3063434 - RNA, 16 nt, Human
uaagcauuccaacuau

SEQ ID NO: 3063435 - RNA, 18 nt, Human
uaagcauuccaacuaucu

SEQ ID NO: 3063436 - RNA, 13 nt, Human
uaagccagacauc

SEQ ID NO: 3063437 - RNA, 15 nt, Human
uaaggcaaucauggu

SEQ ID NO: 3063438 - RNA, 14 nt, Human
uaaggcaaucaugg

SEQ ID NO: 3063439 - RNA, 18 nt, Human
uaaggaugcuuguacaua

SEQ ID NO: 3063440 - RNA, 23 nt, Human
uaaggaugcuuguacauaaugcg

SEQ ID NO: 3063441 - RNA, 22 nt, Human
uaaggaugcuuguacauaaugc

SEQ ID NO: 3063442 - RNA, 21 nt, Human
uaaggaugcuuguacauaaug

SEQ ID NO: 3063443 - RNA, 20 nt, Human
uaaggaugcuuguacauaau

SEQ ID NO: 3063444 - RNA, 19 nt, Human
uaaggaugcuuguacauaa

SEQ ID NO: 3063445 - RNA, 20 nt, Human
uaagccagacaucaacagau

SEQ ID NO: 3063446 - RNA, 21 nt, Human
uaagccagacaucaacagaua

SEQ ID NO: 3063447 - RNA, 12 nt, Human
uaagagggaggg

SEQ ID NO: 3063448 - RNA, 22 nt, Human
uaagagggagggagggcuccag

SEQ ID NO: 3063449 - RNA, 23 nt, Human
uaagagggagggagggcuccaga

SEQ ID NO: 3063450 - RNA, 23 nt, Human
uaagagggauuagggagagaaga

SEQ ID NO: 3063451 - RNA, 14 nt, Human
uaagauaaaugugc

SEQ ID NO: 3063452 - RNA, 17 nt, Human
uaagauaaaugugcuga

SEQ ID NO: 3063453 - RNA, 16 nt, Human
uaagauaaaugugcug

SEQ ID NO: 3063454 - RNA, 24 nt, Human
uaagaaagacuaucuaaauguuga

SEQ ID NO: 3063455 - RNA, 19 nt, Human
uaacuuuuauaaacuuuac

SEQ ID NO: 3063456 - RNA, 22 nt, Human
uaacuuuuauaaacuuuaccuu

SEQ ID NO: 3063457 - RNA, 21 nt, Human
uaacuuuuauaaacuuuaccu

SEQ ID NO: 3063458 - RNA, 22 nt, Human
uaagaaccuuuugagugccuua

SEQ ID NO: 3063459 - RNA, 22 nt, Human
uaagaggcagggucucacucug

SEQ ID NO: 3063460 - RNA, 17 nt, Human
uaagagagucuauuuac

SEQ ID NO: 3063461 - RNA, 23 nt, Human
uaagagagaaugagagacacacu

SEQ ID NO: 3063462 - RNA, 13 nt, Human
uaacagaaaugua

SEQ ID NO: 3063463 - RNA, 15 nt, Human
uaacagaaauguaca

SEQ ID NO: 3063464 - RNA, 14 nt, Human
uaacagaaauguac

SEQ ID NO: 3063465 - RNA, 12 nt, Human
uaacagaaaugu

SEQ ID NO: 3063466 - RNA, 23 nt, Human
uaaauugacacuuaaaaaugguu

SEQ ID NO: 3063467 - RNA, 14 nt, Human
uaaauuuaguauuu

SEQ ID NO: 3063468 - RNA, 19 nt, Human
uaacaaugcuguauuuuaa

SEQ ID NO: 3063469 - RNA, 20 nt, Human
uaacuuuuauaaacuuuacc

SEQ ID NO: 3063470 - RNA, 14 nt, Human
uaaccagcagaaau

SEQ ID NO: 3063471 - RNA, 19 nt, Human
uaaccagcagaaaugccuu

SEQ ID NO: 3063472 - RNA, 16 nt, Human
uaaccagcagaaaugc

SEQ ID NO: 3063473 - RNA, 19 nt, Human
uaacaggcagauacaggaa

SEQ ID NO: 3063474 - RNA, 21 nt, Human
uacuugcucuugaugccuggc

SEQ ID NO: 3063475 - RNA, 20 nt, Human
uacuugcucuugaugccugg

SEQ ID NO: 3063476 - RNA, 14 nt, Human
uacuuguggacaca

SEQ ID NO: 3063477 - RNA, 18 nt, Human
uacuuguggacacagcuc

SEQ ID NO: 3063478 - RNA, 15 nt, Human
uacuuguggacacag

SEQ ID NO: 3063479 - RNA, 19 nt, Human
uacuuguggacacagcucu

SEQ ID NO: 3063480 - RNA, 21 nt, Human
uacuguaucaugacaaagacu

SEQ ID NO: 3063481 - RNA, 17 nt, Human
uagaacagauaaucagu

SEQ ID NO: 3063482 - RNA, 23 nt, Human
uagaaauaucugaaaauguaugu

SEQ ID NO: 3063483 - RNA, 21 nt, Human
uagaaauaucugaaaauguau

SEQ ID NO: 3063484 - RNA, 20 nt, Human
uagaaauaucugaaaaugua

SEQ ID NO: 3063485 - RNA, 15 nt, Human
uagaaauauaauuga

SEQ ID NO: 3063486 - RNA, 19 nt, Human
uaccuuugacaaagguaaa

SEQ ID NO: 3063487 - RNA, 20 nt, Human
uaccuuuguauucucuccug

SEQ ID NO: 3063488 - RNA, 20 nt, Human
uaccuuuuuuauacauaaac

SEQ ID NO: 3063489 - RNA, 19 nt, Human
uaccuuuuuuauacauaaa

SEQ ID NO: 3063490 - RNA, 18 nt, Human
uaccuuuuuuauacauaa

SEQ ID NO: 3063491 - RNA, 22 nt, Human
uacccaucccauaugccugggc

SEQ ID NO: 3063492 - RNA, 23 nt, Human
uacgaagaguauuuuugacagaa

SEQ ID NO: 3063493 - RNA, 20 nt, Human
uacgaagaguauuuuugaca

SEQ ID NO: 3063494 - RNA, 22 nt, Human
uacgaagaguauuuuugacaga

SEQ ID NO: 3063495 - RNA, 17 nt, Human
uacuaaccagcagaaau

SEQ ID NO: 3063496 - RNA, 18 nt, Human
uacuaaccagcagaaaug

SEQ ID NO: 3063497 - RNA, 19 nt, Human
uacuaaccagcagaaaugc

SEQ ID NO: 3063498 - RNA, 22 nt, Human
uacuaauaaaauuuaaaagucu

SEQ ID NO: 3063499 - RNA, 17 nt, Human
uacuaauagacaauuua

SEQ ID NO: 3063500 - RNA, 15 nt, Human
uacuaauagacaauu

SEQ ID NO: 3063501 - RNA, 12 nt, Human
uacuacaguccu

SEQ ID NO: 3063502 - RNA, 17 nt, Human
uacuacaguccucccau

SEQ ID NO: 3063503 - RNA, 20 nt, Human
uacuacaguuuguuaguaug

SEQ ID NO: 3063504 - RNA, 14 nt, Human
uacucaccucaccc

SEQ ID NO: 3063505 - RNA, 12 nt, Human
uacucaccucac

SEQ ID NO: 3063506 - RNA, 22 nt, Human
uacucagaauucucuaguuuga

SEQ ID NO: 3063507 - RNA, 16 nt, Human
uacucagaauucucua

SEQ ID NO: 3063508 - RNA, 15 nt, Human
uacugaggugcuaug

SEQ ID NO: 3063509 - RNA, 19 nt, Human
uacugagagugaacaaauu

SEQ ID NO: 3063510 - RNA, 23 nt, Human
uacugauguuccuagugaaagag

SEQ ID NO: 3063511 - RNA, 12 nt, Human
uacucccaucug

SEQ ID NO: 3063512 - RNA, 14 nt, Human
uacucccaucugug

SEQ ID NO: 3063513 - RNA, 16 nt, Human
uacucccaucugugaa

SEQ ID NO: 3063514 - RNA, 17 nt, Human
uacucccaucugugaaa

SEQ ID NO: 3063515 - RNA, 23 nt, Human
uacauuuggagacacaacuauuu

SEQ ID NO: 3063516 - RNA, 16 nt, Human
uacauuuguauaaaau

SEQ ID NO: 3063517 - RNA, 17 nt, Human
uacauuuguauaaaaua

SEQ ID NO: 3063518 - RNA, 11 nt, Human
uacauuugugu

SEQ ID NO: 3063519 - RNA, 21 nt, Human
uacaugagguacugagaguga

SEQ ID NO: 3063520 - RNA, 22 nt, Human
uacaugagguacugagagugaa

SEQ ID NO: 3063521 - RNA, 16 nt, Human
uaccaacacgagcagg

SEQ ID NO: 3063522 - RNA, 19 nt, Human
uacaguuacucagaauucu

SEQ ID NO: 3063523 - RNA, 23 nt, Human
uacaguuacucagaauucucuag

SEQ ID NO: 3063524 - RNA, 19 nt, Human
uacauaagauaaaugugcu

SEQ ID NO: 3063525 - RNA, 18 nt, Human
uacauaagauaaaugugc

SEQ ID NO: 3063526 - RNA, 22 nt, Human
uacauaagauaaaugugcugaa

SEQ ID NO: 3063527 - RNA, 20 nt, Human
uacaucccuuaccugggaaa

SEQ ID NO: 3063528 - RNA, 22 nt, Human
uacccaggugcuaggaacacuc

SEQ ID NO: 3063529 - RNA, 18 nt, Human
uacccagcgagcccuggu

SEQ ID NO: 3063530 - RNA, 16 nt, Human
uacccagcgagcccug

SEQ ID NO: 3063531 - RNA, 14 nt, Human
uacccacugcucug

SEQ ID NO: 3063532 - RNA, 13 nt, Human
uacccacugcucu

SEQ ID NO: 3063533 - RNA, 12 nt, Human
uacccacugcuc

SEQ ID NO: 3063534 - RNA, 11 nt, Human
uacccacugcu

SEQ ID NO: 3063535 - RNA, 17 nt, Human
uacccacccccacccaa

SEQ ID NO: 3063536 - RNA, 19 nt, Human
uacccacccccacccaagg

SEQ ID NO: 3063537 - RNA, 23 nt, Human
uacccacccccacccaagggccu

SEQ ID NO: 3063538 - RNA, 12 nt, Human
uacccaccccca

SEQ ID NO: 3063539 - RNA, 15 nt, Human
uacccacccccaccc

SEQ ID NO: 3063540 - RNA, 15 nt, Human
uacccaaauuaagag

SEQ ID NO: 3063541 - RNA, 23 nt, Human
uaccauuuugggguacccacugc

SEQ ID NO: 3063542 - RNA, 23 nt, Human
uaccacaggaaccacaagacugc

SEQ ID NO: 3063543 - RNA, 13 nt, Human
uaccacagacaua

SEQ ID NO: 3063544 - RNA, 21 nt, Human
uacagcuugaccgugaggcca

SEQ ID NO: 3063545 - RNA, 22 nt, Human
uacagcuugaccgugaggccag

SEQ ID NO: 3063546 - RNA, 18 nt, Human
uacaggaaaagcugcuga

SEQ ID NO: 3063547 - RNA, 17 nt, Human
uacaggaaaagcugcug

SEQ ID NO: 3063548 - RNA, 23 nt, Human
uacagcuugaccgugaggccaga

SEQ ID NO: 3063549 - RNA, 14 nt, Human
uacaggauuugaaa

SEQ ID NO: 3063550 - RNA, 16 nt, Human
uacaggcacccaccau

SEQ ID NO: 3063551 - RNA, 19 nt, Human
uacaggaaaagcugcugac

SEQ ID NO: 3063552 - RNA, 24 nt, Human
uacagcaaggagauuuacaacugg

SEQ ID NO: 3063553 - RNA, 13 nt, Human
uacacuuuaugca

SEQ ID NO: 3063554 - RNA, 18 nt, Human
uacagaaaaguugaauuu

SEQ ID NO: 3063555 - RNA, 22 nt, Human
uacagaaaaguugaauuuuaca

SEQ ID NO: 3063556 - RNA, 18 nt, Human
uacacuguuucaaacuuu

SEQ ID NO: 3063557 - RNA, 17 nt, Human
uacacuguuucaaacuu

SEQ ID NO: 3063558 - RNA, 19 nt, Human
uacacuguuucaaacuuua

SEQ ID NO: 3063559 - RNA, 17 nt, Human
uaauuuugaaaaacugc

SEQ ID NO: 3063560 - RNA, 13 nt, Human
uaauuuugaaaaa

SEQ ID NO: 3063561 - RNA, 17 nt, Human
uacacacugcauguuug

SEQ ID NO: 3063562 - RNA, 15 nt, Human
uacacacacauacac

SEQ ID NO: 3063563 - RNA, 21 nt, Human
uacacacacacgcgugcacac

SEQ ID NO: 3063564 - RNA, 21 nt, Human
uacacaaugguuuucuugugu

SEQ ID NO: 3063565 - RNA, 17 nt, Human
uacacaaugguuuucuu

SEQ ID NO: 3063566 - RNA, 14 nt, Human
uacacuguuucaaa

SEQ ID NO: 3063567 - RNA, 16 nt, Human
uacacugugcugaguc

SEQ ID NO: 3063568 - RNA, 22 nt, Human
uacacacugcauguuugugauu

SEQ ID NO: 3063569 - RNA, 21 nt, Human
uaggaacuuaaauaaugugaa

SEQ ID NO: 3063570 - RNA, 17 nt, Human
uaggaacacuccuucac

SEQ ID NO: 3063571 - RNA, 13 nt, Human
uaggaacacuccu

SEQ ID NO: 3063572 - RNA, 14 nt, Human
uaggaacacuccuu

SEQ ID NO: 3063573 - RNA, 16 nt, Human
uaggaagacuuuggaa

SEQ ID NO: 3063574 - RNA, 17 nt, Human
uaggaagacuuuggaaa

SEQ ID NO: 3063575 - RNA, 14 nt, Human
uaggaagacuuugg

SEQ ID NO: 3063576 - RNA, 15 nt, Human
uaggaagacuuugga

SEQ ID NO: 3063577 - RNA, 13 nt, Human
uaggaagacuuug

SEQ ID NO: 3063578 - RNA, 14 nt, Human
uaggaauuguguuu

SEQ ID NO: 3063579 - RNA, 23 nt, Human
uaggaauugacccacaagaaaug

SEQ ID NO: 3063580 - RNA, 20 nt, Human
uaggaauugacccacaagaa

SEQ ID NO: 3063581 - RNA, 15 nt, Human
uaggaagguuaaugu

SEQ ID NO: 3063582 - RNA, 14 nt, Human
uaggccuggccaga

SEQ ID NO: 3063583 - RNA, 13 nt, Human
uaggccuggccag

SEQ ID NO: 3063584 - RNA, 13 nt, Human
uaggccaugggac

SEQ ID NO: 3063585 - RNA, 16 nt, Human
uagccuaggugacaga

SEQ ID NO: 3063586 - RNA, 14 nt, Human
uagcccaaaaccaa

SEQ ID NO: 3063587 - RNA, 21 nt, Human
uagcucuaggagggcuggcaa

SEQ ID NO: 3063588 - RNA, 17 nt, Human
uagccugccucuucucu

SEQ ID NO: 3063589 - RNA, 22 nt, Human
uagcucauucuccuuguguuac

SEQ ID NO: 3063590 - RNA, 19 nt, Human
uagcugggacuacaggcac

SEQ ID NO: 3063591 - RNA, 20 nt, Human
uagcugggacuacaggcacc

SEQ ID NO: 3063592 - RNA, 18 nt, Human
uagcugggacuacaggug

SEQ ID NO: 3063593 - RNA, 11 nt, Human
uagcugggacu

SEQ ID NO: 3063594 - RNA, 16 nt, Human
uagauguauguacuuc

SEQ ID NO: 3063595 - RNA, 20 nt, Human
uagauguauguacuucaugc

SEQ ID NO: 3063596 - RNA, 18 nt, Human
uagauaauacaccacuac

SEQ ID NO: 3063597 - RNA, 12 nt, Human
uagauguauaua

SEQ ID NO: 3063598 - RNA, 16 nt, Human
uagcacuuugggaggc

SEQ ID NO: 3063599 - RNA, 23 nt, Human
uagcagagaaugaaagggcccag

SEQ ID NO: 3063600 - RNA, 19 nt, Human
uagcagagaaugaaagggc

SEQ ID NO: 3063601 - RNA, 20 nt, Human
uagcagggcauggcugggaa

SEQ ID NO: 3063602 - RNA, 17 nt, Human
uagaguuuagcuggaaa

SEQ ID NO: 3063603 - RNA, 18 nt, Human
uagaguuuagcuggaaaa

SEQ ID NO: 3063604 - RNA, 16 nt, Human
uagagagagaccacuu

SEQ ID NO: 3063605 - RNA, 16 nt, Human
uagagguucaaagaua

SEQ ID NO: 3063606 - RNA, 19 nt, Human
uagagguucaaagauauuu

SEQ ID NO: 3063607 - RNA, 21 nt, Human
uagagguucaaagauauuuug

SEQ ID NO: 3063608 - RNA, 11 nt, Human
uagagacaggg

SEQ ID NO: 3063609 - RNA, 22 nt, Human
uaucaugugaaaucauucauuu

SEQ ID NO: 3063610 - RNA, 17 nt, Human
uaucaugugaaaucauu

SEQ ID NO: 3063611 - RNA, 15 nt, Human
uaucuaaauguugaa

SEQ ID NO: 3063612 - RNA, 16 nt, Human
uaucgucacugcuuaa

SEQ ID NO: 3063613 - RNA, 19 nt, Human
uaucgucacugcuuaacuu

SEQ ID NO: 3063614 - RNA, 16 nt, Human
uaucaugacaaagacu

SEQ ID NO: 3063615 - RNA, 20 nt, Human
uauauuuauuacuguaagaa

SEQ ID NO: 3063616 - RNA, 23 nt, Human
uauauuuauuacuguaagaaaau

SEQ ID NO: 3063617 - RNA, 14 nt, Human
uauauuuuaagacg

SEQ ID NO: 3063618 - RNA, 13 nt, Human
uauauuuuaagac

SEQ ID NO: 3063619 - RNA, 14 nt, Human
uauauuugaaauau

SEQ ID NO: 3063620 - RNA, 13 nt, Human
uauauuugaaaua

SEQ ID NO: 3063621 - RNA, 18 nt, Human
uauauaaguauucuaaau

SEQ ID NO: 3063622 - RNA, 16 nt, Human
uauacccagaaaguua

SEQ ID NO: 3063623 - RNA, 20 nt, Human
uauaauucacauuguauuca

SEQ ID NO: 3063624 - RNA, 21 nt, Human
uauaauucagaaggaucuuca

SEQ ID NO: 3063625 - RNA, 17 nt, Human
uauaauucuacuuugag

SEQ ID NO: 3063626 - RNA, 20 nt, Human
uauaauguaagcucuacuga

SEQ ID NO: 3063627 - RNA, 19 nt, Human
uauaauguaagcucuacug

SEQ ID NO: 3063628 - RNA, 14 nt, Human
uauaauguaagcuc

SEQ ID NO: 3063629 - RNA, 21 nt, Human
uaguuugauuaaauucuugca

SEQ ID NO: 3063630 - RNA, 20 nt, Human
uauaaugaaugaaacauuuu

SEQ ID NO: 3063631 - RNA, 18 nt, Human
uauaaugaaugaaacauu

SEQ ID NO: 3063632 - RNA, 18 nt, Human
uagucaaauugugugaaa

SEQ ID NO: 3063633 - RNA, 14 nt, Human
uagucaaauugugu

SEQ ID NO: 3063634 - RNA, 15 nt, Human
uaguggauguucuga

SEQ ID NO: 3063635 - RNA, 12 nt, Human
uaguuugcaguu

SEQ ID NO: 3063636 - RNA, 23 nt, Human
uaguuugauuaaauucuugcaaa

SEQ ID NO: 3063637 - RNA, 13 nt, Human
uaguuucuccaag

SEQ ID NO: 3063638 - RNA, 21 nt, Human
uaguuguaccgcaaugugacu

SEQ ID NO: 3063639 - RNA, 17 nt, Human
gggugcugggccccugc

SEQ ID NO: 3063640 - RNA, 22 nt, Human
ggguucaagcgauucuucugcu

SEQ ID NO: 3063641 - RNA, 23 nt, Human
ggguucaagcgauucuucugcuu

SEQ ID NO: 3063642 - RNA, 12 nt, Human
ggguucuaccca

SEQ ID NO: 3063643 - RNA, 17 nt, Human
gggugaagugaagacaa

SEQ ID NO: 3063644 - RNA, 19 nt, Human
gggugacagagcaagugag

SEQ ID NO: 3063645 - RNA, 15 nt, Human
ggucccaccccacac

SEQ ID NO: 3063646 - RNA, 16 nt, Human
ggucccaccccacaca

SEQ ID NO: 3063647 - RNA, 11 nt, Human
ggucagagccu

SEQ ID NO: 3063648 - RNA, 13 nt, Human
gguacccacugcu

SEQ ID NO: 3063649 - RNA, 11 nt, Human
gguacccacug

SEQ ID NO: 3063650 - RNA, 22 nt, Human
gguagaaauaucugaaaaugua

SEQ ID NO: 3063651 - RNA, 17 nt, Human
gguacuuguggacacag

SEQ ID NO: 3063652 - RNA, 16 nt, Human
gguacuuguggacaca

SEQ ID NO: 3063653 - RNA, 23 nt, Human
gguagaaauaucugaaaauguau

SEQ ID NO: 3063654 - RNA, 22 nt, Human
gguagaagcccuucuaccuucc

SEQ ID NO: 3063655 - RNA, 18 nt, Human
gguagcauuuguguugaa

SEQ ID NO: 3063656 - RNA, 18 nt, Human
ggggugcugggccccugc

SEQ ID NO: 3063657 - RNA, 12 nt, Human
gggguggccucc

SEQ ID NO: 3063658 - RNA, 20 nt, Human
gggguggggggggugcuggg

SEQ ID NO: 3063659 - RNA, 17 nt, Human
gggguggggaccucagg

SEQ ID NO: 3063660 - RNA, 22 nt, Human
gggggaggugggauccuccagg

SEQ ID NO: 3063661 - RNA, 19 nt, Human
ggggcugaggugggaggau

SEQ ID NO: 3063662 - RNA, 12 nt, Human
ggggcugcaccg

SEQ ID NO: 3063663 - RNA, 21 nt, Human
ggggcugcaccggcuggccug

SEQ ID NO: 3063664 - RNA, 22 nt, Human
ggggcugcaccggcuggccugg

SEQ ID NO: 3063665 - RNA, 17 nt, Human
ggguaagugagagaggg

SEQ ID NO: 3063666 - RNA, 14 nt, Human
gggucucacucugu

SEQ ID NO: 3063667 - RNA, 12 nt, Human
gggucucacucu

SEQ ID NO: 3063668 - RNA, 21 nt, Human
gggucugaggaauccagaccc

SEQ ID NO: 3063669 - RNA, 12 nt, Human
gggucugaggaa

SEQ ID NO: 3063670 - RNA, 21 nt, Human
ggggaaaaucagccugcucca

SEQ ID NO: 3063671 - RNA, 22 nt, Human
gggcuuggggaccagagcugcc

SEQ ID NO: 3063672 - RNA, 17 nt, Human
ggggaaaaucagccugc

SEQ ID NO: 3063673 - RNA, 19 nt, Human
ggggaaaaucagccugcuc

SEQ ID NO: 3063674 - RNA, 16 nt, Human
ggggaaaaucagccug

SEQ ID NO: 3063675 - RNA, 13 nt, Human
ggggcagugcuca

SEQ ID NO: 3063676 - RNA, 16 nt, Human
ggggcaacccugguga

SEQ ID NO: 3063677 - RNA, 17 nt, Human
ggggcagugcucaccca

SEQ ID NO: 3063678 - RNA, 20 nt, Human
ggggcagugcucacccacac

SEQ ID NO: 3063679 - RNA, 17 nt, Human
ggggcugaggugggagg

SEQ ID NO: 3063680 - RNA, 20 nt, Human
ggggcucccagccaggcccu

SEQ ID NO: 3063681 - RNA, 13 nt, Human
ggggcucccagcc

SEQ ID NO: 3063682 - RNA, 16 nt, Human
ggggcucccagccagg

SEQ ID NO: 3063683 - RNA, 12 nt, Human
ggggcucccagc

SEQ ID NO: 3063684 - RNA, 21 nt, Human
ggugaccucugccugaaguca

SEQ ID NO: 3063685 - RNA, 22 nt, Human
ggugaccagcaccaucucuccu

SEQ ID NO: 3063686 - RNA, 14 nt, Human
ggucugacccacug

SEQ ID NO: 3063687 - RNA, 21 nt, Human
ggugacagagugagacucugu

SEQ ID NO: 3063688 - RNA, 17 nt, Human
ggucccaccccacacac

SEQ ID NO: 3063689 - RNA, 14 nt, Human
ggucccaccccaca

SEQ ID NO: 3063690 - RNA, 23 nt, Human
ggucucacucugucgcccagucu

SEQ ID NO: 3063691 - RNA, 22 nt, Human
ggucucacucugucgcccaguc

SEQ ID NO: 3063692 - RNA, 16 nt, Human
ggucucacucugucgc

SEQ ID NO: 3063693 - RNA, 16 nt, Human
ggugcuaucuccccca

SEQ ID NO: 3063694 - RNA, 17 nt, Human
ggugcuaucucccccag

SEQ ID NO: 3063695 - RNA, 19 nt, Human
ggugcuaucucccccagcc

SEQ ID NO: 3063696 - RNA, 20 nt, Human
ggugcuaucucccccagccc

SEQ ID NO: 3063697 - RNA, 23 nt, Human
ggugcuacaaaaacacagcaagg

SEQ ID NO: 3063698 - RNA, 21 nt, Human
ggugcuacaaaaacacagcaa

SEQ ID NO: 3063699 - RNA, 16 nt, Human
ggugagaggggaacag

SEQ ID NO: 3063700 - RNA, 15 nt, Human
ggugagaagcagagg

SEQ ID NO: 3063701 - RNA, 23 nt, Human
gguggccucccaacucaccccag

SEQ ID NO: 3063702 - RNA, 22 nt, Human
gguggccucccaacucacccca

SEQ ID NO: 3063703 - RNA, 16 nt, Human
gguggcagugggagcu

SEQ ID NO: 3063704 - RNA, 22 nt, Human
gguggcagugggagcugccugu

SEQ ID NO: 3063705 - RNA, 19 nt, Human
gguggcagugggagcugcc

SEQ ID NO: 3063706 - RNA, 15 nt, Human
ggugcugccauccag

SEQ ID NO: 3063707 - RNA, 21 nt, Human
gguucaaagauauuuugcuuu

SEQ ID NO: 3063708 - RNA, 13 nt, Human
gguucaaagauau

SEQ ID NO: 3063709 - RNA, 13 nt, Human
gguugagguuuca

SEQ ID NO: 3063710 - RNA, 21 nt, Human
gguuacccaguuagcucucaa

SEQ ID NO: 3063711 - RNA, 17 nt, Human
gguuaggcauuguggga

SEQ ID NO: 3063712 - RNA, 13 nt, Human
gguuauggagagg

SEQ ID NO: 3063713 - RNA, 21 nt, Human
ggugguuauggagaggguguc

SEQ ID NO: 3063714 - RNA, 18 nt, Human
ggugguuucagaaaugug

SEQ ID NO: 3063715 - RNA, 17 nt, Human
ggugguuucagaaaugu

SEQ ID NO: 3063716 - RNA, 18 nt, Human
ggugguuuucuguucuuu

SEQ ID NO: 3063717 - RNA, 15 nt, Human
ggugguuuucuguuc

SEQ ID NO: 3063718 - RNA, 17 nt, Human
ggugucaagagggucug

SEQ ID NO: 3063719 - RNA, 19 nt, Human
ggugucaagagggucugag

SEQ ID NO: 3063720 - RNA, 19 nt, Human
ggugucaccugaagacuca

SEQ ID NO: 3063721 - RNA, 16 nt, Human
gguggugaccucugcc

SEQ ID NO: 3063722 - RNA, 15 nt, Human
gguggugaccucugc

SEQ ID NO: 3063723 - RNA, 14 nt, Human
gguggugaccucug

SEQ ID NO: 3063724 - RNA, 20 nt, Human
gggcagugcucacccacacc

SEQ ID NO: 3063725 - RNA, 12 nt, Human
gggcaugacacg

SEQ ID NO: 3063726 - RNA, 19 nt, Human
gggccaccgccuugcccag

SEQ ID NO: 3063727 - RNA, 23 nt, Human
gggccacagagaaaguacuucuc

SEQ ID NO: 3063728 - RNA, 16 nt, Human
gggccacagagaaagu

SEQ ID NO: 3063729 - RNA, 17 nt, Human
gggcccagagagggugg

SEQ ID NO: 3063730 - RNA, 21 nt, Human
gggccccugccucucugcagg

SEQ ID NO: 3063731 - RNA, 19 nt, Human
gggccccugccucucugca

SEQ ID NO: 3063732 - RNA, 18 nt, Human
gggccccugccucucugc

SEQ ID NO: 3063733 - RNA, 17 nt, Human
gggccccugccucucug

SEQ ID NO: 3063734 - RNA, 15 nt, Human
gggccccugccucuc

SEQ ID NO: 3063735 - RNA, 13 nt, Human
gggccccugccuc

SEQ ID NO: 3063736 - RNA, 22 nt, Human
gggccccugccucucugcaggu

SEQ ID NO: 3063737 - RNA, 13 nt, Human
gggcccugccucc

SEQ ID NO: 3063738 - RNA, 13 nt, Human
gggccuggccuga

SEQ ID NO: 3063739 - RNA, 12 nt, Human
gggccuggccug

SEQ ID NO: 3063740 - RNA, 14 nt, Human
gggccuggccugag

SEQ ID NO: 3063741 - RNA, 18 nt, Human
gggccuggccugagcugg

SEQ ID NO: 3063742 - RNA, 17 nt, Human
gggccuggcucaggugg

SEQ ID NO: 3063743 - RNA, 13 nt, Human
gggccuggcuccc

SEQ ID NO: 3063744 - RNA, 13 nt, Human
gggauagagagag

SEQ ID NO: 3063745 - RNA, 21 nt, Human
gggauaugauuuaaaucagcc

SEQ ID NO: 3063746 - RNA, 15 nt, Human
gggauccuccaggug

SEQ ID NO: 3063747 - RNA, 16 nt, Human
gggauccuccaggugc

SEQ ID NO: 3063748 - RNA, 18 nt, Human
gggcaacccuggugacca

SEQ ID NO: 3063749 - RNA, 20 nt, Human
gggcaacccccagccugcua

SEQ ID NO: 3063750 - RNA, 23 nt, Human
gggauccuggaguucugguuccu

SEQ ID NO: 3063751 - RNA, 14 nt, Human
gggagugagcuggu

SEQ ID NO: 3063752 - RNA, 11 nt, Human
gggagugagcu

SEQ ID NO: 3063753 - RNA, 18 nt, Human
gggagugacagaggcagc

SEQ ID NO: 3063754 - RNA, 17 nt, Human
gggagugacagaggcag

SEQ ID NO: 3063755 - RNA, 13 nt, Human
gggacugagaaau

SEQ ID NO: 3063756 - RNA, 17 nt, Human
gggaggugggauccucc

SEQ ID NO: 3063757 - RNA, 16 nt, Human
gggaggugaccccagg

SEQ ID NO: 3063758 - RNA, 17 nt, Human
gggcagguugguggggg

SEQ ID NO: 3063759 - RNA, 11 nt, Human
gggcagagcag

SEQ ID NO: 3063760 - RNA, 18 nt, Human
gggcagaaggaagacuuc

SEQ ID NO: 3063761 - RNA, 14 nt, Human
gggcagaaggaaga

SEQ ID NO: 3063762 - RNA, 20 nt, Human
gggcacucagaagacacuga

SEQ ID NO: 3063763 - RNA, 23 nt, Human
gggcacaccgggcacucagaaga

SEQ ID NO: 3063764 - RNA, 18 nt, Human
gggcacagaaaauggaag

SEQ ID NO: 3063765 - RNA, 20 nt, Human
gggcacagaaaauggaagac

SEQ ID NO: 3063766 - RNA, 21 nt, Human
gggcacagaaaauggaagaca

SEQ ID NO: 3063767 - RNA, 19 nt, Human
gggcacucagaagacacug

SEQ ID NO: 3063768 - RNA, 16 nt, Human
gggcacucagaagaca

SEQ ID NO: 3063769 - RNA, 13 nt, Human
gggcacagggucu

SEQ ID NO: 3063770 - RNA, 16 nt, Human
gggcacagggucucua

SEQ ID NO: 3063771 - RNA, 14 nt, Human
ggcucuggagccca

SEQ ID NO: 3063772 - RNA, 13 nt, Human
ggcucuggagccc

SEQ ID NO: 3063773 - RNA, 17 nt, Human
ggccccugcccggcugc

SEQ ID NO: 3063774 - RNA, 16 nt, Human
ggccccugcccggcug

SEQ ID NO: 3063775 - RNA, 17 nt, Human
ggcucugccucccauca

SEQ ID NO: 3063776 - RNA, 20 nt, Human
ggccccugcccggcugcgga

SEQ ID NO: 3063777 - RNA, 13 nt, Human
ggcugagguggga

SEQ ID NO: 3063778 - RNA, 15 nt, Human
ggcugaggugggagg

SEQ ID NO: 3063779 - RNA, 18 nt, Human
ggcugcaccggcuggccu

SEQ ID NO: 3063780 - RNA, 19 nt, Human
ggcugcaccggcuggccug

SEQ ID NO: 3063781 - RNA, 17 nt, Human
ggcugcaccggcuggcc

SEQ ID NO: 3063782 - RNA, 24 nt, Human
ggcugcaaaggguaucaggugcug

SEQ ID NO: 3063783 - RNA, 23 nt, Human
ggcugcaaaggguaucaggugcu

SEQ ID NO: 3063784 - RNA, 22 nt, Human
ggcugcaaaggguaucaggugc

SEQ ID NO: 3063785 - RNA, 18 nt, Human
ggcugcaaaggguaucag

SEQ ID NO: 3063786 - RNA, 23 nt, Human
ggcugcuucaaggauccugagcc

SEQ ID NO: 3063787 - RNA, 21 nt, Human
ggcugcuucaaggauccugag

SEQ ID NO: 3063788 - RNA, 19 nt, Human
ggcugggagagccuuccag

SEQ ID NO: 3063789 - RNA, 18 nt, Human
ggcugggagagccuucca

SEQ ID NO: 3063790 - RNA, 15 nt, Human
ggcugggcagaggaa

SEQ ID NO: 3063791 - RNA, 19 nt, Human
ggcugggcagaggaaagca

SEQ ID NO: 3063792 - RNA, 13 nt, Human
ggcugggcagagg

SEQ ID NO: 3063793 - RNA, 14 nt, Human
ggcugggcagagga

SEQ ID NO: 3063794 - RNA, 20 nt, Human
ggcugggagagccuuccagg

SEQ ID NO: 3063795 - RNA, 23 nt, Human
ggcugggagagccuuccaggggu

SEQ ID NO: 3063796 - RNA, 13 nt, Human
ggcugcugaaggc

SEQ ID NO: 3063797 - RNA, 18 nt, Human
ggcugcugaaggcucgag

SEQ ID NO: 3063798 - RNA, 15 nt, Human
ggcugcugaaggcuc

SEQ ID NO: 3063799 - RNA, 17 nt, Human
ggcugcugaaggcucga

SEQ ID NO: 3063800 - RNA, 14 nt, Human
ggcugcugaaggcu

SEQ ID NO: 3063801 - RNA, 13 nt, Human
ggcugcagggagu

SEQ ID NO: 3063802 - RNA, 12 nt, Human
ggcugcagggag

SEQ ID NO: 3063803 - RNA, 11 nt, Human
ggcugcuucaa

SEQ ID NO: 3063804 - RNA, 12 nt, Human
ggcugcuucaag

SEQ ID NO: 3063805 - RNA, 14 nt, Human
ggcugcuucaagga

SEQ ID NO: 3063806 - RNA, 22 nt, Human
ggcugcuucaaggauccugagc

SEQ ID NO: 3063807 - RNA, 22 nt, Human
ggcuugaguuuaaauuguaaua

SEQ ID NO: 3063808 - RNA, 19 nt, Human
ggcuuggggaccagagcug

SEQ ID NO: 3063809 - RNA, 21 nt, Human
ggcuuggggaccagagcugcc

SEQ ID NO: 3063810 - RNA, 10 nt, Human
ggcuuuugug

SEQ ID NO: 3063811 - RNA, 15 nt, Human
ggcuuagucacugag

SEQ ID NO: 3063812 - RNA, 21 nt, Human
ggcuuagucacugagacagcc

SEQ ID NO: 3063813 - RNA, 17 nt, Human
ggcugggcuucaguggc

SEQ ID NO: 3063814 - RNA, 13 nt, Human
ggcugggcuucag

SEQ ID NO: 3063815 - RNA, 15 nt, Human
ggcuuaaaacaacac

SEQ ID NO: 3063816 - RNA, 12 nt, Human
ggcugggcuuca

SEQ ID NO: 3063817 - RNA, 17 nt, Human
ggcugggcucccuuccc

SEQ ID NO: 3063818 - RNA, 16 nt, Human
gggaccccgagccugg

SEQ ID NO: 3063819 - RNA, 20 nt, Human
gggaccccgagccuggcucc

SEQ ID NO: 3063820 - RNA, 18 nt, Human
gggaccccgagccuggcu

SEQ ID NO: 3063821 - RNA, 14 nt, Human
gggaauugaggaca

SEQ ID NO: 3063822 - RNA, 12 nt, Human
gggaccucaggc

SEQ ID NO: 3063823 - RNA, 13 nt, Human
gggaccucaggcc

SEQ ID NO: 3063824 - RNA, 15 nt, Human
gggaccucaggccug

SEQ ID NO: 3063825 - RNA, 17 nt, Human
gggacuacaggcaccca

SEQ ID NO: 3063826 - RNA, 23 nt, Human
gggaaggauacaaaagcauguga

SEQ ID NO: 3063827 - RNA, 21 nt, Human
gggaaggauacaaaagcaugu

SEQ ID NO: 3063828 - RNA, 14 nt, Human
ggcuuuugugcauu

SEQ ID NO: 3063829 - RNA, 16 nt, Human
gggaaggauacaaaag

SEQ ID NO: 3063830 - RNA, 14 nt, Human
gggaagggggcugg

SEQ ID NO: 3063831 - RNA, 16 nt, Human
gggaagggggcuggga

SEQ ID NO: 3063832 - RNA, 17 nt, Human
gggaagggggcugggac

SEQ ID NO: 3063833 - RNA, 13 nt, Human
gggaaugaagaua

SEQ ID NO: 3063834 - RNA, 16 nt, Human
gcugcgguccacccag

SEQ ID NO: 3063835 - RNA, 12 nt, Human
gcugcccuguga

SEQ ID NO: 3063836 - RNA, 14 nt, Human
gcugcccugugagu

SEQ ID NO: 3063837 - RNA, 11 nt, Human
gcugcccugug

SEQ ID NO: 3063838 - RNA, 16 nt, Human
gcuagauguauguacu

SEQ ID NO: 3063839 - RNA, 18 nt, Human
gcuagauguauguacuuc

SEQ ID NO: 3063840 - RNA, 13 nt, Human
gcugcuucaagga

SEQ ID NO: 3063841 - RNA, 10 nt, Human
gcugcuccca

SEQ ID NO: 3063842 - RNA, 18 nt, Human
gcugcgguccacccagga

SEQ ID NO: 3063843 - RNA, 17 nt, Human
gcugcgguccacccagg

SEQ ID NO: 3063844 - RNA, 16 nt, Human
gcugcuugggcuucau

SEQ ID NO: 3063845 - RNA, 21 nt, Human
gcugcuucaaggauccugagc

SEQ ID NO: 3063846 - RNA, 22 nt, Human
gcugcuucaaggauccugagcc

SEQ ID NO: 3063847 - RNA, 23 nt, Human
gcugcuucaaggauccugagcca

SEQ ID NO: 3063848 - RNA, 20 nt, Human
gcugggacaugggaaagggg

SEQ ID NO: 3063849 - RNA, 13 nt, Human
gcuggccgggacc

SEQ ID NO: 3063850 - RNA, 20 nt, Human
gcugggacuacaggcaccca

SEQ ID NO: 3063851 - RNA, 19 nt, Human
gcugggacuacaggcaccc

SEQ ID NO: 3063852 - RNA, 18 nt, Human
gcugggacuacaggcacc

SEQ ID NO: 3063853 - RNA, 13 nt, Human
gcugggacuacag

SEQ ID NO: 3063854 - RNA, 19 nt, Human
gcugggacuacagguguga

SEQ ID NO: 3063855 - RNA, 21 nt, Human
gcuggaccuugaacuggguac

SEQ ID NO: 3063856 - RNA, 17 nt, Human
gcugcuugggcuucauc

SEQ ID NO: 3063857 - RNA, 22 nt, Human
gcugcuugggcuucauccuccu

SEQ ID NO: 3063858 - RNA, 18 nt, Human
gcuggaccuugaacuggg

SEQ ID NO: 3063859 - RNA, 16 nt, Human
gcuggaccuugaacug

SEQ ID NO: 3063860 - RNA, 19 nt, Human
gcuggggccaggcuggguc

SEQ ID NO: 3063861 - RNA, 16 nt, Human
gcuggggccaggcugg

SEQ ID NO: 3063862 - RNA, 18 nt, Human
gcugggcuucaguggcag

SEQ ID NO: 3063863 - RNA, 23 nt, Human
gcugggggaagaagcucucuccu

SEQ ID NO: 3063864 - RNA, 12 nt, Human
gcuggggccagu

SEQ ID NO: 3063865 - RNA, 19 nt, Human
gcuggucccacucagucca

SEQ ID NO: 3063866 - RNA, 15 nt, Human
gcuggucccacucag

SEQ ID NO: 3063867 - RNA, 20 nt, Human
gcugggggccucagugccac

SEQ ID NO: 3063868 - RNA, 19 nt, Human
gcugggggccucagugcca

SEQ ID NO: 3063869 - RNA, 21 nt, Human
gcugggaugauuggagggggg

SEQ ID NO: 3063870 - RNA, 17 nt, Human
gcugggcuucaguggca

SEQ ID NO: 3063871 - RNA, 12 nt, Human
gcugggagagcc

SEQ ID NO: 3063872 - RNA, 13 nt, Human
gcugggagagccu

SEQ ID NO: 3063873 - RNA, 17 nt, Human
gcugggagagccuucca

SEQ ID NO: 3063874 - RNA, 18 nt, Human
gcugggagagccuuccag

SEQ ID NO: 3063875 - RNA, 19 nt, Human
gcugggagagccuuccagg

SEQ ID NO: 3063876 - RNA, 22 nt, Human
gcugggagagccuuccaggggu

SEQ ID NO: 3063877 - RNA, 22 nt, Human
gcugguucaggguuggccccug

SEQ ID NO: 3063878 - RNA, 22 nt, Human
gcuguauuuuaaaagaaugauu

SEQ ID NO: 3063879 - RNA, 16 nt, Human
gcugucaauuacagga

SEQ ID NO: 3063880 - RNA, 21 nt, Human
gcugguuagagguucccuuug

SEQ ID NO: 3063881 - RNA, 15 nt, Human
gcugguucaggguug

SEQ ID NO: 3063882 - RNA, 14 nt, Human
gcuggucccacuca

SEQ ID NO: 3063883 - RNA, 20 nt, Human
gcuggucccacucaguccau

SEQ ID NO: 3063884 - RNA, 18 nt, Human
gcuggugucaccugaaga

SEQ ID NO: 3063885 - RNA, 16 nt, Human
gcuggugucaccugaa

SEQ ID NO: 3063886 - RNA, 17 nt, Human
gcugucaauuacaggaa

SEQ ID NO: 3063887 - RNA, 19 nt, Human
gcugucaauuacaggaagu

SEQ ID NO: 3063888 - RNA, 22 nt, Human
gcugucaauuacaggaaguacu

SEQ ID NO: 3063889 - RNA, 23 nt, Human
gcugucaauuacaggaaguacug

SEQ ID NO: 3063890 - RNA, 21 nt, Human
gcugucccuuacgugaguccu

SEQ ID NO: 3063891 - RNA, 19 nt, Human
gcugucccuuacgugaguc

SEQ ID NO: 3063892 - RNA, 17 nt, Human
gcugucuccauguuuga

SEQ ID NO: 3063893 - RNA, 13 nt, Human
ggaagagccuugc

SEQ ID NO: 3063894 - RNA, 13 nt, Human
ggaagcacaugcc

SEQ ID NO: 3063895 - RNA, 14 nt, Human
ggaagcacaugccu

SEQ ID NO: 3063896 - RNA, 15 nt, Human
ggaagcacaugccuc

SEQ ID NO: 3063897 - RNA, 17 nt, Human
ggaagcacaugccucuc

SEQ ID NO: 3063898 - RNA, 17 nt, Human
ggaagcacagcuucauu

SEQ ID NO: 3063899 - RNA, 21 nt, Human
ggaagcacaugccucucucag

SEQ ID NO: 3063900 - RNA, 22 nt, Human
ggaagcacaugccucucucagg

SEQ ID NO: 3063901 - RNA, 23 nt, Human
ggaagcacaugccucucucaggc

SEQ ID NO: 3063902 - RNA, 15 nt, Human
ggaagccagcaggcu

SEQ ID NO: 3063903 - RNA, 16 nt, Human
ggaagccagcaggcuc

SEQ ID NO: 3063904 - RNA, 17 nt, Human
ggaagccagcaggcucu

SEQ ID NO: 3063905 - RNA, 18 nt, Human
ggaagccagcaggcucuc

SEQ ID NO: 3063906 - RNA, 13 nt, Human
ggaagccagcagg

SEQ ID NO: 3063907 - RNA, 14 nt, Human
ggaagccagcaggc

SEQ ID NO: 3063908 - RNA, 23 nt, Human
ggaaccgagggggcugcucccac

SEQ ID NO: 3063909 - RNA, 20 nt, Human
ggaacagacuggaagcacag

SEQ ID NO: 3063910 - RNA, 19 nt, Human
ggaacagacuggaagcaca

SEQ ID NO: 3063911 - RNA, 17 nt, Human
ggaacagacuggaagca

SEQ ID NO: 3063912 - RNA, 17 nt, Human
ggaaauauuuauuuuaa

SEQ ID NO: 3063913 - RNA, 18 nt, Human
ggaaauauuuauuuuaau

SEQ ID NO: 3063914 - RNA, 12 nt, Human
ggaaauauuuau

SEQ ID NO: 3063915 - RNA, 13 nt, Human
ggaaauauuuauu

SEQ ID NO: 3063916 - RNA, 15 nt, Human
ggaaauauuuauuuu

SEQ ID NO: 3063917 - RNA, 15 nt, Human
ggaaaaucagccugc

SEQ ID NO: 3063918 - RNA, 14 nt, Human
ggaaaauaaauuau

SEQ ID NO: 3063919 - RNA, 14 nt, Human
gcuuuaucaaaggg

SEQ ID NO: 3063920 - RNA, 20 nt, Human
ggaaaaaauaacaaugaaag

SEQ ID NO: 3063921 - RNA, 14 nt, Human
gcuuuuacuuaaac

SEQ ID NO: 3063922 - RNA, 17 nt, Human
gcuuuuaaaaaaaaaua

SEQ ID NO: 3063923 - RNA, 15 nt, Human
ggaaaaauagccugc

SEQ ID NO: 3063924 - RNA, 14 nt, Human
ggaaaaacugauuu

SEQ ID NO: 3063925 - RNA, 13 nt, Human
ggaaaaauagccu

SEQ ID NO: 3063926 - RNA, 22 nt, Human
gcuugaggguugggcugguguc

SEQ ID NO: 3063927 - RNA, 13 nt, Human
gcuuggaggaagg

SEQ ID NO: 3063928 - RNA, 14 nt, Human
gcuuggaggaagga

SEQ ID NO: 3063929 - RNA, 15 nt, Human
gcuuggaggaaggaa

SEQ ID NO: 3063930 - RNA, 17 nt, Human
gcuugcccuggugccuc

SEQ ID NO: 3063931 - RNA, 19 nt, Human
gcuugcccuggugccucac

SEQ ID NO: 3063932 - RNA, 21 nt, Human
gcuuccagugaggcucugccc

SEQ ID NO: 3063933 - RNA, 19 nt, Human
gcuuccagugaggcucugc

SEQ ID NO: 3063934 - RNA, 20 nt, Human
gcuuccagugaggcucugcc

SEQ ID NO: 3063935 - RNA, 18 nt, Human
gcuuccagugaggcucug

SEQ ID NO: 3063936 - RNA, 23 nt, Human
gcuguucacagccagacuggcac

SEQ ID NO: 3063937 - RNA, 16 nt, Human
gcuguucacagccaga

SEQ ID NO: 3063938 - RNA, 15 nt, Human
gcuguucacagccag

SEQ ID NO: 3063939 - RNA, 23 nt, Human
ggcaggucuugaacuccuggccu

SEQ ID NO: 3063940 - RNA, 13 nt, Human
ggcagguccaggg

SEQ ID NO: 3063941 - RNA, 18 nt, Human
ggcagcucaccucucccu

SEQ ID NO: 3063942 - RNA, 21 nt, Human
ggcagcucaccucucccuugg

SEQ ID NO: 3063943 - RNA, 22 nt, Human
ggcagcucaccucucccuugga

SEQ ID NO: 3063944 - RNA, 16 nt, Human
ggcagcucaccucucc

SEQ ID NO: 3063945 - RNA, 21 nt, Human
ggcagcuugaggguugggcug

SEQ ID NO: 3063946 - RNA, 19 nt, Human
ggcagcugcgguccaccca

SEQ ID NO: 3063947 - RNA, 23 nt, Human
ggcagaguugaagacagagcuac

SEQ ID NO: 3063948 - RNA, 23 nt, Human
ggcagauacaggaaaagcugcug

SEQ ID NO: 3063949 - RNA, 17 nt, Human
ggcagaggaaagcaaag

SEQ ID NO: 3063950 - RNA, 18 nt, Human
ggcaacugcauuggcuuu

SEQ ID NO: 3063951 - RNA, 19 nt, Human
ggcaacugcauuggcuuug

SEQ ID NO: 3063952 - RNA, 15 nt, Human
ggcaaggcugucaau

SEQ ID NO: 3063953 - RNA, 19 nt, Human
ggcaacccccagccugcua

SEQ ID NO: 3063954 - RNA, 21 nt, Human
ggaucagucugauucccaagc

SEQ ID NO: 3063955 - RNA, 20 nt, Human
ggcagagcagagaccauccc

SEQ ID NO: 3063956 - RNA, 15 nt, Human
ggcagagcagagacc

SEQ ID NO: 3063957 - RNA, 16 nt, Human
ggcagagcagagacca

SEQ ID NO: 3063958 - RNA, 12 nt, Human
ggcagagcagag

SEQ ID NO: 3063959 - RNA, 16 nt, Human
ggcacccggccccugc

SEQ ID NO: 3063960 - RNA, 15 nt, Human
ggcacccggccccug

SEQ ID NO: 3063961 - RNA, 16 nt, Human
ggcaaggcugucaauu

SEQ ID NO: 3063962 - RNA, 13 nt, Human
ggccccugcccgg

SEQ ID NO: 3063963 - RNA, 18 nt, Human
ggccccugccacccuggg

SEQ ID NO: 3063964 - RNA, 17 nt, Human
ggccccugccacccugg

SEQ ID NO: 3063965 - RNA, 12 nt, Human
ggccccugccac

SEQ ID NO: 3063966 - RNA, 16 nt, Human
ggccccugccacccug

SEQ ID NO: 3063967 - RNA, 13 nt, Human
ggccccugccacc

SEQ ID NO: 3063968 - RNA, 16 nt, Human
ggccccucaggguccc

SEQ ID NO: 3063969 - RNA, 19 nt, Human
ggccccucagggucccugg

SEQ ID NO: 3063970 - RNA, 20 nt, Human
ggccccucagggucccuggu

SEQ ID NO: 3063971 - RNA, 21 nt, Human
ggccccucagggucccuggug

SEQ ID NO: 3063972 - RNA, 13 nt, Human
ggccaugggccuc

SEQ ID NO: 3063973 - RNA, 22 nt, Human
ggccaugggacagggaggacgc

SEQ ID NO: 3063974 - RNA, 22 nt, Human
ggccaggcugggucgcccugga

SEQ ID NO: 3063975 - RNA, 18 nt, Human
ggccaggcugggucgccc

SEQ ID NO: 3063976 - RNA, 11 nt, Human
ggccaggcugg

SEQ ID NO: 3063977 - RNA, 16 nt, Human
ggccaggccagaggga

SEQ ID NO: 3063978 - RNA, 14 nt, Human
ggccaggccagagg

SEQ ID NO: 3063979 - RNA, 16 nt, Human
ggccacugugaagaga

SEQ ID NO: 3063980 - RNA, 14 nt, Human
ggccaggagccucc

SEQ ID NO: 3063981 - RNA, 16 nt, Human
ggccaggagccuccug

SEQ ID NO: 3063982 - RNA, 11 nt, Human
ggccacuguga

SEQ ID NO: 3063983 - RNA, 15 nt, Human
ggcagguuggugggg

SEQ ID NO: 3063984 - RNA, 23 nt, Human
ggcauguucucugaggacacuaa

SEQ ID NO: 3063985 - RNA, 19 nt, Human
ggcagugcucacccacacc

SEQ ID NO: 3063986 - RNA, 15 nt, Human
ggcauuccccaggag

SEQ ID NO: 3063987 - RNA, 16 nt, Human
ggccacaagacccuug

SEQ ID NO: 3063988 - RNA, 17 nt, Human
ggccacaagacccuugu

SEQ ID NO: 3063989 - RNA, 16 nt, Human
ggccaccugcggugcu

SEQ ID NO: 3063990 - RNA, 22 nt, Human
ggccaccugcggugcuaucucc

SEQ ID NO: 3063991 - RNA, 16 nt, Human
ggaucacagccucuga

SEQ ID NO: 3063992 - RNA, 21 nt, Human
ggagugacagaggcagcccca

SEQ ID NO: 3063993 - RNA, 19 nt, Human
ggagugacagaggcagccc

SEQ ID NO: 3063994 - RNA, 18 nt, Human
ggagugacagaggcagcc

SEQ ID NO: 3063995 - RNA, 17 nt, Human
ggagugacagaggcagc

SEQ ID NO: 3063996 - RNA, 21 nt, Human
ggagugaguugauagcacaga

SEQ ID NO: 3063997 - RNA, 14 nt, Human
ggagugagcugguu

SEQ ID NO: 3063998 - RNA, 12 nt, Human
ggagugagcugg

SEQ ID NO: 3063999 - RNA, 16 nt, Human
ggagugacagaggcag

SEQ ID NO: 3064000 - RNA, 11 nt, Human
ggagugacaga

SEQ ID NO: 3064001 - RNA, 20 nt, Human
ggagucccaccuuggcugca

SEQ ID NO: 3064002 - RNA, 17 nt, Human
ggagggcuccagacaca

SEQ ID NO: 3064003 - RNA, 14 nt, Human
ggagggcuccagac

SEQ ID NO: 3064004 - RNA, 15 nt, Human
ggagggcuccagaca

SEQ ID NO: 3064005 - RNA, 12 nt, Human
ggagggagggcu

SEQ ID NO: 3064006 - RNA, 12 nt, Human
ggagggcuccag

SEQ ID NO: 3064007 - RNA, 13 nt, Human
ggagggcuccaga

SEQ ID NO: 3064008 - RNA, 23 nt, Human
ggaggaucacuugaguccagaag

SEQ ID NO: 3064009 - RNA, 17 nt, Human
ggaggaucucuugagcc

SEQ ID NO: 3064010 - RNA, 21 nt, Human
ggaggaucucuugagccuggg

SEQ ID NO: 3064011 - RNA, 19 nt, Human
ggaggacgcucucuggccu

SEQ ID NO: 3064012 - RNA, 20 nt, Human
ggaggacgcucucuggccuu

SEQ ID NO: 3064013 - RNA, 21 nt, Human
ggaggacgcucucuggccuuc

SEQ ID NO: 3064014 - RNA, 12 nt, Human
ggagcccuggga

SEQ ID NO: 3064015 - RNA, 13 nt, Human
ggagcccugggag

SEQ ID NO: 3064016 - RNA, 23 nt, Human
ggagcccugucuccucucucugu

SEQ ID NO: 3064017 - RNA, 20 nt, Human
ggagcaaaaucgaugcagug

SEQ ID NO: 3064018 - RNA, 15 nt, Human
ggagaggggcacagg

SEQ ID NO: 3064019 - RNA, 20 nt, Human
ggagauuuacaacuggggga

SEQ ID NO: 3064020 - RNA, 17 nt, Human
ggagagcuagcagcagg

SEQ ID NO: 3064021 - RNA, 21 nt, Human
ggagagcuagcagcagggagg

SEQ ID NO: 3064022 - RNA, 21 nt, Human
ggagaccccuuggggagcagg

SEQ ID NO: 3064023 - RNA, 20 nt, Human
ggaagccagcaggcucucag

SEQ ID NO: 3064024 - RNA, 23 nt, Human
ggaccccacuccggcccuccaga

SEQ ID NO: 3064025 - RNA, 22 nt, Human
gcuacacaggggaaaagaggag

SEQ ID NO: 3064026 - RNA, 17 nt, Human
gcuaacauggaaguacu

SEQ ID NO: 3064027 - RNA, 18 nt, Human
gcuaacauggaaguacua

SEQ ID NO: 3064028 - RNA, 14 nt, Human
gcuaacauggaagu

SEQ ID NO: 3064029 - RNA, 15 nt, Human
gcgugagccacugca

SEQ ID NO: 3064030 - RNA, 14 nt, Human
gcgugagccacugc

SEQ ID NO: 3064031 - RNA, 22 nt, Human
gcguccugucggagcccugucu

SEQ ID NO: 3064032 - RNA, 21 nt, Human
gcuagacgagcaggcuucuuc

SEQ ID NO: 3064033 - RNA, 22 nt, Human
gcuagacgagcaggcuucuucc

SEQ ID NO: 3064034 - RNA, 23 nt, Human
gcggacagccacggccaggccag

SEQ ID NO: 3064035 - RNA, 19 nt, Human
gcggggacagcuccuucug

SEQ ID NO: 3064036 - RNA, 18 nt, Human
gcggggacagcuccuucu

SEQ ID NO: 3064037 - RNA, 19 nt, Human
gcggacagccacggccagg

SEQ ID NO: 3064038 - RNA, 16 nt, Human
gcggacagccacggcc

SEQ ID NO: 3064039 - RNA, 19 nt, Human
gcggaaugaaccacaucuu

SEQ ID NO: 3064040 - RNA, 23 nt, Human
gcgguccacccaggagccccgag

SEQ ID NO: 3064041 - RNA, 20 nt, Human
gcgguccacccaggagcccc

SEQ ID NO: 3064042 - RNA, 23 nt, Human
gcggggacagcuccuucuguccu

SEQ ID NO: 3064043 - RNA, 19 nt, Human
gcguccugucggagcccug

SEQ ID NO: 3064044 - RNA, 18 nt, Human
gcgccuacaggagugagc

SEQ ID NO: 3064045 - RNA, 21 nt, Human
gcgccuacaggagugagcacu

SEQ ID NO: 3064046 - RNA, 20 nt, Human
gcgccuacaggagugagcac

SEQ ID NO: 3064047 - RNA, 14 nt, Human
gcgcugccccuggc

SEQ ID NO: 3064048 - RNA, 19 nt, Human
gcgcuggccgggaccccga

SEQ ID NO: 3064049 - RNA, 17 nt, Human
gccugguggcagcugcg

SEQ ID NO: 3064050 - RNA, 16 nt, Human
gccugguggcagcugc

SEQ ID NO: 3064051 - RNA, 18 nt, Human
gccuguaaucacagcuac

SEQ ID NO: 3064052 - RNA, 15 nt, Human
gccugguggcagcug

SEQ ID NO: 3064053 - RNA, 14 nt, Human
gccugguggcagcu

SEQ ID NO: 3064054 - RNA, 20 nt, Human
gccuuagaagucacacagua

SEQ ID NO: 3064055 - RNA, 19 nt, Human
gccuuacccucauguucuu

SEQ ID NO: 3064056 - RNA, 21 nt, Human
gccuuauggaacacucugaga

SEQ ID NO: 3064057 - RNA, 22 nt, Human
gccuuauggaacacucugagac

SEQ ID NO: 3064058 - RNA, 23 nt, Human
gccuuauggaacacucugagacu

SEQ ID NO: 3064059 - RNA, 21 nt, Human
gccuuccaggggugggacacc

SEQ ID NO: 3064060 - RNA, 19 nt, Human
gccuuccccuggcacuggc

SEQ ID NO: 3064061 - RNA, 18 nt, Human
gccuucggccuccauccu

SEQ ID NO: 3064062 - RNA, 20 nt, Human
gccuuccccuggcacuggca

SEQ ID NO: 3064063 - RNA, 22 nt, Human
gcgacagugagacucugucuca

SEQ ID NO: 3064064 - RNA, 14 nt, Human
gccuggacccugug

SEQ ID NO: 3064065 - RNA, 12 nt, Human
gccugcccaggc

SEQ ID NO: 3064066 - RNA, 11 nt, Human
gccugcccagg

SEQ ID NO: 3064067 - RNA, 21 nt, Human
gccucugcacuccccugcugg

SEQ ID NO: 3064068 - RNA, 15 nt, Human
gccucugcacucccc

SEQ ID NO: 3064069 - RNA, 17 nt, Human
gccucugcacuccccug

SEQ ID NO: 3064070 - RNA, 18 nt, Human
gccucugcacuccccugc

SEQ ID NO: 3064071 - RNA, 19 nt, Human
gccucugcacuccccugcu

SEQ ID NO: 3064072 - RNA, 20 nt, Human
gccucugcacuccccugcug

SEQ ID NO: 3064073 - RNA, 16 nt, Human
gccucugcacuccccu

SEQ ID NO: 3064074 - RNA, 15 nt, Human
gccucugacacacag

SEQ ID NO: 3064075 - RNA, 14 nt, Human
gccucucugcaggu

SEQ ID NO: 3064076 - RNA, 10 nt, Human
gccucucugc

SEQ ID NO: 3064077 - RNA, 17 nt, Human
gccucucugcagguccc

SEQ ID NO: 3064078 - RNA, 16 nt, Human
gccucucugcaggucc

SEQ ID NO: 3064079 - RNA, 23 nt, Human
gccucucugcaggucccuaauaa

SEQ ID NO: 3064080 - RNA, 15 nt, Human
gccucucccaucacu

SEQ ID NO: 3064081 - RNA, 19 nt, Human
gccucccgaauagcuggga

SEQ ID NO: 3064082 - RNA, 18 nt, Human
gccucccgaauagcuggg

SEQ ID NO: 3064083 - RNA, 23 nt, Human
gccucccgaguagcugggacuac

SEQ ID NO: 3064084 - RNA, 21 nt, Human
gccucccgaguagcugggacu

SEQ ID NO: 3064085 - RNA, 20 nt, Human
gccucccgaauagcugggac

SEQ ID NO: 3064086 - RNA, 20 nt, Human
gccucccgaguagcugggac

SEQ ID NO: 3064087 - RNA, 14 nt, Human
gccucagccuccca

SEQ ID NO: 3064088 - RNA, 12 nt, Human
gccucagccucc

SEQ ID NO: 3064089 - RNA, 17 nt, Human
gccucccaucacccgcu

SEQ ID NO: 3064090 - RNA, 22 nt, Human
gccucagccucccaaagugcug

SEQ ID NO: 3064091 - RNA, 17 nt, Human
gccuauuuuaauaaaca

SEQ ID NO: 3064092 - RNA, 21 nt, Human
gccucagcauccuggcacccg

SEQ ID NO: 3064093 - RNA, 17 nt, Human
gccucagcauccuggca

SEQ ID NO: 3064094 - RNA, 18 nt, Human
gccucagcauccuggcac

SEQ ID NO: 3064095 - RNA, 24 nt, Human
gccucaagugauucuccugccuca

SEQ ID NO: 3064096 - RNA, 22 nt, Human
gccucaagugauucuccugccu

SEQ ID NO: 3064097 - RNA, 18 nt, Human
gccgucuaccugaggggc

SEQ ID NO: 3064098 - RNA, 20 nt, Human
gccgucuaccugaggggccu

SEQ ID NO: 3064099 - RNA, 22 nt, Human
gccgucuaccugaggggccucu

SEQ ID NO: 3064100 - RNA, 23 nt, Human
gccgucuaccugaggggccucuu

SEQ ID NO: 3064101 - RNA, 16 nt, Human
gccgagauagccaagg

SEQ ID NO: 3064102 - RNA, 13 nt, Human
gcccuucucucca

SEQ ID NO: 3064103 - RNA, 23 nt, Human
gcccuucucuccagccccuggau

SEQ ID NO: 3064104 - RNA, 19 nt, Human
gcccuucuuuccacagaag

SEQ ID NO: 3064105 - RNA, 13 nt, Human
gccgcagcccugc

SEQ ID NO: 3064106 - RNA, 16 nt, Human
gccgcagcccugcaga

SEQ ID NO: 3064107 - RNA, 17 nt, Human
gccgcagcccugcagag

SEQ ID NO: 3064108 - RNA, 15 nt, Human
gccgcagcccugcag

SEQ ID NO: 3064109 - RNA, 17 nt, Human
gccgagauagccaaggc

SEQ ID NO: 3064110 - RNA, 18 nt, Human
gccacugcaccgggccac

SEQ ID NO: 3064111 - RNA, 17 nt, Human
gccacugcaccgggcca

SEQ ID NO: 3064112 - RNA, 18 nt, Human
gccagagggagugacaga

SEQ ID NO: 3064113 - RNA, 17 nt, Human
gccagagggagugacag

SEQ ID NO: 3064114 - RNA, 12 nt, Human
gccagagacaca

SEQ ID NO: 3064115 - RNA, 15 nt, Human
gccagagacacaagc

SEQ ID NO: 3064116 - RNA, 15 nt, Human
gccacggccaggcca

SEQ ID NO: 3064117 - RNA, 14 nt, Human
gccacggccaggcc

SEQ ID NO: 3064118 - RNA, 12 nt, Human
gccaaaggaagc

SEQ ID NO: 3064119 - RNA, 16 nt, Human
gccacggccaggccag

SEQ ID NO: 3064120 - RNA, 22 nt, Human
gccacguucuuacuaguuuccc

SEQ ID NO: 3064121 - RNA, 21 nt, Human
gccacuauuguuagucucuug

SEQ ID NO: 3064122 - RNA, 20 nt, Human
gccacuauuguuagucucuu

SEQ ID NO: 3064123 - RNA, 14 nt, Human
gccagcugcuuggg

SEQ ID NO: 3064124 - RNA, 15 nt, Human
gccagcugcuugggc

SEQ ID NO: 3064125 - RNA, 14 nt, Human
gccagccuugacca

SEQ ID NO: 3064126 - RNA, 20 nt, Human
gccagccuugaccauucucc

SEQ ID NO: 3064127 - RNA, 21 nt, Human
gccagccuugaccauucucca

SEQ ID NO: 3064128 - RNA, 22 nt, Human
gccagccuugaccauucuccac

SEQ ID NO: 3064129 - RNA, 20 nt, Human
gccagccgagauagccaagg

SEQ ID NO: 3064130 - RNA, 12 nt, Human
gccagccuugac

SEQ ID NO: 3064131 - RNA, 16 nt, Human
gccagauucuuuccug

SEQ ID NO: 3064132 - RNA, 20 nt, Human
gccagagggagugacagagg

SEQ ID NO: 3064133 - RNA, 19 nt, Human
gccagagggagugacagag

SEQ ID NO: 3064134 - RNA, 17 nt, Human
gccagauucuuuccuga

SEQ ID NO: 3064135 - RNA, 14 nt, Human
gccaugggacaggg

SEQ ID NO: 3064136 - RNA, 19 nt, Human
gccaugggacagggaggac

SEQ ID NO: 3064137 - RNA, 20 nt, Human
gccauuucuuccacaagagc

SEQ ID NO: 3064138 - RNA, 22 nt, Human
gccauuucuuccacaagagccc

SEQ ID NO: 3064139 - RNA, 13 nt, Human
gccauuuguccca

SEQ ID NO: 3064140 - RNA, 14 nt, Human
gccauuugucccaa

SEQ ID NO: 3064141 - RNA, 16 nt, Human
gccauuugucccaagu

SEQ ID NO: 3064142 - RNA, 18 nt, Human
gccauuugucccaagugc

SEQ ID NO: 3064143 - RNA, 20 nt, Human
gccauuugucccaagugcca

SEQ ID NO: 3064144 - RNA, 17 nt, Human
gccauuucuuccacaag

SEQ ID NO: 3064145 - RNA, 22 nt, Human
gccauuuaaagcuuauuaaaac

SEQ ID NO: 3064146 - RNA, 16 nt, Human
gcccacagcuguauga

SEQ ID NO: 3064147 - RNA, 15 nt, Human
gcccaaagaugcagc

SEQ ID NO: 3064148 - RNA, 16 nt, Human
gcccaaagaugcagcc

SEQ ID NO: 3064149 - RNA, 18 nt, Human
gcccacaggaucagucug

SEQ ID NO: 3064150 - RNA, 13 nt, Human
gcccacaggauca

SEQ ID NO: 3064151 - RNA, 19 nt, Human
gcccacaggaucagucuga

SEQ ID NO: 3064152 - RNA, 15 nt, Human
gcccaccccucaaca

SEQ ID NO: 3064153 - RNA, 13 nt, Human
gccaucccagccc

SEQ ID NO: 3064154 - RNA, 14 nt, Human
gccaucccagcccc

SEQ ID NO: 3064155 - RNA, 15 nt, Human
gccaucccagcccca

SEQ ID NO: 3064156 - RNA, 16 nt, Human
gccaucccagccccaa

SEQ ID NO: 3064157 - RNA, 17 nt, Human
gccaucccagccccaau

SEQ ID NO: 3064158 - RNA, 14 nt, Human
gccauccagguuca

SEQ ID NO: 3064159 - RNA, 20 nt, Human
gccauccagguucagcuugu

SEQ ID NO: 3064160 - RNA, 19 nt, Human
gccauccagguucagcuug

SEQ ID NO: 3064161 - RNA, 17 nt, Human
gccaggaagccagcagg

SEQ ID NO: 3064162 - RNA, 18 nt, Human
gccaggaagccagcaggc

SEQ ID NO: 3064163 - RNA, 15 nt, Human
gccaggaagccagca

SEQ ID NO: 3064164 - RNA, 19 nt, Human
gccaggaagccagcaggcu

SEQ ID NO: 3064165 - RNA, 21 nt, Human
gccaggggaaaaucagccugc

SEQ ID NO: 3064166 - RNA, 22 nt, Human
gccaggggaaaaucagccugcu

SEQ ID NO: 3064167 - RNA, 17 nt, Human
gccaggggaaaaucagc

SEQ ID NO: 3064168 - RNA, 23 nt, Human
gccaggggaaaaucagccugcuc

SEQ ID NO: 3064169 - RNA, 22 nt, Human
gcccaucugggggccucuucug

SEQ ID NO: 3064170 - RNA, 17 nt, Human
gccccagugcccacagg

SEQ ID NO: 3064171 - RNA, 16 nt, Human
gccccagugcccacag

SEQ ID NO: 3064172 - RNA, 15 nt, Human
gccccagugcccaca

SEQ ID NO: 3064173 - RNA, 21 nt, Human
gccccauucugccugcccagg

SEQ ID NO: 3064174 - RNA, 20 nt, Human
gccccauucugccugcccag

SEQ ID NO: 3064175 - RNA, 18 nt, Human
gccccauucugccugccc

SEQ ID NO: 3064176 - RNA, 17 nt, Human
gccccauucugccugcc

SEQ ID NO: 3064177 - RNA, 23 nt, Human
gccccauccucuguacagagccc

SEQ ID NO: 3064178 - RNA, 15 nt, Human
gccccaucugcgggg

SEQ ID NO: 3064179 - RNA, 15 nt, Human
gcccaggcuggcgug

SEQ ID NO: 3064180 - RNA, 14 nt, Human
gcccaggcuggcgu

SEQ ID NO: 3064181 - RNA, 16 nt, Human
gcccaggcuggcgugc

SEQ ID NO: 3064182 - RNA, 20 nt, Human
gcccagucuggaaugcagug

SEQ ID NO: 3064183 - RNA, 22 nt, Human
gcccagucuggaaugcaguggu

SEQ ID NO: 3064184 - RNA, 12 nt, Human
gcccaggaaagg

SEQ ID NO: 3064185 - RNA, 15 nt, Human
gcccaggaaaggcuc

SEQ ID NO: 3064186 - RNA, 16 nt, Human
gcccaggaaaggcucc

SEQ ID NO: 3064187 - RNA, 18 nt, Human
gcccaggccuccuacagc

SEQ ID NO: 3064188 - RNA, 11 nt, Human
gcccaggcugg

SEQ ID NO: 3064189 - RNA, 23 nt, Human
gccccuggcagccccuguucugg

SEQ ID NO: 3064190 - RNA, 19 nt, Human
gccccugcacuccagccug

SEQ ID NO: 3064191 - RNA, 23 nt, Human
gccccugcacagcaggcugccag

SEQ ID NO: 3064192 - RNA, 14 nt, Human
gccccugcacagca

SEQ ID NO: 3064193 - RNA, 17 nt, Human
gccccugcacagcaggc

SEQ ID NO: 3064194 - RNA, 22 nt, Human
gccccugcacagcaggcugcca

SEQ ID NO: 3064195 - RNA, 19 nt, Human
gccccucagggucccuggu

SEQ ID NO: 3064196 - RNA, 21 nt, Human
gccccucagggucccuggugg

SEQ ID NO: 3064197 - RNA, 18 nt, Human
gccccucagggucccugg

SEQ ID NO: 3064198 - RNA, 14 nt, Human
gccccgcccaggcu

SEQ ID NO: 3064199 - RNA, 22 nt, Human
gccccgaggccuucucugaagg

SEQ ID NO: 3064200 - RNA, 23 nt, Human
gccccauucugccugcccaggcc

SEQ ID NO: 3064201 - RNA, 22 nt, Human
gccccauucugccugcccaggc

SEQ ID NO: 3064202 - RNA, 23 nt, Human
gccccgaggccuucucugaagga

SEQ ID NO: 3064203 - RNA, 15 nt, Human
gccccauucugccug

SEQ ID NO: 3064204 - RNA, 17 nt, Human
gccccgugggguuccuc

SEQ ID NO: 3064205 - RNA, 22 nt, Human
gcccucugcccacucccugcaa

SEQ ID NO: 3064206 - RNA, 19 nt, Human
gcccgggcucugccuccca

SEQ ID NO: 3064207 - RNA, 20 nt, Human
gcccgggcucugccucccau

SEQ ID NO: 3064208 - RNA, 21 nt, Human
gcccgggcucugccucccauc

SEQ ID NO: 3064209 - RNA, 13 nt, Human
gcccgggcucugc

SEQ ID NO: 3064210 - RNA, 14 nt, Human
gcccgggcucugcc

SEQ ID NO: 3064211 - RNA, 15 nt, Human
gcccgggcucugccu

SEQ ID NO: 3064212 - RNA, 18 nt, Human
gcccgggcucugccuccc

SEQ ID NO: 3064213 - RNA, 12 nt, Human
gcccgggcucug

SEQ ID NO: 3064214 - RNA, 14 nt, Human
gcccggcuccaggc

SEQ ID NO: 3064215 - RNA, 13 nt, Human
gcccggcuccagg

SEQ ID NO: 3064216 - RNA, 12 nt, Human
gcccggcuccag

SEQ ID NO: 3064217 - RNA, 19 nt, Human
gccccuucugacccaugcu

SEQ ID NO: 3064218 - RNA, 11 nt, Human
gcaggucccua

SEQ ID NO: 3064219 - RNA, 10 nt, Human
gcaggucccu

SEQ ID NO: 3064220 - RNA, 13 nt, Human
gcaggucccuaau

SEQ ID NO: 3064221 - RNA, 12 nt, Human
gcaggucccuaa

SEQ ID NO: 3064222 - RNA, 23 nt, Human
gcagugcuuccaaggauggacca

SEQ ID NO: 3064223 - RNA, 16 nt, Human
gcagugggagcugccu

SEQ ID NO: 3064224 - RNA, 14 nt, Human
gcagugcucaccca

SEQ ID NO: 3064225 - RNA, 20 nt, Human
gcaggauucuuccucccucc

SEQ ID NO: 3064226 - RNA, 15 nt, Human
gcaggcuacugucag

SEQ ID NO: 3064227 - RNA, 12 nt, Human
gcagggcucagc

SEQ ID NO: 3064228 - RNA, 16 nt, Human
gcagggagggcuucug

SEQ ID NO: 3064229 - RNA, 18 nt, Human
gcauauuauuuuauguug

SEQ ID NO: 3064230 - RNA, 23 nt, Human
gcauauuauuuuauguugcauag

SEQ ID NO: 3064231 - RNA, 15 nt, Human
gcauauucaggaagc

SEQ ID NO: 3064232 - RNA, 17 nt, Human
gcauauucaggaagcuc

SEQ ID NO: 3064233 - RNA, 18 nt, Human
gcauauucaggaagcuca

SEQ ID NO: 3064234 - RNA, 20 nt, Human
gcauauucaggaagcucagg

SEQ ID NO: 3064235 - RNA, 21 nt, Human
gcaucaagaugugacauguuu

SEQ ID NO: 3064236 - RNA, 18 nt, Human
gcagugggagcugccugu

SEQ ID NO: 3064237 - RNA, 17 nt, Human
gcagugggagcugccug

SEQ ID NO: 3064238 - RNA, 18 nt, Human
gcauagauucccugagca

SEQ ID NO: 3064239 - RNA, 13 nt, Human
gcaguucugaaga

SEQ ID NO: 3064240 - RNA, 16 nt, Human
gcauuuuacuguacag

SEQ ID NO: 3064241 - RNA, 17 nt, Human
gcauuuuacuguacaga

SEQ ID NO: 3064242 - RNA, 17 nt, Human
gcauuugcugaauacag

SEQ ID NO: 3064243 - RNA, 21 nt, Human
gcauuuggugguuucagaaau

SEQ ID NO: 3064244 - RNA, 23 nt, Human
gcauuugcugaauacagaggcaa

SEQ ID NO: 3064245 - RNA, 12 nt, Human
gcauuccccacu

SEQ ID NO: 3064246 - RNA, 22 nt, Human
gcauuuugcuaaaugugaauga

SEQ ID NO: 3064247 - RNA, 16 nt, Human
gccaaaggaagcacau

SEQ ID NO: 3064248 - RNA, 20 nt, Human
gccaaaggaagcacaugccu

SEQ ID NO: 3064249 - RNA, 14 nt, Human
gccaaaggaagcac

SEQ ID NO: 3064250 - RNA, 16 nt, Human
gccaaagaagcagacc

SEQ ID NO: 3064251 - RNA, 21 nt, Human
gccaaacucaccugccccuca

SEQ ID NO: 3064252 - RNA, 19 nt, Human
gccaaacucaccugccccu

SEQ ID NO: 3064253 - RNA, 17 nt, Human
gcaugaauuugugaagg

SEQ ID NO: 3064254 - RNA, 17 nt, Human
gcaugccuggauggggc

SEQ ID NO: 3064255 - RNA, 22 nt, Human
gcaugccuggauggggcugcac

SEQ ID NO: 3064256 - RNA, 15 nt, Human
gcaugaauuugugaa

SEQ ID NO: 3064257 - RNA, 23 nt, Human
gcaugaaguaauaugcacacauu

SEQ ID NO: 3064258 - RNA, 16 nt, Human
gcaucaggccaggccc

SEQ ID NO: 3064259 - RNA, 17 nt, Human
gcaucaggccaggcccu

SEQ ID NO: 3064260 - RNA, 13 nt, Human
gcaucaggccagg

SEQ ID NO: 3064261 - RNA, 15 nt, Human
gcaucaggccaggcc

SEQ ID NO: 3064262 - RNA, 15 nt, Human
gcaugcugucccuua

SEQ ID NO: 3064263 - RNA, 15 nt, Human
gcaugccuggauggg

SEQ ID NO: 3064264 - RNA, 17 nt, Human
gcauguuugugauugac

SEQ ID NO: 3064265 - RNA, 18 nt, Human
gcagauggaaugcugugu

SEQ ID NO: 3064266 - RNA, 16 nt, Human
gcagaguugaagacag

SEQ ID NO: 3064267 - RNA, 17 nt, Human
gcagaguugaagacaga

SEQ ID NO: 3064268 - RNA, 19 nt, Human
gcagaguugaagacagagc

SEQ ID NO: 3064269 - RNA, 17 nt, Human
gcagagaccaucccuga

SEQ ID NO: 3064270 - RNA, 14 nt, Human
gcagagaccauccc

SEQ ID NO: 3064271 - RNA, 15 nt, Human
gcagagaccaucccu

SEQ ID NO: 3064272 - RNA, 15 nt, Human
gcagaguugaagaca

SEQ ID NO: 3064273 - RNA, 23 nt, Human
gcagagaaugaaagggcccagag

SEQ ID NO: 3064274 - RNA, 22 nt, Human
gcagagaaugaaagggcccaga

SEQ ID NO: 3064275 - RNA, 21 nt, Human
gcagagaauucucuuauccaa

SEQ ID NO: 3064276 - RNA, 21 nt, Human
gcagagaaugaaagggcccag

SEQ ID NO: 3064277 - RNA, 20 nt, Human
gcagagaaugaaagggccca

SEQ ID NO: 3064278 - RNA, 19 nt, Human
gcagagaaugaaagggccc

SEQ ID NO: 3064279 - RNA, 21 nt, Human
gcaggaguuucguuuucaaaa

SEQ ID NO: 3064280 - RNA, 20 nt, Human
gcaggaguuucguuuucaaa

SEQ ID NO: 3064281 - RNA, 14 nt, Human
gcagccuggacccu

SEQ ID NO: 3064282 - RNA, 22 nt, Human
gcagccucaaccuccugggcua

SEQ ID NO: 3064283 - RNA, 21 nt, Human
gcagccucaaccuccugggcu

SEQ ID NO: 3064284 - RNA, 20 nt, Human
gcagccucaaccuccugggc

SEQ ID NO: 3064285 - RNA, 19 nt, Human
gcagccucaaccuccuggg

SEQ ID NO: 3064286 - RNA, 20 nt, Human
gcagcagggagggcuucugc

SEQ ID NO: 3064287 - RNA, 19 nt, Human
gcacagcuaacauggaagu

SEQ ID NO: 3064288 - RNA, 13 nt, Human
gcaaugaccuuuc

SEQ ID NO: 3064289 - RNA, 14 nt, Human
gcaaugaccuuuca

SEQ ID NO: 3064290 - RNA, 18 nt, Human
gcacagccucuuagaugc

SEQ ID NO: 3064291 - RNA, 20 nt, Human
gcacagccucuuagaugcag

SEQ ID NO: 3064292 - RNA, 22 nt, Human
gcacaugccucucucaggccaa

SEQ ID NO: 3064293 - RNA, 16 nt, Human
gcacagcuucauuucc

SEQ ID NO: 3064294 - RNA, 19 nt, Human
gcaccacugcacuccagcc

SEQ ID NO: 3064295 - RNA, 15 nt, Human
gcaccuccugccucg

SEQ ID NO: 3064296 - RNA, 14 nt, Human
gcaccuccugccuc

SEQ ID NO: 3064297 - RNA, 17 nt, Human
gcacccggccccugcug

SEQ ID NO: 3064298 - RNA, 15 nt, Human
gcacccggccccugc

SEQ ID NO: 3064299 - RNA, 14 nt, Human
gcacccggccccug

SEQ ID NO: 3064300 - RNA, 13 nt, Human
gcagaaggaagac

SEQ ID NO: 3064301 - RNA, 14 nt, Human
gcagaaggaagacu

SEQ ID NO: 3064302 - RNA, 12 nt, Human
gcagaaggaaga

SEQ ID NO: 3064303 - RNA, 14 nt, Human
gcagaagacaguau

SEQ ID NO: 3064304 - RNA, 22 nt, Human
gcacugggcuuggggaccagag

SEQ ID NO: 3064305 - RNA, 23 nt, Human
gcacugggcuuggggaccagagc

SEQ ID NO: 3064306 - RNA, 14 nt, Human
gcacugggcuuggg

SEQ ID NO: 3064307 - RNA, 15 nt, Human
gcacugucaagauga

SEQ ID NO: 3064308 - RNA, 18 nt, Human
gcacuaaggugugcucug

SEQ ID NO: 3064309 - RNA, 17 nt, Human
gcacuaaggugugcucu

SEQ ID NO: 3064310 - RNA, 18 nt, Human
gcaaacuuuauuuugugu

SEQ ID NO: 3064311 - RNA, 15 nt, Human
gcaaaccaucauuga

SEQ ID NO: 3064312 - RNA, 17 nt, Human
gcaaaccaucauugaaa

SEQ ID NO: 3064313 - RNA, 19 nt, Human
gcaaaccaucauugaaauc

SEQ ID NO: 3064314 - RNA, 20 nt, Human
gcaaaccaucauugaaaucu

SEQ ID NO: 3064315 - RNA, 21 nt, Human
gcaaaccaucauugaaaucuu

SEQ ID NO: 3064316 - RNA, 16 nt, Human
gcaaaccaucauugaa

SEQ ID NO: 3064317 - RNA, 20 nt, Human
gcaaacuuuauuuuguguuu

SEQ ID NO: 3064318 - RNA, 12 nt, Human
gcaaaugugaau

SEQ ID NO: 3064319 - RNA, 18 nt, Human
gcaacugcauuggcuuug

SEQ ID NO: 3064320 - RNA, 22 nt, Human
gcaacuuuguauaaaagggacu

SEQ ID NO: 3064321 - RNA, 16 nt, Human
gcaagaugugggcagu

SEQ ID NO: 3064322 - RNA, 12 nt, Human
gcaagauguggg

SEQ ID NO: 3064323 - RNA, 16 nt, Human
gcaagcaccuccugcc

SEQ ID NO: 3064324 - RNA, 15 nt, Human
gcaagcaccuccugc

SEQ ID NO: 3064325 - RNA, 20 nt, Human
gcaagcaccuccugccucga

SEQ ID NO: 3064326 - RNA, 18 nt, Human
gcaagcaccuccugccuc

SEQ ID NO: 3064327 - RNA, 14 nt, Human
gcaaggcugucaau

SEQ ID NO: 3064328 - RNA, 18 nt, Human
gcaaggcugucaauuaca

SEQ ID NO: 3064329 - RNA, 14 nt, Human
gcaaggucauuuuu

SEQ ID NO: 3064330 - RNA, 13 nt, Human
gcaaggcugucaa

SEQ ID NO: 3064331 - RNA, 17 nt, Human
gcaauccugcaagaaca

SEQ ID NO: 3064332 - RNA, 16 nt, Human
gauugggaauccgccc

SEQ ID NO: 3064333 - RNA, 21 nt, Human
gauuucuguuuagauaauaca

SEQ ID NO: 3064334 - RNA, 22 nt, Human
gauuucuguuuagauaauacac

SEQ ID NO: 3064335 - RNA, 19 nt, Human
gauuuguuaaugauagcua

SEQ ID NO: 3064336 - RNA, 19 nt, Human
gauucuuuccugaggcugg

SEQ ID NO: 3064337 - RNA, 17 nt, Human
gauucccaagcucugcu

SEQ ID NO: 3064338 - RNA, 16 nt, Human
gauucccaagcucugc

SEQ ID NO: 3064339 - RNA, 20 nt, Human
gauucuuuccugaggcuggg

SEQ ID NO: 3064340 - RNA, 22 nt, Human
gauucuuuccugaggcugggcu

SEQ ID NO: 3064341 - RNA, 16 nt, Human
gauugcaacaggcugg

SEQ ID NO: 3064342 - RNA, 18 nt, Human
gauugcaacaggcugggc

SEQ ID NO: 3064343 - RNA, 17 nt, Human
gauugcaacaggcuggg

SEQ ID NO: 3064344 - RNA, 15 nt, Human
gauugcaacaggcug

SEQ ID NO: 3064345 - RNA, 18 nt, Human
gauguucuagcauggcug

SEQ ID NO: 3064346 - RNA, 16 nt, Human
gaugcuagaacucccu

SEQ ID NO: 3064347 - RNA, 14 nt, Human
gauuaaguaaugau

SEQ ID NO: 3064348 - RNA, 22 nt, Human
gauuaaguaaugauaacuggaa

SEQ ID NO: 3064349 - RNA, 13 nt, Human
gauucagacagcu

SEQ ID NO: 3064350 - RNA, 14 nt, Human
gauucagacagcug

SEQ ID NO: 3064351 - RNA, 17 nt, Human
gauucagacagcugccu

SEQ ID NO: 3064352 - RNA, 18 nt, Human
gauucagacagcugccug

SEQ ID NO: 3064353 - RNA, 21 nt, Human
gauuacaagcgugagccacug

SEQ ID NO: 3064354 - RNA, 13 nt, Human
gauuacaagcgug

SEQ ID NO: 3064355 - RNA, 15 nt, Human
gauucccaagcucug

SEQ ID NO: 3064356 - RNA, 11 nt, Human
gaguucuacau

SEQ ID NO: 3064357 - RNA, 24 nt, Human
gauaauacaccacuacauucuguu

SEQ ID NO: 3064358 - RNA, 23 nt, Human
gauaauacaccacuacauucugu

SEQ ID NO: 3064359 - RNA, 12 nt, Human
gauaauacacca

SEQ ID NO: 3064360 - RNA, 13 nt, Human
gauaaacaguagu

SEQ ID NO: 3064361 - RNA, 22 nt, Human
gauaaauggcuuccuggcaaua

SEQ ID NO: 3064362 - RNA, 20 nt, Human
gaucacggcucacugcagcc

SEQ ID NO: 3064363 - RNA, 23 nt, Human
gaucacggcucacugcagccuca

SEQ ID NO: 3064364 - RNA, 23 nt, Human
gaucagcuuauugucuagugaaa

SEQ ID NO: 3064365 - RNA, 14 nt, Human
gaucacagccucug

SEQ ID NO: 3064366 - RNA, 18 nt, Human
gauauaugcucugcaugu

SEQ ID NO: 3064367 - RNA, 20 nt, Human
gauagugucccacggugccu

SEQ ID NO: 3064368 - RNA, 16 nt, Human
gauacaaaagcaugug

SEQ ID NO: 3064369 - RNA, 21 nt, Human
gaugaaaugaggucagagccu

SEQ ID NO: 3064370 - RNA, 15 nt, Human
gaugaaaugagguca

SEQ ID NO: 3064371 - RNA, 19 nt, Human
gaucuucuuuauaauucua

SEQ ID NO: 3064372 - RNA, 22 nt, Human
gaucuucuguggguuucuaaag

SEQ ID NO: 3064373 - RNA, 23 nt, Human
gaugcaccagcccuuagcaggga

SEQ ID NO: 3064374 - RNA, 15 nt, Human
gaugcaccagcccuu

SEQ ID NO: 3064375 - RNA, 14 nt, Human
gaugagaggaaauc

SEQ ID NO: 3064376 - RNA, 14 nt, Human
gaugcaccagcccu

SEQ ID NO: 3064377 - RNA, 23 nt, Human
gaugagaaauaaaguuucuguug

SEQ ID NO: 3064378 - RNA, 18 nt, Human
gaugaccuugaaugaugc

SEQ ID NO: 3064379 - RNA, 16 nt, Human
gaugccugguggcagc

SEQ ID NO: 3064380 - RNA, 15 nt, Human
gaugccugguggcag

SEQ ID NO: 3064381 - RNA, 14 nt, Human
gaugcagugcuucc

SEQ ID NO: 3064382 - RNA, 14 nt, Human
gaugccugguggca

SEQ ID NO: 3064383 - RNA, 19 nt, Human
gaugcagccucacaguccu

SEQ ID NO: 3064384 - RNA, 12 nt, Human
gauccugagcca

SEQ ID NO: 3064385 - RNA, 13 nt, Human
gauccuggaaauc

SEQ ID NO: 3064386 - RNA, 14 nt, Human
gauccuggaaauca

SEQ ID NO: 3064387 - RNA, 20 nt, Human
gaucuaggaagacuuuggaa

SEQ ID NO: 3064388 - RNA, 14 nt, Human
gaucuaggaagacu

SEQ ID NO: 3064389 - RNA, 18 nt, Human
gaucuaggaagacuuugg

SEQ ID NO: 3064390 - RNA, 13 nt, Human
gaucuaggaagac

SEQ ID NO: 3064391 - RNA, 17 nt, Human
gauccucccaccucagc

SEQ ID NO: 3064392 - RNA, 21 nt, Human
gauccucccaccucagccucc

SEQ ID NO: 3064393 - RNA, 14 nt, Human
gauccuccaggugc

SEQ ID NO: 3064394 - RNA, 16 nt, Human
gauccucccaccucag

SEQ ID NO: 3064395 - RNA, 13 nt, Human
gaucauccacugu

SEQ ID NO: 3064396 - RNA, 17 nt, Human
gacauaaaaacaacuuu

SEQ ID NO: 3064397 - RNA, 16 nt, Human
gacaucaacugcauca

SEQ ID NO: 3064398 - RNA, 14 nt, Human
gacaucaacagaua

SEQ ID NO: 3064399 - RNA, 23 nt, Human
gacaucaacugcaucaagaugug

SEQ ID NO: 3064400 - RNA, 22 nt, Human
gacaggcauguucucugaggac

SEQ ID NO: 3064401 - RNA, 22 nt, Human
gacaguuaagagaaaugagcuu

SEQ ID NO: 3064402 - RNA, 18 nt, Human
gacaggcaagcaccuccu

SEQ ID NO: 3064403 - RNA, 17 nt, Human
gacaggcaagcaccucc

SEQ ID NO: 3064404 - RNA, 13 nt, Human
gacaggcaagcac

SEQ ID NO: 3064405 - RNA, 23 nt, Human
gacaggaugguucccuugaugaa

SEQ ID NO: 3064406 - RNA, 19 nt, Human
gacaggcaaugcuggcugu

SEQ ID NO: 3064407 - RNA, 18 nt, Human
gacaggcaaugcuggcug

SEQ ID NO: 3064408 - RNA, 20 nt, Human
gacaggcaagcaccuccugc

SEQ ID NO: 3064409 - RNA, 21 nt, Human
gacaggcauguucucugagga

SEQ ID NO: 3064410 - RNA, 20 nt, Human
gacaggcauguucucugagg

SEQ ID NO: 3064411 - RNA, 23 nt, Human
gacaggcaaugcuggcuguuggc

SEQ ID NO: 3064412 - RNA, 22 nt, Human
gaauuucccaaagcagugcaug

SEQ ID NO: 3064413 - RNA, 16 nt, Human
gaauuucccaaagcag

SEQ ID NO: 3064414 - RNA, 18 nt, Human
gaauuucccaaagcagug

SEQ ID NO: 3064415 - RNA, 22 nt, Human
gacacgaauauugcugauggug

SEQ ID NO: 3064416 - RNA, 22 nt, Human
gacagacacaggcccggcucca

SEQ ID NO: 3064417 - RNA, 20 nt, Human
gacagacacaggcccggcuc

SEQ ID NO: 3064418 - RNA, 16 nt, Human
gacacuagaagauuuu

SEQ ID NO: 3064419 - RNA, 17 nt, Human
gacagacacaggcccgg

SEQ ID NO: 3064420 - RNA, 16 nt, Human
gacagagugagacucu

SEQ ID NO: 3064421 - RNA, 21 nt, Human
gacagagucucacuguugccc

SEQ ID NO: 3064422 - RNA, 23 nt, Human
gacagaggcagccccauucugcc

SEQ ID NO: 3064423 - RNA, 14 nt, Human
gacagagucucacu

SEQ ID NO: 3064424 - RNA, 20 nt, Human
gacagagcuacacaggggaa

SEQ ID NO: 3064425 - RNA, 21 nt, Human
gacagagccccacccucagau

SEQ ID NO: 3064426 - RNA, 10 nt, Human
gacccugagg

SEQ ID NO: 3064427 - RNA, 11 nt, Human
gacccugaggc

SEQ ID NO: 3064428 - RNA, 12 nt, Human
gacccugaggcc

SEQ ID NO: 3064429 - RNA, 16 nt, Human
gacccugaggcccaga

SEQ ID NO: 3064430 - RNA, 17 nt, Human
gacccugcccugugggc

SEQ ID NO: 3064431 - RNA, 20 nt, Human
gacccugcccugugggcccc

SEQ ID NO: 3064432 - RNA, 22 nt, Human
gacccugcccugugggccccca

SEQ ID NO: 3064433 - RNA, 17 nt, Human
gacccaugcugcccugu

SEQ ID NO: 3064434 - RNA, 15 nt, Human
gaccccacuccggcc

SEQ ID NO: 3064435 - RNA, 17 nt, Human
gaccccacuccggcccu

SEQ ID NO: 3064436 - RNA, 22 nt, Human
gaccccacuccggcccuccaga

SEQ ID NO: 3064437 - RNA, 12 nt, Human
gacccacugcuu

SEQ ID NO: 3064438 - RNA, 18 nt, Human
gacccaaaaggcagaagc

SEQ ID NO: 3064439 - RNA, 19 nt, Human
gacccaaaaggcagaagca

SEQ ID NO: 3064440 - RNA, 19 nt, Human
gacccaugcugcccuguga

SEQ ID NO: 3064441 - RNA, 20 nt, Human
gacccaugcugcccugugag

SEQ ID NO: 3064442 - RNA, 18 nt, Human
gacccaugcugcccugug

SEQ ID NO: 3064443 - RNA, 18 nt, Human
gaccacaaaacuuuucua

SEQ ID NO: 3064444 - RNA, 21 nt, Human
gaccagacaccuugacagggc

SEQ ID NO: 3064445 - RNA, 22 nt, Human
gaccagacaccuugacagggca

SEQ ID NO: 3064446 - RNA, 16 nt, Human
gaccacugcagaagac

SEQ ID NO: 3064447 - RNA, 16 nt, Human
gaccacguuucuaaag

SEQ ID NO: 3064448 - RNA, 20 nt, Human
gaccagcaccaucucuccuc

SEQ ID NO: 3064449 - RNA, 21 nt, Human
gaccagcaccaucucuccucc

SEQ ID NO: 3064450 - RNA, 23 nt, Human
gaccagacaccuugacagggcac

SEQ ID NO: 3064451 - RNA, 21 nt, Human
gaccagagcugccaccugccu

SEQ ID NO: 3064452 - RNA, 13 nt, Human
gacugagaaauuu

SEQ ID NO: 3064453 - RNA, 19 nt, Human
gacugagggggccuggaug

SEQ ID NO: 3064454 - RNA, 17 nt, Human
gacugagggggccugga

SEQ ID NO: 3064455 - RNA, 18 nt, Human
gacugagggggccuggau

SEQ ID NO: 3064456 - RNA, 15 nt, Human
gacugagggggccug

SEQ ID NO: 3064457 - RNA, 16 nt, Human
gacugagggggccugg

SEQ ID NO: 3064458 - RNA, 16 nt, Human
gacugaggggagggga

SEQ ID NO: 3064459 - RNA, 24 nt, Human
gacugcauuauauuuauuacugua

SEQ ID NO: 3064460 - RNA, 11 nt, Human
gacugagaaau

SEQ ID NO: 3064461 - RNA, 16 nt, Human
gacugaauuucuuuug

SEQ ID NO: 3064462 - RNA, 21 nt, Human
gacucuacagaggccaugggc

SEQ ID NO: 3064463 - RNA, 15 nt, Human
gacucuacagaggcc

SEQ ID NO: 3064464 - RNA, 18 nt, Human
gacuccugcaggcagcca

SEQ ID NO: 3064465 - RNA, 19 nt, Human
gacuccugcaggcagccag

SEQ ID NO: 3064466 - RNA, 20 nt, Human
gacuccugcaggcagccagg

SEQ ID NO: 3064467 - RNA, 15 nt, Human
gacuacaggcaccca

SEQ ID NO: 3064468 - RNA, 13 nt, Human
gacuacaggcacc

SEQ ID NO: 3064469 - RNA, 18 nt, Human
gacuacaggcacccacca

SEQ ID NO: 3064470 - RNA, 12 nt, Human
gacuucaucccu

SEQ ID NO: 3064471 - RNA, 20 nt, Human
gacuucaucccucuggggcu

SEQ ID NO: 3064472 - RNA, 12 nt, Human
gacuuacuguac

SEQ ID NO: 3064473 - RNA, 16 nt, Human
gacuuacuguacauga

SEQ ID NO: 3064474 - RNA, 15 nt, Human
gacuuacuguacaug

SEQ ID NO: 3064475 - RNA, 23 nt, Human
gacuuacuguacaugaaaacaca

SEQ ID NO: 3064476 - RNA, 18 nt, Human
gacuuacuguacaugaaa

SEQ ID NO: 3064477 - RNA, 23 nt, Human
gacuggccaagguuuggggaaga

SEQ ID NO: 3064478 - RNA, 22 nt, Human
gacuggauaguccgucucugcu

SEQ ID NO: 3064479 - RNA, 16 nt, Human
gacuggauaguccguc

SEQ ID NO: 3064480 - RNA, 17 nt, Human
gacuggauaguccgucu

SEQ ID NO: 3064481 - RNA, 14 nt, Human
gacuggcacaguuu

SEQ ID NO: 3064482 - RNA, 22 nt, Human
gacuggcacaguuuucugagaa

SEQ ID NO: 3064483 - RNA, 18 nt, Human
gacuggcacaguuuucug

SEQ ID NO: 3064484 - RNA, 20 nt, Human
gaccuucuccuucaccuuug

SEQ ID NO: 3064485 - RNA, 21 nt, Human
gaccuucuccuucaccuuugu

SEQ ID NO: 3064486 - RNA, 14 nt, Human
gaccuugaacuggg

SEQ ID NO: 3064487 - RNA, 15 nt, Human
gaccuucuccuucac

SEQ ID NO: 3064488 - RNA, 16 nt, Human
gaccuucuccuucacc

SEQ ID NO: 3064489 - RNA, 14 nt, Human
gaccuucuccuuca

SEQ ID NO: 3064490 - RNA, 20 nt, Human
gacccuugccgucuaccuga

SEQ ID NO: 3064491 - RNA, 23 nt, Human
gacccuugccgucuaccugaggg

SEQ ID NO: 3064492 - RNA, 19 nt, Human
gacccuugccgucuaccug

SEQ ID NO: 3064493 - RNA, 16 nt, Human
gacuaacuugucuuug

SEQ ID NO: 3064494 - RNA, 23 nt, Human
gacuaacuugucuuuggacccug

SEQ ID NO: 3064495 - RNA, 11 nt, Human
gacguguuaug

SEQ ID NO: 3064496 - RNA, 14 nt, Human
gacguguuaugacu

SEQ ID NO: 3064497 - RNA, 22 nt, Human
gaccuuuaagagaaaugagcug

SEQ ID NO: 3064498 - RNA, 11 nt, Human
gaccuuucaau

SEQ ID NO: 3064499 - RNA, 19 nt, Human
gaccuuucaauaggaaaaa

SEQ ID NO: 3064500 - RNA, 20 nt, Human
gaccuuucaauaggaaaaac

SEQ ID NO: 3064501 - RNA, 22 nt, Human
gacgcugugcugcccugcccac

SEQ ID NO: 3064502 - RNA, 21 nt, Human
gacgcugugcugcccugccca

SEQ ID NO: 3064503 - RNA, 13 nt, Human
gacggagucccac

SEQ ID NO: 3064504 - RNA, 23 nt, Human
gacggagucccaccuuggcugca

SEQ ID NO: 3064505 - RNA, 20 nt, Human
gaagauaauauuaaggaaga

SEQ ID NO: 3064506 - RNA, 20 nt, Human
gaagagguuuuaaagcuucc

SEQ ID NO: 3064507 - RNA, 15 nt, Human
gaagauacugaaaua

SEQ ID NO: 3064508 - RNA, 17 nt, Human
gaagauguagaggagaa

SEQ ID NO: 3064509 - RNA, 18 nt, Human
gaagauguagaggagaaa

SEQ ID NO: 3064510 - RNA, 17 nt, Human
gaagcauuuacuuugug

SEQ ID NO: 3064511 - RNA, 20 nt, Human
gaagccagcaggcucucagg

SEQ ID NO: 3064512 - RNA, 19 nt, Human
gaagccagcaggcucucag

SEQ ID NO: 3064513 - RNA, 21 nt, Human
gaagccagcaggcucucaggc

SEQ ID NO: 3064514 - RNA, 22 nt, Human
gaagccagcaggcucucaggcc

SEQ ID NO: 3064515 - RNA, 13 nt, Human
gaagcccaggaaa

SEQ ID NO: 3064516 - RNA, 15 nt, Human
gaagcccaggaaagg

SEQ ID NO: 3064517 - RNA, 16 nt, Human
gaagcccaggaaaggc

SEQ ID NO: 3064518 - RNA, 19 nt, Human
gaagcccaggaaaggcucc

SEQ ID NO: 3064519 - RNA, 23 nt, Human
gaagcccuucuaccuuccugcaa

SEQ ID NO: 3064520 - RNA, 23 nt, Human
gaagcccaggaaaggcuccagga

SEQ ID NO: 3064521 - RNA, 20 nt, Human
gaacucaucuagguaaauua

SEQ ID NO: 3064522 - RNA, 21 nt, Human
gaacucaucuagguaaauuac

SEQ ID NO: 3064523 - RNA, 23 nt, Human
gaacuuugaccucugcagcaaua

SEQ ID NO: 3064524 - RNA, 11 nt, Human
gaagacuuugg

SEQ ID NO: 3064525 - RNA, 13 nt, Human
gaagacuuuggaa

SEQ ID NO: 3064526 - RNA, 17 nt, Human
gaagacugcauuauauu

SEQ ID NO: 3064527 - RNA, 12 nt, Human
gaagaacugaaa

SEQ ID NO: 3064528 - RNA, 19 nt, Human
gaagacugcauuauauuua

SEQ ID NO: 3064529 - RNA, 19 nt, Human
gaagagaaugcacaaacag

SEQ ID NO: 3064530 - RNA, 14 nt, Human
gaagacuuuggaaa

SEQ ID NO: 3064531 - RNA, 17 nt, Human
gaagacuuuggaaagag

SEQ ID NO: 3064532 - RNA, 20 nt, Human
gaagacuuuucuuucagcca

SEQ ID NO: 3064533 - RNA, 14 nt, Human
gaacuacugaggau

SEQ ID NO: 3064534 - RNA, 22 nt, Human
gaaccuuuugagugccuuacac

SEQ ID NO: 3064535 - RNA, 19 nt, Human
gaaccuuuugagugccuua

SEQ ID NO: 3064536 - RNA, 21 nt, Human
gaaccuuuugagugccuuaca

SEQ ID NO: 3064537 - RNA, 18 nt, Human
gaaccuuuugagugccuu

SEQ ID NO: 3064538 - RNA, 16 nt, Human
gaacagugauuaccag

SEQ ID NO: 3064539 - RNA, 20 nt, Human
gaacagugauuaccagggac

SEQ ID NO: 3064540 - RNA, 15 nt, Human
gaacacucugagacu

SEQ ID NO: 3064541 - RNA, 14 nt, Human
gaacaucacagcuu

SEQ ID NO: 3064542 - RNA, 15 nt, Human
gaacauaaaauacaa

SEQ ID NO: 3064543 - RNA, 17 nt, Human
gaaauuuauaaacuuuu

SEQ ID NO: 3064544 - RNA, 16 nt, Human
gaaauuuauaaacuuu

SEQ ID NO: 3064545 - RNA, 13 nt, Human
gaacacucugaga

SEQ ID NO: 3064546 - RNA, 14 nt, Human
gaacacucugagac

SEQ ID NO: 3064547 - RNA, 16 nt, Human
gaaauuguauuacaaa

SEQ ID NO: 3064548 - RNA, 23 nt, Human
gaauucuugaaggaaaaugauac

SEQ ID NO: 3064549 - RNA, 19 nt, Human
gaauucucuaguuugauua

SEQ ID NO: 3064550 - RNA, 14 nt, Human
gaauugaaaaacca

SEQ ID NO: 3064551 - RNA, 17 nt, Human
gaauucucagaaucuca

SEQ ID NO: 3064552 - RNA, 17 nt, Human
gaauucucuaguuugau

SEQ ID NO: 3064553 - RNA, 20 nt, Human
gaaugucagugugacugauc

SEQ ID NO: 3064554 - RNA, 21 nt, Human
gaaugucagugugacugaucu

SEQ ID NO: 3064555 - RNA, 23 nt, Human
gaauuguguuuauaauuuuaaau

SEQ ID NO: 3064556 - RNA, 15 nt, Human
gaauuguguuuauaa

SEQ ID NO: 3064557 - RNA, 22 nt, Human
gaauuuaaauagcuuuuuucuc

SEQ ID NO: 3064558 - RNA, 22 nt, Human
gaauuguaaggaaugauuaauu

SEQ ID NO: 3064559 - RNA, 15 nt, Human
gaauuucccaaagca

SEQ ID NO: 3064560 - RNA, 14 nt, Human
gaaugucaguguga

SEQ ID NO: 3064561 - RNA, 22 nt, Human
gaaugguuuucaaaauaaaaau

SEQ ID NO: 3064562 - RNA, 23 nt, Human
gaaugaaccacaucuugcucugc

SEQ ID NO: 3064563 - RNA, 18 nt, Human
gaaugaaccacaucuugc

SEQ ID NO: 3064564 - RNA, 22 nt, Human
gaaugaaccacaucuugcucug

SEQ ID NO: 3064565 - RNA, 11 nt, Human
gaaugcagugg

SEQ ID NO: 3064566 - RNA, 19 nt, Human
gaaugaagauacugaaaua

SEQ ID NO: 3064567 - RNA, 17 nt, Human
gaaugaagauacugaaa

SEQ ID NO: 3064568 - RNA, 18 nt, Human
gaaugaagauacugaaau

SEQ ID NO: 3064569 - RNA, 21 nt, Human
gaaugaagauacugaaauaaa

SEQ ID NO: 3064570 - RNA, 16 nt, Human
gaauauuuuaacuucc

SEQ ID NO: 3064571 - RNA, 22 nt, Human
gaauagcugggacuacaggugu

SEQ ID NO: 3064572 - RNA, 20 nt, Human
gaauacucuuauaucuauau

SEQ ID NO: 3064573 - RNA, 23 nt, Human
gaauagcugggacuacaggugug

SEQ ID NO: 3064574 - RNA, 15 nt, Human
gaauaccuguccccc

SEQ ID NO: 3064575 - RNA, 13 nt, Human
gaauaccuguccc

SEQ ID NO: 3064576 - RNA, 21 nt, Human
gaauaccccaagacucccaug

SEQ ID NO: 3064577 - RNA, 17 nt, Human
gaauaauacaguaucuc

SEQ ID NO: 3064578 - RNA, 21 nt, Human
gaauacagaggcaacugcauu

SEQ ID NO: 3064579 - RNA, 19 nt, Human
gaauaacauguaauuaagu

SEQ ID NO: 3064580 - RNA, 18 nt, Human
gaauaacauguaauuaag

SEQ ID NO: 3064581 - RNA, 20 nt, Human
gaaguuugagaucagccugg

SEQ ID NO: 3064582 - RNA, 16 nt, Human
gaagggggcugggaca

SEQ ID NO: 3064583 - RNA, 19 nt, Human
gaagggggcugggacaugg

SEQ ID NO: 3064584 - RNA, 14 nt, Human
gaagcggcuggcag

SEQ ID NO: 3064585 - RNA, 15 nt, Human
gaagggggcugggac

SEQ ID NO: 3064586 - RNA, 22 nt, Human
gaaguaauaugcacacauuuuu

SEQ ID NO: 3064587 - RNA, 21 nt, Human
gaaguaauaugcacacauuuu

SEQ ID NO: 3064588 - RNA, 15 nt, Human
gaaguacuggagaaa

SEQ ID NO: 3064589 - RNA, 18 nt, Human
gaaguacuauaauuuacc

SEQ ID NO: 3064590 - RNA, 21 nt, Human
gaaguuucugccgcagcccug

SEQ ID NO: 3064591 - RNA, 15 nt, Human
gaagucuuagaugua

SEQ ID NO: 3064592 - RNA, 20 nt, Human
gaaguuucugccgcagcccu

SEQ ID NO: 3064593 - RNA, 12 nt, Human
gaaguccaagca

SEQ ID NO: 3064594 - RNA, 22 nt, Human
gaaguccaagcauuuagaugua

SEQ ID NO: 3064595 - RNA, 14 nt, Human
gaaguauccuucag

SEQ ID NO: 3064596 - RNA, 16 nt, Human
gaaguauccuucagcc

SEQ ID NO: 3064597 - RNA, 17 nt, Human
cuuguacuuuauuuucu

SEQ ID NO: 3064598 - RNA, 15 nt, Human
cuugguuuguaaauu

SEQ ID NO: 3064599 - RNA, 14 nt, Human
cuugguuuguaaau

SEQ ID NO: 3064600 - RNA, 18 nt, Human
cuuggggcugaugcaguu

SEQ ID NO: 3064601 - RNA, 16 nt, Human
cuuggggcugaugcag

SEQ ID NO: 3064602 - RNA, 16 nt, Human
cuuggacucauuuuaa

SEQ ID NO: 3064603 - RNA, 18 nt, Human
cuugggccacugugaaga

SEQ ID NO: 3064604 - RNA, 20 nt, Human
cuugggccacugugaagaga

SEQ ID NO: 3064605 - RNA, 16 nt, Human
cuuguuaagauaguua

SEQ ID NO: 3064606 - RNA, 16 nt, Human
cuuguggucccacccc

SEQ ID NO: 3064607 - RNA, 19 nt, Human
cuuguggucccaccccaca

SEQ ID NO: 3064608 - RNA, 15 nt, Human
cuuguggucccaccc

SEQ ID NO: 3064609 - RNA, 15 nt, Human
cuugucggccccacc

SEQ ID NO: 3064610 - RNA, 20 nt, Human
cuugucggccccaccagugc

SEQ ID NO: 3064611 - RNA, 21 nt, Human
cuugucggccccaccagugcc

SEQ ID NO: 3064612 - RNA, 22 nt, Human
cuugucggccccaccagugccu

SEQ ID NO: 3064613 - RNA, 20 nt, Human
cuuuaccuuuuuuauacaua

SEQ ID NO: 3064614 - RNA, 19 nt, Human
cuuuaccuuuuuuauacau

SEQ ID NO: 3064615 - RNA, 17 nt, Human
cuuuaccuuuuuuauac

SEQ ID NO: 3064616 - RNA, 20 nt, Human
cuugcuugauuguauggugg

SEQ ID NO: 3064617 - RNA, 14 nt, Human
cuuggaagcuccgc

SEQ ID NO: 3064618 - RNA, 20 nt, Human
cuuggaagcuccgcuuucua

SEQ ID NO: 3064619 - RNA, 20 nt, Human
cuugcuucaaccccaugaga

SEQ ID NO: 3064620 - RNA, 18 nt, Human
cuugcucuugaugccugg

SEQ ID NO: 3064621 - RNA, 17 nt, Human
cuugcucuugaugccug

SEQ ID NO: 3064622 - RNA, 19 nt, Human
cuugcucuugaugccuggc

SEQ ID NO: 3064623 - RNA, 22 nt, Human
cuugcucugcugacagacacag

SEQ ID NO: 3064624 - RNA, 17 nt, Human
cuugcucugcugacaga

SEQ ID NO: 3064625 - RNA, 22 nt, Human
cuugcccuguuaaaagaugaaa

SEQ ID NO: 3064626 - RNA, 13 nt, Human
cuugcaugaggcu

SEQ ID NO: 3064627 - RNA, 14 nt, Human
cuugcaugaggcua

SEQ ID NO: 3064628 - RNA, 18 nt, Human
cuugcccagccuggaugc

SEQ ID NO: 3064629 - RNA, 18 nt, Human
cuugcccuggugccucac

SEQ ID NO: 3064630 - RNA, 14 nt, Human
cuugcccuguuaaa

SEQ ID NO: 3064631 - RNA, 12 nt, Human
cuugagccuggg

SEQ ID NO: 3064632 - RNA, 15 nt, Human
cuugagccugggagg

SEQ ID NO: 3064633 - RNA, 17 nt, Human
cuugaggguugggcugg

SEQ ID NO: 3064634 - RNA, 15 nt, Human
cuugaggguugggcu

SEQ ID NO: 3064635 - RNA, 20 nt, Human
cuugaguugauucagcucug

SEQ ID NO: 3064636 - RNA, 18 nt, Human
cuugaguugauucagcuc

SEQ ID NO: 3064637 - RNA, 19 nt, Human
cuugaguugauucagcucu

SEQ ID NO: 3064638 - RNA, 18 nt, Human
cuugcaauggcagccuug

SEQ ID NO: 3064639 - RNA, 17 nt, Human
cuugcaauggcagccuu

SEQ ID NO: 3064640 - RNA, 16 nt, Human
cuugcaauggcagccu

SEQ ID NO: 3064641 - RNA, 15 nt, Human
cuugcaauggcagcc

SEQ ID NO: 3064642 - RNA, 20 nt, Human
cuugcagacucuacagaggc

SEQ ID NO: 3064643 - RNA, 21 nt, Human
cuugcagacucuacagaggcc

SEQ ID NO: 3064644 - RNA, 23 nt, Human
cuugcaucaauuuuucuuauuuc

SEQ ID NO: 3064645 - RNA, 22 nt, Human
cuuugcauaacguauaaaagcc

SEQ ID NO: 3064646 - RNA, 19 nt, Human
cuuugacaaagguaaauca

SEQ ID NO: 3064647 - RNA, 14 nt, Human
cuuugcuugaaaga

SEQ ID NO: 3064648 - RNA, 23 nt, Human
cuuuggaaagacuuuuccaaccc

SEQ ID NO: 3064649 - RNA, 12 nt, Human
cuuuggaaagac

SEQ ID NO: 3064650 - RNA, 16 nt, Human
cuuuguucuggcucuu

SEQ ID NO: 3064651 - RNA, 21 nt, Human
cuuuguucuggcucuuccagg

SEQ ID NO: 3064652 - RNA, 12 nt, Human
cuuugugauuuu

SEQ ID NO: 3064653 - RNA, 19 nt, Human
cuuugugaggaagccgcug

SEQ ID NO: 3064654 - RNA, 13 nt, Human
cuuuguggcuucc

SEQ ID NO: 3064655 - RNA, 23 nt, Human
cuuugugaggaagccgcuggggc

SEQ ID NO: 3064656 - RNA, 23 nt, Human
cuuugggaggccaaggugggagg

SEQ ID NO: 3064657 - RNA, 17 nt, Human
cuuugacaaagguaaau

SEQ ID NO: 3064658 - RNA, 15 nt, Human
cuuuagcgcccaguu

SEQ ID NO: 3064659 - RNA, 19 nt, Human
cuuuccucaaaacuucaga

SEQ ID NO: 3064660 - RNA, 13 nt, Human
cuuucugaaauaa

SEQ ID NO: 3064661 - RNA, 20 nt, Human
gaaaaguauguuagugcaaa

SEQ ID NO: 3064662 - RNA, 14 nt, Human
gaaaaguauguuag

SEQ ID NO: 3064663 - RNA, 19 nt, Human
gaaaacaugcuacacacug

SEQ ID NO: 3064664 - RNA, 18 nt, Human
gaaaacaugcuacacacu

SEQ ID NO: 3064665 - RNA, 16 nt, Human
gaaaacaugcuacaca

SEQ ID NO: 3064666 - RNA, 20 nt, Human
gaaaacacuguucucugccc

SEQ ID NO: 3064667 - RNA, 21 nt, Human
gaaaacacuguucucugcccu

SEQ ID NO: 3064668 - RNA, 18 nt, Human
gaaaacacuguucucugc

SEQ ID NO: 3064669 - RNA, 19 nt, Human
gaaaacacuguucucugcc

SEQ ID NO: 3064670 - RNA, 16 nt, Human
cuuuuuuagaguugau

SEQ ID NO: 3064671 - RNA, 21 nt, Human
cuuuguuuguugucagcugaa

SEQ ID NO: 3064672 - RNA, 15 nt, Human
cuuuucuguuugcua

SEQ ID NO: 3064673 - RNA, 23 nt, Human
cuuuucuguccgagcuuugaaaa

SEQ ID NO: 3064674 - RNA, 20 nt, Human
cuuuuguucuugguuuguaa

SEQ ID NO: 3064675 - RNA, 22 nt, Human
cuuuuguucuugguuuguaaau

SEQ ID NO: 3064676 - RNA, 11 nt, Human
cuuaacuauuc

SEQ ID NO: 3064677 - RNA, 14 nt, Human
cuuaacuucacaua

SEQ ID NO: 3064678 - RNA, 12 nt, Human
cuuaacuucaca

SEQ ID NO: 3064679 - RNA, 22 nt, Human
cuuaacuucacauauugauuuc

SEQ ID NO: 3064680 - RNA, 17 nt, Human
cuuaacuucacauauug

SEQ ID NO: 3064681 - RNA, 16 nt, Human
cuuaacuucacauauu

SEQ ID NO: 3064682 - RNA, 15 nt, Human
cuuaacuucacauau

SEQ ID NO: 3064683 - RNA, 14 nt, Human
cuuaaucuaaaugg

SEQ ID NO: 3064684 - RNA, 18 nt, Human
cuuaaugccacuaaauug

SEQ ID NO: 3064685 - RNA, 12 nt, Human
cuguuuagauaa

SEQ ID NO: 3064686 - RNA, 18 nt, Human
cuguuuguuucugaaagg

SEQ ID NO: 3064687 - RNA, 18 nt, Human
cuguuuugaaucucauaa

SEQ ID NO: 3064688 - RNA, 17 nt, Human
cuguuuucucuugagag

SEQ ID NO: 3064689 - RNA, 13 nt, Human
cuguuuucucuug

SEQ ID NO: 3064690 - RNA, 14 nt, Human
cuguuuucucuuga

SEQ ID NO: 3064691 - RNA, 21 nt, Human
cuguuuguuucugaaagggac

SEQ ID NO: 3064692 - RNA, 23 nt, Human
cuguuuguuucugaaagggacgc

SEQ ID NO: 3064693 - RNA, 19 nt, Human
cuguuuuauaauuuuguga

SEQ ID NO: 3064694 - RNA, 15 nt, Human
cuuaugauugcagau

SEQ ID NO: 3064695 - RNA, 23 nt, Human
cuuauuguagcauccuggaauau

SEQ ID NO: 3064696 - RNA, 15 nt, Human
cuuauuuaaugaaag

SEQ ID NO: 3064697 - RNA, 14 nt, Human
cuuauaauuuaaaa

SEQ ID NO: 3064698 - RNA, 19 nt, Human
cuuauaggaauugacccac

SEQ ID NO: 3064699 - RNA, 13 nt, Human
cuuauaauuuaaa

SEQ ID NO: 3064700 - RNA, 17 nt, Human
cuuagguuggcaaaaag

SEQ ID NO: 3064701 - RNA, 21 nt, Human
cuuaggguuaugauuaaguaa

SEQ ID NO: 3064702 - RNA, 13 nt, Human
cuuacuguacaug

SEQ ID NO: 3064703 - RNA, 16 nt, Human
cuuacuguacaugaaa

SEQ ID NO: 3064704 - RNA, 19 nt, Human
cuuacuaguuucccuugca

SEQ ID NO: 3064705 - RNA, 15 nt, Human
cuuacgugaguccug

SEQ ID NO: 3064706 - RNA, 15 nt, Human
cuuagacagucccug

SEQ ID NO: 3064707 - RNA, 16 nt, Human
cuuagacagucccugc

SEQ ID NO: 3064708 - RNA, 14 nt, Human
cuuagacagucccu

SEQ ID NO: 3064709 - RNA, 15 nt, Human
cuuagaagucacaca

SEQ ID NO: 3064710 - RNA, 17 nt, Human
cuuagacagucccugcc

SEQ ID NO: 3064711 - RNA, 18 nt, Human
cuuagacagucccugcca

SEQ ID NO: 3064712 - RNA, 19 nt, Human
cuuagacagucccugccaa

SEQ ID NO: 3064713 - RNA, 11 nt, Human
cuuagacaguc

SEQ ID NO: 3064714 - RNA, 19 nt, Human
cuuagaugcaguucugaag

SEQ ID NO: 3064715 - RNA, 22 nt, Human
cuuccacaagagcccaggccuc

SEQ ID NO: 3064716 - RNA, 23 nt, Human
cuuccacaagagcccaggccucc

SEQ ID NO: 3064717 - RNA, 11 nt, Human
cuucagugccu

SEQ ID NO: 3064718 - RNA, 12 nt, Human
cuucagugccuu

SEQ ID NO: 3064719 - RNA, 13 nt, Human
cuucagugccuua

SEQ ID NO: 3064720 - RNA, 14 nt, Human
cuucagugccuuau

SEQ ID NO: 3064721 - RNA, 18 nt, Human
cuucauuuccugugucuu

SEQ ID NO: 3064722 - RNA, 11 nt, Human
cuucagcugac

SEQ ID NO: 3064723 - RNA, 16 nt, Human
cuucagcgguuuauau

SEQ ID NO: 3064724 - RNA, 18 nt, Human
cuucagcgguuuauauaa

SEQ ID NO: 3064725 - RNA, 21 nt, Human
cuuccaggggugggacacccu

SEQ ID NO: 3064726 - RNA, 22 nt, Human
cuuccaggggugggacacccug

SEQ ID NO: 3064727 - RNA, 24 nt, Human
cuuccaggggugggacacccugug

SEQ ID NO: 3064728 - RNA, 19 nt, Human
cuuccagauccuggaaauc

SEQ ID NO: 3064729 - RNA, 15 nt, Human
cuuccagugaggcuc

SEQ ID NO: 3064730 - RNA, 14 nt, Human
cuuccagugaggcu

SEQ ID NO: 3064731 - RNA, 15 nt, Human
cuucgcuccuguguc

SEQ ID NO: 3064732 - RNA, 14 nt, Human
cuucgcuccugugu

SEQ ID NO: 3064733 - RNA, 13 nt, Human
cuucgcuccugug

SEQ ID NO: 3064734 - RNA, 19 nt, Human
cuuccuuggacucauuuua

SEQ ID NO: 3064735 - RNA, 20 nt, Human
cuucgggaggucgaggcagg

SEQ ID NO: 3064736 - RNA, 21 nt, Human
cuucgggaggucgaggcagga

SEQ ID NO: 3064737 - RNA, 17 nt, Human
cuucggccuccauccug

SEQ ID NO: 3064738 - RNA, 18 nt, Human
cuucggccuccauccuga

SEQ ID NO: 3064739 - RNA, 17 nt, Human
cuucugccauauucugu

SEQ ID NO: 3064740 - RNA, 15 nt, Human
cuucugccauauucu

SEQ ID NO: 3064741 - RNA, 21 nt, Human
cuucugccauauucuguuggc

SEQ ID NO: 3064742 - RNA, 17 nt, Human
cuucugcuucagccucc

SEQ ID NO: 3064743 - RNA, 16 nt, Human
cuucugcuucagccuc

SEQ ID NO: 3064744 - RNA, 13 nt, Human
cuucugcuucagc

SEQ ID NO: 3064745 - RNA, 18 nt, Human
cuucugcuucagccuccc

SEQ ID NO: 3064746 - RNA, 22 nt, Human
cuucuccuucaccuuugucccc

SEQ ID NO: 3064747 - RNA, 19 nt, Human
cuucuccuucaccuuuguc

SEQ ID NO: 3064748 - RNA, 21 nt, Human
cuucucccccacccccuaggg

SEQ ID NO: 3064749 - RNA, 15 nt, Human
cuucuccacccugcu

SEQ ID NO: 3064750 - RNA, 14 nt, Human
cuucuccacccugc

SEQ ID NO: 3064751 - RNA, 14 nt, Human
cuucuccaggcugu

SEQ ID NO: 3064752 - RNA, 17 nt, Human
cuucuccaggcuguauc

SEQ ID NO: 3064753 - RNA, 15 nt, Human
cucuggagcccacug

SEQ ID NO: 3064754 - RNA, 17 nt, Human
cucuggcagcucagaga

SEQ ID NO: 3064755 - RNA, 18 nt, Human
cucuggcagcucagagag

SEQ ID NO: 3064756 - RNA, 19 nt, Human
cucuggcagcucagagagg

SEQ ID NO: 3064757 - RNA, 24 nt, Human
cucuuaaaacccaagugccuuagc

SEQ ID NO: 3064758 - RNA, 13 nt, Human
cucuuaaaaccca

SEQ ID NO: 3064759 - RNA, 22 nt, Human
cucuuccaggcugggagagccu

SEQ ID NO: 3064760 - RNA, 21 nt, Human
cucuuccaggcugggagagcc

SEQ ID NO: 3064761 - RNA, 23 nt, Human
cucuuccaggcugggagagccuu

SEQ ID NO: 3064762 - RNA, 12 nt, Human
cucuucuccagg

SEQ ID NO: 3064763 - RNA, 18 nt, Human
cucuugguccugcugcag

SEQ ID NO: 3064764 - RNA, 19 nt, Human
cucuugguccugcugcagu

SEQ ID NO: 3064765 - RNA, 17 nt, Human
cucuugguccugcugca

SEQ ID NO: 3064766 - RNA, 15 nt, Human
cucuugaccucaggu

SEQ ID NO: 3064767 - RNA, 13 nt, Human
cucuugaccucag

SEQ ID NO: 3064768 - RNA, 16 nt, Human
cucuugaccucaggug

SEQ ID NO: 3064769 - RNA, 17 nt, Human
cucuuuccaucuacccu

SEQ ID NO: 3064770 - RNA, 15 nt, Human
cucuuuggacacuca

SEQ ID NO: 3064771 - RNA, 18 nt, Human
cucuuuggacacucacac

SEQ ID NO: 3064772 - RNA, 17 nt, Human
cucuuucuauuguuucu

SEQ ID NO: 3064773 - RNA, 21 nt, Human
cugaagacucauucuucugua

SEQ ID NO: 3064774 - RNA, 19 nt, Human
cugaagacucauucuucug

SEQ ID NO: 3064775 - RNA, 16 nt, Human
cugaacuuggcgcugc

SEQ ID NO: 3064776 - RNA, 21 nt, Human
cugaacuuggcgcugccccug

SEQ ID NO: 3064777 - RNA, 15 nt, Human
cugaacuuggcgcug

SEQ ID NO: 3064778 - RNA, 19 nt, Human
cucuuuggucuacacugug

SEQ ID NO: 3064779 - RNA, 21 nt, Human
cucuuuggucuacacugugcu

SEQ ID NO: 3064780 - RNA, 18 nt, Human
cucuuugggccuggcucc

SEQ ID NO: 3064781 - RNA, 21 nt, Human
cugaaccuggguaacuaggga

SEQ ID NO: 3064782 - RNA, 16 nt, Human
cugaauacagaggcaa

SEQ ID NO: 3064783 - RNA, 24 nt, Human
cugaagucuuuguacagacaacaa

SEQ ID NO: 3064784 - RNA, 15 nt, Human
cugaagucacacagu

SEQ ID NO: 3064785 - RNA, 14 nt, Human
cugaagucacacag

SEQ ID NO: 3064786 - RNA, 19 nt, Human
cugacagacacaggcccgg

SEQ ID NO: 3064787 - RNA, 23 nt, Human
cugaauuuaaauagcuuuuuucu

SEQ ID NO: 3064788 - RNA, 14 nt, Human
cugaauuuaaauag

SEQ ID NO: 3064789 - RNA, 18 nt, Human
cugaauuuaaauagcuuu

SEQ ID NO: 3064790 - RNA, 21 nt, Human
cugacagacacaggcccggcu

SEQ ID NO: 3064791 - RNA, 11 nt, Human
cugacaggcaa

SEQ ID NO: 3064792 - RNA, 19 nt, Human
cugacaggcaaugcuggcu

SEQ ID NO: 3064793 - RNA, 18 nt, Human
cugacaggcaaugcuggc

SEQ ID NO: 3064794 - RNA, 17 nt, Human
cugacaggcaaugcugg

SEQ ID NO: 3064795 - RNA, 16 nt, Human
cugacaggcaaugcug

SEQ ID NO: 3064796 - RNA, 20 nt, Human
cugacaggcaaugcuggcug

SEQ ID NO: 3064797 - RNA, 17 nt, Human
cugacauuguuggccaa

SEQ ID NO: 3064798 - RNA, 11 nt, Human
cugacccacug

SEQ ID NO: 3064799 - RNA, 12 nt, Human
cucuggagccca

SEQ ID NO: 3064800 - RNA, 14 nt, Human
cucuggaauuugaa

SEQ ID NO: 3064801 - RNA, 17 nt, Human
cucugcggagcacacug

SEQ ID NO: 3064802 - RNA, 18 nt, Human
cucugcggagcacacugg

SEQ ID NO: 3064803 - RNA, 19 nt, Human
cucugcggagcacacuggc

SEQ ID NO: 3064804 - RNA, 21 nt, Human
cucugcggagcacacuggcuc

SEQ ID NO: 3064805 - RNA, 14 nt, Human
cucugccucugaca

SEQ ID NO: 3064806 - RNA, 14 nt, Human
cucugcccuccaag

SEQ ID NO: 3064807 - RNA, 15 nt, Human
cucugcccuccaaga

SEQ ID NO: 3064808 - RNA, 16 nt, Human
cucugcccuccaagac

SEQ ID NO: 3064809 - RNA, 23 nt, Human
cucugcccuccaagaccuucucc

SEQ ID NO: 3064810 - RNA, 22 nt, Human
cucugcaggucccuaauaaagc

SEQ ID NO: 3064811 - RNA, 23 nt, Human
cucugcaggucccuaauaaagcu

SEQ ID NO: 3064812 - RNA, 23 nt, Human
cucugcauacucauuaggauggc

SEQ ID NO: 3064813 - RNA, 22 nt, Human
cucugcaagaauugaagcagga

SEQ ID NO: 3064814 - RNA, 16 nt, Human
cucugaggacacuaac

SEQ ID NO: 3064815 - RNA, 22 nt, Human
cucucugcaggucccuaauaaa

SEQ ID NO: 3064816 - RNA, 19 nt, Human
cucucugcaggucccuaau

SEQ ID NO: 3064817 - RNA, 17 nt, Human
cucucugcaggucccua

SEQ ID NO: 3064818 - RNA, 16 nt, Human
cucucugcaggucccu

SEQ ID NO: 3064819 - RNA, 14 nt, Human
cucucugcaggucc

SEQ ID NO: 3064820 - RNA, 13 nt, Human
cucucugcagguc

SEQ ID NO: 3064821 - RNA, 12 nt, Human
cucucugcaggu

SEQ ID NO: 3064822 - RNA, 15 nt, Human
cucucucacuccuug

SEQ ID NO: 3064823 - RNA, 16 nt, Human
cucucucacuccuuga

SEQ ID NO: 3064824 - RNA, 12 nt, Human
cucucucaggcc

SEQ ID NO: 3064825 - RNA, 14 nt, Human
cucucucacuccuu

SEQ ID NO: 3064826 - RNA, 15 nt, Human
cucuccuguaccucu

SEQ ID NO: 3064827 - RNA, 14 nt, Human
cucuccuguaccuc

SEQ ID NO: 3064828 - RNA, 13 nt, Human
cucuccuguaccu

SEQ ID NO: 3064829 - RNA, 18 nt, Human
cucuccuguaccucuuga

SEQ ID NO: 3064830 - RNA, 17 nt, Human
cucuccuguaccucuug

SEQ ID NO: 3064831 - RNA, 22 nt, Human
cucuccuguaccucuugagccu

SEQ ID NO: 3064832 - RNA, 23 nt, Human
cucucaggccagcugcuugggcu

SEQ ID NO: 3064833 - RNA, 22 nt, Human
cucucaggccagcugcuugggc

SEQ ID NO: 3064834 - RNA, 13 nt, Human
cucuccagccccu

SEQ ID NO: 3064835 - RNA, 12 nt, Human
cucuccagcccc

SEQ ID NO: 3064836 - RNA, 18 nt, Human
cucucccaucacuucccu

SEQ ID NO: 3064837 - RNA, 14 nt, Human
cucucccaucacuu

SEQ ID NO: 3064838 - RNA, 20 nt, Human
cucucccaucacuucccuac

SEQ ID NO: 3064839 - RNA, 13 nt, Human
cucucccaucacu

SEQ ID NO: 3064840 - RNA, 12 nt, Human
cucauucuucug

SEQ ID NO: 3064841 - RNA, 14 nt, Human
cucauucuucugua

SEQ ID NO: 3064842 - RNA, 13 nt, Human
cucauucuucugu

SEQ ID NO: 3064843 - RNA, 13 nt, Human
cucauugaccuga

SEQ ID NO: 3064844 - RNA, 15 nt, Human
cucauugaccugagg

SEQ ID NO: 3064845 - RNA, 23 nt, Human
cucauucuucuguacgucugaca

SEQ ID NO: 3064846 - RNA, 16 nt, Human
cucauugaccugaggc

SEQ ID NO: 3064847 - RNA, 21 nt, Human
cucaucuagguaaauuacagu

SEQ ID NO: 3064848 - RNA, 17 nt, Human
cucaucuccccaucauu

SEQ ID NO: 3064849 - RNA, 21 nt, Human
cucauuagcauuuugcuaaau

SEQ ID NO: 3064850 - RNA, 17 nt, Human
cucauuaggauggcuag

SEQ ID NO: 3064851 - RNA, 18 nt, Human
cucauuaggauggcuagu

SEQ ID NO: 3064852 - RNA, 14 nt, Human
cucauauuuucaug

SEQ ID NO: 3064853 - RNA, 19 nt, Human
cucaggugucccugcacuu

SEQ ID NO: 3064854 - RNA, 18 nt, Human
cucaggugucccugcacu

SEQ ID NO: 3064855 - RNA, 17 nt, Human
cucaggugucccugcac

SEQ ID NO: 3064856 - RNA, 22 nt, Human
cucauaauuuauacaggucaua

SEQ ID NO: 3064857 - RNA, 13 nt, Human
cucauaauuuaua

SEQ ID NO: 3064858 - RNA, 15 nt, Human
cucauaauuuauaca

SEQ ID NO: 3064859 - RNA, 19 nt, Human
cucauaguaugguggcugg

SEQ ID NO: 3064860 - RNA, 18 nt, Human
cucauaguaugguggcug

SEQ ID NO: 3064861 - RNA, 22 nt, Human
cucagguggggucacucuggca

SEQ ID NO: 3064862 - RNA, 23 nt, Human
cucagguggggucacucuggcag

SEQ ID NO: 3064863 - RNA, 16 nt, Human
cucaggugucccugca

SEQ ID NO: 3064864 - RNA, 15 nt, Human
cucaggugucccugc

SEQ ID NO: 3064865 - RNA, 12 nt, Human
cucagggucccu

SEQ ID NO: 3064866 - RNA, 23 nt, Human
cuaaaagguaugcaaucaaaucu

SEQ ID NO: 3064867 - RNA, 20 nt, Human
cuccagcucaccagccccag

SEQ ID NO: 3064868 - RNA, 19 nt, Human
cuccagcucaccagcccca

SEQ ID NO: 3064869 - RNA, 15 nt, Human
cuccaccugccaggg

SEQ ID NO: 3064870 - RNA, 17 nt, Human
cuccaccugccagggac

SEQ ID NO: 3064871 - RNA, 18 nt, Human
cuccaccugccagggaca

SEQ ID NO: 3064872 - RNA, 21 nt, Human
cuccaccugccagggacagag

SEQ ID NO: 3064873 - RNA, 12 nt, Human
cuccacccugcu

SEQ ID NO: 3064874 - RNA, 11 nt, Human
cuccacccugc

SEQ ID NO: 3064875 - RNA, 14 nt, Human
cuccaugugggcua

SEQ ID NO: 3064876 - RNA, 22 nt, Human
cucccaaggggcccaaauucuu

SEQ ID NO: 3064877 - RNA, 21 nt, Human
cucccaaggggcccaaauucu

SEQ ID NO: 3064878 - RNA, 15 nt, Human
cucccaggcauuccc

SEQ ID NO: 3064879 - RNA, 17 nt, Human
cucccaggcauucccca

SEQ ID NO: 3064880 - RNA, 19 nt, Human
cucccaggcauuccccagg

SEQ ID NO: 3064881 - RNA, 20 nt, Human
cucccaggcauuccccagga

SEQ ID NO: 3064882 - RNA, 21 nt, Human
cucccaggcauuccccaggag

SEQ ID NO: 3064883 - RNA, 22 nt, Human
cucccaggcauuccccaggagg

SEQ ID NO: 3064884 - RNA, 17 nt, Human
cucccagucauuuaaua

SEQ ID NO: 3064885 - RNA, 11 nt, Human
cuccaggcucc

SEQ ID NO: 3064886 - RNA, 21 nt, Human
cuccauccugaggcuccacuu

SEQ ID NO: 3064887 - RNA, 20 nt, Human
cuccauccugaggcuccacu

SEQ ID NO: 3064888 - RNA, 23 nt, Human
cuccauccugaggcuccacuugg

SEQ ID NO: 3064889 - RNA, 13 nt, Human
cuccagcuguuca

SEQ ID NO: 3064890 - RNA, 18 nt, Human
cuccagcuguucagcugg

SEQ ID NO: 3064891 - RNA, 19 nt, Human
cuccagcuguucagcuggu

SEQ ID NO: 3064892 - RNA, 14 nt, Human
cuccuucaccuuug

SEQ ID NO: 3064893 - RNA, 16 nt, Human
cuccuucaccuuuguc

SEQ ID NO: 3064894 - RNA, 19 nt, Human
cuccuucaccuuugucccc

SEQ ID NO: 3064895 - RNA, 21 nt, Human
cuccuucaccuuuguccccac

SEQ ID NO: 3064896 - RNA, 15 nt, Human
cuccugcaggcagcc

SEQ ID NO: 3064897 - RNA, 21 nt, Human
cuccugcaggcagccaggcca

SEQ ID NO: 3064898 - RNA, 22 nt, Human
cuccugcaggcagccaggccac

SEQ ID NO: 3064899 - RNA, 11 nt, Human
cuccugugugu

SEQ ID NO: 3064900 - RNA, 23 nt, Human
cuccugugucuugcaauggcagc

SEQ ID NO: 3064901 - RNA, 15 nt, Human
cuccugugucuugca

SEQ ID NO: 3064902 - RNA, 20 nt, Human
cuccuucuguccuacucugu

SEQ ID NO: 3064903 - RNA, 15 nt, Human
cuccuucuguccuac

SEQ ID NO: 3064904 - RNA, 14 nt, Human
cuccuucuguccua

SEQ ID NO: 3064905 - RNA, 13 nt, Human
cuccuucaccuuu

SEQ ID NO: 3064906 - RNA, 16 nt, Human
cucgaacuggcugcaa

SEQ ID NO: 3064907 - RNA, 11 nt, Human
cuccuucuucc

SEQ ID NO: 3064908 - RNA, 21 nt, Human
cuccuugaaaacacuguucuc

SEQ ID NO: 3064909 - RNA, 13 nt, Human
cucgcgacaaugc

SEQ ID NO: 3064910 - RNA, 15 nt, Human
cucgcgacaaugcaa

SEQ ID NO: 3064911 - RNA, 16 nt, Human
cucgaguuacagacaa

SEQ ID NO: 3064912 - RNA, 20 nt, Human
cucgaguuacagacaaagcg

SEQ ID NO: 3064913 - RNA, 13 nt, Human
cucuaaauucuuu

SEQ ID NO: 3064914 - RNA, 17 nt, Human
cucuaaauucuuucauu

SEQ ID NO: 3064915 - RNA, 21 nt, Human
cucggaccccacuccggcccu

SEQ ID NO: 3064916 - RNA, 19 nt, Human
cucggaccccacuccggcc

SEQ ID NO: 3064917 - RNA, 12 nt, Human
cucggagaagag

SEQ ID NO: 3064918 - RNA, 20 nt, Human
cucggagaagagcuguucac

SEQ ID NO: 3064919 - RNA, 13 nt, Human
cucggagaagagc

SEQ ID NO: 3064920 - RNA, 12 nt, Human
cuccucagaucu

SEQ ID NO: 3064921 - RNA, 14 nt, Human
cuccucagaucuuc

SEQ ID NO: 3064922 - RNA, 13 nt, Human
cuccugcaggcag

SEQ ID NO: 3064923 - RNA, 14 nt, Human
cuccugcaggcagc

SEQ ID NO: 3064924 - RNA, 12 nt, Human
cuccugcaggca

SEQ ID NO: 3064925 - RNA, 14 nt, Human
cucccaucucacac

SEQ ID NO: 3064926 - RNA, 15 nt, Human
cucccaucucacaca

SEQ ID NO: 3064927 - RNA, 18 nt, Human
cucccaucucacacauga

SEQ ID NO: 3064928 - RNA, 10 nt, Human
cucccuuccu

SEQ ID NO: 3064929 - RNA, 23 nt, Human
cucccuucccaccucucucacuc

SEQ ID NO: 3064930 - RNA, 17 nt, Human
cucccuuggauuguccc

SEQ ID NO: 3064931 - RNA, 12 nt, Human
cucccuuucaac

SEQ ID NO: 3064932 - RNA, 13 nt, Human
cucccuuucaaca

SEQ ID NO: 3064933 - RNA, 20 nt, Human
cuccuaggacccgucuccag

SEQ ID NO: 3064934 - RNA, 21 nt, Human
cuccuaggacccgucuccagc

SEQ ID NO: 3064935 - RNA, 22 nt, Human
cuccuaggacccgucuccagcu

SEQ ID NO: 3064936 - RNA, 14 nt, Human
cucccuuccucuuu

SEQ ID NO: 3064937 - RNA, 13 nt, Human
cucccuuccucuu

SEQ ID NO: 3064938 - RNA, 16 nt, Human
cucccuucucuucaca

SEQ ID NO: 3064939 - RNA, 14 nt, Human
cugaucgcuucucc

SEQ ID NO: 3064940 - RNA, 15 nt, Human
cugauucccaagcuc

SEQ ID NO: 3064941 - RNA, 18 nt, Human
cugauucccaagcucugc

SEQ ID NO: 3064942 - RNA, 17 nt, Human
cugauucccaagcucug

SEQ ID NO: 3064943 - RNA, 20 nt, Human
cugauucccaagcucugcuc

SEQ ID NO: 3064944 - RNA, 19 nt, Human
cugauucccaagcucugcu

SEQ ID NO: 3064945 - RNA, 22 nt, Human
cugauucccaagcucugcuccu

SEQ ID NO: 3064946 - RNA, 21 nt, Human
cugauguuccuagugaaagag

SEQ ID NO: 3064947 - RNA, 20 nt, Human
cugauguuccuagugaaaga

SEQ ID NO: 3064948 - RNA, 18 nt, Human
cugauguuccuagugaaa

SEQ ID NO: 3064949 - RNA, 13 nt, Human
cugauguuccuag

SEQ ID NO: 3064950 - RNA, 13 nt, Human
cugagucugaagg

SEQ ID NO: 3064951 - RNA, 14 nt, Human
cugagucugaaggc

SEQ ID NO: 3064952 - RNA, 15 nt, Human
cugagucugaaggcu

SEQ ID NO: 3064953 - RNA, 16 nt, Human
cugagucugaaggcug

SEQ ID NO: 3064954 - RNA, 13 nt, Human
cugauaaagauga

SEQ ID NO: 3064955 - RNA, 18 nt, Human
cugcaauuucauaugcug

SEQ ID NO: 3064956 - RNA, 20 nt, Human
cugcaauuucauaugcugua

SEQ ID NO: 3064957 - RNA, 17 nt, Human
cugcacccucaggcagg

SEQ ID NO: 3064958 - RNA, 16 nt, Human
cugcacccucaggcag

SEQ ID NO: 3064959 - RNA, 18 nt, Human
cugcacccucaggcaggu

SEQ ID NO: 3064960 - RNA, 13 nt, Human
cugcacaagcugc

SEQ ID NO: 3064961 - RNA, 14 nt, Human
cugcacaagcugca

SEQ ID NO: 3064962 - RNA, 15 nt, Human
cugcacaagcugcac

SEQ ID NO: 3064963 - RNA, 16 nt, Human
cugcacaagcugcacc

SEQ ID NO: 3064964 - RNA, 22 nt, Human
cugcacagcaggcugccagugc

SEQ ID NO: 3064965 - RNA, 21 nt, Human
cugcacagcaggcugccagug

SEQ ID NO: 3064966 - RNA, 20 nt, Human
cugcacagcaggcugccagu

SEQ ID NO: 3064967 - RNA, 11 nt, Human
cugcagccuca

SEQ ID NO: 3064968 - RNA, 20 nt, Human
cugcagccucaaccuccugg

SEQ ID NO: 3064969 - RNA, 19 nt, Human
cugcagccucaaccuccug

SEQ ID NO: 3064970 - RNA, 22 nt, Human
cugcagccucaaccuccugggc

SEQ ID NO: 3064971 - RNA, 22 nt, Human
cugcagggaguccgaaagggac

SEQ ID NO: 3064972 - RNA, 23 nt, Human
cugcagaagacaguauggcagcu

SEQ ID NO: 3064973 - RNA, 13 nt, Human
cugcagaagacag

SEQ ID NO: 3064974 - RNA, 17 nt, Human
cugcaccggcuggccug

SEQ ID NO: 3064975 - RNA, 18 nt, Human
cugcaccggcuggccugg

SEQ ID NO: 3064976 - RNA, 19 nt, Human
cugcaccggcuggccuggc

SEQ ID NO: 3064977 - RNA, 17 nt, Human
cugcacuugcagacucu

SEQ ID NO: 3064978 - RNA, 16 nt, Human
cugcacuugcagacuc

SEQ ID NO: 3064979 - RNA, 14 nt, Human
cugcacuugcagac

SEQ ID NO: 3064980 - RNA, 16 nt, Human
cugcaccggcuggccu

SEQ ID NO: 3064981 - RNA, 13 nt, Human
cugccucucugca

SEQ ID NO: 3064982 - RNA, 12 nt, Human
cugccucucugc

SEQ ID NO: 3064983 - RNA, 14 nt, Human
cugccucucugcag

SEQ ID NO: 3064984 - RNA, 13 nt, Human
cugccucuucucu

SEQ ID NO: 3064985 - RNA, 23 nt, Human
cugccugaagucacacagugagu

SEQ ID NO: 3064986 - RNA, 23 nt, Human
cugccuguugggccaggagccuc

SEQ ID NO: 3064987 - RNA, 14 nt, Human
cugccugcccaggc

SEQ ID NO: 3064988 - RNA, 13 nt, Human
cugccugcccagg

SEQ ID NO: 3064989 - RNA, 13 nt, Human
cugccuauuuuaa

SEQ ID NO: 3064990 - RNA, 15 nt, Human
cugccuaagugcagc

SEQ ID NO: 3064991 - RNA, 13 nt, Human
cugccucagccuc

SEQ ID NO: 3064992 - RNA, 18 nt, Human
cugcuccucuccccagca

SEQ ID NO: 3064993 - RNA, 17 nt, Human
cugcuccucuccccagc

SEQ ID NO: 3064994 - RNA, 16 nt, Human
cugcuccucuccccag

SEQ ID NO: 3064995 - RNA, 20 nt, Human
cugcggaaugaaccacaucu

SEQ ID NO: 3064996 - RNA, 15 nt, Human
cugcgguccacccag

SEQ ID NO: 3064997 - RNA, 21 nt, Human
cugcggaaugaaccacaucuu

SEQ ID NO: 3064998 - RNA, 16 nt, Human
cugcgguccacccagg

SEQ ID NO: 3064999 - RNA, 14 nt, Human
cugcuccagcuguu

SEQ ID NO: 3065000 - RNA, 15 nt, Human
cugccaugccagcuu

SEQ ID NO: 3065001 - RNA, 17 nt, Human
cugccaugccagcuuau

SEQ ID NO: 3065002 - RNA, 19 nt, Human
cugccaugccagcuuaucu

SEQ ID NO: 3065003 - RNA, 15 nt, Human
cugccaggaagccag

SEQ ID NO: 3065004 - RNA, 16 nt, Human
cugccaggaagccagc

SEQ ID NO: 3065005 - RNA, 18 nt, Human
cugccaggaagccagcag

SEQ ID NO: 3065006 - RNA, 19 nt, Human
cugccaggaagccagcagg

SEQ ID NO: 3065007 - RNA, 19 nt, Human
cugccagccgagauagcca

SEQ ID NO: 3065008 - RNA, 14 nt, Human
cugccacccugggg

SEQ ID NO: 3065009 - RNA, 20 nt, Human
cugccacccuggggagaaag

SEQ ID NO: 3065010 - RNA, 16 nt, Human
cugccacccuggggag

SEQ ID NO: 3065011 - RNA, 15 nt, Human
cugccacccugggga

SEQ ID NO: 3065012 - RNA, 19 nt, Human
cugcccuccaagaccuucu

SEQ ID NO: 3065013 - RNA, 15 nt, Human
cugcccggcugcgga

SEQ ID NO: 3065014 - RNA, 11 nt, Human
cugcccggcug

SEQ ID NO: 3065015 - RNA, 13 nt, Human
cugcccugcccac

SEQ ID NO: 3065016 - RNA, 14 nt, Human
cugcccugcccacc

SEQ ID NO: 3065017 - RNA, 15 nt, Human
cugcccugcccaccu

SEQ ID NO: 3065018 - RNA, 16 nt, Human
cugcccugcccaccug

SEQ ID NO: 3065019 - RNA, 16 nt, Human
cugccauuucugagau

SEQ ID NO: 3065020 - RNA, 14 nt, Human
cugccccuggcagc

SEQ ID NO: 3065021 - RNA, 15 nt, Human
cugccccuggcagcc

SEQ ID NO: 3065022 - RNA, 16 nt, Human
cugccccuggcagccc

SEQ ID NO: 3065023 - RNA, 20 nt, Human
cugcccggcaggguccuaga

SEQ ID NO: 3065024 - RNA, 17 nt, Human
cugggccccugccucuc

SEQ ID NO: 3065025 - RNA, 16 nt, Human
cugggccccugccucu

SEQ ID NO: 3065026 - RNA, 12 nt, Human
cugggccccugc

SEQ ID NO: 3065027 - RNA, 10 nt, Human
cugggccccu

SEQ ID NO: 3065028 - RNA, 20 nt, Human
cugggcaaugugauaaaacc

SEQ ID NO: 3065029 - RNA, 12 nt, Human
cugggagugagc

SEQ ID NO: 3065030 - RNA, 13 nt, Human
cugggagugagcu

SEQ ID NO: 3065031 - RNA, 16 nt, Human
cugggagugagcuggu

SEQ ID NO: 3065032 - RNA, 16 nt, Human
cugggaggcucuggag

SEQ ID NO: 3065033 - RNA, 15 nt, Human
cugggaggcucugga

SEQ ID NO: 3065034 - RNA, 18 nt, Human
cugggaggaaccgagggg

SEQ ID NO: 3065035 - RNA, 22 nt, Human
cugggaggcucuggagcccacu

SEQ ID NO: 3065036 - RNA, 18 nt, Human
cugggaggucaaggcugc

SEQ ID NO: 3065037 - RNA, 16 nt, Human
cugggagcuuuuguag

SEQ ID NO: 3065038 - RNA, 12 nt, Human
cugggaggaacc

SEQ ID NO: 3065039 - RNA, 22 nt, Human
cugggaacccaaguccaagcau

SEQ ID NO: 3065040 - RNA, 20 nt, Human
cuggcuguuggcugggggcc

SEQ ID NO: 3065041 - RNA, 18 nt, Human
cuggcuguuggcuggggg

SEQ ID NO: 3065042 - RNA, 21 nt, Human
cuggcuggguggcaccagcag

SEQ ID NO: 3065043 - RNA, 19 nt, Human
cuggcuguuggcugggggc

SEQ ID NO: 3065044 - RNA, 18 nt, Human
cuggcucuuccaggcugg

SEQ ID NO: 3065045 - RNA, 19 nt, Human
cuggcucuuccaggcuggg

SEQ ID NO: 3065046 - RNA, 20 nt, Human
cuggcucuuccaggcuggga

SEQ ID NO: 3065047 - RNA, 17 nt, Human
cuggcucuuccaggcug

SEQ ID NO: 3065048 - RNA, 13 nt, Human
cuggccugagcug

SEQ ID NO: 3065049 - RNA, 18 nt, Human
cugguccauagagagcaa

SEQ ID NO: 3065050 - RNA, 14 nt, Human
cuggucccacucag

SEQ ID NO: 3065051 - RNA, 18 nt, Human
cuggucccacucagucca

SEQ ID NO: 3065052 - RNA, 15 nt, Human
cuggucccacucagu

SEQ ID NO: 3065053 - RNA, 15 nt, Human
cugguccauagagag

SEQ ID NO: 3065054 - RNA, 17 nt, Human
cugguccauagagagca

SEQ ID NO: 3065055 - RNA, 13 nt, Human
cuggguuggaggg

SEQ ID NO: 3065056 - RNA, 19 nt, Human
cuggguucuacccaggugc

SEQ ID NO: 3065057 - RNA, 23 nt, Human
cugguggcagugggagcugccug

SEQ ID NO: 3065058 - RNA, 19 nt, Human
cugguggcagugggagcug

SEQ ID NO: 3065059 - RNA, 18 nt, Human
cugggguggggaccucag

SEQ ID NO: 3065060 - RNA, 19 nt, Human
cugggguggggaccucagg

SEQ ID NO: 3065061 - RNA, 17 nt, Human
cugggguggggaccuca

SEQ ID NO: 3065062 - RNA, 18 nt, Human
cugggggccucagugcca

SEQ ID NO: 3065063 - RNA, 17 nt, Human
cugggggccucagugcc

SEQ ID NO: 3065064 - RNA, 13 nt, Human
cugggggccucag

SEQ ID NO: 3065065 - RNA, 21 nt, Human
cugggguggggaccucaggcc

SEQ ID NO: 3065066 - RNA, 22 nt, Human
cugggguggggaccucaggccu

SEQ ID NO: 3065067 - RNA, 23 nt, Human
cugggguggggaccucaggccug

SEQ ID NO: 3065068 - RNA, 20 nt, Human
cuggguacuuguggacacag

SEQ ID NO: 3065069 - RNA, 23 nt, Human
cuggguacuuguggacacagcuc

SEQ ID NO: 3065070 - RNA, 21 nt, Human
cuggguacuuguggacacagc

SEQ ID NO: 3065071 - RNA, 19 nt, Human
cuggguacuuguggacaca

SEQ ID NO: 3065072 - RNA, 20 nt, Human
cugggcuucaguggcagcug

SEQ ID NO: 3065073 - RNA, 19 nt, Human
cugggcuucaguggcagcu

SEQ ID NO: 3065074 - RNA, 17 nt, Human
cugggcuucaguggcag

SEQ ID NO: 3065075 - RNA, 18 nt, Human
cugggcuucaguggcagc

SEQ ID NO: 3065076 - RNA, 21 nt, Human
cugggcuuggggaccagagcu

SEQ ID NO: 3065077 - RNA, 17 nt, Human
cugggcuuggggaccag

SEQ ID NO: 3065078 - RNA, 20 nt, Human
cugggcuuggggaccagagc

SEQ ID NO: 3065079 - RNA, 13 nt, Human
cugggcuugggga

SEQ ID NO: 3065080 - RNA, 22 nt, Human
cugggcuucaguggcagcugcu

SEQ ID NO: 3065081 - RNA, 21 nt, Human
cugggcuucaguggcagcugc

SEQ ID NO: 3065082 - RNA, 17 nt, Human
cuggauuauauuaugaa

SEQ ID NO: 3065083 - RNA, 16 nt, Human
cuggauggggcugcac

SEQ ID NO: 3065084 - RNA, 23 nt, Human
cuggauuaaacuuaaucuaaaug

SEQ ID NO: 3065085 - RNA, 13 nt, Human
cuggauuaaacuu

SEQ ID NO: 3065086 - RNA, 15 nt, Human
cuggauggggcugca

SEQ ID NO: 3065087 - RNA, 19 nt, Human
cuggcacaguuuucugaga

SEQ ID NO: 3065088 - RNA, 18 nt, Human
cuggcacaguuuucugag

SEQ ID NO: 3065089 - RNA, 22 nt, Human
cuggcacuauaauguaagcucu

SEQ ID NO: 3065090 - RNA, 23 nt, Human
cuggcacuauaauguaagcucua

SEQ ID NO: 3065091 - RNA, 13 nt, Human
cuggcacugcuuc

SEQ ID NO: 3065092 - RNA, 14 nt, Human
cuggcacugcuucc

SEQ ID NO: 3065093 - RNA, 23 nt, Human
cuggcaaacagggccucugcgga

SEQ ID NO: 3065094 - RNA, 20 nt, Human
cuggcaaacagggccucugc

SEQ ID NO: 3065095 - RNA, 21 nt, Human
cuggcaaacagggccucugcg

SEQ ID NO: 3065096 - RNA, 16 nt, Human
cuggcaaacagggccu

SEQ ID NO: 3065097 - RNA, 17 nt, Human
cuggcaaacagggccuc

SEQ ID NO: 3065098 - RNA, 19 nt, Human
cuggcaaacagggccucug

SEQ ID NO: 3065099 - RNA, 16 nt, Human
cuggccagaugcacca

SEQ ID NO: 3065100 - RNA, 16 nt, Human
cuggccaacgggguga

SEQ ID NO: 3065101 - RNA, 15 nt, Human
cuggcacugcuucca

SEQ ID NO: 3065102 - RNA, 16 nt, Human
cuggcacugcuuccag

SEQ ID NO: 3065103 - RNA, 17 nt, Human
cuggcacugcuuccagu

SEQ ID NO: 3065104 - RNA, 20 nt, Human
cuggccagaugcaccagccc

SEQ ID NO: 3065105 - RNA, 19 nt, Human
cuggccagaugcaccagcc

SEQ ID NO: 3065106 - RNA, 18 nt, Human
cuggccagaugcaccagc

SEQ ID NO: 3065107 - RNA, 17 nt, Human
cuggccagaugcaccag

SEQ ID NO: 3065108 - RNA, 21 nt, Human
cuggccagaugcaccagcccu

SEQ ID NO: 3065109 - RNA, 17 nt, Human
cuggccuagcauacgua

SEQ ID NO: 3065110 - RNA, 17 nt, Human
cuggcccagggcaucug

SEQ ID NO: 3065111 - RNA, 18 nt, Human
cuggcccagggcaucugg

SEQ ID NO: 3065112 - RNA, 14 nt, Human
cuggcccagggcau

SEQ ID NO: 3065113 - RNA, 13 nt, Human
cuggcccagggca

SEQ ID NO: 3065114 - RNA, 12 nt, Human
cuggcccacugc

SEQ ID NO: 3065115 - RNA, 13 nt, Human
cuggcccacugca

SEQ ID NO: 3065116 - RNA, 23 nt, Human
cuggccuagcauacguacacauu

SEQ ID NO: 3065117 - RNA, 20 nt, Human
cuggcccagggcaucuggga

SEQ ID NO: 3065118 - RNA, 14 nt, Human
cuggccuagcauac

SEQ ID NO: 3065119 - RNA, 13 nt, Human
cugcugaaacaac

SEQ ID NO: 3065120 - RNA, 21 nt, Human
cuggaagugcuaauuuugaaa

SEQ ID NO: 3065121 - RNA, 23 nt, Human
cuggaauaauccuaaacauauga

SEQ ID NO: 3065122 - RNA, 15 nt, Human
cuggaagcacagcuu

SEQ ID NO: 3065123 - RNA, 18 nt, Human
cuggaagcacagcuucau

SEQ ID NO: 3065124 - RNA, 14 nt, Human
cuggaagcacagcu

SEQ ID NO: 3065125 - RNA, 15 nt, Human
cuggaaugcaguggu

SEQ ID NO: 3065126 - RNA, 14 nt, Human
cuggaaugcagugg

SEQ ID NO: 3065127 - RNA, 20 nt, Human
cuggagcccacuguacuugc

SEQ ID NO: 3065128 - RNA, 17 nt, Human
cuggagcccacuguacu

SEQ ID NO: 3065129 - RNA, 16 nt, Human
cuggagcccacuguac

SEQ ID NO: 3065130 - RNA, 15 nt, Human
cuggagcccacugua

SEQ ID NO: 3065131 - RNA, 13 nt, Human
cuggagcccacug

SEQ ID NO: 3065132 - RNA, 21 nt, Human
cuggagcccacuguacuugcu

SEQ ID NO: 3065133 - RNA, 17 nt, Human
cuggagcuagaauuuga

SEQ ID NO: 3065134 - RNA, 22 nt, Human
cuggagcuagaauuugauaugu

SEQ ID NO: 3065135 - RNA, 16 nt, Human
cuggagcuagaauuug

SEQ ID NO: 3065136 - RNA, 19 nt, Human
cccuuuuuuggcugcugaa

SEQ ID NO: 3065137 - RNA, 17 nt, Human
ccgagaaggaagccucc

SEQ ID NO: 3065138 - RNA, 18 nt, Human
ccgagauagccaaggcca

SEQ ID NO: 3065139 - RNA, 19 nt, Human
ccgagauagccaaggccaa

SEQ ID NO: 3065140 - RNA, 22 nt, Human
ccgagauagccaaggccaaagg

SEQ ID NO: 3065141 - RNA, 11 nt, Human
cccuuuuccuu

SEQ ID NO: 3065142 - RNA, 13 nt, Human
cccuuuucuguuu

SEQ ID NO: 3065143 - RNA, 17 nt, Human
cccuuuuuuggcugcug

SEQ ID NO: 3065144 - RNA, 18 nt, Human
cccuuuuuuggcugcuga

SEQ ID NO: 3065145 - RNA, 17 nt, Human
ccgaggccuucucugaa

SEQ ID NO: 3065146 - RNA, 19 nt, Human
ccgagccuggcuccaaacc

SEQ ID NO: 3065147 - RNA, 18 nt, Human
ccgagaucacgccacugc

SEQ ID NO: 3065148 - RNA, 16 nt, Human
ccgagccuggcuccaa

SEQ ID NO: 3065149 - RNA, 16 nt, Human
ccgagggggcugcucc

SEQ ID NO: 3065150 - RNA, 18 nt, Human
ccgagggggcugcuccca

SEQ ID NO: 3065151 - RNA, 19 nt, Human
ccgagggggcugcucccac

SEQ ID NO: 3065152 - RNA, 17 nt, Human
cccuugccgucuaccug

SEQ ID NO: 3065153 - RNA, 18 nt, Human
cccuugccgucuaccuga

SEQ ID NO: 3065154 - RNA, 22 nt, Human
cccuugccgucuaccugagggg

SEQ ID NO: 3065155 - RNA, 16 nt, Human
cccuugaugaagaagu

SEQ ID NO: 3065156 - RNA, 15 nt, Human
cccuugaugaagaag

SEQ ID NO: 3065157 - RNA, 18 nt, Human
cccuuggggagcaggcuc

SEQ ID NO: 3065158 - RNA, 14 nt, Human
cccuugugguccca

SEQ ID NO: 3065159 - RNA, 16 nt, Human
cccuuguggucccacc

SEQ ID NO: 3065160 - RNA, 18 nt, Human
cccuuguggucccacccc

SEQ ID NO: 3065161 - RNA, 20 nt, Human
cccuuugacgccaucccagc

SEQ ID NO: 3065162 - RNA, 18 nt, Human
ccccucagggucccuggu

SEQ ID NO: 3065163 - RNA, 20 nt, Human
ccccucagggucccuggugg

SEQ ID NO: 3065164 - RNA, 17 nt, Human
ccccucagggucccugg

SEQ ID NO: 3065165 - RNA, 19 nt, Human
cccugguggcagugggagc

SEQ ID NO: 3065166 - RNA, 16 nt, Human
cccugguggcaguggg

SEQ ID NO: 3065167 - RNA, 15 nt, Human
cccugguggcagugg

SEQ ID NO: 3065168 - RNA, 16 nt, Human
cccugugggcccccaa

SEQ ID NO: 3065169 - RNA, 15 nt, Human
cccugugggccccca

SEQ ID NO: 3065170 - RNA, 15 nt, Human
cccuguuuguuucug

SEQ ID NO: 3065171 - RNA, 18 nt, Human
cccugugggcccccaaau

SEQ ID NO: 3065172 - RNA, 12 nt, Human
cccccagcccca

SEQ ID NO: 3065173 - RNA, 21 nt, Human
cccccgcugucagccauuccu

SEQ ID NO: 3065174 - RNA, 12 nt, Human
ccccacugguga

SEQ ID NO: 3065175 - RNA, 13 nt, Human
ccccacuggugac

SEQ ID NO: 3065176 - RNA, 13 nt, Human
ccccaggaggcca

SEQ ID NO: 3065177 - RNA, 14 nt, Human
ccccaggaggccag

SEQ ID NO: 3065178 - RNA, 15 nt, Human
ccccaggaggccagc

SEQ ID NO: 3065179 - RNA, 21 nt, Human
ccccaggaggccagccuugac

SEQ ID NO: 3065180 - RNA, 22 nt, Human
ccccaggaggccagccuugacc

SEQ ID NO: 3065181 - RNA, 23 nt, Human
ccgcuuucuacccagcgagcccu

SEQ ID NO: 3065182 - RNA, 13 nt, Human
ccggcuggccugg

SEQ ID NO: 3065183 - RNA, 22 nt, Human
ccgggaggcagagguugcagug

SEQ ID NO: 3065184 - RNA, 15 nt, Human
ccgggcacucagaag

SEQ ID NO: 3065185 - RNA, 12 nt, Human
ccggcuggccug

SEQ ID NO: 3065186 - RNA, 20 nt, Human
ccucacaguccuuaccagca

SEQ ID NO: 3065187 - RNA, 22 nt, Human
ccucacaguccuuaccagcaga

SEQ ID NO: 3065188 - RNA, 12 nt, Human
ccucaccccacu

SEQ ID NO: 3065189 - RNA, 15 nt, Human
ccucaccccacugug

SEQ ID NO: 3065190 - RNA, 17 nt, Human
ccucaccuuucccaucu

SEQ ID NO: 3065191 - RNA, 17 nt, Human
ccucacaguccuuacca

SEQ ID NO: 3065192 - RNA, 23 nt, Human
ccugaagcuaucguaaaauuaag

SEQ ID NO: 3065193 - RNA, 22 nt, Human
ccugaagcuaucguaaaauuaa

SEQ ID NO: 3065194 - RNA, 20 nt, Human
ccugaagcuaucguaaaauu

SEQ ID NO: 3065195 - RNA, 20 nt, Human
ccugaacaggauauucucac

SEQ ID NO: 3065196 - RNA, 17 nt, Human
ccugaagucacacagug

SEQ ID NO: 3065197 - RNA, 16 nt, Human
ccugaagucacacagu

SEQ ID NO: 3065198 - RNA, 13 nt, Human
ccugaaggccccg

SEQ ID NO: 3065199 - RNA, 15 nt, Human
ccugaagucacacag

SEQ ID NO: 3065200 - RNA, 22 nt, Human
ccucuuuggucuacacugugcu

SEQ ID NO: 3065201 - RNA, 17 nt, Human
ccucuuaugggcugggu

SEQ ID NO: 3065202 - RNA, 18 nt, Human
ccugaaagaggaaugaag

SEQ ID NO: 3065203 - RNA, 13 nt, Human
ccugaaagaggaa

SEQ ID NO: 3065204 - RNA, 23 nt, Human
ccugaaagaggaaugaaguacuc

SEQ ID NO: 3065205 - RNA, 15 nt, Human
ccucuuaugggcugg

SEQ ID NO: 3065206 - RNA, 16 nt, Human
ccucuuaugggcuggg

SEQ ID NO: 3065207 - RNA, 14 nt, Human
ccucuuaugggcug

SEQ ID NO: 3065208 - RNA, 23 nt, Human
ccucuuagaugcaguucugaaga

SEQ ID NO: 3065209 - RNA, 14 nt, Human
ccucuuagaaaaac

SEQ ID NO: 3065210 - RNA, 14 nt, Human
ccucuguacagagc

SEQ ID NO: 3065211 - RNA, 15 nt, Human
ccucuguacagagcc

SEQ ID NO: 3065212 - RNA, 16 nt, Human
ccucuguacagagccc

SEQ ID NO: 3065213 - RNA, 17 nt, Human
ccucuguacagagccca

SEQ ID NO: 3065214 - RNA, 18 nt, Human
ccucuguacagagcccac

SEQ ID NO: 3065215 - RNA, 23 nt, Human
ccucuguacagagcccacgcccc

SEQ ID NO: 3065216 - RNA, 12 nt, Human
ccugaggcccag

SEQ ID NO: 3065217 - RNA, 13 nt, Human
ccugaggcccaga

SEQ ID NO: 3065218 - RNA, 14 nt, Human
ccugaggcccagag

SEQ ID NO: 3065219 - RNA, 12 nt, Human
ccugacaacacu

SEQ ID NO: 3065220 - RNA, 14 nt, Human
ccugacaacacuca

SEQ ID NO: 3065221 - RNA, 15 nt, Human
ccugacaacacucau

SEQ ID NO: 3065222 - RNA, 16 nt, Human
ccugacaacacucauu

SEQ ID NO: 3065223 - RNA, 17 nt, Human
ccugaggcuccacuugg

SEQ ID NO: 3065224 - RNA, 23 nt, Human
ccugaggcccuucucuccagccc

SEQ ID NO: 3065225 - RNA, 21 nt, Human
ccugaggcccuucucuccagc

SEQ ID NO: 3065226 - RNA, 22 nt, Human
ccugaggcccuucucuccagcc

SEQ ID NO: 3065227 - RNA, 16 nt, Human
ccugaggcccuucucu

SEQ ID NO: 3065228 - RNA, 17 nt, Human
ccugaggcccuucucuc

SEQ ID NO: 3065229 - RNA, 19 nt, Human
ccugaggcccuucucucca

SEQ ID NO: 3065230 - RNA, 20 nt, Human
ccugaggcccuucucuccag

SEQ ID NO: 3065231 - RNA, 14 nt, Human
ccugaggcccuucu

SEQ ID NO: 3065232 - RNA, 18 nt, Human
ccugaggcuccacuuggu

SEQ ID NO: 3065233 - RNA, 20 nt, Human
ccugaggcuccacuuggucu

SEQ ID NO: 3065234 - RNA, 14 nt, Human
ccugaugcuucuuc

SEQ ID NO: 3065235 - RNA, 23 nt, Human
ccugauugugucucuugguccug

SEQ ID NO: 3065236 - RNA, 17 nt, Human
ccugaugcuucuucaga

SEQ ID NO: 3065237 - RNA, 18 nt, Human
ccugaugcuucuucagag

SEQ ID NO: 3065238 - RNA, 17 nt, Human
ccuccugggaaugaagc

SEQ ID NO: 3065239 - RNA, 13 nt, Human
ccuccugggcuaa

SEQ ID NO: 3065240 - RNA, 22 nt, Human
ccuccugugugugcgccuacag

SEQ ID NO: 3065241 - RNA, 15 nt, Human
ccuccugugugugcg

SEQ ID NO: 3065242 - RNA, 13 nt, Human
ccuccugugugug

SEQ ID NO: 3065243 - RNA, 15 nt, Human
ccucccucccucuuu

SEQ ID NO: 3065244 - RNA, 13 nt, Human
ccucccucccucu

SEQ ID NO: 3065245 - RNA, 16 nt, Human
ccucccucccucuuuc

SEQ ID NO: 3065246 - RNA, 15 nt, Human
ccucagucuggcccu

SEQ ID NO: 3065247 - RNA, 19 nt, Human
ccucaggugauccacccac

SEQ ID NO: 3065248 - RNA, 17 nt, Human
ccucaggugauccaccc

SEQ ID NO: 3065249 - RNA, 22 nt, Human
ccucaggugagaagcagaggaa

SEQ ID NO: 3065250 - RNA, 22 nt, Human
ccucaggugauccacccaccuc

SEQ ID NO: 3065251 - RNA, 15 nt, Human
ccucagggucccugg

SEQ ID NO: 3065252 - RNA, 22 nt, Human
ccucagggucccugguggcagc

SEQ ID NO: 3065253 - RNA, 16 nt, Human
ccucaggugagaagca

SEQ ID NO: 3065254 - RNA, 14 nt, Human
ccucagcauccugg

SEQ ID NO: 3065255 - RNA, 17 nt, Human
ccucagcauccuggcac

SEQ ID NO: 3065256 - RNA, 16 nt, Human
ccucagcauccuggca

SEQ ID NO: 3065257 - RNA, 20 nt, Human
ccucagaaaacaaggaugaa

SEQ ID NO: 3065258 - RNA, 14 nt, Human
ccucaggccugggg

SEQ ID NO: 3065259 - RNA, 21 nt, Human
ccucaggccugggggcugggc

SEQ ID NO: 3065260 - RNA, 10 nt, Human
ccucaggccu

SEQ ID NO: 3065261 - RNA, 11 nt, Human
ccucaggccug

SEQ ID NO: 3065262 - RNA, 14 nt, Human
ccucagggucccug

SEQ ID NO: 3065263 - RNA, 23 nt, Human
ccuccugugugugcgccuacagg

SEQ ID NO: 3065264 - RNA, 12 nt, Human
ccucucccauca

SEQ ID NO: 3065265 - RNA, 23 nt, Human
ccucugaaaaccaauguucucuc

SEQ ID NO: 3065266 - RNA, 15 nt, Human
ccucugacacacagc

SEQ ID NO: 3065267 - RNA, 16 nt, Human
ccucugacacacagcu

SEQ ID NO: 3065268 - RNA, 12 nt, Human
ccucugggacug

SEQ ID NO: 3065269 - RNA, 14 nt, Human
ccucugcacucccc

SEQ ID NO: 3065270 - RNA, 19 nt, Human
ccucugcacuccccugcug

SEQ ID NO: 3065271 - RNA, 20 nt, Human
ccucugcacuccccugcugg

SEQ ID NO: 3065272 - RNA, 21 nt, Human
ccucugcacuccccugcuggg

SEQ ID NO: 3065273 - RNA, 22 nt, Human
ccucugcacuccccugcugggu

SEQ ID NO: 3065274 - RNA, 19 nt, Human
ccucugcagcaauaaagca

SEQ ID NO: 3065275 - RNA, 20 nt, Human
ccucugcacaagcugcaccc

SEQ ID NO: 3065276 - RNA, 17 nt, Human
ccucugcacaagcugca

SEQ ID NO: 3065277 - RNA, 19 nt, Human
ccucugcacaagcugcacc

SEQ ID NO: 3065278 - RNA, 11 nt, Human
ccucugcacaa

SEQ ID NO: 3065279 - RNA, 15 nt, Human
ccucugcacaagcug

SEQ ID NO: 3065280 - RNA, 18 nt, Human
ccucugacacacagcucu

SEQ ID NO: 3065281 - RNA, 17 nt, Human
ccucugacacacagcuc

SEQ ID NO: 3065282 - RNA, 14 nt, Human
ccuuugacaaaggu

SEQ ID NO: 3065283 - RNA, 23 nt, Human
ccuuugacgccaucccagcccca

SEQ ID NO: 3065284 - RNA, 16 nt, Human
ccuuugcuugaaagaa

SEQ ID NO: 3065285 - RNA, 13 nt, Human
ccuuuaagagaaa

SEQ ID NO: 3065286 - RNA, 16 nt, Human
ccuuguggucccaccc

SEQ ID NO: 3065287 - RNA, 19 nt, Human
ccuuguggucccaccccac

SEQ ID NO: 3065288 - RNA, 20 nt, Human
ccuuguggucccaccccaca

SEQ ID NO: 3065289 - RNA, 13 nt, Human
ccuuggcugcagg

SEQ ID NO: 3065290 - RNA, 12 nt, Human
ccuuggcugcag

SEQ ID NO: 3065291 - RNA, 21 nt, Human
cgauucuucugcuucagccuc

SEQ ID NO: 3065292 - RNA, 19 nt, Human
cgauucuucugcuucagcc

SEQ ID NO: 3065293 - RNA, 13 nt, Human
cgauucuucugcu

SEQ ID NO: 3065294 - RNA, 19 nt, Human
cgaucuggguucacugcaa

SEQ ID NO: 3065295 - RNA, 12 nt, Human
cgauuucuguuu

SEQ ID NO: 3065296 - RNA, 11 nt, Human
cgcaaugugac

SEQ ID NO: 3065297 - RNA, 23 nt, Human
cgcacuucgggaggucgaggcag

SEQ ID NO: 3065298 - RNA, 12 nt, Human
cgaggacaggga

SEQ ID NO: 3065299 - RNA, 13 nt, Human
cgaggacagggag

SEQ ID NO: 3065300 - RNA, 19 nt, Human
cgaggccuucucugaagga

SEQ ID NO: 3065301 - RNA, 18 nt, Human
cgaggccuucucugaagg

SEQ ID NO: 3065302 - RNA, 20 nt, Human
ccuuuguauucucuccugua

SEQ ID NO: 3065303 - RNA, 18 nt, Human
ccuuuguauucucuccug

SEQ ID NO: 3065304 - RNA, 15 nt, Human
ccuuuguauucucuc

SEQ ID NO: 3065305 - RNA, 20 nt, Human
cgcgugcacacaccagagcc

SEQ ID NO: 3065306 - RNA, 19 nt, Human
cgcgugcacacaccagagc

SEQ ID NO: 3065307 - RNA, 16 nt, Human
cgcgugcacacaccag

SEQ ID NO: 3065308 - RNA, 15 nt, Human
cgcuaagagggaggg

SEQ ID NO: 3065309 - RNA, 16 nt, Human
cgcuaagagggaggga

SEQ ID NO: 3065310 - RNA, 14 nt, Human
cgcuaagagggagg

SEQ ID NO: 3065311 - RNA, 16 nt, Human
cgcgacaaugcaaacc

SEQ ID NO: 3065312 - RNA, 17 nt, Human
cgcgacaaugcaaacca

SEQ ID NO: 3065313 - RNA, 15 nt, Human
cgcgacaaugcaaac

SEQ ID NO: 3065314 - RNA, 15 nt, Human
cgcccccacugguga

SEQ ID NO: 3065315 - RNA, 13 nt, Human
cgcagacaggacc

SEQ ID NO: 3065316 - RNA, 14 nt, Human
cgcagacaggacca

SEQ ID NO: 3065317 - RNA, 20 nt, Human
cgggaggauguucugggaca

SEQ ID NO: 3065318 - RNA, 12 nt, Human
cgggcaugacac

SEQ ID NO: 3065319 - RNA, 15 nt, Human
cgggcaugacacgaa

SEQ ID NO: 3065320 - RNA, 17 nt, Human
cgggaggucgaggcagg

SEQ ID NO: 3065321 - RNA, 16 nt, Human
cgggaggucgaggcag

SEQ ID NO: 3065322 - RNA, 15 nt, Human
cggcuggccuggccc

SEQ ID NO: 3065323 - RNA, 16 nt, Human
cggcuggccuggcccc

SEQ ID NO: 3065324 - RNA, 14 nt, Human
cggcuggccuggcc

SEQ ID NO: 3065325 - RNA, 18 nt, Human
cggcuggccuggccccuc

SEQ ID NO: 3065326 - RNA, 21 nt, Human
cggccccaccagugccucucc

SEQ ID NO: 3065327 - RNA, 18 nt, Human
cggccccaccagugccuc

SEQ ID NO: 3065328 - RNA, 20 nt, Human
cggccccaccagugccucuc

SEQ ID NO: 3065329 - RNA, 15 nt, Human
cggccccaccagugc

SEQ ID NO: 3065330 - RNA, 16 nt, Human
cggccccaccagugcc

SEQ ID NO: 3065331 - RNA, 17 nt, Human
cggccccaccagugccu

SEQ ID NO: 3065332 - RNA, 13 nt, Human
cggccccaccagu

SEQ ID NO: 3065333 - RNA, 14 nt, Human
cggccuccauccug

SEQ ID NO: 3065334 - RNA, 16 nt, Human
cggccuccauccugag

SEQ ID NO: 3065335 - RNA, 17 nt, Human
cggccuccauccugagg

SEQ ID NO: 3065336 - RNA, 17 nt, Human
cggaccccacuccggcc

SEQ ID NO: 3065337 - RNA, 21 nt, Human
cggaccccacuccggcccucc

SEQ ID NO: 3065338 - RNA, 16 nt, Human
cggaucuuuggacaga

SEQ ID NO: 3065339 - RNA, 19 nt, Human
cggaucuuuggacagaagc

SEQ ID NO: 3065340 - RNA, 20 nt, Human
cggaaugaaccacaucuugc

SEQ ID NO: 3065341 - RNA, 18 nt, Human
cggacagccacggccagg

SEQ ID NO: 3065342 - RNA, 16 nt, Human
cggacagccacggcca

SEQ ID NO: 3065343 - RNA, 15 nt, Human
cggacagccacggcc

SEQ ID NO: 3065344 - RNA, 13 nt, Human
cgcuccugugucu

SEQ ID NO: 3065345 - RNA, 22 nt, Human
cguauaaaagccuguuuaagag

SEQ ID NO: 3065346 - RNA, 21 nt, Human
cguauaaaagccuguuuaaga

SEQ ID NO: 3065347 - RNA, 17 nt, Human
cguauaaaagccuguuu

SEQ ID NO: 3065348 - RNA, 16 nt, Human
cguauaaaagccuguu

SEQ ID NO: 3065349 - RNA, 23 nt, Human
cggugcuaucucccccagcccca

SEQ ID NO: 3065350 - RNA, 16 nt, Human
cgucaacucauauuuu

SEQ ID NO: 3065351 - RNA, 20 nt, Human
cgucaacucauauuuucaug

SEQ ID NO: 3065352 - RNA, 14 nt, Human
cgucuaccugaggg

SEQ ID NO: 3065353 - RNA, 14 nt, Human
cgucugacaggcaa

SEQ ID NO: 3065354 - RNA, 13 nt, Human
cgucugacaggca

SEQ ID NO: 3065355 - RNA, 11 nt, Human
cguccccuguc

SEQ ID NO: 3065356 - RNA, 14 nt, Human
cguccccugucccc

SEQ ID NO: 3065357 - RNA, 21 nt, Human
cgugcacacaccagagcccac

SEQ ID NO: 3065358 - RNA, 20 nt, Human
cgugcacacaccagagccca

SEQ ID NO: 3065359 - RNA, 19 nt, Human
cgugcauaccacuuuuguu

SEQ ID NO: 3065360 - RNA, 18 nt, Human
cgugcauaccacuuuugu

SEQ ID NO: 3065361 - RNA, 14 nt, Human
cgugcauaccacuu

SEQ ID NO: 3065362 - RNA, 22 nt, Human
cgugcacacaccagagcccacc

SEQ ID NO: 3065363 - RNA, 22 nt, Human
cgugcaguggugcgaucugggu

SEQ ID NO: 3065364 - RNA, 12 nt, Human
cguggcugcuuc

SEQ ID NO: 3065365 - RNA, 14 nt, Human
cguggcugcuucaa

SEQ ID NO: 3065366 - RNA, 15 nt, Human
cguggcugcuucaag

SEQ ID NO: 3065367 - RNA, 21 nt, Human
cguuucuaaaggcuaccuuug

SEQ ID NO: 3065368 - RNA, 19 nt, Human
cguuucuaaaggcuaccuu

SEQ ID NO: 3065369 - RNA, 20 nt, Human
cguuucuaugacacaugcaa

SEQ ID NO: 3065370 - RNA, 13 nt, Human
cguuuucaaaauu

SEQ ID NO: 3065371 - RNA, 13 nt, Human
ccuugacagggca

SEQ ID NO: 3065372 - RNA, 14 nt, Human
ccuugacagggcac

SEQ ID NO: 3065373 - RNA, 19 nt, Human
ccuugaccauucuccaccu

SEQ ID NO: 3065374 - RNA, 20 nt, Human
ccuugaccauucuccaccug

SEQ ID NO: 3065375 - RNA, 17 nt, Human
ccuugacagggcacacc

SEQ ID NO: 3065376 - RNA, 15 nt, Human
ccuugacagggcaca

SEQ ID NO: 3065377 - RNA, 19 nt, Human
ccuuggauuguccccgacc

SEQ ID NO: 3065378 - RNA, 22 nt, Human
ccuugaguugauucagcucugc

SEQ ID NO: 3065379 - RNA, 23 nt, Human
ccuugaguugauucagcucugca

SEQ ID NO: 3065380 - RNA, 21 nt, Human
ccuugaccauucuccaccugc

SEQ ID NO: 3065381 - RNA, 20 nt, Human
ccuugaguugauucagcucu

SEQ ID NO: 3065382 - RNA, 17 nt, Human
ccuugaaugaugccaug

SEQ ID NO: 3065383 - RNA, 17 nt, Human
ccuugaacuuugaccuc

SEQ ID NO: 3065384 - RNA, 16 nt, Human
ccuugaacuggguacu

SEQ ID NO: 3065385 - RNA, 19 nt, Human
ccuugaaaacacuguucuc

SEQ ID NO: 3065386 - RNA, 21 nt, Human
ccuugaaaacacuguucucug

SEQ ID NO: 3065387 - RNA, 22 nt, Human
ccuugaaaacacuguucucugc

SEQ ID NO: 3065388 - RNA, 14 nt, Human
ccuugaacugggua

SEQ ID NO: 3065389 - RNA, 18 nt, Human
ccuucgcuccugugucuu

SEQ ID NO: 3065390 - RNA, 15 nt, Human
ccuucgcuccugugu

SEQ ID NO: 3065391 - RNA, 14 nt, Human
ccuucgcuccugug

SEQ ID NO: 3065392 - RNA, 13 nt, Human
ccuucgcuccugu

SEQ ID NO: 3065393 - RNA, 15 nt, Human
ccuugaaaacacugu

SEQ ID NO: 3065394 - RNA, 11 nt, Human
ccuuuggcuuc

SEQ ID NO: 3065395 - RNA, 14 nt, Human
ccuuaccagcagag

SEQ ID NO: 3065396 - RNA, 15 nt, Human
ccuuaccagcagagc

SEQ ID NO: 3065397 - RNA, 16 nt, Human
ccuuaccagcagagca

SEQ ID NO: 3065398 - RNA, 17 nt, Human
ccuuaccagcagagcac

SEQ ID NO: 3065399 - RNA, 19 nt, Human
ccuuacccucauguucuua

SEQ ID NO: 3065400 - RNA, 20 nt, Human
ccuuaccucggugccuuccu

SEQ ID NO: 3065401 - RNA, 14 nt, Human
ccuuaccugccagg

SEQ ID NO: 3065402 - RNA, 14 nt, Human
ccuuagacaguccc

SEQ ID NO: 3065403 - RNA, 21 nt, Human
ccuuagacagucccugccaau

SEQ ID NO: 3065404 - RNA, 18 nt, Human
ccuuagacagucccugcc

SEQ ID NO: 3065405 - RNA, 19 nt, Human
ccuuagacagucccugcca

SEQ ID NO: 3065406 - RNA, 16 nt, Human
ccuuagacagucccug

SEQ ID NO: 3065407 - RNA, 17 nt, Human
ccuuagacagucccugc

SEQ ID NO: 3065408 - RNA, 15 nt, Human
ccuuccagggguggg

SEQ ID NO: 3065409 - RNA, 16 nt, Human
ccuuccagggguggga

SEQ ID NO: 3065410 - RNA, 18 nt, Human
ccuuccaggggugggaca

SEQ ID NO: 3065411 - RNA, 22 nt, Human
ccuuccaggggugggacacccu

SEQ ID NO: 3065412 - RNA, 14 nt, Human
ccuuccucuuucca

SEQ ID NO: 3065413 - RNA, 20 nt, Human
ccuucagugccuuauggaac

SEQ ID NO: 3065414 - RNA, 15 nt, Human
ccuucagugccuuau

SEQ ID NO: 3065415 - RNA, 19 nt, Human
ccuucagugccuuauggaa

SEQ ID NO: 3065416 - RNA, 13 nt, Human
ccuucagugccuu

SEQ ID NO: 3065417 - RNA, 14 nt, Human
ccuucagugccuua

SEQ ID NO: 3065418 - RNA, 12 nt, Human
ccuucagugccu

SEQ ID NO: 3065419 - RNA, 12 nt, Human
ccuucagccuga

SEQ ID NO: 3065420 - RNA, 22 nt, Human
ccugugagcuaggaauuguguu

SEQ ID NO: 3065421 - RNA, 20 nt, Human
ccugugaguacuacaguccu

SEQ ID NO: 3065422 - RNA, 17 nt, Human
ccugucccccugacaac

SEQ ID NO: 3065423 - RNA, 16 nt, Human
ccugucccccugacaa

SEQ ID NO: 3065424 - RNA, 18 nt, Human
ccuguccccgcacugggc

SEQ ID NO: 3065425 - RNA, 17 nt, Human
ccugugccucugggacu

SEQ ID NO: 3065426 - RNA, 15 nt, Human
ccugugccucuggga

SEQ ID NO: 3065427 - RNA, 19 nt, Human
ccugugccucugggacugg

SEQ ID NO: 3065428 - RNA, 20 nt, Human
ccugugauggggcccugccu

SEQ ID NO: 3065429 - RNA, 21 nt, Human
ccugugauggggcccugccuc

SEQ ID NO: 3065430 - RNA, 22 nt, Human
ccugugauggggcccugccucc

SEQ ID NO: 3065431 - RNA, 18 nt, Human
ccugugauggggcccugc

SEQ ID NO: 3065432 - RNA, 19 nt, Human
ccugugauggggcccugcc

SEQ ID NO: 3065433 - RNA, 17 nt, Human
ccugugauggggcccug

SEQ ID NO: 3065434 - RNA, 13 nt, Human
ccugguggcagcu

SEQ ID NO: 3065435 - RNA, 12 nt, Human
ccugguggcagc

SEQ ID NO: 3065436 - RNA, 14 nt, Human
ccugguggcagcuc

SEQ ID NO: 3065437 - RNA, 16 nt, Human
ccugguggcagcucac

SEQ ID NO: 3065438 - RNA, 17 nt, Human
ccugguggcagcucacc

SEQ ID NO: 3065439 - RNA, 18 nt, Human
ccugguggcagcucaccu

SEQ ID NO: 3065440 - RNA, 12 nt, Human
ccuguaccucuu

SEQ ID NO: 3065441 - RNA, 20 nt, Human
ccuguaauccuagcacuuug

SEQ ID NO: 3065442 - RNA, 21 nt, Human
ccuguagagugggagcugagu

SEQ ID NO: 3065443 - RNA, 19 nt, Human
ccuguagagugggagcuga

SEQ ID NO: 3065444 - RNA, 23 nt, Human
ccuguagagugggagcugagugg

SEQ ID NO: 3065445 - RNA, 20 nt, Human
ccugcuuuuuauggccugug

SEQ ID NO: 3065446 - RNA, 21 nt, Human
ccugcuggguguggcgcagca

SEQ ID NO: 3065447 - RNA, 13 nt, Human
ccugcugguucag

SEQ ID NO: 3065448 - RNA, 19 nt, Human
ccugcugguucaggguugg

SEQ ID NO: 3065449 - RNA, 23 nt, Human
ccugcgucucauacucaccucac

SEQ ID NO: 3065450 - RNA, 19 nt, Human
ccugcaacaccuuguuucc

SEQ ID NO: 3065451 - RNA, 16 nt, Human
ccugcaaccugauugu

SEQ ID NO: 3065452 - RNA, 18 nt, Human
ccugcaacaccuuguuuc

SEQ ID NO: 3065453 - RNA, 13 nt, Human
ccugcuccagcug

SEQ ID NO: 3065454 - RNA, 14 nt, Human
ccugcuccagcugu

SEQ ID NO: 3065455 - RNA, 22 nt, Human
ccugcuccagcuguucagcugg

SEQ ID NO: 3065456 - RNA, 12 nt, Human
ccugcuccagcu

SEQ ID NO: 3065457 - RNA, 12 nt, Human
ccuggcggggug

SEQ ID NO: 3065458 - RNA, 14 nt, Human
ccuggccccucagg

SEQ ID NO: 3065459 - RNA, 12 nt, Human
ccuggcucugug

SEQ ID NO: 3065460 - RNA, 18 nt, Human
ccuggcucuguggcgagc

SEQ ID NO: 3065461 - RNA, 18 nt, Human
ccuggcaugggaaugaau

SEQ ID NO: 3065462 - RNA, 21 nt, Human
ccugggaggcucuggagccca

SEQ ID NO: 3065463 - RNA, 13 nt, Human
ccugggaggcucu

SEQ ID NO: 3065464 - RNA, 16 nt, Human
ccugggaucccucauc

SEQ ID NO: 3065465 - RNA, 20 nt, Human
ccugggaucccucauccuca

SEQ ID NO: 3065466 - RNA, 20 nt, Human
ccugggaggucaaggcugca

SEQ ID NO: 3065467 - RNA, 12 nt, Human
ccugggcagaag

SEQ ID NO: 3065468 - RNA, 14 nt, Human
ccugggcagaagga

SEQ ID NO: 3065469 - RNA, 20 nt, Human
ccuggacugugugcucagga

SEQ ID NO: 3065470 - RNA, 17 nt, Human
ccuggacugugugcuca

SEQ ID NO: 3065471 - RNA, 13 nt, Human
ccuggacugaggg

SEQ ID NO: 3065472 - RNA, 14 nt, Human
ccuggacugagggg

SEQ ID NO: 3065473 - RNA, 21 nt, Human
ccuggacugagggggccugga

SEQ ID NO: 3065474 - RNA, 22 nt, Human
ccuggacugagggggccuggau

SEQ ID NO: 3065475 - RNA, 13 nt, Human
ccuggacccugug

SEQ ID NO: 3065476 - RNA, 14 nt, Human
ccuggacccugugg

SEQ ID NO: 3065477 - RNA, 20 nt, Human
ccuggcacugcuuccaguga

SEQ ID NO: 3065478 - RNA, 17 nt, Human
ccuggcacugcuuccag

SEQ ID NO: 3065479 - RNA, 23 nt, Human
ccuggacugagggggccuggaug

SEQ ID NO: 3065480 - RNA, 21 nt, Human
ccuggcacugcuuccagugag

SEQ ID NO: 3065481 - RNA, 13 nt, Human
ccuggcacuggca

SEQ ID NO: 3065482 - RNA, 14 nt, Human
ccuggcagccccug

SEQ ID NO: 3065483 - RNA, 22 nt, Human
ccuggcacuggcaaacagggcc

SEQ ID NO: 3065484 - RNA, 23 nt, Human
ccuggcacuggcaaacagggccu

SEQ ID NO: 3065485 - RNA, 16 nt, Human
ccuggcagccccuguu

SEQ ID NO: 3065486 - RNA, 16 nt, Human
ccuggcaugggaauga

SEQ ID NO: 3065487 - RNA, 17 nt, Human
ccuggcaugggaaugaa

SEQ ID NO: 3065488 - RNA, 14 nt, Human
ccuggcaugggaau

SEQ ID NO: 3065489 - RNA, 22 nt, Human
ccacacccagcccacuucugcc

SEQ ID NO: 3065490 - RNA, 21 nt, Human
ccacacccagcccacuucugc

SEQ ID NO: 3065491 - RNA, 15 nt, Human
ccacacccagcccac

SEQ ID NO: 3065492 - RNA, 20 nt, Human
ccacacccagcccacuucug

SEQ ID NO: 3065493 - RNA, 20 nt, Human
ccacaccauaagcuacugcc

SEQ ID NO: 3065494 - RNA, 21 nt, Human
ccacaccauaagcuacugcca

SEQ ID NO: 3065495 - RNA, 22 nt, Human
ccacaccauaagcuacugccau

SEQ ID NO: 3065496 - RNA, 20 nt, Human
ccacaggaaccacaagacug

SEQ ID NO: 3065497 - RNA, 16 nt, Human
ccacaggaucagucug

SEQ ID NO: 3065498 - RNA, 21 nt, Human
ccaccaacauacucccaucug

SEQ ID NO: 3065499 - RNA, 17 nt, Human
ccacaucuugcucugcu

SEQ ID NO: 3065500 - RNA, 18 nt, Human
ccacaucuugcucugcug

SEQ ID NO: 3065501 - RNA, 19 nt, Human
ccacaucuugcucugcuga

SEQ ID NO: 3065502 - RNA, 16 nt, Human
ccacauuccugaugcu

SEQ ID NO: 3065503 - RNA, 16 nt, Human
ccacaugugcacaugc

SEQ ID NO: 3065504 - RNA, 16 nt, Human
ccaauauucauagcag

SEQ ID NO: 3065505 - RNA, 17 nt, Human
ccacccccacccaaggg

SEQ ID NO: 3065506 - RNA, 23 nt, Human
ccacccaggagccccgaggccuu

SEQ ID NO: 3065507 - RNA, 21 nt, Human
ccacccaggagccccgaggcc

SEQ ID NO: 3065508 - RNA, 22 nt, Human
ccagaaguuugagaucagccug

SEQ ID NO: 3065509 - RNA, 23 nt, Human
ccagaaguuugagaucagccugg

SEQ ID NO: 3065510 - RNA, 23 nt, Human
ccacugcacuccagccuggguga

SEQ ID NO: 3065511 - RNA, 13 nt, Human
ccacugcagaaga

SEQ ID NO: 3065512 - RNA, 18 nt, Human
ccacugcagaagacagua

SEQ ID NO: 3065513 - RNA, 13 nt, Human
ccacuucagcuga

SEQ ID NO: 3065514 - RNA, 14 nt, Human
ccacuucagcugac

SEQ ID NO: 3065515 - RNA, 20 nt, Human
ccagacaccuugacagggca

SEQ ID NO: 3065516 - RNA, 21 nt, Human
ccagacaccuugacagggcac

SEQ ID NO: 3065517 - RNA, 21 nt, Human
ccagaauuucccaaagcagug

SEQ ID NO: 3065518 - RNA, 18 nt, Human
ccagaauuucccaaagca

SEQ ID NO: 3065519 - RNA, 12 nt, Human
ccagaauuuccc

SEQ ID NO: 3065520 - RNA, 19 nt, Human
ccagaauuucccaaagcag

SEQ ID NO: 3065521 - RNA, 14 nt, Human
ccacgguguucugu

SEQ ID NO: 3065522 - RNA, 23 nt, Human
ccacggccaggccagagggagug

SEQ ID NO: 3065523 - RNA, 18 nt, Human
ccacggccaggccagagg

SEQ ID NO: 3065524 - RNA, 16 nt, Human
ccacggccaggccaga

SEQ ID NO: 3065525 - RNA, 19 nt, Human
ccacgcuggagugcaguga

SEQ ID NO: 3065526 - RNA, 18 nt, Human
ccacgcuggagugcagug

SEQ ID NO: 3065527 - RNA, 15 nt, Human
ccacccccacccaag

SEQ ID NO: 3065528 - RNA, 13 nt, Human
ccacgcuggagug

SEQ ID NO: 3065529 - RNA, 16 nt, Human
ccacgcuggagugcag

SEQ ID NO: 3065530 - RNA, 15 nt, Human
ccaccccacacacgc

SEQ ID NO: 3065531 - RNA, 14 nt, Human
ccacuacauucugu

SEQ ID NO: 3065532 - RNA, 15 nt, Human
ccacuacauucuguu

SEQ ID NO: 3065533 - RNA, 11 nt, Human
ccacuacauuc

SEQ ID NO: 3065534 - RNA, 17 nt, Human
ccacuacauucuguuaa

SEQ ID NO: 3065535 - RNA, 16 nt, Human
ccacuacauucuguua

SEQ ID NO: 3065536 - RNA, 15 nt, Human
cauuuccuaaauaua

SEQ ID NO: 3065537 - RNA, 17 nt, Human
cauuuaggccaugggac

SEQ ID NO: 3065538 - RNA, 16 nt, Human
cauuuaaaagauacag

SEQ ID NO: 3065539 - RNA, 15 nt, Human
cauuuaaaagauaca

SEQ ID NO: 3065540 - RNA, 12 nt, Human
cauuuaaaagau

SEQ ID NO: 3065541 - RNA, 13 nt, Human
cauuuccuguguc

SEQ ID NO: 3065542 - RNA, 12 nt, Human
cauuuccugugu

SEQ ID NO: 3065543 - RNA, 23 nt, Human
cauuguauucagaguugaugguu

SEQ ID NO: 3065544 - RNA, 18 nt, Human
cauuguuggccaaagcca

SEQ ID NO: 3065545 - RNA, 17 nt, Human
cauuguuggccaaagcc

SEQ ID NO: 3065546 - RNA, 14 nt, Human
cacccaagggccug

SEQ ID NO: 3065547 - RNA, 15 nt, Human
cacccaagggccugg

SEQ ID NO: 3065548 - RNA, 17 nt, Human
ccaaacucaccugcccc

SEQ ID NO: 3065549 - RNA, 19 nt, Human
cauuuuagggguagcauuu

SEQ ID NO: 3065550 - RNA, 20 nt, Human
cauuugaaaauuuugauguu

SEQ ID NO: 3065551 - RNA, 22 nt, Human
cauuugaaaauuuugauguuuu

SEQ ID NO: 3065552 - RNA, 13 nt, Human
cauuugcuccuuu

SEQ ID NO: 3065553 - RNA, 14 nt, Human
cauuugcuccuuuc

SEQ ID NO: 3065554 - RNA, 13 nt, Human
cauuugcucaugg

SEQ ID NO: 3065555 - RNA, 18 nt, Human
cauuugcucauggaauug

SEQ ID NO: 3065556 - RNA, 22 nt, Human
cauuuguuugaacugauaaaga

SEQ ID NO: 3065557 - RNA, 20 nt, Human
cauuuguuugaacugauaaa

SEQ ID NO: 3065558 - RNA, 17 nt, Human
cauuuguuugaacugau

SEQ ID NO: 3065559 - RNA, 18 nt, Human
cauuugagcagggcucag

SEQ ID NO: 3065560 - RNA, 17 nt, Human
cauuugagcagggcuca

SEQ ID NO: 3065561 - RNA, 20 nt, Human
cauuugagcagggcucagcg

SEQ ID NO: 3065562 - RNA, 16 nt, Human
cauuugagcagggcuc

SEQ ID NO: 3065563 - RNA, 15 nt, Human
ccaagcucccaggca

SEQ ID NO: 3065564 - RNA, 16 nt, Human
ccaagcucccaggcau

SEQ ID NO: 3065565 - RNA, 22 nt, Human
ccaagcucccaggcauucccca

SEQ ID NO: 3065566 - RNA, 17 nt, Human
ccaaggccaaaggaagc

SEQ ID NO: 3065567 - RNA, 14 nt, Human
ccaagcucccaggc

SEQ ID NO: 3065568 - RNA, 22 nt, Human
ccaagcauaccaacacgagcag

SEQ ID NO: 3065569 - RNA, 17 nt, Human
ccaagcauuuagaugua

SEQ ID NO: 3065570 - RNA, 23 nt, Human
ccaagguuuggggaagaacgaag

SEQ ID NO: 3065571 - RNA, 13 nt, Human
ccaaggugggagg

SEQ ID NO: 3065572 - RNA, 20 nt, Human
ccaagucaagugaaaaagga

SEQ ID NO: 3065573 - RNA, 19 nt, Human
ccaagggccuggccugagc

SEQ ID NO: 3065574 - RNA, 16 nt, Human
ccaagggccuggccug

SEQ ID NO: 3065575 - RNA, 18 nt, Human
ccaagggccuggccugag

SEQ ID NO: 3065576 - RNA, 22 nt, Human
ccaaggggaauguuugccucug

SEQ ID NO: 3065577 - RNA, 18 nt, Human
ccaaggccaaaggaagca

SEQ ID NO: 3065578 - RNA, 21 nt, Human
ccaaggccaaaggaagcacau

SEQ ID NO: 3065579 - RNA, 15 nt, Human
ccaagggccuggccu

SEQ ID NO: 3065580 - RNA, 14 nt, Human
ccaagcaaguauua

SEQ ID NO: 3065581 - RNA, 15 nt, Human
ccaagaagcccagga

SEQ ID NO: 3065582 - RNA, 12 nt, Human
ccaacccucauc

SEQ ID NO: 3065583 - RNA, 19 nt, Human
ccaagaagcccaggaaagg

SEQ ID NO: 3065584 - RNA, 20 nt, Human
ccaagaagcccaggaaaggc

SEQ ID NO: 3065585 - RNA, 17 nt, Human
ccaaagccuccuccagc

SEQ ID NO: 3065586 - RNA, 22 nt, Human
ccaaagccuccuccagccgcca

SEQ ID NO: 3065587 - RNA, 19 nt, Human
ccaaagcagugcaugcugu

SEQ ID NO: 3065588 - RNA, 22 nt, Human
ccaaacugacucuuaagaagac

SEQ ID NO: 3065589 - RNA, 23 nt, Human
ccaaagcagugcaugcugucccu

SEQ ID NO: 3065590 - RNA, 19 nt, Human
ccaaagccaaagcuaggcc

SEQ ID NO: 3065591 - RNA, 20 nt, Human
ccaaacucaccugccccuca

SEQ ID NO: 3065592 - RNA, 15 nt, Human
ccaaagcuaggccug

SEQ ID NO: 3065593 - RNA, 17 nt, Human
ccaaagcuaggccuggc

SEQ ID NO: 3065594 - RNA, 16 nt, Human
ccaaagcuaggccugg

SEQ ID NO: 3065595 - RNA, 21 nt, Human
ccaaagcuaggccuggccaga

SEQ ID NO: 3065596 - RNA, 16 nt, Human
ccaaaggcucucuccu

SEQ ID NO: 3065597 - RNA, 15 nt, Human
ccaaaggaagcacau

SEQ ID NO: 3065598 - RNA, 23 nt, Human
ccaaaggaagcacaugccucucu

SEQ ID NO: 3065599 - RNA, 20 nt, Human
ccaaaguacacuguuucaaa

SEQ ID NO: 3065600 - RNA, 23 nt, Human
ccaaauuucauaccuaucaucuu

SEQ ID NO: 3065601 - RNA, 18 nt, Human
ccaaaguacacuguuuca

SEQ ID NO: 3065602 - RNA, 15 nt, Human
ccaaaguacacuguu

SEQ ID NO: 3065603 - RNA, 17 nt, Human
ccaacauacucccaucu

SEQ ID NO: 3065604 - RNA, 18 nt, Human
ccaacauacucccaucug

SEQ ID NO: 3065605 - RNA, 19 nt, Human
ccaacauacucccaucugu

SEQ ID NO: 3065606 - RNA, 20 nt, Human
ccaacauacucccaucugug

SEQ ID NO: 3065607 - RNA, 16 nt, Human
ccaacauacucccauc

SEQ ID NO: 3065608 - RNA, 21 nt, Human
ccaacauacucccaucuguga

SEQ ID NO: 3065609 - RNA, 22 nt, Human
ccaacauacucccaucugugaa

SEQ ID NO: 3065610 - RNA, 17 nt, Human
cccaagggccuggccug

SEQ ID NO: 3065611 - RNA, 23 nt, Human
cccaaauggaaaugggcagagca

SEQ ID NO: 3065612 - RNA, 18 nt, Human
cccaagggccuggccuga

SEQ ID NO: 3065613 - RNA, 19 nt, Human
cccaagggccuggccugag

SEQ ID NO: 3065614 - RNA, 23 nt, Human
cccaagggccuggccugagcugg

SEQ ID NO: 3065615 - RNA, 17 nt, Human
cccacaccauaagcuac

SEQ ID NO: 3065616 - RNA, 21 nt, Human
cccacaccauaagcuacugcc

SEQ ID NO: 3065617 - RNA, 23 nt, Human
cccaaugcacuuuguucuggcuc

SEQ ID NO: 3065618 - RNA, 18 nt, Human
cccagcaagugagagcug

SEQ ID NO: 3065619 - RNA, 16 nt, Human
cccagcaagugagagc

SEQ ID NO: 3065620 - RNA, 22 nt, Human
cccagauugcaacaggcugggc

SEQ ID NO: 3065621 - RNA, 21 nt, Human
cccagauugcaacaggcuggg

SEQ ID NO: 3065622 - RNA, 20 nt, Human
cccagauugcaacaggcugg

SEQ ID NO: 3065623 - RNA, 20 nt, Human
cccagagggccugcaaggga

SEQ ID NO: 3065624 - RNA, 18 nt, Human
cccagagggccugcaagg

SEQ ID NO: 3065625 - RNA, 15 nt, Human
cccagcgagcccugg

SEQ ID NO: 3065626 - RNA, 19 nt, Human
cccagccuggaugccaucc

SEQ ID NO: 3065627 - RNA, 18 nt, Human
cccagcgagcccuggugg

SEQ ID NO: 3065628 - RNA, 17 nt, Human
cccagcgagcccuggug

SEQ ID NO: 3065629 - RNA, 23 nt, Human
cccagcgagcccugguggcagug

SEQ ID NO: 3065630 - RNA, 19 nt, Human
cccagcgagcccugguggc

SEQ ID NO: 3065631 - RNA, 12 nt, Human
cccagccugcua

SEQ ID NO: 3065632 - RNA, 18 nt, Human
cccagccuggaugccauc

SEQ ID NO: 3065633 - RNA, 14 nt, Human
cccagccuggaugc

SEQ ID NO: 3065634 - RNA, 22 nt, Human
cccagcaagugagagcugggug

SEQ ID NO: 3065635 - RNA, 21 nt, Human
cccagcaagugagagcugggu

SEQ ID NO: 3065636 - RNA, 20 nt, Human
cccagcaagugagagcuggg

SEQ ID NO: 3065637 - RNA, 19 nt, Human
cccagcaagugagagcugg

SEQ ID NO: 3065638 - RNA, 11 nt, Human
cccagccccuu

SEQ ID NO: 3065639 - RNA, 17 nt, Human
cccaggccuccuacagc

SEQ ID NO: 3065640 - RNA, 18 nt, Human
cccaggccuccuacagcu

SEQ ID NO: 3065641 - RNA, 22 nt, Human
cccaggugcuaggaacacuccu

SEQ ID NO: 3065642 - RNA, 13 nt, Human
cccaggugccagu

SEQ ID NO: 3065643 - RNA, 23 nt, Human
cccaggugcuaggaacacuccuu

SEQ ID NO: 3065644 - RNA, 13 nt, Human
cccagugcccaca

SEQ ID NO: 3065645 - RNA, 20 nt, Human
cccagucuggaaugcagugg

SEQ ID NO: 3065646 - RNA, 22 nt, Human
cccaggccccugccacccuggg

SEQ ID NO: 3065647 - RNA, 21 nt, Human
cccaggccccugccacccugg

SEQ ID NO: 3065648 - RNA, 18 nt, Human
cccaggccccugccaccc

SEQ ID NO: 3065649 - RNA, 16 nt, Human
cccaggccccugccac

SEQ ID NO: 3065650 - RNA, 11 nt, Human
cccaggccccu

SEQ ID NO: 3065651 - RNA, 22 nt, Human
cccaggcauuccccaggaggcc

SEQ ID NO: 3065652 - RNA, 23 nt, Human
cccaggcauuccccaggaggcca

SEQ ID NO: 3065653 - RNA, 20 nt, Human
cccaggcauuccccaggagg

SEQ ID NO: 3065654 - RNA, 21 nt, Human
cccaggcauuccccaggaggc

SEQ ID NO: 3065655 - RNA, 18 nt, Human
cccaggcauuccccagga

SEQ ID NO: 3065656 - RNA, 17 nt, Human
cccaggcaggucuugaa

SEQ ID NO: 3065657 - RNA, 13 nt, Human
cccaggaggccag

SEQ ID NO: 3065658 - RNA, 22 nt, Human
cccaggaggccagccuugacca

SEQ ID NO: 3065659 - RNA, 18 nt, Human
cccaggagccccgaggcc

SEQ ID NO: 3065660 - RNA, 21 nt, Human
cccaggagccccgaggccuuc

SEQ ID NO: 3065661 - RNA, 13 nt, Human
cccaggcaggucu

SEQ ID NO: 3065662 - RNA, 11 nt, Human
cccaggcaggu

SEQ ID NO: 3065663 - RNA, 17 nt, Human
ccccaggaggccagccu

SEQ ID NO: 3065664 - RNA, 17 nt, Human
cccaugcugcccuguga

SEQ ID NO: 3065665 - RNA, 18 nt, Human
cccaugcugcccugugag

SEQ ID NO: 3065666 - RNA, 15 nt, Human
cccaugcugcccugu

SEQ ID NO: 3065667 - RNA, 16 nt, Human
cccaugcugcccugug

SEQ ID NO: 3065668 - RNA, 18 nt, Human
cccagugccgagaaggaa

SEQ ID NO: 3065669 - RNA, 17 nt, Human
cccagugccgagaagga

SEQ ID NO: 3065670 - RNA, 20 nt, Human
cccagugcccacaggaucag

SEQ ID NO: 3065671 - RNA, 15 nt, Human
cccagugcccacagg

SEQ ID NO: 3065672 - RNA, 14 nt, Human
ccccacccaagggc

SEQ ID NO: 3065673 - RNA, 20 nt, Human
ccccacccaagggccuggcc

SEQ ID NO: 3065674 - RNA, 16 nt, Human
ccccaccagugccucu

SEQ ID NO: 3065675 - RNA, 15 nt, Human
ccccaccagugccuc

SEQ ID NO: 3065676 - RNA, 22 nt, Human
ccccaccagugccucucccugc

SEQ ID NO: 3065677 - RNA, 17 nt, Human
ccccaccagugccucuc

SEQ ID NO: 3065678 - RNA, 18 nt, Human
ccccaccagugccucucc

SEQ ID NO: 3065679 - RNA, 22 nt, Human
ccccaaauggaaaugggcagag

SEQ ID NO: 3065680 - RNA, 17 nt, Human
ccccaagacucccauga

SEQ ID NO: 3065681 - RNA, 23 nt, Human
ccagcuggggccaggcugggucg

SEQ ID NO: 3065682 - RNA, 22 nt, Human
ccagcuggggccaggcuggguc

SEQ ID NO: 3065683 - RNA, 21 nt, Human
ccagcuggggccaggcugggu

SEQ ID NO: 3065684 - RNA, 20 nt, Human
ccagcuggggccaggcuggg

SEQ ID NO: 3065685 - RNA, 19 nt, Human
ccagcuggggccaggcugg

SEQ ID NO: 3065686 - RNA, 18 nt, Human
ccagcuggggccaggcug

SEQ ID NO: 3065687 - RNA, 17 nt, Human
ccagcuggggccaggcu

SEQ ID NO: 3065688 - RNA, 20 nt, Human
ccaggaagccagcaggcucu

SEQ ID NO: 3065689 - RNA, 22 nt, Human
ccaggaagccagcaggcucuca

SEQ ID NO: 3065690 - RNA, 14 nt, Human
ccagcucuggucca

SEQ ID NO: 3065691 - RNA, 17 nt, Human
ccagcucugguccauag

SEQ ID NO: 3065692 - RNA, 21 nt, Human
ccagcucugguccauagagag

SEQ ID NO: 3065693 - RNA, 22 nt, Human
ccagcucugguccauagagagc

SEQ ID NO: 3065694 - RNA, 20 nt, Human
ccagcugcuugggcuucauc

SEQ ID NO: 3065695 - RNA, 22 nt, Human
ccagcugcugagauccuggacu

SEQ ID NO: 3065696 - RNA, 23 nt, Human
ccagcugcugagauccuggacug

SEQ ID NO: 3065697 - RNA, 21 nt, Human
ccagcugcugagauccuggac

SEQ ID NO: 3065698 - RNA, 20 nt, Human
ccagcugcugagauccugga

SEQ ID NO: 3065699 - RNA, 23 nt, Human
ccagcugcuugggcuucauccuc

SEQ ID NO: 3065700 - RNA, 19 nt, Human
ccagccuugaccauucucc

SEQ ID NO: 3065701 - RNA, 20 nt, Human
ccagccuugaccauucucca

SEQ ID NO: 3065702 - RNA, 16 nt, Human
ccagagcccaccuugg

SEQ ID NO: 3065703 - RNA, 22 nt, Human
ccagagcccaccuuggcucaag

SEQ ID NO: 3065704 - RNA, 16 nt, Human
ccagcgagcccuggug

SEQ ID NO: 3065705 - RNA, 15 nt, Human
ccagcgagcccuggu

SEQ ID NO: 3065706 - RNA, 13 nt, Human
ccagcgagcccug

SEQ ID NO: 3065707 - RNA, 14 nt, Human
ccagcgagcccugg

SEQ ID NO: 3065708 - RNA, 12 nt, Human
ccagcucugguc

SEQ ID NO: 3065709 - RNA, 13 nt, Human
ccagcucuggucc

SEQ ID NO: 3065710 - RNA, 11 nt, Human
ccagcucuggu

SEQ ID NO: 3065711 - RNA, 19 nt, Human
ccaggcuuuuuuaucaugu

SEQ ID NO: 3065712 - RNA, 15 nt, Human
ccagggcaucuggga

SEQ ID NO: 3065713 - RNA, 16 nt, Human
ccagggcaucugggag

SEQ ID NO: 3065714 - RNA, 13 nt, Human
ccaggccccugcc

SEQ ID NO: 3065715 - RNA, 19 nt, Human
ccaggcuggucucaaacuc

SEQ ID NO: 3065716 - RNA, 14 nt, Human
ccaggcuggucuca

SEQ ID NO: 3065717 - RNA, 20 nt, Human
ccaggcuguaucccaugagc

SEQ ID NO: 3065718 - RNA, 20 nt, Human
ccagugaauucuugaaggaa

SEQ ID NO: 3065719 - RNA, 16 nt, Human
ccagugaauucuugaa

SEQ ID NO: 3065720 - RNA, 14 nt, Human
ccagguucagcuug

SEQ ID NO: 3065721 - RNA, 23 nt, Human
ccaguaaaugggggugcauuuga

SEQ ID NO: 3065722 - RNA, 19 nt, Human
ccaggugcuaggaacacuc

SEQ ID NO: 3065723 - RNA, 17 nt, Human
ccaggugccaguuaugg

SEQ ID NO: 3065724 - RNA, 13 nt, Human
ccaggugccaguu

SEQ ID NO: 3065725 - RNA, 15 nt, Human
ccaggagcagccaca

SEQ ID NO: 3065726 - RNA, 16 nt, Human
ccaggagcagccacau

SEQ ID NO: 3065727 - RNA, 15 nt, Human
ccaggagccccgagg

SEQ ID NO: 3065728 - RNA, 13 nt, Human
ccaggcauggugg

SEQ ID NO: 3065729 - RNA, 14 nt, Human
ccaggcauucccca

SEQ ID NO: 3065730 - RNA, 24 nt, Human
ccaggcauuccccaggaggccagc

SEQ ID NO: 3065731 - RNA, 23 nt, Human
ccaggcauuccccaggaggccag

SEQ ID NO: 3065732 - RNA, 22 nt, Human
ccaggcauuccccaggaggcca

SEQ ID NO: 3065733 - RNA, 13 nt, Human
ccaggagccuccu

SEQ ID NO: 3065734 - RNA, 14 nt, Human
ccaggagccuccug

SEQ ID NO: 3065735 - RNA, 18 nt, Human
ccaggagccuccugcccu

SEQ ID NO: 3065736 - RNA, 12 nt, Human
ccaggagccucc

SEQ ID NO: 3065737 - RNA, 12 nt, Human
ccaggaggccag

SEQ ID NO: 3065738 - RNA, 13 nt, Human
ccaggaggccagc

SEQ ID NO: 3065739 - RNA, 12 nt, Human
cccaaagaugca

SEQ ID NO: 3065740 - RNA, 15 nt, Human
cccaaagaugcagcc

SEQ ID NO: 3065741 - RNA, 16 nt, Human
cccaaagcagugcaug

SEQ ID NO: 3065742 - RNA, 20 nt, Human
cccaaaacucuccucugcug

SEQ ID NO: 3065743 - RNA, 13 nt, Human
cccaaaaggcaga

SEQ ID NO: 3065744 - RNA, 18 nt, Human
cccaaaaggcagaagcaa

SEQ ID NO: 3065745 - RNA, 23 nt, Human
ccauuuuggauucuuauggacaa

SEQ ID NO: 3065746 - RNA, 20 nt, Human
ccauuuugggguacccacug

SEQ ID NO: 3065747 - RNA, 22 nt, Human
ccauuuugggguacccacugcu

SEQ ID NO: 3065748 - RNA, 18 nt, Human
ccauucugccugcccagg

SEQ ID NO: 3065749 - RNA, 17 nt, Human
ccauucugccugcccag

SEQ ID NO: 3065750 - RNA, 17 nt, Human
ccauucuccaccugcca

SEQ ID NO: 3065751 - RNA, 16 nt, Human
ccauucugccugccca

SEQ ID NO: 3065752 - RNA, 20 nt, Human
ccauucugccugcccaggcc

SEQ ID NO: 3065753 - RNA, 19 nt, Human
ccauucugccugcccaggc

SEQ ID NO: 3065754 - RNA, 14 nt, Human
ccauucuccaccug

SEQ ID NO: 3065755 - RNA, 21 nt, Human
ccauucugccugcccaggccc

SEQ ID NO: 3065756 - RNA, 13 nt, Human
ccauggacuuugu

SEQ ID NO: 3065757 - RNA, 14 nt, Human
ccauggacuuuguu

SEQ ID NO: 3065758 - RNA, 15 nt, Human
ccauucuccaccugc

SEQ ID NO: 3065759 - RNA, 16 nt, Human
ccauucuccaccugcc

SEQ ID NO: 3065760 - RNA, 22 nt, Human
ccaucauugaaaucuuuuugcu

SEQ ID NO: 3065761 - RNA, 12 nt, Human
ccauccucugua

SEQ ID NO: 3065762 - RNA, 19 nt, Human
ccauccucuguacagagcc

SEQ ID NO: 3065763 - RNA, 13 nt, Human
ccaucaccagaca

SEQ ID NO: 3065764 - RNA, 18 nt, Human
ccaucaaggguacacugc

SEQ ID NO: 3065765 - RNA, 17 nt, Human
ccagugaggcucugccc

SEQ ID NO: 3065766 - RNA, 14 nt, Human
ccauacauuugugu

SEQ ID NO: 3065767 - RNA, 20 nt, Human
ccagugaggcucugcccuug

SEQ ID NO: 3065768 - RNA, 18 nt, Human
ccagugaggcucugcccu

SEQ ID NO: 3065769 - RNA, 19 nt, Human
ccagugaggcucugcccuu

SEQ ID NO: 3065770 - RNA, 19 nt, Human
ccaugauuaaccacuucag

SEQ ID NO: 3065771 - RNA, 21 nt, Human
ccaugauuaaccacuucagcu

SEQ ID NO: 3065772 - RNA, 18 nt, Human
ccaugauguuuuccauga

SEQ ID NO: 3065773 - RNA, 16 nt, Human
ccaugauguuuagaaa

SEQ ID NO: 3065774 - RNA, 14 nt, Human
ccaugaagauguag

SEQ ID NO: 3065775 - RNA, 14 nt, Human
ccaugcugcccugu

SEQ ID NO: 3065776 - RNA, 11 nt, Human
ccaugcugccc

SEQ ID NO: 3065777 - RNA, 13 nt, Human
ccaugcugcccug

SEQ ID NO: 3065778 - RNA, 20 nt, Human
ccauccucuguacagagccc

SEQ ID NO: 3065779 - RNA, 17 nt, Human
cucugcacaagcugcac

SEQ ID NO: 3065780 - RNA, 18 nt, Human
cucugcacaagcugcacc

SEQ ID NO: 3065781 - RNA, 24 nt, Human
cucuugauucauaaugacuuaagc

SEQ ID NO: 3065782 - RNA, 13 nt, Human
cugaaagaggaau

SEQ ID NO: 3065783 - RNA, 17 nt, Human
cugaaagaggaaugaag

SEQ ID NO: 3065784 - RNA, 13 nt, Human
cucuugagccugg

SEQ ID NO: 3065785 - RNA, 14 nt, Human
cucuugagccuggg

SEQ ID NO: 3065786 - RNA, 22 nt, Human
cucuugauucauaaugacuuaa

SEQ ID NO: 3065787 - RNA, 15 nt, Human
cucuugagccuggga

SEQ ID NO: 3065788 - RNA, 16 nt, Human
cucuugagccugggag

SEQ ID NO: 3065789 - RNA, 23 nt, Human
cucuugagccuugaacuuugacc

SEQ ID NO: 3065790 - RNA, 23 nt, Human
cugacacacagcucuguccuggg

SEQ ID NO: 3065791 - RNA, 22 nt, Human
cugacacacagcucuguccugg

SEQ ID NO: 3065792 - RNA, 21 nt, Human
cugacacacagcucuguccug

SEQ ID NO: 3065793 - RNA, 20 nt, Human
cugacacacagcucuguccu

SEQ ID NO: 3065794 - RNA, 19 nt, Human
cugacacacagcucugucc

SEQ ID NO: 3065795 - RNA, 18 nt, Human
cugacacacagcucuguc

SEQ ID NO: 3065796 - RNA, 17 nt, Human
cugacacacagcucugu

SEQ ID NO: 3065797 - RNA, 16 nt, Human
cugacacacagcucug

SEQ ID NO: 3065798 - RNA, 15 nt, Human
cugacacacagcucu

SEQ ID NO: 3065799 - RNA, 13 nt, Human
cugacacacagcu

SEQ ID NO: 3065800 - RNA, 21 nt, Human
cugacacaugcugaacaucac

SEQ ID NO: 3065801 - RNA, 17 nt, Human
cugaucucucgugauug

SEQ ID NO: 3065802 - RNA, 18 nt, Human
cugaucucucgugauuga

SEQ ID NO: 3065803 - RNA, 14 nt, Human
cugaucucucguga

SEQ ID NO: 3065804 - RNA, 22 nt, Human
cugaggugggaggaucucuuga

SEQ ID NO: 3065805 - RNA, 13 nt, Human
cugaggugggagg

SEQ ID NO: 3065806 - RNA, 12 nt, Human
cugaggugggag

SEQ ID NO: 3065807 - RNA, 18 nt, Human
cugagggggccuggaugc

SEQ ID NO: 3065808 - RNA, 23 nt, Human
cugaggaauccagacccggcugc

SEQ ID NO: 3065809 - RNA, 14 nt, Human
cugaggggccucuu

SEQ ID NO: 3065810 - RNA, 21 nt, Human
cugaggaauccagacccggcu

SEQ ID NO: 3065811 - RNA, 19 nt, Human
cugacccugcuucaaauau

SEQ ID NO: 3065812 - RNA, 12 nt, Human
cugagcugggau

SEQ ID NO: 3065813 - RNA, 22 nt, Human
cugagcugggaugauuggaggg

SEQ ID NO: 3065814 - RNA, 22 nt, Human
cuccuagccugugccucuggga

SEQ ID NO: 3065815 - RNA, 17 nt, Human
cuccuuuagcgcccagu

SEQ ID NO: 3065816 - RNA, 16 nt, Human
cuccuuuagcgcccag

SEQ ID NO: 3065817 - RNA, 22 nt, Human
cuccuuuagcgcccaguugggu

SEQ ID NO: 3065818 - RNA, 23 nt, Human
cuccuuugugaggaagccgcugg

SEQ ID NO: 3065819 - RNA, 24 nt, Human
cuccuuuucacaguucucuccuuc

SEQ ID NO: 3065820 - RNA, 11 nt, Human
cucggugccuu

SEQ ID NO: 3065821 - RNA, 23 nt, Human
cucgguguggagaagcggcuggc

SEQ ID NO: 3065822 - RNA, 10 nt, Human
cucuccucug

SEQ ID NO: 3065823 - RNA, 17 nt, Human
cucucuggccuucggcc

SEQ ID NO: 3065824 - RNA, 19 nt, Human
cucucuggccuucggccuc

SEQ ID NO: 3065825 - RNA, 13 nt, Human
cucucccuuggau

SEQ ID NO: 3065826 - RNA, 20 nt, Human
cucucccugcugcuccuagg

SEQ ID NO: 3065827 - RNA, 13 nt, Human
cucuccuccuuuu

SEQ ID NO: 3065828 - RNA, 20 nt, Human
cucuccuccuuuucacaguu

SEQ ID NO: 3065829 - RNA, 16 nt, Human
cucuccgaccagacac

SEQ ID NO: 3065830 - RNA, 16 nt, Human
cucugcacaagcugca

SEQ ID NO: 3065831 - RNA, 22 nt, Human
cuccgcuuucuacccagcgagc

SEQ ID NO: 3065832 - RNA, 14 nt, Human
cuccgucaacucau

SEQ ID NO: 3065833 - RNA, 20 nt, Human
cuccgcuuucuacccagcga

SEQ ID NO: 3065834 - RNA, 21 nt, Human
cuccgcuuucuacccagcgag

SEQ ID NO: 3065835 - RNA, 19 nt, Human
cucccucuuucccucccuu

SEQ ID NO: 3065836 - RNA, 16 nt, Human
cucccucccucuuucc

SEQ ID NO: 3065837 - RNA, 15 nt, Human
cucccucuuucccuc

SEQ ID NO: 3065838 - RNA, 22 nt, Human
cuccagaauuucccaaagcagu

SEQ ID NO: 3065839 - RNA, 11 nt, Human
cuccagacaca

SEQ ID NO: 3065840 - RNA, 17 nt, Human
cucagaaucucaaauaa

SEQ ID NO: 3065841 - RNA, 16 nt, Human
cucagaaucucaaaua

SEQ ID NO: 3065842 - RNA, 21 nt, Human
cuccagaauuucccaaagcag

SEQ ID NO: 3065843 - RNA, 22 nt, Human
cuccaggcuguaucccaugagc

SEQ ID NO: 3065844 - RNA, 23 nt, Human
cuccaggcuguaucccaugagcc

SEQ ID NO: 3065845 - RNA, 19 nt, Human
cuccaggugcacaagcucc

SEQ ID NO: 3065846 - RNA, 20 nt, Human
cuccaggugcacaagcucca

SEQ ID NO: 3065847 - RNA, 18 nt, Human
cuccaggugcacaagcuc

SEQ ID NO: 3065848 - RNA, 21 nt, Human
cuccagugagacagcucugca

SEQ ID NO: 3065849 - RNA, 13 nt, Human
cucccaccucagc

SEQ ID NO: 3065850 - RNA, 11 nt, Human
cucccagccag

SEQ ID NO: 3065851 - RNA, 13 nt, Human
cucccagccaggc

SEQ ID NO: 3065852 - RNA, 14 nt, Human
cucccagccaggcc

SEQ ID NO: 3065853 - RNA, 16 nt, Human
cucccagccaggcccu

SEQ ID NO: 3065854 - RNA, 17 nt, Human
cucccaccucagccucc

SEQ ID NO: 3065855 - RNA, 16 nt, Human
cucccaccucagccuc

SEQ ID NO: 3065856 - RNA, 14 nt, Human
cucccaccucagcc

SEQ ID NO: 3065857 - RNA, 12 nt, Human
cucagaauauug

SEQ ID NO: 3065858 - RNA, 19 nt, Human
cucagaaaacaaggaugaa

SEQ ID NO: 3065859 - RNA, 23 nt, Human
cucagaaaacaaggaugaauuaa

SEQ ID NO: 3065860 - RNA, 18 nt, Human
cucacuuguuuuauuuaa

SEQ ID NO: 3065861 - RNA, 14 nt, Human
cucaccugccccuc

SEQ ID NO: 3065862 - RNA, 16 nt, Human
cucaccugccccucaa

SEQ ID NO: 3065863 - RNA, 18 nt, Human
cucaccugccccucaacu

SEQ ID NO: 3065864 - RNA, 13 nt, Human
cucaccugccccu

SEQ ID NO: 3065865 - RNA, 14 nt, Human
cucaccucucccuu

SEQ ID NO: 3065866 - RNA, 15 nt, Human
cucaccucucccuug

SEQ ID NO: 3065867 - RNA, 16 nt, Human
cucaccucucccuugg

SEQ ID NO: 3065868 - RNA, 17 nt, Human
cucaccucucccuugga

SEQ ID NO: 3065869 - RNA, 13 nt, Human
cucaccucucccu

SEQ ID NO: 3065870 - RNA, 18 nt, Human
cucaaaaaaagaaaaaga

SEQ ID NO: 3065871 - RNA, 17 nt, Human
cucaaaaaaagaaaaag

SEQ ID NO: 3065872 - RNA, 17 nt, Human
cuauguugcccaggcag

SEQ ID NO: 3065873 - RNA, 16 nt, Human
cuauguugcccaggca

SEQ ID NO: 3065874 - RNA, 13 nt, Human
cucaaaacugcac

SEQ ID NO: 3065875 - RNA, 20 nt, Human
cuaucucccccagccccauc

SEQ ID NO: 3065876 - RNA, 19 nt, Human
cuauguaucaaugaguaac

SEQ ID NO: 3065877 - RNA, 18 nt, Human
cuaucucccccagcccca

SEQ ID NO: 3065878 - RNA, 17 nt, Human
cuaugugagcacaaagg

SEQ ID NO: 3065879 - RNA, 16 nt, Human
cuauguaucaaugagu

SEQ ID NO: 3065880 - RNA, 22 nt, Human
cuauguguagggcgggaggaug

SEQ ID NO: 3065881 - RNA, 15 nt, Human
cuauguugcccaggc

SEQ ID NO: 3065882 - RNA, 14 nt, Human
cuauguugcccagg

SEQ ID NO: 3065883 - RNA, 14 nt, Human
cucacacaugagca

SEQ ID NO: 3065884 - RNA, 21 nt, Human
cucacacaugagcaucaggcc

SEQ ID NO: 3065885 - RNA, 14 nt, Human
cucacaaaggaugc

SEQ ID NO: 3065886 - RNA, 12 nt, Human
cucaaauaacua

SEQ ID NO: 3065887 - RNA, 20 nt, Human
cuacuagggaaaugccuuug

SEQ ID NO: 3065888 - RNA, 15 nt, Human
cuaccugaggggccu

SEQ ID NO: 3065889 - RNA, 16 nt, Human
cuaccugaggggccuc

SEQ ID NO: 3065890 - RNA, 19 nt, Human
cuaccugaggggccucuua

SEQ ID NO: 3065891 - RNA, 23 nt, Human
cuaccugaggggccucuuauggg

SEQ ID NO: 3065892 - RNA, 14 nt, Human
cuagggaagauaau

SEQ ID NO: 3065893 - RNA, 19 nt, Human
cuaguuugauuaaauucuu

SEQ ID NO: 3065894 - RNA, 17 nt, Human
cuaguuugauuaaauuc

SEQ ID NO: 3065895 - RNA, 20 nt, Human
cuaguuugauuaaauucuug

SEQ ID NO: 3065896 - RNA, 15 nt, Human
cuaguuugauuaaau

SEQ ID NO: 3065897 - RNA, 19 nt, Human
cuagcauacguacacauuu

SEQ ID NO: 3065898 - RNA, 18 nt, Human
cuagcauacguacacauu

SEQ ID NO: 3065899 - RNA, 16 nt, Human
cuagcauacguacaca

SEQ ID NO: 3065900 - RNA, 19 nt, Human
cuaggccuggccagaugca

SEQ ID NO: 3065901 - RNA, 18 nt, Human
cuaggccuggccagaugc

SEQ ID NO: 3065902 - RNA, 15 nt, Human
cuaggccuggccaga

SEQ ID NO: 3065903 - RNA, 14 nt, Human
cuaggccuggccag

SEQ ID NO: 3065904 - RNA, 12 nt, Human
cuaggccugggg

SEQ ID NO: 3065905 - RNA, 13 nt, Human
cuaggccugggga

SEQ ID NO: 3065906 - RNA, 13 nt, Human
cuaggccuggcca

SEQ ID NO: 3065907 - RNA, 19 nt, Human
cuagccagaggagagagga

SEQ ID NO: 3065908 - RNA, 17 nt, Human
cuagccagaggagagag

SEQ ID NO: 3065909 - RNA, 20 nt, Human
cgcuggggccaguugguccc

SEQ ID NO: 3065910 - RNA, 17 nt, Human
cgcuggggccaguuggu

SEQ ID NO: 3065911 - RNA, 23 nt, Human
cgcuggccgggaccccgagccug

SEQ ID NO: 3065912 - RNA, 18 nt, Human
cgcuggccgggaccccga

SEQ ID NO: 3065913 - RNA, 16 nt, Human
cgcugccccuggcagc

SEQ ID NO: 3065914 - RNA, 17 nt, Human
cgcugccccuggcagcc

SEQ ID NO: 3065915 - RNA, 13 nt, Human
cgcugccccuggc

SEQ ID NO: 3065916 - RNA, 23 nt, Human
cgcuggaccuugaacuggguacu

SEQ ID NO: 3065917 - RNA, 19 nt, Human
cgcuggaccuugaacuggg

SEQ ID NO: 3065918 - RNA, 18 nt, Human
cgcugccccuggcagccc

SEQ ID NO: 3065919 - RNA, 16 nt, Human
cgccuuaaggauguuc

SEQ ID NO: 3065920 - RNA, 24 nt, Human
cggagaagagcuguucacagccag

SEQ ID NO: 3065921 - RNA, 23 nt, Human
cggagaagagcuguucacagcca

SEQ ID NO: 3065922 - RNA, 13 nt, Human
cguacacauuuua

SEQ ID NO: 3065923 - RNA, 15 nt, Human
cgguuuauauaagcu

SEQ ID NO: 3065924 - RNA, 13 nt, Human
cguuaaaauacca

SEQ ID NO: 3065925 - RNA, 15 nt, Human
cuaaagcugccagcc

SEQ ID NO: 3065926 - RNA, 16 nt, Human
cuaaaggcuaccuuug

SEQ ID NO: 3065927 - RNA, 15 nt, Human
cuaaaggcuaccuuu

SEQ ID NO: 3065928 - RNA, 14 nt, Human
cuaaagcugccagc

SEQ ID NO: 3065929 - RNA, 19 nt, Human
cuaaaguguauuuuuuuac

SEQ ID NO: 3065930 - RNA, 19 nt, Human
cuaaaggcuaccuuuguau

SEQ ID NO: 3065931 - RNA, 17 nt, Human
cuaaaggcuaccuuugu

SEQ ID NO: 3065932 - RNA, 22 nt, Human
cuaaaguguauuuuuuuacuaa

SEQ ID NO: 3065933 - RNA, 14 nt, Human
ccuccgccucuugg

SEQ ID NO: 3065934 - RNA, 13 nt, Human
ccuccgccucuug

SEQ ID NO: 3065935 - RNA, 16 nt, Human
ccucccuucucuucac

SEQ ID NO: 3065936 - RNA, 18 nt, Human
ccuccuuuucacaguucu

SEQ ID NO: 3065937 - RNA, 23 nt, Human
ccuccuuugugaggaagccgcug

SEQ ID NO: 3065938 - RNA, 20 nt, Human
ccuccuuugugaggaagccg

SEQ ID NO: 3065939 - RNA, 20 nt, Human
ccucggaccccacuccggcc

SEQ ID NO: 3065940 - RNA, 22 nt, Human
ccucggaccccacuccggcccu

SEQ ID NO: 3065941 - RNA, 14 nt, Human
ccucggagaagagc

SEQ ID NO: 3065942 - RNA, 12 nt, Human
ccucggagaaga

SEQ ID NO: 3065943 - RNA, 16 nt, Human
ccucaacaccucugca

SEQ ID NO: 3065944 - RNA, 21 nt, Human
ccucaacucuccuccagaguc

SEQ ID NO: 3065945 - RNA, 23 nt, Human
ccucaacucuccuccagagucag

SEQ ID NO: 3065946 - RNA, 19 nt, Human
ccucaacucuccuccagag

SEQ ID NO: 3065947 - RNA, 15 nt, Human
ccucaaccuccuggg

SEQ ID NO: 3065948 - RNA, 18 nt, Human
ccucauuagcauuuugcu

SEQ ID NO: 3065949 - RNA, 12 nt, Human
ccucaggcaggu

SEQ ID NO: 3065950 - RNA, 18 nt, Human
ccucaggcaggugggaug

SEQ ID NO: 3065951 - RNA, 20 nt, Human
ccucaagugauucuccugcc

SEQ ID NO: 3065952 - RNA, 23 nt, Human
ccucaagugauucuccugccuca

SEQ ID NO: 3065953 - RNA, 17 nt, Human
ccucccaucacccgcua

SEQ ID NO: 3065954 - RNA, 17 nt, Human
ccuccaagaccuucucc

SEQ ID NO: 3065955 - RNA, 19 nt, Human
ccuccaagaccuucuccuu

SEQ ID NO: 3065956 - RNA, 16 nt, Human
ccuccaagaccuucuc

SEQ ID NO: 3065957 - RNA, 12 nt, Human
ccucccaucacc

SEQ ID NO: 3065958 - RNA, 12 nt, Human
ccuaauaaagcu

SEQ ID NO: 3065959 - RNA, 21 nt, Human
ccuagcauacguacacauuuu

SEQ ID NO: 3065960 - RNA, 23 nt, Human
ccuagccugugccucugggacug

SEQ ID NO: 3065961 - RNA, 19 nt, Human
ccuagccuuagaagucaca

SEQ ID NO: 3065962 - RNA, 22 nt, Human
ccuagccuuagaagucacacag

SEQ ID NO: 3065963 - RNA, 18 nt, Human
ccggccaccugcggugcu

SEQ ID NO: 3065964 - RNA, 17 nt, Human
ccggccaccugcggugc

SEQ ID NO: 3065965 - RNA, 14 nt, Human
cccuucucuccagc

SEQ ID NO: 3065966 - RNA, 19 nt, Human
cccuucucuccagccccug

SEQ ID NO: 3065967 - RNA, 21 nt, Human
cccuuuuuuggcugcugaagg

SEQ ID NO: 3065968 - RNA, 22 nt, Human
cccuuuuuuggcugcugaaggc

SEQ ID NO: 3065969 - RNA, 23 nt, Human
cccuuuuuuggcugcugaaggcu

SEQ ID NO: 3065970 - RNA, 23 nt, Human
cccugugaguacuacaguccucc

SEQ ID NO: 3065971 - RNA, 15 nt, Human
cccugugauggggcc

SEQ ID NO: 3065972 - RNA, 21 nt, Human
cccugugaguacuacaguccu

SEQ ID NO: 3065973 - RNA, 14 nt, Human
cccuccuuucacca

SEQ ID NO: 3065974 - RNA, 19 nt, Human
cccuguggaugcugcugcc

SEQ ID NO: 3065975 - RNA, 14 nt, Human
ccgcagcccugcag

SEQ ID NO: 3065976 - RNA, 18 nt, Human
ccgcagcccugcagaggg

SEQ ID NO: 3065977 - RNA, 13 nt, Human
ccugguguggaag

SEQ ID NO: 3065978 - RNA, 15 nt, Human
ccugguggcaguggg

SEQ ID NO: 3065979 - RNA, 20 nt, Human
ccugguggcagugggagcug

SEQ ID NO: 3065980 - RNA, 19 nt, Human
ccugguggcagugggagcu

SEQ ID NO: 3065981 - RNA, 18 nt, Human
ccugguggcagugggagc

SEQ ID NO: 3065982 - RNA, 15 nt, Human
ccuggggagaaagua

SEQ ID NO: 3065983 - RNA, 15 nt, Human
ccuggauggggcugc

SEQ ID NO: 3065984 - RNA, 13 nt, Human
ccuggaugccauc

SEQ ID NO: 3065985 - RNA, 14 nt, Human
ccuggaugccaucc

SEQ ID NO: 3065986 - RNA, 18 nt, Human
ccuggaugccauccaagu

SEQ ID NO: 3065987 - RNA, 14 nt, Human
ccuggaugcccccu

SEQ ID NO: 3065988 - RNA, 17 nt, Human
ccuggauggggcugcac

SEQ ID NO: 3065989 - RNA, 18 nt, Human
ccuggauggggcugcacc

SEQ ID NO: 3065990 - RNA, 19 nt, Human
ccuggaugcccccugugga

SEQ ID NO: 3065991 - RNA, 16 nt, Human
ccuggaugcccccugu

SEQ ID NO: 3065992 - RNA, 18 nt, Human
ccuggaugcccccugugg

SEQ ID NO: 3065993 - RNA, 16 nt, Human
ccuggccccucagggu

SEQ ID NO: 3065994 - RNA, 18 nt, Human
ccuggccccucagggucc

SEQ ID NO: 3065995 - RNA, 20 nt, Human
ccuggccccucagggucccu

SEQ ID NO: 3065996 - RNA, 21 nt, Human
ccuggccccucagggucccug

SEQ ID NO: 3065997 - RNA, 22 nt, Human
ccuggccucaagugauucuccu

SEQ ID NO: 3065998 - RNA, 20 nt, Human
ccuggccugagcugggauga

SEQ ID NO: 3065999 - RNA, 17 nt, Human
ccugucucuacuaaaaa

SEQ ID NO: 3066000 - RNA, 13 nt, Human
ccugccucucugc

SEQ ID NO: 3066001 - RNA, 15 nt, Human
ccugccucucugcag

SEQ ID NO: 3066002 - RNA, 14 nt, Human
ccugccucucugca

SEQ ID NO: 3066003 - RNA, 18 nt, Human
ccugcccaccuggccucu

SEQ ID NO: 3066004 - RNA, 19 nt, Human
ccugcccaccuggccucug

SEQ ID NO: 3066005 - RNA, 19 nt, Human
ccugcccaggccccugcca

SEQ ID NO: 3066006 - RNA, 18 nt, Human
ccugcccaggccccugcc

SEQ ID NO: 3066007 - RNA, 21 nt, Human
ccugcccaggccccugccacc

SEQ ID NO: 3066008 - RNA, 15 nt, Human
ccugccucagccucc

SEQ ID NO: 3066009 - RNA, 16 nt, Human
ccugccucagccuccc

SEQ ID NO: 3066010 - RNA, 15 nt, Human
ccugcccaccuggcc

SEQ ID NO: 3066011 - RNA, 17 nt, Human
ccugcccaccuggccuc

SEQ ID NO: 3066012 - RNA, 12 nt, Human
ccugcaggcagc

SEQ ID NO: 3066013 - RNA, 13 nt, Human
ccugcaggcagcc

SEQ ID NO: 3066014 - RNA, 14 nt, Human
ccugcaggcagcca

SEQ ID NO: 3066015 - RNA, 15 nt, Human
ccucuuugagugaag

SEQ ID NO: 3066016 - RNA, 19 nt, Human
ccucuuucccucccuuccu

SEQ ID NO: 3066017 - RNA, 16 nt, Human
ccucuuucccucccuu

SEQ ID NO: 3066018 - RNA, 22 nt, Human
ccccugcacagcaggcugccag

SEQ ID NO: 3066019 - RNA, 23 nt, Human
ccccugcacagcaggcugccagu

SEQ ID NO: 3066020 - RNA, 16 nt, Human
ccccugccacccuggg

SEQ ID NO: 3066021 - RNA, 14 nt, Human
ccccugccacccug

SEQ ID NO: 3066022 - RNA, 15 nt, Human
ccccugacaacacuc

SEQ ID NO: 3066023 - RNA, 13 nt, Human
ccccugaauuuaa

SEQ ID NO: 3066024 - RNA, 17 nt, Human
ccccugaauuuaaauag

SEQ ID NO: 3066025 - RNA, 15 nt, Human
ccccugcacagcagg

SEQ ID NO: 3066026 - RNA, 16 nt, Human
ccccugcacagcaggc

SEQ ID NO: 3066027 - RNA, 21 nt, Human
ccccugcacagcaggcugcca

SEQ ID NO: 3066028 - RNA, 13 nt, Human
ccccugcacucca

SEQ ID NO: 3066029 - RNA, 18 nt, Human
cccgggaagggggcuggg

SEQ ID NO: 3066030 - RNA, 21 nt, Human
cccgggaagggggcugggaca

SEQ ID NO: 3066031 - RNA, 16 nt, Human
cccucaacaccucugc

SEQ ID NO: 3066032 - RNA, 16 nt, Human
cccucaacucuccucc

SEQ ID NO: 3066033 - RNA, 17 nt, Human
cccggccaccugcggug

SEQ ID NO: 3066034 - RNA, 18 nt, Human
cccgaauagcugggacua

SEQ ID NO: 3066035 - RNA, 17 nt, Human
cccgaauagcugggacu

SEQ ID NO: 3066036 - RNA, 16 nt, Human
cccgaauagcugggac

SEQ ID NO: 3066037 - RNA, 14 nt, Human
ccccuucugaccca

SEQ ID NO: 3066038 - RNA, 13 nt, Human
ccccuucugaccc

SEQ ID NO: 3066039 - RNA, 15 nt, Human
cccgggaagggggcu

SEQ ID NO: 3066040 - RNA, 12 nt, Human
cccgggaagggg

SEQ ID NO: 3066041 - RNA, 15 nt, Human
cccggccccugcugg

SEQ ID NO: 3066042 - RNA, 16 nt, Human
cccggccccugcuggu

SEQ ID NO: 3066043 - RNA, 14 nt, Human
ccccgcacugggcu

SEQ ID NO: 3066044 - RNA, 23 nt, Human
ccccgaggccuucucugaaggac

SEQ ID NO: 3066045 - RNA, 15 nt, Human
cccauucugccugcc

SEQ ID NO: 3066046 - RNA, 14 nt, Human
cccauucugccugc

SEQ ID NO: 3066047 - RNA, 19 nt, Human
cccauucugccugcccagg

SEQ ID NO: 3066048 - RNA, 13 nt, Human
cccauucugccug

SEQ ID NO: 3066049 - RNA, 15 nt, Human
cccauuugcuccuuu

SEQ ID NO: 3066050 - RNA, 20 nt, Human
ccccagauugcaacaggcug

SEQ ID NO: 3066051 - RNA, 15 nt, Human
ccccagauugcaaca

SEQ ID NO: 3066052 - RNA, 21 nt, Human
cccauccucuguacagagccc

SEQ ID NO: 3066053 - RNA, 22 nt, Human
cccauccucuguacagagccca

SEQ ID NO: 3066054 - RNA, 20 nt, Human
cccauccucuguacagagcc

SEQ ID NO: 3066055 - RNA, 17 nt, Human
cccaggaaaggcuccag

SEQ ID NO: 3066056 - RNA, 18 nt, Human
cccaggaaaggcuccagg

SEQ ID NO: 3066057 - RNA, 20 nt, Human
cccaggcuuagucacugaga

SEQ ID NO: 3066058 - RNA, 22 nt, Human
cccaggcuuagucacugagaca

SEQ ID NO: 3066059 - RNA, 20 nt, Human
cccauauuuguacaccaaua

SEQ ID NO: 3066060 - RNA, 15 nt, Human
cccaggaaaggcucc

SEQ ID NO: 3066061 - RNA, 16 nt, Human
cccaggaaaggcucca

SEQ ID NO: 3066062 - RNA, 23 nt, Human
cccagcaagugagagcugggugu

SEQ ID NO: 3066063 - RNA, 14 nt, Human
cccagccaggcccu

SEQ ID NO: 3066064 - RNA, 12 nt, Human
cccagccaggcc

SEQ ID NO: 3066065 - RNA, 12 nt, Human
ccaguccugccc

SEQ ID NO: 3066066 - RNA, 13 nt, Human
ccaguccugcccg

SEQ ID NO: 3066067 - RNA, 15 nt, Human
ccaguccugcccgcc

SEQ ID NO: 3066068 - RNA, 14 nt, Human
ccaggcaggucuug

SEQ ID NO: 3066069 - RNA, 12 nt, Human
ccaggcaggucu

SEQ ID NO: 3066070 - RNA, 23 nt, Human
ccaggcaggucuugaacuccugg

SEQ ID NO: 3066071 - RNA, 12 nt, Human
ccaggcuggcgu

SEQ ID NO: 3066072 - RNA, 21 nt, Human
ccaggggaaaaucagccugcu

SEQ ID NO: 3066073 - RNA, 23 nt, Human
ccagccccuucugacccaugcug

SEQ ID NO: 3066074 - RNA, 24 nt, Human
ccagccccuucugacccaugcugc

SEQ ID NO: 3066075 - RNA, 12 nt, Human
ccagcagagcac

SEQ ID NO: 3066076 - RNA, 13 nt, Human
ccagcagagcacc

SEQ ID NO: 3066077 - RNA, 14 nt, Human
ccagcagagcaccu

SEQ ID NO: 3066078 - RNA, 17 nt, Human
ccagccccagugcccac

SEQ ID NO: 3066079 - RNA, 15 nt, Human
ccagccccauccucu

SEQ ID NO: 3066080 - RNA, 17 nt, Human
ccagccccauccucugu

SEQ ID NO: 3066081 - RNA, 15 nt, Human
cccaacucaccccag

SEQ ID NO: 3066082 - RNA, 16 nt, Human
cccaacucaccccagc

SEQ ID NO: 3066083 - RNA, 15 nt, Human
ccauuggggcuccca

SEQ ID NO: 3066084 - RNA, 16 nt, Human
ccauuggggcucccag

SEQ ID NO: 3066085 - RNA, 17 nt, Human
ccauuggggcucccagc

SEQ ID NO: 3066086 - RNA, 22 nt, Human
cccacugcuuuuggucugugug

SEQ ID NO: 3066087 - RNA, 23 nt, Human
cccacugcuuuuggucuguguga

SEQ ID NO: 3066088 - RNA, 19 nt, Human
cccacuccggcccuccaga

SEQ ID NO: 3066089 - RNA, 21 nt, Human
cccacuccggcccuccagagc

SEQ ID NO: 3066090 - RNA, 13 nt, Human
cccacucccugca

SEQ ID NO: 3066091 - RNA, 12 nt, Human
cccacucccugc

SEQ ID NO: 3066092 - RNA, 14 nt, Human
cccacuccggcccu

SEQ ID NO: 3066093 - RNA, 17 nt, Human
cccaacucaccccagcc

SEQ ID NO: 3066094 - RNA, 20 nt, Human
cccaacucaccccagcccca

SEQ ID NO: 3066095 - RNA, 13 nt, Human
cccaacuccagaa

SEQ ID NO: 3066096 - RNA, 16 nt, Human
cccaagacucccauga

SEQ ID NO: 3066097 - RNA, 20 nt, Human
cccaagacucccaugaggga

SEQ ID NO: 3066098 - RNA, 12 nt, Human
cccaagcucugc

SEQ ID NO: 3066099 - RNA, 14 nt, Human
cccaagcucugcuc

SEQ ID NO: 3066100 - RNA, 13 nt, Human
cccaagcucugcu

SEQ ID NO: 3066101 - RNA, 22 nt, Human
ccauccccuguagagugggagc

SEQ ID NO: 3066102 - RNA, 21 nt, Human
ccaucccauaugccugggcag

SEQ ID NO: 3066103 - RNA, 19 nt, Human
ccaucccauaugccugggc

SEQ ID NO: 3066104 - RNA, 20 nt, Human
ccaucccauaugccugggca

SEQ ID NO: 3066105 - RNA, 19 nt, Human
ccauccagguucagcuugu

SEQ ID NO: 3066106 - RNA, 18 nt, Human
ccauccagguucagcuug

SEQ ID NO: 3066107 - RNA, 18 nt, Human
ccaguuggucccccuucc

SEQ ID NO: 3066108 - RNA, 20 nt, Human
ccaguuggucccccuuccau

SEQ ID NO: 3066109 - RNA, 17 nt, Human
ccauaagcuacugccau

SEQ ID NO: 3066110 - RNA, 18 nt, Human
ccauaagcuacugccauc

SEQ ID NO: 3066111 - RNA, 21 nt, Human
ccauaagcuacugccauccug

SEQ ID NO: 3066112 - RNA, 16 nt, Human
ccauaagcuacugcca

SEQ ID NO: 3066113 - RNA, 13 nt, Human
ccaguuggucccc

SEQ ID NO: 3066114 - RNA, 23 nt, Human
ccaguuggguggaugccuggugg

SEQ ID NO: 3066115 - RNA, 20 nt, Human
ccaugaggaacaaggcaagg

SEQ ID NO: 3066116 - RNA, 23 nt, Human
ccaugaggaacaaggcaaggcug

SEQ ID NO: 3066117 - RNA, 17 nt, Human
ccaugagggagaugcca

SEQ ID NO: 3066118 - RNA, 18 nt, Human
ccaugaguccccuguuug

SEQ ID NO: 3066119 - RNA, 23 nt, Human
ccaugagggagaugccaugagcc

SEQ ID NO: 3066120 - RNA, 18 nt, Human
ccaugagggagaugccau

SEQ ID NO: 3066121 - RNA, 19 nt, Human
ccaugagggagaugccaug

SEQ ID NO: 3066122 - RNA, 20 nt, Human
ccaugagggagaugccauga

SEQ ID NO: 3066123 - RNA, 21 nt, Human
ccaugagggagaugccaugag

SEQ ID NO: 3066124 - RNA, 12 nt, Human
auuuuauaucuu

SEQ ID NO: 3066125 - RNA, 21 nt, Human
auuuuauaucaauuuaaaaaa

SEQ ID NO: 3066126 - RNA, 19 nt, Human
auuuuagggguagcauuug

SEQ ID NO: 3066127 - RNA, 14 nt, Human
auuuuauaucuugu

SEQ ID NO: 3066128 - RNA, 16 nt, Human
auuuuauaucuuguag

SEQ ID NO: 3066129 - RNA, 19 nt, Human
auuuuuaagugcugcauuu

SEQ ID NO: 3066130 - RNA, 18 nt, Human
auuuuuaagugcugcauu

SEQ ID NO: 3066131 - RNA, 16 nt, Human
auuuuuaagugcugca

SEQ ID NO: 3066132 - RNA, 14 nt, Human
auuuuuagacagag

SEQ ID NO: 3066133 - RNA, 21 nt, Human
caaaaggauaaugaauacuuu

SEQ ID NO: 3066134 - RNA, 15 nt, Human
caaacagucucagga

SEQ ID NO: 3066135 - RNA, 17 nt, Human
caaacagucucaggaaa

SEQ ID NO: 3066136 - RNA, 16 nt, Human
caaacagucucaggaa

SEQ ID NO: 3066137 - RNA, 14 nt, Human
caaaccaaauaaaa

SEQ ID NO: 3066138 - RNA, 15 nt, Human
caaaccaaauaaaaa

SEQ ID NO: 3066139 - RNA, 24 nt, Human
caaacccaguguuuuaggagcaug

SEQ ID NO: 3066140 - RNA, 18 nt, Human
auuuuuuuuuccuucagu

SEQ ID NO: 3066141 - RNA, 16 nt, Human
auuuuuuugagacaga

SEQ ID NO: 3066142 - RNA, 15 nt, Human
auuuuuauauuugaa

SEQ ID NO: 3066143 - RNA, 20 nt, Human
auuuuuuuuuccuucagugc

SEQ ID NO: 3066144 - RNA, 22 nt, Human
auuuuuuuuuccuucagugccu

SEQ ID NO: 3066145 - RNA, 17 nt, Human
auuuuuuuuuccuucag

SEQ ID NO: 3066146 - RNA, 19 nt, Human
caaaagcugggcagguugg

SEQ ID NO: 3066147 - RNA, 14 nt, Human
caaagguaaaucag

SEQ ID NO: 3066148 - RNA, 22 nt, Human
caaaguagaagucuuagaugua

SEQ ID NO: 3066149 - RNA, 21 nt, Human
caaaguaucccuacuguaauu

SEQ ID NO: 3066150 - RNA, 19 nt, Human
caaaguaucccuacuguaa

SEQ ID NO: 3066151 - RNA, 18 nt, Human
caaagggugaaaauuauu

SEQ ID NO: 3066152 - RNA, 22 nt, Human
caaagcagugcaugcugucccu

SEQ ID NO: 3066153 - RNA, 16 nt, Human
caaagauauuuugcuu

SEQ ID NO: 3066154 - RNA, 14 nt, Human
caaagauauuuugc

SEQ ID NO: 3066155 - RNA, 18 nt, Human
caaagcagugcaugcugu

SEQ ID NO: 3066156 - RNA, 21 nt, Human
caaagcagugcaugcuguccc

SEQ ID NO: 3066157 - RNA, 21 nt, Human
caaaucugcuuuuuaaagaau

SEQ ID NO: 3066158 - RNA, 21 nt, Human
caaaucuuaacuugaaggagu

SEQ ID NO: 3066159 - RNA, 23 nt, Human
caaaugcuguaacuuucugaaau

SEQ ID NO: 3066160 - RNA, 13 nt, Human
caagaugguucua

SEQ ID NO: 3066161 - RNA, 16 nt, Human
caagaugguucuagca

SEQ ID NO: 3066162 - RNA, 18 nt, Human
caagaccacguuucuaaa

SEQ ID NO: 3066163 - RNA, 17 nt, Human
caagaccacguuucuaa

SEQ ID NO: 3066164 - RNA, 19 nt, Human
caagacccaaaaggcagaa

SEQ ID NO: 3066165 - RNA, 16 nt, Human
caagaccacguuucua

SEQ ID NO: 3066166 - RNA, 14 nt, Human
caacucuccuccag

SEQ ID NO: 3066167 - RNA, 22 nt, Human
caagaauugaagcaggacuaaa

SEQ ID NO: 3066168 - RNA, 17 nt, Human
caacucaccccagcccc

SEQ ID NO: 3066169 - RNA, 17 nt, Human
caacucauauuuucaug

SEQ ID NO: 3066170 - RNA, 18 nt, Human
caacucaccccagcccca

SEQ ID NO: 3066171 - RNA, 20 nt, Human
auuaguacuccccuccuuga

SEQ ID NO: 3066172 - RNA, 19 nt, Human
auuaugaauuacauuugua

SEQ ID NO: 3066173 - RNA, 20 nt, Human
auuaugaauuacauuuguau

SEQ ID NO: 3066174 - RNA, 17 nt, Human
auuaaaugcccagcccc

SEQ ID NO: 3066175 - RNA, 19 nt, Human
auuaaaugcccagccccuu

SEQ ID NO: 3066176 - RNA, 18 nt, Human
auucaacagguuuuccug

SEQ ID NO: 3066177 - RNA, 16 nt, Human
auucaaaugucuauaa

SEQ ID NO: 3066178 - RNA, 18 nt, Human
auucaaauguauuacagu

SEQ ID NO: 3066179 - RNA, 16 nt, Human
auucuugcaaaguauc

SEQ ID NO: 3066180 - RNA, 15 nt, Human
auucuugcaaaguau

SEQ ID NO: 3066181 - RNA, 14 nt, Human
auucuugcaaagua

SEQ ID NO: 3066182 - RNA, 14 nt, Human
auucuucugcuuca

SEQ ID NO: 3066183 - RNA, 22 nt, Human
auucuucuguacgucugacagg

SEQ ID NO: 3066184 - RNA, 20 nt, Human
auucuucugcuucagccucc

SEQ ID NO: 3066185 - RNA, 19 nt, Human
auucuucugcuucagccuc

SEQ ID NO: 3066186 - RNA, 18 nt, Human
auucucuaguuugauuaa

SEQ ID NO: 3066187 - RNA, 17 nt, Human
auucucuaguuugauua

SEQ ID NO: 3066188 - RNA, 22 nt, Human
auucuccuuguguuacuaaguu

SEQ ID NO: 3066189 - RNA, 21 nt, Human
auucuccuuguguuacuaagu

SEQ ID NO: 3066190 - RNA, 19 nt, Human
auucuccuuguguuacuaa

SEQ ID NO: 3066191 - RNA, 18 nt, Human
auucuccuuguguuacua

SEQ ID NO: 3066192 - RNA, 17 nt, Human
auucuccuuguguuacu

SEQ ID NO: 3066193 - RNA, 16 nt, Human
auuucauaugcuguau

SEQ ID NO: 3066194 - RNA, 20 nt, Human
auuucuaugaaauauuaugu

SEQ ID NO: 3066195 - RNA, 20 nt, Human
auuucauaccuaucaucuua

SEQ ID NO: 3066196 - RNA, 22 nt, Human
auuuaugcauauuauuuuaugu

SEQ ID NO: 3066197 - RNA, 16 nt, Human
auuuaugcauauuauu

SEQ ID NO: 3066198 - RNA, 14 nt, Human
auuucacucuccuu

SEQ ID NO: 3066199 - RNA, 21 nt, Human
auuuaaugaaagacuguacaa

SEQ ID NO: 3066200 - RNA, 20 nt, Human
auuuaaugaaagacuguaca

SEQ ID NO: 3066201 - RNA, 15 nt, Human
auuuaaugaaagacu

SEQ ID NO: 3066202 - RNA, 16 nt, Human
auuuaaugaaagacug

SEQ ID NO: 3066203 - RNA, 16 nt, Human
auuuaauaaaugugcc

SEQ ID NO: 3066204 - RNA, 14 nt, Human
auuguguugugaau

SEQ ID NO: 3066205 - RNA, 17 nt, Human
auuguguugugaauguu

SEQ ID NO: 3066206 - RNA, 16 nt, Human
auuguugucugcaacu

SEQ ID NO: 3066207 - RNA, 18 nt, Human
auugcuugagcucaggag

SEQ ID NO: 3066208 - RNA, 16 nt, Human
cagaaaguuauugaua

SEQ ID NO: 3066209 - RNA, 11 nt, Human
cagaaaguuau

SEQ ID NO: 3066210 - RNA, 14 nt, Human
cagaaguuucugcc

SEQ ID NO: 3066211 - RNA, 16 nt, Human
cagaaguuucugccgc

SEQ ID NO: 3066212 - RNA, 11 nt, Human
cagaacaguga

SEQ ID NO: 3066213 - RNA, 12 nt, Human
cagaacagugau

SEQ ID NO: 3066214 - RNA, 17 nt, Human
cagaacagugauuacca

SEQ ID NO: 3066215 - RNA, 16 nt, Human
cagaaauguacagcaa

SEQ ID NO: 3066216 - RNA, 19 nt, Human
cacugggagaaaugaaaaa

SEQ ID NO: 3066217 - RNA, 22 nt, Human
cacuguuuugaaucucauaauu

SEQ ID NO: 3066218 - RNA, 15 nt, Human
cacuuaaaaaugguu

SEQ ID NO: 3066219 - RNA, 19 nt, Human
cacuguugcccaggcuggc

SEQ ID NO: 3066220 - RNA, 18 nt, Human
cacuguugcccaggcugg

SEQ ID NO: 3066221 - RNA, 23 nt, Human
cacuguugcccaggcuggcgugc

SEQ ID NO: 3066222 - RNA, 17 nt, Human
cacuguugcccaggcug

SEQ ID NO: 3066223 - RNA, 14 nt, Human
cacugcagccucaa

SEQ ID NO: 3066224 - RNA, 19 nt, Human
cacugcagccucaaccucc

SEQ ID NO: 3066225 - RNA, 23 nt, Human
cacugcagccucaaccuccuggg

SEQ ID NO: 3066226 - RNA, 22 nt, Human
cacugcagccucaaccuccugg

SEQ ID NO: 3066227 - RNA, 21 nt, Human
cacugcagccucaaccuccug

SEQ ID NO: 3066228 - RNA, 20 nt, Human
cacugcagccucaaccuccu

SEQ ID NO: 3066229 - RNA, 17 nt, Human
cacugccaugccagcuu

SEQ ID NO: 3066230 - RNA, 18 nt, Human
cacuuguguuaugaagca

SEQ ID NO: 3066231 - RNA, 16 nt, Human
cacuuucuagccagag

SEQ ID NO: 3066232 - RNA, 17 nt, Human
cacuuucuagccagagg

SEQ ID NO: 3066233 - RNA, 13 nt, Human
cacuuucuagcca

SEQ ID NO: 3066234 - RNA, 21 nt, Human
cacuacauucuguuaaucauu

SEQ ID NO: 3066235 - RNA, 13 nt, Human
cacuccagccuga

SEQ ID NO: 3066236 - RNA, 12 nt, Human
cacuccagccug

SEQ ID NO: 3066237 - RNA, 17 nt, Human
cacuacauucuguuaau

SEQ ID NO: 3066238 - RNA, 16 nt, Human
cacuacauucuguuaa

SEQ ID NO: 3066239 - RNA, 14 nt, Human
cacuccagccuggg

SEQ ID NO: 3066240 - RNA, 13 nt, Human
cacuccagccugg

SEQ ID NO: 3066241 - RNA, 23 nt, Human
cacuccagccugagcgacaguga

SEQ ID NO: 3066242 - RNA, 20 nt, Human
cacucugucgcccagucugg

SEQ ID NO: 3066243 - RNA, 13 nt, Human
cacggccaggcca

SEQ ID NO: 3066244 - RNA, 12 nt, Human
cacggccaggcc

SEQ ID NO: 3066245 - RNA, 17 nt, Human
cacggccaggccagagg

SEQ ID NO: 3066246 - RNA, 14 nt, Human
cacggcucacugca

SEQ ID NO: 3066247 - RNA, 22 nt, Human
cacucuuauugcccacgcugga

SEQ ID NO: 3066248 - RNA, 21 nt, Human
cacucuuauugcccacgcugg

SEQ ID NO: 3066249 - RNA, 20 nt, Human
cacucuuauugcccacgcug

SEQ ID NO: 3066250 - RNA, 16 nt, Human
caccuuggcugcaggg

SEQ ID NO: 3066251 - RNA, 15 nt, Human
caccuuggcugcagg

SEQ ID NO: 3066252 - RNA, 18 nt, Human
caccuuggcugcagggag

SEQ ID NO: 3066253 - RNA, 14 nt, Human
caccuuucccaucu

SEQ ID NO: 3066254 - RNA, 15 nt, Human
cacacuuuggcccag

SEQ ID NO: 3066255 - RNA, 18 nt, Human
cacacuuuggcccagggu

SEQ ID NO: 3066256 - RNA, 19 nt, Human
cacacuuuggcccagggug

SEQ ID NO: 3066257 - RNA, 20 nt, Human
cacacauuuuuuaaaugcac

SEQ ID NO: 3066258 - RNA, 19 nt, Human
cacacauuuuuuaaaugca

SEQ ID NO: 3066259 - RNA, 16 nt, Human
cacacauuuuuuaaau

SEQ ID NO: 3066260 - RNA, 12 nt, Human
cacacauuuuuu

SEQ ID NO: 3066261 - RNA, 11 nt, Human
cacacauuuuu

SEQ ID NO: 3066262 - RNA, 10 nt, Human
cacacauuuu

SEQ ID NO: 3066263 - RNA, 10 nt, Human
cacagcucuu

SEQ ID NO: 3066264 - RNA, 18 nt, Human
cacagcucuguccuggga

SEQ ID NO: 3066265 - RNA, 16 nt, Human
cacagcucuguccugg

SEQ ID NO: 3066266 - RNA, 15 nt, Human
cacagcucuguccug

SEQ ID NO: 3066267 - RNA, 15 nt, Human
cacagcucuucucca

SEQ ID NO: 3066268 - RNA, 14 nt, Human
cacagcucuucucc

SEQ ID NO: 3066269 - RNA, 17 nt, Human
cacagcucuucuccagg

SEQ ID NO: 3066270 - RNA, 14 nt, Human
cacagcucuguccu

SEQ ID NO: 3066271 - RNA, 11 nt, Human
cacagcucugu

SEQ ID NO: 3066272 - RNA, 16 nt, Human
cacagacccugcccug

SEQ ID NO: 3066273 - RNA, 17 nt, Human
cacagacccugcccugu

SEQ ID NO: 3066274 - RNA, 14 nt, Human
cacagacccugccc

SEQ ID NO: 3066275 - RNA, 14 nt, Human
caccaacgucugug

SEQ ID NO: 3066276 - RNA, 17 nt, Human
cacauuuuauuuuauua

SEQ ID NO: 3066277 - RNA, 20 nt, Human
cacauuuuauuuuauuaugc

SEQ ID NO: 3066278 - RNA, 19 nt, Human
cacauuuuauuuuauuaug

SEQ ID NO: 3066279 - RNA, 21 nt, Human
cacauuuuauuuuauuaugca

SEQ ID NO: 3066280 - RNA, 17 nt, Human
cacccaccucagccucc

SEQ ID NO: 3066281 - RNA, 13 nt, Human
caccagccccagu

SEQ ID NO: 3066282 - RNA, 18 nt, Human
cacccaccucagccuccc

SEQ ID NO: 3066283 - RNA, 16 nt, Human
cacccaggagccccga

SEQ ID NO: 3066284 - RNA, 18 nt, Human
caaggcaaggcugucaau

SEQ ID NO: 3066285 - RNA, 17 nt, Human
caaggcaaggcugucaa

SEQ ID NO: 3066286 - RNA, 16 nt, Human
caaggcaaggcuguca

SEQ ID NO: 3066287 - RNA, 19 nt, Human
caaggccaaaggaagcaca

SEQ ID NO: 3066288 - RNA, 20 nt, Human
caaggccaaaggaagcacau

SEQ ID NO: 3066289 - RNA, 21 nt, Human
caaggccaaaggaagcacaug

SEQ ID NO: 3066290 - RNA, 21 nt, Human
caaggccuuccccuggcacug

SEQ ID NO: 3066291 - RNA, 18 nt, Human
caaggccuuccccuggca

SEQ ID NO: 3066292 - RNA, 21 nt, Human
caagucagucauucagauaug

SEQ ID NO: 3066293 - RNA, 20 nt, Human
caauaaaauccauacauuug

SEQ ID NO: 3066294 - RNA, 23 nt, Human
caauaaaauccauacauuugugu

SEQ ID NO: 3066295 - RNA, 20 nt, Human
cacaagcuccaagcucccag

SEQ ID NO: 3066296 - RNA, 13 nt, Human
caaugcuggcugu

SEQ ID NO: 3066297 - RNA, 21 nt, Human
caaugcuggcuguuggcuggg

SEQ ID NO: 3066298 - RNA, 20 nt, Human
caaugcuggcuguuggcugg

SEQ ID NO: 3066299 - RNA, 12 nt, Human
caaugcuggcug

SEQ ID NO: 3066300 - RNA, 16 nt, Human
caauggcagccuuggc

SEQ ID NO: 3066301 - RNA, 17 nt, Human
cacaagagcccaggccu

SEQ ID NO: 3066302 - RNA, 20 nt, Human
cacaagagcccaggccuccu

SEQ ID NO: 3066303 - RNA, 18 nt, Human
cacaagcuccaagcuccc

SEQ ID NO: 3066304 - RNA, 19 nt, Human
cacaagcuccaagcuccca

SEQ ID NO: 3066305 - RNA, 18 nt, Human
cacaagagcccaggccuc

SEQ ID NO: 3066306 - RNA, 19 nt, Human
cacaagagcccaggccucc

SEQ ID NO: 3066307 - RNA, 15 nt, Human
caaugggagcucaug

SEQ ID NO: 3066308 - RNA, 19 nt, Human
cauuguaaauaguauuuga

SEQ ID NO: 3066309 - RNA, 21 nt, Human
cauuuggagacacaacuauuu

SEQ ID NO: 3066310 - RNA, 15 nt, Human
cauuuggauuggaug

SEQ ID NO: 3066311 - RNA, 17 nt, Human
cauuugucacacacuuu

SEQ ID NO: 3066312 - RNA, 12 nt, Human
cauuugucccaa

SEQ ID NO: 3066313 - RNA, 13 nt, Human
cauuugucccaag

SEQ ID NO: 3066314 - RNA, 14 nt, Human
cauuugucccaagu

SEQ ID NO: 3066315 - RNA, 16 nt, Human
cauuugucccaagugc

SEQ ID NO: 3066316 - RNA, 18 nt, Human
cauuugucccaagugcca

SEQ ID NO: 3066317 - RNA, 19 nt, Human
cauuugucccaagugccaa

SEQ ID NO: 3066318 - RNA, 14 nt, Human
cauuuauucugcuc

SEQ ID NO: 3066319 - RNA, 16 nt, Human
cauuuuuuaaaugcac

SEQ ID NO: 3066320 - RNA, 15 nt, Human
cauuuuuuaaaugca

SEQ ID NO: 3066321 - RNA, 19 nt, Human
cauuuuuuaaaugcaccug

SEQ ID NO: 3066322 - RNA, 16 nt, Human
ccaaggccaaaggaag

SEQ ID NO: 3066323 - RNA, 13 nt, Human
ccaagaagcccag

SEQ ID NO: 3066324 - RNA, 13 nt, Human
ccaacgucugugc

SEQ ID NO: 3066325 - RNA, 15 nt, Human
ccaacgucugugcca

SEQ ID NO: 3066326 - RNA, 22 nt, Human
ccaaauggaaaugggcagagca

SEQ ID NO: 3066327 - RNA, 15 nt, Human
ccaaggccaaaggaa

SEQ ID NO: 3066328 - RNA, 14 nt, Human
ccaagaagcccagg

SEQ ID NO: 3066329 - RNA, 19 nt, Human
ccaagcuggucccacucag

SEQ ID NO: 3066330 - RNA, 12 nt, Human
ccaagcuggucc

SEQ ID NO: 3066331 - RNA, 16 nt, Human
ccaccgccuugcccag

SEQ ID NO: 3066332 - RNA, 17 nt, Human
ccaccgccuugcccagc

SEQ ID NO: 3066333 - RNA, 19 nt, Human
ccaccgccuugcccagccu

SEQ ID NO: 3066334 - RNA, 18 nt, Human
ccaccaucaugucuggcu

SEQ ID NO: 3066335 - RNA, 12 nt, Human
ccaccagugccu

SEQ ID NO: 3066336 - RNA, 13 nt, Human
ccaccagugccuc

SEQ ID NO: 3066337 - RNA, 14 nt, Human
ccaccagugccucu

SEQ ID NO: 3066338 - RNA, 15 nt, Human
ccaccagugccucuc

SEQ ID NO: 3066339 - RNA, 17 nt, Human
ccaccagugccucuccc

SEQ ID NO: 3066340 - RNA, 18 nt, Human
ccaccaucaccagacagg

SEQ ID NO: 3066341 - RNA, 19 nt, Human
ccaccagugccucucccug

SEQ ID NO: 3066342 - RNA, 19 nt, Human
ccaccaucaugucuggcua

SEQ ID NO: 3066343 - RNA, 16 nt, Human
ccaccuuggcugcagg

SEQ ID NO: 3066344 - RNA, 15 nt, Human
ccaccuuggcugcag

SEQ ID NO: 3066345 - RNA, 14 nt, Human
ccaccuuggcugca

SEQ ID NO: 3066346 - RNA, 12 nt, Human
ccaccuuggcug

SEQ ID NO: 3066347 - RNA, 19 nt, Human
ccaccuuggcugcagggag

SEQ ID NO: 3066348 - RNA, 18 nt, Human
ccaccuuggcugcaggga

SEQ ID NO: 3066349 - RNA, 18 nt, Human
ccacgcuggaccuugaac

SEQ ID NO: 3066350 - RNA, 22 nt, Human
ccacagagaaaguacuucucca

SEQ ID NO: 3066351 - RNA, 18 nt, Human
ccacagaagcuccaggua

SEQ ID NO: 3066352 - RNA, 18 nt, Human
ccaccagucugacuguuu

SEQ ID NO: 3066353 - RNA, 16 nt, Human
ccacagaagcuccagg

SEQ ID NO: 3066354 - RNA, 12 nt, Human
caugcacaaauu

SEQ ID NO: 3066355 - RNA, 24 nt, Human
caugauuaaccacuucagcugacu

SEQ ID NO: 3066356 - RNA, 22 nt, Human
caugauuaaccacuucagcuga

SEQ ID NO: 3066357 - RNA, 23 nt, Human
caugauuaaccacuucagcugac

SEQ ID NO: 3066358 - RNA, 12 nt, Human
caugcugcccug

SEQ ID NO: 3066359 - RNA, 13 nt, Human
caugcugcccugu

SEQ ID NO: 3066360 - RNA, 13 nt, Human
caugcuccuggcc

SEQ ID NO: 3066361 - RNA, 16 nt, Human
caugcacgugugugca

SEQ ID NO: 3066362 - RNA, 23 nt, Human
caugaaguaauaugcacacauuu

SEQ ID NO: 3066363 - RNA, 22 nt, Human
caugaaguaauaugcacacauu

SEQ ID NO: 3066364 - RNA, 19 nt, Human
caugaaguaauaugcacac

SEQ ID NO: 3066365 - RNA, 15 nt, Human
caugaaguaauaugc

SEQ ID NO: 3066366 - RNA, 21 nt, Human
caugacacgaauauugcugau

SEQ ID NO: 3066367 - RNA, 23 nt, Human
caugacacgaauauugcugaugg

SEQ ID NO: 3066368 - RNA, 14 nt, Human
caugcugcccugug

SEQ ID NO: 3066369 - RNA, 15 nt, Human
caugcugcccuguga

SEQ ID NO: 3066370 - RNA, 12 nt, Human
cauuccuguucc

SEQ ID NO: 3066371 - RNA, 19 nt, Human
cauguccaagaagcccagg

SEQ ID NO: 3066372 - RNA, 20 nt, Human
cauguccaagaagcccagga

SEQ ID NO: 3066373 - RNA, 18 nt, Human
cauguccaagaagcccag

SEQ ID NO: 3066374 - RNA, 16 nt, Human
cauguccaagaagccc

SEQ ID NO: 3066375 - RNA, 13 nt, Human
cauguuggccagg

SEQ ID NO: 3066376 - RNA, 12 nt, Human
cauguuggccag

SEQ ID NO: 3066377 - RNA, 23 nt, Human
cauuaucuagauacuguaucaug

SEQ ID NO: 3066378 - RNA, 12 nt, Human
cauuaucucaaa

SEQ ID NO: 3066379 - RNA, 13 nt, Human
cauuaucucaaaa

SEQ ID NO: 3066380 - RNA, 22 nt, Human
cauuaggugugacugaauuucu

SEQ ID NO: 3066381 - RNA, 17 nt, Human
caucccagccccaauga

SEQ ID NO: 3066382 - RNA, 14 nt, Human
caucaggccaggcc

SEQ ID NO: 3066383 - RNA, 16 nt, Human
caucaggccaggcccu

SEQ ID NO: 3066384 - RNA, 19 nt, Human
caucaggccaggcccucug

SEQ ID NO: 3066385 - RNA, 15 nt, Human
caucaggccaggccc

SEQ ID NO: 3066386 - RNA, 19 nt, Human
caucccauaugccugggca

SEQ ID NO: 3066387 - RNA, 14 nt, Human
cauccccuguagag

SEQ ID NO: 3066388 - RNA, 21 nt, Human
caucugcgggggcagugcuca

SEQ ID NO: 3066389 - RNA, 19 nt, Human
caucugcgggggcagugcu

SEQ ID NO: 3066390 - RNA, 20 nt, Human
caucugcgggggcagugcuc

SEQ ID NO: 3066391 - RNA, 17 nt, Human
caucugcgggggcagug

SEQ ID NO: 3066392 - RNA, 13 nt, Human
cauaauuuauaca

SEQ ID NO: 3066393 - RNA, 20 nt, Human
cauaauuuauacaggucaua

SEQ ID NO: 3066394 - RNA, 22 nt, Human
cauagcagagaaugaaagggcc

SEQ ID NO: 3066395 - RNA, 19 nt, Human
cauagcagagaaugaaagg

SEQ ID NO: 3066396 - RNA, 22 nt, Human
cauaugccugggcagaaggaag

SEQ ID NO: 3066397 - RNA, 13 nt, Human
cauaugccugggc

SEQ ID NO: 3066398 - RNA, 15 nt, Human
cauaugccugggcag

SEQ ID NO: 3066399 - RNA, 20 nt, Human
cauaugccugggcagaagga

SEQ ID NO: 3066400 - RNA, 20 nt, Human
cauauucaggaagcucaggg

SEQ ID NO: 3066401 - RNA, 21 nt, Human
cauauuauuuuauguugcaua

SEQ ID NO: 3066402 - RNA, 14 nt, Human
cauauucaggaagc

SEQ ID NO: 3066403 - RNA, 15 nt, Human
cauauucaggaagcu

SEQ ID NO: 3066404 - RNA, 19 nt, Human
cagcauauucaggaagcuc

SEQ ID NO: 3066405 - RNA, 22 nt, Human
cagcauauucaggaagcucagg

SEQ ID NO: 3066406 - RNA, 23 nt, Human
cagcauauucaggaagcucaggg

SEQ ID NO: 3066407 - RNA, 17 nt, Human
cagcaguugaaaagacu

SEQ ID NO: 3066408 - RNA, 21 nt, Human
cagcaguugaaaagacuccaa

SEQ ID NO: 3066409 - RNA, 20 nt, Human
cagcaguugaaaagacucca

SEQ ID NO: 3066410 - RNA, 12 nt, Human
cagccaggccac

SEQ ID NO: 3066411 - RNA, 13 nt, Human
cagccaggccaca

SEQ ID NO: 3066412 - RNA, 20 nt, Human
cagaaguuugagaucagccu

SEQ ID NO: 3066413 - RNA, 23 nt, Human
cagaaguuucugccgcagcccug

SEQ ID NO: 3066414 - RNA, 22 nt, Human
cagaaguuugagaucagccugg

SEQ ID NO: 3066415 - RNA, 16 nt, Human
cagagcugccaccugc

SEQ ID NO: 3066416 - RNA, 18 nt, Human
cagagcugccaccugccu

SEQ ID NO: 3066417 - RNA, 22 nt, Human
cagagggccugcaagggaguga

SEQ ID NO: 3066418 - RNA, 18 nt, Human
cagaggggguggccuccc

SEQ ID NO: 3066419 - RNA, 17 nt, Human
cagaggggguggccucc

SEQ ID NO: 3066420 - RNA, 19 nt, Human
cagaggggguggccuccca

SEQ ID NO: 3066421 - RNA, 20 nt, Human
cagaggggguggccucccaa

SEQ ID NO: 3066422 - RNA, 20 nt, Human
cagagucagaaguuucugcc

SEQ ID NO: 3066423 - RNA, 15 nt, Human
cagauaugauucaaa

SEQ ID NO: 3066424 - RNA, 16 nt, Human
cagauaugauucaaau

SEQ ID NO: 3066425 - RNA, 17 nt, Human
cagauaugauucaaaug

SEQ ID NO: 3066426 - RNA, 19 nt, Human
cagauaugauucaaauguc

SEQ ID NO: 3066427 - RNA, 16 nt, Human
cagcuccccucggaga

SEQ ID NO: 3066428 - RNA, 18 nt, Human
cagcuccccucggagaag

SEQ ID NO: 3066429 - RNA, 17 nt, Human
cagcuccccucggagaa

SEQ ID NO: 3066430 - RNA, 14 nt, Human
caggaaaggcucca

SEQ ID NO: 3066431 - RNA, 15 nt, Human
caggaaaggcuccag

SEQ ID NO: 3066432 - RNA, 23 nt, Human
caggaaaucaaauaugcaaagca

SEQ ID NO: 3066433 - RNA, 22 nt, Human
caggaaaucaaauaugcaaagc

SEQ ID NO: 3066434 - RNA, 18 nt, Human
cagcuucauuuccugugu

SEQ ID NO: 3066435 - RNA, 20 nt, Human
caggaaagagaacuuccaga

SEQ ID NO: 3066436 - RNA, 15 nt, Human
cagcuucauuuccug

SEQ ID NO: 3066437 - RNA, 18 nt, Human
cagcugugcucuggacag

SEQ ID NO: 3066438 - RNA, 15 nt, Human
cagcuccagcucacc

SEQ ID NO: 3066439 - RNA, 14 nt, Human
cagcuccagcucac

SEQ ID NO: 3066440 - RNA, 13 nt, Human
cagcuccagcuca

SEQ ID NO: 3066441 - RNA, 19 nt, Human
cagcuccaagaauuucuag

SEQ ID NO: 3066442 - RNA, 16 nt, Human
cagcuccaagaauuuc

SEQ ID NO: 3066443 - RNA, 20 nt, Human
cagcuccagcucaccagccc

SEQ ID NO: 3066444 - RNA, 18 nt, Human
cagcuccagcucaccagc

SEQ ID NO: 3066445 - RNA, 17 nt, Human
cagcuccagcucaccag

SEQ ID NO: 3066446 - RNA, 16 nt, Human
cagcuccagcucacca

SEQ ID NO: 3066447 - RNA, 22 nt, Human
cagcuccagcucaccagcccca

SEQ ID NO: 3066448 - RNA, 20 nt, Human
cagccgagauagccaaggcc

SEQ ID NO: 3066449 - RNA, 21 nt, Human
cagccgagauagccaaggcca

SEQ ID NO: 3066450 - RNA, 15 nt, Human
cagcccuucuuucca

SEQ ID NO: 3066451 - RNA, 19 nt, Human
cagcccuucuuuccacaga

SEQ ID NO: 3066452 - RNA, 20 nt, Human
cagcccuucuuuccacagaa

SEQ ID NO: 3066453 - RNA, 12 nt, Human
cagccccuggau

SEQ ID NO: 3066454 - RNA, 13 nt, Human
cagccccuggaug

SEQ ID NO: 3066455 - RNA, 14 nt, Human
cagccccuggaugc

SEQ ID NO: 3066456 - RNA, 17 nt, Human
cagccccuggaugcagc

SEQ ID NO: 3066457 - RNA, 18 nt, Human
cagccccuggaugcagcc

SEQ ID NO: 3066458 - RNA, 19 nt, Human
cagccccuggaugcagccu

SEQ ID NO: 3066459 - RNA, 21 nt, Human
cagccccuggaugcagccuca

SEQ ID NO: 3066460 - RNA, 21 nt, Human
cagcccuuagcagggaaacag

SEQ ID NO: 3066461 - RNA, 16 nt, Human
cagcccuuagcaggga

SEQ ID NO: 3066462 - RNA, 15 nt, Human
cagcccuuagcaggg

SEQ ID NO: 3066463 - RNA, 17 nt, Human
cagcggggacagcuccu

SEQ ID NO: 3066464 - RNA, 16 nt, Human
cagcggggacagcucc

SEQ ID NO: 3066465 - RNA, 14 nt, Human
cagcggggacagcu

SEQ ID NO: 3066466 - RNA, 15 nt, Human
cagcggggacagcuc

SEQ ID NO: 3066467 - RNA, 18 nt, Human
cagccugagcgacaguga

SEQ ID NO: 3066468 - RNA, 19 nt, Human
cagccugagcgacagugag

SEQ ID NO: 3066469 - RNA, 18 nt, Human
caggcacccaccaucaug

SEQ ID NO: 3066470 - RNA, 23 nt, Human
caggcacccaccaucaugucugg

SEQ ID NO: 3066471 - RNA, 22 nt, Human
caggcacccaccaucaugucug

SEQ ID NO: 3066472 - RNA, 17 nt, Human
caggaggccagccuuga

SEQ ID NO: 3066473 - RNA, 14 nt, Human
caggaggccagccu

SEQ ID NO: 3066474 - RNA, 15 nt, Human
caggaggccagccuu

SEQ ID NO: 3066475 - RNA, 16 nt, Human
caggaggccagccuug

SEQ ID NO: 3066476 - RNA, 21 nt, Human
caggccagagggagugacaga

SEQ ID NO: 3066477 - RNA, 19 nt, Human
caggccagagggagugaca

SEQ ID NO: 3066478 - RNA, 16 nt, Human
caggccagagggagug

SEQ ID NO: 3066479 - RNA, 23 nt, Human
caggccagagggagugacagagg

SEQ ID NO: 3066480 - RNA, 19 nt, Human
caggcugggcuucaguggc

SEQ ID NO: 3066481 - RNA, 17 nt, Human
caggcugggcuucagug

SEQ ID NO: 3066482 - RNA, 17 nt, Human
cagggaggacgcucucu

SEQ ID NO: 3066483 - RNA, 18 nt, Human
cagggaggacgcucucug

SEQ ID NO: 3066484 - RNA, 15 nt, Human
caggcugggcuucag

SEQ ID NO: 3066485 - RNA, 16 nt, Human
caggcugggcuucagu

SEQ ID NO: 3066486 - RNA, 18 nt, Human
cagggaggugaccccagg

SEQ ID NO: 3066487 - RNA, 22 nt, Human
cagggaguccgaaagggacuug

SEQ ID NO: 3066488 - RNA, 18 nt, Human
cagguuuaagcuguuacu

SEQ ID NO: 3066489 - RNA, 16 nt, Human
cagguuuaagcuguua

SEQ ID NO: 3066490 - RNA, 22 nt, Human
cagucaccccggccaccugcgg

SEQ ID NO: 3066491 - RNA, 20 nt, Human
cagucaccccggccaccugc

SEQ ID NO: 3066492 - RNA, 19 nt, Human
cagucaccccggccaccug

SEQ ID NO: 3066493 - RNA, 22 nt, Human
caggugcacaagcuccaagcuc

SEQ ID NO: 3066494 - RNA, 17 nt, Human
caggugauccacccacc

SEQ ID NO: 3066495 - RNA, 16 nt, Human
caggugauccacccac

SEQ ID NO: 3066496 - RNA, 12 nt, Human
caggguuggccc

SEQ ID NO: 3066497 - RNA, 14 nt, Human
cagguugguggggg

SEQ ID NO: 3066498 - RNA, 18 nt, Human
caggugcuaggaacacuc

SEQ ID NO: 3066499 - RNA, 20 nt, Human
caggugcuaggaacacuccu

SEQ ID NO: 3066500 - RNA, 14 nt, Human
caggugcgaaagga

SEQ ID NO: 3066501 - RNA, 18 nt, Human
cagggucucacucugucg

SEQ ID NO: 3066502 - RNA, 17 nt, Human
cagggucucacucuguc

SEQ ID NO: 3066503 - RNA, 21 nt, Human
cagggucucacucugucgccc

SEQ ID NO: 3066504 - RNA, 15 nt, Human
cagucucaggaaauc

SEQ ID NO: 3066505 - RNA, 22 nt, Human
cagugcaugcugucccuuacgu

SEQ ID NO: 3066506 - RNA, 23 nt, Human
cagugcaugcugucccuuacgug

SEQ ID NO: 3066507 - RNA, 19 nt, Human
cagugcaugcugucccuua

SEQ ID NO: 3066508 - RNA, 20 nt, Human
cagucugauucccaagcucu

SEQ ID NO: 3066509 - RNA, 19 nt, Human
cagucugauucccaagcuc

SEQ ID NO: 3066510 - RNA, 22 nt, Human
cagugcacuaauguguaagaca

SEQ ID NO: 3066511 - RNA, 12 nt, Human
cagugcccacag

SEQ ID NO: 3066512 - RNA, 11 nt, Human
cagugggagcu

SEQ ID NO: 3066513 - RNA, 15 nt, Human
cagugccaaaaacaa

SEQ ID NO: 3066514 - RNA, 11 nt, Human
gcuacugccau

SEQ ID NO: 3066515 - RNA, 16 nt, Human
gcuagaacucccuuuc

SEQ ID NO: 3066516 - RNA, 12 nt, Human
gcuagaacuccc

SEQ ID NO: 3066517 - RNA, 13 nt, Human
gcuagaacucccu

SEQ ID NO: 3066518 - RNA, 14 nt, Human
gcuagaacucccuu

SEQ ID NO: 3066519 - RNA, 15 nt, Human
gcuagaacucccuuu

SEQ ID NO: 3066520 - RNA, 20 nt, Human
gcgggaggauguucugggac

SEQ ID NO: 3066521 - RNA, 22 nt, Human
gcgggaggauguucugggacac

SEQ ID NO: 3066522 - RNA, 21 nt, Human
gcgggaggauguucugggaca

SEQ ID NO: 3066523 - RNA, 20 nt, Human
gcgugcacacaccagagccc

SEQ ID NO: 3066524 - RNA, 18 nt, Human
gcguuucuaugacacaug

SEQ ID NO: 3066525 - RNA, 23 nt, Human
gcgugcacacaccagagcccacc

SEQ ID NO: 3066526 - RNA, 19 nt, Human
gcgugcacacaccagagcc

SEQ ID NO: 3066527 - RNA, 23 nt, Human
gcuaagugauccucccaccucag

SEQ ID NO: 3066528 - RNA, 15 nt, Human
gcuaaugggacacua

SEQ ID NO: 3066529 - RNA, 13 nt, Human
gcuaaugggacac

SEQ ID NO: 3066530 - RNA, 12 nt, Human
gcuaugcauuug

SEQ ID NO: 3066531 - RNA, 21 nt, Human
gcuagugugguguuuccuggc

SEQ ID NO: 3066532 - RNA, 22 nt, Human
gcuagugugguguuuccuggca

SEQ ID NO: 3066533 - RNA, 13 nt, Human
gcuaugcauuuga

SEQ ID NO: 3066534 - RNA, 19 nt, Human
gcuauucaguaauaacucu

SEQ ID NO: 3066535 - RNA, 16 nt, Human
gcuaggccuggccaga

SEQ ID NO: 3066536 - RNA, 23 nt, Human
gcuaggccuggccagaugcacca

SEQ ID NO: 3066537 - RNA, 17 nt, Human
gcuaggccuggccagau

SEQ ID NO: 3066538 - RNA, 14 nt, Human
gcucagagagggug

SEQ ID NO: 3066539 - RNA, 13 nt, Human
gcucagagagggu

SEQ ID NO: 3066540 - RNA, 23 nt, Human
gcucagguggggucacucuggca

SEQ ID NO: 3066541 - RNA, 14 nt, Human
gcucaggugucccu

SEQ ID NO: 3066542 - RNA, 16 nt, Human
gcucaggugucccugc

SEQ ID NO: 3066543 - RNA, 20 nt, Human
gcuauucaguaauaacucua

SEQ ID NO: 3066544 - RNA, 18 nt, Human
gcuauucaguaauaacuc

SEQ ID NO: 3066545 - RNA, 14 nt, Human
gcucacugcagccu

SEQ ID NO: 3066546 - RNA, 13 nt, Human
gcucacugcagcc

SEQ ID NO: 3066547 - RNA, 12 nt, Human
gcucacugcagc

SEQ ID NO: 3066548 - RNA, 11 nt, Human
gcucacugcag

SEQ ID NO: 3066549 - RNA, 16 nt, Human
gcucacugcagccuca

SEQ ID NO: 3066550 - RNA, 15 nt, Human
gcucacugcagccuc

SEQ ID NO: 3066551 - RNA, 17 nt, Human
gcucacugcagccucaa

SEQ ID NO: 3066552 - RNA, 11 nt, Human
gcucugcccuu

SEQ ID NO: 3066553 - RNA, 23 nt, Human
gcucugcaagaauugaagcagga

SEQ ID NO: 3066554 - RNA, 17 nt, Human
gcucugaucauccacug

SEQ ID NO: 3066555 - RNA, 23 nt, Human
gcucugaucauccacugugccau

SEQ ID NO: 3066556 - RNA, 19 nt, Human
gcuccaccuugcagcucuc

SEQ ID NO: 3066557 - RNA, 15 nt, Human
gcuccacuuggucug

SEQ ID NO: 3066558 - RNA, 18 nt, Human
gcuccccucggagaagag

SEQ ID NO: 3066559 - RNA, 21 nt, Human
gcuccccucggagaagagcug

SEQ ID NO: 3066560 - RNA, 18 nt, Human
gcuccuggcccacugcau

SEQ ID NO: 3066561 - RNA, 19 nt, Human
gcuccuggcccacugcauc

SEQ ID NO: 3066562 - RNA, 20 nt, Human
gcuccuggcccacugcaucg

SEQ ID NO: 3066563 - RNA, 14 nt, Human
gcuccuggcccacu

SEQ ID NO: 3066564 - RNA, 15 nt, Human
gcuccuggcccacug

SEQ ID NO: 3066565 - RNA, 18 nt, Human
gcuccagcucaccagccc

SEQ ID NO: 3066566 - RNA, 17 nt, Human
gcuccagcucaccagcc

SEQ ID NO: 3066567 - RNA, 18 nt, Human
gcuccacuuggucuguga

SEQ ID NO: 3066568 - RNA, 21 nt, Human
gcuccagcucaccagccccag

SEQ ID NO: 3066569 - RNA, 20 nt, Human
gcuccagcucaccagcccca

SEQ ID NO: 3066570 - RNA, 18 nt, Human
gcucccaccuggcucugu

SEQ ID NO: 3066571 - RNA, 14 nt, Human
gcucccaccuggcu

SEQ ID NO: 3066572 - RNA, 16 nt, Human
gcucccaccuggcucu

SEQ ID NO: 3066573 - RNA, 18 nt, Human
gcucccagccaggcccuu

SEQ ID NO: 3066574 - RNA, 16 nt, Human
gcucccagccaggccc

SEQ ID NO: 3066575 - RNA, 17 nt, Human
gcucccagccaggcccu

SEQ ID NO: 3066576 - RNA, 14 nt, Human
gcucccagccaggc

SEQ ID NO: 3066577 - RNA, 15 nt, Human
gcucccagccaggcc

SEQ ID NO: 3066578 - RNA, 22 nt, Human
gcgaucuggguucacugcaacc

SEQ ID NO: 3066579 - RNA, 16 nt, Human
gccuugaccauucucc

SEQ ID NO: 3066580 - RNA, 21 nt, Human
gccuucggccuccauccugag

SEQ ID NO: 3066581 - RNA, 20 nt, Human
gccuucggccuccauccuga

SEQ ID NO: 3066582 - RNA, 19 nt, Human
gccuucggccuccauccug

SEQ ID NO: 3066583 - RNA, 17 nt, Human
gccuugaccauucucca

SEQ ID NO: 3066584 - RNA, 19 nt, Human
gccuugaccauucuccacc

SEQ ID NO: 3066585 - RNA, 20 nt, Human
gccuugaccauucuccaccu

SEQ ID NO: 3066586 - RNA, 15 nt, Human
gcgagcccugguggc

SEQ ID NO: 3066587 - RNA, 17 nt, Human
gcgagcccugguggcag

SEQ ID NO: 3066588 - RNA, 18 nt, Human
gccuugcccagccuggau

SEQ ID NO: 3066589 - RNA, 19 nt, Human
gccuugcccagccuggaug

SEQ ID NO: 3066590 - RNA, 14 nt, Human
gccuugcccagccu

SEQ ID NO: 3066591 - RNA, 15 nt, Human
gccuugcccagccug

SEQ ID NO: 3066592 - RNA, 17 nt, Human
gccuugcccagccugga

SEQ ID NO: 3066593 - RNA, 13 nt, Human
gccuugcccagcc

SEQ ID NO: 3066594 - RNA, 15 nt, Human
gccuguugggccagg

SEQ ID NO: 3066595 - RNA, 16 nt, Human
gccuguugggccagga

SEQ ID NO: 3066596 - RNA, 18 nt, Human
gccuguugggccaggagc

SEQ ID NO: 3066597 - RNA, 20 nt, Human
gccuguugggccaggagccu

SEQ ID NO: 3066598 - RNA, 14 nt, Human
gccuguugggccag

SEQ ID NO: 3066599 - RNA, 17 nt, Human
gccugugccucugggac

SEQ ID NO: 3066600 - RNA, 16 nt, Human
gccugugccucuggga

SEQ ID NO: 3066601 - RNA, 13 nt, Human
gccuggcucaggu

SEQ ID NO: 3066602 - RNA, 18 nt, Human
gccugugccucugggacu

SEQ ID NO: 3066603 - RNA, 13 nt, Human
gccuggccugagc

SEQ ID NO: 3066604 - RNA, 14 nt, Human
gccuggccugagcu

SEQ ID NO: 3066605 - RNA, 18 nt, Human
gccuggccugagcuggga

SEQ ID NO: 3066606 - RNA, 20 nt, Human
gccuggccugagcugggaug

SEQ ID NO: 3066607 - RNA, 20 nt, Human
gccugcccaggccccugcca

SEQ ID NO: 3066608 - RNA, 15 nt, Human
gccugcccaggcccc

SEQ ID NO: 3066609 - RNA, 22 nt, Human
gccugcccaggccccugccacc

SEQ ID NO: 3066610 - RNA, 22 nt, Human
gccucgaacuggcugcaaaggg

SEQ ID NO: 3066611 - RNA, 20 nt, Human
gccucgaacuggcugcaaag

SEQ ID NO: 3066612 - RNA, 17 nt, Human
gccucuuaugggcuggg

SEQ ID NO: 3066613 - RNA, 18 nt, Human
gccucuuaugggcugggu

SEQ ID NO: 3066614 - RNA, 16 nt, Human
gccucuuaugggcugg

SEQ ID NO: 3066615 - RNA, 15 nt, Human
gccucuuagaugcag

SEQ ID NO: 3066616 - RNA, 21 nt, Human
gccucuuaugggcuggguucu

SEQ ID NO: 3066617 - RNA, 14 nt, Human
gccucuuggguuca

SEQ ID NO: 3066618 - RNA, 14 nt, Human
gccugcccaggccc

SEQ ID NO: 3066619 - RNA, 13 nt, Human
gccugcccaggcc

SEQ ID NO: 3066620 - RNA, 17 nt, Human
gccucccaaagugcugg

SEQ ID NO: 3066621 - RNA, 13 nt, Human
gccuccugugugu

SEQ ID NO: 3066622 - RNA, 16 nt, Human
gccucccaaagugcug

SEQ ID NO: 3066623 - RNA, 23 nt, Human
gccuccugugugugcgccuacag

SEQ ID NO: 3066624 - RNA, 19 nt, Human
gccuccugugugugcgccu

SEQ ID NO: 3066625 - RNA, 17 nt, Human
gccucgaacuggcugca

SEQ ID NO: 3066626 - RNA, 18 nt, Human
gcccugcagagggcacag

SEQ ID NO: 3066627 - RNA, 16 nt, Human
gcccugcagagggcac

SEQ ID NO: 3066628 - RNA, 17 nt, Human
gcccugcccaccuggcc

SEQ ID NO: 3066629 - RNA, 20 nt, Human
gcccugcccaccuggccucu

SEQ ID NO: 3066630 - RNA, 21 nt, Human
gcccugcccaccuggccucug

SEQ ID NO: 3066631 - RNA, 22 nt, Human
gcccugcccaccuggccucugc

SEQ ID NO: 3066632 - RNA, 11 nt, Human
gcccugccucc

SEQ ID NO: 3066633 - RNA, 15 nt, Human
gcccugcccaccugg

SEQ ID NO: 3066634 - RNA, 20 nt, Human
gcccuuagcagggaaacagc

SEQ ID NO: 3066635 - RNA, 19 nt, Human
gcccuuagcagggaaacag

SEQ ID NO: 3066636 - RNA, 12 nt, Human
gcccugccuccu

SEQ ID NO: 3066637 - RNA, 13 nt, Human
gcccugccuccuu

SEQ ID NO: 3066638 - RNA, 22 nt, Human
gcccuuagcagggaaacagcua

SEQ ID NO: 3066639 - RNA, 20 nt, Human
gccgcagcccugcagagggc

SEQ ID NO: 3066640 - RNA, 19 nt, Human
gccgcagcccugcagaggg

SEQ ID NO: 3066641 - RNA, 23 nt, Human
gccgcccaaggccuuccccuggc

SEQ ID NO: 3066642 - RNA, 14 nt, Human
gccgcccaaggccu

SEQ ID NO: 3066643 - RNA, 20 nt, Human
gccuaggugacagagugaga

SEQ ID NO: 3066644 - RNA, 15 nt, Human
gccuaggugacagag

SEQ ID NO: 3066645 - RNA, 14 nt, Human
gccuaggugacaga

SEQ ID NO: 3066646 - RNA, 13 nt, Human
gccuaggugacag

SEQ ID NO: 3066647 - RNA, 20 nt, Human
gccuagcauacguacacauu

SEQ ID NO: 3066648 - RNA, 22 nt, Human
gccuagcauacguacacauuuu

SEQ ID NO: 3066649 - RNA, 21 nt, Human
gccuagcauacguacacauuu

SEQ ID NO: 3066650 - RNA, 23 nt, Human
gccuagcauacguacacauuuua

SEQ ID NO: 3066651 - RNA, 19 nt, Human
gccuagcauacguacacau

SEQ ID NO: 3066652 - RNA, 12 nt, Human
gcccccacuggu

SEQ ID NO: 3066653 - RNA, 16 nt, Human
gccccugccacccugg

SEQ ID NO: 3066654 - RNA, 17 nt, Human
gccccugccacccuggg

SEQ ID NO: 3066655 - RNA, 23 nt, Human
gccccugccucucugcagguccc

SEQ ID NO: 3066656 - RNA, 20 nt, Human
gccccugccucucugcaggu

SEQ ID NO: 3066657 - RNA, 23 nt, Human
gcccgggcucugccucccaucac

SEQ ID NO: 3066658 - RNA, 17 nt, Human
gcuucacggaagagccu

SEQ ID NO: 3066659 - RNA, 15 nt, Human
gcuucacggaagagc

SEQ ID NO: 3066660 - RNA, 20 nt, Human
gcuucaaggauccugagcca

SEQ ID NO: 3066661 - RNA, 21 nt, Human
gcuucaaggauccugagccag

SEQ ID NO: 3066662 - RNA, 19 nt, Human
gcuucaaggauccugagcc

SEQ ID NO: 3066663 - RNA, 18 nt, Human
gcuucaaggauccugagc

SEQ ID NO: 3066664 - RNA, 18 nt, Human
gcuucacggaagagccuu

SEQ ID NO: 3066665 - RNA, 12 nt, Human
gcuucagccucc

SEQ ID NO: 3066666 - RNA, 22 nt, Human
gcuuccucauaguaugguggcu

SEQ ID NO: 3066667 - RNA, 23 nt, Human
gcuucuucagagacuccugcagg

SEQ ID NO: 3066668 - RNA, 12 nt, Human
gcuuguacauaa

SEQ ID NO: 3066669 - RNA, 22 nt, Human
gcuugaccuuuaagagaaauga

SEQ ID NO: 3066670 - RNA, 14 nt, Human
gcuugagcucagga

SEQ ID NO: 3066671 - RNA, 20 nt, Human
gcuuguaaauagcucaggug

SEQ ID NO: 3066672 - RNA, 13 nt, Human
gcugcugaaggcu

SEQ ID NO: 3066673 - RNA, 14 nt, Human
gcugcugaaggcuc

SEQ ID NO: 3066674 - RNA, 15 nt, Human
gcugcugaaggcucg

SEQ ID NO: 3066675 - RNA, 15 nt, Human
gcucugguccauaga

SEQ ID NO: 3066676 - RNA, 16 nt, Human
gcucugguccauagag

SEQ ID NO: 3066677 - RNA, 13 nt, Human
gcugcuggcuggu

SEQ ID NO: 3066678 - RNA, 20 nt, Human
gcuggccuggccccucaggg

SEQ ID NO: 3066679 - RNA, 22 nt, Human
gcuggagugcagugagccgaga

SEQ ID NO: 3066680 - RNA, 17 nt, Human
gcuggagugcagugagc

SEQ ID NO: 3066681 - RNA, 18 nt, Human
gcuggagugcagugagcc

SEQ ID NO: 3066682 - RNA, 20 nt, Human
gcuggcgugcaguggugcga

SEQ ID NO: 3066683 - RNA, 21 nt, Human
gcuggguggcaccagcagccu

SEQ ID NO: 3066684 - RNA, 22 nt, Human
gcuggguggcaccagcagccug

SEQ ID NO: 3066685 - RNA, 23 nt, Human
gcuggguggcaccagcagccugg

SEQ ID NO: 3066686 - RNA, 22 nt, Human
gcugggccccugccucucugca

SEQ ID NO: 3066687 - RNA, 21 nt, Human
gcugggccccugccucucugc

SEQ ID NO: 3066688 - RNA, 23 nt, Human
gcugggccccugccucucugcag

SEQ ID NO: 3066689 - RNA, 23 nt, Human
gcugggguggggaccucaggccu

SEQ ID NO: 3066690 - RNA, 16 nt, Human
gcuggcuguuggcugg

SEQ ID NO: 3066691 - RNA, 20 nt, Human
gcugggccccugccucucug

SEQ ID NO: 3066692 - RNA, 15 nt, Human
gcuggcuguuggcug

SEQ ID NO: 3066693 - RNA, 11 nt, Human
ggacccugagg

SEQ ID NO: 3066694 - RNA, 12 nt, Human
ggacccccugaa

SEQ ID NO: 3066695 - RNA, 15 nt, Human
ggaccccgagccugg

SEQ ID NO: 3066696 - RNA, 14 nt, Human
ggaccucaggccug

SEQ ID NO: 3066697 - RNA, 15 nt, Human
ggaccucaggccugg

SEQ ID NO: 3066698 - RNA, 20 nt, Human
ggacguguuaugacuccaga

SEQ ID NO: 3066699 - RNA, 13 nt, Human
ggaccucaggccu

SEQ ID NO: 3066700 - RNA, 12 nt, Human
ggaccucaggcc

SEQ ID NO: 3066701 - RNA, 12 nt, Human
ggacccugaggc

SEQ ID NO: 3066702 - RNA, 13 nt, Human
ggacccugaggcc

SEQ ID NO: 3066703 - RNA, 19 nt, Human
ggacccugaggcccagagg

SEQ ID NO: 3066704 - RNA, 14 nt, Human
ggacuuggaagcuc

SEQ ID NO: 3066705 - RNA, 14 nt, Human
ggacuuugcacacu

SEQ ID NO: 3066706 - RNA, 23 nt, Human
ggacuuugcacacuuuggcccag

SEQ ID NO: 3066707 - RNA, 16 nt, Human
ggagaaaggaagggcu

SEQ ID NO: 3066708 - RNA, 13 nt, Human
ggagaaacuggaa

SEQ ID NO: 3066709 - RNA, 16 nt, Human
ggacucaaugcacuga

SEQ ID NO: 3066710 - RNA, 22 nt, Human
ggacucauuuuaaaaaauggaa

SEQ ID NO: 3066711 - RNA, 24 nt, Human
ggacuaacuugucuuuggacccug

SEQ ID NO: 3066712 - RNA, 14 nt, Human
ggacuacaggugug

SEQ ID NO: 3066713 - RNA, 15 nt, Human
ggacucaaugcacug

SEQ ID NO: 3066714 - RNA, 20 nt, Human
ggacuaacuugucuuuggac

SEQ ID NO: 3066715 - RNA, 12 nt, Human
ggaacacucuga

SEQ ID NO: 3066716 - RNA, 14 nt, Human
ggaacacucugaga

SEQ ID NO: 3066717 - RNA, 19 nt, Human
ggaacacuccuucacagau

SEQ ID NO: 3066718 - RNA, 15 nt, Human
ggaacacucugagac

SEQ ID NO: 3066719 - RNA, 16 nt, Human
ggaacacucugagacu

SEQ ID NO: 3066720 - RNA, 13 nt, Human
ggaagacuuugga

SEQ ID NO: 3066721 - RNA, 17 nt, Human
ggaagacuuuggaaaga

SEQ ID NO: 3066722 - RNA, 12 nt, Human
ggaagacuuugg

SEQ ID NO: 3066723 - RNA, 13 nt, Human
ggaagacagcucu

SEQ ID NO: 3066724 - RNA, 14 nt, Human
ggaagacagcucuu

SEQ ID NO: 3066725 - RNA, 22 nt, Human
ggaagacaaugugaaaagaaaa

SEQ ID NO: 3066726 - RNA, 13 nt, Human
ggaagagaaaaaa

SEQ ID NO: 3066727 - RNA, 18 nt, Human
ggaagacuuuggaaagag

SEQ ID NO: 3066728 - RNA, 15 nt, Human
ggaagagaaaaaaua

SEQ ID NO: 3066729 - RNA, 19 nt, Human
ggaaggaaacccagcucug

SEQ ID NO: 3066730 - RNA, 20 nt, Human
ggaaggaaacccagcucugg

SEQ ID NO: 3066731 - RNA, 16 nt, Human
ggaaggaaacccagcu

SEQ ID NO: 3066732 - RNA, 15 nt, Human
ggaagcucagggccu

SEQ ID NO: 3066733 - RNA, 23 nt, Human
ggaagcucagggccuggcucagg

SEQ ID NO: 3066734 - RNA, 11 nt, Human
ggaagcuccgc

SEQ ID NO: 3066735 - RNA, 22 nt, Human
ggaagcucagggccuggcucag

SEQ ID NO: 3066736 - RNA, 15 nt, Human
ggaagccgcuggggc

SEQ ID NO: 3066737 - RNA, 19 nt, Human
ggaaugaagauacugaaau

SEQ ID NO: 3066738 - RNA, 22 nt, Human
ggacaaggaugaucuaggaaga

SEQ ID NO: 3066739 - RNA, 23 nt, Human
ggacaaggaugaucuaggaagac

SEQ ID NO: 3066740 - RNA, 13 nt, Human
ggacaagagcagg

SEQ ID NO: 3066741 - RNA, 18 nt, Human
ggaauaacauguaauuaa

SEQ ID NO: 3066742 - RNA, 16 nt, Human
ggaauccagacccggc

SEQ ID NO: 3066743 - RNA, 18 nt, Human
ggacacagcucuucucca

SEQ ID NO: 3066744 - RNA, 15 nt, Human
ggacacagcucuucu

SEQ ID NO: 3066745 - RNA, 14 nt, Human
ggacacagcucuuc

SEQ ID NO: 3066746 - RNA, 17 nt, Human
ggacagcuccuucuguc

SEQ ID NO: 3066747 - RNA, 20 nt, Human
ggacagcuccuucuguccua

SEQ ID NO: 3066748 - RNA, 19 nt, Human
ggacagcuccuucuguccu

SEQ ID NO: 3066749 - RNA, 22 nt, Human
ggacacuaaccacgcuggaccu

SEQ ID NO: 3066750 - RNA, 17 nt, Human
ggacacuaaccacgcug

SEQ ID NO: 3066751 - RNA, 13 nt, Human
ggcugggagagcc

SEQ ID NO: 3066752 - RNA, 14 nt, Human
ggcugggagagccu

SEQ ID NO: 3066753 - RNA, 15 nt, Human
ggcugggagagccuu

SEQ ID NO: 3066754 - RNA, 16 nt, Human
ggcugggagagccuuc

SEQ ID NO: 3066755 - RNA, 21 nt, Human
ggcugcucccaccuggcucug

SEQ ID NO: 3066756 - RNA, 22 nt, Human
ggcugcucccaccuggcucugu

SEQ ID NO: 3066757 - RNA, 13 nt, Human
ggcugcucccacc

SEQ ID NO: 3066758 - RNA, 15 nt, Human
ggcugcucccaccug

SEQ ID NO: 3066759 - RNA, 18 nt, Human
ggcugcucccaccuggcu

SEQ ID NO: 3066760 - RNA, 19 nt, Human
ggcugcucccaccuggcuc

SEQ ID NO: 3066761 - RNA, 11 nt, Human
ggcugcuccca

SEQ ID NO: 3066762 - RNA, 12 nt, Human
ggcugcucccac

SEQ ID NO: 3066763 - RNA, 12 nt, Human
ggcucuuccagg

SEQ ID NO: 3066764 - RNA, 13 nt, Human
ggcucucaggcca

SEQ ID NO: 3066765 - RNA, 11 nt, Human
ggcucucaggc

SEQ ID NO: 3066766 - RNA, 22 nt, Human
ggcugcggaaugaaccacaucu

SEQ ID NO: 3066767 - RNA, 19 nt, Human
ggcugccaaugggagcuca

SEQ ID NO: 3066768 - RNA, 20 nt, Human
ggcugccaaugggagcucau

SEQ ID NO: 3066769 - RNA, 22 nt, Human
ggcugcaugcgggcuuccuccu

SEQ ID NO: 3066770 - RNA, 14 nt, Human
ggcuccacuugguc

SEQ ID NO: 3066771 - RNA, 17 nt, Human
ggcuccaaacccucgag

SEQ ID NO: 3066772 - RNA, 18 nt, Human
ggcucagcggggacagcu

SEQ ID NO: 3066773 - RNA, 20 nt, Human
ggcucagcggggacagcucc

SEQ ID NO: 3066774 - RNA, 19 nt, Human
ggcucagcggggacagcuc

SEQ ID NO: 3066775 - RNA, 19 nt, Human
ggcucagguggggucacuc

SEQ ID NO: 3066776 - RNA, 20 nt, Human
ggcucagguggggucacucu

SEQ ID NO: 3066777 - RNA, 23 nt, Human
gggacuuggaagcuccgcuuucu

SEQ ID NO: 3066778 - RNA, 18 nt, Human
gggacuuggaagcuccgc

SEQ ID NO: 3066779 - RNA, 17 nt, Human
gggacuuggaagcuccg

SEQ ID NO: 3066780 - RNA, 15 nt, Human
gggacuuggaagcuc

SEQ ID NO: 3066781 - RNA, 21 nt, Human
gggagaaccaaaaagaggcua

SEQ ID NO: 3066782 - RNA, 18 nt, Human
gggaggucaaggcugcag

SEQ ID NO: 3066783 - RNA, 15 nt, Human
gggagggagggcucc

SEQ ID NO: 3066784 - RNA, 16 nt, Human
gggagggagggcucca

SEQ ID NO: 3066785 - RNA, 15 nt, Human
gggagagccuuccag

SEQ ID NO: 3066786 - RNA, 19 nt, Human
gggagagccuuccaggggu

SEQ ID NO: 3066787 - RNA, 23 nt, Human
gggagcaggcucgggcuccccag

SEQ ID NO: 3066788 - RNA, 21 nt, Human
aaaagauuuucagaaaauauu

SEQ ID NO: 3066789 - RNA, 15 nt, Human
aaaacuucagacaua

SEQ ID NO: 3066790 - RNA, 18 nt, Human
aaaacucuccucugcugc

SEQ ID NO: 3066791 - RNA, 14 nt, Human
gggaccagagcugc

SEQ ID NO: 3066792 - RNA, 20 nt, Human
gggaccagagcugccaccug

SEQ ID NO: 3066793 - RNA, 17 nt, Human
aaaaaugguuuaaaugg

SEQ ID NO: 3066794 - RNA, 12 nt, Human
aaaacccaagug

SEQ ID NO: 3066795 - RNA, 14 nt, Human
aaaaccacagcagu

SEQ ID NO: 3066796 - RNA, 14 nt, Human
aaaacaugcuacac

SEQ ID NO: 3066797 - RNA, 13 nt, Human
aaaacaugcuaca

SEQ ID NO: 3066798 - RNA, 22 nt, Human
ggcuucauccuccucagaucuu

SEQ ID NO: 3066799 - RNA, 18 nt, Human
ggcuucauccuccucaga

SEQ ID NO: 3066800 - RNA, 16 nt, Human
ggcuuccucauaguau

SEQ ID NO: 3066801 - RNA, 18 nt, Human
ggcuguaucccaugagcc

SEQ ID NO: 3066802 - RNA, 20 nt, Human
ggcuucaguggcagcugcuu

SEQ ID NO: 3066803 - RNA, 19 nt, Human
ggcuucaguggcagcugcu

SEQ ID NO: 3066804 - RNA, 17 nt, Human
ggcuucaguggcagcug

SEQ ID NO: 3066805 - RNA, 18 nt, Human
ggcuucaguggcagcugc

SEQ ID NO: 3066806 - RNA, 20 nt, Human
ggcugggucgcccuggacug

SEQ ID NO: 3066807 - RNA, 17 nt, Human
ggcugggucgcccugga

SEQ ID NO: 3066808 - RNA, 14 nt, Human
ggcugggucgcccu

SEQ ID NO: 3066809 - RNA, 19 nt, Human
ggcuggguucuacccaggu

SEQ ID NO: 3066810 - RNA, 21 nt, Human
ggcuggguucuacccaggugc

SEQ ID NO: 3066811 - RNA, 19 nt, Human
ggcuggguggcaccagcag

SEQ ID NO: 3066812 - RNA, 14 nt, Human
aaaaauaacaauga

SEQ ID NO: 3066813 - RNA, 19 nt, Human
ggcugggggccucagugcc

SEQ ID NO: 3066814 - RNA, 17 nt, Human
ggcugggggccucagug

SEQ ID NO: 3066815 - RNA, 16 nt, Human
ggcugggggccucagu

SEQ ID NO: 3066816 - RNA, 15 nt, Human
ggcugggggccucag

SEQ ID NO: 3066817 - RNA, 15 nt, Human
gggacagcuccuucu

SEQ ID NO: 3066818 - RNA, 22 nt, Human
gggacagucaccucauggaauu

SEQ ID NO: 3066819 - RNA, 20 nt, Human
gggacagucaccucauggaa

SEQ ID NO: 3066820 - RNA, 21 nt, Human
gggacagucaccucauggaau

SEQ ID NO: 3066821 - RNA, 13 nt, Human
gggaagagacuug

SEQ ID NO: 3066822 - RNA, 13 nt, Human
gggacagcuccuu

SEQ ID NO: 3066823 - RNA, 12 nt, Human
gggacagcuccu

SEQ ID NO: 3066824 - RNA, 18 nt, Human
gggaagaagcucucuccu

SEQ ID NO: 3066825 - RNA, 20 nt, Human
gggaacccaaguccaagcau

SEQ ID NO: 3066826 - RNA, 21 nt, Human
ggcuuccuccugguguggaag

SEQ ID NO: 3066827 - RNA, 14 nt, Human
ggccaguugguccc

SEQ ID NO: 3066828 - RNA, 17 nt, Human
ggccaguuggucccccu

SEQ ID NO: 3066829 - RNA, 20 nt, Human
ggccagugugacaaggauug

SEQ ID NO: 3066830 - RNA, 14 nt, Human
ggccccugcugguu

SEQ ID NO: 3066831 - RNA, 13 nt, Human
ggccccugcuggu

SEQ ID NO: 3066832 - RNA, 21 nt, Human
ggccccugccucucugcaggu

SEQ ID NO: 3066833 - RNA, 23 nt, Human
ggccccugcugguucaggguugg

SEQ ID NO: 3066834 - RNA, 13 nt, Human
ggcccggcuccag

SEQ ID NO: 3066835 - RNA, 19 nt, Human
ggcccuucucuccagcccc

SEQ ID NO: 3066836 - RNA, 20 nt, Human
ggcccuucucuccagccccu

SEQ ID NO: 3066837 - RNA, 21 nt, Human
ggcccuucucuccagccccug

SEQ ID NO: 3066838 - RNA, 15 nt, Human
ggcccggcuccaggc

SEQ ID NO: 3066839 - RNA, 23 nt, Human
ggccucaagugauucuccugccu

SEQ ID NO: 3066840 - RNA, 22 nt, Human
ggcccuucucuccagccccugg

SEQ ID NO: 3066841 - RNA, 23 nt, Human
ggcccuucucuccagccccugga

SEQ ID NO: 3066842 - RNA, 17 nt, Human
ggcccuugucggcccca

SEQ ID NO: 3066843 - RNA, 14 nt, Human
ggccuccauccuga

SEQ ID NO: 3066844 - RNA, 15 nt, Human
ggccuccauccugag

SEQ ID NO: 3066845 - RNA, 13 nt, Human
ggccuccauccug

SEQ ID NO: 3066846 - RNA, 20 nt, Human
ggcacagaaaauggaagaca

SEQ ID NO: 3066847 - RNA, 21 nt, Human
ggcacagaaaauggaagacag

SEQ ID NO: 3066848 - RNA, 19 nt, Human
ggcacagaaaauggaagac

SEQ ID NO: 3066849 - RNA, 23 nt, Human
ggcacagaaaauggaagacagcu

SEQ ID NO: 3066850 - RNA, 21 nt, Human
ggcacaguuuucugagaaaga

SEQ ID NO: 3066851 - RNA, 13 nt, Human
ggcacaucagcac

SEQ ID NO: 3066852 - RNA, 20 nt, Human
ggcacucagaagacacugau

SEQ ID NO: 3066853 - RNA, 23 nt, Human
ggcacucagaagacacugauggg

SEQ ID NO: 3066854 - RNA, 11 nt, Human
ggcagccccug

SEQ ID NO: 3066855 - RNA, 23 nt, Human
ggcagccccauucugccugccca

SEQ ID NO: 3066856 - RNA, 16 nt, Human
ggagagaagagaaugc

SEQ ID NO: 3066857 - RNA, 21 nt, Human
ggcaguggugguuuucuguuc

SEQ ID NO: 3066858 - RNA, 20 nt, Human
ggcaguggugguuuucuguu

SEQ ID NO: 3066859 - RNA, 22 nt, Human
ggcagccccuguucuggcagag

SEQ ID NO: 3066860 - RNA, 14 nt, Human
guacuuaacuauuc

SEQ ID NO: 3066861 - RNA, 21 nt, Human
guacuucaaauccuugaagau

SEQ ID NO: 3066862 - RNA, 22 nt, Human
guacuucaaauccuugaagauu

SEQ ID NO: 3066863 - RNA, 16 nt, Human
guacuggagaaaaugg

SEQ ID NO: 3066864 - RNA, 18 nt, Human
guacuacaguccucccau

SEQ ID NO: 3066865 - RNA, 19 nt, Human
guacuacaguccucccauc

SEQ ID NO: 3066866 - RNA, 14 nt, Human
guacccacugcucu

SEQ ID NO: 3066867 - RNA, 13 nt, Human
guacccacugcuc

SEQ ID NO: 3066868 - RNA, 13 nt, Human
guacuauguauca

SEQ ID NO: 3066869 - RNA, 17 nt, Human
guacuacaguccuccca

SEQ ID NO: 3066870 - RNA, 17 nt, Human
guacuauguaucaauga

SEQ ID NO: 3066871 - RNA, 15 nt, Human
guacuauguaucaau

SEQ ID NO: 3066872 - RNA, 11 nt, Human
guagagccagg

SEQ ID NO: 3066873 - RNA, 10 nt, Human
guagagccag

SEQ ID NO: 3066874 - RNA, 13 nt, Human
guagagacagggu

SEQ ID NO: 3066875 - RNA, 15 nt, Human
guagagccagggucu

SEQ ID NO: 3066876 - RNA, 12 nt, Human
guagagacaggg

SEQ ID NO: 3066877 - RNA, 11 nt, Human
guagagacagg

SEQ ID NO: 3066878 - RNA, 23 nt, Human
guagacgugcacgcacacugucu

SEQ ID NO: 3066879 - RNA, 20 nt, Human
guagacgugcacgcacacug

SEQ ID NO: 3066880 - RNA, 23 nt, Human
guagaaauaucugaaaauguaug

SEQ ID NO: 3066881 - RNA, 21 nt, Human
guagaaauaucugaaaaugua

SEQ ID NO: 3066882 - RNA, 20 nt, Human
guagaaauaucugaaaaugu

SEQ ID NO: 3066883 - RNA, 21 nt, Human
guagaagucuuagauguauau

SEQ ID NO: 3066884 - RNA, 18 nt, Human
guagaagcccuucuaccu

SEQ ID NO: 3066885 - RNA, 15 nt, Human
guacauuuggagaca

SEQ ID NO: 3066886 - RNA, 23 nt, Human
guaccaagacuacuagggaaaug

SEQ ID NO: 3066887 - RNA, 20 nt, Human
guaccaagacuacuagggaa

SEQ ID NO: 3066888 - RNA, 12 nt, Human
guacccacugcu

SEQ ID NO: 3066889 - RNA, 16 nt, Human
guacaugaaaacacau

SEQ ID NO: 3066890 - RNA, 15 nt, Human
guacaugaaaacaca

SEQ ID NO: 3066891 - RNA, 14 nt, Human
guacaugaaaacac

SEQ ID NO: 3066892 - RNA, 15 nt, Human
aaauccauacauuug

SEQ ID NO: 3066893 - RNA, 20 nt, Human
guacaugaaaacacauuuuu

SEQ ID NO: 3066894 - RNA, 19 nt, Human
guacaugaaaacacauuuu

SEQ ID NO: 3066895 - RNA, 18 nt, Human
guacaugaaaacacauuu

SEQ ID NO: 3066896 - RNA, 17 nt, Human
guacaugaaaacacauu

SEQ ID NO: 3066897 - RNA, 19 nt, Human
guacauggaauaacaugua

SEQ ID NO: 3066898 - RNA, 15 nt, Human
aaauccacuuuaucu

SEQ ID NO: 3066899 - RNA, 11 nt, Human
aaaucauuucu

SEQ ID NO: 3066900 - RNA, 23 nt, Human
aaaucauuucugcaucagcugcu

SEQ ID NO: 3066901 - RNA, 22 nt, Human
aaaucauuucugcaucagcugc

SEQ ID NO: 3066902 - RNA, 21 nt, Human
aaaucauuucugcaucagcug

SEQ ID NO: 3066903 - RNA, 19 nt, Human
aaaucauuucugcaucagc

SEQ ID NO: 3066904 - RNA, 19 nt, Human
aaaucagccguguaaccau

SEQ ID NO: 3066905 - RNA, 12 nt, Human
aaaucagccugc

SEQ ID NO: 3066906 - RNA, 18 nt, Human
aaaucagccugcuccagc

SEQ ID NO: 3066907 - RNA, 16 nt, Human
aaaucagcugcuacua

SEQ ID NO: 3066908 - RNA, 12 nt, Human
aaaucauuucug

SEQ ID NO: 3066909 - RNA, 21 nt, Human
aaaucagacuaugaaguuuuu

SEQ ID NO: 3066910 - RNA, 14 nt, Human
aaaucagacuauga

SEQ ID NO: 3066911 - RNA, 15 nt, Human
aaauauuauguguuu

SEQ ID NO: 3066912 - RNA, 14 nt, Human
aaauauuauguguu

SEQ ID NO: 3066913 - RNA, 17 nt, Human
aaauauuauguuaaaac

SEQ ID NO: 3066914 - RNA, 19 nt, Human
aaauauuaagaaagacuau

SEQ ID NO: 3066915 - RNA, 22 nt, Human
guaauuugugauacaaugcugu

SEQ ID NO: 3066916 - RNA, 21 nt, Human
guaauccaagcaaaugugaau

SEQ ID NO: 3066917 - RNA, 18 nt, Human
guaauaugcacacauuuu

SEQ ID NO: 3066918 - RNA, 17 nt, Human
guaauaugcacacauuu

SEQ ID NO: 3066919 - RNA, 16 nt, Human
guaauaugcacacauu

SEQ ID NO: 3066920 - RNA, 14 nt, Human
guaauaugcacaca

SEQ ID NO: 3066921 - RNA, 22 nt, Human
guaauaacugugaaguuuacau

SEQ ID NO: 3066922 - RNA, 16 nt, Human
guaauaacugugaagu

SEQ ID NO: 3066923 - RNA, 15 nt, Human
guaauaacugugaag

SEQ ID NO: 3066924 - RNA, 19 nt, Human
guaauagagcaaaauugau

SEQ ID NO: 3066925 - RNA, 20 nt, Human
guaauaggcguaacuaauuu

SEQ ID NO: 3066926 - RNA, 17 nt, Human
aaauacagauagauaua

SEQ ID NO: 3066927 - RNA, 19 nt, Human
aaauacacacucaaaucaa

SEQ ID NO: 3066928 - RNA, 18 nt, Human
aaauaccagccaguaaau

SEQ ID NO: 3066929 - RNA, 22 nt, Human
aaauacgugggcauucaaaugu

SEQ ID NO: 3066930 - RNA, 14 nt, Human
aaauauaauugaca

SEQ ID NO: 3066931 - RNA, 22 nt, Human
aaauaauuuuuauauuugaaau

SEQ ID NO: 3066932 - RNA, 23 nt, Human
aaauaauuuuuauauuugaaaua

SEQ ID NO: 3066933 - RNA, 15 nt, Human
aaauacacacucaaa

SEQ ID NO: 3066934 - RNA, 21 nt, Human
aaauaauuuuuauauuugaaa

SEQ ID NO: 3066935 - RNA, 20 nt, Human
aaaguuauugauaaguucau

SEQ ID NO: 3066936 - RNA, 23 nt, Human
aaaguucugcagauaaacaguag

SEQ ID NO: 3066937 - RNA, 17 nt, Human
aaaguauguuagugcaa

SEQ ID NO: 3066938 - RNA, 18 nt, Human
aaaguaucccuacuguaa

SEQ ID NO: 3066939 - RNA, 18 nt, Human
aaaguauguuagugcaaa

SEQ ID NO: 3066940 - RNA, 21 nt, Human
aaaguacuucuccacccugcu

SEQ ID NO: 3066941 - RNA, 20 nt, Human
aaaguacuucuccacccugc

SEQ ID NO: 3066942 - RNA, 23 nt, Human
aaaguacuucuccacccugcucu

SEQ ID NO: 3066943 - RNA, 19 nt, Human
aaaguacuucuccacccug

SEQ ID NO: 3066944 - RNA, 20 nt, Human
aaaguacacuguuucaaacu

SEQ ID NO: 3066945 - RNA, 20 nt, Human
aaagguauuuuaaucaccaa

SEQ ID NO: 3066946 - RNA, 14 nt, Human
aaauaaaaauauug

SEQ ID NO: 3066947 - RNA, 16 nt, Human
aaaguugguaaaccuu

SEQ ID NO: 3066948 - RNA, 17 nt, Human
aaaguugguaaaccuuu

SEQ ID NO: 3066949 - RNA, 18 nt, Human
gggggccucagugccacu

SEQ ID NO: 3066950 - RNA, 17 nt, Human
gggggccucagugccac

SEQ ID NO: 3066951 - RNA, 15 nt, Human
gggggccucagugcc

SEQ ID NO: 3066952 - RNA, 12 nt, Human
gggggccucagu

SEQ ID NO: 3066953 - RNA, 16 nt, Human
ggggaccagagcugcc

SEQ ID NO: 3066954 - RNA, 15 nt, Human
ggggaccagagcugc

SEQ ID NO: 3066955 - RNA, 19 nt, Human
ggggaauugaggacacuga

SEQ ID NO: 3066956 - RNA, 22 nt, Human
ggggaauguuugccucugccuc

SEQ ID NO: 3066957 - RNA, 18 nt, Human
ggggaauguuugccucug

SEQ ID NO: 3066958 - RNA, 16 nt, Human
aaacauggccuuugcu

SEQ ID NO: 3066959 - RNA, 15 nt, Human
aaacagucucaggaa

SEQ ID NO: 3066960 - RNA, 14 nt, Human
aaacaguagugaua

SEQ ID NO: 3066961 - RNA, 17 nt, Human
aaacauggccuuugcuu

SEQ ID NO: 3066962 - RNA, 13 nt, Human
gggaugagaaagg

SEQ ID NO: 3066963 - RNA, 19 nt, Human
aaaauuuagaaauauaauu

SEQ ID NO: 3066964 - RNA, 20 nt, Human
aaaauuuugauguuuuaagg

SEQ ID NO: 3066965 - RNA, 11 nt, Human
aaacacagcaa

SEQ ID NO: 3066966 - RNA, 11 nt, Human
aaacagggccu

SEQ ID NO: 3066967 - RNA, 11 nt, Human
aaacacauuuu

SEQ ID NO: 3066968 - RNA, 14 nt, Human
aaacacagcaaggg

SEQ ID NO: 3066969 - RNA, 12 nt, Human
aaacacagcaag

SEQ ID NO: 3066970 - RNA, 22 nt, Human
aaacuaggugcauauuuauaaa

SEQ ID NO: 3066971 - RNA, 18 nt, Human
aaacuaggugcauauuua

SEQ ID NO: 3066972 - RNA, 14 nt, Human
aaacgucuuaaaua

SEQ ID NO: 3066973 - RNA, 13 nt, Human
aaacgucuuaaau

SEQ ID NO: 3066974 - RNA, 15 nt, Human
aaacucguuaauuug

SEQ ID NO: 3066975 - RNA, 14 nt, Human
aaacuuaaucuaaa

SEQ ID NO: 3066976 - RNA, 16 nt, Human
aaacuuaaucuaaaug

SEQ ID NO: 3066977 - RNA, 18 nt, Human
aaacuuaaucuaaaugga

SEQ ID NO: 3066978 - RNA, 17 nt, Human
aaacuuaaucuaaaugg

SEQ ID NO: 3066979 - RNA, 19 nt, Human
ggguggcaccagcagccug

SEQ ID NO: 3066980 - RNA, 18 nt, Human
aaaccuuuuauauuuagu

SEQ ID NO: 3066981 - RNA, 18 nt, Human
aaaccuuuguuugcaucu

SEQ ID NO: 3066982 - RNA, 15 nt, Human
aaacgggcucagcaa

SEQ ID NO: 3066983 - RNA, 23 nt, Human
aaaccaagucaagugaaaaagga

SEQ ID NO: 3066984 - RNA, 12 nt, Human
aaaccacagcag

SEQ ID NO: 3066985 - RNA, 15 nt, Human
gggucgcccuggacu

SEQ ID NO: 3066986 - RNA, 13 nt, Human
gggucgcccugga

SEQ ID NO: 3066987 - RNA, 19 nt, Human
gggggugcugggccccugc

SEQ ID NO: 3066988 - RNA, 15 nt, Human
gggggccuggaugcc

SEQ ID NO: 3066989 - RNA, 14 nt, Human
aaagacuguacaaa

SEQ ID NO: 3066990 - RNA, 13 nt, Human
aaagacuguacaa

SEQ ID NO: 3066991 - RNA, 23 nt, Human
aaagacugaguacguugugcauu

SEQ ID NO: 3066992 - RNA, 17 nt, Human
aaagaugcuucucacug

SEQ ID NO: 3066993 - RNA, 14 nt, Human
aaagaugcuucuca

SEQ ID NO: 3066994 - RNA, 19 nt, Human
aaagaugcuucucacugcc

SEQ ID NO: 3066995 - RNA, 15 nt, Human
aaagaggaaugaagu

SEQ ID NO: 3066996 - RNA, 15 nt, Human
aaagaggcagcuuga

SEQ ID NO: 3066997 - RNA, 12 nt, Human
gguccugcugca

SEQ ID NO: 3066998 - RNA, 11 nt, Human
gguccugcugc

SEQ ID NO: 3066999 - RNA, 22 nt, Human
aaagaccuuuggagcaaagcug

SEQ ID NO: 3067000 - RNA, 17 nt, Human
aaagacuauucaaacag

SEQ ID NO: 3067001 - RNA, 19 nt, Human
aaagacuauucaaacaguc

SEQ ID NO: 3067002 - RNA, 18 nt, Human
aaagacuauucaaacagu

SEQ ID NO: 3067003 - RNA, 14 nt, Human
aaagacuccaaaga

SEQ ID NO: 3067004 - RNA, 21 nt, Human
aaagacuccaaagaaauguaa

SEQ ID NO: 3067005 - RNA, 15 nt, Human
aaagacuccaaagaa

SEQ ID NO: 3067006 - RNA, 21 nt, Human
aaagacuauucaaacagucuc

SEQ ID NO: 3067007 - RNA, 13 nt, Human
aaagacagugaaa

SEQ ID NO: 3067008 - RNA, 16 nt, Human
aaacuuguauuaugug

SEQ ID NO: 3067009 - RNA, 19 nt, Human
aaacuucagacauagaauu

SEQ ID NO: 3067010 - RNA, 23 nt, Human
aaacuucagcgguuuauauaagc

SEQ ID NO: 3067011 - RNA, 17 nt, Human
aaagggugaaaauuauu

SEQ ID NO: 3067012 - RNA, 14 nt, Human
aaagguaaaucaga

SEQ ID NO: 3067013 - RNA, 14 nt, Human
aaagguacuucaaa

SEQ ID NO: 3067014 - RNA, 20 nt, Human
aaagggacugagaaauuuau

SEQ ID NO: 3067015 - RNA, 22 nt, Human
aaagggacuuggaagcuccgcu

SEQ ID NO: 3067016 - RNA, 21 nt, Human
aaaggagagcuagcagcaggg

SEQ ID NO: 3067017 - RNA, 17 nt, Human
aaaggagagcuagcagc

SEQ ID NO: 3067018 - RNA, 17 nt, Human
aaaggagauuggaagga

SEQ ID NO: 3067019 - RNA, 22 nt, Human
aaaggaaagagggagguaagga

SEQ ID NO: 3067020 - RNA, 15 nt, Human
aaagcucacuuuacu

SEQ ID NO: 3067021 - RNA, 21 nt, Human
aaagcacugacuucuaaguaa

SEQ ID NO: 3067022 - RNA, 17 nt, Human
aaagcacugacuucuaa

SEQ ID NO: 3067023 - RNA, 13 nt, Human
aaagcugcugaca

SEQ ID NO: 3067024 - RNA, 15 nt, Human
aaagcuuguuaagau

SEQ ID NO: 3067025 - RNA, 13 nt, Human
ggugaaaauuauu

SEQ ID NO: 3067026 - RNA, 14 nt, Human
ggugaaaauuauuu

SEQ ID NO: 3067027 - RNA, 22 nt, Human
ggugaaaauuauuuuguucaua

SEQ ID NO: 3067028 - RNA, 13 nt, Human
ggugaacagaaca

SEQ ID NO: 3067029 - RNA, 14 nt, Human
ggucgcccuggacu

SEQ ID NO: 3067030 - RNA, 13 nt, Human
ggucgaggcagga

SEQ ID NO: 3067031 - RNA, 24 nt, Human
ggugauccacccaccucagccucc

SEQ ID NO: 3067032 - RNA, 23 nt, Human
ggugauccacccaccucagccuc

SEQ ID NO: 3067033 - RNA, 18 nt, Human
ggugauccacccaccuca

SEQ ID NO: 3067034 - RNA, 13 nt, Human
ggugcaaugaccu

SEQ ID NO: 3067035 - RNA, 12 nt, Human
ggugcaaugacc

SEQ ID NO: 3067036 - RNA, 16 nt, Human
ggugcugggccccugc

SEQ ID NO: 3067037 - RNA, 15 nt, Human
ggugcugggccccug

SEQ ID NO: 3067038 - RNA, 13 nt, Human
ggugcugggcccc

SEQ ID NO: 3067039 - RNA, 11 nt, Human
ggugcugggcc

SEQ ID NO: 3067040 - RNA, 21 nt, Human
ggugcauauuuauaaaaauaa

SEQ ID NO: 3067041 - RNA, 13 nt, Human
gguggaugccugg

SEQ ID NO: 3067042 - RNA, 13 nt, Human
gacgcugugcugc

SEQ ID NO: 3067043 - RNA, 12 nt, Human
gacgcugugcug

SEQ ID NO: 3067044 - RNA, 16 nt, Human
gacuauucaaacaguc

SEQ ID NO: 3067045 - RNA, 15 nt, Human
gacuauucaaacagu

SEQ ID NO: 3067046 - RNA, 17 nt, Human
gagaagcggcuggcagc

SEQ ID NO: 3067047 - RNA, 16 nt, Human
gagaagcggcuggcag

SEQ ID NO: 3067048 - RNA, 20 nt, Human
gacugugugcucaggagccc

SEQ ID NO: 3067049 - RNA, 17 nt, Human
gacugugugcucaggag

SEQ ID NO: 3067050 - RNA, 16 nt, Human
gacugugugcucagga

SEQ ID NO: 3067051 - RNA, 14 nt, Human
gacugugugcucag

SEQ ID NO: 3067052 - RNA, 14 nt, Human
gacucaaugcacug

SEQ ID NO: 3067053 - RNA, 17 nt, Human
gacucaaugcacugaca

SEQ ID NO: 3067054 - RNA, 22 nt, Human
gacuguacaaaguagaagucuu

SEQ ID NO: 3067055 - RNA, 16 nt, Human
gacuguuuucucuuga

SEQ ID NO: 3067056 - RNA, 18 nt, Human
gacuguuuucucuugaga

SEQ ID NO: 3067057 - RNA, 14 nt, Human
gacuuuggaaagac

SEQ ID NO: 3067058 - RNA, 14 nt, Human
gacuuuggaaagag

SEQ ID NO: 3067059 - RNA, 21 nt, Human
gacuuuucuguccgagcuuug

SEQ ID NO: 3067060 - RNA, 22 nt, Human
gacuuuguuaguuucuccaagc

SEQ ID NO: 3067061 - RNA, 20 nt, Human
gacuuuuccaacccucauca

SEQ ID NO: 3067062 - RNA, 15 nt, Human
gacagcuccuucugu

SEQ ID NO: 3067063 - RNA, 14 nt, Human
gacagcuccuucug

SEQ ID NO: 3067064 - RNA, 13 nt, Human
gacagcuccuucu

SEQ ID NO: 3067065 - RNA, 14 nt, Human
gacagaaagcagaa

SEQ ID NO: 3067066 - RNA, 21 nt, Human
gacagcccuucuuuccacaga

SEQ ID NO: 3067067 - RNA, 20 nt, Human
gacagaaagcagaacaguga

SEQ ID NO: 3067068 - RNA, 16 nt, Human
gacccuauugcugcuu

SEQ ID NO: 3067069 - RNA, 14 nt, Human
gacccgucuccagc

SEQ ID NO: 3067070 - RNA, 15 nt, Human
gacccgucuccagcu

SEQ ID NO: 3067071 - RNA, 18 nt, Human
gacccgucuccagcugcu

SEQ ID NO: 3067072 - RNA, 13 nt, Human
gacccggcugcgu

SEQ ID NO: 3067073 - RNA, 12 nt, Human
gacccggcugcg

SEQ ID NO: 3067074 - RNA, 16 nt, Human
gaccaucccugaaggc

SEQ ID NO: 3067075 - RNA, 17 nt, Human
gaccaucccugaaggcc

SEQ ID NO: 3067076 - RNA, 16 nt, Human
gaccauucuccaccug

SEQ ID NO: 3067077 - RNA, 14 nt, Human
gaccaucccugaag

SEQ ID NO: 3067078 - RNA, 15 nt, Human
gaccaucccugaagg

SEQ ID NO: 3067079 - RNA, 14 nt, Human
gagucacuggaaca

SEQ ID NO: 3067080 - RNA, 21 nt, Human
gagucacuggaacacuaauga

SEQ ID NO: 3067081 - RNA, 17 nt, Human
gaggugggauccuccag

SEQ ID NO: 3067082 - RNA, 15 nt, Human
gaggugggauccucc

SEQ ID NO: 3067083 - RNA, 16 nt, Human
gaggugggauccucca

SEQ ID NO: 3067084 - RNA, 13 nt, Human
gaggugggauccu

SEQ ID NO: 3067085 - RNA, 18 nt, Human
gagugagacucugucuca

SEQ ID NO: 3067086 - RNA, 14 nt, Human
gagugagacucugu

SEQ ID NO: 3067087 - RNA, 18 nt, Human
gagucagaaguuucugcc

SEQ ID NO: 3067088 - RNA, 18 nt, Human
gagugcagugagccgaga

SEQ ID NO: 3067089 - RNA, 13 nt, Human
gagugcagugagc

SEQ ID NO: 3067090 - RNA, 22 nt, Human
gaguugauacuacaguuuguua

SEQ ID NO: 3067091 - RNA, 21 nt, Human
gaguugauagcacagacccug

SEQ ID NO: 3067092 - RNA, 19 nt, Human
gaguugauacuacaguuug

SEQ ID NO: 3067093 - RNA, 19 nt, Human
gaggcucuggagcccacug

SEQ ID NO: 3067094 - RNA, 14 nt, Human
gaggcucuggagcc

SEQ ID NO: 3067095 - RNA, 15 nt, Human
gaggcucugcccuug

SEQ ID NO: 3067096 - RNA, 17 nt, Human
gaggcucugcccuuggu

SEQ ID NO: 3067097 - RNA, 12 nt, Human
gaggcucugccc

SEQ ID NO: 3067098 - RNA, 13 nt, Human
gaggcucugcccu

SEQ ID NO: 3067099 - RNA, 14 nt, Human
gaggcucugcccuu

SEQ ID NO: 3067100 - RNA, 20 nt, Human
gaggccagagacacaagccu

SEQ ID NO: 3067101 - RNA, 19 nt, Human
gaggccagagacacaagcc

SEQ ID NO: 3067102 - RNA, 12 nt, Human
gagggcuccaga

SEQ ID NO: 3067103 - RNA, 13 nt, Human
gagggcuccagac

SEQ ID NO: 3067104 - RNA, 14 nt, Human
gagggcuccagaca

SEQ ID NO: 3067105 - RNA, 15 nt, Human
gagggcuccagacac

SEQ ID NO: 3067106 - RNA, 12 nt, Human
gaggggaacaga

SEQ ID NO: 3067107 - RNA, 20 nt, Human
gagcaucaggccaggcccuc

SEQ ID NO: 3067108 - RNA, 22 nt, Human
gagcaucaggccaggcccucug

SEQ ID NO: 3067109 - RNA, 19 nt, Human
gagcugccuguucagcucc

SEQ ID NO: 3067110 - RNA, 16 nt, Human
gagcugccuguucagc

SEQ ID NO: 3067111 - RNA, 15 nt, Human
gagcugccuguucag

SEQ ID NO: 3067112 - RNA, 12 nt, Human
gagccuuccagg

SEQ ID NO: 3067113 - RNA, 13 nt, Human
gagccuuccaggg

SEQ ID NO: 3067114 - RNA, 13 nt, Human
gagcgacagugag

SEQ ID NO: 3067115 - RNA, 15 nt, Human
gagcgacagugagac

SEQ ID NO: 3067116 - RNA, 17 nt, Human
gagcaucaggccaggcc

SEQ ID NO: 3067117 - RNA, 16 nt, Human
gcacuuuguucuggcu

SEQ ID NO: 3067118 - RNA, 19 nt, Human
gcagcugcgguccacccag

SEQ ID NO: 3067119 - RNA, 20 nt, Human
gcagcugcuuuugucuaugg

SEQ ID NO: 3067120 - RNA, 13 nt, Human
gcagcugcuuuug

SEQ ID NO: 3067121 - RNA, 23 nt, Human
gcagcugcgguccacccaggagc

SEQ ID NO: 3067122 - RNA, 22 nt, Human
gcagcugcgguccacccaggag

SEQ ID NO: 3067123 - RNA, 16 nt, Human
gcagcuugaggguugg

SEQ ID NO: 3067124 - RNA, 15 nt, Human
gcagcuuauucacaa

SEQ ID NO: 3067125 - RNA, 13 nt, Human
gcaggcucucagg

SEQ ID NO: 3067126 - RNA, 14 nt, Human
gcaggcucucaggc

SEQ ID NO: 3067127 - RNA, 15 nt, Human
gcaggcucucaggcc

SEQ ID NO: 3067128 - RNA, 16 nt, Human
gcaggcucucaggcca

SEQ ID NO: 3067129 - RNA, 22 nt, Human
gcaggcucgggcuccccagccc

SEQ ID NO: 3067130 - RNA, 12 nt, Human
gcaggcucucag

SEQ ID NO: 3067131 - RNA, 21 nt, Human
gcagcuugaggguugggcugg

SEQ ID NO: 3067132 - RNA, 19 nt, Human
gcagcuugaggguugggcu

SEQ ID NO: 3067133 - RNA, 22 nt, Human
gcagggaaacagcuaaugggac

SEQ ID NO: 3067134 - RNA, 13 nt, Human
gcagggaaacagc

SEQ ID NO: 3067135 - RNA, 17 nt, Human
gcaggcucucaggccag

SEQ ID NO: 3067136 - RNA, 18 nt, Human
gcaggcugccagugccug

SEQ ID NO: 3067137 - RNA, 17 nt, Human
gcaggcugccagugccu

SEQ ID NO: 3067138 - RNA, 15 nt, Human
gcauaccacuuuugu

SEQ ID NO: 3067139 - RNA, 14 nt, Human
gcaguugccaguca

SEQ ID NO: 3067140 - RNA, 23 nt, Human
gcaguugccagucaccccggcca

SEQ ID NO: 3067141 - RNA, 15 nt, Human
gcauaaaaauuagcc

SEQ ID NO: 3067142 - RNA, 22 nt, Human
gcaguugaaaagacuccaaaga

SEQ ID NO: 3067143 - RNA, 21 nt, Human
gcauccuggcacccggccccu

SEQ ID NO: 3067144 - RNA, 17 nt, Human
gcauccuggcacccggc

SEQ ID NO: 3067145 - RNA, 18 nt, Human
gcauggcauauuuuucac

SEQ ID NO: 3067146 - RNA, 23 nt, Human
gcauccuggcacccggccccugc

SEQ ID NO: 3067147 - RNA, 22 nt, Human
gcauccuggcacccggccccug

SEQ ID NO: 3067148 - RNA, 14 nt, Human
gcauccuggcaccc

SEQ ID NO: 3067149 - RNA, 17 nt, Human
gcaugugaugagaggaa

SEQ ID NO: 3067150 - RNA, 16 nt, Human
gcauuguaaaugugcu

SEQ ID NO: 3067151 - RNA, 13 nt, Human
gcaugggaaugaa

SEQ ID NO: 3067152 - RNA, 16 nt, Human
gcaugggaaugaaugu

SEQ ID NO: 3067153 - RNA, 19 nt, Human
gcaugggaaugaaugucag

SEQ ID NO: 3067154 - RNA, 19 nt, Human
gccaacuauggccugugga

SEQ ID NO: 3067155 - RNA, 15 nt, Human
gccaacuauggccug

SEQ ID NO: 3067156 - RNA, 14 nt, Human
gccaacuauggccu

SEQ ID NO: 3067157 - RNA, 14 nt, Human
gccaagaauucuua

SEQ ID NO: 3067158 - RNA, 18 nt, Human
gccaagaauucuuaaaua

SEQ ID NO: 3067159 - RNA, 15 nt, Human
gcauuuaaaagauac

SEQ ID NO: 3067160 - RNA, 12 nt, Human
gcauuuaaaaga

SEQ ID NO: 3067161 - RNA, 16 nt, Human
gcauuugaaaauuuug

SEQ ID NO: 3067162 - RNA, 14 nt, Human
gcauuugaaaauuu

SEQ ID NO: 3067163 - RNA, 17 nt, Human
gccaaggccaaaggaag

SEQ ID NO: 3067164 - RNA, 11 nt, Human
gccaaggccaa

SEQ ID NO: 3067165 - RNA, 15 nt, Human
gcaaaagaugcuucu

SEQ ID NO: 3067166 - RNA, 18 nt, Human
gcaacccccagccugcua

SEQ ID NO: 3067167 - RNA, 16 nt, Human
gcaaaagaugcuucuc

SEQ ID NO: 3067168 - RNA, 17 nt, Human
gcaacccccagccugcu

SEQ ID NO: 3067169 - RNA, 22 nt, Human
gcaacccuggugaccagcacca

SEQ ID NO: 3067170 - RNA, 18 nt, Human
gcaaccuccgccucuugg

SEQ ID NO: 3067171 - RNA, 11 nt, Human
gcaauaaagca

SEQ ID NO: 3067172 - RNA, 23 nt, Human
gcaauaaggggagaguaacccug

SEQ ID NO: 3067173 - RNA, 18 nt, Human
gcaauagucaaauugugu

SEQ ID NO: 3067174 - RNA, 19 nt, Human
gcacacaccagagcccacc

SEQ ID NO: 3067175 - RNA, 18 nt, Human
gcacacaccagagcccac

SEQ ID NO: 3067176 - RNA, 17 nt, Human
gcacacaccagagccca

SEQ ID NO: 3067177 - RNA, 16 nt, Human
gcacacaccagagccc

SEQ ID NO: 3067178 - RNA, 15 nt, Human
gcacacaccagagcc

SEQ ID NO: 3067179 - RNA, 14 nt, Human
gcacacaccagagc

SEQ ID NO: 3067180 - RNA, 12 nt, Human
gcacacaccaga

SEQ ID NO: 3067181 - RNA, 17 nt, Human
gcacuccagccugggug

SEQ ID NO: 3067182 - RNA, 15 nt, Human
gcacuccagccuggg

SEQ ID NO: 3067183 - RNA, 22 nt, Human
gcacuauagccuaggugacaga

SEQ ID NO: 3067184 - RNA, 22 nt, Human
gcacuauaauguaagcucuacu

SEQ ID NO: 3067185 - RNA, 12 nt, Human
gcaccuccugcc

SEQ ID NO: 3067186 - RNA, 20 nt, Human
gcacacaccagagcccaccu

SEQ ID NO: 3067187 - RNA, 12 nt, Human
gcacacauuuuu

SEQ ID NO: 3067188 - RNA, 11 nt, Human
gcacacauuuu

SEQ ID NO: 3067189 - RNA, 17 nt, Human
gcaccggcuggccuggc

SEQ ID NO: 3067190 - RNA, 15 nt, Human
gcaccggcuggccug

SEQ ID NO: 3067191 - RNA, 16 nt, Human
gcaccggcuggccugg

SEQ ID NO: 3067192 - RNA, 17 nt, Human
gauuucacucuccuugg

SEQ ID NO: 3067193 - RNA, 18 nt, Human
gauuucacucuccuuggu

SEQ ID NO: 3067194 - RNA, 13 nt, Human
gauuucacucucc

SEQ ID NO: 3067195 - RNA, 16 nt, Human
gauuucacucuccuug

SEQ ID NO: 3067196 - RNA, 23 nt, Human
gauuuuuuuuuccuucagugccu

SEQ ID NO: 3067197 - RNA, 22 nt, Human
gauuuuuuuuuccuucagugcc

SEQ ID NO: 3067198 - RNA, 21 nt, Human
gauucuccugccucagccucc

SEQ ID NO: 3067199 - RNA, 20 nt, Human
gauucuccugccucagccuc

SEQ ID NO: 3067200 - RNA, 19 nt, Human
gauucuccugccucagccu

SEQ ID NO: 3067201 - RNA, 23 nt, Human
gauucuuauggacaaugacccag

SEQ ID NO: 3067202 - RNA, 20 nt, Human
gauucuucugcuucagccuc

SEQ ID NO: 3067203 - RNA, 21 nt, Human
gauucuucugcuucagccucc

SEQ ID NO: 3067204 - RNA, 23 nt, Human
gauuuaacagaaauguacagcaa

SEQ ID NO: 3067205 - RNA, 20 nt, Human
gauuuaacagaaauguacag

SEQ ID NO: 3067206 - RNA, 18 nt, Human
gaucuggguucacugcaa

SEQ ID NO: 3067207 - RNA, 20 nt, Human
gaucuggguucacugcaacc

SEQ ID NO: 3067208 - RNA, 14 nt, Human
gaugaugacuaugg

SEQ ID NO: 3067209 - RNA, 21 nt, Human
gaugaugaaaugaggucagag

SEQ ID NO: 3067210 - RNA, 21 nt, Human
gaugcugucuucguacuggga

SEQ ID NO: 3067211 - RNA, 16 nt, Human
gaugcuuguacauaau

SEQ ID NO: 3067212 - RNA, 14 nt, Human
gaugcuuguacaua

SEQ ID NO: 3067213 - RNA, 23 nt, Human
cuucugaacuuggcgcugccccu

SEQ ID NO: 3067214 - RNA, 13 nt, Human
cuucuucagagac

SEQ ID NO: 3067215 - RNA, 14 nt, Human
cuucuucagagacu

SEQ ID NO: 3067216 - RNA, 13 nt, Human
cuuccuccuggug

SEQ ID NO: 3067217 - RNA, 21 nt, Human
cuuccucuuuccaucuacccu

SEQ ID NO: 3067218 - RNA, 22 nt, Human
cuuccucuuuccaucuacccuc

SEQ ID NO: 3067219 - RNA, 13 nt, Human
cuucucacauuua

SEQ ID NO: 3067220 - RNA, 20 nt, Human
cuucucacauuuauauuuuu

SEQ ID NO: 3067221 - RNA, 21 nt, Human
cuucuaaguaaaaccacagca

SEQ ID NO: 3067222 - RNA, 17 nt, Human
cuucuaaguaaaaccac

SEQ ID NO: 3067223 - RNA, 13 nt, Human
cuucuaaguaaaa

SEQ ID NO: 3067224 - RNA, 12 nt, Human
cuugcaaaguau

SEQ ID NO: 3067225 - RNA, 23 nt, Human
cuuggauuguccccgacccuugc

SEQ ID NO: 3067226 - RNA, 24 nt, Human
cuuggauuguccccgacccuugcc

SEQ ID NO: 3067227 - RNA, 22 nt, Human
cuuggauuguccccgacccuug

SEQ ID NO: 3067228 - RNA, 15 nt, Human
cuugauguguuaucu

SEQ ID NO: 3067229 - RNA, 18 nt, Human
cuugauguguuaucucuu

SEQ ID NO: 3067230 - RNA, 22 nt, Human
cuugauauccucuuugagugaa

SEQ ID NO: 3067231 - RNA, 17 nt, Human
cuugauauccucuuuga

SEQ ID NO: 3067232 - RNA, 16 nt, Human
cuugacaucaacugca

SEQ ID NO: 3067233 - RNA, 20 nt, Human
cuugacagggcacaccgggc

SEQ ID NO: 3067234 - RNA, 21 nt, Human
cuuuuauaaacuuuaccuuuu

SEQ ID NO: 3067235 - RNA, 20 nt, Human
cuuuuauaaacuuuaccuuu

SEQ ID NO: 3067236 - RNA, 22 nt, Human
cuuuguauucucuccuguaccu

SEQ ID NO: 3067237 - RNA, 19 nt, Human
cuuuuauaaacuuuaccuu

SEQ ID NO: 3067238 - RNA, 15 nt, Human
cuuuguaaugaaaac

SEQ ID NO: 3067239 - RNA, 14 nt, Human
cuuuguaaugaaaa

SEQ ID NO: 3067240 - RNA, 16 nt, Human
cuuuguaaugaaaacc

SEQ ID NO: 3067241 - RNA, 13 nt, Human
cuuuguaaugaaa

SEQ ID NO: 3067242 - RNA, 17 nt, Human
cuuuguauucucuccug

SEQ ID NO: 3067243 - RNA, 22 nt, Human
cuuugcacacuuuggcccaggg

SEQ ID NO: 3067244 - RNA, 19 nt, Human
cuuugcacacuuuggccca

SEQ ID NO: 3067245 - RNA, 20 nt, Human
cuuugcacacuuuggcccag

SEQ ID NO: 3067246 - RNA, 15 nt, Human
cuuugcacacuuugg

SEQ ID NO: 3067247 - RNA, 16 nt, Human
cuuugacgccauccca

SEQ ID NO: 3067248 - RNA, 17 nt, Human
cuuugacgccaucccag

SEQ ID NO: 3067249 - RNA, 16 nt, Human
cuuucuacccagcgag

SEQ ID NO: 3067250 - RNA, 15 nt, Human
cuuucuacccagcga

SEQ ID NO: 3067251 - RNA, 23 nt, Human
cuuuaaugucacaggcaggucca

SEQ ID NO: 3067252 - RNA, 14 nt, Human
cuuucacccuuuuc

SEQ ID NO: 3067253 - RNA, 15 nt, Human
cuuucacccuuuucu

SEQ ID NO: 3067254 - RNA, 20 nt, Human
cuuucacccuuuucuguuug

SEQ ID NO: 3067255 - RNA, 14 nt, Human
cuugguccugcugc

SEQ ID NO: 3067256 - RNA, 16 nt, Human
cuuggucugugagaug

SEQ ID NO: 3067257 - RNA, 19 nt, Human
cuuggucugugagaugcua

SEQ ID NO: 3067258 - RNA, 22 nt, Human
cuugguagaagcccuucuaccu

SEQ ID NO: 3067259 - RNA, 19 nt, Human
cuuggugucgggcaugaca

SEQ ID NO: 3067260 - RNA, 23 nt, Human
cuugucggccccaccagugccuc

SEQ ID NO: 3067261 - RNA, 13 nt, Human
cuugucuuuggac

SEQ ID NO: 3067262 - RNA, 15 nt, Human
cuugucuuuggaccc

SEQ ID NO: 3067263 - RNA, 18 nt, Human
cuugucuuuggacccuga

SEQ ID NO: 3067264 - RNA, 23 nt, Human
gaaaauuauuuuguucauacaua

SEQ ID NO: 3067265 - RNA, 22 nt, Human
gaaaacuuguauuauguguguu

SEQ ID NO: 3067266 - RNA, 19 nt, Human
gaaaacuuguauuaugugu

SEQ ID NO: 3067267 - RNA, 18 nt, Human
gaaaacuuguauuaugug

SEQ ID NO: 3067268 - RNA, 23 nt, Human
gaaaagaaaaaugagccuggcaa

SEQ ID NO: 3067269 - RNA, 14 nt, Human
gaaaagacuccaaa

SEQ ID NO: 3067270 - RNA, 17 nt, Human
gaaaagacuccaaagaa

SEQ ID NO: 3067271 - RNA, 16 nt, Human
gaaaagacuccaaaga

SEQ ID NO: 3067272 - RNA, 20 nt, Human
gaaaauuauuuuguucauac

SEQ ID NO: 3067273 - RNA, 21 nt, Human
gaaaauuauuuuguucauaca

SEQ ID NO: 3067274 - RNA, 22 nt, Human
gaaaauuauuuuguucauacau

SEQ ID NO: 3067275 - RNA, 21 nt, Human
gaaagaaaauaccaaggaaca

SEQ ID NO: 3067276 - RNA, 18 nt, Human
gaaagaaaaucaggcugg

SEQ ID NO: 3067277 - RNA, 17 nt, Human
gaaacuggauuaaacuu

SEQ ID NO: 3067278 - RNA, 13 nt, Human
gaaacuggauuaa

SEQ ID NO: 3067279 - RNA, 14 nt, Human
gaaaggcuccagga

SEQ ID NO: 3067280 - RNA, 15 nt, Human
gaaaggcuccaggag

SEQ ID NO: 3067281 - RNA, 13 nt, Human
gaaaggcuccagg

SEQ ID NO: 3067282 - RNA, 12 nt, Human
gaaaggcuccag

SEQ ID NO: 3067283 - RNA, 13 nt, Human
gaaagggcccaga

SEQ ID NO: 3067284 - RNA, 20 nt, Human
gaaagggauuuucagcccuc

SEQ ID NO: 3067285 - RNA, 12 nt, Human
gaaagggauuuu

SEQ ID NO: 3067286 - RNA, 11 nt, Human
gaaaugaaaaa

SEQ ID NO: 3067287 - RNA, 16 nt, Human
gaaagggcccagagag

SEQ ID NO: 3067288 - RNA, 15 nt, Human
gaaagggcccagaga

SEQ ID NO: 3067289 - RNA, 22 nt, Human
gaaccaccacacccagcccacu

SEQ ID NO: 3067290 - RNA, 21 nt, Human
gaaccaccacacccagcccac

SEQ ID NO: 3067291 - RNA, 20 nt, Human
gaaccaccacacccagccca

SEQ ID NO: 3067292 - RNA, 18 nt, Human
gaaccaccacacccagcc

SEQ ID NO: 3067293 - RNA, 17 nt, Human
gaacugauguaaguaaa

SEQ ID NO: 3067294 - RNA, 13 nt, Human
gaacuccuggccu

SEQ ID NO: 3067295 - RNA, 17 nt, Human
gaacccgggaggcagag

SEQ ID NO: 3067296 - RNA, 14 nt, Human
gaacuccuggccuc

SEQ ID NO: 3067297 - RNA, 17 nt, Human
gaacccaaguccaagca

SEQ ID NO: 3067298 - RNA, 16 nt, Human
gaacccaaguccaagc

SEQ ID NO: 3067299 - RNA, 22 nt, Human
gaaccauggucggaaaacaugc

SEQ ID NO: 3067300 - RNA, 23 nt, Human
gaaccaccacacccagcccacuu

SEQ ID NO: 3067301 - RNA, 16 nt, Human
gaagacucauucuucu

SEQ ID NO: 3067302 - RNA, 18 nt, Human
gaagacucauucuucugu

SEQ ID NO: 3067303 - RNA, 17 nt, Human
gaagacucauucuucug

SEQ ID NO: 3067304 - RNA, 22 nt, Human
gaagcacaugccucucucaggc

SEQ ID NO: 3067305 - RNA, 17 nt, Human
gaagcacagugaucaag

SEQ ID NO: 3067306 - RNA, 14 nt, Human
gaagcacagcuuca

SEQ ID NO: 3067307 - RNA, 13 nt, Human
gaagcacagcuuc

SEQ ID NO: 3067308 - RNA, 16 nt, Human
gaagcaccauaacuuu

SEQ ID NO: 3067309 - RNA, 21 nt, Human
gaagcacaugccucucucagg

SEQ ID NO: 3067310 - RNA, 12 nt, Human
gaagcagcucuu

SEQ ID NO: 3067311 - RNA, 14 nt, Human
gaagacagcucuua

SEQ ID NO: 3067312 - RNA, 15 nt, Human
gaagacagcucuuau

SEQ ID NO: 3067313 - RNA, 13 nt, Human
gaagacagagcua

SEQ ID NO: 3067314 - RNA, 15 nt, Human
gaagacagagcuaca

SEQ ID NO: 3067315 - RNA, 12 nt, Human
gaagacagcucu

SEQ ID NO: 3067316 - RNA, 13 nt, Human
gaagacagcucuu

SEQ ID NO: 3067317 - RNA, 21 nt, Human
gaagacacugaugggcaaccc

SEQ ID NO: 3067318 - RNA, 16 nt, Human
gaagacacugaugggc

SEQ ID NO: 3067319 - RNA, 16 nt, Human
cugucgcccagucugg

SEQ ID NO: 3067320 - RNA, 15 nt, Human
cugucgcccagucug

SEQ ID NO: 3067321 - RNA, 17 nt, Human
cugucggagcccugucu

SEQ ID NO: 3067322 - RNA, 23 nt, Human
cugucaauuacaggaaguacugg

SEQ ID NO: 3067323 - RNA, 19 nt, Human
cugucaauuacaggaagua

SEQ ID NO: 3067324 - RNA, 20 nt, Human
cugucaauuacaggaaguac

SEQ ID NO: 3067325 - RNA, 21 nt, Human
cuguccugggagugagcuggu

SEQ ID NO: 3067326 - RNA, 13 nt, Human
cuguagaguggga

SEQ ID NO: 3067327 - RNA, 18 nt, Human
cugugccucugggacugg

SEQ ID NO: 3067328 - RNA, 13 nt, Human
cugugcugcccug

SEQ ID NO: 3067329 - RNA, 14 nt, Human
cugugcugcccugc

SEQ ID NO: 3067330 - RNA, 12 nt, Human
cugugcugcccu

SEQ ID NO: 3067331 - RNA, 15 nt, Human
cugugcugcccugcc

SEQ ID NO: 3067332 - RNA, 17 nt, Human
cugugcugcccugccca

SEQ ID NO: 3067333 - RNA, 18 nt, Human
cugugcugcccugcccac

SEQ ID NO: 3067334 - RNA, 19 nt, Human
cugugcugcccugcccacc

SEQ ID NO: 3067335 - RNA, 17 nt, Human
cugugucagcauagaag

SEQ ID NO: 3067336 - RNA, 19 nt, Human
cugugucagcauagaagua

SEQ ID NO: 3067337 - RNA, 13 nt, Human
cuguuauaaucuu

SEQ ID NO: 3067338 - RNA, 19 nt, Human
cuuagggaaggauacaaaa

SEQ ID NO: 3067339 - RNA, 21 nt, Human
cuuagggaaggauacaaaagc

SEQ ID NO: 3067340 - RNA, 23 nt, Human
cuuagcucauucuccuuguguua

SEQ ID NO: 3067341 - RNA, 22 nt, Human
cuuagcucauucuccuuguguu

SEQ ID NO: 3067342 - RNA, 16 nt, Human
cuuaccagcagagcac

SEQ ID NO: 3067343 - RNA, 21 nt, Human
cuuagcagggaaacagcuaau

SEQ ID NO: 3067344 - RNA, 14 nt, Human
cuguuggcuggggg

SEQ ID NO: 3067345 - RNA, 22 nt, Human
cuguuggcugggggccucagug

SEQ ID NO: 3067346 - RNA, 19 nt, Human
cuguuggcugggggccuca

SEQ ID NO: 3067347 - RNA, 15 nt, Human
cuguuggccagugug

SEQ ID NO: 3067348 - RNA, 12 nt, Human
cuguuuaagaga

SEQ ID NO: 3067349 - RNA, 14 nt, Human
cuguuuaagagaca

SEQ ID NO: 3067350 - RNA, 21 nt, Human
cuuaaaaaugguuuaaauggu

SEQ ID NO: 3067351 - RNA, 14 nt, Human
cuuaaaacaacacu

SEQ ID NO: 3067352 - RNA, 15 nt, Human
cuuaccagcagagca

SEQ ID NO: 3067353 - RNA, 14 nt, Human
cugcuucaaauauu

SEQ ID NO: 3067354 - RNA, 19 nt, Human
cugcuucaaauauuucccu

SEQ ID NO: 3067355 - RNA, 12 nt, Human
cugcuucaagga

SEQ ID NO: 3067356 - RNA, 21 nt, Human
cugcuucaaggauccugagcc

SEQ ID NO: 3067357 - RNA, 22 nt, Human
cugcuucaaggauccugagcca

SEQ ID NO: 3067358 - RNA, 23 nt, Human
cugcuucaaggauccugagccag

SEQ ID NO: 3067359 - RNA, 20 nt, Human
cugcuuuugucuaugggacu

SEQ ID NO: 3067360 - RNA, 20 nt, Human
cugcuucaaggauccugagc

SEQ ID NO: 3067361 - RNA, 20 nt, Human
cugcuuauccguuagccgug

SEQ ID NO: 3067362 - RNA, 19 nt, Human
cuggauaguccgucucugc

SEQ ID NO: 3067363 - RNA, 18 nt, Human
cuggauaguccgucucug

SEQ ID NO: 3067364 - RNA, 23 nt, Human
cuggacugagggggccuggaugc

SEQ ID NO: 3067365 - RNA, 20 nt, Human
cuggacugagggggccugga

SEQ ID NO: 3067366 - RNA, 21 nt, Human
cuggacugagggggccuggau

SEQ ID NO: 3067367 - RNA, 22 nt, Human
cuggacugagggggccuggaug

SEQ ID NO: 3067368 - RNA, 18 nt, Human
cuggacugagggggccug

SEQ ID NO: 3067369 - RNA, 14 nt, Human
cuggagaaaaugga

SEQ ID NO: 3067370 - RNA, 19 nt, Human
cugcuuuuuaaagaaugcu

SEQ ID NO: 3067371 - RNA, 21 nt, Human
cugcuuuugucuaugggacuc

SEQ ID NO: 3067372 - RNA, 19 nt, Human
cugcuuuugucuaugggac

SEQ ID NO: 3067373 - RNA, 21 nt, Human
cugccuguugggccaggagcc

SEQ ID NO: 3067374 - RNA, 22 nt, Human
cugccuguugggccaggagccu

SEQ ID NO: 3067375 - RNA, 15 nt, Human
cugccuguucagcuc

SEQ ID NO: 3067376 - RNA, 18 nt, Human
cugcugacuguuuucucu

SEQ ID NO: 3067377 - RNA, 21 nt, Human
cugcugacuguuuucucuuga

SEQ ID NO: 3067378 - RNA, 20 nt, Human
cugccuguugggccaggagc

SEQ ID NO: 3067379 - RNA, 19 nt, Human
cugccuguucagcuccagc

SEQ ID NO: 3067380 - RNA, 18 nt, Human
cugccuguucagcuccag

SEQ ID NO: 3067381 - RNA, 17 nt, Human
cugccuguucagcucca

SEQ ID NO: 3067382 - RNA, 23 nt, Human
cugccucucccaucacuucccua

SEQ ID NO: 3067383 - RNA, 22 nt, Human
cugccucucccaucacuucccu

SEQ ID NO: 3067384 - RNA, 15 nt, Human
cugccucucccauca

SEQ ID NO: 3067385 - RNA, 11 nt, Human
cuggcagccca

SEQ ID NO: 3067386 - RNA, 12 nt, Human
cuggcagccccu

SEQ ID NO: 3067387 - RNA, 17 nt, Human
cuggcagaguugaagac

SEQ ID NO: 3067388 - RNA, 18 nt, Human
cuggcagaguugaagaca

SEQ ID NO: 3067389 - RNA, 11 nt, Human
cugggacacag

SEQ ID NO: 3067390 - RNA, 22 nt, Human
cuggccccucagggucccuggu

SEQ ID NO: 3067391 - RNA, 22 nt, Human
cuggccgggaccccgagccugg

SEQ ID NO: 3067392 - RNA, 12 nt, Human
cugggcagaagg

SEQ ID NO: 3067393 - RNA, 15 nt, Human
cugggcagaaggaag

SEQ ID NO: 3067394 - RNA, 14 nt, Human
cuggggagaaagua

SEQ ID NO: 3067395 - RNA, 15 nt, Human
cuggggccaggcugg

SEQ ID NO: 3067396 - RNA, 15 nt, Human
cuggguucacugcaa

SEQ ID NO: 3067397 - RNA, 20 nt, Human
cuggguucacugcaaccucc

SEQ ID NO: 3067398 - RNA, 18 nt, Human
cuggguucacugcaaccu

SEQ ID NO: 3067399 - RNA, 14 nt, Human
uuucaaacuuugga

SEQ ID NO: 3067400 - RNA, 17 nt, Human
uuuccaugaguccccug

SEQ ID NO: 3067401 - RNA, 18 nt, Human
uuuccaugaguccccugu

SEQ ID NO: 3067402 - RNA, 11 nt, Human
auggacuuugu

SEQ ID NO: 3067403 - RNA, 12 nt, Human
auggacuuuguu

SEQ ID NO: 3067404 - RNA, 22 nt, Human
auggacuuugcacacuuuggcc

SEQ ID NO: 3067405 - RNA, 19 nt, Human
auggacuaacuugucuuug

SEQ ID NO: 3067406 - RNA, 20 nt, Human
auggcauauuuuucacauau

SEQ ID NO: 3067407 - RNA, 21 nt, Human
auggcauauuuuucacauauc

SEQ ID NO: 3067408 - RNA, 22 nt, Human
auggcauauuuuucacauaucu

SEQ ID NO: 3067409 - RNA, 23 nt, Human
auggcauauuuuucacauaucua

SEQ ID NO: 3067410 - RNA, 18 nt, Human
auggcauauuuuucacau

SEQ ID NO: 3067411 - RNA, 14 nt, Human
auggcacuaguauu

SEQ ID NO: 3067412 - RNA, 16 nt, Human
auggcacuaguauuuc

SEQ ID NO: 3067413 - RNA, 23 nt, Human
auggcuauaggugcuacaaaaac

SEQ ID NO: 3067414 - RNA, 19 nt, Human
auggcuaagcaaaauguga

SEQ ID NO: 3067415 - RNA, 19 nt, Human
augggagagaagagaaugc

SEQ ID NO: 3067416 - RNA, 15 nt, Human
augggagagaagaga

SEQ ID NO: 3067417 - RNA, 21 nt, Human
uuuaucaaagggugaaaauua

SEQ ID NO: 3067418 - RNA, 18 nt, Human
uuuaucaugugaaaucau

SEQ ID NO: 3067419 - RNA, 17 nt, Human
uuuaucaugugaaauca

SEQ ID NO: 3067420 - RNA, 18 nt, Human
augcuagguuaauuccaa

SEQ ID NO: 3067421 - RNA, 19 nt, Human
augcuagaacucccuuuca

SEQ ID NO: 3067422 - RNA, 22 nt, Human
augcuagaacucccuuucaaca

SEQ ID NO: 3067423 - RNA, 20 nt, Human
augcuagaacucccuuucaa

SEQ ID NO: 3067424 - RNA, 21 nt, Human
augcuagaacucccuuucaac

SEQ ID NO: 3067425 - RNA, 20 nt, Human
uuuauuuuguguuuaggaac

SEQ ID NO: 3067426 - RNA, 16 nt, Human
uuuauuuuguguuuag

SEQ ID NO: 3067427 - RNA, 22 nt, Human
uuucaaaauuguuacaaauugu

SEQ ID NO: 3067428 - RNA, 16 nt, Human
uuucaaacauauauaa

SEQ ID NO: 3067429 - RNA, 16 nt, Human
uuucaaacuuuacuau

SEQ ID NO: 3067430 - RNA, 22 nt, Human
uuucaaacuuuacuauggcccu

SEQ ID NO: 3067431 - RNA, 15 nt, Human
uuucaaacuuuacua

SEQ ID NO: 3067432 - RNA, 13 nt, Human
augcuucucacug

SEQ ID NO: 3067433 - RNA, 19 nt, Human
augcuguucaugaaagauu

SEQ ID NO: 3067434 - RNA, 22 nt, Human
augcugugcccuaaaguguauu

SEQ ID NO: 3067435 - RNA, 17 nt, Human
augcuguucaugaaaga

SEQ ID NO: 3067436 - RNA, 13 nt, Human
augcugcugcccc

SEQ ID NO: 3067437 - RNA, 15 nt, Human
augcugcugccccug

SEQ ID NO: 3067438 - RNA, 21 nt, Human
augcugcugccccugcacagc

SEQ ID NO: 3067439 - RNA, 22 nt, Human
augcugcugccccugcacagca

SEQ ID NO: 3067440 - RNA, 23 nt, Human
augcugcugccccugcacagcag

SEQ ID NO: 3067441 - RNA, 17 nt, Human
augauacuugaaaauua

SEQ ID NO: 3067442 - RNA, 21 nt, Human
augauacuugaaaauuaacau

SEQ ID NO: 3067443 - RNA, 17 nt, Human
augaucuaggaagacuu

SEQ ID NO: 3067444 - RNA, 20 nt, Human
augaucuaggaagacuuugg

SEQ ID NO: 3067445 - RNA, 15 nt, Human
augaucuaggaagac

SEQ ID NO: 3067446 - RNA, 18 nt, Human
augauuaaguaaugauaa

SEQ ID NO: 3067447 - RNA, 14 nt, Human
augauuaaguaaug

SEQ ID NO: 3067448 - RNA, 20 nt, Human
uuguguuaaguauguguaaa

SEQ ID NO: 3067449 - RNA, 21 nt, Human
uuguuccacaaguuaaauaaa

SEQ ID NO: 3067450 - RNA, 20 nt, Human
uuguguuacuaaguuuuuau

SEQ ID NO: 3067451 - RNA, 15 nt, Human
uuguguuacuaaguu

SEQ ID NO: 3067452 - RNA, 13 nt, Human
uuguguuacuaag

SEQ ID NO: 3067453 - RNA, 16 nt, Human
uuggugcgggguacac

SEQ ID NO: 3067454 - RNA, 17 nt, Human
augauaaguaaaugcua

SEQ ID NO: 3067455 - RNA, 15 nt, Human
augauaacuggaaac

SEQ ID NO: 3067456 - RNA, 20 nt, Human
uuguucuugguuuguaaauu

SEQ ID NO: 3067457 - RNA, 23 nt, Human
uuuaaaaauacagauagauauau

SEQ ID NO: 3067458 - RNA, 13 nt, Human
uuuaaagaaugcu

SEQ ID NO: 3067459 - RNA, 19 nt, Human
augcacuuuguucuggcuc

SEQ ID NO: 3067460 - RNA, 20 nt, Human
augcacuuuguucuggcucu

SEQ ID NO: 3067461 - RNA, 17 nt, Human
augcacuuuguucuggc

SEQ ID NO: 3067462 - RNA, 16 nt, Human
augcacuuuguucugg

SEQ ID NO: 3067463 - RNA, 14 nt, Human
augcaccagcccuu

SEQ ID NO: 3067464 - RNA, 13 nt, Human
augcaccuggaau

SEQ ID NO: 3067465 - RNA, 22 nt, Human
augcaccagcccuuagcaggga

SEQ ID NO: 3067466 - RNA, 17 nt, Human
augcagccucacagucc

SEQ ID NO: 3067467 - RNA, 18 nt, Human
augcagccucacaguccu

SEQ ID NO: 3067468 - RNA, 19 nt, Human
uuuaauuuuuuugagacag

SEQ ID NO: 3067469 - RNA, 12 nt, Human
augcccagcccc

SEQ ID NO: 3067470 - RNA, 13 nt, Human
augcccagccccu

SEQ ID NO: 3067471 - RNA, 14 nt, Human
augcccagccccuu

SEQ ID NO: 3067472 - RNA, 13 nt, Human
augcagugcuucc

SEQ ID NO: 3067473 - RNA, 23 nt, Human
augcagugguaugaucacggcuc

SEQ ID NO: 3067474 - RNA, 13 nt, Human
augcaguucugaa

SEQ ID NO: 3067475 - RNA, 11 nt, Human
augcccagccc

SEQ ID NO: 3067476 - RNA, 21 nt, Human
augccauuuaaagcuuauuaa

SEQ ID NO: 3067477 - RNA, 17 nt, Human
augccauuuaaagcuua

SEQ ID NO: 3067478 - RNA, 17 nt, Human
auguacauguacugauu

SEQ ID NO: 3067479 - RNA, 13 nt, Human
augguuguacaua

SEQ ID NO: 3067480 - RNA, 21 nt, Human
augguucccuugaugaagaag

SEQ ID NO: 3067481 - RNA, 15 nt, Human
augguuuucaaaaua

SEQ ID NO: 3067482 - RNA, 14 nt, Human
augguuuucaaaau

SEQ ID NO: 3067483 - RNA, 15 nt, Human
augguuuggagcuga

SEQ ID NO: 3067484 - RNA, 14 nt, Human
augguuuggagcug

SEQ ID NO: 3067485 - RNA, 16 nt, Human
augguuuucaaaauaa

SEQ ID NO: 3067486 - RNA, 14 nt, Human
augguuuucuugug

SEQ ID NO: 3067487 - RNA, 17 nt, Human
augguggcuggguugga

SEQ ID NO: 3067488 - RNA, 15 nt, Human
augguggcuggguug

SEQ ID NO: 3067489 - RNA, 13 nt, Human
augguggcugggu

SEQ ID NO: 3067490 - RNA, 12 nt, Human
augguggcuggg

SEQ ID NO: 3067491 - RNA, 19 nt, Human
auggugcaaugaccuuuca

SEQ ID NO: 3067492 - RNA, 16 nt, Human
auggugcaaugaccuu

SEQ ID NO: 3067493 - RNA, 17 nt, Human
auggugcaaugaccuuu

SEQ ID NO: 3067494 - RNA, 12 nt, Human
auggugcaauga

SEQ ID NO: 3067495 - RNA, 13 nt, Human
auggugcaaugac

SEQ ID NO: 3067496 - RNA, 15 nt, Human
auggugcaaugaccu

SEQ ID NO: 3067497 - RNA, 15 nt, Human
augggugcuuggagg

SEQ ID NO: 3067498 - RNA, 20 nt, Human
auggugagggauacccaucc

SEQ ID NO: 3067499 - RNA, 20 nt, Human
augggcuggguucuacccag

SEQ ID NO: 3067500 - RNA, 17 nt, Human
augggccuccugugugu

SEQ ID NO: 3067501 - RNA, 18 nt, Human
augggccuccugugugug

SEQ ID NO: 3067502 - RNA, 15 nt, Human
uuugaaauauugacu

SEQ ID NO: 3067503 - RNA, 12 nt, Human
auggggcugcac

SEQ ID NO: 3067504 - RNA, 24 nt, Human
auggggcugcaccggcuggccugg

SEQ ID NO: 3067505 - RNA, 14 nt, Human
augggggugcauuu

SEQ ID NO: 3067506 - RNA, 15 nt, Human
augggggugcauuug

SEQ ID NO: 3067507 - RNA, 15 nt, Human
augggauccuggagu

SEQ ID NO: 3067508 - RNA, 18 nt, Human
uuucucccagucauuuaa

SEQ ID NO: 3067509 - RNA, 17 nt, Human
uuucucccagucauuua

SEQ ID NO: 3067510 - RNA, 19 nt, Human
uuucuggcuaugcauuuga

SEQ ID NO: 3067511 - RNA, 18 nt, Human
uuucuggcuaugcauuug

SEQ ID NO: 3067512 - RNA, 16 nt, Human
uuucuggcuaugcauu

SEQ ID NO: 3067513 - RNA, 15 nt, Human
uuucuggcuaugcau

SEQ ID NO: 3067514 - RNA, 19 nt, Human
uuucugcagccacuauugu

SEQ ID NO: 3067515 - RNA, 17 nt, Human
auguagaggagaaacug

SEQ ID NO: 3067516 - RNA, 19 nt, Human
auguagaggagaaacugga

SEQ ID NO: 3067517 - RNA, 12 nt, Human
auguagaggaga

SEQ ID NO: 3067518 - RNA, 13 nt, Human
auguagaggagaa

SEQ ID NO: 3067519 - RNA, 16 nt, Human
auguacuucaugcugu

SEQ ID NO: 3067520 - RNA, 19 nt, Human
auguagccccucuccugga

SEQ ID NO: 3067521 - RNA, 22 nt, Human
uuugacagaauauguuucaaac

SEQ ID NO: 3067522 - RNA, 12 nt, Human
uuugaccucugc

SEQ ID NO: 3067523 - RNA, 13 nt, Human
uuugccucugccu

SEQ ID NO: 3067524 - RNA, 13 nt, Human
uuugcucauggaa

SEQ ID NO: 3067525 - RNA, 15 nt, Human
uuugccguuauuaaa

SEQ ID NO: 3067526 - RNA, 14 nt, Human
uuugcaagccagau

SEQ ID NO: 3067527 - RNA, 22 nt, Human
uuugauucagacagcugccugg

SEQ ID NO: 3067528 - RNA, 13 nt, Human
uuugacgccaucc

SEQ ID NO: 3067529 - RNA, 14 nt, Human
uuugacgccauccc

SEQ ID NO: 3067530 - RNA, 16 nt, Human
uuugacgccaucccag

SEQ ID NO: 3067531 - RNA, 19 nt, Human
uuugacgccaucccagccc

SEQ ID NO: 3067532 - RNA, 20 nt, Human
uuugacgccaucccagcccc

SEQ ID NO: 3067533 - RNA, 21 nt, Human
uuugauucagacagcugccug

SEQ ID NO: 3067534 - RNA, 21 nt, Human
uuugauuaaauucuugcaaag

SEQ ID NO: 3067535 - RNA, 18 nt, Human
uuugauuaaauucuugca

SEQ ID NO: 3067536 - RNA, 13 nt, Human
uuugauuaaauuc

SEQ ID NO: 3067537 - RNA, 22 nt, Human
uuugauguucuuucacccuuuu

SEQ ID NO: 3067538 - RNA, 22 nt, Human
auguauuacaguggggaaugaa

SEQ ID NO: 3067539 - RNA, 16 nt, Human
auguauguguaaguau

SEQ ID NO: 3067540 - RNA, 15 nt, Human
auguauguguaagua

SEQ ID NO: 3067541 - RNA, 12 nt, Human
augucaguguga

SEQ ID NO: 3067542 - RNA, 13 nt, Human
augucagugugac

SEQ ID NO: 3067543 - RNA, 16 nt, Human
auguccacugguucuu

SEQ ID NO: 3067544 - RNA, 17 nt, Human
auguccacugguucuuc

SEQ ID NO: 3067545 - RNA, 14 nt, Human
uuuguaaugaaaac

SEQ ID NO: 3067546 - RNA, 13 nt, Human
uuuguaaugaaaa

SEQ ID NO: 3067547 - RNA, 12 nt, Human
uuuguauaaaag

SEQ ID NO: 3067548 - RNA, 17 nt, Human
uuuguaguguuggagaa

SEQ ID NO: 3067549 - RNA, 19 nt, Human
uuuguaguguuggagaaga

SEQ ID NO: 3067550 - RNA, 21 nt, Human
uuuguaguguuggagaagaac

SEQ ID NO: 3067551 - RNA, 20 nt, Human
uuugugaagguggaaauaaa

SEQ ID NO: 3067552 - RNA, 17 nt, Human
uuugugaagcaaaauuu

SEQ ID NO: 3067553 - RNA, 15 nt, Human
augugaugagaggaa

SEQ ID NO: 3067554 - RNA, 16 nt, Human
augugaugagaggaaa

SEQ ID NO: 3067555 - RNA, 17 nt, Human
augugaugagaggaaau

SEQ ID NO: 3067556 - RNA, 19 nt, Human
augugaugagaggaaauca

SEQ ID NO: 3067557 - RNA, 23 nt, Human
augugcacaugcacgugugugca

SEQ ID NO: 3067558 - RNA, 21 nt, Human
uugauuaaauucuugcaaagu

SEQ ID NO: 3067559 - RNA, 14 nt, Human
uugauuaaauucuu

SEQ ID NO: 3067560 - RNA, 22 nt, Human
uugcaagccagauuuuccugaa

SEQ ID NO: 3067561 - RNA, 23 nt, Human
uugauguuuuaaggaugcuugua

SEQ ID NO: 3067562 - RNA, 13 nt, Human
uugauuaaauucu

SEQ ID NO: 3067563 - RNA, 23 nt, Human
aucugaaaauguauguguaagua

SEQ ID NO: 3067564 - RNA, 12 nt, Human
aucugaaaaugu

SEQ ID NO: 3067565 - RNA, 14 nt, Human
uugcaccacugcac

SEQ ID NO: 3067566 - RNA, 15 nt, Human
uugcaccacugcacu

SEQ ID NO: 3067567 - RNA, 16 nt, Human
uugcaccacugcacuc

SEQ ID NO: 3067568 - RNA, 18 nt, Human
uugcaccacugcacucca

SEQ ID NO: 3067569 - RNA, 19 nt, Human
uugcaauggcagccuuggc

SEQ ID NO: 3067570 - RNA, 17 nt, Human
uugcaauggcagccuug

SEQ ID NO: 3067571 - RNA, 16 nt, Human
uugcaauggcagccuu

SEQ ID NO: 3067572 - RNA, 13 nt, Human
uugcaucaauuuu

SEQ ID NO: 3067573 - RNA, 13 nt, Human
aucuccaaaauaa

SEQ ID NO: 3067574 - RNA, 21 nt, Human
aucuccaaaauaaaacuuuuu

SEQ ID NO: 3067575 - RNA, 20 nt, Human
aucuccaaaauaaaacuuuu

SEQ ID NO: 3067576 - RNA, 17 nt, Human
aucuccaaaauaaaacu

SEQ ID NO: 3067577 - RNA, 14 nt, Human
aucuccaaaauaaa

SEQ ID NO: 3067578 - RNA, 14 nt, Human
aucucagggccugg

SEQ ID NO: 3067579 - RNA, 16 nt, Human
aucucagggccugguc

SEQ ID NO: 3067580 - RNA, 16 nt, Human
aucucccccagcccca

SEQ ID NO: 3067581 - RNA, 17 nt, Human
aucucccccagccccau

SEQ ID NO: 3067582 - RNA, 14 nt, Human
aucucccccagccc

SEQ ID NO: 3067583 - RNA, 15 nt, Human
aucucccccagcccc

SEQ ID NO: 3067584 - RNA, 22 nt, Human
aucugaaaauguauguguaagu

SEQ ID NO: 3067585 - RNA, 20 nt, Human
aucugaaaauguauguguaa

SEQ ID NO: 3067586 - RNA, 19 nt, Human
aucugaaaauguaugugua

SEQ ID NO: 3067587 - RNA, 16 nt, Human
aucugaaaauguaugu

SEQ ID NO: 3067588 - RNA, 14 nt, Human
aucugaaaauguau

SEQ ID NO: 3067589 - RNA, 15 nt, Human
aucucuugagccugg

SEQ ID NO: 3067590 - RNA, 17 nt, Human
uugacagaauauguuuc

SEQ ID NO: 3067591 - RNA, 21 nt, Human
uugaaggaugcugucuucgua

SEQ ID NO: 3067592 - RNA, 13 nt, Human
aucuaaauggaac

SEQ ID NO: 3067593 - RNA, 18 nt, Human
aucuaaauggaaccacuc

SEQ ID NO: 3067594 - RNA, 17 nt, Human
aucuaaauggaaccacu

SEQ ID NO: 3067595 - RNA, 16 nt, Human
auccucuguacagagc

SEQ ID NO: 3067596 - RNA, 17 nt, Human
auccucuguacagagcc

SEQ ID NO: 3067597 - RNA, 16 nt, Human
uugagauguguucaca

SEQ ID NO: 3067598 - RNA, 16 nt, Human
uugagaucagccuggg

SEQ ID NO: 3067599 - RNA, 15 nt, Human
uugagaucagccugg

SEQ ID NO: 3067600 - RNA, 20 nt, Human
uugacagaauauguuucaaa

SEQ ID NO: 3067601 - RNA, 12 nt, Human
uugagacagagu

SEQ ID NO: 3067602 - RNA, 18 nt, Human
aucuaauauguaacaagc

SEQ ID NO: 3067603 - RNA, 18 nt, Human
aucuacacuccagugaga

SEQ ID NO: 3067604 - RNA, 19 nt, Human
aucuacacuccagugagac

SEQ ID NO: 3067605 - RNA, 20 nt, Human
uugagugaagcugggagaac

SEQ ID NO: 3067606 - RNA, 20 nt, Human
uugaguugauucagcucugc

SEQ ID NO: 3067607 - RNA, 19 nt, Human
aucuuguagcuuuaucaaa

SEQ ID NO: 3067608 - RNA, 20 nt, Human
aucuuguagcuuuaucaaag

SEQ ID NO: 3067609 - RNA, 18 nt, Human
aucuuguagcuuuaucaa

SEQ ID NO: 3067610 - RNA, 20 nt, Human
aucuuggucagauuugaacu

SEQ ID NO: 3067611 - RNA, 13 nt, Human
aucuugcucugcu

SEQ ID NO: 3067612 - RNA, 18 nt, Human
aucugugaaaggaaagag

SEQ ID NO: 3067613 - RNA, 16 nt, Human
aucuggugacuuuccu

SEQ ID NO: 3067614 - RNA, 17 nt, Human
aucuggugacuuuccuc

SEQ ID NO: 3067615 - RNA, 10 nt, Human
aucuggugac

SEQ ID NO: 3067616 - RNA, 17 nt, Human
aucugugaaaggaaaga

SEQ ID NO: 3067617 - RNA, 22 nt, Human
aucugucauuugagcagggcuc

SEQ ID NO: 3067618 - RNA, 18 nt, Human
aucugcgggggcagugcu

SEQ ID NO: 3067619 - RNA, 19 nt, Human
aucugcgggggcagugcuc

SEQ ID NO: 3067620 - RNA, 20 nt, Human
aucugcgggggcagugcuca

SEQ ID NO: 3067621 - RNA, 21 nt, Human
aucugcgggggcagugcucac

SEQ ID NO: 3067622 - RNA, 23 nt, Human
aucugcgggggcagugcucaccc

SEQ ID NO: 3067623 - RNA, 20 nt, Human
uuggagacacaacuauuuuu

SEQ ID NO: 3067624 - RNA, 14 nt, Human
uugcuugaaagaaa

SEQ ID NO: 3067625 - RNA, 16 nt, Human
uuggagggugucccaa

SEQ ID NO: 3067626 - RNA, 18 nt, Human
uuggccccugcccggcug

SEQ ID NO: 3067627 - RNA, 23 nt, Human
uuggcuauuagagaucaaccccu

SEQ ID NO: 3067628 - RNA, 22 nt, Human
aucuuuucauuuaggugaggaa

SEQ ID NO: 3067629 - RNA, 17 nt, Human
aucuuugcagacaggca

SEQ ID NO: 3067630 - RNA, 18 nt, Human
augaaagggcccagagag

SEQ ID NO: 3067631 - RNA, 15 nt, Human
augaaagggcccaga

SEQ ID NO: 3067632 - RNA, 16 nt, Human
augaauauuuaguguu

SEQ ID NO: 3067633 - RNA, 21 nt, Human
augaaauuauauaaguauucu

SEQ ID NO: 3067634 - RNA, 19 nt, Human
augaaauuauauaaguauu

SEQ ID NO: 3067635 - RNA, 19 nt, Human
augaaagggcccagagagg

SEQ ID NO: 3067636 - RNA, 14 nt, Human
augaaaugagguca

SEQ ID NO: 3067637 - RNA, 21 nt, Human
augaauauuuaguguucauaa

SEQ ID NO: 3067638 - RNA, 23 nt, Human
augaauggcuaagcaaaauguga

SEQ ID NO: 3067639 - RNA, 15 nt, Human
augaauuaaguuuuu

SEQ ID NO: 3067640 - RNA, 15 nt, Human
augaauuacauuugu

SEQ ID NO: 3067641 - RNA, 18 nt, Human
uuggggaccagagcugcc

SEQ ID NO: 3067642 - RNA, 16 nt, Human
augaauuacauuugua

SEQ ID NO: 3067643 - RNA, 14 nt, Human
uucuaaauuuuaua

SEQ ID NO: 3067644 - RNA, 23 nt, Human
uucuaagaagugaaaaucuacac

SEQ ID NO: 3067645 - RNA, 13 nt, Human
uucuaagaaguga

SEQ ID NO: 3067646 - RNA, 15 nt, Human
uucuaaguaaaacca

SEQ ID NO: 3067647 - RNA, 16 nt, Human
uucuaaguaaaaccac

SEQ ID NO: 3067648 - RNA, 15 nt, Human
uucuagcauggcaua

SEQ ID NO: 3067649 - RNA, 18 nt, Human
uucuagcauggcauauuu

SEQ ID NO: 3067650 - RNA, 20 nt, Human
uucuagcauggcauauuuuu

SEQ ID NO: 3067651 - RNA, 21 nt, Human
uucuagcauggcauauuuuuc

SEQ ID NO: 3067652 - RNA, 14 nt, Human
uucuagcauggcau

SEQ ID NO: 3067653 - RNA, 19 nt, Human
uucuagcaugaagacagag

SEQ ID NO: 3067654 - RNA, 17 nt, Human
uucuagcuaauguaaua

SEQ ID NO: 3067655 - RNA, 22 nt, Human
uucuagcauggcauauuuuuca

SEQ ID NO: 3067656 - RNA, 16 nt, Human
uucuagcauggcugcc

SEQ ID NO: 3067657 - RNA, 21 nt, Human
uucuaaaggcuaccuuuguau

SEQ ID NO: 3067658 - RNA, 20 nt, Human
uucuaaaggcuaccuuugua

SEQ ID NO: 3067659 - RNA, 19 nt, Human
uucuaaaggcuaccuuugu

SEQ ID NO: 3067660 - RNA, 15 nt, Human
uucggccuccauccu

SEQ ID NO: 3067661 - RNA, 19 nt, Human
uucuaaaucuccaaaauaa

SEQ ID NO: 3067662 - RNA, 21 nt, Human
uucuaaaucuccaaaauaaaa

SEQ ID NO: 3067663 - RNA, 19 nt, Human
uucgcuccugugucuugca

SEQ ID NO: 3067664 - RNA, 15 nt, Human
uucgcuccugugucu

SEQ ID NO: 3067665 - RNA, 14 nt, Human
uucggccuccaucc

SEQ ID NO: 3067666 - RNA, 14 nt, Human
aucaggccaggccc

SEQ ID NO: 3067667 - RNA, 17 nt, Human
aucaggguuaguauugu

SEQ ID NO: 3067668 - RNA, 13 nt, Human
aucagcacgauuu

SEQ ID NO: 3067669 - RNA, 15 nt, Human
aucaggccaggcccu

SEQ ID NO: 3067670 - RNA, 16 nt, Human
aucaggccaggcccuc

SEQ ID NO: 3067671 - RNA, 18 nt, Human
aucaggccaggcccucug

SEQ ID NO: 3067672 - RNA, 12 nt, Human
aucagaauucuc

SEQ ID NO: 3067673 - RNA, 11 nt, Human
aucagaauucu

SEQ ID NO: 3067674 - RNA, 22 nt, Human
aucacuugucaauaaaauccau

SEQ ID NO: 3067675 - RNA, 13 nt, Human
uucuaggacugaa

SEQ ID NO: 3067676 - RNA, 14 nt, Human
uucuaggacugaau

SEQ ID NO: 3067677 - RNA, 20 nt, Human
uucucacagcuccaagaauu

SEQ ID NO: 3067678 - RNA, 16 nt, Human
uucuaggacugaauua

SEQ ID NO: 3067679 - RNA, 19 nt, Human
uuccguagguuauuuucag

SEQ ID NO: 3067680 - RNA, 16 nt, Human
uuccguuaaaauacca

SEQ ID NO: 3067681 - RNA, 14 nt, Human
uuccguuaaaauac

SEQ ID NO: 3067682 - RNA, 15 nt, Human
uucccuauuagagaa

SEQ ID NO: 3067683 - RNA, 20 nt, Human
uucccucaccuuucccaucu

SEQ ID NO: 3067684 - RNA, 13 nt, Human
uuccucuuuccau

SEQ ID NO: 3067685 - RNA, 22 nt, Human
uuccucuuuccaucuacccucc

SEQ ID NO: 3067686 - RNA, 17 nt, Human
uuccucuuuccaucuac

SEQ ID NO: 3067687 - RNA, 14 nt, Human
uuccugaaccgaug

SEQ ID NO: 3067688 - RNA, 14 nt, Human
uuccugaacaggau

SEQ ID NO: 3067689 - RNA, 15 nt, Human
uuccugaacaggaua

SEQ ID NO: 3067690 - RNA, 17 nt, Human
uuccuaauccucuagga

SEQ ID NO: 3067691 - RNA, 12 nt, Human
auauuuuucaca

SEQ ID NO: 3067692 - RNA, 13 nt, Human
auauuuuucacau

SEQ ID NO: 3067693 - RNA, 14 nt, Human
auauuuuucacaua

SEQ ID NO: 3067694 - RNA, 15 nt, Human
auauuuuucacauau

SEQ ID NO: 3067695 - RNA, 17 nt, Human
auauuuuucacauaucu

SEQ ID NO: 3067696 - RNA, 11 nt, Human
uuccugugucu

SEQ ID NO: 3067697 - RNA, 21 nt, Human
aucaagaugugacauguuuua

SEQ ID NO: 3067698 - RNA, 14 nt, Human
aucaacagauaaau

SEQ ID NO: 3067699 - RNA, 18 nt, Human
auauuuuuuguuaaauga

SEQ ID NO: 3067700 - RNA, 20 nt, Human
auauuuuuuguuaaaugauu

SEQ ID NO: 3067701 - RNA, 14 nt, Human
aucaaugaguaaca

SEQ ID NO: 3067702 - RNA, 15 nt, Human
aucacggcucacugc

SEQ ID NO: 3067703 - RNA, 13 nt, Human
aucacgccacugc

SEQ ID NO: 3067704 - RNA, 19 nt, Human
aucacggcucacugcagcc

SEQ ID NO: 3067705 - RNA, 18 nt, Human
aucacggcucacugcagc

SEQ ID NO: 3067706 - RNA, 20 nt, Human
aucauuuuaccuuugacaaa

SEQ ID NO: 3067707 - RNA, 18 nt, Human
auccaagcaaaugugaau

SEQ ID NO: 3067708 - RNA, 15 nt, Human
auccaguaucuugaa

SEQ ID NO: 3067709 - RNA, 16 nt, Human
auccaguaucuugaag

SEQ ID NO: 3067710 - RNA, 15 nt, Human
auccacccaccucag

SEQ ID NO: 3067711 - RNA, 13 nt, Human
auccacccaccuc

SEQ ID NO: 3067712 - RNA, 18 nt, Human
auccaagcuggucccacu

SEQ ID NO: 3067713 - RNA, 14 nt, Human
auccauacauuugu

SEQ ID NO: 3067714 - RNA, 21 nt, Human
auccaguaucuugaagacuuu

SEQ ID NO: 3067715 - RNA, 19 nt, Human
aucccaaacccuucagugc

SEQ ID NO: 3067716 - RNA, 20 nt, Human
aucccaaacccuucagugcc

SEQ ID NO: 3067717 - RNA, 12 nt, Human
aucccagcccca

SEQ ID NO: 3067718 - RNA, 18 nt, Human
aucccauaugccugggca

SEQ ID NO: 3067719 - RNA, 15 nt, Human
uucugccauauucug

SEQ ID NO: 3067720 - RNA, 19 nt, Human
uucugaacuuggcgcugcc

SEQ ID NO: 3067721 - RNA, 22 nt, Human
uucugaacuuggcgcugccccu

SEQ ID NO: 3067722 - RNA, 18 nt, Human
uucugccugcccaggccc

SEQ ID NO: 3067723 - RNA, 17 nt, Human
uucugccugcccaggcc

SEQ ID NO: 3067724 - RNA, 15 nt, Human
uucuggcucuuccag

SEQ ID NO: 3067725 - RNA, 21 nt, Human
uucugccugcccaggccccug

SEQ ID NO: 3067726 - RNA, 16 nt, Human
uucuggcucuuccagg

SEQ ID NO: 3067727 - RNA, 17 nt, Human
uucuggcucuuccaggc

SEQ ID NO: 3067728 - RNA, 17 nt, Human
uucucuaguuugauuaa

SEQ ID NO: 3067729 - RNA, 15 nt, Human
uucucuaguuugauu

SEQ ID NO: 3067730 - RNA, 12 nt, Human
uucucuaggaaa

SEQ ID NO: 3067731 - RNA, 21 nt, Human
uucuccuuguguuacuaaguu

SEQ ID NO: 3067732 - RNA, 15 nt, Human
uucuuuguaaugaaa

SEQ ID NO: 3067733 - RNA, 20 nt, Human
uucuucugcuucagccuccc

SEQ ID NO: 3067734 - RNA, 23 nt, Human
uucuuaaccagaucauugugaaa

SEQ ID NO: 3067735 - RNA, 13 nt, Human
aucccucauccuc

SEQ ID NO: 3067736 - RNA, 21 nt, Human
aucccucauccucauacccac

SEQ ID NO: 3067737 - RNA, 23 nt, Human
aucccucauccucauacccaccc

SEQ ID NO: 3067738 - RNA, 14 nt, Human
aucccucauccuca

SEQ ID NO: 3067739 - RNA, 24 nt, Human
aucccauaugccugggcagaagga

SEQ ID NO: 3067740 - RNA, 13 nt, Human
uucuucucccuca

SEQ ID NO: 3067741 - RNA, 11 nt, Human
uucuucucccu

SEQ ID NO: 3067742 - RNA, 14 nt, Human
uucuucucccucag

SEQ ID NO: 3067743 - RNA, 15 nt, Human
uucuucugcuucagc

SEQ ID NO: 3067744 - RNA, 13 nt, Human
uucuucugcuuca

SEQ ID NO: 3067745 - RNA, 17 nt, Human
uugaaauuguauuacaa

SEQ ID NO: 3067746 - RNA, 18 nt, Human
uugaacccgggaggcaga

SEQ ID NO: 3067747 - RNA, 19 nt, Human
uugaacccgggaggcagag

SEQ ID NO: 3067748 - RNA, 16 nt, Human
auccuaggcauuugcu

SEQ ID NO: 3067749 - RNA, 16 nt, Human
auccuccucagaucuu

SEQ ID NO: 3067750 - RNA, 14 nt, Human
auccuccucagauc

SEQ ID NO: 3067751 - RNA, 12 nt, Human
auccuaagcuau

SEQ ID NO: 3067752 - RNA, 15 nt, Human
auuauuuuguucaua

SEQ ID NO: 3067753 - RNA, 16 nt, Human
auuauuuuguucauac

SEQ ID NO: 3067754 - RNA, 17 nt, Human
auuauuuuguucauaca

SEQ ID NO: 3067755 - RNA, 18 nt, Human
auuauuuuguucauacau

SEQ ID NO: 3067756 - RNA, 19 nt, Human
auuauuuuguucauacaua

SEQ ID NO: 3067757 - RNA, 21 nt, Human
auuauuuuguucauacauauu

SEQ ID NO: 3067758 - RNA, 18 nt, Human
auucaaacagucucagga

SEQ ID NO: 3067759 - RNA, 16 nt, Human
auucaaacagucucag

SEQ ID NO: 3067760 - RNA, 20 nt, Human
auucaaacagucucaggaaa

SEQ ID NO: 3067761 - RNA, 19 nt, Human
auucaaacagucucaggaa

SEQ ID NO: 3067762 - RNA, 15 nt, Human
auuauuauuuggccc

SEQ ID NO: 3067763 - RNA, 20 nt, Human
auuauuaccuuacagaaguu

SEQ ID NO: 3067764 - RNA, 18 nt, Human
auuaucuagauacuguau

SEQ ID NO: 3067765 - RNA, 14 nt, Human
auuaucuagauacu

SEQ ID NO: 3067766 - RNA, 21 nt, Human
auuauguuaaaacugggacag

SEQ ID NO: 3067767 - RNA, 15 nt, Human
auuauauuuauuacu

SEQ ID NO: 3067768 - RNA, 18 nt, Human
auuauauuuauuacugua

SEQ ID NO: 3067769 - RNA, 20 nt, Human
auucacauuguauucagagu

SEQ ID NO: 3067770 - RNA, 13 nt, Human
auucacauuguau

SEQ ID NO: 3067771 - RNA, 18 nt, Human
auucagaaggaucuucau

SEQ ID NO: 3067772 - RNA, 24 nt, Human
auucagaaggaucuucaucugacu

SEQ ID NO: 3067773 - RNA, 11 nt, Human
auucagacagc

SEQ ID NO: 3067774 - RNA, 12 nt, Human
auucagacagcu

SEQ ID NO: 3067775 - RNA, 13 nt, Human
auucagacagcug

SEQ ID NO: 3067776 - RNA, 14 nt, Human
auucagacagcugc

SEQ ID NO: 3067777 - RNA, 15 nt, Human
auucagacagcugcc

SEQ ID NO: 3067778 - RNA, 16 nt, Human
auucagacagcugccu

SEQ ID NO: 3067779 - RNA, 17 nt, Human
auucagacagcugccug

SEQ ID NO: 3067780 - RNA, 18 nt, Human
auucagacagcugccugg

SEQ ID NO: 3067781 - RNA, 12 nt, Human
auucaggaagcu

SEQ ID NO: 3067782 - RNA, 14 nt, Human
auucuaaauuuuau

SEQ ID NO: 3067783 - RNA, 13 nt, Human
auucaggaagcuc

SEQ ID NO: 3067784 - RNA, 17 nt, Human
auuauauuuacaaaugg

SEQ ID NO: 3067785 - RNA, 14 nt, Human
auuauauuaugaag

SEQ ID NO: 3067786 - RNA, 18 nt, Human
auucuagcuaauguaaua

SEQ ID NO: 3067787 - RNA, 15 nt, Human
auucuagcuaaugua

SEQ ID NO: 3067788 - RNA, 17 nt, Human
auucucauuugucacac

SEQ ID NO: 3067789 - RNA, 19 nt, Human
auucugccugcccaggccc

SEQ ID NO: 3067790 - RNA, 18 nt, Human
auucugccugcccaggcc

SEQ ID NO: 3067791 - RNA, 17 nt, Human
auucugccugcccaggc

SEQ ID NO: 3067792 - RNA, 16 nt, Human
auucugccugcccagg

SEQ ID NO: 3067793 - RNA, 15 nt, Human
auucugccugcccag

SEQ ID NO: 3067794 - RNA, 14 nt, Human
auucugccugccca

SEQ ID NO: 3067795 - RNA, 13 nt, Human
auucugccugccc

SEQ ID NO: 3067796 - RNA, 11 nt, Human
auucugccugc

SEQ ID NO: 3067797 - RNA, 14 nt, Human
auucuguuggccag

SEQ ID NO: 3067798 - RNA, 21 nt, Human
auucuguuggccagugugaca

SEQ ID NO: 3067799 - RNA, 19 nt, Human
auucuguuggccaguguga

SEQ ID NO: 3067800 - RNA, 22 nt, Human
auucugcucacauaucugucau

SEQ ID NO: 3067801 - RNA, 21 nt, Human
auucugcucacauaucuguca

SEQ ID NO: 3067802 - RNA, 20 nt, Human
auucugcucacauaucuguc

SEQ ID NO: 3067803 - RNA, 19 nt, Human
auucugcucacauaucugu

SEQ ID NO: 3067804 - RNA, 21 nt, Human
auucugccugcccaggccccu

SEQ ID NO: 3067805 - RNA, 20 nt, Human
auucugccugcccaggcccc

SEQ ID NO: 3067806 - RNA, 18 nt, Human
auucugcucacauaucug

SEQ ID NO: 3067807 - RNA, 17 nt, Human
auugaaaucuuuuugcu

SEQ ID NO: 3067808 - RNA, 18 nt, Human
auugaaaucuuuuugcuu

SEQ ID NO: 3067809 - RNA, 20 nt, Human
auugaaaucuuuuugcuuug

SEQ ID NO: 3067810 - RNA, 12 nt, Human
auugaaaucuuu

SEQ ID NO: 3067811 - RNA, 14 nt, Human
auucuuaaauaugu

SEQ ID NO: 3067812 - RNA, 17 nt, Human
auugaccugaggcccuu

SEQ ID NO: 3067813 - RNA, 19 nt, Human
auugacacuuaaaaauggu

SEQ ID NO: 3067814 - RNA, 15 nt, Human
auugacacuuaaaaa

SEQ ID NO: 3067815 - RNA, 17 nt, Human
auugacacuuaaaaaug

SEQ ID NO: 3067816 - RNA, 22 nt, Human
auuuuugacagaauauguuuca

SEQ ID NO: 3067817 - RNA, 12 nt, Human
auuuuugacaga

SEQ ID NO: 3067818 - RNA, 13 nt, Human
auuuuugacagaa

SEQ ID NO: 3067819 - RNA, 14 nt, Human
auuuuugacagaau

SEQ ID NO: 3067820 - RNA, 15 nt, Human
auuuuugacagaaua

SEQ ID NO: 3067821 - RNA, 22 nt, Human
auuuuucuuagggaaggauaca

SEQ ID NO: 3067822 - RNA, 15 nt, Human
auuuuucuuauuuca

SEQ ID NO: 3067823 - RNA, 20 nt, Human
auuuuucuuauuucauuucu

SEQ ID NO: 3067824 - RNA, 19 nt, Human
auuuuucuuauuucauuuc

SEQ ID NO: 3067825 - RNA, 18 nt, Human
auuuuucacauaucuagu

SEQ ID NO: 3067826 - RNA, 21 nt, Human
auuuuucacauaucuaguaug

SEQ ID NO: 3067827 - RNA, 15 nt, Human
auuuuucacauaucu

SEQ ID NO: 3067828 - RNA, 15 nt, Human
auuuuuccaaaauaa

SEQ ID NO: 3067829 - RNA, 21 nt, Human
auuuuucuuagggaaggauac

SEQ ID NO: 3067830 - RNA, 22 nt, Human
auuuuugugauuuugugauuga

SEQ ID NO: 3067831 - RNA, 20 nt, Human
auuuuuguagcacugacaga

SEQ ID NO: 3067832 - RNA, 21 nt, Human
auuuuuguagcacugacagau

SEQ ID NO: 3067833 - RNA, 12 nt, Human
auuuuuguaauu

SEQ ID NO: 3067834 - RNA, 19 nt, Human
auuuuuguagagccagggu

SEQ ID NO: 3067835 - RNA, 14 nt, Human
auuuuuuaaaugca

SEQ ID NO: 3067836 - RNA, 13 nt, Human
auuuuuuaaaugc

SEQ ID NO: 3067837 - RNA, 21 nt, Human
auuuuuguuuucauuaucuca

SEQ ID NO: 3067838 - RNA, 20 nt, Human
auuuuuucucuaggaaauau

SEQ ID NO: 3067839 - RNA, 23 nt, Human
auuuuuucucuaggaaauauuua

SEQ ID NO: 3067840 - RNA, 18 nt, Human
auuuuuuguuaaaugauu

SEQ ID NO: 3067841 - RNA, 17 nt, Human
auuuuguguuuaggaac

SEQ ID NO: 3067842 - RNA, 12 nt, Human
auuuuguucaua

SEQ ID NO: 3067843 - RNA, 14 nt, Human
auuuuguucauaca

SEQ ID NO: 3067844 - RNA, 15 nt, Human
auuuuguucauacau

SEQ ID NO: 3067845 - RNA, 16 nt, Human
auuuuguucauacaua

SEQ ID NO: 3067846 - RNA, 18 nt, Human
auuuuguucauacauauu

SEQ ID NO: 3067847 - RNA, 16 nt, Human
auuuuguuucagugca

SEQ ID NO: 3067848 - RNA, 23 nt, Human
auuuugucauauaagauucauau

SEQ ID NO: 3067849 - RNA, 19 nt, Human
auuuugugcccccauguaa

SEQ ID NO: 3067850 - RNA, 12 nt, Human
auuuugcuuugu

SEQ ID NO: 3067851 - RNA, 20 nt, Human
auuuugcuuugugauuuuug

SEQ ID NO: 3067852 - RNA, 18 nt, Human
auuuugcuuugugauuuu

SEQ ID NO: 3067853 - RNA, 19 nt, Human
auuuuggaaaauaaauuau

SEQ ID NO: 3067854 - RNA, 14 nt, Human
auuuuggaaaauaa

SEQ ID NO: 3067855 - RNA, 20 nt, Human
auuuuggaaaauaaauuauu

SEQ ID NO: 3067856 - RNA, 21 nt, Human
auuuugcugucccuuuuccuu

SEQ ID NO: 3067857 - RNA, 20 nt, Human
auuuugcuaaaugugaauga

SEQ ID NO: 3067858 - RNA, 17 nt, Human
auuuugauguuuuaagg

SEQ ID NO: 3067859 - RNA, 15 nt, Human
auuuugauguuuuaa

SEQ ID NO: 3067860 - RNA, 19 nt, Human
auuuugauccaagcugguc

SEQ ID NO: 3067861 - RNA, 18 nt, Human
auuuugauccaagcuggu

SEQ ID NO: 3067862 - RNA, 17 nt, Human
auuuuaauaaacacucu

SEQ ID NO: 3067863 - RNA, 16 nt, Human
auuuuaauaaacacuc

SEQ ID NO: 3067864 - RNA, 15 nt, Human
auuuuaauaaacacu

SEQ ID NO: 3067865 - RNA, 14 nt, Human
auuuucuauaauuu

SEQ ID NO: 3067866 - RNA, 15 nt, Human
auuuucuauaauuua

SEQ ID NO: 3067867 - RNA, 19 nt, Human
auuuucccuauuagagaag

SEQ ID NO: 3067868 - RNA, 14 nt, Human
auuuuccugaaaac

SEQ ID NO: 3067869 - RNA, 16 nt, Human
auuuuccugccaggca

SEQ ID NO: 3067870 - RNA, 19 nt, Human
auuggacaguaaaauccac

SEQ ID NO: 3067871 - RNA, 19 nt, Human
auuggagcucgugggacag

SEQ ID NO: 3067872 - RNA, 18 nt, Human
auugcuuuggucauauga

SEQ ID NO: 3067873 - RNA, 14 nt, Human
auugcuuuggucau

SEQ ID NO: 3067874 - RNA, 21 nt, Human
auugauuuccguuaaaauacc

SEQ ID NO: 3067875 - RNA, 13 nt, Human
auugacuuuuuau

SEQ ID NO: 3067876 - RNA, 16 nt, Human
auuguacgaagaguau

SEQ ID NO: 3067877 - RNA, 23 nt, Human
auugucaaaguggugagaggcau

SEQ ID NO: 3067878 - RNA, 16 nt, Human
auugucaaagugguga

SEQ ID NO: 3067879 - RNA, 14 nt, Human
auugugggaagggg

SEQ ID NO: 3067880 - RNA, 13 nt, Human
auugugggaaggg

SEQ ID NO: 3067881 - RNA, 13 nt, Human
auugucuagugaa

SEQ ID NO: 3067882 - RNA, 21 nt, Human
auuguuuggggaugagaaagg

SEQ ID NO: 3067883 - RNA, 13 nt, Human
auuuaaaagauac

SEQ ID NO: 3067884 - RNA, 16 nt, Human
auuuaaaagauacagu

SEQ ID NO: 3067885 - RNA, 14 nt, Human
auuuaaaagauaca

SEQ ID NO: 3067886 - RNA, 17 nt, Human
auuuaaaagauacaguu

SEQ ID NO: 3067887 - RNA, 19 nt, Human
auuuguaguguuggagaag

SEQ ID NO: 3067888 - RNA, 22 nt, Human
auuuguaguguuggagaagaac

SEQ ID NO: 3067889 - RNA, 14 nt, Human
auuuguauaaaaua

SEQ ID NO: 3067890 - RNA, 23 nt, Human
auuuuaaaagaaugauuaugaau

SEQ ID NO: 3067891 - RNA, 21 nt, Human
auuugugaagguggaaauaaa

SEQ ID NO: 3067892 - RNA, 18 nt, Human
auuugugaagguggaaau

SEQ ID NO: 3067893 - RNA, 18 nt, Human
auuugucccaagugccaa

SEQ ID NO: 3067894 - RNA, 13 nt, Human
auuugucccaagu

SEQ ID NO: 3067895 - RNA, 14 nt, Human
auuugucccaagug

SEQ ID NO: 3067896 - RNA, 22 nt, Human
auuuuaaaaauacagauagaua

SEQ ID NO: 3067897 - RNA, 16 nt, Human
auuuuaaaagaaugau

SEQ ID NO: 3067898 - RNA, 18 nt, Human
auuugaaacacuuugcau

SEQ ID NO: 3067899 - RNA, 16 nt, Human
auuucuuccacaagag

SEQ ID NO: 3067900 - RNA, 15 nt, Human
auuugaaaauuuuga

SEQ ID NO: 3067901 - RNA, 16 nt, Human
auuugaaaauuuugau

SEQ ID NO: 3067902 - RNA, 17 nt, Human
auuucuaggacugaauu

SEQ ID NO: 3067903 - RNA, 18 nt, Human
auuucuaggacugaauua

SEQ ID NO: 3067904 - RNA, 20 nt, Human
auuucuuccacaagagccca

SEQ ID NO: 3067905 - RNA, 23 nt, Human
auuucuuccacaagagcccaggc

SEQ ID NO: 3067906 - RNA, 20 nt, Human
auuucuaggacugaauuaug

SEQ ID NO: 3067907 - RNA, 23 nt, Human
auuucuaggacugaauuaugaaa

SEQ ID NO: 3067908 - RNA, 19 nt, Human
auuucccaaagcagugcau

SEQ ID NO: 3067909 - RNA, 14 nt, Human
auuuauuuaaauuu

SEQ ID NO: 3067910 - RNA, 12 nt, Human
auuuauuuaaau

SEQ ID NO: 3067911 - RNA, 14 nt, Human
auuuauuuuaauaa

SEQ ID NO: 3067912 - RNA, 23 nt, Human
uuacuguacagacagaaaaaacu

SEQ ID NO: 3067913 - RNA, 12 nt, Human
uuacuguacaug

SEQ ID NO: 3067914 - RNA, 23 nt, Human
uuacuguacaugaaaacacauuu

SEQ ID NO: 3067915 - RNA, 22 nt, Human
uuacuguacaugaaaacacauu

SEQ ID NO: 3067916 - RNA, 14 nt, Human
uuacuguacaugaa

SEQ ID NO: 3067917 - RNA, 13 nt, Human
uuacuguacauga

SEQ ID NO: 3067918 - RNA, 15 nt, Human
uuacugcagcuuugu

SEQ ID NO: 3067919 - RNA, 16 nt, Human
uuagaagucacacagu

SEQ ID NO: 3067920 - RNA, 14 nt, Human
auaagauucauauu

SEQ ID NO: 3067921 - RNA, 17 nt, Human
uuacaguggggaaugaa

SEQ ID NO: 3067922 - RNA, 14 nt, Human
uuaccagcagagca

SEQ ID NO: 3067923 - RNA, 19 nt, Human
uuaccagcagagcaccuua

SEQ ID NO: 3067924 - RNA, 14 nt, Human
uuacaggugugaac

SEQ ID NO: 3067925 - RNA, 22 nt, Human
uuauaaaaauaaaaaacacugg

SEQ ID NO: 3067926 - RNA, 21 nt, Human
uuauaaaaauaaaaaacacug

SEQ ID NO: 3067927 - RNA, 13 nt, Human
uuauaaacuuuac

SEQ ID NO: 3067928 - RNA, 15 nt, Human
uuauaaaaauaaaaa

SEQ ID NO: 3067929 - RNA, 14 nt, Human
uuaguagagacagg

SEQ ID NO: 3067930 - RNA, 19 nt, Human
uuaguacuccccuccuuga

SEQ ID NO: 3067931 - RNA, 13 nt, Human
uuaguagagacag

SEQ ID NO: 3067932 - RNA, 13 nt, Human
uuaguaaucauau

SEQ ID NO: 3067933 - RNA, 14 nt, Human
uuaguaaucauauu

SEQ ID NO: 3067934 - RNA, 19 nt, Human
uuaggugugggggaagcac

SEQ ID NO: 3067935 - RNA, 21 nt, Human
uuaggugugacugaauuucuu

SEQ ID NO: 3067936 - RNA, 15 nt, Human
uuagggagagaagau

SEQ ID NO: 3067937 - RNA, 14 nt, Human
uuagggagagaaga

SEQ ID NO: 3067938 - RNA, 14 nt, Human
uuaggguuaugauu

SEQ ID NO: 3067939 - RNA, 16 nt, Human
uuaggguuaugauuaa

SEQ ID NO: 3067940 - RNA, 21 nt, Human
auaagauucauauuuacuucu

SEQ ID NO: 3067941 - RNA, 22 nt, Human
auaagccaaaaaaugcuugcuu

SEQ ID NO: 3067942 - RNA, 13 nt, Human
auaauuuuaaaug

SEQ ID NO: 3067943 - RNA, 12 nt, Human
auaauuuuaaau

SEQ ID NO: 3067944 - RNA, 14 nt, Human
auaauuuuaaaugu

SEQ ID NO: 3067945 - RNA, 23 nt, Human
auaauucacauuguauucagagu

SEQ ID NO: 3067946 - RNA, 14 nt, Human
auaaucuuucacag

SEQ ID NO: 3067947 - RNA, 19 nt, Human
auaauuuauacaggucaua

SEQ ID NO: 3067948 - RNA, 21 nt, Human
auaauuuauacaggucauauu

SEQ ID NO: 3067949 - RNA, 17 nt, Human
auaauucagaaggaucu

SEQ ID NO: 3067950 - RNA, 18 nt, Human
auaauuuaccugaagucu

SEQ ID NO: 3067951 - RNA, 15 nt, Human
aguuuguugaaacac

SEQ ID NO: 3067952 - RNA, 19 nt, Human
aguuucugccgcagcccug

SEQ ID NO: 3067953 - RNA, 22 nt, Human
aguuuguuaguaugaggcauuu

SEQ ID NO: 3067954 - RNA, 15 nt, Human
aguuucugccgcagc

SEQ ID NO: 3067955 - RNA, 14 nt, Human
aguuucucuuuuca

SEQ ID NO: 3067956 - RNA, 20 nt, Human
uuaaauuuugaguucuacau

SEQ ID NO: 3067957 - RNA, 15 nt, Human
uuaaauuuugaguuc

SEQ ID NO: 3067958 - RNA, 14 nt, Human
uuaacagaaaugua

SEQ ID NO: 3067959 - RNA, 13 nt, Human
uuaacagaaaugu

SEQ ID NO: 3067960 - RNA, 12 nt, Human
uuaacagaaaug

SEQ ID NO: 3067961 - RNA, 13 nt, Human
aguuuacauugua

SEQ ID NO: 3067962 - RNA, 17 nt, Human
aguuuacauuguaaaua

SEQ ID NO: 3067963 - RNA, 15 nt, Human
aguuuacauuguaaa

SEQ ID NO: 3067964 - RNA, 17 nt, Human
aguuuaaauuguaauag

SEQ ID NO: 3067965 - RNA, 20 nt, Human
aguuuaaauuguaauaggcg

SEQ ID NO: 3067966 - RNA, 19 nt, Human
uuaaaaaagaaacauuugg

SEQ ID NO: 3067967 - RNA, 15 nt, Human
aguuuagcuggaaaa

SEQ ID NO: 3067968 - RNA, 19 nt, Human
uuaaaaugagaaaucuaaa

SEQ ID NO: 3067969 - RNA, 12 nt, Human
uuaaaaugagaa

SEQ ID NO: 3067970 - RNA, 19 nt, Human
uuaaaaaucucaaauuucu

SEQ ID NO: 3067971 - RNA, 16 nt, Human
uuaaaaaauggaacau

SEQ ID NO: 3067972 - RNA, 20 nt, Human
uuaaaaaucucaaauuucua

SEQ ID NO: 3067973 - RNA, 17 nt, Human
uuaaaaaucucaaauuu

SEQ ID NO: 3067974 - RNA, 14 nt, Human
uuaaaaucauuucu

SEQ ID NO: 3067975 - RNA, 22 nt, Human
uuaaaaucauuucugcaucagc

SEQ ID NO: 3067976 - RNA, 13 nt, Human
uuaaucuuuaauu

SEQ ID NO: 3067977 - RNA, 17 nt, Human
uuaaucuuuaauuuuac

SEQ ID NO: 3067978 - RNA, 16 nt, Human
uuaauuuauccucugu

SEQ ID NO: 3067979 - RNA, 16 nt, Human
uuaauuugguuuucac

SEQ ID NO: 3067980 - RNA, 22 nt, Human
uuaagacgaaacauuuguucua

SEQ ID NO: 3067981 - RNA, 22 nt, Human
uuaagagagucuauuuacggaa

SEQ ID NO: 3067982 - RNA, 15 nt, Human
uuaaucuaaauggaa

SEQ ID NO: 3067983 - RNA, 15 nt, Human
aguuuuuuuuauaca

SEQ ID NO: 3067984 - RNA, 16 nt, Human
aguuuuauaugcuucu

SEQ ID NO: 3067985 - RNA, 19 nt, Human
uuaagacgaaacauuuguu

SEQ ID NO: 3067986 - RNA, 20 nt, Human
auaaaagccuguuuaagaga

SEQ ID NO: 3067987 - RNA, 19 nt, Human
auaaaagccuguuuaagag

SEQ ID NO: 3067988 - RNA, 18 nt, Human
uuaacuuuuauaaacuuu

SEQ ID NO: 3067989 - RNA, 22 nt, Human
uuaacuuuuauaaacuuuaccu

SEQ ID NO: 3067990 - RNA, 23 nt, Human
uuaacuuuuauaaacuuuaccuu

SEQ ID NO: 3067991 - RNA, 23 nt, Human
auacgcaacauaauuaaauuuug

SEQ ID NO: 3067992 - RNA, 13 nt, Human
auacguacacauu

SEQ ID NO: 3067993 - RNA, 16 nt, Human
auacguacacauuuua

SEQ ID NO: 3067994 - RNA, 18 nt, Human
auacgugggcauucaaau

SEQ ID NO: 3067995 - RNA, 19 nt, Human
auacgugggcauucaaaug

SEQ ID NO: 3067996 - RNA, 15 nt, Human
auacguacacauuuu

SEQ ID NO: 3067997 - RNA, 14 nt, Human
auacguacacauuu

SEQ ID NO: 3067998 - RNA, 18 nt, Human
auaccacuuuuguucuug

SEQ ID NO: 3067999 - RNA, 17 nt, Human
auaccacuuuuguucuu

SEQ ID NO: 3068000 - RNA, 22 nt, Human
auaccacaggaaccacaagacu

SEQ ID NO: 3068001 - RNA, 14 nt, Human
auaccuuuuuuaga

SEQ ID NO: 3068002 - RNA, 15 nt, Human
uuauauuugaaauau

SEQ ID NO: 3068003 - RNA, 19 nt, Human
uuauauuugaaauauugac

SEQ ID NO: 3068004 - RNA, 20 nt, Human
auacuaaccagcagaaaugc

SEQ ID NO: 3068005 - RNA, 19 nt, Human
auacuaaccagcagaaaug

SEQ ID NO: 3068006 - RNA, 13 nt, Human
auacuaaccagca

SEQ ID NO: 3068007 - RNA, 17 nt, Human
auacuauggaauuucuc

SEQ ID NO: 3068008 - RNA, 21 nt, Human
auacaggaugaugacuaugga

SEQ ID NO: 3068009 - RNA, 18 nt, Human
auacaguuacucagaauu

SEQ ID NO: 3068010 - RNA, 23 nt, Human
auacaggaaaagcugcugacagu

SEQ ID NO: 3068011 - RNA, 22 nt, Human
auacaggaaaagcugcugacag

SEQ ID NO: 3068012 - RNA, 23 nt, Human
auacagauagauauaugcucugc

SEQ ID NO: 3068013 - RNA, 20 nt, Human
auacaguuacucagaauucu

SEQ ID NO: 3068014 - RNA, 20 nt, Human
auacauaaacaagaccacgu

SEQ ID NO: 3068015 - RNA, 22 nt, Human
uuauaaacuuuuuucuuacugu

SEQ ID NO: 3068016 - RNA, 16 nt, Human
uuauaaacuuuuuucu

SEQ ID NO: 3068017 - RNA, 12 nt, Human
uuauaaacuuuu

SEQ ID NO: 3068018 - RNA, 18 nt, Human
uuauaaacuuuaccuuuu

SEQ ID NO: 3068019 - RNA, 17 nt, Human
uuauaaacuuuaccuuu

SEQ ID NO: 3068020 - RNA, 16 nt, Human
auacagaggcaacugc

SEQ ID NO: 3068021 - RNA, 17 nt, Human
auacagaggcaacugca

SEQ ID NO: 3068022 - RNA, 13 nt, Human
uuaugugaaacau

SEQ ID NO: 3068023 - RNA, 22 nt, Human
uuaugugccagauuuaugcaua

SEQ ID NO: 3068024 - RNA, 15 nt, Human
uuaugugaaacaugu

SEQ ID NO: 3068025 - RNA, 18 nt, Human
uuauggcuuuugugcauu

SEQ ID NO: 3068026 - RNA, 19 nt, Human
uuauggcuuuugugcauua

SEQ ID NO: 3068027 - RNA, 13 nt, Human
uuaugggcugggu

SEQ ID NO: 3068028 - RNA, 19 nt, Human
uuaugauuaaguaaugaua

SEQ ID NO: 3068029 - RNA, 22 nt, Human
uuaugggcuggguucuacccag

SEQ ID NO: 3068030 - RNA, 20 nt, Human
uuaugaagcuuuuaugugaa

SEQ ID NO: 3068031 - RNA, 19 nt, Human
uuaugaaacuuuuggaagg

SEQ ID NO: 3068032 - RNA, 14 nt, Human
uuaugaaacuuuug

SEQ ID NO: 3068033 - RNA, 17 nt, Human
uuaugaaacuuuuggaa

SEQ ID NO: 3068034 - RNA, 18 nt, Human
uuaugaaacuuuuggaag

SEQ ID NO: 3068035 - RNA, 21 nt, Human
uuaucacccagaagaaaauag

SEQ ID NO: 3068036 - RNA, 19 nt, Human
uuaucacccagaagaaaau

SEQ ID NO: 3068037 - RNA, 18 nt, Human
uuaucacccagaagaaaa

SEQ ID NO: 3068038 - RNA, 17 nt, Human
uuaucacccagaagaaa

SEQ ID NO: 3068039 - RNA, 20 nt, Human
uuaugauacuugaaaauuaa

SEQ ID NO: 3068040 - RNA, 11 nt, Human
uuaugacucca

SEQ ID NO: 3068041 - RNA, 21 nt, Human
uuaugaauuacauuuguauaa

SEQ ID NO: 3068042 - RNA, 14 nt, Human
uuaugaauuacauu

SEQ ID NO: 3068043 - RNA, 16 nt, Human
uuaugaauuacauuug

SEQ ID NO: 3068044 - RNA, 17 nt, Human
uuaugaauuacauuugu

SEQ ID NO: 3068045 - RNA, 18 nt, Human
auagauaggucagugcaa

SEQ ID NO: 3068046 - RNA, 19 nt, Human
auagaguguacuuaacuau

SEQ ID NO: 3068047 - RNA, 14 nt, Human
auagaguguacuua

SEQ ID NO: 3068048 - RNA, 21 nt, Human
auagaguguacuuaacuauuc

SEQ ID NO: 3068049 - RNA, 22 nt, Human
auagagcaaaauugauguguuu

SEQ ID NO: 3068050 - RNA, 21 nt, Human
auagagcaaaauugauguguu

SEQ ID NO: 3068051 - RNA, 17 nt, Human
auagagcaaaauugaug

SEQ ID NO: 3068052 - RNA, 15 nt, Human
auagagcaaaauuga

SEQ ID NO: 3068053 - RNA, 14 nt, Human
auagagagagacca

SEQ ID NO: 3068054 - RNA, 19 nt, Human
auagaauaaaauuuuuaau

SEQ ID NO: 3068055 - RNA, 14 nt, Human
auagaauaaaauuu

SEQ ID NO: 3068056 - RNA, 22 nt, Human
auagaauaaaauuuuuaaucuu

SEQ ID NO: 3068057 - RNA, 17 nt, Human
auagaauuaacacauga

SEQ ID NO: 3068058 - RNA, 22 nt, Human
auagacaauuuauuauggcaca

SEQ ID NO: 3068059 - RNA, 16 nt, Human
auagacaauuuauuau

SEQ ID NO: 3068060 - RNA, 23 nt, Human
auagacaauuuauuauggcacau

SEQ ID NO: 3068061 - RNA, 13 nt, Human
auagaaguaaaaa

SEQ ID NO: 3068062 - RNA, 14 nt, Human
uuauuauauuuaca

SEQ ID NO: 3068063 - RNA, 19 nt, Human
uuauguuaaaacugggaca

SEQ ID NO: 3068064 - RNA, 15 nt, Human
uuauuauauuuacaa

SEQ ID NO: 3068065 - RNA, 12 nt, Human
uuauuaugcaug

SEQ ID NO: 3068066 - RNA, 12 nt, Human
uuauucauaauu

SEQ ID NO: 3068067 - RNA, 13 nt, Human
uuauuaugcauga

SEQ ID NO: 3068068 - RNA, 16 nt, Human
auacucugcuuagaau

SEQ ID NO: 3068069 - RNA, 14 nt, Human
auacucuuauaucu

SEQ ID NO: 3068070 - RNA, 18 nt, Human
auacucuuauaucuauau

SEQ ID NO: 3068071 - RNA, 17 nt, Human
auacuccuccaagguua

SEQ ID NO: 3068072 - RNA, 14 nt, Human
auacucccaucugu

SEQ ID NO: 3068073 - RNA, 11 nt, Human
auacucccauc

SEQ ID NO: 3068074 - RNA, 16 nt, Human
auacucauuaggaugg

SEQ ID NO: 3068075 - RNA, 19 nt, Human
aguauucuuauuuaaugaa

SEQ ID NO: 3068076 - RNA, 17 nt, Human
agucaccccggccaccu

SEQ ID NO: 3068077 - RNA, 15 nt, Human
agucaccaagcccag

SEQ ID NO: 3068078 - RNA, 14 nt, Human
agucaccaagccca

SEQ ID NO: 3068079 - RNA, 22 nt, Human
ugucauuugagcagggcucagc

SEQ ID NO: 3068080 - RNA, 21 nt, Human
ugucauuugagcagggcucag

SEQ ID NO: 3068081 - RNA, 20 nt, Human
ugucauuugagcagggcuca

SEQ ID NO: 3068082 - RNA, 20 nt, Human
ugucagguggggcagcuuga

SEQ ID NO: 3068083 - RNA, 18 nt, Human
ugucagguggggcagcuu

SEQ ID NO: 3068084 - RNA, 17 nt, Human
ugucagguggggcagcu

SEQ ID NO: 3068085 - RNA, 14 nt, Human
uguccaagaagccc

SEQ ID NO: 3068086 - RNA, 15 nt, Human
uguccaagaagccca

SEQ ID NO: 3068087 - RNA, 16 nt, Human
ugucagguggggcagc

SEQ ID NO: 3068088 - RNA, 23 nt, Human
ugucccugcacuugcagacucua

SEQ ID NO: 3068089 - RNA, 22 nt, Human
ugucccugcacuugcagacucu

SEQ ID NO: 3068090 - RNA, 20 nt, Human
ugucccugcacuugcagacu

SEQ ID NO: 3068091 - RNA, 16 nt, Human
uguccaagaagcccag

SEQ ID NO: 3068092 - RNA, 17 nt, Human
uguccaagaagcccagg

SEQ ID NO: 3068093 - RNA, 18 nt, Human
uguccaagaagcccagga

SEQ ID NO: 3068094 - RNA, 22 nt, Human
uguccaagaagcccaggaaagg

SEQ ID NO: 3068095 - RNA, 20 nt, Human
uguccagccccguagacgug

SEQ ID NO: 3068096 - RNA, 14 nt, Human
aguccucccaucuc

SEQ ID NO: 3068097 - RNA, 16 nt, Human
aguccucccaucucac

SEQ ID NO: 3068098 - RNA, 21 nt, Human
agucucacuguugcccaggcu

SEQ ID NO: 3068099 - RNA, 13 nt, Human
agucucaggaaau

SEQ ID NO: 3068100 - RNA, 22 nt, Human
ugucucaguccaugaagaugua

SEQ ID NO: 3068101 - RNA, 23 nt, Human
agucucacuguugcccaggcugg

SEQ ID NO: 3068102 - RNA, 15 nt, Human
agucuauuuacggaa

SEQ ID NO: 3068103 - RNA, 20 nt, Human
agucuauuuacggaacucaa

SEQ ID NO: 3068104 - RNA, 16 nt, Human
agucccaccuuggcug

SEQ ID NO: 3068105 - RNA, 15 nt, Human
agucccaccuuggcu

SEQ ID NO: 3068106 - RNA, 19 nt, Human
agucccaccuuggcugcag

SEQ ID NO: 3068107 - RNA, 18 nt, Human
agucccaccuuggcugca

SEQ ID NO: 3068108 - RNA, 19 nt, Human
ugucccuuacgugaguccu

SEQ ID NO: 3068109 - RNA, 23 nt, Human
ugucccuuacgugaguccuggca

SEQ ID NO: 3068110 - RNA, 14 nt, Human
ugucccugcacuug

SEQ ID NO: 3068111 - RNA, 20 nt, Human
ugucggccccaccagugccu

SEQ ID NO: 3068112 - RNA, 21 nt, Human
ugucggccccaccagugccuc

SEQ ID NO: 3068113 - RNA, 22 nt, Human
ugucggccccaccagugccucu

SEQ ID NO: 3068114 - RNA, 23 nt, Human
ugucggccccaccagugccucuc

SEQ ID NO: 3068115 - RNA, 14 nt, Human
agucaggaaagaga

SEQ ID NO: 3068116 - RNA, 14 nt, Human
agguugaagcacca

SEQ ID NO: 3068117 - RNA, 14 nt, Human
agguugcagugagc

SEQ ID NO: 3068118 - RNA, 22 nt, Human
aggugugagucaccaagcccag

SEQ ID NO: 3068119 - RNA, 21 nt, Human
aggugugagucaccaagccca

SEQ ID NO: 3068120 - RNA, 16 nt, Human
aggugucccugcacuu

SEQ ID NO: 3068121 - RNA, 20 nt, Human
aggugugagucaccaagccc

SEQ ID NO: 3068122 - RNA, 12 nt, Human
aggugggaggau

SEQ ID NO: 3068123 - RNA, 16 nt, Human
aggugcuacaaaaaca

SEQ ID NO: 3068124 - RNA, 21 nt, Human
uguaauuaaguacuauguauc

SEQ ID NO: 3068125 - RNA, 19 nt, Human
uguaauuaaguacuaugua

SEQ ID NO: 3068126 - RNA, 18 nt, Human
uguaauuaaguacuaugu

SEQ ID NO: 3068127 - RNA, 19 nt, Human
uguaagggaaacugccagc

SEQ ID NO: 3068128 - RNA, 17 nt, Human
uguaauuaaguacuaug

SEQ ID NO: 3068129 - RNA, 20 nt, Human
agguuggcaaaaaggcagga

SEQ ID NO: 3068130 - RNA, 18 nt, Human
uguaagggaaacugccag

SEQ ID NO: 3068131 - RNA, 13 nt, Human
uguaagggaaacu

SEQ ID NO: 3068132 - RNA, 20 nt, Human
uguacauaaugcgugcauac

SEQ ID NO: 3068133 - RNA, 19 nt, Human
uguacauaaugcgugcaua

SEQ ID NO: 3068134 - RNA, 20 nt, Human
uguaauuuuuuuaucgucac

SEQ ID NO: 3068135 - RNA, 14 nt, Human
uguacaugaaaaca

SEQ ID NO: 3068136 - RNA, 16 nt, Human
uguacaugaaaacaca

SEQ ID NO: 3068137 - RNA, 20 nt, Human
uguacaugaaaacacauuuu

SEQ ID NO: 3068138 - RNA, 13 nt, Human
aguaauagagcaa

SEQ ID NO: 3068139 - RNA, 19 nt, Human
aguaaaaccacagcaguug

SEQ ID NO: 3068140 - RNA, 17 nt, Human
aguaaaaccacagcagu

SEQ ID NO: 3068141 - RNA, 16 nt, Human
aguaaaaccacagcag

SEQ ID NO: 3068142 - RNA, 23 nt, Human
aguaaaaacaaagaaauuaugug

SEQ ID NO: 3068143 - RNA, 16 nt, Human
aguaaaaacaaagaaa

SEQ ID NO: 3068144 - RNA, 21 nt, Human
uguacauggaauaacauguaa

SEQ ID NO: 3068145 - RNA, 19 nt, Human
aguaauucaagaaaacaac

SEQ ID NO: 3068146 - RNA, 12 nt, Human
aguaauuggaaa

SEQ ID NO: 3068147 - RNA, 13 nt, Human
aguaauuggaaag

SEQ ID NO: 3068148 - RNA, 19 nt, Human
aguacauuuggagacacaa

SEQ ID NO: 3068149 - RNA, 23 nt, Human
aguacacuguuucaaacuuuacu

SEQ ID NO: 3068150 - RNA, 20 nt, Human
aguacacuguuucaaacuuu

SEQ ID NO: 3068151 - RNA, 21 nt, Human
aguacacuguuucaaacuuua

SEQ ID NO: 3068152 - RNA, 18 nt, Human
uguauauccuuucuaaca

SEQ ID NO: 3068153 - RNA, 22 nt, Human
uguauauauuuccuauauuguu

SEQ ID NO: 3068154 - RNA, 18 nt, Human
uguauauauuuccuauau

SEQ ID NO: 3068155 - RNA, 17 nt, Human
uguaguguuggagaaga

SEQ ID NO: 3068156 - RNA, 18 nt, Human
uguaguguuggagaagaa

SEQ ID NO: 3068157 - RNA, 16 nt, Human
uguaguguuggagaag

SEQ ID NO: 3068158 - RNA, 17 nt, Human
uguaggguuauaauaau

SEQ ID NO: 3068159 - RNA, 16 nt, Human
uguaggguuauaauaa

SEQ ID NO: 3068160 - RNA, 14 nt, Human
uguguaaaauguga

SEQ ID NO: 3068161 - RNA, 20 nt, Human
ugugucagguggggcagcuu

SEQ ID NO: 3068162 - RNA, 22 nt, Human
ugugucuaaauuugaauguuaa

SEQ ID NO: 3068163 - RNA, 19 nt, Human
ugugucuaaauuugaaugu

SEQ ID NO: 3068164 - RNA, 22 nt, Human
ugugucucuugguccugcugca

SEQ ID NO: 3068165 - RNA, 18 nt, Human
agugggggaucacagccu

SEQ ID NO: 3068166 - RNA, 22 nt, Human
agugggcccaaugcacuuuguu

SEQ ID NO: 3068167 - RNA, 16 nt, Human
aguggggaaugaagau

SEQ ID NO: 3068168 - RNA, 23 nt, Human
uguuaagcagauggaaugcugug

SEQ ID NO: 3068169 - RNA, 22 nt, Human
uguguuaaguauguguaaaaug

SEQ ID NO: 3068170 - RNA, 22 nt, Human
uguguuaucacccagaagaaaa

SEQ ID NO: 3068171 - RNA, 14 nt, Human
uguuacaaauugua

SEQ ID NO: 3068172 - RNA, 18 nt, Human
uguuacaaauuguagaag

SEQ ID NO: 3068173 - RNA, 17 nt, Human
uguuacaaauuguagaa

SEQ ID NO: 3068174 - RNA, 19 nt, Human
uguuacauaagauaaaugu

SEQ ID NO: 3068175 - RNA, 15 nt, Human
uguugcauagaauaa

SEQ ID NO: 3068176 - RNA, 15 nt, Human
uguucuaagaaguga

SEQ ID NO: 3068177 - RNA, 20 nt, Human
uguugcccaggcuggcgugc

SEQ ID NO: 3068178 - RNA, 23 nt, Human
uguugcccaggcuggcgugcagu

SEQ ID NO: 3068179 - RNA, 22 nt, Human
uguugcccacagcuguaugauu

SEQ ID NO: 3068180 - RNA, 21 nt, Human
aguguucauaaauaaaguuug

SEQ ID NO: 3068181 - RNA, 18 nt, Human
aguguguguuuuucauaa

SEQ ID NO: 3068182 - RNA, 16 nt, Human
aguguuguggauuuaa

SEQ ID NO: 3068183 - RNA, 23 nt, Human
aguguuggagaagaacugaaauc

SEQ ID NO: 3068184 - RNA, 20 nt, Human
aguguuguggauuuaacaga

SEQ ID NO: 3068185 - RNA, 19 nt, Human
aguguuguggauuuaacag

SEQ ID NO: 3068186 - RNA, 13 nt, Human
aguuacucagaau

SEQ ID NO: 3068187 - RNA, 22 nt, Human
agugugguguuuccuggcacug

SEQ ID NO: 3068188 - RNA, 17 nt, Human
uguuaugacuccagaau

SEQ ID NO: 3068189 - RNA, 13 nt, Human
uguuaugacucca

SEQ ID NO: 3068190 - RNA, 20 nt, Human
agugugguguuuccuggcac

SEQ ID NO: 3068191 - RNA, 21 nt, Human
agugugccugaagucccagau

SEQ ID NO: 3068192 - RNA, 20 nt, Human
agugugccugaagucccaga

SEQ ID NO: 3068193 - RNA, 20 nt, Human
agugugacugaucucucgug

SEQ ID NO: 3068194 - RNA, 16 nt, Human
agucuuucacauuuaa

SEQ ID NO: 3068195 - RNA, 20 nt, Human
agugaacaaauuuacagaga

SEQ ID NO: 3068196 - RNA, 21 nt, Human
agugaacaaauuuacagagac

SEQ ID NO: 3068197 - RNA, 16 nt, Human
agugaacuugggccac

SEQ ID NO: 3068198 - RNA, 22 nt, Human
agugaacaaauuuacagagaca

SEQ ID NO: 3068199 - RNA, 23 nt, Human
agugaacaaauuuacagagacag

SEQ ID NO: 3068200 - RNA, 21 nt, Human
agugacugauggcuaauguac

SEQ ID NO: 3068201 - RNA, 14 nt, Human
agugagcacuaagg

SEQ ID NO: 3068202 - RNA, 12 nt, Human
agugagcugguu

SEQ ID NO: 3068203 - RNA, 22 nt, Human
ugugaugaugaaaugaggucag

SEQ ID NO: 3068204 - RNA, 19 nt, Human
ugugaugagaggaaaucac

SEQ ID NO: 3068205 - RNA, 18 nt, Human
ugugaugagaggaaauca

SEQ ID NO: 3068206 - RNA, 13 nt, Human
agucuuagaugua

SEQ ID NO: 3068207 - RNA, 16 nt, Human
agucuuagauguauau

SEQ ID NO: 3068208 - RNA, 14 nt, Human
agucuuagauguau

SEQ ID NO: 3068209 - RNA, 16 nt, Human
agucucuugauucaua

SEQ ID NO: 3068210 - RNA, 17 nt, Human
agucucuugauucauaa

SEQ ID NO: 3068211 - RNA, 16 nt, Human
ugugacugaucucucg

SEQ ID NO: 3068212 - RNA, 11 nt, Human
ugugaggaagc

SEQ ID NO: 3068213 - RNA, 20 nt, Human
ugugcucaggagcccuggga

SEQ ID NO: 3068214 - RNA, 21 nt, Human
ugugcucaggagcccugggag

SEQ ID NO: 3068215 - RNA, 18 nt, Human
ugugcugagucugaaggc

SEQ ID NO: 3068216 - RNA, 19 nt, Human
ugugcugagucugaaggcu

SEQ ID NO: 3068217 - RNA, 21 nt, Human
uguggaucaaauccagccugc

SEQ ID NO: 3068218 - RNA, 14 nt, Human
uguggaugauaaaa

SEQ ID NO: 3068219 - RNA, 20 nt, Human
uguggauuuaacagaaaugu

SEQ ID NO: 3068220 - RNA, 19 nt, Human
uguggauuuaacagaaaug

SEQ ID NO: 3068221 - RNA, 22 nt, Human
uguggauuuaacagaaauguac

SEQ ID NO: 3068222 - RNA, 23 nt, Human
agugagcugguuuuuagcggaga

SEQ ID NO: 3068223 - RNA, 18 nt, Human
ugugcugcccugcccacc

SEQ ID NO: 3068224 - RNA, 19 nt, Human
ugugcugcccugcccaccu

SEQ ID NO: 3068225 - RNA, 20 nt, Human
ugugcugcccugcccaccug

SEQ ID NO: 3068226 - RNA, 14 nt, Human
agugcaugcugucc

SEQ ID NO: 3068227 - RNA, 16 nt, Human
agugcaugcugucccu

SEQ ID NO: 3068228 - RNA, 17 nt, Human
agugcagugagccgaga

SEQ ID NO: 3068229 - RNA, 14 nt, Human
agugcacuaaugug

SEQ ID NO: 3068230 - RNA, 17 nt, Human
agugcacuaauguguaa

SEQ ID NO: 3068231 - RNA, 21 nt, Human
agugcacuaauguguaagaca

SEQ ID NO: 3068232 - RNA, 12 nt, Human
agugaggcucug

SEQ ID NO: 3068233 - RNA, 13 nt, Human
agugaggcucugc

SEQ ID NO: 3068234 - RNA, 16 nt, Human
agugaggaugaaaaaa

SEQ ID NO: 3068235 - RNA, 22 nt, Human
agugcaaauugucacaggacag

SEQ ID NO: 3068236 - RNA, 19 nt, Human
aggaguuucguuuucaaaa

SEQ ID NO: 3068237 - RNA, 21 nt, Human
aggaguuugagaccaaccugg

SEQ ID NO: 3068238 - RNA, 14 nt, Human
uggaagugcuaauu

SEQ ID NO: 3068239 - RNA, 15 nt, Human
aggaggccagccuug

SEQ ID NO: 3068240 - RNA, 21 nt, Human
uggaacaagaugguucuagca

SEQ ID NO: 3068241 - RNA, 10 nt, Human
ugcugcccug

SEQ ID NO: 3068242 - RNA, 22 nt, Human
ugcugccccugcacagcaggcu

SEQ ID NO: 3068243 - RNA, 21 nt, Human
ugcugccccugcacagcaggc

SEQ ID NO: 3068244 - RNA, 20 nt, Human
ugcugccccugcacagcagg

SEQ ID NO: 3068245 - RNA, 12 nt, Human
uggaacacucug

SEQ ID NO: 3068246 - RNA, 13 nt, Human
uggaagcuccgcu

SEQ ID NO: 3068247 - RNA, 20 nt, Human
uggaaguacuauaauuuacc

SEQ ID NO: 3068248 - RNA, 18 nt, Human
uggaaguacuauaauuua

SEQ ID NO: 3068249 - RNA, 14 nt, Human
uggaauuugaaaca

SEQ ID NO: 3068250 - RNA, 22 nt, Human
uggaauuucucccagucauuua

SEQ ID NO: 3068251 - RNA, 19 nt, Human
aggcaacugcauuggcuuu

SEQ ID NO: 3068252 - RNA, 14 nt, Human
aggcaagcaccucc

SEQ ID NO: 3068253 - RNA, 15 nt, Human
uggacaccggaaaca

SEQ ID NO: 3068254 - RNA, 14 nt, Human
uggacaaaauggaa

SEQ ID NO: 3068255 - RNA, 17 nt, Human
uggacaaaauggaauac

SEQ ID NO: 3068256 - RNA, 16 nt, Human
aggaugcuuguacaua

SEQ ID NO: 3068257 - RNA, 15 nt, Human
aggaugcuuguacau

SEQ ID NO: 3068258 - RNA, 21 nt, Human
aggauccugagccagauuuca

SEQ ID NO: 3068259 - RNA, 12 nt, Human
aggaucagucug

SEQ ID NO: 3068260 - RNA, 18 nt, Human
aggaugcuuguacauaau

SEQ ID NO: 3068261 - RNA, 22 nt, Human
aggauugcuacuguccuaccca

SEQ ID NO: 3068262 - RNA, 21 nt, Human
uggagcucgugggacagucac

SEQ ID NO: 3068263 - RNA, 16 nt, Human
aggcaaugcuggcugu

SEQ ID NO: 3068264 - RNA, 15 nt, Human
aggcaaugcuggcug

SEQ ID NO: 3068265 - RNA, 23 nt, Human
uggagcccacuguacuugcucuu

SEQ ID NO: 3068266 - RNA, 19 nt, Human
uggagcccacuguacuugc

SEQ ID NO: 3068267 - RNA, 16 nt, Human
uggagcccacuguacu

SEQ ID NO: 3068268 - RNA, 24 nt, Human
uggacuuuguuaguuucuccaagc

SEQ ID NO: 3068269 - RNA, 14 nt, Human
uggagaagaacuga

SEQ ID NO: 3068270 - RNA, 16 nt, Human
uggagaagaacugaaa

SEQ ID NO: 3068271 - RNA, 11 nt, Human
uggacuuuguu

SEQ ID NO: 3068272 - RNA, 22 nt, Human
uggacuuuguuaguuucuccaa

SEQ ID NO: 3068273 - RNA, 20 nt, Human
aggcaggaguuucguuuuca

SEQ ID NO: 3068274 - RNA, 12 nt, Human
aggcaggauggc

SEQ ID NO: 3068275 - RNA, 21 nt, Human
aggcagccccauucugccugc

SEQ ID NO: 3068276 - RNA, 20 nt, Human
aggcagccccauucugccug

SEQ ID NO: 3068277 - RNA, 19 nt, Human
aggcagccccauucugccu

SEQ ID NO: 3068278 - RNA, 22 nt, Human
aggcagccccauucugccugcc

SEQ ID NO: 3068279 - RNA, 21 nt, Human
aggcaggucuugaacuccugg

SEQ ID NO: 3068280 - RNA, 14 nt, Human
aggcagguccaggg

SEQ ID NO: 3068281 - RNA, 22 nt, Human
aggcagggucucacucugucgc

SEQ ID NO: 3068282 - RNA, 21 nt, Human
aggcagggucucacucugucg

SEQ ID NO: 3068283 - RNA, 20 nt, Human
aggcagggucucacucuguc

SEQ ID NO: 3068284 - RNA, 18 nt, Human
aggcagggucucacucug

SEQ ID NO: 3068285 - RNA, 19 nt, Human
aggcagggucucacucugu

SEQ ID NO: 3068286 - RNA, 12 nt, Human
aggccuggccag

SEQ ID NO: 3068287 - RNA, 13 nt, Human
aggccuggccaga

SEQ ID NO: 3068288 - RNA, 16 nt, Human
aggcccggcuccaggc

SEQ ID NO: 3068289 - RNA, 15 nt, Human
aggcccggcuccagg

SEQ ID NO: 3068290 - RNA, 14 nt, Human
aggcccggcuccag

SEQ ID NO: 3068291 - RNA, 21 nt, Human
aggccccugccacccugggga

SEQ ID NO: 3068292 - RNA, 12 nt, Human
aggccccugcca

SEQ ID NO: 3068293 - RNA, 18 nt, Human
aggccccugccacccugg

SEQ ID NO: 3068294 - RNA, 17 nt, Human
aggccccugccacccug

SEQ ID NO: 3068295 - RNA, 19 nt, Human
aggcccagagggccugcaa

SEQ ID NO: 3068296 - RNA, 20 nt, Human
aggcccagagggccugcaag

SEQ ID NO: 3068297 - RNA, 15 nt, Human
aggccccugccaccc

SEQ ID NO: 3068298 - RNA, 13 nt, Human
aggccccugccac

SEQ ID NO: 3068299 - RNA, 16 nt, Human
uggcaccagcagccug

SEQ ID NO: 3068300 - RNA, 17 nt, Human
uggcaccagcagccugg

SEQ ID NO: 3068301 - RNA, 15 nt, Human
aggcccagagggccu

SEQ ID NO: 3068302 - RNA, 16 nt, Human
aggcccagagggccug

SEQ ID NO: 3068303 - RNA, 13 nt, Human
uggcagcucagag

SEQ ID NO: 3068304 - RNA, 23 nt, Human
aggccagagacacaagccuucgg

SEQ ID NO: 3068305 - RNA, 18 nt, Human
aggccaugggccuccugu

SEQ ID NO: 3068306 - RNA, 17 nt, Human
aggccaugggccuccug

SEQ ID NO: 3068307 - RNA, 12 nt, Human
aggccagagaca

SEQ ID NO: 3068308 - RNA, 16 nt, Human
uggcagcucagagagg

SEQ ID NO: 3068309 - RNA, 13 nt, Human
aggccagagacac

SEQ ID NO: 3068310 - RNA, 18 nt, Human
aggccagagacacaagcc

SEQ ID NO: 3068311 - RNA, 14 nt, Human
uggcagcucagaga

SEQ ID NO: 3068312 - RNA, 15 nt, Human
uggcagcucagagag

SEQ ID NO: 3068313 - RNA, 14 nt, Human
aggcuccaggagca

SEQ ID NO: 3068314 - RNA, 16 nt, Human
aggcuccaggagcagc

SEQ ID NO: 3068315 - RNA, 13 nt, Human
aggcuccaggagc

SEQ ID NO: 3068316 - RNA, 11 nt, Human
aggcuccacuu

SEQ ID NO: 3068317 - RNA, 17 nt, Human
aggcuccacuuggucug

SEQ ID NO: 3068318 - RNA, 21 nt, Human
aggcuccacuuggucugugag

SEQ ID NO: 3068319 - RNA, 22 nt, Human
aggcuccacuuggucugugaga

SEQ ID NO: 3068320 - RNA, 18 nt, Human
aggccuucucugaaggac

SEQ ID NO: 3068321 - RNA, 17 nt, Human
aggccuucucugaagga

SEQ ID NO: 3068322 - RNA, 19 nt, Human
uggccucugcacuccccug

SEQ ID NO: 3068323 - RNA, 18 nt, Human
uggccucugcacuccccu

SEQ ID NO: 3068324 - RNA, 20 nt, Human
uggccucugcacuccccugc

SEQ ID NO: 3068325 - RNA, 18 nt, Human
uggccugagcugggauga

SEQ ID NO: 3068326 - RNA, 13 nt, Human
uggcccacugcau

SEQ ID NO: 3068327 - RNA, 14 nt, Human
uggcccacugcauc

SEQ ID NO: 3068328 - RNA, 13 nt, Human
uggcccacgcacu

SEQ ID NO: 3068329 - RNA, 19 nt, Human
uggcccacgcacuucggga

SEQ ID NO: 3068330 - RNA, 22 nt, Human
uggcaugggaaugaaugucagu

SEQ ID NO: 3068331 - RNA, 15 nt, Human
ugggagaaaugaaaa

SEQ ID NO: 3068332 - RNA, 16 nt, Human
ugggacuacaggugug

SEQ ID NO: 3068333 - RNA, 18 nt, Human
ugggacuacaggcaccca

SEQ ID NO: 3068334 - RNA, 20 nt, Human
agggacuuggaagcuccgcu

SEQ ID NO: 3068335 - RNA, 14 nt, Human
agggagagaagaua

SEQ ID NO: 3068336 - RNA, 13 nt, Human
agggagagaagau

SEQ ID NO: 3068337 - RNA, 15 nt, Human
agggacuuggaagcu

SEQ ID NO: 3068338 - RNA, 23 nt, Human
agggacuucugucuucacaacag

SEQ ID NO: 3068339 - RNA, 19 nt, Human
agggacuuggaagcuccgc

SEQ ID NO: 3068340 - RNA, 18 nt, Human
agggacuuggaagcuccg

SEQ ID NO: 3068341 - RNA, 16 nt, Human
ugggauuuggucaaca

SEQ ID NO: 3068342 - RNA, 21 nt, Human
ugggcaacccccagccugcua

SEQ ID NO: 3068343 - RNA, 14 nt, Human
ugggcauucaaaug

SEQ ID NO: 3068344 - RNA, 13 nt, Human
ugggcauucaaau

SEQ ID NO: 3068345 - RNA, 16 nt, Human
ugggcagaaggaagac

SEQ ID NO: 3068346 - RNA, 20 nt, Human
ugggcagaaggaagacuuca

SEQ ID NO: 3068347 - RNA, 13 nt, Human
ugggcagaaggaa

SEQ ID NO: 3068348 - RNA, 23 nt, Human
ugggaggcucuggagcccacugu

SEQ ID NO: 3068349 - RNA, 17 nt, Human
ugggaggcucuggagcc

SEQ ID NO: 3068350 - RNA, 14 nt, Human
ugggaggcucugga

SEQ ID NO: 3068351 - RNA, 19 nt, Human
ugggaggcugagaugggag

SEQ ID NO: 3068352 - RNA, 16 nt, Human
ugggagaaaugaaaaa

SEQ ID NO: 3068353 - RNA, 21 nt, Human
ugggagaaccaaaaagaggcu

SEQ ID NO: 3068354 - RNA, 22 nt, Human
ugggaggaucucuugagccugg

SEQ ID NO: 3068355 - RNA, 22 nt, Human
ugggaggauugcuugagcucag

SEQ ID NO: 3068356 - RNA, 18 nt, Human
ugggaggauugcuugagc

SEQ ID NO: 3068357 - RNA, 21 nt, Human
ugggaggauugcuugagcuca

SEQ ID NO: 3068358 - RNA, 14 nt, Human
ugggcucccuuccc

SEQ ID NO: 3068359 - RNA, 21 nt, Human
ugggcucccuucccaccucuc

SEQ ID NO: 3068360 - RNA, 22 nt, Human
agggcuguuauaaucuuucaca

SEQ ID NO: 3068361 - RNA, 20 nt, Human
agggcuccagacacaugucc

SEQ ID NO: 3068362 - RNA, 15 nt, Human
agggcuccagacaca

SEQ ID NO: 3068363 - RNA, 14 nt, Human
agggcccagagagg

SEQ ID NO: 3068364 - RNA, 17 nt, Human
agggagggcuccagaca

SEQ ID NO: 3068365 - RNA, 19 nt, Human
agggagggcuccagacaca

SEQ ID NO: 3068366 - RNA, 12 nt, Human
agggagggcucc

SEQ ID NO: 3068367 - RNA, 17 nt, Human
agggagggagggcucca

SEQ ID NO: 3068368 - RNA, 22 nt, Human
agggagggcuccagacacaugu

SEQ ID NO: 3068369 - RNA, 20 nt, Human
agggaguccgaaagggacuu

SEQ ID NO: 3068370 - RNA, 20 nt, Human
agggagugaguugauagcac

SEQ ID NO: 3068371 - RNA, 20 nt, Human
agggagugacagaggcagcc

SEQ ID NO: 3068372 - RNA, 23 nt, Human
agggaguccgaaagggacuugga

SEQ ID NO: 3068373 - RNA, 13 nt, Human
agggcccagagag

SEQ ID NO: 3068374 - RNA, 12 nt, Human
agggcccagaga

SEQ ID NO: 3068375 - RNA, 21 nt, Human
aggcuuuuuuaucaugugaaa

SEQ ID NO: 3068376 - RNA, 18 nt, Human
aggcuuuuuuaucaugug

SEQ ID NO: 3068377 - RNA, 15 nt, Human
aggcuuuuuuaucau

SEQ ID NO: 3068378 - RNA, 15 nt, Human
agggaaacugccagc

SEQ ID NO: 3068379 - RNA, 14 nt, Human
agggaaacugccag

SEQ ID NO: 3068380 - RNA, 23 nt, Human
agggaaacugccagcaacgcagg

SEQ ID NO: 3068381 - RNA, 21 nt, Human
agggaaacugccagcaacgca

SEQ ID NO: 3068382 - RNA, 19 nt, Human
agggaaacugccagcaacg

SEQ ID NO: 3068383 - RNA, 16 nt, Human
agggaaacugccagca

SEQ ID NO: 3068384 - RNA, 21 nt, Human
aggcuuagucacugagacagc

SEQ ID NO: 3068385 - RNA, 22 nt, Human
aggcuuagucacugagacagcc

SEQ ID NO: 3068386 - RNA, 23 nt, Human
aggcuuagucacugagacagccc

SEQ ID NO: 3068387 - RNA, 21 nt, Human
aggcugggucgcccuggacug

SEQ ID NO: 3068388 - RNA, 20 nt, Human
aggcugggucgcccuggacu

SEQ ID NO: 3068389 - RNA, 14 nt, Human
aggcuggguucuga

SEQ ID NO: 3068390 - RNA, 17 nt, Human
aggcuggguucugaucc

SEQ ID NO: 3068391 - RNA, 18 nt, Human
aggcugggucgcccugga

SEQ ID NO: 3068392 - RNA, 15 nt, Human
aggcugggucgcccu

SEQ ID NO: 3068393 - RNA, 10 nt, Human
aggcuggguc

SEQ ID NO: 3068394 - RNA, 22 nt, Human
aggcugggggaagaagcucucu

SEQ ID NO: 3068395 - RNA, 21 nt, Human
aggcugggcuucaguggcagc

SEQ ID NO: 3068396 - RNA, 20 nt, Human
aggcugggcuucaguggcag

SEQ ID NO: 3068397 - RNA, 19 nt, Human
aggcugggcuucaguggca

SEQ ID NO: 3068398 - RNA, 18 nt, Human
aggcugggcuucaguggc

SEQ ID NO: 3068399 - RNA, 23 nt, Human
aggcugggcuucaguggcagcug

SEQ ID NO: 3068400 - RNA, 22 nt, Human
aggcugggcuucaguggcagcu

SEQ ID NO: 3068401 - RNA, 17 nt, Human
aggcugggggaagaagc

SEQ ID NO: 3068402 - RNA, 19 nt, Human
aggcugggagagccuucca

SEQ ID NO: 3068403 - RNA, 16 nt, Human
aggcugggagagccuu

SEQ ID NO: 3068404 - RNA, 20 nt, Human
ugggaacccaaguccaagca

SEQ ID NO: 3068405 - RNA, 20 nt, Human
aggcugggagagccuuccag

SEQ ID NO: 3068406 - RNA, 21 nt, Human
aggcugggagagccuuccagg

SEQ ID NO: 3068407 - RNA, 22 nt, Human
aggcugggagagccuuccaggg

SEQ ID NO: 3068408 - RNA, 21 nt, Human
aggcugggcucccuucccacc

SEQ ID NO: 3068409 - RNA, 23 nt, Human
aggcugggcucccuucccaccuc

SEQ ID NO: 3068410 - RNA, 14 nt, Human
aggcugggcuucag

SEQ ID NO: 3068411 - RNA, 14 nt, Human
aggcugggcucccu

SEQ ID NO: 3068412 - RNA, 18 nt, Human
aggcugggcucccuuccc

SEQ ID NO: 3068413 - RNA, 13 nt, Human
aggcugggcuccc

SEQ ID NO: 3068414 - RNA, 18 nt, Human
ugggaaacaaaaggauaa

SEQ ID NO: 3068415 - RNA, 21 nt, Human
uggcuuuugugcauuaucuag

SEQ ID NO: 3068416 - RNA, 17 nt, Human
uggcuucacggaagagc

SEQ ID NO: 3068417 - RNA, 20 nt, Human
uggcuucacggaagagccuu

SEQ ID NO: 3068418 - RNA, 16 nt, Human
uggcuuuugugcauua

SEQ ID NO: 3068419 - RNA, 15 nt, Human
uggcuuuugugcauu

SEQ ID NO: 3068420 - RNA, 16 nt, Human
ugggaaagcauuguaa

SEQ ID NO: 3068421 - RNA, 14 nt, Human
ugggaaagcauugu

SEQ ID NO: 3068422 - RNA, 18 nt, Human
ugggaaagcauuguaaau

SEQ ID NO: 3068423 - RNA, 17 nt, Human
ugggaaagcauuguaaa

SEQ ID NO: 3068424 - RNA, 23 nt, Human
uggcugcaaaggguaucaggugc

SEQ ID NO: 3068425 - RNA, 18 nt, Human
uggcuguuggcugggggc

SEQ ID NO: 3068426 - RNA, 16 nt, Human
uggcuguuggcugggg

SEQ ID NO: 3068427 - RNA, 14 nt, Human
uggcuucacggaag

SEQ ID NO: 3068428 - RNA, 23 nt, Human
uggcuguuggcugggggccucag

SEQ ID NO: 3068429 - RNA, 13 nt, Human
uggcucacgccug

SEQ ID NO: 3068430 - RNA, 13 nt, Human
uggcucacccagu

SEQ ID NO: 3068431 - RNA, 16 nt, Human
uggcucacccaguccu

SEQ ID NO: 3068432 - RNA, 23 nt, Human
uggcuauaggugcuacaaaaaca

SEQ ID NO: 3068433 - RNA, 17 nt, Human
aggcuccaggagcagcc

SEQ ID NO: 3068434 - RNA, 18 nt, Human
aggcuccaggagcagcca

SEQ ID NO: 3068435 - RNA, 19 nt, Human
aggcuccaggagcagccac

SEQ ID NO: 3068436 - RNA, 23 nt, Human
aggcuccaggagcagccacauuc

SEQ ID NO: 3068437 - RNA, 14 nt, Human
uggcuaaauucaug

SEQ ID NO: 3068438 - RNA, 18 nt, Human
uggcuaagcaaaauguga

SEQ ID NO: 3068439 - RNA, 19 nt, Human
uggcuaauguacugcauau

SEQ ID NO: 3068440 - RNA, 17 nt, Human
uggcuaauguacugcau

SEQ ID NO: 3068441 - RNA, 19 nt, Human
uggcuauaggugcuacaaa

SEQ ID NO: 3068442 - RNA, 15 nt, Human
uggcuauaggugcua

SEQ ID NO: 3068443 - RNA, 23 nt, Human
ugcauuugaaaauuuugauguuu

SEQ ID NO: 3068444 - RNA, 19 nt, Human
ugcauuugaaaauuuugau

SEQ ID NO: 3068445 - RNA, 22 nt, Human
agcgcccaguuggguggaugcc

SEQ ID NO: 3068446 - RNA, 14 nt, Human
agcgcccaguuggg

SEQ ID NO: 3068447 - RNA, 19 nt, Human
agcuacuaauuuuaaaaug

SEQ ID NO: 3068448 - RNA, 23 nt, Human
agcgugguggacaugcacagcua

SEQ ID NO: 3068449 - RNA, 20 nt, Human
agcgugguggacaugcacag

SEQ ID NO: 3068450 - RNA, 17 nt, Human
agcgugagccacugcac

SEQ ID NO: 3068451 - RNA, 16 nt, Human
agcgugagccacugca

SEQ ID NO: 3068452 - RNA, 21 nt, Human
ugccauauucuguuggccagu

SEQ ID NO: 3068453 - RNA, 20 nt, Human
ugccauauucuguuggccag

SEQ ID NO: 3068454 - RNA, 15 nt, Human
agcggggacagcucc

SEQ ID NO: 3068455 - RNA, 17 nt, Human
agcggggacagcuccuu

SEQ ID NO: 3068456 - RNA, 16 nt, Human
agcggggacagcuccu

SEQ ID NO: 3068457 - RNA, 15 nt, Human
agcgugagccacugc

SEQ ID NO: 3068458 - RNA, 13 nt, Human
agcgugagccacu

SEQ ID NO: 3068459 - RNA, 15 nt, Human
ugccagucaccccgg

SEQ ID NO: 3068460 - RNA, 16 nt, Human
ugccagucaccccggc

SEQ ID NO: 3068461 - RNA, 18 nt, Human
ugccagucaccccggcca

SEQ ID NO: 3068462 - RNA, 20 nt, Human
ugccagucaccccggccacc

SEQ ID NO: 3068463 - RNA, 15 nt, Human
ugccauauucuguug

SEQ ID NO: 3068464 - RNA, 17 nt, Human
ugccauauucuguuggc

SEQ ID NO: 3068465 - RNA, 16 nt, Human
ugccauauucuguugg

SEQ ID NO: 3068466 - RNA, 22 nt, Human
ugccagucaccccggccaccug

SEQ ID NO: 3068467 - RNA, 23 nt, Human
ugccagucaccccggccaccugc

SEQ ID NO: 3068468 - RNA, 15 nt, Human
ugcccaggcaggucu

SEQ ID NO: 3068469 - RNA, 14 nt, Human
ugcccacaggauca

SEQ ID NO: 3068470 - RNA, 11 nt, Human
ugcccaggccc

SEQ ID NO: 3068471 - RNA, 20 nt, Human
ugcccaggcaggucuugaac

SEQ ID NO: 3068472 - RNA, 17 nt, Human
ugcccaggcaggucuug

SEQ ID NO: 3068473 - RNA, 16 nt, Human
ugcccaggcaggucuu

SEQ ID NO: 3068474 - RNA, 22 nt, Human
ugcccaggccccugccacccug

SEQ ID NO: 3068475 - RNA, 20 nt, Human
ugcccaggccccugccaccc

SEQ ID NO: 3068476 - RNA, 12 nt, Human
ugcccaggcccc

SEQ ID NO: 3068477 - RNA, 13 nt, Human
ugcccccugugga

SEQ ID NO: 3068478 - RNA, 19 nt, Human
ugcccccuguggaugcugc

SEQ ID NO: 3068479 - RNA, 21 nt, Human
ugcccccuguggaugcugcug

SEQ ID NO: 3068480 - RNA, 14 nt, Human
agcucagggccugg

SEQ ID NO: 3068481 - RNA, 15 nt, Human
agcucagggccuggc

SEQ ID NO: 3068482 - RNA, 16 nt, Human
agcucagggccuggcu

SEQ ID NO: 3068483 - RNA, 19 nt, Human
ugccauguuggccaggcug

SEQ ID NO: 3068484 - RNA, 18 nt, Human
ugccauguuggccaggcu

SEQ ID NO: 3068485 - RNA, 17 nt, Human
agcucagggccuggcuc

SEQ ID NO: 3068486 - RNA, 17 nt, Human
ugccauguuggccaggc

SEQ ID NO: 3068487 - RNA, 20 nt, Human
ugccauguuggccaggcugg

SEQ ID NO: 3068488 - RNA, 21 nt, Human
ugccauguuggccaggcuggu

SEQ ID NO: 3068489 - RNA, 12 nt, Human
agcuacugccau

SEQ ID NO: 3068490 - RNA, 13 nt, Human
agcuacugccauc

SEQ ID NO: 3068491 - RNA, 14 nt, Human
agcuacugccaucc

SEQ ID NO: 3068492 - RNA, 16 nt, Human
agcuacugccauccug

SEQ ID NO: 3068493 - RNA, 18 nt, Human
agcuacugccauccuggc

SEQ ID NO: 3068494 - RNA, 22 nt, Human
agcuacugccauccuggcccag

SEQ ID NO: 3068495 - RNA, 16 nt, Human
agccugccucuucucu

SEQ ID NO: 3068496 - RNA, 19 nt, Human
agccugccucuucucuacu

SEQ ID NO: 3068497 - RNA, 23 nt, Human
agccugcaguuauuaacacuaac

SEQ ID NO: 3068498 - RNA, 21 nt, Human
agccugcaauuucauaugcug

SEQ ID NO: 3068499 - RNA, 19 nt, Human
agccugcaauuucauaugc

SEQ ID NO: 3068500 - RNA, 16 nt, Human
ugcaugcugucccuua

SEQ ID NO: 3068501 - RNA, 22 nt, Human
ugcauaccacuuuuguucuugg

SEQ ID NO: 3068502 - RNA, 21 nt, Human
ugcauaccacuuuuguucuug

SEQ ID NO: 3068503 - RNA, 20 nt, Human
ugcaugaaguaauaugcaca

SEQ ID NO: 3068504 - RNA, 22 nt, Human
ugcaugaaguaauaugcacaca

SEQ ID NO: 3068505 - RNA, 21 nt, Human
ugcaugaggcuaguguggugu

SEQ ID NO: 3068506 - RNA, 14 nt, Human
ugcaugcugucccu

SEQ ID NO: 3068507 - RNA, 15 nt, Human
ugcaugcugucccuu

SEQ ID NO: 3068508 - RNA, 13 nt, Human
ugcaugcuguccc

SEQ ID NO: 3068509 - RNA, 15 nt, Human
ugcauaauggucaga

SEQ ID NO: 3068510 - RNA, 20 nt, Human
ugcaggucccuaauaaagcu

SEQ ID NO: 3068511 - RNA, 19 nt, Human
ugcaggucccuaauaaagc

SEQ ID NO: 3068512 - RNA, 18 nt, Human
ugcaggucccuaauaaag

SEQ ID NO: 3068513 - RNA, 17 nt, Human
ugcaggucccuaauaaa

SEQ ID NO: 3068514 - RNA, 14 nt, Human
ugcagugagccgag

SEQ ID NO: 3068515 - RNA, 15 nt, Human
agccucagcauccug

SEQ ID NO: 3068516 - RNA, 18 nt, Human
agccugagcgacagugag

SEQ ID NO: 3068517 - RNA, 14 nt, Human
agccucagcauccu

SEQ ID NO: 3068518 - RNA, 13 nt, Human
agccucagcaucc

SEQ ID NO: 3068519 - RNA, 18 nt, Human
agccucaaccuccugggc

SEQ ID NO: 3068520 - RNA, 17 nt, Human
agccucaaccuccuggg

SEQ ID NO: 3068521 - RNA, 19 nt, Human
ugcagccucaaccuccugg

SEQ ID NO: 3068522 - RNA, 18 nt, Human
ugcagccucaaccuccug

SEQ ID NO: 3068523 - RNA, 19 nt, Human
ugcacguacacacacauac

SEQ ID NO: 3068524 - RNA, 14 nt, Human
ugcaccacugcacu

SEQ ID NO: 3068525 - RNA, 12 nt, Human
ugcacuccccug

SEQ ID NO: 3068526 - RNA, 13 nt, Human
ugcacuccccugc

SEQ ID NO: 3068527 - RNA, 18 nt, Human
ugcacaagcuccaagcuc

SEQ ID NO: 3068528 - RNA, 20 nt, Human
ugcacaagcuccaagcuccc

SEQ ID NO: 3068529 - RNA, 22 nt, Human
ugcacaagcuccaagcucccag

SEQ ID NO: 3068530 - RNA, 23 nt, Human
ugcacaagcuccaagcucccagg

SEQ ID NO: 3068531 - RNA, 15 nt, Human
ugcacaagcuccaag

SEQ ID NO: 3068532 - RNA, 16 nt, Human
ugcacaagcuccaagc

SEQ ID NO: 3068533 - RNA, 15 nt, Human
ugcacacaccagagc

SEQ ID NO: 3068534 - RNA, 22 nt, Human
ugcagacucuacagaggccaug

SEQ ID NO: 3068535 - RNA, 17 nt, Human
agcccuucuuuccacag

SEQ ID NO: 3068536 - RNA, 15 nt, Human
ugcacuccccugcug

SEQ ID NO: 3068537 - RNA, 20 nt, Human
ugcacuuuguucuggcucuu

SEQ ID NO: 3068538 - RNA, 18 nt, Human
ugcagacucuacagaggc

SEQ ID NO: 3068539 - RNA, 20 nt, Human
ugcagacucuacagaggcca

SEQ ID NO: 3068540 - RNA, 19 nt, Human
ugcagacucuacagaggcc

SEQ ID NO: 3068541 - RNA, 17 nt, Human
agccuaggugacagagu

SEQ ID NO: 3068542 - RNA, 15 nt, Human
agccuaggugacaga

SEQ ID NO: 3068543 - RNA, 15 nt, Human
agccucaaccuccug

SEQ ID NO: 3068544 - RNA, 18 nt, Human
agcccuucuuuccacaga

SEQ ID NO: 3068545 - RNA, 19 nt, Human
agcccuucuuuccacagaa

SEQ ID NO: 3068546 - RNA, 22 nt, Human
aggaauuuuauuuuuuucugaa

SEQ ID NO: 3068547 - RNA, 11 nt, Human
ugcugccaucc

SEQ ID NO: 3068548 - RNA, 15 nt, Human
ugcugccauccaggu

SEQ ID NO: 3068549 - RNA, 14 nt, Human
ugcugccauccagg

SEQ ID NO: 3068550 - RNA, 13 nt, Human
ugcugccauccag

SEQ ID NO: 3068551 - RNA, 12 nt, Human
ugcugccaucca

SEQ ID NO: 3068552 - RNA, 22 nt, Human
ugcugccauccagguucagcuu

SEQ ID NO: 3068553 - RNA, 21 nt, Human
ugcugccauccagguucagcu

SEQ ID NO: 3068554 - RNA, 20 nt, Human
aggaauuuuauuuuuuucug

SEQ ID NO: 3068555 - RNA, 19 nt, Human
aggaauugacccacaagaa

SEQ ID NO: 3068556 - RNA, 16 nt, Human
aggaagcucagggccu

SEQ ID NO: 3068557 - RNA, 20 nt, Human
aggaauccagacccggcugc

SEQ ID NO: 3068558 - RNA, 23 nt, Human
aggaauccagacccggcugcgug

SEQ ID NO: 3068559 - RNA, 15 nt, Human
aggaagacuuuggaa

SEQ ID NO: 3068560 - RNA, 14 nt, Human
aggaagagaaaaaa

SEQ ID NO: 3068561 - RNA, 18 nt, Human
aggaagcucagggccugg

SEQ ID NO: 3068562 - RNA, 22 nt, Human
aggaagcucagggccuggcuca

SEQ ID NO: 3068563 - RNA, 17 nt, Human
aggaagcucagggccug

SEQ ID NO: 3068564 - RNA, 17 nt, Human
ugcugacuguuuucucu

SEQ ID NO: 3068565 - RNA, 18 nt, Human
ugcucugcauguuacaua

SEQ ID NO: 3068566 - RNA, 15 nt, Human
ugcucugcauguuac

SEQ ID NO: 3068567 - RNA, 17 nt, Human
ugcucuggacaggcaug

SEQ ID NO: 3068568 - RNA, 22 nt, Human
ugcucugaucauccacugugcc

SEQ ID NO: 3068569 - RNA, 19 nt, Human
ugcucugaucauccacugu

SEQ ID NO: 3068570 - RNA, 22 nt, Human
aggaaaggcuccaggagcagcc

SEQ ID NO: 3068571 - RNA, 13 nt, Human
aggaaauauuuau

SEQ ID NO: 3068572 - RNA, 14 nt, Human
aggaaauauuuauu

SEQ ID NO: 3068573 - RNA, 18 nt, Human
aggaaauauuuauuuuaa

SEQ ID NO: 3068574 - RNA, 16 nt, Human
aggaaaggcuccagga

SEQ ID NO: 3068575 - RNA, 18 nt, Human
aggaaaggcuccaggagc

SEQ ID NO: 3068576 - RNA, 20 nt, Human
aggaaaggcuccaggagcag

SEQ ID NO: 3068577 - RNA, 21 nt, Human
ugcugacuguuuucucuugag

SEQ ID NO: 3068578 - RNA, 24 nt, Human
ugcugacuguuuucucuugagagg

SEQ ID NO: 3068579 - RNA, 16 nt, Human
ugcugacuguuuucuc

SEQ ID NO: 3068580 - RNA, 19 nt, Human
aggaaagcaaaggagauug

SEQ ID NO: 3068581 - RNA, 23 nt, Human
aggaaaccaguuaggucucaaua

SEQ ID NO: 3068582 - RNA, 21 nt, Human
aggaaacccagcucuggucca

SEQ ID NO: 3068583 - RNA, 18 nt, Human
aggaaacccagcucuggu

SEQ ID NO: 3068584 - RNA, 20 nt, Human
aggaaacccagcucuggucc

SEQ ID NO: 3068585 - RNA, 16 nt, Human
aggaaacccagcucug

SEQ ID NO: 3068586 - RNA, 17 nt, Human
aggaaacccagcucugg

SEQ ID NO: 3068587 - RNA, 15 nt, Human
aggaaacccagcucu

SEQ ID NO: 3068588 - RNA, 12 nt, Human
agcuuugaaaau

SEQ ID NO: 3068589 - RNA, 16 nt, Human
agcuuugaaaauucag

SEQ ID NO: 3068590 - RNA, 18 nt, Human
agcuuugaaaauucagug

SEQ ID NO: 3068591 - RNA, 19 nt, Human
agcuuugaaaauucagugg

SEQ ID NO: 3068592 - RNA, 16 nt, Human
aggaaagaggcucugg

SEQ ID NO: 3068593 - RNA, 17 nt, Human
aggaaagcaaaggagau

SEQ ID NO: 3068594 - RNA, 14 nt, Human
ugcuaguaauugga

SEQ ID NO: 3068595 - RNA, 16 nt, Human
ugcuaguaauuggaaa

SEQ ID NO: 3068596 - RNA, 12 nt, Human
aggaaagaggcu

SEQ ID NO: 3068597 - RNA, 13 nt, Human
aggaaagaggcuc

SEQ ID NO: 3068598 - RNA, 13 nt, Human
aggaaagagaacu

SEQ ID NO: 3068599 - RNA, 19 nt, Human
aggaaagagaacuuccaga

SEQ ID NO: 3068600 - RNA, 21 nt, Human
agcuuguaaauagcucaggug

SEQ ID NO: 3068601 - RNA, 20 nt, Human
agcuuguaaauagcucaggu

SEQ ID NO: 3068602 - RNA, 19 nt, Human
agcuuguaaauagcucagg

SEQ ID NO: 3068603 - RNA, 18 nt, Human
agcuuguaaauagcucag

SEQ ID NO: 3068604 - RNA, 21 nt, Human
agcuuauugucuagugaaacu

SEQ ID NO: 3068605 - RNA, 15 nt, Human
agcuuauuaaaacuc

SEQ ID NO: 3068606 - RNA, 20 nt, Human
agcuuauuaaaacucauuuu

SEQ ID NO: 3068607 - RNA, 20 nt, Human
ugcggacagccacggccagg

SEQ ID NO: 3068608 - RNA, 12 nt, Human
agcuuaucucag

SEQ ID NO: 3068609 - RNA, 14 nt, Human
agcuuaucucaggg

SEQ ID NO: 3068610 - RNA, 15 nt, Human
agcuuaucucagggg

SEQ ID NO: 3068611 - RNA, 20 nt, Human
ugccucucugcaggucccua

SEQ ID NO: 3068612 - RNA, 19 nt, Human
ugccucucugcaggucccu

SEQ ID NO: 3068613 - RNA, 21 nt, Human
ugccucugacacacagcucug

SEQ ID NO: 3068614 - RNA, 20 nt, Human
ugccucugacacacagcucu

SEQ ID NO: 3068615 - RNA, 18 nt, Human
ugccucucugcagguccc

SEQ ID NO: 3068616 - RNA, 16 nt, Human
ugccucucugcagguc

SEQ ID NO: 3068617 - RNA, 15 nt, Human
ugccucucucaggcc

SEQ ID NO: 3068618 - RNA, 13 nt, Human
ugccucccaucac

SEQ ID NO: 3068619 - RNA, 14 nt, Human
ugccucccaucacc

SEQ ID NO: 3068620 - RNA, 19 nt, Human
ugccucccaucacccgcua

SEQ ID NO: 3068621 - RNA, 13 nt, Human
ugccucucucagg

SEQ ID NO: 3068622 - RNA, 14 nt, Human
ugccucucucaggc

SEQ ID NO: 3068623 - RNA, 13 nt, Human
agcugccaccugc

SEQ ID NO: 3068624 - RNA, 18 nt, Human
agcugcauacaguuugca

SEQ ID NO: 3068625 - RNA, 19 nt, Human
ugcccuccaagaccuucuc

SEQ ID NO: 3068626 - RNA, 20 nt, Human
ugcccuccaagaccuucucc

SEQ ID NO: 3068627 - RNA, 22 nt, Human
ugcccuccaagaccuucuccuu

SEQ ID NO: 3068628 - RNA, 20 nt, Human
agcucugguccauagagagc

SEQ ID NO: 3068629 - RNA, 22 nt, Human
agcucugcuccucuccccagca

SEQ ID NO: 3068630 - RNA, 12 nt, Human
agcucugcuccu

SEQ ID NO: 3068631 - RNA, 12 nt, Human
agcucuguccug

SEQ ID NO: 3068632 - RNA, 17 nt, Human
agcucuucuccaggcug

SEQ ID NO: 3068633 - RNA, 18 nt, Human
agcucuucuccaggcugu

SEQ ID NO: 3068634 - RNA, 20 nt, Human
agcugaucgcuucuccccca

SEQ ID NO: 3068635 - RNA, 18 nt, Human
agcugcacccucaggcag

SEQ ID NO: 3068636 - RNA, 19 nt, Human
agcugcacccucaggcagg

SEQ ID NO: 3068637 - RNA, 20 nt, Human
agcugcacccucaggcaggu

SEQ ID NO: 3068638 - RNA, 22 nt, Human
agcugcacccucaggcaggugg

SEQ ID NO: 3068639 - RNA, 13 nt, Human
agcugcacccuca

SEQ ID NO: 3068640 - RNA, 17 nt, Human
agcugcacccucaggca

SEQ ID NO: 3068641 - RNA, 17 nt, Human
agcuggggccaggcugg

SEQ ID NO: 3068642 - RNA, 14 nt, Human
agcugggcagguug

SEQ ID NO: 3068643 - RNA, 19 nt, Human
agcugggacuacaggugug

SEQ ID NO: 3068644 - RNA, 17 nt, Human
agcugggacuacaggug

SEQ ID NO: 3068645 - RNA, 23 nt, Human
agcugggaugauuggagggggga

SEQ ID NO: 3068646 - RNA, 21 nt, Human
agcugccugggaucccucauc

SEQ ID NO: 3068647 - RNA, 13 nt, Human
agcugccugggau

SEQ ID NO: 3068648 - RNA, 19 nt, Human
agcugccugggaucccuca

SEQ ID NO: 3068649 - RNA, 13 nt, Human
agcuggaaaagua

SEQ ID NO: 3068650 - RNA, 22 nt, Human
ugccucugacacacagcucugu

SEQ ID NO: 3068651 - RNA, 20 nt, Human
agcuggggccaggcuggguc

SEQ ID NO: 3068652 - RNA, 16 nt, Human
ugccuguucagcucca

SEQ ID NO: 3068653 - RNA, 15 nt, Human
ugccuguucagcucc

SEQ ID NO: 3068654 - RNA, 17 nt, Human
ugcggacagccacggcc

SEQ ID NO: 3068655 - RNA, 18 nt, Human
ugcggacagccacggcca

SEQ ID NO: 3068656 - RNA, 19 nt, Human
ugcgaaaggaugaaaguga

SEQ ID NO: 3068657 - RNA, 13 nt, Human
ugcgaaaggauga

SEQ ID NO: 3068658 - RNA, 13 nt, Human
ugagcuacaaaug

SEQ ID NO: 3068659 - RNA, 14 nt, Human
ugagcuacaaaugc

SEQ ID NO: 3068660 - RNA, 14 nt, Human
ugagcuaggaauug

SEQ ID NO: 3068661 - RNA, 16 nt, Human
ugagcuacaaaugcau

SEQ ID NO: 3068662 - RNA, 19 nt, Human
ugaggaagccgcuggggcc

SEQ ID NO: 3068663 - RNA, 21 nt, Human
ugaggaagccgcuggggccag

SEQ ID NO: 3068664 - RNA, 22 nt, Human
ugaggaagcaaaagcaucuaug

SEQ ID NO: 3068665 - RNA, 14 nt, Human
ugaggaagccgcug

SEQ ID NO: 3068666 - RNA, 17 nt, Human
ugaggaagccgcugggg

SEQ ID NO: 3068667 - RNA, 18 nt, Human
ugaggaagccgcuggggc

SEQ ID NO: 3068668 - RNA, 15 nt, Human
ugaggaagcaaaagc

SEQ ID NO: 3068669 - RNA, 21 nt, Human
ugaggacacuaaccacgcugg

SEQ ID NO: 3068670 - RNA, 15 nt, Human
ugaggacacugauau

SEQ ID NO: 3068671 - RNA, 23 nt, Human
ugaggcauuuguuugaacugaua

SEQ ID NO: 3068672 - RNA, 12 nt, Human
ugaggccagaga

SEQ ID NO: 3068673 - RNA, 22 nt, Human
ugaggaauccagacccggcugc

SEQ ID NO: 3068674 - RNA, 21 nt, Human
ugaggaauccagacccggcug

SEQ ID NO: 3068675 - RNA, 23 nt, Human
ugaggcccagagggccugcaagg

SEQ ID NO: 3068676 - RNA, 21 nt, Human
ugaggcccagagggccugcaa

SEQ ID NO: 3068677 - RNA, 22 nt, Human
ugaggcccagagggccugcaag

SEQ ID NO: 3068678 - RNA, 15 nt, Human
ugaggcccagagggc

SEQ ID NO: 3068679 - RNA, 17 nt, Human
ugaggcccagagggccu

SEQ ID NO: 3068680 - RNA, 18 nt, Human
ugaggcccagagggccug

SEQ ID NO: 3068681 - RNA, 20 nt, Human
ugaggcccagagggccugca

SEQ ID NO: 3068682 - RNA, 20 nt, Human
ugaggccagagacacaagcc

SEQ ID NO: 3068683 - RNA, 14 nt, Human
ugaggccagagaca

SEQ ID NO: 3068684 - RNA, 16 nt, Human
ugaggccagagacaca

SEQ ID NO: 3068685 - RNA, 12 nt, Human
ugaggcccagag

SEQ ID NO: 3068686 - RNA, 13 nt, Human
ugaggcccagagg

SEQ ID NO: 3068687 - RNA, 20 nt, Human
ugaggguugggcugguguca

SEQ ID NO: 3068688 - RNA, 17 nt, Human
ugagguacugagaguga

SEQ ID NO: 3068689 - RNA, 13 nt, Human
ugaggucagagcc

SEQ ID NO: 3068690 - RNA, 22 nt, Human
ugagguacugagagugaacaaa

SEQ ID NO: 3068691 - RNA, 16 nt, Human
ugaggucagagccugc

SEQ ID NO: 3068692 - RNA, 14 nt, Human
ugaggucagagccu

SEQ ID NO: 3068693 - RNA, 18 nt, Human
agcagagaccaucccuga

SEQ ID NO: 3068694 - RNA, 19 nt, Human
agcagagaccaucccugaa

SEQ ID NO: 3068695 - RNA, 17 nt, Human
agcagagaccaucccug

SEQ ID NO: 3068696 - RNA, 17 nt, Human
ugaggucagagccugca

SEQ ID NO: 3068697 - RNA, 20 nt, Human
agcagagcaccuuagacagu

SEQ ID NO: 3068698 - RNA, 20 nt, Human
agcagagaccaucccugaag

SEQ ID NO: 3068699 - RNA, 21 nt, Human
agcagauggaaugcuguguua

SEQ ID NO: 3068700 - RNA, 19 nt, Human
agcagauggagaccccuug

SEQ ID NO: 3068701 - RNA, 17 nt, Human
agcagaggaaggagagg

SEQ ID NO: 3068702 - RNA, 13 nt, Human
ugaggggccucuu

SEQ ID NO: 3068703 - RNA, 12 nt, Human
ugaggggccucu

SEQ ID NO: 3068704 - RNA, 20 nt, Human
ugaggcccuucucuccagcc

SEQ ID NO: 3068705 - RNA, 22 nt, Human
ugaggcccuucucuccagcccc

SEQ ID NO: 3068706 - RNA, 23 nt, Human
ugaggcccuucucuccagccccu

SEQ ID NO: 3068707 - RNA, 24 nt, Human
ugaggcccuucucuccagccccug

SEQ ID NO: 3068708 - RNA, 18 nt, Human
ugaggcccuucucuccag

SEQ ID NO: 3068709 - RNA, 19 nt, Human
ugaggcccuucucuccagc

SEQ ID NO: 3068710 - RNA, 16 nt, Human
ugaggcccuucucucc

SEQ ID NO: 3068711 - RNA, 19 nt, Human
ugagggauacccaucccau

SEQ ID NO: 3068712 - RNA, 19 nt, Human
agcagaaaugccuuacccu

SEQ ID NO: 3068713 - RNA, 13 nt, Human
agcagaaaugccu

SEQ ID NO: 3068714 - RNA, 12 nt, Human
agcagaaaugcc

SEQ ID NO: 3068715 - RNA, 14 nt, Human
agcagaacagugau

SEQ ID NO: 3068716 - RNA, 23 nt, Human
agcacuuugggaggccaaggugg

SEQ ID NO: 3068717 - RNA, 22 nt, Human
agcacuuugggaggccaaggug

SEQ ID NO: 3068718 - RNA, 15 nt, Human
agcacgauuucuguu

SEQ ID NO: 3068719 - RNA, 14 nt, Human
agcacgauuucugu

SEQ ID NO: 3068720 - RNA, 16 nt, Human
agcacgauuucuguuu

SEQ ID NO: 3068721 - RNA, 23 nt, Human
agcaccuuagacagucccugcca

SEQ ID NO: 3068722 - RNA, 13 nt, Human
agcacgauuucug

SEQ ID NO: 3068723 - RNA, 19 nt, Human
agcaccuuagacagucccu

SEQ ID NO: 3068724 - RNA, 20 nt, Human
agcaccuuagacagucccug

SEQ ID NO: 3068725 - RNA, 21 nt, Human
agcaccuuagacagucccugc

SEQ ID NO: 3068726 - RNA, 22 nt, Human
agcaccuuagacagucccugcc

SEQ ID NO: 3068727 - RNA, 19 nt, Human
ugagccuugaacuuugacc

SEQ ID NO: 3068728 - RNA, 18 nt, Human
ugagccuugaacuuugac

SEQ ID NO: 3068729 - RNA, 17 nt, Human
ugagccuugaacuuuga

SEQ ID NO: 3068730 - RNA, 15 nt, Human
ugagccuugaacuuu

SEQ ID NO: 3068731 - RNA, 13 nt, Human
ugagcgacaguga

SEQ ID NO: 3068732 - RNA, 14 nt, Human
ugagcgacagugag

SEQ ID NO: 3068733 - RNA, 16 nt, Human
ugagcgacagugagac

SEQ ID NO: 3068734 - RNA, 20 nt, Human
ugagcgacagugagacucug

SEQ ID NO: 3068735 - RNA, 19 nt, Human
ugagccugggaggucaagg

SEQ ID NO: 3068736 - RNA, 22 nt, Human
ugagccugggaggucaaggcug

SEQ ID NO: 3068737 - RNA, 14 nt, Human
ugagccuugaacuu

SEQ ID NO: 3068738 - RNA, 11 nt, Human
ugagccuggca

SEQ ID NO: 3068739 - RNA, 16 nt, Human
ugagccuggcaagaau

SEQ ID NO: 3068740 - RNA, 14 nt, Human
ugagccugggaggu

SEQ ID NO: 3068741 - RNA, 21 nt, Human
agcagagaaugaaagggccca

SEQ ID NO: 3068742 - RNA, 22 nt, Human
agcagaccauuggggcucccag

SEQ ID NO: 3068743 - RNA, 23 nt, Human
agcagaccauuggggcucccagc

SEQ ID NO: 3068744 - RNA, 21 nt, Human
agcagagaauucucuuaucca

SEQ ID NO: 3068745 - RNA, 14 nt, Human
agcagagaauucuc

SEQ ID NO: 3068746 - RNA, 23 nt, Human
agcagagaaugaaagggcccaga

SEQ ID NO: 3068747 - RNA, 22 nt, Human
agcagagaaugaaagggcccag

SEQ ID NO: 3068748 - RNA, 15 nt, Human
agcagagaccauccc

SEQ ID NO: 3068749 - RNA, 16 nt, Human
agcagagaccaucccu

SEQ ID NO: 3068750 - RNA, 10 nt, Human
ugagccuggc

SEQ ID NO: 3068751 - RNA, 17 nt, Human
ugagccagauuucacuc

SEQ ID NO: 3068752 - RNA, 22 nt, Human
ugagccagauuucacucuccuu

SEQ ID NO: 3068753 - RNA, 21 nt, Human
ugagccagauuucacucuccu

SEQ ID NO: 3068754 - RNA, 13 nt, Human
agcaagugagagc

SEQ ID NO: 3068755 - RNA, 20 nt, Human
agcaagugagacccugucuc

SEQ ID NO: 3068756 - RNA, 14 nt, Human
agcaagugagagcu

SEQ ID NO: 3068757 - RNA, 18 nt, Human
agcaagugagagcugggu

SEQ ID NO: 3068758 - RNA, 22 nt, Human
agcaagugagagcuggguguca

SEQ ID NO: 3068759 - RNA, 13 nt, Human
agcacaugccucu

SEQ ID NO: 3068760 - RNA, 14 nt, Human
agcacaugccucuc

SEQ ID NO: 3068761 - RNA, 22 nt, Human
agcaccaaaagcuuaccaaggg

SEQ ID NO: 3068762 - RNA, 16 nt, Human
agcaccaaucaugaau

SEQ ID NO: 3068763 - RNA, 16 nt, Human
agcacagcuucauuuc

SEQ ID NO: 3068764 - RNA, 22 nt, Human
agcacagccucuuagaugcagu

SEQ ID NO: 3068765 - RNA, 15 nt, Human
agcacagugaucaag

SEQ ID NO: 3068766 - RNA, 15 nt, Human
ugagcaauccugcaa

SEQ ID NO: 3068767 - RNA, 14 nt, Human
agcaacgcaggccc

SEQ ID NO: 3068768 - RNA, 23 nt, Human
ugagcacuaaggugugcucugau

SEQ ID NO: 3068769 - RNA, 22 nt, Human
ugagcacuaaggugugcucuga

SEQ ID NO: 3068770 - RNA, 21 nt, Human
ugagcacuaaggugugcucug

SEQ ID NO: 3068771 - RNA, 20 nt, Human
ugagcacuaaggugugcucu

SEQ ID NO: 3068772 - RNA, 14 nt, Human
ugagccagauuuca

SEQ ID NO: 3068773 - RNA, 16 nt, Human
ugagccagauuucacu

SEQ ID NO: 3068774 - RNA, 13 nt, Human
ugagccagauuuc

SEQ ID NO: 3068775 - RNA, 23 nt, Human
ugagccacugcaccgggccacag

SEQ ID NO: 3068776 - RNA, 18 nt, Human
ugagccacugcaccgggc

SEQ ID NO: 3068777 - RNA, 21 nt, Human
ugagccacugcaccgggccac

SEQ ID NO: 3068778 - RNA, 21 nt, Human
ugagcaucaggccaggcccuc

SEQ ID NO: 3068779 - RNA, 22 nt, Human
ugagcaucaggccaggcccucu

SEQ ID NO: 3068780 - RNA, 24 nt, Human
ugagcaucaggccaggcccucugc

SEQ ID NO: 3068781 - RNA, 17 nt, Human
agauuuucagaaaauau

SEQ ID NO: 3068782 - RNA, 12 nt, Human
agauuuucagaa

SEQ ID NO: 3068783 - RNA, 14 nt, Human
agauuuaugcauau

SEQ ID NO: 3068784 - RNA, 16 nt, Human
agauuuaccacuugug

SEQ ID NO: 3068785 - RNA, 16 nt, Human
agauugugccccugca

SEQ ID NO: 3068786 - RNA, 13 nt, Human
agauuucacucuc

SEQ ID NO: 3068787 - RNA, 14 nt, Human
agauuucacucucc

SEQ ID NO: 3068788 - RNA, 20 nt, Human
ugacuccagaauuucccaaa

SEQ ID NO: 3068789 - RNA, 23 nt, Human
ugacuccagaauuucccaaagca

SEQ ID NO: 3068790 - RNA, 15 nt, Human
ugacuguuuccauca

SEQ ID NO: 3068791 - RNA, 17 nt, Human
ugacuccagaauuuccc

SEQ ID NO: 3068792 - RNA, 19 nt, Human
ugacuccagaauuucccaa

SEQ ID NO: 3068793 - RNA, 14 nt, Human
ugaccugaggcccu

SEQ ID NO: 3068794 - RNA, 15 nt, Human
ugaccugaggcccuu

SEQ ID NO: 3068795 - RNA, 24 nt, Human
ugacuucuaaguaaaaccacagca

SEQ ID NO: 3068796 - RNA, 23 nt, Human
agauuauauauauuuuuuucuga

SEQ ID NO: 3068797 - RNA, 22 nt, Human
agauucaaugccccugaauuua

SEQ ID NO: 3068798 - RNA, 21 nt, Human
agauucaaugccccugaauuu

SEQ ID NO: 3068799 - RNA, 21 nt, Human
agaucauugugaaauuauuca

SEQ ID NO: 3068800 - RNA, 12 nt, Human
agaucauuguga

SEQ ID NO: 3068801 - RNA, 14 nt, Human
agauccuggaaauc

SEQ ID NO: 3068802 - RNA, 19 nt, Human
agaugaugaugaucuuuaa

SEQ ID NO: 3068803 - RNA, 18 nt, Human
agauguguucacaaugga

SEQ ID NO: 3068804 - RNA, 15 nt, Human
agauguguucacaau

SEQ ID NO: 3068805 - RNA, 13 nt, Human
ugaccucugccug

SEQ ID NO: 3068806 - RNA, 14 nt, Human
ugaccucugccuga

SEQ ID NO: 3068807 - RNA, 12 nt, Human
ugaccugaggcc

SEQ ID NO: 3068808 - RNA, 18 nt, Human
agaugcuucucacugcca

SEQ ID NO: 3068809 - RNA, 16 nt, Human
agaugcuucucacugc

SEQ ID NO: 3068810 - RNA, 23 nt, Human
agaugcuagaacucccuuucaac

SEQ ID NO: 3068811 - RNA, 22 nt, Human
agaugcuagaacucccuuucaa

SEQ ID NO: 3068812 - RNA, 21 nt, Human
agaggcgcaugaauuugugaa

SEQ ID NO: 3068813 - RNA, 22 nt, Human
agagggagggagggcuccagac

SEQ ID NO: 3068814 - RNA, 21 nt, Human
agagggagggagggcuccaga

SEQ ID NO: 3068815 - RNA, 20 nt, Human
agagggagggagggcuccag

SEQ ID NO: 3068816 - RNA, 18 nt, Human
ugaagauguagaggagaa

SEQ ID NO: 3068817 - RNA, 17 nt, Human
ugaagauguagaggaga

SEQ ID NO: 3068818 - RNA, 12 nt, Human
ucuuuguaauga

SEQ ID NO: 3068819 - RNA, 14 nt, Human
ucuuuggucuacac

SEQ ID NO: 3068820 - RNA, 21 nt, Human
ucuuuggucuacacugugcug

SEQ ID NO: 3068821 - RNA, 15 nt, Human
ucuuuguaaugaaaa

SEQ ID NO: 3068822 - RNA, 13 nt, Human
ucuuuguaaugaa

SEQ ID NO: 3068823 - RNA, 22 nt, Human
ugaacuuguaaaggaauuuaaa

SEQ ID NO: 3068824 - RNA, 11 nt, Human
ugaacuuugac

SEQ ID NO: 3068825 - RNA, 11 nt, Human
ugaagacaaug

SEQ ID NO: 3068826 - RNA, 17 nt, Human
ugaagacaaugacuuac

SEQ ID NO: 3068827 - RNA, 13 nt, Human
ugaagacaaugac

SEQ ID NO: 3068828 - RNA, 16 nt, Human
ugaacuuugaccucug

SEQ ID NO: 3068829 - RNA, 14 nt, Human
ugaagaagauggua

SEQ ID NO: 3068830 - RNA, 20 nt, Human
ugaagaagcaccaaucauga

SEQ ID NO: 3068831 - RNA, 18 nt, Human
agaggcaacugcauuggc

SEQ ID NO: 3068832 - RNA, 11 nt, Human
agaggaaauca

SEQ ID NO: 3068833 - RNA, 12 nt, Human
agaggaaaucac

SEQ ID NO: 3068834 - RNA, 12 nt, Human
agaggaaagcaa

SEQ ID NO: 3068835 - RNA, 16 nt, Human
agaggaaagcaaagga

SEQ ID NO: 3068836 - RNA, 18 nt, Human
agaggaaagcaaaggaga

SEQ ID NO: 3068837 - RNA, 19 nt, Human
agaggaaagcaaaggagau

SEQ ID NO: 3068838 - RNA, 19 nt, Human
agagcugggugucaagagg

SEQ ID NO: 3068839 - RNA, 18 nt, Human
ugaagguggaaauaaacu

SEQ ID NO: 3068840 - RNA, 19 nt, Human
ugaauggacuuugcacacu

SEQ ID NO: 3068841 - RNA, 16 nt, Human
agagugagacucuguc

SEQ ID NO: 3068842 - RNA, 15 nt, Human
agagugagacucugu

SEQ ID NO: 3068843 - RNA, 18 nt, Human
agagucuauuuacggaac

SEQ ID NO: 3068844 - RNA, 22 nt, Human
agagugaacaaauuuacagaga

SEQ ID NO: 3068845 - RNA, 22 nt, Human
agagucucacuguugcccaggc

SEQ ID NO: 3068846 - RNA, 14 nt, Human
agagugaacaaauu

SEQ ID NO: 3068847 - RNA, 20 nt, Human
agagucucacuguugcccag

SEQ ID NO: 3068848 - RNA, 15 nt, Human
ugaaugucaguguga

SEQ ID NO: 3068849 - RNA, 18 nt, Human
ugaaugucagugugacug

SEQ ID NO: 3068850 - RNA, 14 nt, Human
ugaaugucagugug

SEQ ID NO: 3068851 - RNA, 19 nt, Human
agauaaucagugugucuaa

SEQ ID NO: 3068852 - RNA, 19 nt, Human
agagugagacucugucuca

SEQ ID NO: 3068853 - RNA, 19 nt, Human
agauaaggguaucugguga

SEQ ID NO: 3068854 - RNA, 17 nt, Human
agauaaggguaucuggu

SEQ ID NO: 3068855 - RNA, 21 nt, Human
agaucaaccccuucgcuccug

SEQ ID NO: 3068856 - RNA, 19 nt, Human
agaucaaccccuucgcucc

SEQ ID NO: 3068857 - RNA, 14 nt, Human
agaucaaccccuuc

SEQ ID NO: 3068858 - RNA, 19 nt, Human
agauacaggaaaagcugcu

SEQ ID NO: 3068859 - RNA, 22 nt, Human
agauauuuugcuuugugauuuu

SEQ ID NO: 3068860 - RNA, 18 nt, Human
ucuggauuauauuaugaa

SEQ ID NO: 3068861 - RNA, 12 nt, Human
ucuggauuauau

SEQ ID NO: 3068862 - RNA, 14 nt, Human
ucuggcagcucaga

SEQ ID NO: 3068863 - RNA, 15 nt, Human
ucuggcagcucagag

SEQ ID NO: 3068864 - RNA, 23 nt, Human
ucugcuuuuuaaagaaugcucuu

SEQ ID NO: 3068865 - RNA, 18 nt, Human
ucuggagguacgaaaaga

SEQ ID NO: 3068866 - RNA, 15 nt, Human
agaagcggcuggcag

SEQ ID NO: 3068867 - RNA, 16 nt, Human
agaagcggcuggcagc

SEQ ID NO: 3068868 - RNA, 16 nt, Human
ucugcucacauaucug

SEQ ID NO: 3068869 - RNA, 14 nt, Human
ucugcccuccaaga

SEQ ID NO: 3068870 - RNA, 23 nt, Human
ucugccgcagcccugcagagggc

SEQ ID NO: 3068871 - RNA, 21 nt, Human
agaagaacugaaaucauacuu

SEQ ID NO: 3068872 - RNA, 22 nt, Human
ucugcacuccccugcugggugu

SEQ ID NO: 3068873 - RNA, 21 nt, Human
ucugauucccaagcucugcuc

SEQ ID NO: 3068874 - RNA, 20 nt, Human
ucugauucccaagcucugcu

SEQ ID NO: 3068875 - RNA, 19 nt, Human
ucugauucccaagcucugc

SEQ ID NO: 3068876 - RNA, 18 nt, Human
ucugauucccaagcucug

SEQ ID NO: 3068877 - RNA, 13 nt, Human
ucugauacagaaa

SEQ ID NO: 3068878 - RNA, 16 nt, Human
ucugauacagaaaagu

SEQ ID NO: 3068879 - RNA, 17 nt, Human
ucugauacagaaaaguu

SEQ ID NO: 3068880 - RNA, 23 nt, Human
ucugagaaagacuauucaaacag

SEQ ID NO: 3068881 - RNA, 22 nt, Human
ucugagaaagacuauucaaaca

SEQ ID NO: 3068882 - RNA, 21 nt, Human
ucugagaaagacuauucaaac

SEQ ID NO: 3068883 - RNA, 19 nt, Human
ucugacccugcuucaaaua

SEQ ID NO: 3068884 - RNA, 23 nt, Human
agaaagacuauucaaacagucuc

SEQ ID NO: 3068885 - RNA, 20 nt, Human
agaaagacuauucaaacagu

SEQ ID NO: 3068886 - RNA, 18 nt, Human
agaaagacuauucaaaca

SEQ ID NO: 3068887 - RNA, 19 nt, Human
agaaagacuauucaaacag

SEQ ID NO: 3068888 - RNA, 21 nt, Human
ucugacuguuuccaucaaggg

SEQ ID NO: 3068889 - RNA, 20 nt, Human
ucugagaaagacuauucaaa

SEQ ID NO: 3068890 - RNA, 19 nt, Human
ucugagaaagacuauucaa

SEQ ID NO: 3068891 - RNA, 15 nt, Human
ucugagaaagacuau

SEQ ID NO: 3068892 - RNA, 14 nt, Human
ucugagaaagacua

SEQ ID NO: 3068893 - RNA, 16 nt, Human
agaaauguacagcaag

SEQ ID NO: 3068894 - RNA, 17 nt, Human
agaaauguacagcaagg

SEQ ID NO: 3068895 - RNA, 11 nt, Human
agaaauguguu

SEQ ID NO: 3068896 - RNA, 14 nt, Human
agaacucccuuuca

SEQ ID NO: 3068897 - RNA, 22 nt, Human
acuuuuuuuuuuuaagaguaaa

SEQ ID NO: 3068898 - RNA, 14 nt, Human
acuuuuggcauuuu

SEQ ID NO: 3068899 - RNA, 14 nt, Human
acuuuuggaaggua

SEQ ID NO: 3068900 - RNA, 22 nt, Human
acuuuuuauggcacuaguauuu

SEQ ID NO: 3068901 - RNA, 17 nt, Human
acuuuggaaagacuuuu

SEQ ID NO: 3068902 - RNA, 13 nt, Human
acuuuggaaagac

SEQ ID NO: 3068903 - RNA, 14 nt, Human
acuuuggaaagacu

SEQ ID NO: 3068904 - RNA, 12 nt, Human
acuuuggaaaga

SEQ ID NO: 3068905 - RNA, 18 nt, Human
acuuuaccuuuuuuauac

SEQ ID NO: 3068906 - RNA, 22 nt, Human
acuuuaccuuuuuuauacauaa

SEQ ID NO: 3068907 - RNA, 19 nt, Human
acuuuaccuuuuuuauaca

SEQ ID NO: 3068908 - RNA, 19 nt, Human
acuuugaccucugcagcaa

SEQ ID NO: 3068909 - RNA, 23 nt, Human
acuuugaccucugcagcaauaaa

SEQ ID NO: 3068910 - RNA, 11 nt, Human
ucucccuugga

SEQ ID NO: 3068911 - RNA, 18 nt, Human
ucucccuuggauuguccc

SEQ ID NO: 3068912 - RNA, 15 nt, Human
ucucccagucauuua

SEQ ID NO: 3068913 - RNA, 13 nt, Human
ucuccucugcugc

SEQ ID NO: 3068914 - RNA, 14 nt, Human
ucuccucugcugcu

SEQ ID NO: 3068915 - RNA, 19 nt, Human
ucucccuuggauugucccc

SEQ ID NO: 3068916 - RNA, 12 nt, Human
ucuccucugcug

SEQ ID NO: 3068917 - RNA, 15 nt, Human
ucuccucucucugua

SEQ ID NO: 3068918 - RNA, 15 nt, Human
agaaacauuugguaa

SEQ ID NO: 3068919 - RNA, 14 nt, Human
agaaagaaaaucag

SEQ ID NO: 3068920 - RNA, 13 nt, Human
agaaacuggaacu

SEQ ID NO: 3068921 - RNA, 18 nt, Human
agaaaaaggaugcacaga

SEQ ID NO: 3068922 - RNA, 16 nt, Human
agaaaacaaggaugaa

SEQ ID NO: 3068923 - RNA, 19 nt, Human
agaaaacaaggaugaauua

SEQ ID NO: 3068924 - RNA, 22 nt, Human
ucucuuuaaugucacaggcagg

SEQ ID NO: 3068925 - RNA, 13 nt, Human
ucucuugagccug

SEQ ID NO: 3068926 - RNA, 14 nt, Human
ucucuugagccugg

SEQ ID NO: 3068927 - RNA, 15 nt, Human
ucucuugagccuggg

SEQ ID NO: 3068928 - RNA, 14 nt, Human
ucucuugagagggu

SEQ ID NO: 3068929 - RNA, 13 nt, Human
ucucuucuuuaaa

SEQ ID NO: 3068930 - RNA, 12 nt, Human
ucucuucuuuaa

SEQ ID NO: 3068931 - RNA, 13 nt, Human
ucucuggccuucg

SEQ ID NO: 3068932 - RNA, 16 nt, Human
ucucuggccuucggcc

SEQ ID NO: 3068933 - RNA, 17 nt, Human
ucucuggccuucggccu

SEQ ID NO: 3068934 - RNA, 13 nt, Human
ucucuccagcccc

SEQ ID NO: 3068935 - RNA, 14 nt, Human
ucucuccagccccu

SEQ ID NO: 3068936 - RNA, 20 nt, Human
ucuccuucaccuuugucccc

SEQ ID NO: 3068937 - RNA, 18 nt, Human
ucuccuucaccuuugucc

SEQ ID NO: 3068938 - RNA, 22 nt, Human
ucucuccuguaccucuugagcc

SEQ ID NO: 3068939 - RNA, 20 nt, Human
ucucuccuguaccucuugag

SEQ ID NO: 3068940 - RNA, 15 nt, Human
ucucuccagccccug

SEQ ID NO: 3068941 - RNA, 17 nt, Human
ucucuccuguaccucuu

SEQ ID NO: 3068942 - RNA, 17 nt, Human
ucuuuaaaauacacacu

SEQ ID NO: 3068943 - RNA, 21 nt, Human
ucuuuaaagggauggcaagau

SEQ ID NO: 3068944 - RNA, 15 nt, Human
ucuuuacuucaugga

SEQ ID NO: 3068945 - RNA, 13 nt, Human
ucuuuccugaggc

SEQ ID NO: 3068946 - RNA, 14 nt, Human
ucuuuccugaggcu

SEQ ID NO: 3068947 - RNA, 15 nt, Human
ucuuuccugaggcug

SEQ ID NO: 3068948 - RNA, 12 nt, Human
ucuuuccugagg

SEQ ID NO: 3068949 - RNA, 14 nt, Human
agacuccugcaggc

SEQ ID NO: 3068950 - RNA, 15 nt, Human
agacuccugcaggca

SEQ ID NO: 3068951 - RNA, 16 nt, Human
agacuccugcaggcag

SEQ ID NO: 3068952 - RNA, 17 nt, Human
agacuccugcaggcagc

SEQ ID NO: 3068953 - RNA, 18 nt, Human
agacuccugcaggcagcc

SEQ ID NO: 3068954 - RNA, 19 nt, Human
agacuccugcaggcagcca

SEQ ID NO: 3068955 - RNA, 20 nt, Human
agacuccugcaggcagccag

SEQ ID NO: 3068956 - RNA, 21 nt, Human
agacucgcgacaaugcaaacc

SEQ ID NO: 3068957 - RNA, 17 nt, Human
agacucuacagaggcca

SEQ ID NO: 3068958 - RNA, 19 nt, Human
agacucuacagaggccaug

SEQ ID NO: 3068959 - RNA, 20 nt, Human
agacuggauaguccgucucu

SEQ ID NO: 3068960 - RNA, 21 nt, Human
agacuggauaguccgucucug

SEQ ID NO: 3068961 - RNA, 15 nt, Human
agacuggcacaguuu

SEQ ID NO: 3068962 - RNA, 14 nt, Human
agacuggcacaguu

SEQ ID NO: 3068963 - RNA, 14 nt, Human
agacuucaucccuc

SEQ ID NO: 3068964 - RNA, 17 nt, Human
agacuucaucccucugg

SEQ ID NO: 3068965 - RNA, 13 nt, Human
agagaccaucccu

SEQ ID NO: 3068966 - RNA, 14 nt, Human
agagaccaucccug

SEQ ID NO: 3068967 - RNA, 18 nt, Human
agagacacacugaagaag

SEQ ID NO: 3068968 - RNA, 20 nt, Human
agagacacacugaagaagca

SEQ ID NO: 3068969 - RNA, 15 nt, Human
agagaccaucccuga

SEQ ID NO: 3068970 - RNA, 12 nt, Human
agacuuuggaaa

SEQ ID NO: 3068971 - RNA, 14 nt, Human
agacuuuggaaaga

SEQ ID NO: 3068972 - RNA, 18 nt, Human
agagaaugaaagggccca

SEQ ID NO: 3068973 - RNA, 17 nt, Human
agagacacacugaagaa

SEQ ID NO: 3068974 - RNA, 15 nt, Human
agagaaugagagaca

SEQ ID NO: 3068975 - RNA, 16 nt, Human
ucuugcaauggcagcc

SEQ ID NO: 3068976 - RNA, 13 nt, Human
ucuugcaauggca

SEQ ID NO: 3068977 - RNA, 17 nt, Human
ucuugcaauggcagccu

SEQ ID NO: 3068978 - RNA, 20 nt, Human
ucuugaugccuggcggggug

SEQ ID NO: 3068979 - RNA, 14 nt, Human
ucuugaugccuggc

SEQ ID NO: 3068980 - RNA, 15 nt, Human
agacucauucuucug

SEQ ID NO: 3068981 - RNA, 19 nt, Human
agacuccaaagaaauguaa

SEQ ID NO: 3068982 - RNA, 16 nt, Human
agacuccaaagaaaug

SEQ ID NO: 3068983 - RNA, 17 nt, Human
agacucauucuucugua

SEQ ID NO: 3068984 - RNA, 21 nt, Human
agacuauucaaacagucucag

SEQ ID NO: 3068985 - RNA, 20 nt, Human
agacuauucaaacagucuca

SEQ ID NO: 3068986 - RNA, 18 nt, Human
agacuauucaaacagucu

SEQ ID NO: 3068987 - RNA, 18 nt, Human
agacucauucuucuguac

SEQ ID NO: 3068988 - RNA, 12 nt, Human
agacuccaaaga

SEQ ID NO: 3068989 - RNA, 14 nt, Human
agacuccaaagaaa

SEQ ID NO: 3068990 - RNA, 13 nt, Human
agacuccaaagaa

SEQ ID NO: 3068991 - RNA, 18 nt, Human
agacuaucuaaauguuga

SEQ ID NO: 3068992 - RNA, 17 nt, Human
agacuaucuaaauguug

SEQ ID NO: 3068993 - RNA, 19 nt, Human
agacuaucuaaauguugaa

SEQ ID NO: 3068994 - RNA, 16 nt, Human
agacuauucaaacagu

SEQ ID NO: 3068995 - RNA, 15 nt, Human
agacuaucuaaaugu

SEQ ID NO: 3068996 - RNA, 19 nt, Human
agacccuuguggucccacc

SEQ ID NO: 3068997 - RNA, 20 nt, Human
agacccuuguggucccaccc

SEQ ID NO: 3068998 - RNA, 22 nt, Human
agacccuuguggucccacccca

SEQ ID NO: 3068999 - RNA, 23 nt, Human
agacccuuguggucccaccccac

SEQ ID NO: 3069000 - RNA, 16 nt, Human
agacccugcccugugg

SEQ ID NO: 3069001 - RNA, 19 nt, Human
agacccugcccugugggcc

SEQ ID NO: 3069002 - RNA, 21 nt, Human
agacccugcccugugggcccc

SEQ ID NO: 3069003 - RNA, 23 nt, Human
agacccugcccugugggccccca

SEQ ID NO: 3069004 - RNA, 13 nt, Human
agacccuuguggu

SEQ ID NO: 3069005 - RNA, 15 nt, Human
agacccuuguggucc

SEQ ID NO: 3069006 - RNA, 13 nt, Human
agacccugcccug

SEQ ID NO: 3069007 - RNA, 14 nt, Human
agacccugcccugu

SEQ ID NO: 3069008 - RNA, 12 nt, Human
agacccugcccu

SEQ ID NO: 3069009 - RNA, 18 nt, Human
ucuguuuuauaauuuugu

SEQ ID NO: 3069010 - RNA, 23 nt, Human
agaauuucccaaagcagugcaug

SEQ ID NO: 3069011 - RNA, 13 nt, Human
agaauuucuagga

SEQ ID NO: 3069012 - RNA, 21 nt, Human
agaauuucuaggacugaauua

SEQ ID NO: 3069013 - RNA, 17 nt, Human
agaauuucccaaagcag

SEQ ID NO: 3069014 - RNA, 18 nt, Human
agaauuucccaaagcagu

SEQ ID NO: 3069015 - RNA, 20 nt, Human
ucuguuggccagugugacaa

SEQ ID NO: 3069016 - RNA, 19 nt, Human
ucuguuggccagugugaca

SEQ ID NO: 3069017 - RNA, 18 nt, Human
ucuguuggccagugugac

SEQ ID NO: 3069018 - RNA, 15 nt, Human
ucugugaaaggaaag

SEQ ID NO: 3069019 - RNA, 21 nt, Human
ucugugaaaggaaagagggag

SEQ ID NO: 3069020 - RNA, 15 nt, Human
ucugucauuugagca

SEQ ID NO: 3069021 - RNA, 23 nt, Human
ucugucauuugagcagggcucag

SEQ ID NO: 3069022 - RNA, 20 nt, Human
ucugucauuugagcagggcu

SEQ ID NO: 3069023 - RNA, 18 nt, Human
ucugguccauagagagca

SEQ ID NO: 3069024 - RNA, 16 nt, Human
ucuggguucacugcaa

SEQ ID NO: 3069025 - RNA, 14 nt, Human
ucuggguucacugc

SEQ ID NO: 3069026 - RNA, 11 nt, Human
ucuggggcugu

SEQ ID NO: 3069027 - RNA, 14 nt, Human
agacagucccugcc

SEQ ID NO: 3069028 - RNA, 16 nt, Human
agacagucccugccaa

SEQ ID NO: 3069029 - RNA, 17 nt, Human
agacagucccugccaau

SEQ ID NO: 3069030 - RNA, 15 nt, Human
agacagucccugcca

SEQ ID NO: 3069031 - RNA, 21 nt, Human
agacaggguuuugccauguug

SEQ ID NO: 3069032 - RNA, 15 nt, Human
agacaggaccaggga

SEQ ID NO: 3069033 - RNA, 22 nt, Human
agacaggcaagcaccuccugcc

SEQ ID NO: 3069034 - RNA, 23 nt, Human
agacaggcaagcaccuccugccu

SEQ ID NO: 3069035 - RNA, 20 nt, Human
agaauuugauaugugaacag

SEQ ID NO: 3069036 - RNA, 18 nt, Human
agaauuugauaugugaac

SEQ ID NO: 3069037 - RNA, 19 nt, Human
agaauuugauaugugaaca

SEQ ID NO: 3069038 - RNA, 17 nt, Human
agaauuugauaugugaa

SEQ ID NO: 3069039 - RNA, 15 nt, Human
ucuuaugggcugggu

SEQ ID NO: 3069040 - RNA, 16 nt, Human
ucuuaugggcuggguu

SEQ ID NO: 3069041 - RNA, 13 nt, Human
ucuuaugggcugg

SEQ ID NO: 3069042 - RNA, 14 nt, Human
ucuuaugggcuggg

SEQ ID NO: 3069043 - RNA, 22 nt, Human
ucuuauugcccacgcuggagug

SEQ ID NO: 3069044 - RNA, 18 nt, Human
ucuuauugcccacgcugg

SEQ ID NO: 3069045 - RNA, 14 nt, Human
ucuuauugcccacg

SEQ ID NO: 3069046 - RNA, 14 nt, Human
ucuuaauuaaaaga

SEQ ID NO: 3069047 - RNA, 21 nt, Human
ucuuaauuaaaagaauauuuu

SEQ ID NO: 3069048 - RNA, 18 nt, Human
ucuuaauuaaaagaauau

SEQ ID NO: 3069049 - RNA, 22 nt, Human
ucuuccaggcugggagagccuu

SEQ ID NO: 3069050 - RNA, 21 nt, Human
ucuuccaggcugggagagccu

SEQ ID NO: 3069051 - RNA, 22 nt, Human
ucuucccuacaguugaaaaaca

SEQ ID NO: 3069052 - RNA, 15 nt, Human
ucuucacaacagauu

SEQ ID NO: 3069053 - RNA, 22 nt, Human
accugaagcuaucguaaaauua

SEQ ID NO: 3069054 - RNA, 12 nt, Human
accucugcacaa

SEQ ID NO: 3069055 - RNA, 23 nt, Human
accucucccuuggauuguccccg

SEQ ID NO: 3069056 - RNA, 14 nt, Human
accucucucacucc

SEQ ID NO: 3069057 - RNA, 19 nt, Human
accucucucacuccuugaa

SEQ ID NO: 3069058 - RNA, 13 nt, Human
accucucccuugg

SEQ ID NO: 3069059 - RNA, 14 nt, Human
accucucccuugga

SEQ ID NO: 3069060 - RNA, 15 nt, Human
accucucccuuggau

SEQ ID NO: 3069061 - RNA, 14 nt, Human
accucuaaauucuu

SEQ ID NO: 3069062 - RNA, 21 nt, Human
accucuaaauucuuucauuuu

SEQ ID NO: 3069063 - RNA, 17 nt, Human
accucggugccuuccuc

SEQ ID NO: 3069064 - RNA, 18 nt, Human
accucuaaauucuuucau

SEQ ID NO: 3069065 - RNA, 22 nt, Human
ucauugaccugaggcccuucuc

SEQ ID NO: 3069066 - RNA, 21 nt, Human
ucauucuccuuguguuacuaa

SEQ ID NO: 3069067 - RNA, 19 nt, Human
ucauugaccugaggcccuu

SEQ ID NO: 3069068 - RNA, 14 nt, Human
ucaugugaaaucau

SEQ ID NO: 3069069 - RNA, 13 nt, Human
ucaugucuggcua

SEQ ID NO: 3069070 - RNA, 17 nt, Human
ucauguucuuaauucuu

SEQ ID NO: 3069071 - RNA, 11 nt, Human
ucauguucuua

SEQ ID NO: 3069072 - RNA, 23 nt, Human
ucauccacugugccaugugccag

SEQ ID NO: 3069073 - RNA, 22 nt, Human
ucaugaauuaguuuuauaugcu

SEQ ID NO: 3069074 - RNA, 21 nt, Human
ucauccacugugccaugugcc

SEQ ID NO: 3069075 - RNA, 19 nt, Human
ucauccacugugccaugug

SEQ ID NO: 3069076 - RNA, 19 nt, Human
ucaugacaaagacugagua

SEQ ID NO: 3069077 - RNA, 21 nt, Human
ucaugaauuaguuuuauaugc

SEQ ID NO: 3069078 - RNA, 19 nt, Human
ucauauuaauauauuucca

SEQ ID NO: 3069079 - RNA, 10 nt, Human
acccuuuucu

SEQ ID NO: 3069080 - RNA, 16 nt, Human
ucauauuuacuucuua

SEQ ID NO: 3069081 - RNA, 21 nt, Human
accgaacugauguaaguaaac

SEQ ID NO: 3069082 - RNA, 22 nt, Human
ucauauuuacuucuuauacauu

SEQ ID NO: 3069083 - RNA, 21 nt, Human
ucauauuuacuucuuauacau

SEQ ID NO: 3069084 - RNA, 20 nt, Human
ucauauuuacuucuuauaca

SEQ ID NO: 3069085 - RNA, 20 nt, Human
accgcagacaggaccaggga

SEQ ID NO: 3069086 - RNA, 17 nt, Human
accgccaaggcuggggg

SEQ ID NO: 3069087 - RNA, 17 nt, Human
accgcagacaggaccag

SEQ ID NO: 3069088 - RNA, 20 nt, Human
accuccgccucuuggguuca

SEQ ID NO: 3069089 - RNA, 18 nt, Human
ucauccacugugccaugu

SEQ ID NO: 3069090 - RNA, 13 nt, Human
accuagccuuaga

SEQ ID NO: 3069091 - RNA, 12 nt, Human
accuucuccuuc

SEQ ID NO: 3069092 - RNA, 13 nt, Human
accuucuccuuca

SEQ ID NO: 3069093 - RNA, 15 nt, Human
accuugaaugaugcc

SEQ ID NO: 3069094 - RNA, 14 nt, Human
accuugacagggca

SEQ ID NO: 3069095 - RNA, 15 nt, Human
accuugacagggcac

SEQ ID NO: 3069096 - RNA, 15 nt, Human
uccaccaucaagcca

SEQ ID NO: 3069097 - RNA, 17 nt, Human
accuuagacagucccug

SEQ ID NO: 3069098 - RNA, 19 nt, Human
accuuuguauucucuccug

SEQ ID NO: 3069099 - RNA, 15 nt, Human
accuuuguauucucu

SEQ ID NO: 3069100 - RNA, 23 nt, Human
accuuuguauucucuccuguacc

SEQ ID NO: 3069101 - RNA, 22 nt, Human
uccagaaguuugagaucagccu

SEQ ID NO: 3069102 - RNA, 22 nt, Human
uccagccccuggaugcagccuc

SEQ ID NO: 3069103 - RNA, 20 nt, Human
uccagccugagcgacaguga

SEQ ID NO: 3069104 - RNA, 11 nt, Human
uccagccuggg

SEQ ID NO: 3069105 - RNA, 21 nt, Human
uccagccugagcgacagugag

SEQ ID NO: 3069106 - RNA, 16 nt, Human
uccagccccuggaugc

SEQ ID NO: 3069107 - RNA, 17 nt, Human
uccagccccuggaugca

SEQ ID NO: 3069108 - RNA, 19 nt, Human
uccagccccuggaugcagc

SEQ ID NO: 3069109 - RNA, 21 nt, Human
uccagccccuggaugcagccu

SEQ ID NO: 3069110 - RNA, 15 nt, Human
uccagccccuggaug

SEQ ID NO: 3069111 - RNA, 14 nt, Human
uccagccccuggau

SEQ ID NO: 3069112 - RNA, 11 nt, Human
uccaagcuggu

SEQ ID NO: 3069113 - RNA, 12 nt, Human
uccaagcuccca

SEQ ID NO: 3069114 - RNA, 13 nt, Human
uccaagcucccag

SEQ ID NO: 3069115 - RNA, 14 nt, Human
uccaagcucccagg

SEQ ID NO: 3069116 - RNA, 15 nt, Human
uccaagcucccaggc

SEQ ID NO: 3069117 - RNA, 16 nt, Human
uccaagcucccaggca

SEQ ID NO: 3069118 - RNA, 23 nt, Human
uccaaagucucuggaauuugaaa

SEQ ID NO: 3069119 - RNA, 13 nt, Human
ucauuuuuuuuaa

SEQ ID NO: 3069120 - RNA, 21 nt, Human
ucauuugagcagggcucagcg

SEQ ID NO: 3069121 - RNA, 20 nt, Human
ucauuuuagggguagcauuu

SEQ ID NO: 3069122 - RNA, 18 nt, Human
accugcggugcuaucucc

SEQ ID NO: 3069123 - RNA, 15 nt, Human
accugaagucuuugu

SEQ ID NO: 3069124 - RNA, 22 nt, Human
accugaagucuuuguacagaca

SEQ ID NO: 3069125 - RNA, 19 nt, Human
accugcggugcuaucuccc

SEQ ID NO: 3069126 - RNA, 22 nt, Human
accugcggugcuaucuccccca

SEQ ID NO: 3069127 - RNA, 23 nt, Human
accugcggugcuaucucccccag

SEQ ID NO: 3069128 - RNA, 17 nt, Human
accuggaauauauaacc

SEQ ID NO: 3069129 - RNA, 14 nt, Human
accuggaauauaua

SEQ ID NO: 3069130 - RNA, 19 nt, Human
ucauuugagcagggcucag

SEQ ID NO: 3069131 - RNA, 19 nt, Human
acccacuugcuuuuaaaau

SEQ ID NO: 3069132 - RNA, 16 nt, Human
acccagaagaaaauag

SEQ ID NO: 3069133 - RNA, 18 nt, Human
acccaaaaggcagaagca

SEQ ID NO: 3069134 - RNA, 21 nt, Human
acccaaauguucaucaaugaa

SEQ ID NO: 3069135 - RNA, 18 nt, Human
acccagcccacuucugcc

SEQ ID NO: 3069136 - RNA, 15 nt, Human
acccagcccacuucu

SEQ ID NO: 3069137 - RNA, 17 nt, Human
acccagcccacuucugc

SEQ ID NO: 3069138 - RNA, 16 nt, Human
acccagcccacuucug

SEQ ID NO: 3069139 - RNA, 23 nt, Human
accauuuugggguacccacugcu

SEQ ID NO: 3069140 - RNA, 13 nt, Human
acccaaaaggcag

SEQ ID NO: 3069141 - RNA, 15 nt, Human
acccaaaaggcagaa

SEQ ID NO: 3069142 - RNA, 22 nt, Human
accauuuugggguacccacugc

SEQ ID NO: 3069143 - RNA, 13 nt, Human
accauucuccacc

SEQ ID NO: 3069144 - RNA, 16 nt, Human
accauucuccaccugc

SEQ ID NO: 3069145 - RNA, 18 nt, Human
accauucuccaccugcca

SEQ ID NO: 3069146 - RNA, 22 nt, Human
accaugauuaaccacuucagcu

SEQ ID NO: 3069147 - RNA, 23 nt, Human
accaugauuaaccacuucagcug

SEQ ID NO: 3069148 - RNA, 18 nt, Human
accaguguuguggauuua

SEQ ID NO: 3069149 - RNA, 21 nt, Human
accaguguuguggauuuaaca

SEQ ID NO: 3069150 - RNA, 13 nt, Human
accagugccucuc

SEQ ID NO: 3069151 - RNA, 10 nt, Human
accagugccu

SEQ ID NO: 3069152 - RNA, 18 nt, Human
accagugccucucccugc

SEQ ID NO: 3069153 - RNA, 21 nt, Human
accagugccucucccugcugc

SEQ ID NO: 3069154 - RNA, 22 nt, Human
accagugccucucccugcugcu

SEQ ID NO: 3069155 - RNA, 23 nt, Human
accagugccucucccugcugcuc

SEQ ID NO: 3069156 - RNA, 18 nt, Human
ucacuguugcccaggcug

SEQ ID NO: 3069157 - RNA, 17 nt, Human
ucacuguugcccaggcu

SEQ ID NO: 3069158 - RNA, 14 nt, Human
accagggacugagg

SEQ ID NO: 3069159 - RNA, 16 nt, Human
ucaccugccccucaac

SEQ ID NO: 3069160 - RNA, 14 nt, Human
ucacugagacagcc

SEQ ID NO: 3069161 - RNA, 15 nt, Human
ucacugagacagccc

SEQ ID NO: 3069162 - RNA, 13 nt, Human
ucacugagacagc

SEQ ID NO: 3069163 - RNA, 16 nt, Human
ucacuguugcccaggc

SEQ ID NO: 3069164 - RNA, 12 nt, Human
ucacugcagccu

SEQ ID NO: 3069165 - RNA, 23 nt, Human
accagacaccuugacagggcaca

SEQ ID NO: 3069166 - RNA, 22 nt, Human
accagacaccuugacagggcac

SEQ ID NO: 3069167 - RNA, 12 nt, Human
accacuuuuguu

SEQ ID NO: 3069168 - RNA, 17 nt, Human
accagacaccuugacag

SEQ ID NO: 3069169 - RNA, 19 nt, Human
accacuuguguuuugcaag

SEQ ID NO: 3069170 - RNA, 23 nt, Human
accacuuguguuuugcaagccag

SEQ ID NO: 3069171 - RNA, 17 nt, Human
accagagcccaccuugg

SEQ ID NO: 3069172 - RNA, 22 nt, Human
accagagcccaccuuggcucaa

SEQ ID NO: 3069173 - RNA, 19 nt, Human
accagagcccaccuuggcu

SEQ ID NO: 3069174 - RNA, 19 nt, Human
ucaccugaagacucauucu

SEQ ID NO: 3069175 - RNA, 16 nt, Human
ucaccugaagacucau

SEQ ID NO: 3069176 - RNA, 23 nt, Human
ucaccugaagacucauucuucug

SEQ ID NO: 3069177 - RNA, 14 nt, Human
accacaucuugcuc

SEQ ID NO: 3069178 - RNA, 11 nt, Human
accacagcagu

SEQ ID NO: 3069179 - RNA, 22 nt, Human
accacagacauacuaaccagca

SEQ ID NO: 3069180 - RNA, 21 nt, Human
accacagacauacuaaccagc

SEQ ID NO: 3069181 - RNA, 12 nt, Human
uauuucauuucu

SEQ ID NO: 3069182 - RNA, 13 nt, Human
accacuucagcug

SEQ ID NO: 3069183 - RNA, 14 nt, Human
accacuucagcuga

SEQ ID NO: 3069184 - RNA, 15 nt, Human
accacuucagcugac

SEQ ID NO: 3069185 - RNA, 13 nt, Human
accacugcagaag

SEQ ID NO: 3069186 - RNA, 14 nt, Human
accacugcagaaga

SEQ ID NO: 3069187 - RNA, 19 nt, Human
accacugcagaagacagua

SEQ ID NO: 3069188 - RNA, 24 nt, Human
accacaucuugcucugcugacaga

SEQ ID NO: 3069189 - RNA, 21 nt, Human
accacaucuugcucugcugac

SEQ ID NO: 3069190 - RNA, 20 nt, Human
accacaucuugcucugcuga

SEQ ID NO: 3069191 - RNA, 20 nt, Human
accacucuaucaaguauuau

SEQ ID NO: 3069192 - RNA, 20 nt, Human
accccuucgcuccugugucu

SEQ ID NO: 3069193 - RNA, 23 nt, Human
ucaggguuggccccugcccggcu

SEQ ID NO: 3069194 - RNA, 16 nt, Human
acccuuguggucccac

SEQ ID NO: 3069195 - RNA, 17 nt, Human
acccuuguggucccacc

SEQ ID NO: 3069196 - RNA, 19 nt, Human
acccuuguggucccacccc

SEQ ID NO: 3069197 - RNA, 15 nt, Human
acccuugugguccca

SEQ ID NO: 3069198 - RNA, 11 nt, Human
acccugcccug

SEQ ID NO: 3069199 - RNA, 12 nt, Human
acccugcccugu

SEQ ID NO: 3069200 - RNA, 13 nt, Human
acccugcccugug

SEQ ID NO: 3069201 - RNA, 14 nt, Human
acccucuuagaaaa

SEQ ID NO: 3069202 - RNA, 15 nt, Human
ucaggccagcugcuu

SEQ ID NO: 3069203 - RNA, 20 nt, Human
ucaggccagcugcuugggcu

SEQ ID NO: 3069204 - RNA, 11 nt, Human
ucaggccaggc

SEQ ID NO: 3069205 - RNA, 14 nt, Human
ucaggccagcugcu

SEQ ID NO: 3069206 - RNA, 19 nt, Human
accccuucgcuccuguguc

SEQ ID NO: 3069207 - RNA, 16 nt, Human
ucagguaacaggcaga

SEQ ID NO: 3069208 - RNA, 15 nt, Human
ucagguaacaggcag

SEQ ID NO: 3069209 - RNA, 13 nt, Human
ucagguaacaggc

SEQ ID NO: 3069210 - RNA, 14 nt, Human
ucagggucccuggu

SEQ ID NO: 3069211 - RNA, 18 nt, Human
ucagggucccugguggca

SEQ ID NO: 3069212 - RNA, 23 nt, Human
ucaggggugugcggccuuuggcu

SEQ ID NO: 3069213 - RNA, 13 nt, Human
ucagggucccugg

SEQ ID NO: 3069214 - RNA, 17 nt, Human
ucagcggggacagcucc

SEQ ID NO: 3069215 - RNA, 16 nt, Human
ucagcggggacagcuc

SEQ ID NO: 3069216 - RNA, 15 nt, Human
ucagcggggacagcu

SEQ ID NO: 3069217 - RNA, 20 nt, Human
ucaggccaaacucaccugcc

SEQ ID NO: 3069218 - RNA, 23 nt, Human
ucaggccaaacucaccugccccu

SEQ ID NO: 3069219 - RNA, 16 nt, Human
ucaggaagcucagggc

SEQ ID NO: 3069220 - RNA, 17 nt, Human
ucaggaagcucagggcc

SEQ ID NO: 3069221 - RNA, 19 nt, Human
ucaggaagcucagggccug

SEQ ID NO: 3069222 - RNA, 20 nt, Human
ucaggaagcucagggccugg

SEQ ID NO: 3069223 - RNA, 14 nt, Human
acccccagccugcu

SEQ ID NO: 3069224 - RNA, 15 nt, Human
acccccagccugcua

SEQ ID NO: 3069225 - RNA, 19 nt, Human
ucagccuggcuucaaauug

SEQ ID NO: 3069226 - RNA, 10 nt, Human
ucagccuggg

SEQ ID NO: 3069227 - RNA, 12 nt, Human
ucagccugggca

SEQ ID NO: 3069228 - RNA, 18 nt, Human
ucagaugcacaugagcug

SEQ ID NO: 3069229 - RNA, 13 nt, Human
ucagaagacacug

SEQ ID NO: 3069230 - RNA, 13 nt, Human
ucagaucuucugu

SEQ ID NO: 3069231 - RNA, 13 nt, Human
acccagcucuggu

SEQ ID NO: 3069232 - RNA, 15 nt, Human
acccagcucuggucc

SEQ ID NO: 3069233 - RNA, 16 nt, Human
acccaguccugcccgc

SEQ ID NO: 3069234 - RNA, 15 nt, Human
ucccagugaauucuu

SEQ ID NO: 3069235 - RNA, 19 nt, Human
ucccagugccgagaaggaa

SEQ ID NO: 3069236 - RNA, 22 nt, Human
ucccagugccgagaaggaagcc

SEQ ID NO: 3069237 - RNA, 16 nt, Human
acuacaguccucccau

SEQ ID NO: 3069238 - RNA, 14 nt, Human
ucccaucucacaca

SEQ ID NO: 3069239 - RNA, 19 nt, Human
ucccaucucacacaugagc

SEQ ID NO: 3069240 - RNA, 13 nt, Human
ucccaucucacac

SEQ ID NO: 3069241 - RNA, 15 nt, Human
ucccauaugccuggg

SEQ ID NO: 3069242 - RNA, 22 nt, Human
uccccaccgcagacaggaccag

SEQ ID NO: 3069243 - RNA, 14 nt, Human
acguuucuaaaggc

SEQ ID NO: 3069244 - RNA, 13 nt, Human
acuaaaaauacaa

SEQ ID NO: 3069245 - RNA, 12 nt, Human
acguuucuaaag

SEQ ID NO: 3069246 - RNA, 14 nt, Human
uccagcucaccagc

SEQ ID NO: 3069247 - RNA, 24 nt, Human
uccagccugggugacagagcaagu

SEQ ID NO: 3069248 - RNA, 13 nt, Human
uccagccugggug

SEQ ID NO: 3069249 - RNA, 12 nt, Human
acuaaccacgcu

SEQ ID NO: 3069250 - RNA, 16 nt, Human
acuaaccagcagaaau

SEQ ID NO: 3069251 - RNA, 13 nt, Human
acuaaccacgcug

SEQ ID NO: 3069252 - RNA, 17 nt, Human
acuaaccagcagaaaug

SEQ ID NO: 3069253 - RNA, 23 nt, Human
acuacaggugugagucaccaagc

SEQ ID NO: 3069254 - RNA, 15 nt, Human
acuacaguccuccca

SEQ ID NO: 3069255 - RNA, 22 nt, Human
acuaugaaguuuuuuuuauaca

SEQ ID NO: 3069256 - RNA, 18 nt, Human
acuauguugcccaggcag

SEQ ID NO: 3069257 - RNA, 17 nt, Human
acuauguugcccaggca

SEQ ID NO: 3069258 - RNA, 20 nt, Human
acuauguugcccaggcaggu

SEQ ID NO: 3069259 - RNA, 19 nt, Human
acuauguugcccaggcagg

SEQ ID NO: 3069260 - RNA, 23 nt, Human
acuauguugcccaggcaggucuu

SEQ ID NO: 3069261 - RNA, 23 nt, Human
uccccaggaggccagccuugacc

SEQ ID NO: 3069262 - RNA, 24 nt, Human
uccccaccgcagacaggaccaggg

SEQ ID NO: 3069263 - RNA, 23 nt, Human
acuauaauuuaccugaagucuuu

SEQ ID NO: 3069264 - RNA, 21 nt, Human
acuauaauguaagcucuacug

SEQ ID NO: 3069265 - RNA, 17 nt, Human
acuauagccuaggugac

SEQ ID NO: 3069266 - RNA, 16 nt, Human
ucccgaauagcuggga

SEQ ID NO: 3069267 - RNA, 15 nt, Human
ucccgaauagcuggg

SEQ ID NO: 3069268 - RNA, 18 nt, Human
ucccgaauagcugggacu

SEQ ID NO: 3069269 - RNA, 20 nt, Human
ucccgaguagcugggacuac

SEQ ID NO: 3069270 - RNA, 18 nt, Human
ucccuauuagagaagaga

SEQ ID NO: 3069271 - RNA, 16 nt, Human
ucccuauuagagaaga

SEQ ID NO: 3069272 - RNA, 18 nt, Human
acucaucuagguaaauua

SEQ ID NO: 3069273 - RNA, 16 nt, Human
acucaucuagguaaau

SEQ ID NO: 3069274 - RNA, 22 nt, Human
ucccucauccucauacccaccc

SEQ ID NO: 3069275 - RNA, 21 nt, Human
ucccucagucuggcccuuccu

SEQ ID NO: 3069276 - RNA, 20 nt, Human
ucccucagucuggcccuucc

SEQ ID NO: 3069277 - RNA, 22 nt, Human
acucauugaccugaggcccuuc

SEQ ID NO: 3069278 - RNA, 21 nt, Human
acuccaaagaaauguaaggga

SEQ ID NO: 3069279 - RNA, 22 nt, Human
ucccuuuccaaaugcccagcuu

SEQ ID NO: 3069280 - RNA, 18 nt, Human
ucccuuacgugaguccug

SEQ ID NO: 3069281 - RNA, 22 nt, Human
ucccuuacgugaguccuggcau

SEQ ID NO: 3069282 - RNA, 23 nt, Human
ucccugguggcagcucaccucuc

SEQ ID NO: 3069283 - RNA, 22 nt, Human
ucccuuugacgccaucccagcc

SEQ ID NO: 3069284 - RNA, 23 nt, Human
ucccuuugacgccaucccagccc

SEQ ID NO: 3069285 - RNA, 21 nt, Human
ucccuuugacgccaucccagc

SEQ ID NO: 3069286 - RNA, 14 nt, Human
uccuaggcauuugc

SEQ ID NO: 3069287 - RNA, 22 nt, Human
acucuuauaucuauauuuuaca

SEQ ID NO: 3069288 - RNA, 23 nt, Human
acucuuauaucuauauuuuacau

SEQ ID NO: 3069289 - RNA, 18 nt, Human
acucuccucugcugcugg

SEQ ID NO: 3069290 - RNA, 19 nt, Human
acucuccucugcugcuggc

SEQ ID NO: 3069291 - RNA, 16 nt, Human
acucuccucugcugcu

SEQ ID NO: 3069292 - RNA, 17 nt, Human
acucuccucugcugcug

SEQ ID NO: 3069293 - RNA, 18 nt, Human
acucgcgacaaugcaaac

SEQ ID NO: 3069294 - RNA, 19 nt, Human
uccuaggcauuugcugaau

SEQ ID NO: 3069295 - RNA, 20 nt, Human
acucgcgacaaugcaaacca

SEQ ID NO: 3069296 - RNA, 23 nt, Human
acucgcgacaaugcaaaccauca

SEQ ID NO: 3069297 - RNA, 17 nt, Human
acucgcgacaaugcaaa

SEQ ID NO: 3069298 - RNA, 20 nt, Human
uccucagaucuucugugggu

SEQ ID NO: 3069299 - RNA, 19 nt, Human
acucuuauugcccacgcug

SEQ ID NO: 3069300 - RNA, 16 nt, Human
acucuuauugcccacg

SEQ ID NO: 3069301 - RNA, 20 nt, Human
uccucaaaacuucagacaua

SEQ ID NO: 3069302 - RNA, 15 nt, Human
uccucccucccucuu

SEQ ID NO: 3069303 - RNA, 17 nt, Human
uccucccucccucuuuc

SEQ ID NO: 3069304 - RNA, 19 nt, Human
uccucccucccucuuuccc

SEQ ID NO: 3069305 - RNA, 12 nt, Human
uccucuccccag

SEQ ID NO: 3069306 - RNA, 14 nt, Human
uccucauacccacc

SEQ ID NO: 3069307 - RNA, 18 nt, Human
uccucauacccaccccca

SEQ ID NO: 3069308 - RNA, 20 nt, Human
acuguacagacagaaaaaac

SEQ ID NO: 3069309 - RNA, 15 nt, Human
acuguacaaaguaga

SEQ ID NO: 3069310 - RNA, 14 nt, Human
acuguacaaaguag

SEQ ID NO: 3069311 - RNA, 13 nt, Human
acuguacaaagua

SEQ ID NO: 3069312 - RNA, 19 nt, Human
acuguaauuugugauacaa

SEQ ID NO: 3069313 - RNA, 14 nt, Human
acuguacaugaaaa

SEQ ID NO: 3069314 - RNA, 13 nt, Human
acuguacaugaaa

SEQ ID NO: 3069315 - RNA, 23 nt, Human
acuguacaugaaaacacauuuuu

SEQ ID NO: 3069316 - RNA, 17 nt, Human
acugggagaaaugaaaa

SEQ ID NO: 3069317 - RNA, 13 nt, Human
ucgcuccuguguc

SEQ ID NO: 3069318 - RNA, 12 nt, Human
ucgcuccugugu

SEQ ID NO: 3069319 - RNA, 22 nt, Human
acugggcuuggggaccagagcu

SEQ ID NO: 3069320 - RNA, 16 nt, Human
acuguaaggcaaucau

SEQ ID NO: 3069321 - RNA, 18 nt, Human
acuggguacuuguggaca

SEQ ID NO: 3069322 - RNA, 23 nt, Human
acuggguacuuguggacacagcu

SEQ ID NO: 3069323 - RNA, 20 nt, Human
acuggguacuuguggacaca

SEQ ID NO: 3069324 - RNA, 19 nt, Human
acuggguacuuguggacac

SEQ ID NO: 3069325 - RNA, 14 nt, Human
ucgagcaugccugg

SEQ ID NO: 3069326 - RNA, 13 nt, Human
ucgaggacaggga

SEQ ID NO: 3069327 - RNA, 13 nt, Human
ucgcgacaaugca

SEQ ID NO: 3069328 - RNA, 17 nt, Human
ucgaggacagggaggug

SEQ ID NO: 3069329 - RNA, 14 nt, Human
ucgaggacagggag

SEQ ID NO: 3069330 - RNA, 13 nt, Human
ucgaacuggcugc

SEQ ID NO: 3069331 - RNA, 14 nt, Human
ucgaacuggcugca

SEQ ID NO: 3069332 - RNA, 15 nt, Human
ucgaacuggcugcaa

SEQ ID NO: 3069333 - RNA, 23 nt, Human
uccuuuagcgcccaguugggugg

SEQ ID NO: 3069334 - RNA, 15 nt, Human
uccuuucaccacaug

SEQ ID NO: 3069335 - RNA, 22 nt, Human
acuggauuaaacuuaaucuaaa

SEQ ID NO: 3069336 - RNA, 21 nt, Human
acuggcaaacagggccucugc

SEQ ID NO: 3069337 - RNA, 17 nt, Human
acuggcaaacagggccu

SEQ ID NO: 3069338 - RNA, 19 nt, Human
acuggcaaacagggccucu

SEQ ID NO: 3069339 - RNA, 20 nt, Human
acuggcaaacagggccucug

SEQ ID NO: 3069340 - RNA, 18 nt, Human
acugcuuccagugaggcu

SEQ ID NO: 3069341 - RNA, 21 nt, Human
acugcuuccagugaggcucug

SEQ ID NO: 3069342 - RNA, 22 nt, Human
acugcuuccagugaggcucugc

SEQ ID NO: 3069343 - RNA, 23 nt, Human
acugcuuccagugaggcucugcc

SEQ ID NO: 3069344 - RNA, 20 nt, Human
acugccuucucaacuccaaa

SEQ ID NO: 3069345 - RNA, 22 nt, Human
acugccuucucaacuccaaacu

SEQ ID NO: 3069346 - RNA, 22 nt, Human
acuggcugcaaaggguaucagg

SEQ ID NO: 3069347 - RNA, 18 nt, Human
acuggcucacccaguccu

SEQ ID NO: 3069348 - RNA, 22 nt, Human
acuggcacaguuuucugagaaa

SEQ ID NO: 3069349 - RNA, 21 nt, Human
acuggcacaguuuucugagaa

SEQ ID NO: 3069350 - RNA, 15 nt, Human
acuggcucacccagu

SEQ ID NO: 3069351 - RNA, 12 nt, Human
acuggcucaccc

SEQ ID NO: 3069352 - RNA, 13 nt, Human
uccuucagugccu

SEQ ID NO: 3069353 - RNA, 20 nt, Human
uccuucagugccuuauggaa

SEQ ID NO: 3069354 - RNA, 22 nt, Human
uccuucagugccuuauggaaca

SEQ ID NO: 3069355 - RNA, 11 nt, Human
uccuucagugc

SEQ ID NO: 3069356 - RNA, 13 nt, Human
uccuucagccuga

SEQ ID NO: 3069357 - RNA, 12 nt, Human
uccuucagugcc

SEQ ID NO: 3069358 - RNA, 14 nt, Human
acugaggaucagag

SEQ ID NO: 3069359 - RNA, 17 nt, Human
acugaggggaggggagc

SEQ ID NO: 3069360 - RNA, 22 nt, Human
acugaggggaggggagcauggg

SEQ ID NO: 3069361 - RNA, 15 nt, Human
uccucuccccagcaa

SEQ ID NO: 3069362 - RNA, 22 nt, Human
acugcaaccuccgccucuuggg

SEQ ID NO: 3069363 - RNA, 16 nt, Human
acugcaaccuccgccu

SEQ ID NO: 3069364 - RNA, 14 nt, Human
acugcaaccuccgc

SEQ ID NO: 3069365 - RNA, 13 nt, Human
acugcaaccuccg

SEQ ID NO: 3069366 - RNA, 21 nt, Human
acugaguacguugugcauuug

SEQ ID NO: 3069367 - RNA, 19 nt, Human
acugaguacguugugcauu

SEQ ID NO: 3069368 - RNA, 18 nt, Human
acugaguacguugugcau

SEQ ID NO: 3069369 - RNA, 16 nt, Human
acugagggggccugga

SEQ ID NO: 3069370 - RNA, 17 nt, Human
acugagggggccuggau

SEQ ID NO: 3069371 - RNA, 18 nt, Human
acugagggggccuggaug

SEQ ID NO: 3069372 - RNA, 23 nt, Human
acugaguacguugugcauuuggu

SEQ ID NO: 3069373 - RNA, 22 nt, Human
acugaguacguugugcauuugg

SEQ ID NO: 3069374 - RNA, 19 nt, Human
acugagggggccuggaugc

SEQ ID NO: 3069375 - RNA, 15 nt, Human
uccugcaggcagcca

SEQ ID NO: 3069376 - RNA, 16 nt, Human
uccugcaggcagccag

SEQ ID NO: 3069377 - RNA, 17 nt, Human
uccugcaggcagccagg

SEQ ID NO: 3069378 - RNA, 19 nt, Human
uccugcaggcagccaggcc

SEQ ID NO: 3069379 - RNA, 20 nt, Human
uccugcaggcagccaggcca

SEQ ID NO: 3069380 - RNA, 19 nt, Human
uccugccucagccucccaa

SEQ ID NO: 3069381 - RNA, 22 nt, Human
uccugcaggcagccaggccaca

SEQ ID NO: 3069382 - RNA, 20 nt, Human
uccugccucgaacuggcugc

SEQ ID NO: 3069383 - RNA, 17 nt, Human
uccugccucagccuccc

SEQ ID NO: 3069384 - RNA, 13 nt, Human
uccugcugcaguu

SEQ ID NO: 3069385 - RNA, 23 nt, Human
acugcagccucaaccuccugggc

SEQ ID NO: 3069386 - RNA, 13 nt, Human
acugcacuguuuu

SEQ ID NO: 3069387 - RNA, 22 nt, Human
acugcagccucaaccuccuggg

SEQ ID NO: 3069388 - RNA, 21 nt, Human
acugcagccucaaccuccugg

SEQ ID NO: 3069389 - RNA, 19 nt, Human
acugcagccucaaccuccu

SEQ ID NO: 3069390 - RNA, 24 nt, Human
uccugugucuugcaauggcagccu

SEQ ID NO: 3069391 - RNA, 23 nt, Human
uccugugucuugcaauggcagcc

SEQ ID NO: 3069392 - RNA, 14 nt, Human
uccugugugugcgc

SEQ ID NO: 3069393 - RNA, 13 nt, Human
uccugugugugcg

SEQ ID NO: 3069394 - RNA, 18 nt, Human
uccugugugugcgccuac

SEQ ID NO: 3069395 - RNA, 19 nt, Human
uccuguucccaugagauga

SEQ ID NO: 3069396 - RNA, 22 nt, Human
aaugugaaacuggauuaaacuu

SEQ ID NO: 3069397 - RNA, 14 nt, Human
aaugucacaggcag

SEQ ID NO: 3069398 - RNA, 13 nt, Human
aaugucacaggca

SEQ ID NO: 3069399 - RNA, 14 nt, Human
aauguauuuuuccu

SEQ ID NO: 3069400 - RNA, 19 nt, Human
uacauaaguaauucaagaa

SEQ ID NO: 3069401 - RNA, 17 nt, Human
uacauaaguaauucaag

SEQ ID NO: 3069402 - RNA, 16 nt, Human
uacauaaguaauucaa

SEQ ID NO: 3069403 - RNA, 15 nt, Human
uacauaaguaauuca

SEQ ID NO: 3069404 - RNA, 20 nt, Human
uacaguggggaaugaagaua

SEQ ID NO: 3069405 - RNA, 18 nt, Human
uacaguaucucagggccu

SEQ ID NO: 3069406 - RNA, 12 nt, Human
uacaguccuccc

SEQ ID NO: 3069407 - RNA, 15 nt, Human
uacaguccucccauc

SEQ ID NO: 3069408 - RNA, 17 nt, Human
uacaguccucccaucuc

SEQ ID NO: 3069409 - RNA, 18 nt, Human
uacaguccucccaucuca

SEQ ID NO: 3069410 - RNA, 13 nt, Human
aauguaagacaaa

SEQ ID NO: 3069411 - RNA, 15 nt, Human
aauguaagcucuacu

SEQ ID NO: 3069412 - RNA, 13 nt, Human
aauguaagcucua

SEQ ID NO: 3069413 - RNA, 17 nt, Human
aaugguuuucuugugug

SEQ ID NO: 3069414 - RNA, 18 nt, Human
aaugguuuucuugugugu

SEQ ID NO: 3069415 - RNA, 22 nt, Human
aaugguuuucuuguguguuuau

SEQ ID NO: 3069416 - RNA, 16 nt, Human
aaugguuuucuugugu

SEQ ID NO: 3069417 - RNA, 16 nt, Human
aaugguuuaaaugguc

SEQ ID NO: 3069418 - RNA, 22 nt, Human
uacagcaaggagauuuacaacu

SEQ ID NO: 3069419 - RNA, 23 nt, Human
aauguacagcaaggagauuuaca

SEQ ID NO: 3069420 - RNA, 21 nt, Human
aauguacagcaaggagauuua

SEQ ID NO: 3069421 - RNA, 18 nt, Human
aauguugacaugggacau

SEQ ID NO: 3069422 - RNA, 19 nt, Human
aauuaacaugaauauuuag

SEQ ID NO: 3069423 - RNA, 22 nt, Human
aauuaaauuuugaguucuacau

SEQ ID NO: 3069424 - RNA, 22 nt, Human
aauuaacuuuuauaaacuuuac

SEQ ID NO: 3069425 - RNA, 15 nt, Human
aauuaagagagucua

SEQ ID NO: 3069426 - RNA, 20 nt, Human
aauuaacuuuuauaaacuuu

SEQ ID NO: 3069427 - RNA, 18 nt, Human
aauuaacuuuuauaaacu

SEQ ID NO: 3069428 - RNA, 20 nt, Human
uacauuguacgaagaguauu

SEQ ID NO: 3069429 - RNA, 22 nt, Human
uacauuguacgaagaguauuuu

SEQ ID NO: 3069430 - RNA, 23 nt, Human
uacauuguacgaagaguauuuuu

SEQ ID NO: 3069431 - RNA, 17 nt, Human
uacauguacugauuacu

SEQ ID NO: 3069432 - RNA, 23 nt, Human
uacauggcuggagcuagaauuug

SEQ ID NO: 3069433 - RNA, 16 nt, Human
aauuaacuuuuauaaa

SEQ ID NO: 3069434 - RNA, 13 nt, Human
aauuaaguacuau

SEQ ID NO: 3069435 - RNA, 17 nt, Human
uaccauccccuguagag

SEQ ID NO: 3069436 - RNA, 19 nt, Human
uaccccaagacucccauga

SEQ ID NO: 3069437 - RNA, 17 nt, Human
uaccacuuuuguucuug

SEQ ID NO: 3069438 - RNA, 22 nt, Human
uacccuggcacuauaauguaag

SEQ ID NO: 3069439 - RNA, 20 nt, Human
uacccuggcacuauaaugua

SEQ ID NO: 3069440 - RNA, 16 nt, Human
uacccucauguucuua

SEQ ID NO: 3069441 - RNA, 15 nt, Human
uacccucauguucuu

SEQ ID NO: 3069442 - RNA, 20 nt, Human
uacccgggaagggggcuggg

SEQ ID NO: 3069443 - RNA, 13 nt, Human
uaauucauguugc

SEQ ID NO: 3069444 - RNA, 17 nt, Human
uaauuuaccugaagucu

SEQ ID NO: 3069445 - RNA, 18 nt, Human
uaauuuaccugaagucuu

SEQ ID NO: 3069446 - RNA, 16 nt, Human
uacaaaaacauggccu

SEQ ID NO: 3069447 - RNA, 16 nt, Human
uacaaaaacacagcaa

SEQ ID NO: 3069448 - RNA, 18 nt, Human
uacaaaaacacagcaagg

SEQ ID NO: 3069449 - RNA, 17 nt, Human
uacaaaaacacagcaag

SEQ ID NO: 3069450 - RNA, 20 nt, Human
uacaagcgugagccacugca

SEQ ID NO: 3069451 - RNA, 19 nt, Human
uacaagcgugagccacugc

SEQ ID NO: 3069452 - RNA, 18 nt, Human
uacaagcgugagccacug

SEQ ID NO: 3069453 - RNA, 16 nt, Human
uacaagcgugagccac

SEQ ID NO: 3069454 - RNA, 13 nt, Human
aaugaccuuucaa

SEQ ID NO: 3069455 - RNA, 14 nt, Human
aaugaccuuucaau

SEQ ID NO: 3069456 - RNA, 14 nt, Human
aaugcaaaccauca

SEQ ID NO: 3069457 - RNA, 16 nt, Human
aaugcaaaccaucauu

SEQ ID NO: 3069458 - RNA, 20 nt, Human
aaugaaugucagugugacug

SEQ ID NO: 3069459 - RNA, 21 nt, Human
aaugaaugucagugugacuga

SEQ ID NO: 3069460 - RNA, 18 nt, Human
aaugcacaaacagaggcc

SEQ ID NO: 3069461 - RNA, 22 nt, Human
aaugcaaaccaucauugaaauc

SEQ ID NO: 3069462 - RNA, 23 nt, Human
aaugcaaaccaucauugaaaucu

SEQ ID NO: 3069463 - RNA, 19 nt, Human
aaugcacaaacagaggccg

SEQ ID NO: 3069464 - RNA, 20 nt, Human
aaugcacaaacagaggccgc

SEQ ID NO: 3069465 - RNA, 13 nt, Human
aaugcacuuuguu

SEQ ID NO: 3069466 - RNA, 16 nt, Human
aaugcacuuuguucug

SEQ ID NO: 3069467 - RNA, 19 nt, Human
aaugcacuuuguucuggcu

SEQ ID NO: 3069468 - RNA, 20 nt, Human
aaugcacuuuguucuggcuc

SEQ ID NO: 3069469 - RNA, 23 nt, Human
uaauuaguuccucauuagcauuu

SEQ ID NO: 3069470 - RNA, 15 nt, Human
uaauguaagacaaau

SEQ ID NO: 3069471 - RNA, 17 nt, Human
uaauguaagcucuacug

SEQ ID NO: 3069472 - RNA, 16 nt, Human
uaauguaagcucuacu

SEQ ID NO: 3069473 - RNA, 17 nt, Human
uaauguaauaacuguga

SEQ ID NO: 3069474 - RNA, 15 nt, Human
uaaugucacaggcag

SEQ ID NO: 3069475 - RNA, 17 nt, Human
uaaugucacaggcaggu

SEQ ID NO: 3069476 - RNA, 16 nt, Human
uaaugucacaggcagg

SEQ ID NO: 3069477 - RNA, 23 nt, Human
uaaugugaaacuggauuaaacuu

SEQ ID NO: 3069478 - RNA, 22 nt, Human
uaaugugaaacuggauuaaacu

SEQ ID NO: 3069479 - RNA, 20 nt, Human
uaaugugaaacuggauuaaa

SEQ ID NO: 3069480 - RNA, 12 nt, Human
uaaugugaaacu

SEQ ID NO: 3069481 - RNA, 15 nt, Human
aaugaaugucagugu

SEQ ID NO: 3069482 - RNA, 14 nt, Human
aaugaaugucagug

SEQ ID NO: 3069483 - RNA, 14 nt, Human
aaugaaugaaacau

SEQ ID NO: 3069484 - RNA, 15 nt, Human
aaugaaugaaugaau

SEQ ID NO: 3069485 - RNA, 23 nt, Human
aaucuucugaacuuggcgcugcc

SEQ ID NO: 3069486 - RNA, 17 nt, Human
uaaucuuuaauuuuaca

SEQ ID NO: 3069487 - RNA, 22 nt, Human
uaauccaagcaaaugugaauca

SEQ ID NO: 3069488 - RNA, 18 nt, Human
uaaucagugugucuaaau

SEQ ID NO: 3069489 - RNA, 17 nt, Human
uaaucagugugucuaaa

SEQ ID NO: 3069490 - RNA, 21 nt, Human
uaauauugauaugcuuauaca

SEQ ID NO: 3069491 - RNA, 18 nt, Human
uaauacuugcuuuggaaa

SEQ ID NO: 3069492 - RNA, 21 nt, Human
uaauacaccacuacauucugu

SEQ ID NO: 3069493 - RNA, 22 nt, Human
uaauacaccacuacauucuguu

SEQ ID NO: 3069494 - RNA, 23 nt, Human
uaauacaccacuacauucuguua

SEQ ID NO: 3069495 - RNA, 20 nt, Human
aauacaguaucucagggccu

SEQ ID NO: 3069496 - RNA, 17 nt, Human
acaaaaaaauauauuua

SEQ ID NO: 3069497 - RNA, 13 nt, Human
acaaaaaaauaua

SEQ ID NO: 3069498 - RNA, 17 nt, Human
aauuuuuuugagacaga

SEQ ID NO: 3069499 - RNA, 20 nt, Human
acaaaaaaauauauuuaaug

SEQ ID NO: 3069500 - RNA, 16 nt, Human
acaaaaacacagcaag

SEQ ID NO: 3069501 - RNA, 13 nt, Human
acaaaaacauggc

SEQ ID NO: 3069502 - RNA, 22 nt, Human
aauuuuuuuaucgucacugcuu

SEQ ID NO: 3069503 - RNA, 19 nt, Human
aauuuuuucucuaggaaau

SEQ ID NO: 3069504 - RNA, 18 nt, Human
aauuuuuauuaaauuaug

SEQ ID NO: 3069505 - RNA, 17 nt, Human
aauuuuuauuaaauuau

SEQ ID NO: 3069506 - RNA, 19 nt, Human
aauuuuuauauuugaaaua

SEQ ID NO: 3069507 - RNA, 12 nt, Human
uagacagucccu

SEQ ID NO: 3069508 - RNA, 14 nt, Human
uagacagucccugc

SEQ ID NO: 3069509 - RNA, 15 nt, Human
uagaagucacacagu

SEQ ID NO: 3069510 - RNA, 18 nt, Human
uagaacucccuuucaaca

SEQ ID NO: 3069511 - RNA, 21 nt, Human
uacuucaaauccuugaagauu

SEQ ID NO: 3069512 - RNA, 19 nt, Human
uagaagucuuagauguaua

SEQ ID NO: 3069513 - RNA, 18 nt, Human
uagaagucuuagauguau

SEQ ID NO: 3069514 - RNA, 17 nt, Human
uagaagucuuagaugua

SEQ ID NO: 3069515 - RNA, 16 nt, Human
uagaagucuuagaugu

SEQ ID NO: 3069516 - RNA, 16 nt, Human
uagaagucacacagua

SEQ ID NO: 3069517 - RNA, 23 nt, Human
uagaagucacauuccugaacagg

SEQ ID NO: 3069518 - RNA, 16 nt, Human
uagacaauuuauuaug

SEQ ID NO: 3069519 - RNA, 21 nt, Human
uagacagagucucacuguugc

SEQ ID NO: 3069520 - RNA, 18 nt, Human
acaagcacuaaacaaaga

SEQ ID NO: 3069521 - RNA, 17 nt, Human
acaagagcccaggccuc

SEQ ID NO: 3069522 - RNA, 12 nt, Human
acaagccacccc

SEQ ID NO: 3069523 - RNA, 21 nt, Human
acaagcgugagccacugcacc

SEQ ID NO: 3069524 - RNA, 20 nt, Human
acaagcgugagccacugcac

SEQ ID NO: 3069525 - RNA, 13 nt, Human
acaagcugcaccc

SEQ ID NO: 3069526 - RNA, 18 nt, Human
acaagcgugagccacugc

SEQ ID NO: 3069527 - RNA, 15 nt, Human
acaacaacaaaauga

SEQ ID NO: 3069528 - RNA, 12 nt, Human
acaacacucaca

SEQ ID NO: 3069529 - RNA, 22 nt, Human
acaagaaaugaaagcagggacu

SEQ ID NO: 3069530 - RNA, 21 nt, Human
uagcaugucgucaaagcugaa

SEQ ID NO: 3069531 - RNA, 18 nt, Human
uagcaugucgucaaagcu

SEQ ID NO: 3069532 - RNA, 24 nt, Human
uagcacagacccugcccugugggc

SEQ ID NO: 3069533 - RNA, 16 nt, Human
uagcacagacccugcc

SEQ ID NO: 3069534 - RNA, 17 nt, Human
uagcacagacccugccc

SEQ ID NO: 3069535 - RNA, 18 nt, Human
uagcacagacccugcccu

SEQ ID NO: 3069536 - RNA, 19 nt, Human
uagcacagacccugcccug

SEQ ID NO: 3069537 - RNA, 22 nt, Human
uagauuuuagacccuauugcug

SEQ ID NO: 3069538 - RNA, 16 nt, Human
uagaugcaguucugaa

SEQ ID NO: 3069539 - RNA, 17 nt, Human
uagaugcaguucugaag

SEQ ID NO: 3069540 - RNA, 19 nt, Human
uagaugcaguucugaagaa

SEQ ID NO: 3069541 - RNA, 20 nt, Human
aauuugaaacacuuugcaua

SEQ ID NO: 3069542 - RNA, 15 nt, Human
aauuugaaacacuuu

SEQ ID NO: 3069543 - RNA, 16 nt, Human
aauuugauaugugaac

SEQ ID NO: 3069544 - RNA, 18 nt, Human
aauuugauaugugaacag

SEQ ID NO: 3069545 - RNA, 15 nt, Human
aauuugauaugugaa

SEQ ID NO: 3069546 - RNA, 19 nt, Human
aauuugauaugugaacagu

SEQ ID NO: 3069547 - RNA, 14 nt, Human
uacuucaaauccuu

SEQ ID NO: 3069548 - RNA, 19 nt, Human
uacuucaaauccuugaaga

SEQ ID NO: 3069549 - RNA, 21 nt, Human
aauuucuaaaucuccaaaaua

SEQ ID NO: 3069550 - RNA, 13 nt, Human
aauuucuaaaucu

SEQ ID NO: 3069551 - RNA, 19 nt, Human
aauuucucccagucauuua

SEQ ID NO: 3069552 - RNA, 20 nt, Human
aauuucucccagucauuuaa

SEQ ID NO: 3069553 - RNA, 17 nt, Human
aauuuagaaauauaauu

SEQ ID NO: 3069554 - RNA, 23 nt, Human
aauugugugaaagguacuucaaa

SEQ ID NO: 3069555 - RNA, 22 nt, Human
aauuguuuggggaugagaaagg

SEQ ID NO: 3069556 - RNA, 13 nt, Human
aauuuaaaagucu

SEQ ID NO: 3069557 - RNA, 19 nt, Human
aauuuacauacucugcuua

SEQ ID NO: 3069558 - RNA, 15 nt, Human
aauuuacauacucug

SEQ ID NO: 3069559 - RNA, 16 nt, Human
aauuuaaauagcuuuu

SEQ ID NO: 3069560 - RNA, 15 nt, Human
aauuuaaauagcuuu

SEQ ID NO: 3069561 - RNA, 14 nt, Human
aauucuuucauuuu

SEQ ID NO: 3069562 - RNA, 14 nt, Human
uacguacacauuuu

SEQ ID NO: 3069563 - RNA, 15 nt, Human
uacguacacauuuua

SEQ ID NO: 3069564 - RNA, 16 nt, Human
aauugacccacaagaa

SEQ ID NO: 3069565 - RNA, 19 nt, Human
aauugacccacaagaaaug

SEQ ID NO: 3069566 - RNA, 13 nt, Human
aauugacccacaa

SEQ ID NO: 3069567 - RNA, 21 nt, Human
aauucuugaaggaaaaugaua

SEQ ID NO: 3069568 - RNA, 16 nt, Human
aauucuugaaggaaaa

SEQ ID NO: 3069569 - RNA, 15 nt, Human
aauucuugaaggaaa

SEQ ID NO: 3069570 - RNA, 22 nt, Human
aauucuucuccacuuucuagcc

SEQ ID NO: 3069571 - RNA, 21 nt, Human
aauucuugccaaauauaaaua

SEQ ID NO: 3069572 - RNA, 20 nt, Human
aauucuugcaaaguaucccu

SEQ ID NO: 3069573 - RNA, 14 nt, Human
aauucuugcaaagu

SEQ ID NO: 3069574 - RNA, 13 nt, Human
aauucuuaaauau

SEQ ID NO: 3069575 - RNA, 21 nt, Human
uacucugugucagguggggca

SEQ ID NO: 3069576 - RNA, 20 nt, Human
uacucuuauaucuauauuuu

SEQ ID NO: 3069577 - RNA, 22 nt, Human
uacucuuauaucuauauuuuac

SEQ ID NO: 3069578 - RNA, 14 nt, Human
uacgucugacaggc

SEQ ID NO: 3069579 - RNA, 13 nt, Human
uacguugugcauu

SEQ ID NO: 3069580 - RNA, 16 nt, Human
uacuauaauuuaccug

SEQ ID NO: 3069581 - RNA, 16 nt, Human
uacuauguaucaauga

SEQ ID NO: 3069582 - RNA, 19 nt, Human
acaguucggugagcuacaa

SEQ ID NO: 3069583 - RNA, 22 nt, Human
acaguucggugagcuacaaaug

SEQ ID NO: 3069584 - RNA, 23 nt, Human
acaguucggugagcuacaaaugc

SEQ ID NO: 3069585 - RNA, 16 nt, Human
acaguucucuccuucu

SEQ ID NO: 3069586 - RNA, 20 nt, Human
acaguucaauucucauuugu

SEQ ID NO: 3069587 - RNA, 20 nt, Human
acaguuacucagaauucucu

SEQ ID NO: 3069588 - RNA, 13 nt, Human
acaguuacucaga

SEQ ID NO: 3069589 - RNA, 24 nt, Human
uauucucuccuguaccucuugagc

SEQ ID NO: 3069590 - RNA, 20 nt, Human
uauucucuccuguaccucuu

SEQ ID NO: 3069591 - RNA, 18 nt, Human
uauucucuccuguaccuc

SEQ ID NO: 3069592 - RNA, 17 nt, Human
acaguucucuccuucuu

SEQ ID NO: 3069593 - RNA, 16 nt, Human
uauucuguuggccagu

SEQ ID NO: 3069594 - RNA, 15 nt, Human
uauucuuauuuaaug

SEQ ID NO: 3069595 - RNA, 19 nt, Human
uauuuaaugauaaguaaau

SEQ ID NO: 3069596 - RNA, 14 nt, Human
uauuuaauucaugu

SEQ ID NO: 3069597 - RNA, 23 nt, Human
uauuuaauuuuuuugagacagag

SEQ ID NO: 3069598 - RNA, 18 nt, Human
uauuuacuucuuauacau

SEQ ID NO: 3069599 - RNA, 19 nt, Human
uauuuaguguucauaaaua

SEQ ID NO: 3069600 - RNA, 13 nt, Human
uauuuauuuaaau

SEQ ID NO: 3069601 - RNA, 14 nt, Human
uauuuauuuaaauu

SEQ ID NO: 3069602 - RNA, 18 nt, Human
uauuuauuuuaauaaugu

SEQ ID NO: 3069603 - RNA, 14 nt, Human
uauuuauuuuaaua

SEQ ID NO: 3069604 - RNA, 16 nt, Human
uauuuauuuuaauaau

SEQ ID NO: 3069605 - RNA, 13 nt, Human
uauugucaaagug

SEQ ID NO: 3069606 - RNA, 17 nt, Human
uauugucaaagugguga

SEQ ID NO: 3069607 - RNA, 17 nt, Human
uauuguagcauccugga

SEQ ID NO: 3069608 - RNA, 18 nt, Human
uauuguagcauccuggaa

SEQ ID NO: 3069609 - RNA, 20 nt, Human
uauuguagcauccuggaaua

SEQ ID NO: 3069610 - RNA, 21 nt, Human
uauuguagcauccuggaauau

SEQ ID NO: 3069611 - RNA, 21 nt, Human
uauuuaaugaaagacuguaca

SEQ ID NO: 3069612 - RNA, 15 nt, Human
uauuuaaugaaagac

SEQ ID NO: 3069613 - RNA, 14 nt, Human
uauuuaauagguuu

SEQ ID NO: 3069614 - RNA, 17 nt, Human
uauuuaaccucuaaauu

SEQ ID NO: 3069615 - RNA, 18 nt, Human
uauuuaaccucuaaauuc

SEQ ID NO: 3069616 - RNA, 17 nt, Human
uauugucuagugaaacu

SEQ ID NO: 3069617 - RNA, 19 nt, Human
uauguuuuaagaggcaggg

SEQ ID NO: 3069618 - RNA, 17 nt, Human
uauguuuuaagaggcag

SEQ ID NO: 3069619 - RNA, 22 nt, Human
uauuaaaaaucucaaauuucua

SEQ ID NO: 3069620 - RNA, 20 nt, Human
uauuaaaaaucucaaauuuc

SEQ ID NO: 3069621 - RNA, 18 nt, Human
uauuaaaaaucucaaauu

SEQ ID NO: 3069622 - RNA, 16 nt, Human
uauuaaaaaucucaaa

SEQ ID NO: 3069623 - RNA, 23 nt, Human
uauuaaaaaucucaaauuucuaa

SEQ ID NO: 3069624 - RNA, 12 nt, Human
uauuaaaacuca

SEQ ID NO: 3069625 - RNA, 23 nt, Human
uauuacaguggggaaugaagaua

SEQ ID NO: 3069626 - RNA, 14 nt, Human
uauucauaauuauu

SEQ ID NO: 3069627 - RNA, 23 nt, Human
uauucauagcagcuuauucacaa

SEQ ID NO: 3069628 - RNA, 16 nt, Human
uauucaggagaguaga

SEQ ID NO: 3069629 - RNA, 18 nt, Human
uauucaggaagcucaggg

SEQ ID NO: 3069630 - RNA, 22 nt, Human
uauucaggaagcucagggccug

SEQ ID NO: 3069631 - RNA, 16 nt, Human
uauucaggaagcucag

SEQ ID NO: 3069632 - RNA, 16 nt, Human
uauuaccacagacaua

SEQ ID NO: 3069633 - RNA, 15 nt, Human
uauuagaauaccaca

SEQ ID NO: 3069634 - RNA, 12 nt, Human
uauuagagaaga

SEQ ID NO: 3069635 - RNA, 20 nt, Human
acagugaaagaaaauaacaa

SEQ ID NO: 3069636 - RNA, 17 nt, Human
acagucucaggaaauca

SEQ ID NO: 3069637 - RNA, 21 nt, Human
acaguccuuaccagcagagca

SEQ ID NO: 3069638 - RNA, 22 nt, Human
acaguccuuaccagcagagcac

SEQ ID NO: 3069639 - RNA, 16 nt, Human
acagucucaggaaauc

SEQ ID NO: 3069640 - RNA, 15 nt, Human
acagucucaggaaau

SEQ ID NO: 3069641 - RNA, 14 nt, Human
acagucucaggaaa

SEQ ID NO: 3069642 - RNA, 13 nt, Human
acagucucaggaa

SEQ ID NO: 3069643 - RNA, 21 nt, Human
acaguuaccucugccucagaa

SEQ ID NO: 3069644 - RNA, 15 nt, Human
acaguuaagagaaau

SEQ ID NO: 3069645 - RNA, 14 nt, Human
acagugagacucug

SEQ ID NO: 3069646 - RNA, 18 nt, Human
acagugagacucugucuc

SEQ ID NO: 3069647 - RNA, 12 nt, Human
acagucccugcc

SEQ ID NO: 3069648 - RNA, 13 nt, Human
acagucccugcca

SEQ ID NO: 3069649 - RNA, 19 nt, Human
acaguauuacuucugcuac

SEQ ID NO: 3069650 - RNA, 17 nt, Human
acaguauuacuucugcu

SEQ ID NO: 3069651 - RNA, 16 nt, Human
acaguauuacuucugc

SEQ ID NO: 3069652 - RNA, 15 nt, Human
acaguauuacuucug

SEQ ID NO: 3069653 - RNA, 15 nt, Human
acagucccugccaau

SEQ ID NO: 3069654 - RNA, 13 nt, Human
acaguccucccau

SEQ ID NO: 3069655 - RNA, 14 nt, Human
acaguccucccauc

SEQ ID NO: 3069656 - RNA, 15 nt, Human
acaguccucccaucu

SEQ ID NO: 3069657 - RNA, 18 nt, Human
acaguccuuaccagcaga

SEQ ID NO: 3069658 - RNA, 20 nt, Human
acaguccuuaccagcagagc

SEQ ID NO: 3069659 - RNA, 17 nt, Human
acaguccucccaucuca

SEQ ID NO: 3069660 - RNA, 17 nt, Human
acaggcugggcuucagu

SEQ ID NO: 3069661 - RNA, 14 nt, Human
acaggcugggcuuc

SEQ ID NO: 3069662 - RNA, 21 nt, Human
acaggcugggcuucaguggca

SEQ ID NO: 3069663 - RNA, 20 nt, Human
acagggcacaccgggcacuc

SEQ ID NO: 3069664 - RNA, 12 nt, Human
acaggcugggcu

SEQ ID NO: 3069665 - RNA, 22 nt, Human
acagguuuuccugaagaauuga

SEQ ID NO: 3069666 - RNA, 22 nt, Human
acagggcacaccgggcacucag

SEQ ID NO: 3069667 - RNA, 21 nt, Human
acaguauggcagcuuuccuca

SEQ ID NO: 3069668 - RNA, 16 nt, Human
uauauugauccagaaa

SEQ ID NO: 3069669 - RNA, 14 nt, Human
acagacuggaagca

SEQ ID NO: 3069670 - RNA, 18 nt, Human
acagacccugcccugugg

SEQ ID NO: 3069671 - RNA, 20 nt, Human
acagacccugcccugugggc

SEQ ID NO: 3069672 - RNA, 17 nt, Human
acagacccugcccugug

SEQ ID NO: 3069673 - RNA, 16 nt, Human
acagacccugcccugu

SEQ ID NO: 3069674 - RNA, 11 nt, Human
acacuccuuca

SEQ ID NO: 3069675 - RNA, 23 nt, Human
acagacacaggcccggcuccagg

SEQ ID NO: 3069676 - RNA, 14 nt, Human
uauauuuacaaaug

SEQ ID NO: 3069677 - RNA, 15 nt, Human
uauauuuacaaaugg

SEQ ID NO: 3069678 - RNA, 18 nt, Human
uaucaaguauuauaccuu

SEQ ID NO: 3069679 - RNA, 21 nt, Human
uaucaaguauuauaccuuuuu

SEQ ID NO: 3069680 - RNA, 18 nt, Human
uaucacccagaagaaaau

SEQ ID NO: 3069681 - RNA, 14 nt, Human
uaucuaguaugaaa

SEQ ID NO: 3069682 - RNA, 16 nt, Human
uaucuaguaugaaauu

SEQ ID NO: 3069683 - RNA, 17 nt, Human
uaucuaguaugaaauua

SEQ ID NO: 3069684 - RNA, 19 nt, Human
uaucuagauacuguaucau

SEQ ID NO: 3069685 - RNA, 16 nt, Human
uaucucccccagcccc

SEQ ID NO: 3069686 - RNA, 18 nt, Human
uaucucccccagccccau

SEQ ID NO: 3069687 - RNA, 17 nt, Human
uaucucccccagcccca

SEQ ID NO: 3069688 - RNA, 16 nt, Human
uaucuagauacuguau

SEQ ID NO: 3069689 - RNA, 15 nt, Human
uaucuagauacugua

SEQ ID NO: 3069690 - RNA, 21 nt, Human
acagagugagacucugucuca

SEQ ID NO: 3069691 - RNA, 16 nt, Human
acagagcuacacaggg

SEQ ID NO: 3069692 - RNA, 20 nt, Human
acagagcccacgcccccacu

SEQ ID NO: 3069693 - RNA, 22 nt, Human
acagacuggaagcacagcuuca

SEQ ID NO: 3069694 - RNA, 14 nt, Human
uaucuugaagacuu

SEQ ID NO: 3069695 - RNA, 18 nt, Human
acagaguuuucacucuua

SEQ ID NO: 3069696 - RNA, 20 nt, Human
acagaguuuucacucuuauu

SEQ ID NO: 3069697 - RNA, 14 nt, Human
acagcaggcugcca

SEQ ID NO: 3069698 - RNA, 21 nt, Human
uaugagcuuccuucugugaaa

SEQ ID NO: 3069699 - RNA, 13 nt, Human
uaugaggcauuug

SEQ ID NO: 3069700 - RNA, 23 nt, Human
uaugaggcauuuguuugaacuga

SEQ ID NO: 3069701 - RNA, 18 nt, Human
uaugagcuuccuucugug

SEQ ID NO: 3069702 - RNA, 15 nt, Human
uaucuugaauaaugu

SEQ ID NO: 3069703 - RNA, 15 nt, Human
uaucuugaagacuuu

SEQ ID NO: 3069704 - RNA, 23 nt, Human
uaugaucacggcucacugcagcc

SEQ ID NO: 3069705 - RNA, 21 nt, Human
uaugaucacggcucacugcag

SEQ ID NO: 3069706 - RNA, 14 nt, Human
uaugaucacggcuc

SEQ ID NO: 3069707 - RNA, 14 nt, Human
uauggccuguggau

SEQ ID NO: 3069708 - RNA, 22 nt, Human
uauggccugugagcuaggaauu

SEQ ID NO: 3069709 - RNA, 16 nt, Human
uauggcuauaggugcu

SEQ ID NO: 3069710 - RNA, 22 nt, Human
uauggcccuggccuagcauacg

SEQ ID NO: 3069711 - RNA, 19 nt, Human
uaugcucugcauguuacau

SEQ ID NO: 3069712 - RNA, 14 nt, Human
uaugcucugcaugu

SEQ ID NO: 3069713 - RNA, 18 nt, Human
uaugcucugcauguuaca

SEQ ID NO: 3069714 - RNA, 16 nt, Human
uauggcuuuugugcau

SEQ ID NO: 3069715 - RNA, 10 nt, Human
uaugggagag

SEQ ID NO: 3069716 - RNA, 17 nt, Human
uauggcuauaggugcua

SEQ ID NO: 3069717 - RNA, 14 nt, Human
acagcuaacaugga

SEQ ID NO: 3069718 - RNA, 15 nt, Human
acagcuaacauggaa

SEQ ID NO: 3069719 - RNA, 17 nt, Human
acagcuaacauggaagu

SEQ ID NO: 3069720 - RNA, 15 nt, Human
acagcuccaagaauu

SEQ ID NO: 3069721 - RNA, 13 nt, Human
uauauaucaaaua

SEQ ID NO: 3069722 - RNA, 23 nt, Human
uauauauuuuuuucugaaauuuc

SEQ ID NO: 3069723 - RNA, 20 nt, Human
uauauauuuuuuucugaaau

SEQ ID NO: 3069724 - RNA, 21 nt, Human
uauauauuuuuuucugaaauu

SEQ ID NO: 3069725 - RNA, 22 nt, Human
uauauauuuuuuucugaaauuu

SEQ ID NO: 3069726 - RNA, 16 nt, Human
uauauccuuucuaaca

SEQ ID NO: 3069727 - RNA, 19 nt, Human
acacucauugaccugaggc

SEQ ID NO: 3069728 - RNA, 21 nt, Human
acacucauugaccugaggccc

SEQ ID NO: 3069729 - RNA, 23 nt, Human
acacucauugaccugaggcccuu

SEQ ID NO: 3069730 - RNA, 20 nt, Human
uauagccuaggugacagagu

SEQ ID NO: 3069731 - RNA, 18 nt, Human
uauagccuaggugacaga

SEQ ID NO: 3069732 - RNA, 14 nt, Human
uauaggaauugacc

SEQ ID NO: 3069733 - RNA, 13 nt, Human
uauaggaauugac

SEQ ID NO: 3069734 - RNA, 12 nt, Human
uauaggaauuga

SEQ ID NO: 3069735 - RNA, 23 nt, Human
uauaggugcuacaaaaacacagc

SEQ ID NO: 3069736 - RNA, 20 nt, Human
uauaggugcuacaaaaacac

SEQ ID NO: 3069737 - RNA, 21 nt, Human
uauaggugcuacaaaaacaca

SEQ ID NO: 3069738 - RNA, 18 nt, Human
uauaacaaugcuguauuu

SEQ ID NO: 3069739 - RNA, 21 nt, Human
uauaauuuaccugaagucuuu

SEQ ID NO: 3069740 - RNA, 14 nt, Human
uauaauuuugugaa

SEQ ID NO: 3069741 - RNA, 20 nt, Human
uauaaccaguguuguggauu

SEQ ID NO: 3069742 - RNA, 14 nt, Human
uauacauuugauaa

SEQ ID NO: 3069743 - RNA, 14 nt, Human
uauacauaaacaag

SEQ ID NO: 3069744 - RNA, 13 nt, Human
uauacauaaacaa

SEQ ID NO: 3069745 - RNA, 12 nt, Human
uauaaaagccug

SEQ ID NO: 3069746 - RNA, 17 nt, Human
uauaaaagccuguuuaa

SEQ ID NO: 3069747 - RNA, 14 nt, Human
uauaaaagccuguu

SEQ ID NO: 3069748 - RNA, 21 nt, Human
uauaaaauaauuuuuauauuu

SEQ ID NO: 3069749 - RNA, 22 nt, Human
uauaaaauaauuuuuauauuug

SEQ ID NO: 3069750 - RNA, 20 nt, Human
acacaugcaaggucauuuuu

SEQ ID NO: 3069751 - RNA, 19 nt, Human
acacaugcaaggucauuuu

SEQ ID NO: 3069752 - RNA, 18 nt, Human
acacaugcaaggucauuu

SEQ ID NO: 3069753 - RNA, 22 nt, Human
acacaucagcuugcccuguuaa

SEQ ID NO: 3069754 - RNA, 21 nt, Human
acacaugcaaggucauuuuuu

SEQ ID NO: 3069755 - RNA, 21 nt, Human
acacccagcccacuucugcca

SEQ ID NO: 3069756 - RNA, 20 nt, Human
acacccagcccacuucugcc

SEQ ID NO: 3069757 - RNA, 19 nt, Human
acacccagcccacuucugc

SEQ ID NO: 3069758 - RNA, 12 nt, Human
acacccugugau

SEQ ID NO: 3069759 - RNA, 18 nt, Human
acacccugugauggggcc

SEQ ID NO: 3069760 - RNA, 11 nt, Human
acacccuguga

SEQ ID NO: 3069761 - RNA, 19 nt, Human
acaccauaagcuacugcca

SEQ ID NO: 3069762 - RNA, 15 nt, Human
uaguuuuauaugcuu

SEQ ID NO: 3069763 - RNA, 16 nt, Human
uaguuuuauaugcuuc

SEQ ID NO: 3069764 - RNA, 20 nt, Human
uaguuccucauuagcauuuu

SEQ ID NO: 3069765 - RNA, 19 nt, Human
acaagcugcacccucaggc

SEQ ID NO: 3069766 - RNA, 21 nt, Human
acaagcugcacccucaggcag

SEQ ID NO: 3069767 - RNA, 22 nt, Human
acaagcugcacccucaggcagg

SEQ ID NO: 3069768 - RNA, 23 nt, Human
acaagcugcacccucaggcaggu

SEQ ID NO: 3069769 - RNA, 21 nt, Human
uagucaggugccucaagagaa

SEQ ID NO: 3069770 - RNA, 22 nt, Human
uagugagcagucaggaaagaga

SEQ ID NO: 3069771 - RNA, 22 nt, Human
aaguaaaaacaaagaaauuaug

SEQ ID NO: 3069772 - RNA, 18 nt, Human
aaguaaaaccacagcagu

SEQ ID NO: 3069773 - RNA, 17 nt, Human
aaguaaaaccacagcag

SEQ ID NO: 3069774 - RNA, 21 nt, Human
guuucuagcaugaagacagag

SEQ ID NO: 3069775 - RNA, 14 nt, Human
aaguaaaaccacag

SEQ ID NO: 3069776 - RNA, 16 nt, Human
aaguaaaaccacagca

SEQ ID NO: 3069777 - RNA, 15 nt, Human
aaguaaaaccacagc

SEQ ID NO: 3069778 - RNA, 21 nt, Human
aagggugaugggaaagcauug

SEQ ID NO: 3069779 - RNA, 13 nt, Human
aagggcccagaga

SEQ ID NO: 3069780 - RNA, 15 nt, Human
aagggcccagagagg

SEQ ID NO: 3069781 - RNA, 16 nt, Human
aaggguaucuggugac

SEQ ID NO: 3069782 - RNA, 19 nt, Human
aaggguaucaggugcugcc

SEQ ID NO: 3069783 - RNA, 14 nt, Human
aaggggcaguggug

SEQ ID NO: 3069784 - RNA, 17 nt, Human
aaggguaucaggugcug

SEQ ID NO: 3069785 - RNA, 13 nt, Human
guuugcuaaguga

SEQ ID NO: 3069786 - RNA, 17 nt, Human
guuugccucugccucug

SEQ ID NO: 3069787 - RNA, 18 nt, Human
guuucugccgcagcccug

SEQ ID NO: 3069788 - RNA, 22 nt, Human
guuucugccgcagcccugcaga

SEQ ID NO: 3069789 - RNA, 16 nt, Human
guuuuacugcagcuuu

SEQ ID NO: 3069790 - RNA, 18 nt, Human
guuuuacugcagcuuugu

SEQ ID NO: 3069791 - RNA, 15 nt, Human
guuuuacugcagcuu

SEQ ID NO: 3069792 - RNA, 15 nt, Human
guuuuauaauuuugu

SEQ ID NO: 3069793 - RNA, 22 nt, Human
guuuuauaauuuugugaagcaa

SEQ ID NO: 3069794 - RNA, 15 nt, Human
guuuucugagaaaga

SEQ ID NO: 3069795 - RNA, 16 nt, Human
guuuuaagaggcaggg

SEQ ID NO: 3069796 - RNA, 14 nt, Human
guuuuaagaggcag

SEQ ID NO: 3069797 - RNA, 13 nt, Human
aaguauucuaaau

SEQ ID NO: 3069798 - RNA, 15 nt, Human
aaguauucuaaauuu

SEQ ID NO: 3069799 - RNA, 20 nt, Human
aaguacuucuccacccugcu

SEQ ID NO: 3069800 - RNA, 23 nt, Human
aaguacuucuccacccugcucuc

SEQ ID NO: 3069801 - RNA, 22 nt, Human
aaguacuucuccacccugcucu

SEQ ID NO: 3069802 - RNA, 23 nt, Human
aaguauguuagugcaaauuguca

SEQ ID NO: 3069803 - RNA, 21 nt, Human
aaguauguuagugcaaauugu

SEQ ID NO: 3069804 - RNA, 15 nt, Human
aaguacuauguauca

SEQ ID NO: 3069805 - RNA, 22 nt, Human
guuuucugagaaagacuauuca

SEQ ID NO: 3069806 - RNA, 17 nt, Human
guuuucugagaaagacu

SEQ ID NO: 3069807 - RNA, 16 nt, Human
guuuucugagaaagac

SEQ ID NO: 3069808 - RNA, 16 nt, Human
aaguacuauguaucaa

SEQ ID NO: 3069809 - RNA, 15 nt, Human
aaguacuggagaaaa

SEQ ID NO: 3069810 - RNA, 21 nt, Human
aaguacuucuccacccugcuc

SEQ ID NO: 3069811 - RNA, 13 nt, Human
aagucacacagug

SEQ ID NO: 3069812 - RNA, 20 nt, Human
aagucacauuccugaacagg

SEQ ID NO: 3069813 - RNA, 18 nt, Human
aaguauucuuauuuaaug

SEQ ID NO: 3069814 - RNA, 24 nt, Human
aagucacacaguauuacuucugcu

SEQ ID NO: 3069815 - RNA, 21 nt, Human
aagucaagugaaaaaggagga

SEQ ID NO: 3069816 - RNA, 15 nt, Human
guuuuuuuuuaaaga

SEQ ID NO: 3069817 - RNA, 23 nt, Human
guuuuuuuuuaaaaaagaaacau

SEQ ID NO: 3069818 - RNA, 16 nt, Human
guuuuugucuuaaaaa

SEQ ID NO: 3069819 - RNA, 17 nt, Human
aagucuuagauguauau

SEQ ID NO: 3069820 - RNA, 19 nt, Human
aagucuuagauguauauau

SEQ ID NO: 3069821 - RNA, 18 nt, Human
aagucuuagauguauaua

SEQ ID NO: 3069822 - RNA, 18 nt, Human
guuuuucuaggccugggg

SEQ ID NO: 3069823 - RNA, 17 nt, Human
guugggcuggugucacc

SEQ ID NO: 3069824 - RNA, 15 nt, Human
guugggcugguguca

SEQ ID NO: 3069825 - RNA, 23 nt, Human
guuggcugggggccucagugcca

SEQ ID NO: 3069826 - RNA, 15 nt, Human
guugcccaggcuggc

SEQ ID NO: 3069827 - RNA, 16 nt, Human
guugcccaggcuggcg

SEQ ID NO: 3069828 - RNA, 14 nt, Human
aaggaugcccaaag

SEQ ID NO: 3069829 - RNA, 22 nt, Human
aaggaugcacagaguuguuaca

SEQ ID NO: 3069830 - RNA, 24 nt, Human
aaggaugcacagaguuguuacauu

SEQ ID NO: 3069831 - RNA, 14 nt, Human
aaggccccgcccag

SEQ ID NO: 3069832 - RNA, 16 nt, Human
aaggccccgcccaggc

SEQ ID NO: 3069833 - RNA, 19 nt, Human
aaggccccgcccaggcuua

SEQ ID NO: 3069834 - RNA, 15 nt, Human
aaggcuaccuuugua

SEQ ID NO: 3069835 - RNA, 14 nt, Human
guugcccaggcugg

SEQ ID NO: 3069836 - RNA, 13 nt, Human
aaggcuaccuuug

SEQ ID NO: 3069837 - RNA, 12 nt, Human
aaggaaaaugau

SEQ ID NO: 3069838 - RNA, 14 nt, Human
aaggaaaaugauac

SEQ ID NO: 3069839 - RNA, 15 nt, Human
aaggaaacccagcuc

SEQ ID NO: 3069840 - RNA, 22 nt, Human
aaggagcaagucagaauagaaa

SEQ ID NO: 3069841 - RNA, 17 nt, Human
aaggagauuuacaacug

SEQ ID NO: 3069842 - RNA, 18 nt, Human
aaggagauuuacaacugg

SEQ ID NO: 3069843 - RNA, 11 nt, Human
aaggauaaagu

SEQ ID NO: 3069844 - RNA, 11 nt, Human
aaggauccuga

SEQ ID NO: 3069845 - RNA, 12 nt, Human
aaggauccugag

SEQ ID NO: 3069846 - RNA, 14 nt, Human
aaggaucuucaucu

SEQ ID NO: 3069847 - RNA, 20 nt, Human
aaggauccugagccagauuu

SEQ ID NO: 3069848 - RNA, 22 nt, Human
aaggauccugagccagauuuca

SEQ ID NO: 3069849 - RNA, 23 nt, Human
aaggauaaaguugguaaaccuuu

SEQ ID NO: 3069850 - RNA, 21 nt, Human
aaggauaaaguugguaaaccu

SEQ ID NO: 3069851 - RNA, 20 nt, Human
aaggaggaagagaaaaaaua

SEQ ID NO: 3069852 - RNA, 13 nt, Human
guguuuauuuaua

SEQ ID NO: 3069853 - RNA, 13 nt, Human
guguuuauuguca

SEQ ID NO: 3069854 - RNA, 11 nt, Human
aagcucccagg

SEQ ID NO: 3069855 - RNA, 12 nt, Human
aagcucccaggc

SEQ ID NO: 3069856 - RNA, 22 nt, Human
aagcucccaggcauuccccagg

SEQ ID NO: 3069857 - RNA, 23 nt, Human
aagcucccaggcauuccccagga

SEQ ID NO: 3069858 - RNA, 21 nt, Human
aagcucuacugaggugcuaug

SEQ ID NO: 3069859 - RNA, 16 nt, Human
aagcuuuuaugugaaa

SEQ ID NO: 3069860 - RNA, 16 nt, Human
aaggaaaaaauaacaa

SEQ ID NO: 3069861 - RNA, 18 nt, Human
aagcuguuacugucuuca

SEQ ID NO: 3069862 - RNA, 13 nt, Human
aagcucugcuccu

SEQ ID NO: 3069863 - RNA, 23 nt, Human
guugauagcacagacccugcccu

SEQ ID NO: 3069864 - RNA, 22 nt, Human
guugauagcacagacccugccc

SEQ ID NO: 3069865 - RNA, 13 nt, Human
guugaauuuuaca

SEQ ID NO: 3069866 - RNA, 12 nt, Human
guucucugcccu

SEQ ID NO: 3069867 - RNA, 11 nt, Human
guucucugccc

SEQ ID NO: 3069868 - RNA, 16 nt, Human
guucucugaggacacu

SEQ ID NO: 3069869 - RNA, 14 nt, Human
guucucugaggaca

SEQ ID NO: 3069870 - RNA, 20 nt, Human
uaaauguuuuuuuuuaaaga

SEQ ID NO: 3069871 - RNA, 22 nt, Human
uaaauuaacuuuuauaaacuuu

SEQ ID NO: 3069872 - RNA, 21 nt, Human
uaaaucuccaaaauaaaacuu

SEQ ID NO: 3069873 - RNA, 20 nt, Human
uaaaucuccaaaauaaaacu

SEQ ID NO: 3069874 - RNA, 18 nt, Human
uaaaucuccaaaauaaaa

SEQ ID NO: 3069875 - RNA, 15 nt, Human
uaaauguugacaugg

SEQ ID NO: 3069876 - RNA, 17 nt, Human
uaaaugauuucauucaa

SEQ ID NO: 3069877 - RNA, 23 nt, Human
uaacaaaaaaauauauuuaauga

SEQ ID NO: 3069878 - RNA, 20 nt, Human
uaacaaaaaaauauauuuaa

SEQ ID NO: 3069879 - RNA, 16 nt, Human
uaaauuuugaguucua

SEQ ID NO: 3069880 - RNA, 14 nt, Human
uaaauuuuauaucu

SEQ ID NO: 3069881 - RNA, 13 nt, Human
uaacaagccaccc

SEQ ID NO: 3069882 - RNA, 13 nt, Human
uaacaaugcugua

SEQ ID NO: 3069883 - RNA, 15 nt, Human
uaacaaugcuguauu

SEQ ID NO: 3069884 - RNA, 17 nt, Human
uaacaaugcuguauuuu

SEQ ID NO: 3069885 - RNA, 18 nt, Human
uaaauaguauuugagagu

SEQ ID NO: 3069886 - RNA, 19 nt, Human
uaaaucuccaaaauaaaac

SEQ ID NO: 3069887 - RNA, 12 nt, Human
uaaauagcuuuu

SEQ ID NO: 3069888 - RNA, 15 nt, Human
aauacaccacuacau

SEQ ID NO: 3069889 - RNA, 14 nt, Human
aauacacacucaaa

SEQ ID NO: 3069890 - RNA, 20 nt, Human
aauacaccacuacauucugu

SEQ ID NO: 3069891 - RNA, 18 nt, Human
aauacaccacuacauucu

SEQ ID NO: 3069892 - RNA, 16 nt, Human
aauacaccacuacauu

SEQ ID NO: 3069893 - RNA, 15 nt, Human
aauaacaauaaaaga

SEQ ID NO: 3069894 - RNA, 15 nt, Human
aauaacgauaaaaga

SEQ ID NO: 3069895 - RNA, 19 nt, Human
aauaacauguaauuaagua

SEQ ID NO: 3069896 - RNA, 12 nt, Human
aauaacauguaa

SEQ ID NO: 3069897 - RNA, 12 nt, Human
aauaaauuauuu

SEQ ID NO: 3069898 - RNA, 21 nt, Human
aauaaaugugccuucauuuuu

SEQ ID NO: 3069899 - RNA, 12 nt, Human
aauaaaugugcc

SEQ ID NO: 3069900 - RNA, 15 nt, Human
aauaacuaaaaggua

SEQ ID NO: 3069901 - RNA, 19 nt, Human
aauaauguuucaaacauau

SEQ ID NO: 3069902 - RNA, 12 nt, Human
aauaaaaauaau

SEQ ID NO: 3069903 - RNA, 22 nt, Human
aauaaaaauauuguguugugaa

SEQ ID NO: 3069904 - RNA, 14 nt, Human
aauaaaguaauuau

SEQ ID NO: 3069905 - RNA, 22 nt, Human
aauaaaauccauacauuugugu

SEQ ID NO: 3069906 - RNA, 19 nt, Human
uaaaguguauuuuuuuacu

SEQ ID NO: 3069907 - RNA, 15 nt, Human
uaaaguguauuuuuu

SEQ ID NO: 3069908 - RNA, 14 nt, Human
uaaaguguauuuuu

SEQ ID NO: 3069909 - RNA, 13 nt, Human
uaaagucaggggu

SEQ ID NO: 3069910 - RNA, 19 nt, Human
uaaaauuuuuaaucuuuaa

SEQ ID NO: 3069911 - RNA, 19 nt, Human
uaaaccaaggcuagaacca

SEQ ID NO: 3069912 - RNA, 17 nt, Human
uaaaauuuuuaaucuuu

SEQ ID NO: 3069913 - RNA, 19 nt, Human
aaguuuacauuguaaauag

SEQ ID NO: 3069914 - RNA, 18 nt, Human
aaguuuacauuguaaaua

SEQ ID NO: 3069915 - RNA, 22 nt, Human
aaguuauugauaaguucauaca

SEQ ID NO: 3069916 - RNA, 23 nt, Human
aaguuauugauaaguucauacau

SEQ ID NO: 3069917 - RNA, 12 nt, Human
aaguucauacau

SEQ ID NO: 3069918 - RNA, 13 nt, Human
aaguucauacauu

SEQ ID NO: 3069919 - RNA, 15 nt, Human
aaguucauacauugu

SEQ ID NO: 3069920 - RNA, 19 nt, Human
aaguuauugauaaguucau

SEQ ID NO: 3069921 - RNA, 20 nt, Human
aaguuauugauaaguucaua

SEQ ID NO: 3069922 - RNA, 14 nt, Human
aaguuaaauaaauc

SEQ ID NO: 3069923 - RNA, 12 nt, Human
aaguuaaauaaa

SEQ ID NO: 3069924 - RNA, 17 nt, Human
guuuuuuuuuaaagacu

SEQ ID NO: 3069925 - RNA, 16 nt, Human
uaaagacuuuuaugau

SEQ ID NO: 3069926 - RNA, 21 nt, Human
uaaaggcuaccuuuguauucu

SEQ ID NO: 3069927 - RNA, 19 nt, Human
uaaaggcuaccuuuguauu

SEQ ID NO: 3069928 - RNA, 19 nt, Human
uaaaccucaaaaugucuaa

SEQ ID NO: 3069929 - RNA, 18 nt, Human
uaaaccucaaaaugucua

SEQ ID NO: 3069930 - RNA, 16 nt, Human
uaaaccgccaaggcug

SEQ ID NO: 3069931 - RNA, 18 nt, Human
uaaaccgccaaggcuggg

SEQ ID NO: 3069932 - RNA, 13 nt, Human
uaaacgucuuaaa

SEQ ID NO: 3069933 - RNA, 17 nt, Human
uaaacgucuuaaauauu

SEQ ID NO: 3069934 - RNA, 17 nt, Human
uaaacucauuucuagca

SEQ ID NO: 3069935 - RNA, 12 nt, Human
uaaacucauuuc

SEQ ID NO: 3069936 - RNA, 17 nt, Human
gugaguacuacaguccu

SEQ ID NO: 3069937 - RNA, 21 nt, Human
gugagcacuaaggugugcucu

SEQ ID NO: 3069938 - RNA, 16 nt, Human
gugagaggggaacaga

SEQ ID NO: 3069939 - RNA, 13 nt, Human
gugagagcugggu

SEQ ID NO: 3069940 - RNA, 15 nt, Human
gugagcaauccugca

SEQ ID NO: 3069941 - RNA, 12 nt, Human
gugaccccaggu

SEQ ID NO: 3069942 - RNA, 12 nt, Human
gugagagcuggg

SEQ ID NO: 3069943 - RNA, 19 nt, Human
gugaguacuacaguccucc

SEQ ID NO: 3069944 - RNA, 17 nt, Human
gugaguccuggcauggg

SEQ ID NO: 3069945 - RNA, 20 nt, Human
gugaguccuggcaugggaau

SEQ ID NO: 3069946 - RNA, 13 nt, Human
aacugaaaucaua

SEQ ID NO: 3069947 - RNA, 20 nt, Human
aacugaaaucauacuucuua

SEQ ID NO: 3069948 - RNA, 16 nt, Human
gugaagugaaugaaac

SEQ ID NO: 3069949 - RNA, 14 nt, Human
gugaagugaagaca

SEQ ID NO: 3069950 - RNA, 23 nt, Human
gugaagacaaugacuuacuguac

SEQ ID NO: 3069951 - RNA, 13 nt, Human
aacuauauuguuu

SEQ ID NO: 3069952 - RNA, 20 nt, Human
aacuaucucauuuccaagca

SEQ ID NO: 3069953 - RNA, 19 nt, Human
gugacagaggcagccccau

SEQ ID NO: 3069954 - RNA, 18 nt, Human
gugacagaggcagcccca

SEQ ID NO: 3069955 - RNA, 16 nt, Human
gugacagaggcagccc

SEQ ID NO: 3069956 - RNA, 17 nt, Human
gugaccaaugaugguca

SEQ ID NO: 3069957 - RNA, 18 nt, Human
gugaccagcaccaucucu

SEQ ID NO: 3069958 - RNA, 21 nt, Human
gugaccagcaccaucucuccu

SEQ ID NO: 3069959 - RNA, 18 nt, Human
gugaccauguuuuguuua

SEQ ID NO: 3069960 - RNA, 23 nt, Human
aacguggcugcuucaaggauccu

SEQ ID NO: 3069961 - RNA, 16 nt, Human
gucuucaguaagccgu

SEQ ID NO: 3069962 - RNA, 15 nt, Human
gucuuuguacagaca

SEQ ID NO: 3069963 - RNA, 16 nt, Human
gucuuuguacagacaa

SEQ ID NO: 3069964 - RNA, 12 nt, Human
aaccugugucuc

SEQ ID NO: 3069965 - RNA, 19 nt, Human
aaccugauugugucucuug

SEQ ID NO: 3069966 - RNA, 18 nt, Human
aaccugauugugucucuu

SEQ ID NO: 3069967 - RNA, 23 nt, Human
gucugacaggcaaugcuggcugu

SEQ ID NO: 3069968 - RNA, 22 nt, Human
gucugacaggcaaugcuggcug

SEQ ID NO: 3069969 - RNA, 21 nt, Human
gucugacaggcaaugcuggcu

SEQ ID NO: 3069970 - RNA, 18 nt, Human
gucuggaaugcaguggua

SEQ ID NO: 3069971 - RNA, 13 nt, Human
gucuucacaacag

SEQ ID NO: 3069972 - RNA, 13 nt, Human
gucucuugguccu

SEQ ID NO: 3069973 - RNA, 20 nt, Human
gucucuugguccugcugcag

SEQ ID NO: 3069974 - RNA, 18 nt, Human
gucucuugguccugcugc

SEQ ID NO: 3069975 - RNA, 19 nt, Human
gucucuugguccugcugca

SEQ ID NO: 3069976 - RNA, 17 nt, Human
gucucuugguccugcug

SEQ ID NO: 3069977 - RNA, 22 nt, Human
gucucuuuaaugucacaggcag

SEQ ID NO: 3069978 - RNA, 19 nt, Human
gucugaaggcuggguucug

SEQ ID NO: 3069979 - RNA, 14 nt, Human
gucugaaggcuggg

SEQ ID NO: 3069980 - RNA, 20 nt, Human
gucucuuuaaugucacaggc

SEQ ID NO: 3069981 - RNA, 19 nt, Human
gucucuuuaaugucacagg

SEQ ID NO: 3069982 - RNA, 18 nt, Human
gucucuuuaaugucacag

SEQ ID NO: 3069983 - RNA, 12 nt, Human
aacauaauuaaa

SEQ ID NO: 3069984 - RNA, 20 nt, Human
aacauacucccaucugugaa

SEQ ID NO: 3069985 - RNA, 18 nt, Human
aacauacucccaucugug

SEQ ID NO: 3069986 - RNA, 16 nt, Human
aacauacucccaucug

SEQ ID NO: 3069987 - RNA, 22 nt, Human
aacauguuuuucuucucccuca

SEQ ID NO: 3069988 - RNA, 14 nt, Human
aacaucaacaucuu

SEQ ID NO: 3069989 - RNA, 16 nt, Human
aacauauauaacaaug

SEQ ID NO: 3069990 - RNA, 20 nt, Human
aacagacuggaagcacagcu

SEQ ID NO: 3069991 - RNA, 13 nt, Human
guccuacccaccc

SEQ ID NO: 3069992 - RNA, 19 nt, Human
aacagauuauuaccuuaca

SEQ ID NO: 3069993 - RNA, 17 nt, Human
aacagucucaggaaauc

SEQ ID NO: 3069994 - RNA, 19 nt, Human
aacagucucaggaaaucaa

SEQ ID NO: 3069995 - RNA, 23 nt, Human
guccaugaagauguagaggagaa

SEQ ID NO: 3069996 - RNA, 18 nt, Human
gucccaccuuggcugcag

SEQ ID NO: 3069997 - RNA, 17 nt, Human
gucccaccuuggcugca

SEQ ID NO: 3069998 - RNA, 19 nt, Human
gucccaccuuggcugcagg

SEQ ID NO: 3069999 - RNA, 13 nt, Human
gucccuuuuccuu

SEQ ID NO: 3070000 - RNA, 21 nt, Human
guccgaaagggacuuggaagc

SEQ ID NO: 3070001 - RNA, 22 nt, Human
guccgaaagggacuuggaagcu

SEQ ID NO: 3070002 - RNA, 13 nt, Human
gucccccugacaa

SEQ ID NO: 3070003 - RNA, 15 nt, Human
guccccgcacugggc

SEQ ID NO: 3070004 - RNA, 16 nt, Human
guccccgcacugggcu

SEQ ID NO: 3070005 - RNA, 23 nt, Human
guccccuguuuguuucugaaagg

SEQ ID NO: 3070006 - RNA, 22 nt, Human
aacauuuguucuauagcuuuuc

SEQ ID NO: 3070007 - RNA, 14 nt, Human
gucuccagcugcug

SEQ ID NO: 3070008 - RNA, 13 nt, Human
gucuccagcugcu

SEQ ID NO: 3070009 - RNA, 13 nt, Human
aaccacaucuugc

SEQ ID NO: 3070010 - RNA, 23 nt, Human
aaccaucauugaaaucuuuuugc

SEQ ID NO: 3070011 - RNA, 14 nt, Human
gucuaugggacuca

SEQ ID NO: 3070012 - RNA, 22 nt, Human
gucucaaacucuugaccucagg

SEQ ID NO: 3070013 - RNA, 19 nt, Human
gucucaaaaaaagaaaaag

SEQ ID NO: 3070014 - RNA, 23 nt, Human
gucucaguccaugaagauguaga

SEQ ID NO: 3070015 - RNA, 14 nt, Human
gucgcccuggacug

SEQ ID NO: 3070016 - RNA, 23 nt, Human
gucgcccagucuggaaugcagug

SEQ ID NO: 3070017 - RNA, 20 nt, Human
gucuaccugaggggccucuu

SEQ ID NO: 3070018 - RNA, 14 nt, Human
gucgcccagucugg

SEQ ID NO: 3070019 - RNA, 13 nt, Human
gucgcccagucug

SEQ ID NO: 3070020 - RNA, 14 nt, Human
gucgaggacaggga

SEQ ID NO: 3070021 - RNA, 13 nt, Human
guccugcugcagu

SEQ ID NO: 3070022 - RNA, 16 nt, Human
guccugcugcaguugc

SEQ ID NO: 3070023 - RNA, 13 nt, Human
guguucugugaua

SEQ ID NO: 3070024 - RNA, 19 nt, Human
gugugguguuuccuggcac

SEQ ID NO: 3070025 - RNA, 20 nt, Human
gugucccaaaaagaaaggag

SEQ ID NO: 3070026 - RNA, 19 nt, Human
gugucuugcaauggcagcc

SEQ ID NO: 3070027 - RNA, 16 nt, Human
aagcaaguauuagaau

SEQ ID NO: 3070028 - RNA, 15 nt, Human
gugugguguuuccug

SEQ ID NO: 3070029 - RNA, 18 nt, Human
gugugagucaccaagccc

SEQ ID NO: 3070030 - RNA, 13 nt, Human
gugugagucacca

SEQ ID NO: 3070031 - RNA, 21 nt, Human
gugucuugcaauggcagccuu

SEQ ID NO: 3070032 - RNA, 22 nt, Human
aagauguagaggagaaacugga

SEQ ID NO: 3070033 - RNA, 13 nt, Human
aagcaaaauguga

SEQ ID NO: 3070034 - RNA, 19 nt, Human
aagauguagaggagaaacu

SEQ ID NO: 3070035 - RNA, 14 nt, Human
aagcaaaugugaau

SEQ ID NO: 3070036 - RNA, 13 nt, Human
aagcaaaugugaa

SEQ ID NO: 3070037 - RNA, 19 nt, Human
aagcaaaauuuuuucucua

SEQ ID NO: 3070038 - RNA, 14 nt, Human
aagaguaggaagac

SEQ ID NO: 3070039 - RNA, 18 nt, Human
gugguuauggagagggug

SEQ ID NO: 3070040 - RNA, 19 nt, Human
gugguguuuccuggcacug

SEQ ID NO: 3070041 - RNA, 16 nt, Human
aagaguaggaagacuu

SEQ ID NO: 3070042 - RNA, 18 nt, Human
aagaguaggaagacuuug

SEQ ID NO: 3070043 - RNA, 19 nt, Human
aagaguaggaagacuuugg

SEQ ID NO: 3070044 - RNA, 15 nt, Human
aagauauuuugcuuu

SEQ ID NO: 3070045 - RNA, 20 nt, Human
aagauauuuugcuuugugau

SEQ ID NO: 3070046 - RNA, 17 nt, Human
aagauauuuugcuuugu

SEQ ID NO: 3070047 - RNA, 22 nt, Human
aagauauuuugcuuugugauuu

SEQ ID NO: 3070048 - RNA, 18 nt, Human
guggggggggugcugggc

SEQ ID NO: 3070049 - RNA, 14 nt, Human
guggguagacacac

SEQ ID NO: 3070050 - RNA, 15 nt, Human
gugguguuuccuggc

SEQ ID NO: 3070051 - RNA, 16 nt, Human
gugguguuuccuggca

SEQ ID NO: 3070052 - RNA, 20 nt, Human
guggugguuuucuguucuuu

SEQ ID NO: 3070053 - RNA, 13 nt, Human
guggccucccaac

SEQ ID NO: 3070054 - RNA, 14 nt, Human
guggccucccaacu

SEQ ID NO: 3070055 - RNA, 15 nt, Human
gugggauccuccagg

SEQ ID NO: 3070056 - RNA, 18 nt, Human
gugggauccuccaggugc

SEQ ID NO: 3070057 - RNA, 12 nt, Human
gugggagcugag

SEQ ID NO: 3070058 - RNA, 16 nt, Human
aagagauugugguuuc

SEQ ID NO: 3070059 - RNA, 19 nt, Human
aagagauugugguuucauu

SEQ ID NO: 3070060 - RNA, 12 nt, Human
aagagcccaggc

SEQ ID NO: 3070061 - RNA, 14 nt, Human
aagagcccaggccu

SEQ ID NO: 3070062 - RNA, 16 nt, Human
aagagcccaggccucc

SEQ ID NO: 3070063 - RNA, 18 nt, Human
aagagcuguucacagcca

SEQ ID NO: 3070064 - RNA, 23 nt, Human
aagacgcugugcugcccugccca

SEQ ID NO: 3070065 - RNA, 20 nt, Human
aagacgcugugcugcccugc

SEQ ID NO: 3070066 - RNA, 13 nt, Human
aagacuauucaaa

SEQ ID NO: 3070067 - RNA, 14 nt, Human
aagacuauucaaac

SEQ ID NO: 3070068 - RNA, 21 nt, Human
aagacgcugugcugcccugcc

SEQ ID NO: 3070069 - RNA, 22 nt, Human
aagacgcugugcugcccugccc

SEQ ID NO: 3070070 - RNA, 17 nt, Human
aagacucauucuucugu

SEQ ID NO: 3070071 - RNA, 14 nt, Human
aagacuccaaagaa

SEQ ID NO: 3070072 - RNA, 17 nt, Human
aagacuccaaagaaaug

SEQ ID NO: 3070073 - RNA, 16 nt, Human
aagacuccaaagaaau

SEQ ID NO: 3070074 - RNA, 17 nt, Human
aagacugcauuauauuu

SEQ ID NO: 3070075 - RNA, 22 nt, Human
aagacucccaugagggagaugc

SEQ ID NO: 3070076 - RNA, 24 nt, Human
guggacacagcucuucuccaggcu

SEQ ID NO: 3070077 - RNA, 15 nt, Human
guggacacagcucuu

SEQ ID NO: 3070078 - RNA, 14 nt, Human
guggacacagcucu

SEQ ID NO: 3070079 - RNA, 19 nt, Human
gugcugggccccugccucu

SEQ ID NO: 3070080 - RNA, 16 nt, Human
gugcugggccccugcc

SEQ ID NO: 3070081 - RNA, 21 nt, Human
gugcugcccugcccaccuggc

SEQ ID NO: 3070082 - RNA, 19 nt, Human
gugcugcccugcccaccug

SEQ ID NO: 3070083 - RNA, 20 nt, Human
gugcugcccugcccaccugg

SEQ ID NO: 3070084 - RNA, 18 nt, Human
gugcugcccugcccaccu

SEQ ID NO: 3070085 - RNA, 13 nt, Human
aagaauauuuuaa

SEQ ID NO: 3070086 - RNA, 17 nt, Human
guggcagcugcggucca

SEQ ID NO: 3070087 - RNA, 24 nt, Human
aagaauuucuaggacugaauuaug

SEQ ID NO: 3070088 - RNA, 13 nt, Human
aagacccaaaagg

SEQ ID NO: 3070089 - RNA, 13 nt, Human
guggcaccagcag

SEQ ID NO: 3070090 - RNA, 14 nt, Human
guggcaccagcagc

SEQ ID NO: 3070091 - RNA, 22 nt, Human
guggcagcucaccucucccuug

SEQ ID NO: 3070092 - RNA, 14 nt, Human
guggcagcugcggu

SEQ ID NO: 3070093 - RNA, 23 nt, Human
guggauuuaacagaaauguacag

SEQ ID NO: 3070094 - RNA, 20 nt, Human
guggauuuaacagaaaugua

SEQ ID NO: 3070095 - RNA, 21 nt, Human
guggauuuaacagaaauguac

SEQ ID NO: 3070096 - RNA, 16 nt, Human
aagaagcccaggaaag

SEQ ID NO: 3070097 - RNA, 17 nt, Human
aagaagcccaggaaagg

SEQ ID NO: 3070098 - RNA, 22 nt, Human
aagaagcaccaaucaugaauua

SEQ ID NO: 3070099 - RNA, 14 nt, Human
aagaagcucucucc

SEQ ID NO: 3070100 - RNA, 15 nt, Human
aagaagcucucuccu

SEQ ID NO: 3070101 - RNA, 13 nt, Human
aagaaaauaucac

SEQ ID NO: 3070102 - RNA, 20 nt, Human
aagaaaaaggaugcacagag

SEQ ID NO: 3070103 - RNA, 19 nt, Human
aagaaaaaggaugcacaga

SEQ ID NO: 3070104 - RNA, 22 nt, Human
aagaaaaaggaugcacagaguu

SEQ ID NO: 3070105 - RNA, 23 nt, Human
aacuugguucccauuugcuccuu

SEQ ID NO: 3070106 - RNA, 22 nt, Human
aacuugucuuuggacccugagg

SEQ ID NO: 3070107 - RNA, 14 nt, Human
aacuuggcgcugcc

SEQ ID NO: 3070108 - RNA, 21 nt, Human
gugccuggguggaugggccac

SEQ ID NO: 3070109 - RNA, 15 nt, Human
gugccucugggacug

SEQ ID NO: 3070110 - RNA, 14 nt, Human
gugccucugggacu

SEQ ID NO: 3070111 - RNA, 22 nt, Human
gugcauuugaggucuguucuuu

SEQ ID NO: 3070112 - RNA, 21 nt, Human
gugcauuugaggucuguucuu

SEQ ID NO: 3070113 - RNA, 20 nt, Human
gugcauuugaggucuguucu

SEQ ID NO: 3070114 - RNA, 20 nt, Human
gugcacuaauguguaagaca

SEQ ID NO: 3070115 - RNA, 15 nt, Human
gugcauuuggugguu

SEQ ID NO: 3070116 - RNA, 14 nt, Human
gugccaagcagagg

SEQ ID NO: 3070117 - RNA, 14 nt, Human
gugcacacaccaga

SEQ ID NO: 3070118 - RNA, 12 nt, Human
gugcacacacca

SEQ ID NO: 3070119 - RNA, 18 nt, Human
gugcacguacacacacau

SEQ ID NO: 3070120 - RNA, 17 nt, Human
gugcacacaccagagcc

SEQ ID NO: 3070121 - RNA, 23 nt, Human
gugcacaagcuccaagcucccag

SEQ ID NO: 3070122 - RNA, 18 nt, Human
gugcacgcacacugucug

SEQ ID NO: 3070123 - RNA, 15 nt, Human
aaaaaauauuuuccu

SEQ ID NO: 3070124 - RNA, 12 nt, Human
aaaaacacagca

SEQ ID NO: 3070125 - RNA, 18 nt, Human
aaaaacacagcaagggug

SEQ ID NO: 3070126 - RNA, 13 nt, Human
aaaaacacagcaa

SEQ ID NO: 3070127 - RNA, 12 nt, Human
aguccuguaaug

SEQ ID NO: 3070128 - RNA, 12 nt, Human
agucugaaggcu

SEQ ID NO: 3070129 - RNA, 16 nt, Human
agucugaaggcugggu

SEQ ID NO: 3070130 - RNA, 13 nt, Human
agucugaaggcug

SEQ ID NO: 3070131 - RNA, 15 nt, Human
agucugaaggcuggg

SEQ ID NO: 3070132 - RNA, 20 nt, Human
aguccuggcaugggaaugaa

SEQ ID NO: 3070133 - RNA, 21 nt, Human
aguccuggcaugggaaugaau

SEQ ID NO: 3070134 - RNA, 22 nt, Human
aguccuggcaugggaaugaaug

SEQ ID NO: 3070135 - RNA, 20 nt, Human
agugaacuugggccacugug

SEQ ID NO: 3070136 - RNA, 17 nt, Human
agucuggaaugcagugg

SEQ ID NO: 3070137 - RNA, 18 nt, Human
agucugauucccaagcuc

SEQ ID NO: 3070138 - RNA, 16 nt, Human
agucugauucccaagc

SEQ ID NO: 3070139 - RNA, 16 nt, Human
agugaagacaaugacu

SEQ ID NO: 3070140 - RNA, 14 nt, Human
agugaagacaauga

SEQ ID NO: 3070141 - RNA, 16 nt, Human
aguaucuuuuuauuca

SEQ ID NO: 3070142 - RNA, 14 nt, Human
aguaugaaauuaua

SEQ ID NO: 3070143 - RNA, 16 nt, Human
aguaugaaauuauaua

SEQ ID NO: 3070144 - RNA, 16 nt, Human
aguaugaggcauuugu

SEQ ID NO: 3070145 - RNA, 15 nt, Human
aguaugaggcauuug

SEQ ID NO: 3070146 - RNA, 11 nt, Human
aguaucuugaa

SEQ ID NO: 3070147 - RNA, 12 nt, Human
aguaucuugaag

SEQ ID NO: 3070148 - RNA, 15 nt, Human
aguaucuugaagacu

SEQ ID NO: 3070149 - RNA, 15 nt, Human
aguaucucagggccu

SEQ ID NO: 3070150 - RNA, 23 nt, Human
agucaaauugugugaaagguacu

SEQ ID NO: 3070151 - RNA, 19 nt, Human
agucaaauugugugaaagg

SEQ ID NO: 3070152 - RNA, 23 nt, Human
aguugaaaaucuuauaauuuaaa

SEQ ID NO: 3070153 - RNA, 22 nt, Human
aguugaaaagacuccaaagaaa

SEQ ID NO: 3070154 - RNA, 14 nt, Human
aguugaagacagag

SEQ ID NO: 3070155 - RNA, 21 nt, Human
aguugugugaauaccccaaga

SEQ ID NO: 3070156 - RNA, 16 nt, Human
aguuguguuugaagca

SEQ ID NO: 3070157 - RNA, 20 nt, Human
aguuguuugauucagacagc

SEQ ID NO: 3070158 - RNA, 10 nt, Human
aguucauaca

SEQ ID NO: 3070159 - RNA, 11 nt, Human
aguucauacau

SEQ ID NO: 3070160 - RNA, 19 nt, Human
aguucagguaacaggcaga

SEQ ID NO: 3070161 - RNA, 18 nt, Human
aguucagguaacaggcag

SEQ ID NO: 3070162 - RNA, 20 nt, Human
aguucagguaacaggcagau

SEQ ID NO: 3070163 - RNA, 22 nt, Human
aguugaaaaucuuauaauuuaa

SEQ ID NO: 3070164 - RNA, 21 nt, Human
aguugaaaagacuccaaagaa

SEQ ID NO: 3070165 - RNA, 15 nt, Human
aguucauacauugua

SEQ ID NO: 3070166 - RNA, 22 nt, Human
aguucaucuugaauuguaagga

SEQ ID NO: 3070167 - RNA, 14 nt, Human
aguuacagacaaag

SEQ ID NO: 3070168 - RNA, 16 nt, Human
aguuacagacaaagcg

SEQ ID NO: 3070169 - RNA, 18 nt, Human
aguuacacuaaaagguga

SEQ ID NO: 3070170 - RNA, 12 nt, Human
aguuaaauaaau

SEQ ID NO: 3070171 - RNA, 23 nt, Human
aguggcuuaaaacaacacucaca

SEQ ID NO: 3070172 - RNA, 18 nt, Human
aguguauuuuuuuacuaa

SEQ ID NO: 3070173 - RNA, 17 nt, Human
aguguauuuuuuuacua

SEQ ID NO: 3070174 - RNA, 15 nt, Human
agugucuuaauuaaa

SEQ ID NO: 3070175 - RNA, 14 nt, Human
agugggagcugccu

SEQ ID NO: 3070176 - RNA, 15 nt, Human
agugggagcugccug

SEQ ID NO: 3070177 - RNA, 18 nt, Human
agugucuuaauuaaaaga

SEQ ID NO: 3070178 - RNA, 17 nt, Human
agugucuuaauuaaaag

SEQ ID NO: 3070179 - RNA, 16 nt, Human
auaucaaauauauuca

SEQ ID NO: 3070180 - RNA, 19 nt, Human
auauauuuuuuucugaaau

SEQ ID NO: 3070181 - RNA, 23 nt, Human
auauuaugaagcuuuuaugugaa

SEQ ID NO: 3070182 - RNA, 16 nt, Human
auauuauguuaaaacu

SEQ ID NO: 3070183 - RNA, 19 nt, Human
auauuuacuucuuauacau

SEQ ID NO: 3070184 - RNA, 22 nt, Human
auauuuauuacuguaagaaaau

SEQ ID NO: 3070185 - RNA, 13 nt, Human
auauuuauuuuaa

SEQ ID NO: 3070186 - RNA, 21 nt, Human
auaugcuuauacacuuacacu

SEQ ID NO: 3070187 - RNA, 20 nt, Human
auaugcuucuguuuuauaau

SEQ ID NO: 3070188 - RNA, 22 nt, Human
auaugcuucuguuuuauaauuu

SEQ ID NO: 3070189 - RNA, 22 nt, Human
auauuaccacagacauacuaac

SEQ ID NO: 3070190 - RNA, 19 nt, Human
auauuaccacagacauacu

SEQ ID NO: 3070191 - RNA, 15 nt, Human
auagguuuaauaauu

SEQ ID NO: 3070192 - RNA, 14 nt, Human
auagguuuggacaa

SEQ ID NO: 3070193 - RNA, 21 nt, Human
auaguauuugagaguucuaaa

SEQ ID NO: 3070194 - RNA, 20 nt, Human
auaguauuugagaguucuaa

SEQ ID NO: 3070195 - RNA, 18 nt, Human
auaguaugguggcugggu

SEQ ID NO: 3070196 - RNA, 17 nt, Human
auaguaugguggcuggg

SEQ ID NO: 3070197 - RNA, 23 nt, Human
auaggugcuacaaaaacacagca

SEQ ID NO: 3070198 - RNA, 21 nt, Human
auaggugcuacaaaaacacag

SEQ ID NO: 3070199 - RNA, 15 nt, Human
auaggugcuacaaaa

SEQ ID NO: 3070200 - RNA, 14 nt, Human
auaggugcuacaaa

SEQ ID NO: 3070201 - RNA, 15 nt, Human
auagccaaggccaaa

SEQ ID NO: 3070202 - RNA, 21 nt, Human
auagccaaggccaaaggaagc

SEQ ID NO: 3070203 - RNA, 18 nt, Human
auagcagcuuauucacaa

SEQ ID NO: 3070204 - RNA, 23 nt, Human
auaguauuugagaguucuaaauu

SEQ ID NO: 3070205 - RNA, 14 nt, Human
auagucaaauugug

SEQ ID NO: 3070206 - RNA, 20 nt, Human
auaauuaaauuuugaguucu

SEQ ID NO: 3070207 - RNA, 15 nt, Human
auaauguaagcucua

SEQ ID NO: 3070208 - RNA, 15 nt, Human
auaaugucccuucac

SEQ ID NO: 3070209 - RNA, 23 nt, Human
auaauguuucaaacauauauaac

SEQ ID NO: 3070210 - RNA, 18 nt, Human
auacaccacuacauucug

SEQ ID NO: 3070211 - RNA, 18 nt, Human
auacacacucaaaucaag

SEQ ID NO: 3070212 - RNA, 17 nt, Human
auacacacucaaaucaa

SEQ ID NO: 3070213 - RNA, 20 nt, Human
auacaccacuacauucuguu

SEQ ID NO: 3070214 - RNA, 19 nt, Human
auacaccacuacauucugu

SEQ ID NO: 3070215 - RNA, 21 nt, Human
auacaccacuacauucuguua

SEQ ID NO: 3070216 - RNA, 20 nt, Human
auaaugcgugcauaccacuu

SEQ ID NO: 3070217 - RNA, 21 nt, Human
auaaugcgugcauaccacuuu

SEQ ID NO: 3070218 - RNA, 14 nt, Human
auaauguaagcucu

SEQ ID NO: 3070219 - RNA, 12 nt, Human
auacccaccccc

SEQ ID NO: 3070220 - RNA, 11 nt, Human
auacccacccc

SEQ ID NO: 3070221 - RNA, 18 nt, Human
auaccugucccccugaca

SEQ ID NO: 3070222 - RNA, 17 nt, Human
auaccugucccccugac

SEQ ID NO: 3070223 - RNA, 18 nt, Human
auaaaggauuaaugucaa

SEQ ID NO: 3070224 - RNA, 18 nt, Human
auaaagcuguguggcagu

SEQ ID NO: 3070225 - RNA, 15 nt, Human
auaaagcaggcagaa

SEQ ID NO: 3070226 - RNA, 20 nt, Human
auaaagcagcguuucuauga

SEQ ID NO: 3070227 - RNA, 19 nt, Human
auaaagcagcguuucuaug

SEQ ID NO: 3070228 - RNA, 18 nt, Human
auaaagcagcguuucuau

SEQ ID NO: 3070229 - RNA, 14 nt, Human
auaaagcagcguuu

SEQ ID NO: 3070230 - RNA, 13 nt, Human
auaaagcagcguu

SEQ ID NO: 3070231 - RNA, 20 nt, Human
auaaacuuuuuucuuacugu

SEQ ID NO: 3070232 - RNA, 24 nt, Human
auaaacuuuaccuuuuuuauacau

SEQ ID NO: 3070233 - RNA, 16 nt, Human
auaaacuuuaccuuuu

SEQ ID NO: 3070234 - RNA, 21 nt, Human
auaaacuuuaccuuuuuuaua

SEQ ID NO: 3070235 - RNA, 17 nt, Human
auaaaacuuuuuaaaau

SEQ ID NO: 3070236 - RNA, 14 nt, Human
auaaaaauauugug

SEQ ID NO: 3070237 - RNA, 11 nt, Human
auaaaacuuuu

SEQ ID NO: 3070238 - RNA, 15 nt, Human
auaaaacuuuuuaaa

SEQ ID NO: 3070239 - RNA, 14 nt, Human
auguuucaaacuuu

SEQ ID NO: 3070240 - RNA, 17 nt, Human
auguuucaaacuuugga

SEQ ID NO: 3070241 - RNA, 21 nt, Human
auguuucaaacauauauaaca

SEQ ID NO: 3070242 - RNA, 12 nt, Human
auguuucaaacu

SEQ ID NO: 3070243 - RNA, 13 nt, Human
auguuucaaacuu

SEQ ID NO: 3070244 - RNA, 13 nt, Human
auguucugggaca

SEQ ID NO: 3070245 - RNA, 18 nt, Human
auguuugccucugccucu

SEQ ID NO: 3070246 - RNA, 22 nt, Human
auguuugccucugccucugaca

SEQ ID NO: 3070247 - RNA, 19 nt, Human
auguuugccucugccucug

SEQ ID NO: 3070248 - RNA, 12 nt, Human
auguucugggac

SEQ ID NO: 3070249 - RNA, 11 nt, Human
auguucuggga

SEQ ID NO: 3070250 - RNA, 18 nt, Human
augugggcagugauguca

SEQ ID NO: 3070251 - RNA, 17 nt, Human
auguucuaagaagugaa

SEQ ID NO: 3070252 - RNA, 15 nt, Human
augugaaacauguuu

SEQ ID NO: 3070253 - RNA, 22 nt, Human
augugaaacuggauuaaacuua

SEQ ID NO: 3070254 - RNA, 23 nt, Human
augugaacaguuguguuugaagc

SEQ ID NO: 3070255 - RNA, 11 nt, Human
augugaacagu

SEQ ID NO: 3070256 - RNA, 21 nt, Human
augugaacaguuguguuugaa

SEQ ID NO: 3070257 - RNA, 14 nt, Human
augucuuuucuugc

SEQ ID NO: 3070258 - RNA, 20 nt, Human
auguauucuagcuaauguaa

SEQ ID NO: 3070259 - RNA, 19 nt, Human
auguauucuagcuaaugua

SEQ ID NO: 3070260 - RNA, 17 nt, Human
auguaauuaaguacuau

SEQ ID NO: 3070261 - RNA, 15 nt, Human
auguaauuaaguacu

SEQ ID NO: 3070262 - RNA, 19 nt, Human
auguaagggaaacugccag

SEQ ID NO: 3070263 - RNA, 16 nt, Human
auguaagggaaacugc

SEQ ID NO: 3070264 - RNA, 14 nt, Human
auguaagggaaacu

SEQ ID NO: 3070265 - RNA, 19 nt, Human
auggucaccaaaucagcug

SEQ ID NO: 3070266 - RNA, 16 nt, Human
augcauauuauuuuau

SEQ ID NO: 3070267 - RNA, 17 nt, Human
augccucucucaggcca

SEQ ID NO: 3070268 - RNA, 16 nt, Human
augcaugaaguaauau

SEQ ID NO: 3070269 - RNA, 19 nt, Human
augccucucucaggccaaa

SEQ ID NO: 3070270 - RNA, 21 nt, Human
augcauagguuuagcaguaua

SEQ ID NO: 3070271 - RNA, 17 nt, Human
augcauagguuuagcag

SEQ ID NO: 3070272 - RNA, 18 nt, Human
augcacagaguuguuaca

SEQ ID NO: 3070273 - RNA, 17 nt, Human
augcacagaguuguuac

SEQ ID NO: 3070274 - RNA, 16 nt, Human
augcacaaacagaggc

SEQ ID NO: 3070275 - RNA, 17 nt, Human
augcacaaacagaggcc

SEQ ID NO: 3070276 - RNA, 16 nt, Human
augcacagaguuguua

SEQ ID NO: 3070277 - RNA, 23 nt, Human
augcacacauuuuuuaaaugcac

SEQ ID NO: 3070278 - RNA, 16 nt, Human
augaugccaugaggaa

SEQ ID NO: 3070279 - RNA, 17 nt, Human
augaugccaugaggaac

SEQ ID NO: 3070280 - RNA, 24 nt, Human
augauguuuuccaugaguccccug

SEQ ID NO: 3070281 - RNA, 15 nt, Human
augcacaaacagagg

SEQ ID NO: 3070282 - RNA, 15 nt, Human
auggauuuccagcca

SEQ ID NO: 3070283 - RNA, 14 nt, Human
augcuuguacauaa

SEQ ID NO: 3070284 - RNA, 13 nt, Human
augcuuguacaua

SEQ ID NO: 3070285 - RNA, 12 nt, Human
augcuuguacau

SEQ ID NO: 3070286 - RNA, 16 nt, Human
augcucuuuacuucau

SEQ ID NO: 3070287 - RNA, 11 nt, Human
augcugcccug

SEQ ID NO: 3070288 - RNA, 16 nt, Human
aucaugugaaaucauu

SEQ ID NO: 3070289 - RNA, 14 nt, Human
aucaugugaaauca

SEQ ID NO: 3070290 - RNA, 15 nt, Human
aucaugugaaaucau

SEQ ID NO: 3070291 - RNA, 17 nt, Human
aucagcugcugaaacaa

SEQ ID NO: 3070292 - RNA, 23 nt, Human
aucagcugcugaaacaacaaaua

SEQ ID NO: 3070293 - RNA, 22 nt, Human
aucagcugcugaaacaacaaau

SEQ ID NO: 3070294 - RNA, 21 nt, Human
aucagcugcugaaacaacaaa

SEQ ID NO: 3070295 - RNA, 19 nt, Human
aucagccugcuccagcugu

SEQ ID NO: 3070296 - RNA, 17 nt, Human
aucagccugcuccagcu

SEQ ID NO: 3070297 - RNA, 18 nt, Human
aucagccugcuccagcug

SEQ ID NO: 3070298 - RNA, 19 nt, Human
aucaccgaaaacguggcug

SEQ ID NO: 3070299 - RNA, 21 nt, Human
aucaccgaaaacguggcugcu

SEQ ID NO: 3070300 - RNA, 14 nt, Human
aucaccgaaaacgu

SEQ ID NO: 3070301 - RNA, 20 nt, Human
aucagcacgauuucuguuua

SEQ ID NO: 3070302 - RNA, 19 nt, Human
aucagcacgauuucuguuu

SEQ ID NO: 3070303 - RNA, 23 nt, Human
aucagcacgauuucuguuuagau

SEQ ID NO: 3070304 - RNA, 19 nt, Human
aucaccaacgucugugcca

SEQ ID NO: 3070305 - RNA, 23 nt, Human
aucacccgcuaagagggagggag

SEQ ID NO: 3070306 - RNA, 18 nt, Human
aucaccaacgucugugcc

SEQ ID NO: 3070307 - RNA, 21 nt, Human
aucacagccucugaaaaccaa

SEQ ID NO: 3070308 - RNA, 13 nt, Human
aucacagccucug

SEQ ID NO: 3070309 - RNA, 17 nt, Human
auauuuauuuuaauaau

SEQ ID NO: 3070310 - RNA, 14 nt, Human
auauuuauuuuaau

SEQ ID NO: 3070311 - RNA, 15 nt, Human
auauuuauuuuaaua

SEQ ID NO: 3070312 - RNA, 16 nt, Human
auccagaaagaaaacu

SEQ ID NO: 3070313 - RNA, 18 nt, Human
auccagaaagaaaacuug

SEQ ID NO: 3070314 - RNA, 15 nt, Human
auccagacccggcug

SEQ ID NO: 3070315 - RNA, 14 nt, Human
aucccauuuaaaaa

SEQ ID NO: 3070316 - RNA, 15 nt, Human
aucccauuuaaaaaa

SEQ ID NO: 3070317 - RNA, 11 nt, Human
auccuccaggu

SEQ ID NO: 3070318 - RNA, 23 nt, Human
auccucauacccacccccaccca

SEQ ID NO: 3070319 - RNA, 23 nt, Human
auccuccaggugcacaagcucca

SEQ ID NO: 3070320 - RNA, 15 nt, Human
auccucccaccucag

SEQ ID NO: 3070321 - RNA, 15 nt, Human
auccccuguagagug

SEQ ID NO: 3070322 - RNA, 19 nt, Human
auccucccaccucagccuc

SEQ ID NO: 3070323 - RNA, 18 nt, Human
auccucccaccucagccu

SEQ ID NO: 3070324 - RNA, 20 nt, Human
auccucccaccucagccucc

SEQ ID NO: 3070325 - RNA, 18 nt, Human
aucuugaauaauguaaga

SEQ ID NO: 3070326 - RNA, 22 nt, Human
aucuucugaacuuggcgcugcc

SEQ ID NO: 3070327 - RNA, 18 nt, Human
aucuugaagacuuuucuu

SEQ ID NO: 3070328 - RNA, 14 nt, Human
aucuucuuuauaau

SEQ ID NO: 3070329 - RNA, 21 nt, Human
aucucccccagccccauccuc

SEQ ID NO: 3070330 - RNA, 14 nt, Human
aucuauauuuuaca

SEQ ID NO: 3070331 - RNA, 17 nt, Human
aucuauauuuuacauaa

SEQ ID NO: 3070332 - RNA, 21 nt, Human
aucuauauuuuacauaaauuu

SEQ ID NO: 3070333 - RNA, 22 nt, Human
aucugcuuuuuaaagaaugcuc

SEQ ID NO: 3070334 - RNA, 22 nt, Human
augaagcuuuuaugugaaacau

SEQ ID NO: 3070335 - RNA, 19 nt, Human
augaaguuuuuuuuauaca

SEQ ID NO: 3070336 - RNA, 23 nt, Human
augaaaaaauauauaucaaauau

SEQ ID NO: 3070337 - RNA, 17 nt, Human
augaaagacuguacaaa

SEQ ID NO: 3070338 - RNA, 16 nt, Human
augaaagacuguacaa

SEQ ID NO: 3070339 - RNA, 13 nt, Human
augaaagacugua

SEQ ID NO: 3070340 - RNA, 21 nt, Human
augaccuuucaauaggaaaaa

SEQ ID NO: 3070341 - RNA, 18 nt, Human
augaccuuucaauaggaa

SEQ ID NO: 3070342 - RNA, 22 nt, Human
augaccuuucaauaggaaaaac

SEQ ID NO: 3070343 - RNA, 23 nt, Human
augaccuuucaauaggaaaaacu

SEQ ID NO: 3070344 - RNA, 12 nt, Human
agagggcacaga

SEQ ID NO: 3070345 - RNA, 22 nt, Human
agaggguggugaccucugccug

SEQ ID NO: 3070346 - RNA, 20 nt, Human
agaggguggugaccucugcc

SEQ ID NO: 3070347 - RNA, 19 nt, Human
agaggguggugaccucugc

SEQ ID NO: 3070348 - RNA, 14 nt, Human
agagugugccugaa

SEQ ID NO: 3070349 - RNA, 19 nt, Human
agaguggggauaugauuua

SEQ ID NO: 3070350 - RNA, 11 nt, Human
agagugggagc

SEQ ID NO: 3070351 - RNA, 15 nt, Human
agaggagagaggacc

SEQ ID NO: 3070352 - RNA, 16 nt, Human
agaggagagaggaccc

SEQ ID NO: 3070353 - RNA, 23 nt, Human
agaggacuuuucuuuguggcuuc

SEQ ID NO: 3070354 - RNA, 21 nt, Human
agaggaaaucaccgaaaacgu

SEQ ID NO: 3070355 - RNA, 16 nt, Human
agaggaaggagaggag

SEQ ID NO: 3070356 - RNA, 15 nt, Human
agagcccaggccucc

SEQ ID NO: 3070357 - RNA, 13 nt, Human
agagcccaggccu

SEQ ID NO: 3070358 - RNA, 14 nt, Human
agagcccaggccuc

SEQ ID NO: 3070359 - RNA, 14 nt, Human
agaucuucuguggg

SEQ ID NO: 3070360 - RNA, 19 nt, Human
agauauaugcucugcaugu

SEQ ID NO: 3070361 - RNA, 22 nt, Human
agacgugcacgcacacugucug

SEQ ID NO: 3070362 - RNA, 21 nt, Human
agacgugcacgcacacugucu

SEQ ID NO: 3070363 - RNA, 20 nt, Human
agacgcugugcugcccugcc

SEQ ID NO: 3070364 - RNA, 22 nt, Human
agacgcugugcugcccugccca

SEQ ID NO: 3070365 - RNA, 18 nt, Human
agacggagucccaccuug

SEQ ID NO: 3070366 - RNA, 21 nt, Human
agacgcugugcugcccugccc

SEQ ID NO: 3070367 - RNA, 11 nt, Human
agacagcucuu

SEQ ID NO: 3070368 - RNA, 12 nt, Human
agacagcucuua

SEQ ID NO: 3070369 - RNA, 12 nt, Human
agacagcugccu

SEQ ID NO: 3070370 - RNA, 14 nt, Human
agacagcccgggcu

SEQ ID NO: 3070371 - RNA, 15 nt, Human
agacagcccgggcuc

SEQ ID NO: 3070372 - RNA, 15 nt, Human
agacagauacuccuc

SEQ ID NO: 3070373 - RNA, 21 nt, Human
agacagauacuccuccaaggu

SEQ ID NO: 3070374 - RNA, 23 nt, Human
agacagagucucacuguugccca

SEQ ID NO: 3070375 - RNA, 17 nt, Human
agagaacuuccagaucc

SEQ ID NO: 3070376 - RNA, 23 nt, Human
agagagcaagacgcugugcugcc

SEQ ID NO: 3070377 - RNA, 21 nt, Human
agagaggguggugaccucugc

SEQ ID NO: 3070378 - RNA, 20 nt, Human
agagaggguggugaccucug

SEQ ID NO: 3070379 - RNA, 22 nt, Human
agagaggguggugaccucugcc

SEQ ID NO: 3070380 - RNA, 13 nt, Human
agagcccaccuug

SEQ ID NO: 3070381 - RNA, 16 nt, Human
agagcccacgccccca

SEQ ID NO: 3070382 - RNA, 13 nt, Human
agagcccacgccc

SEQ ID NO: 3070383 - RNA, 19 nt, Human
agagcccaccuuggcucaa

SEQ ID NO: 3070384 - RNA, 16 nt, Human
agacuggaagcacagc

SEQ ID NO: 3070385 - RNA, 17 nt, Human
agacuggaagcacagcu

SEQ ID NO: 3070386 - RNA, 19 nt, Human
agacuggaagcacagcuuc

SEQ ID NO: 3070387 - RNA, 21 nt, Human
agacugcauuauauuuauuac

SEQ ID NO: 3070388 - RNA, 16 nt, Human
agcaguugaaaagacu

SEQ ID NO: 3070389 - RNA, 13 nt, Human
agcaguugaaaag

SEQ ID NO: 3070390 - RNA, 23 nt, Human
agccaagugugguagagugugcc

SEQ ID NO: 3070391 - RNA, 20 nt, Human
agcaugccuggauggggcug

SEQ ID NO: 3070392 - RNA, 23 nt, Human
agcaugccuggauggggcugcac

SEQ ID NO: 3070393 - RNA, 23 nt, Human
agcauccuggcacccggccccug

SEQ ID NO: 3070394 - RNA, 22 nt, Human
agcauccuggcacccggccccu

SEQ ID NO: 3070395 - RNA, 18 nt, Human
agcauccuggcacccggc

SEQ ID NO: 3070396 - RNA, 15 nt, Human
agcaugaagacagag

SEQ ID NO: 3070397 - RNA, 18 nt, Human
agcacugacagauuucca

SEQ ID NO: 3070398 - RNA, 13 nt, Human
agcacugacagau

SEQ ID NO: 3070399 - RNA, 14 nt, Human
agcacugacagauu

SEQ ID NO: 3070400 - RNA, 16 nt, Human
agcacugacuucuaag

SEQ ID NO: 3070401 - RNA, 18 nt, Human
agcacagacccugcccug

SEQ ID NO: 3070402 - RNA, 19 nt, Human
agcacagacccugcccugu

SEQ ID NO: 3070403 - RNA, 20 nt, Human
agcacagacccugcccugug

SEQ ID NO: 3070404 - RNA, 17 nt, Human
agcacagacccugcccu

SEQ ID NO: 3070405 - RNA, 20 nt, Human
agcacacuggcucacccagu

SEQ ID NO: 3070406 - RNA, 23 nt, Human
agcacacuugacaucaacugcau

SEQ ID NO: 3070407 - RNA, 12 nt, Human
agcacacuggcu

SEQ ID NO: 3070408 - RNA, 19 nt, Human
agcacacuggcucacccag

SEQ ID NO: 3070409 - RNA, 18 nt, Human
agcagugcaugcuguccc

SEQ ID NO: 3070410 - RNA, 19 nt, Human
agcagugcaugcugucccu

SEQ ID NO: 3070411 - RNA, 20 nt, Human
agcagugcaugcugucccuu

SEQ ID NO: 3070412 - RNA, 13 nt, Human
agcagcguuucua

SEQ ID NO: 3070413 - RNA, 13 nt, Human
agccgcuggggcc

SEQ ID NO: 3070414 - RNA, 12 nt, Human
agccgcccaagg

SEQ ID NO: 3070415 - RNA, 13 nt, Human
agccgcccaaggc

SEQ ID NO: 3070416 - RNA, 15 nt, Human
agccgcccaaggccu

SEQ ID NO: 3070417 - RNA, 16 nt, Human
agccgcccaaggccuu

SEQ ID NO: 3070418 - RNA, 21 nt, Human
agccgccaugcuccuggccca

SEQ ID NO: 3070419 - RNA, 19 nt, Human
agccucccgaguagcuggg

SEQ ID NO: 3070420 - RNA, 18 nt, Human
agccucccgaguagcugg

SEQ ID NO: 3070421 - RNA, 20 nt, Human
agccucccgaguagcuggga

SEQ ID NO: 3070422 - RNA, 14 nt, Human
agccuccuccagcc

SEQ ID NO: 3070423 - RNA, 20 nt, Human
agccucccaaagugcuggga

SEQ ID NO: 3070424 - RNA, 21 nt, Human
agccucccaaagugcugggau

SEQ ID NO: 3070425 - RNA, 22 nt, Human
agccucccacgacugcccggca

SEQ ID NO: 3070426 - RNA, 18 nt, Human
agccagcaggcucucagg

SEQ ID NO: 3070427 - RNA, 19 nt, Human
agccagcaggcucucaggc

SEQ ID NO: 3070428 - RNA, 17 nt, Human
agccagcaggcucucag

SEQ ID NO: 3070429 - RNA, 20 nt, Human
agccagcaggcucucaggcc

SEQ ID NO: 3070430 - RNA, 15 nt, Human
agccccagugcccac

SEQ ID NO: 3070431 - RNA, 14 nt, Human
agccccagugccca

SEQ ID NO: 3070432 - RNA, 13 nt, Human
agccccagugccc

SEQ ID NO: 3070433 - RNA, 16 nt, Human
agccccauucugccug

SEQ ID NO: 3070434 - RNA, 13 nt, Human
agccccauucugc

SEQ ID NO: 3070435 - RNA, 23 nt, Human
agguaaaucagacuaugaaguuu

SEQ ID NO: 3070436 - RNA, 11 nt, Human
aggucccuaau

SEQ ID NO: 3070437 - RNA, 12 nt, Human
aggucccuaaua

SEQ ID NO: 3070438 - RNA, 18 nt, Human
agguaaaucagacuauga

SEQ ID NO: 3070439 - RNA, 20 nt, Human
agguaaaagcaucacaugaa

SEQ ID NO: 3070440 - RNA, 15 nt, Human
aggucccuaauaaag

SEQ ID NO: 3070441 - RNA, 13 nt, Human
aggucccuaauaa

SEQ ID NO: 3070442 - RNA, 18 nt, Human
aggucuguucuuuccaaa

SEQ ID NO: 3070443 - RNA, 23 nt, Human
aggucuguucuuuccaaaguaca

SEQ ID NO: 3070444 - RNA, 22 nt, Human
aggucuguucuuuccaaaguac

SEQ ID NO: 3070445 - RNA, 18 nt, Human
aggugcuacaaaaacaca

SEQ ID NO: 3070446 - RNA, 22 nt, Human
aggugcuacaaaaacacagcaa

SEQ ID NO: 3070447 - RNA, 21 nt, Human
aggugcuacaaaaacacagca

SEQ ID NO: 3070448 - RNA, 20 nt, Human
aggugcuacaaaaacacagc

SEQ ID NO: 3070449 - RNA, 19 nt, Human
aggugcuacaaaaacacag

SEQ ID NO: 3070450 - RNA, 23 nt, Human
aggugcuaggaacacuccuucac

SEQ ID NO: 3070451 - RNA, 19 nt, Human
aggugcuaggaacacuccu

SEQ ID NO: 3070452 - RNA, 22 nt, Human
aggugcuaggaacacuccuuca

SEQ ID NO: 3070453 - RNA, 24 nt, Human
aggugcuacaaaaacacagcaagg

SEQ ID NO: 3070454 - RNA, 23 nt, Human
aggugcuacaaaaacacagcaag

SEQ ID NO: 3070455 - RNA, 22 nt, Human
agguucccuuugacgccauccc

SEQ ID NO: 3070456 - RNA, 13 nt, Human
agguucccuuuga

SEQ ID NO: 3070457 - RNA, 14 nt, Human
agguucaaagauau

SEQ ID NO: 3070458 - RNA, 23 nt, Human
agguucccuuugacgccauccca

SEQ ID NO: 3070459 - RNA, 19 nt, Human
aggggccucuuaugggcug

SEQ ID NO: 3070460 - RNA, 20 nt, Human
aggggccucuuaugggcugg

SEQ ID NO: 3070461 - RNA, 21 nt, Human
aggggccucuuaugggcuggg

SEQ ID NO: 3070462 - RNA, 21 nt, Human
aggguaucaggugcugccauc

SEQ ID NO: 3070463 - RNA, 18 nt, Human
aggguaucaggugcugcc

SEQ ID NO: 3070464 - RNA, 19 nt, Human
aggguaucaggugcugcca

SEQ ID NO: 3070465 - RNA, 11 nt, Human
agggucccugg

SEQ ID NO: 3070466 - RNA, 23 nt, Human
aggcuacuguaaggcaaucaugg

SEQ ID NO: 3070467 - RNA, 17 nt, Human
aggcuacugucagcucc

SEQ ID NO: 3070468 - RNA, 21 nt, Human
aggcuagaaccaccugccuau

SEQ ID NO: 3070469 - RNA, 20 nt, Human
aggcccuucucuccagcccc

SEQ ID NO: 3070470 - RNA, 21 nt, Human
aggcccuucucuccagccccu

SEQ ID NO: 3070471 - RNA, 22 nt, Human
aggcccuucucuccagccccug

SEQ ID NO: 3070472 - RNA, 23 nt, Human
aggcccuucucuccagccccugg

SEQ ID NO: 3070473 - RNA, 22 nt, Human
aggcccuugucggccccaccag

SEQ ID NO: 3070474 - RNA, 20 nt, Human
aggcugucaauuacaggaag

SEQ ID NO: 3070475 - RNA, 19 nt, Human
aggcugucaauuacaggaa

SEQ ID NO: 3070476 - RNA, 18 nt, Human
aggcuguaucccaugagc

SEQ ID NO: 3070477 - RNA, 13 nt, Human
aggcuguauccca

SEQ ID NO: 3070478 - RNA, 15 nt, Human
aggcuagauguaugu

SEQ ID NO: 3070479 - RNA, 16 nt, Human
aggcuagauguaugua

SEQ ID NO: 3070480 - RNA, 22 nt, Human
agggacagaggggguggccucc

SEQ ID NO: 3070481 - RNA, 21 nt, Human
aggcugucaauuacaggaagu

SEQ ID NO: 3070482 - RNA, 23 nt, Human
agggacagaggggguggccuccc

SEQ ID NO: 3070483 - RNA, 23 nt, Human
aggaugcuuguacauaaugcgug

SEQ ID NO: 3070484 - RNA, 21 nt, Human
aggaugcuuguacauaaugcg

SEQ ID NO: 3070485 - RNA, 13 nt, Human
aggaccucaggug

SEQ ID NO: 3070486 - RNA, 22 nt, Human
aggauguucuagcauggcugcc

SEQ ID NO: 3070487 - RNA, 16 nt, Human
aggauguucugggaca

SEQ ID NO: 3070488 - RNA, 15 nt, Human
aggauguucugggac

SEQ ID NO: 3070489 - RNA, 23 nt, Human
aggaugguucccuugaugaagaa

SEQ ID NO: 3070490 - RNA, 14 nt, Human
aggauuauuggaaa

SEQ ID NO: 3070491 - RNA, 17 nt, Human
aggauguugaaaaaguu

SEQ ID NO: 3070492 - RNA, 21 nt, Human
agcuuuucccuuuuuuuaagu

SEQ ID NO: 3070493 - RNA, 21 nt, Human
aggaaucaugugccaagcaga

SEQ ID NO: 3070494 - RNA, 17 nt, Human
aggaauccagacccggc

SEQ ID NO: 3070495 - RNA, 21 nt, Human
agcugcgguccacccaggagc

SEQ ID NO: 3070496 - RNA, 23 nt, Human
agcuccgcuuucuacccagcgag

SEQ ID NO: 3070497 - RNA, 21 nt, Human
agcuccgcuuucuacccagcg

SEQ ID NO: 3070498 - RNA, 20 nt, Human
agcuccgcuuucuacccagc

SEQ ID NO: 3070499 - RNA, 12 nt, Human
agcuccuucugu

SEQ ID NO: 3070500 - RNA, 13 nt, Human
agcuccuucuguc

SEQ ID NO: 3070501 - RNA, 22 nt, Human
agcuccccucggagaagagcug

SEQ ID NO: 3070502 - RNA, 23 nt, Human
agcugcgguccacccaggagccc

SEQ ID NO: 3070503 - RNA, 13 nt, Human
aaccacgcuggac

SEQ ID NO: 3070504 - RNA, 22 nt, Human
aaccacuggaaaguuuaugguu

SEQ ID NO: 3070505 - RNA, 15 nt, Human
aaccacuucagcuga

SEQ ID NO: 3070506 - RNA, 21 nt, Human
aaccgaacugauguaaguaaa

SEQ ID NO: 3070507 - RNA, 16 nt, Human
aacccgggaggcagag

SEQ ID NO: 3070508 - RNA, 15 nt, Human
aaaugccuuuguacu

SEQ ID NO: 3070509 - RNA, 17 nt, Human
aaaucuuauaauuuaaa

SEQ ID NO: 3070510 - RNA, 23 nt, Human
aaaugccuuacccucauguucuu

SEQ ID NO: 3070511 - RNA, 22 nt, Human
aaauguuguucucuucuuuaaa

SEQ ID NO: 3070512 - RNA, 18 nt, Human
aaauucuugcaaaguauc

SEQ ID NO: 3070513 - RNA, 21 nt, Human
aaauucuugcaaaguaucccu

SEQ ID NO: 3070514 - RNA, 13 nt, Human
aaauucuuucauu

SEQ ID NO: 3070515 - RNA, 19 nt, Human
aaauugacacuuaaaaaug

SEQ ID NO: 3070516 - RNA, 16 nt, Human
aacacaucagcuugcc

SEQ ID NO: 3070517 - RNA, 12 nt, Human
aacacaucagcu

SEQ ID NO: 3070518 - RNA, 18 nt, Human
aacaaauuuacagagaca

SEQ ID NO: 3070519 - RNA, 22 nt, Human
aacuuuauacccagaaaguuau

SEQ ID NO: 3070520 - RNA, 23 nt, Human
aacuuuauacccagaaaguuauu

SEQ ID NO: 3070521 - RNA, 20 nt, Human
aacuuuaugcuaagugaaau

SEQ ID NO: 3070522 - RNA, 21 nt, Human
aacuuuaugcuaagugaaaua

SEQ ID NO: 3070523 - RNA, 16 nt, Human
aacuuaaucuaaaugg

SEQ ID NO: 3070524 - RNA, 15 nt, Human
aacuuaaucuaaaug

SEQ ID NO: 3070525 - RNA, 18 nt, Human
aacuuaaucuaaauggaa

SEQ ID NO: 3070526 - RNA, 19 nt, Human
aacuuaaauaaugugaaac

SEQ ID NO: 3070527 - RNA, 14 nt, Human
aacugauaaagaug

SEQ ID NO: 3070528 - RNA, 15 nt, Human
aacugacucuuaaga

SEQ ID NO: 3070529 - RNA, 18 nt, Human
aacugacucuuaagaaga

SEQ ID NO: 3070530 - RNA, 20 nt, Human
aacugagaugugaacacauc

SEQ ID NO: 3070531 - RNA, 19 nt, Human
aacugacucuuaagaagac

SEQ ID NO: 3070532 - RNA, 20 nt, Human
aacugacucuuaagaagacu

SEQ ID NO: 3070533 - RNA, 15 nt, Human
aaaggcuccaggagc

SEQ ID NO: 3070534 - RNA, 16 nt, Human
aaaggcuccaggagca

SEQ ID NO: 3070535 - RNA, 14 nt, Human
aaaggcagaagcaa

SEQ ID NO: 3070536 - RNA, 19 nt, Human
aaauaaaacuuuuuaaaau

SEQ ID NO: 3070537 - RNA, 16 nt, Human
aaauaaaacuuuuuaa

SEQ ID NO: 3070538 - RNA, 13 nt, Human
aaauaaaacuuuu

SEQ ID NO: 3070539 - RNA, 13 nt, Human
aaaguggaaaaau

SEQ ID NO: 3070540 - RNA, 19 nt, Human
aaaggcuccaggagcagcc

SEQ ID NO: 3070541 - RNA, 20 nt, Human
aaaggcuccaggagcagcca

SEQ ID NO: 3070542 - RNA, 18 nt, Human
aaaucugcuuuuuaaaga

SEQ ID NO: 3070543 - RNA, 20 nt, Human
aaauauuuauuuuaauaaug

SEQ ID NO: 3070544 - RNA, 13 nt, Human
aaauauuuauuuu

SEQ ID NO: 3070545 - RNA, 15 nt, Human
aaauauuuauuuuaa

SEQ ID NO: 3070546 - RNA, 14 nt, Human
aaaucaaauaugca

SEQ ID NO: 3070547 - RNA, 12 nt, Human
aaaucaaauaug

SEQ ID NO: 3070548 - RNA, 15 nt, Human
aaaucaaauaugcaa

SEQ ID NO: 3070549 - RNA, 24 nt, Human
aaauagcucaggugucccugcacu

SEQ ID NO: 3070550 - RNA, 19 nt, Human
aaauaguggugugauuugg

SEQ ID NO: 3070551 - RNA, 20 nt, Human
aaauagcuuuuuucucugau

SEQ ID NO: 3070552 - RNA, 17 nt, Human
aaauagcuuuuuucucu

SEQ ID NO: 3070553 - RNA, 17 nt, Human
aaagaaauauaccuaaa

SEQ ID NO: 3070554 - RNA, 15 nt, Human
aaagaaauauaccua

SEQ ID NO: 3070555 - RNA, 23 nt, Human
aaacugagaugugaacacaucag

SEQ ID NO: 3070556 - RNA, 21 nt, Human
aaacugagaugugaacacauc

SEQ ID NO: 3070557 - RNA, 14 nt, Human
aaagaguaggaaga

SEQ ID NO: 3070558 - RNA, 15 nt, Human
aaagaaauguaaggg

SEQ ID NO: 3070559 - RNA, 13 nt, Human
aaagaagcagacc

SEQ ID NO: 3070560 - RNA, 16 nt, Human
aaagaagcagaccauu

SEQ ID NO: 3070561 - RNA, 17 nt, Human
aaagauauuuugcuuug

SEQ ID NO: 3070562 - RNA, 16 nt, Human
aaagauauuuugcuuu

SEQ ID NO: 3070563 - RNA, 12 nt, Human
aaagauauuuug

SEQ ID NO: 3070564 - RNA, 18 nt, Human
aaaccaucauugaaaucu

SEQ ID NO: 3070565 - RNA, 18 nt, Human
aaacucuccucugcugcu

SEQ ID NO: 3070566 - RNA, 13 nt, Human
aaacucuccucug

SEQ ID NO: 3070567 - RNA, 24 nt, Human
aaacccucgaggcggaucuuugga

SEQ ID NO: 3070568 - RNA, 13 nt, Human
aaacccucgaggc

SEQ ID NO: 3070569 - RNA, 21 nt, Human
aaacacugggagaaaugaaaa

SEQ ID NO: 3070570 - RNA, 24 nt, Human
aaacacucaguuguucaauaauaa

SEQ ID NO: 3070571 - RNA, 22 nt, Human
aaacacugggagaaaugaaaaa

SEQ ID NO: 3070572 - RNA, 16 nt, Human
aaacacuguucucugc

SEQ ID NO: 3070573 - RNA, 21 nt, Human
aaaauugaugggauuugguca

SEQ ID NO: 3070574 - RNA, 14 nt, Human
aaaauugauguguu

SEQ ID NO: 3070575 - RNA, 12 nt, Human
aaaauugaugug

SEQ ID NO: 3070576 - RNA, 21 nt, Human
aaaauugauguguuuauuuau

SEQ ID NO: 3070577 - RNA, 22 nt, Human
aaaaucucaaauuucuaaaucu

SEQ ID NO: 3070578 - RNA, 19 nt, Human
aaaaucucaaauuucuaaa

SEQ ID NO: 3070579 - RNA, 16 nt, Human
aaaaucucaauauuuc

SEQ ID NO: 3070580 - RNA, 17 nt, Human
aaaaucaguuguacagu

SEQ ID NO: 3070581 - RNA, 22 nt, Human
aaaaucccuuaccucggugccu

SEQ ID NO: 3070582 - RNA, 21 nt, Human
aaaaucuacacuccagugaga

SEQ ID NO: 3070583 - RNA, 18 nt, Human
aaaaguucugcagauaaa

SEQ ID NO: 3070584 - RNA, 17 nt, Human
aaaauaaaacuuuuuaa

SEQ ID NO: 3070585 - RNA, 16 nt, Human
aaaauaaaacuuuuua

SEQ ID NO: 3070586 - RNA, 15 nt, Human
aaaaagaaaggaggg

SEQ ID NO: 3070587 - RNA, 16 nt, Human
aaaaagaaacauuugg

SEQ ID NO: 3070588 - RNA, 20 nt, Human
aagcagauggaaugcugugu

SEQ ID NO: 3070589 - RNA, 19 nt, Human
aagcagauggaaugcugug

SEQ ID NO: 3070590 - RNA, 17 nt, Human
aagcagauggaaugcug

SEQ ID NO: 3070591 - RNA, 14 nt, Human
aagcagcguuucua

SEQ ID NO: 3070592 - RNA, 20 nt, Human
aagcagcguuucuaugacac

SEQ ID NO: 3070593 - RNA, 17 nt, Human
aagcagcguuucuauga

SEQ ID NO: 3070594 - RNA, 19 nt, Human
aagccagcaggcucucagg

SEQ ID NO: 3070595 - RNA, 22 nt, Human
aagcagcguuucuaugacacau

SEQ ID NO: 3070596 - RNA, 21 nt, Human
aagcagcguuucuaugacaca

SEQ ID NO: 3070597 - RNA, 20 nt, Human
aagccagcaggcucucaggc

SEQ ID NO: 3070598 - RNA, 23 nt, Human
aagccagcaggcucucaggccag

SEQ ID NO: 3070599 - RNA, 13 nt, Human
aagauaaaugugc

SEQ ID NO: 3070600 - RNA, 23 nt, Human
aagauacaguuacucagaauucu

SEQ ID NO: 3070601 - RNA, 12 nt, Human
aagauaaaugug

SEQ ID NO: 3070602 - RNA, 13 nt, Human
aagauacugaaau

SEQ ID NO: 3070603 - RNA, 18 nt, Human
aagcuguguggcagucug

SEQ ID NO: 3070604 - RNA, 21 nt, Human
aagcuggucccacucagucca

SEQ ID NO: 3070605 - RNA, 18 nt, Human
aagcuggucccacucagu

SEQ ID NO: 3070606 - RNA, 15 nt, Human
aagcugggcagguug

SEQ ID NO: 3070607 - RNA, 22 nt, Human
aagcuacugccauccuggccca

SEQ ID NO: 3070608 - RNA, 17 nt, Human
aagcuacugccauccug

SEQ ID NO: 3070609 - RNA, 13 nt, Human
aaggacacuagaa

SEQ ID NO: 3070610 - RNA, 15 nt, Human
aaggauugcuacugu

SEQ ID NO: 3070611 - RNA, 15 nt, Human
aaggauguucuagca

SEQ ID NO: 3070612 - RNA, 20 nt, Human
aaggcagcucuaaaugucaa

SEQ ID NO: 3070613 - RNA, 17 nt, Human
aagcgauucuucugcuu

SEQ ID NO: 3070614 - RNA, 21 nt, Human
aagcgauucuucugcuucagc

SEQ ID NO: 3070615 - RNA, 20 nt, Human
aaggugaggagcuugaaacc

SEQ ID NO: 3070616 - RNA, 20 nt, Human
aaguagaagucuuagaugua

SEQ ID NO: 3070617 - RNA, 19 nt, Human
aaguagaagucuuagaugu

SEQ ID NO: 3070618 - RNA, 21 nt, Human
aaguagaagucuuagauguau

SEQ ID NO: 3070619 - RNA, 21 nt, Human
aaguagggacuucugucuuca

SEQ ID NO: 3070620 - RNA, 23 nt, Human
aaguaucccuacuguaauuugug

SEQ ID NO: 3070621 - RNA, 18 nt, Human
aaguaucccuacuguaau

SEQ ID NO: 3070622 - RNA, 17 nt, Human
aaguaucccuacuguaa

SEQ ID NO: 3070623 - RNA, 14 nt, Human
aagucuccaaaguc

SEQ ID NO: 3070624 - RNA, 22 nt, Human
aaguccucuuuucugagaggac

SEQ ID NO: 3070625 - RNA, 18 nt, Human
aaguccucuuuucugaga

SEQ ID NO: 3070626 - RNA, 18 nt, Human
aaguccaagcauuuagau

SEQ ID NO: 3070627 - RNA, 17 nt, Human
aaguccaagcauaccaa

SEQ ID NO: 3070628 - RNA, 19 nt, Human
aaggucauuuuuuuuaaga

SEQ ID NO: 3070629 - RNA, 18 nt, Human
aaggucauuuuuuuuaag

SEQ ID NO: 3070630 - RNA, 23 nt, Human
aagggaaacugccagcaacgcag

SEQ ID NO: 3070631 - RNA, 17 nt, Human
aagggaaacugccagca

SEQ ID NO: 3070632 - RNA, 16 nt, Human
aagggaaacugccagc

SEQ ID NO: 3070633 - RNA, 15 nt, Human
aagucuccaaagucu

SEQ ID NO: 3070634 - RNA, 19 nt, Human
aaguggaaaaauagccugc

SEQ ID NO: 3070635 - RNA, 21 nt, Human
aaguggaaaaauagccugccu

SEQ ID NO: 3070636 - RNA, 12 nt, Human
aaguugaauuuu

SEQ ID NO: 3070637 - RNA, 20 nt, Human
aauguuuuuuuuuaaagacu

SEQ ID NO: 3070638 - RNA, 15 nt, Human
aauguuuuuuuuuaa

SEQ ID NO: 3070639 - RNA, 22 nt, Human
aauguuuuuuuuuaaagacuuu

SEQ ID NO: 3070640 - RNA, 21 nt, Human
aaugcuagguuaauuccaauu

SEQ ID NO: 3070641 - RNA, 16 nt, Human
aauguuugccucugcc

SEQ ID NO: 3070642 - RNA, 15 nt, Human
aauguuugccucugc

SEQ ID NO: 3070643 - RNA, 23 nt, Human
aauguuucaaacauauauaacaa

SEQ ID NO: 3070644 - RNA, 15 nt, Human
aaugugaaaagaaaa

SEQ ID NO: 3070645 - RNA, 19 nt, Human
aaugcuagguuaauuccaa

SEQ ID NO: 3070646 - RNA, 18 nt, Human
aaugcuagguuaauucca

SEQ ID NO: 3070647 - RNA, 19 nt, Human
aaugcgugcauaccacuuu

SEQ ID NO: 3070648 - RNA, 18 nt, Human
aaugcgugcauaccacuu

SEQ ID NO: 3070649 - RNA, 23 nt, Human
aaugccuuacccucauguucuua

SEQ ID NO: 3070650 - RNA, 18 nt, Human
aauccaagcaaaugugaa

SEQ ID NO: 3070651 - RNA, 17 nt, Human
aauccaagcaaauguga

SEQ ID NO: 3070652 - RNA, 13 nt, Human
aauccagccugcu

SEQ ID NO: 3070653 - RNA, 15 nt, Human
aaucucaaauuucua

SEQ ID NO: 3070654 - RNA, 16 nt, Human
aaucucaaauuucuaa

SEQ ID NO: 3070655 - RNA, 17 nt, Human
aauccagacccggcugc

SEQ ID NO: 3070656 - RNA, 19 nt, Human
aauccagacccggcugcgu

SEQ ID NO: 3070657 - RNA, 18 nt, Human
aaucucaaauuucuaaau

SEQ ID NO: 3070658 - RNA, 17 nt, Human
aaucucaaauuucuaaa

SEQ ID NO: 3070659 - RNA, 16 nt, Human
aaugauuaauuaaaac

SEQ ID NO: 3070660 - RNA, 21 nt, Human
aaugauuaugaauuacauuug

SEQ ID NO: 3070661 - RNA, 15 nt, Human
aaugauuaugaauua

SEQ ID NO: 3070662 - RNA, 15 nt, Human
aaucaccaaaggcuc

SEQ ID NO: 3070663 - RNA, 14 nt, Human
aaucaccgaaaacg

SEQ ID NO: 3070664 - RNA, 15 nt, Human
aaucaccgaaaacgu

SEQ ID NO: 3070665 - RNA, 16 nt, Human
aauauauaucaaauau

SEQ ID NO: 3070666 - RNA, 13 nt, Human
aauauguuucaaa

SEQ ID NO: 3070667 - RNA, 15 nt, Human
aauauguuucaaacu

SEQ ID NO: 3070668 - RNA, 16 nt, Human
aauauguuucaaacuu

SEQ ID NO: 3070669 - RNA, 17 nt, Human
aauauguuucaaacuuu

SEQ ID NO: 3070670 - RNA, 13 nt, Human
aauagacaauuua

SEQ ID NO: 3070671 - RNA, 20 nt, Human
aauacucuacccucuuagaa

SEQ ID NO: 3070672 - RNA, 22 nt, Human
aauacucuacccucuuagaaaa

SEQ ID NO: 3070673 - RNA, 13 nt, Human
aauacucuuauau

SEQ ID NO: 3070674 - RNA, 13 nt, Human
accagaucauugu

SEQ ID NO: 3070675 - RNA, 19 nt, Human
accagagcugccaccugcc

SEQ ID NO: 3070676 - RNA, 17 nt, Human
accagccaguaaauggg

SEQ ID NO: 3070677 - RNA, 13 nt, Human
accagcagaaaug

SEQ ID NO: 3070678 - RNA, 19 nt, Human
acauuuguucuauagcuuu

SEQ ID NO: 3070679 - RNA, 15 nt, Human
acauuuauucugcuc

SEQ ID NO: 3070680 - RNA, 21 nt, Human
acauuuguauaaaauaauuuu

SEQ ID NO: 3070681 - RNA, 14 nt, Human
acauuuauucugcu

SEQ ID NO: 3070682 - RNA, 22 nt, Human
acauguuucuuuguaaugaaaa

SEQ ID NO: 3070683 - RNA, 19 nt, Human
acauguuucuuuguaauga

SEQ ID NO: 3070684 - RNA, 18 nt, Human
acaugugcacaugcacgu

SEQ ID NO: 3070685 - RNA, 16 nt, Human
acaugugcacaugcac

SEQ ID NO: 3070686 - RNA, 17 nt, Human
acaucagcacgauuucu

SEQ ID NO: 3070687 - RNA, 15 nt, Human
acaucagcacgauuu

SEQ ID NO: 3070688 - RNA, 18 nt, Human
acaucagcacgauuucug

SEQ ID NO: 3070689 - RNA, 19 nt, Human
acaugaucuucuuuauaau

SEQ ID NO: 3070690 - RNA, 23 nt, Human
acaggcaaugcuggcuguuggcu

SEQ ID NO: 3070691 - RNA, 19 nt, Human
acaggcaaugcuggcuguu

SEQ ID NO: 3070692 - RNA, 19 nt, Human
acaggguuuugccauguug

SEQ ID NO: 3070693 - RNA, 21 nt, Human
acauaaugcgugcauaccacu

SEQ ID NO: 3070694 - RNA, 22 nt, Human
acauaaugcgugcauaccacuu

SEQ ID NO: 3070695 - RNA, 23 nt, Human
acauaaugcgugcauaccacuuu

SEQ ID NO: 3070696 - RNA, 20 nt, Human
accccucaacaccucugcac

SEQ ID NO: 3070697 - RNA, 19 nt, Human
accccuccaugugggcuag

SEQ ID NO: 3070698 - RNA, 16 nt, Human
accccuccaugugggc

SEQ ID NO: 3070699 - RNA, 16 nt, Human
accauauuaccacaga

SEQ ID NO: 3070700 - RNA, 14 nt, Human
accauauuaccaca

SEQ ID NO: 3070701 - RNA, 23 nt, Human
acccaagggccuggccugagcug

SEQ ID NO: 3070702 - RNA, 15 nt, Human
acccacaagaaauga

SEQ ID NO: 3070703 - RNA, 17 nt, Human
acccacaagaaaugaaa

SEQ ID NO: 3070704 - RNA, 21 nt, Human
acccacaagaaaugaaagcag

SEQ ID NO: 3070705 - RNA, 15 nt, Human
acccaccucagccuc

SEQ ID NO: 3070706 - RNA, 14 nt, Human
acccaccucagccu

SEQ ID NO: 3070707 - RNA, 13 nt, Human
acccaccucagcc

SEQ ID NO: 3070708 - RNA, 19 nt, Human
acccaagggccuggccuga

SEQ ID NO: 3070709 - RNA, 22 nt, Human
acccaagggccuggccugagcu

SEQ ID NO: 3070710 - RNA, 18 nt, Human
acccaagggccuggccug

SEQ ID NO: 3070711 - RNA, 20 nt, Human
accauauuaccacagacaua

SEQ ID NO: 3070712 - RNA, 11 nt, Human
acccccugaau

SEQ ID NO: 3070713 - RNA, 16 nt, Human
acccaccucagccucc

SEQ ID NO: 3070714 - RNA, 19 nt, Human
acccaguguuuuaggagca

SEQ ID NO: 3070715 - RNA, 22 nt, Human
acccaguguuuuaggagcauga

SEQ ID NO: 3070716 - RNA, 21 nt, Human
acaggaugaugacuauggaaa

SEQ ID NO: 3070717 - RNA, 14 nt, Human
acaggauuauugga

SEQ ID NO: 3070718 - RNA, 12 nt, Human
acaggcaagcac

SEQ ID NO: 3070719 - RNA, 18 nt, Human
acaggcaaugcuggcugu

SEQ ID NO: 3070720 - RNA, 15 nt, Human
acaggaucagucuga

SEQ ID NO: 3070721 - RNA, 17 nt, Human
acagcucuucuccaggc

SEQ ID NO: 3070722 - RNA, 16 nt, Human
acagcucuucuccagg

SEQ ID NO: 3070723 - RNA, 17 nt, Human
acagcucuguccuggga

SEQ ID NO: 3070724 - RNA, 15 nt, Human
acagccacggccagg

SEQ ID NO: 3070725 - RNA, 17 nt, Human
acagccacggccaggcc

SEQ ID NO: 3070726 - RNA, 16 nt, Human
acagccacggccaggc

SEQ ID NO: 3070727 - RNA, 18 nt, Human
acagccacggccaggcca

SEQ ID NO: 3070728 - RNA, 17 nt, Human
acagccaacuauggccu

SEQ ID NO: 3070729 - RNA, 18 nt, Human
acagcaguugaaaagacu

SEQ ID NO: 3070730 - RNA, 19 nt, Human
acagccaacuauggccugu

SEQ ID NO: 3070731 - RNA, 19 nt, Human
acagagugagacucugucu

SEQ ID NO: 3070732 - RNA, 21 nt, Human
acagcaguugaaaagacucca

SEQ ID NO: 3070733 - RNA, 23 nt, Human
acagcaguugaaaagacuccaaa

SEQ ID NO: 3070734 - RNA, 22 nt, Human
acagcaguugaaaagacuccaa

SEQ ID NO: 3070735 - RNA, 15 nt, Human
acagagugagacucu

SEQ ID NO: 3070736 - RNA, 23 nt, Human
acagagucucacuguugcccagg

SEQ ID NO: 3070737 - RNA, 11 nt, Human
acagacacagg

SEQ ID NO: 3070738 - RNA, 15 nt, Human
acacuguacugcaau

SEQ ID NO: 3070739 - RNA, 15 nt, Human
acagaggcagcccca

SEQ ID NO: 3070740 - RNA, 14 nt, Human
acagaggcagcccc

SEQ ID NO: 3070741 - RNA, 14 nt, Human
acagacacaggccc

SEQ ID NO: 3070742 - RNA, 13 nt, Human
acagacacaggcc

SEQ ID NO: 3070743 - RNA, 23 nt, Human
acagaggccaugggccuccugug

SEQ ID NO: 3070744 - RNA, 19 nt, Human
acagaggcagccccauucu

SEQ ID NO: 3070745 - RNA, 15 nt, Human
acacugcauguuugu

SEQ ID NO: 3070746 - RNA, 14 nt, Human
acacugcauguuug

SEQ ID NO: 3070747 - RNA, 21 nt, Human
acacuggcucacccaguccug

SEQ ID NO: 3070748 - RNA, 20 nt, Human
acacuggcucacccaguccu

SEQ ID NO: 3070749 - RNA, 22 nt, Human
acaaaauguaggguuauaauaa

SEQ ID NO: 3070750 - RNA, 12 nt, Human
acaaggcaaggc

SEQ ID NO: 3070751 - RNA, 14 nt, Human
acaaggcaaggcug

SEQ ID NO: 3070752 - RNA, 17 nt, Human
acaaggauugcuacugu

SEQ ID NO: 3070753 - RNA, 20 nt, Human
acaaggcaaggcugucaauu

SEQ ID NO: 3070754 - RNA, 17 nt, Human
acacgcgugcacacacc

SEQ ID NO: 3070755 - RNA, 15 nt, Human
acacgcgugcacaca

SEQ ID NO: 3070756 - RNA, 21 nt, Human
acacgagcaggcuacugucag

SEQ ID NO: 3070757 - RNA, 19 nt, Human
acacauuuuuuaaaugcac

SEQ ID NO: 3070758 - RNA, 19 nt, Human
acacgagcaggcuacuguc

SEQ ID NO: 3070759 - RNA, 14 nt, Human
acacgagcaggcua

SEQ ID NO: 3070760 - RNA, 12 nt, Human
acacauuuuucu

SEQ ID NO: 3070761 - RNA, 22 nt, Human
acacauuuuuuaaaugcaccug

SEQ ID NO: 3070762 - RNA, 20 nt, Human
acacauuuuuuaaaugcacc

SEQ ID NO: 3070763 - RNA, 13 nt, Human
acacagcucuucu

SEQ ID NO: 3070764 - RNA, 11 nt, Human
acacagcucuu

SEQ ID NO: 3070765 - RNA, 22 nt, Human
acacauuuuauuuuauuaugca

SEQ ID NO: 3070766 - RNA, 21 nt, Human
acacauuuuauuuuauuaugc

SEQ ID NO: 3070767 - RNA, 19 nt, Human
acacagaggcugccucucc

SEQ ID NO: 3070768 - RNA, 14 nt, Human
acacagcucugucc

SEQ ID NO: 3070769 - RNA, 20 nt, Human
acacagcucuguccugggag

SEQ ID NO: 3070770 - RNA, 11 nt, Human
agaaaguuauu

SEQ ID NO: 3070771 - RNA, 23 nt, Human
agaaaguuauugauaaguucaua

SEQ ID NO: 3070772 - RNA, 16 nt, Human
agaaaggauaaaguug

SEQ ID NO: 3070773 - RNA, 23 nt, Human
agaaaguacuucuccacccugcu

SEQ ID NO: 3070774 - RNA, 22 nt, Human
agaaaguacuucuccacccugc

SEQ ID NO: 3070775 - RNA, 20 nt, Human
acuuuauacccagaaaguua

SEQ ID NO: 3070776 - RNA, 22 nt, Human
acuuuauacccagaaaguuauu

SEQ ID NO: 3070777 - RNA, 22 nt, Human
acuuuaucuugaauaauguaag

SEQ ID NO: 3070778 - RNA, 22 nt, Human
acuuuauuuucuauaauuuaaa

SEQ ID NO: 3070779 - RNA, 16 nt, Human
acuuuguucuggcucu

SEQ ID NO: 3070780 - RNA, 17 nt, Human
acuuuguucuggcucuu

SEQ ID NO: 3070781 - RNA, 16 nt, Human
acuuuuaugauacuug

SEQ ID NO: 3070782 - RNA, 12 nt, Human
acuuuuaugaua

SEQ ID NO: 3070783 - RNA, 13 nt, Human
acuuuuauaaacu

SEQ ID NO: 3070784 - RNA, 19 nt, Human
acuuuguucuggcucuucc

SEQ ID NO: 3070785 - RNA, 23 nt, Human
acuuuuaugauacuugaaaauua

SEQ ID NO: 3070786 - RNA, 20 nt, Human
acuuuucauaaccuagccuu

SEQ ID NO: 3070787 - RNA, 16 nt, Human
acuuuucuuucagcca

SEQ ID NO: 3070788 - RNA, 14 nt, Human
agaaaauaacaaua

SEQ ID NO: 3070789 - RNA, 14 nt, Human
acuuuucuuugugg

SEQ ID NO: 3070790 - RNA, 16 nt, Human
agaaaaucaggcuggc

SEQ ID NO: 3070791 - RNA, 15 nt, Human
agaaaauaccaagga

SEQ ID NO: 3070792 - RNA, 19 nt, Human
agaaaauaguggugugauu

SEQ ID NO: 3070793 - RNA, 22 nt, Human
acugugaaguuuacauuguaaa

SEQ ID NO: 3070794 - RNA, 16 nt, Human
acugugaagagaacca

SEQ ID NO: 3070795 - RNA, 18 nt, Human
acugguuccauggccucu

SEQ ID NO: 3070796 - RNA, 22 nt, Human
acuguaagaaaauaucacuugu

SEQ ID NO: 3070797 - RNA, 19 nt, Human
acuguaagaaaauaucacu

SEQ ID NO: 3070798 - RNA, 13 nt, Human
acuguaagaaaau

SEQ ID NO: 3070799 - RNA, 18 nt, Human
acugguaggaaacuaggu

SEQ ID NO: 3070800 - RNA, 15 nt, Human
acuggagaaaaugga

SEQ ID NO: 3070801 - RNA, 17 nt, Human
acuggaagcacagcuuc

SEQ ID NO: 3070802 - RNA, 19 nt, Human
acuggaagcacagcuucau

SEQ ID NO: 3070803 - RNA, 16 nt, Human
acuggaagcacagcuu

SEQ ID NO: 3070804 - RNA, 13 nt, Human
acugccagcaacg

SEQ ID NO: 3070805 - RNA, 20 nt, Human
acucugucucaguccaugaa

SEQ ID NO: 3070806 - RNA, 18 nt, Human
acucugucucaguccaug

SEQ ID NO: 3070807 - RNA, 20 nt, Human
acugugcugagucugaaggc

SEQ ID NO: 3070808 - RNA, 14 nt, Human
acuugggccacugu

SEQ ID NO: 3070809 - RNA, 15 nt, Human
acuugggccacugug

SEQ ID NO: 3070810 - RNA, 22 nt, Human
acuucugucuucacaacagauu

SEQ ID NO: 3070811 - RNA, 18 nt, Human
acuucuuauacauuugau

SEQ ID NO: 3070812 - RNA, 16 nt, Human
acuugguuuuuaaaaa

SEQ ID NO: 3070813 - RNA, 21 nt, Human
acuuggucugugagaugcuag

SEQ ID NO: 3070814 - RNA, 23 nt, Human
acuucacauauugauuuccguua

SEQ ID NO: 3070815 - RNA, 21 nt, Human
acuucugucuucacaacagau

SEQ ID NO: 3070816 - RNA, 19 nt, Human
acucaguccauagcagaga

SEQ ID NO: 3070817 - RNA, 22 nt, Human
acuauucaggagaguagaacag

SEQ ID NO: 3070818 - RNA, 18 nt, Human
acuauucaaacagucuca

SEQ ID NO: 3070819 - RNA, 21 nt, Human
acuauucaaacagucucagga

SEQ ID NO: 3070820 - RNA, 20 nt, Human
acuaguauuucuaugaaaua

SEQ ID NO: 3070821 - RNA, 19 nt, Human
acuaguauuucuaugaaau

SEQ ID NO: 3070822 - RNA, 13 nt, Human
acucaaaagcugg

SEQ ID NO: 3070823 - RNA, 14 nt, Human
acucaaaucaagaa

SEQ ID NO: 3070824 - RNA, 15 nt, Human
acucuagggaaaaac

SEQ ID NO: 3070825 - RNA, 17 nt, Human
acucuagggaaaaacca

SEQ ID NO: 3070826 - RNA, 23 nt, Human
acucuaucaaguauuauaccuuu

SEQ ID NO: 3070827 - RNA, 21 nt, Human
acucuaucaaguauuauaccu

SEQ ID NO: 3070828 - RNA, 17 nt, Human
acucuauguucuaagaa

SEQ ID NO: 3070829 - RNA, 19 nt, Human
acucugucgcccagucugg

SEQ ID NO: 3070830 - RNA, 15 nt, Human
acucauauuuucaug

SEQ ID NO: 3070831 - RNA, 12 nt, Human
accugucccccu

SEQ ID NO: 3070832 - RNA, 15 nt, Human
accugucccccugac

SEQ ID NO: 3070833 - RNA, 16 nt, Human
accugucccccugaca

SEQ ID NO: 3070834 - RNA, 15 nt, Human
accuuuaagagaaau

SEQ ID NO: 3070835 - RNA, 18 nt, Human
accuuucccaucuuccaa

SEQ ID NO: 3070836 - RNA, 13 nt, Human
accuuucccaucu

SEQ ID NO: 3070837 - RNA, 17 nt, Human
accuuggcugcagggag

SEQ ID NO: 3070838 - RNA, 18 nt, Human
accuuggcugcagggagu

SEQ ID NO: 3070839 - RNA, 15 nt, Human
accucugcagcaaua

SEQ ID NO: 3070840 - RNA, 20 nt, Human
accucugcagcaauaaagca

SEQ ID NO: 3070841 - RNA, 18 nt, Human
accucugcagcaauaaag

SEQ ID NO: 3070842 - RNA, 23 nt, Human
accucugccugaagucacacagu

SEQ ID NO: 3070843 - RNA, 21 nt, Human
accucugcagcaauaaagcag

SEQ ID NO: 3070844 - RNA, 12 nt, Human
acgcugugcugc

SEQ ID NO: 3070845 - RNA, 14 nt, Human
acgcugugcugccc

SEQ ID NO: 3070846 - RNA, 11 nt, Human
acgcugugcug

SEQ ID NO: 3070847 - RNA, 22 nt, Human
acgcaggcccccaggugccagu

SEQ ID NO: 3070848 - RNA, 19 nt, Human
acgcaggcccccaggugcc

SEQ ID NO: 3070849 - RNA, 14 nt, Human
acgucugacaggca

SEQ ID NO: 3070850 - RNA, 13 nt, Human
acgucugacaggc

SEQ ID NO: 3070851 - RNA, 14 nt, Human
acggaacucaaaua

SEQ ID NO: 3070852 - RNA, 11 nt, Human
acgugaguccu

SEQ ID NO: 3070853 - RNA, 13 nt, Human
acuaagagagaau

SEQ ID NO: 3070854 - RNA, 15 nt, Human
caaauucugucucug

SEQ ID NO: 3070855 - RNA, 15 nt, Human
caaauugugugaaag

SEQ ID NO: 3070856 - RNA, 14 nt, Human
caaauuuacagaga

SEQ ID NO: 3070857 - RNA, 23 nt, Human
caacaggcugggcuucaguggca

SEQ ID NO: 3070858 - RNA, 15 nt, Human
caaauuuacagagac

SEQ ID NO: 3070859 - RNA, 24 nt, Human
caacaggcugggcuucaguggcag

SEQ ID NO: 3070860 - RNA, 19 nt, Human
caacagguuuuccugaaga

SEQ ID NO: 3070861 - RNA, 18 nt, Human
caacaggguuuuuuucca

SEQ ID NO: 3070862 - RNA, 15 nt, Human
caacagguuuuccug

SEQ ID NO: 3070863 - RNA, 22 nt, Human
caacaucuuggucagauuugaa

SEQ ID NO: 3070864 - RNA, 19 nt, Human
caaccccuucgcuccugug

SEQ ID NO: 3070865 - RNA, 18 nt, Human
caaccccuucgcuccugu

SEQ ID NO: 3070866 - RNA, 21 nt, Human
caaccccuucgcuccuguguc

SEQ ID NO: 3070867 - RNA, 12 nt, Human
caacuuuauacc

SEQ ID NO: 3070868 - RNA, 12 nt, Human
caacuuuguaua

SEQ ID NO: 3070869 - RNA, 18 nt, Human
caagaaaacaacuucaau

SEQ ID NO: 3070870 - RNA, 11 nt, Human
caacuuuguau

SEQ ID NO: 3070871 - RNA, 20 nt, Human
caacucuccuccagagucag

SEQ ID NO: 3070872 - RNA, 21 nt, Human
caacucugaaggguaauuaua

SEQ ID NO: 3070873 - RNA, 16 nt, Human
caacugcauuggcuuu

SEQ ID NO: 3070874 - RNA, 12 nt, Human
caacccucauca

SEQ ID NO: 3070875 - RNA, 15 nt, Human
caacccucaucacca

SEQ ID NO: 3070876 - RNA, 16 nt, Human
caaccugauugugucu

SEQ ID NO: 3070877 - RNA, 19 nt, Human
caacucuccuccagaguca

SEQ ID NO: 3070878 - RNA, 17 nt, Human
caagcacuaaacaaaga

SEQ ID NO: 3070879 - RNA, 18 nt, Human
caagcaccuccugccucg

SEQ ID NO: 3070880 - RNA, 21 nt, Human
caagccaccaacauacuccca

SEQ ID NO: 3070881 - RNA, 16 nt, Human
caagcgugagccacug

SEQ ID NO: 3070882 - RNA, 13 nt, Human
caaggauccugag

SEQ ID NO: 3070883 - RNA, 21 nt, Human
caaggaugaucuaggaagacu

SEQ ID NO: 3070884 - RNA, 22 nt, Human
caaggauccugagccagauuuc

SEQ ID NO: 3070885 - RNA, 17 nt, Human
caagcgugagccacugc

SEQ ID NO: 3070886 - RNA, 17 nt, Human
caagugauucuccugcc

SEQ ID NO: 3070887 - RNA, 16 nt, Human
caagugauucuccugc

SEQ ID NO: 3070888 - RNA, 19 nt, Human
caagugaaaaaggaggaag

SEQ ID NO: 3070889 - RNA, 21 nt, Human
caagugauucuccugccucag

SEQ ID NO: 3070890 - RNA, 22 nt, Human
caagugauucuccugccucagc

SEQ ID NO: 3070891 - RNA, 22 nt, Human
caagugugguagagugugccug

SEQ ID NO: 3070892 - RNA, 23 nt, Human
caaggugggaggauugcuugagc

SEQ ID NO: 3070893 - RNA, 12 nt, Human
caaggugggagg

SEQ ID NO: 3070894 - RNA, 19 nt, Human
caagggccuggccugagcu

SEQ ID NO: 3070895 - RNA, 16 nt, Human
caagggccuggccuga

SEQ ID NO: 3070896 - RNA, 15 nt, Human
caaggauugcuacug

SEQ ID NO: 3070897 - RNA, 23 nt, Human
caaaaaaauauauuuaaugauaa

SEQ ID NO: 3070898 - RNA, 18 nt, Human
auuuuuuuacuaauagac

SEQ ID NO: 3070899 - RNA, 15 nt, Human
caaagcuaggccugg

SEQ ID NO: 3070900 - RNA, 21 nt, Human
caaagccaaagcuaggccugg

SEQ ID NO: 3070901 - RNA, 20 nt, Human
caaagccaaagcuaggccug

SEQ ID NO: 3070902 - RNA, 17 nt, Human
caaagcuaggccuggcc

SEQ ID NO: 3070903 - RNA, 16 nt, Human
caaagcuaggccuggc

SEQ ID NO: 3070904 - RNA, 16 nt, Human
caaagcuuguuaagau

SEQ ID NO: 3070905 - RNA, 12 nt, Human
caaauauauuca

SEQ ID NO: 3070906 - RNA, 14 nt, Human
caaauaugcaaagc

SEQ ID NO: 3070907 - RNA, 21 nt, Human
caaaggaugcccaaagaugca

SEQ ID NO: 3070908 - RNA, 13 nt, Human
caaaucagcugcu

SEQ ID NO: 3070909 - RNA, 16 nt, Human
caaaucagcugcuacu

SEQ ID NO: 3070910 - RNA, 18 nt, Human
caaauaugcaaagcacug

SEQ ID NO: 3070911 - RNA, 17 nt, Human
caaauaugcaaagcacu

SEQ ID NO: 3070912 - RNA, 16 nt, Human
caaauaugcaaagcac

SEQ ID NO: 3070913 - RNA, 22 nt, Human
caaauucugcuugcuugcuuuu

SEQ ID NO: 3070914 - RNA, 21 nt, Human
caaauguucaucaaugaauga

SEQ ID NO: 3070915 - RNA, 20 nt, Human
caaauguucaucaaugaaug

SEQ ID NO: 3070916 - RNA, 23 nt, Human
cacauguccaagaagcccaggaa

SEQ ID NO: 3070917 - RNA, 19 nt, Human
cacaugccucucucaggcc

SEQ ID NO: 3070918 - RNA, 13 nt, Human
cacaugccucucu

SEQ ID NO: 3070919 - RNA, 17 nt, Human
cacaugccucucucagg

SEQ ID NO: 3070920 - RNA, 18 nt, Human
cacaugccucucucaggc

SEQ ID NO: 3070921 - RNA, 18 nt, Human
cacaucagcacgauuucu

SEQ ID NO: 3070922 - RNA, 12 nt, Human
cacauaucuguc

SEQ ID NO: 3070923 - RNA, 20 nt, Human
cacauauugauuuccguuaa

SEQ ID NO: 3070924 - RNA, 15 nt, Human
cacaugugcacaugc

SEQ ID NO: 3070925 - RNA, 14 nt, Human
cacaugugcacaug

SEQ ID NO: 3070926 - RNA, 17 nt, Human
cacaugugcacaugcac

SEQ ID NO: 3070927 - RNA, 16 nt, Human
cacauuccugaugcuu

SEQ ID NO: 3070928 - RNA, 16 nt, Human
cacauuccugaacagg

SEQ ID NO: 3070929 - RNA, 15 nt, Human
caccacacccagccc

SEQ ID NO: 3070930 - RNA, 13 nt, Human
caccacacccagc

SEQ ID NO: 3070931 - RNA, 18 nt, Human
cacauuggagauguuuag

SEQ ID NO: 3070932 - RNA, 17 nt, Human
cacauuggaaacaaguc

SEQ ID NO: 3070933 - RNA, 15 nt, Human
caccaagcccaguua

SEQ ID NO: 3070934 - RNA, 18 nt, Human
caccacuacauucuguua

SEQ ID NO: 3070935 - RNA, 17 nt, Human
caccacuacauucuguu

SEQ ID NO: 3070936 - RNA, 16 nt, Human
caccacuacauucugu

SEQ ID NO: 3070937 - RNA, 14 nt, Human
caccaccucuuugg

SEQ ID NO: 3070938 - RNA, 20 nt, Human
caccacuacauucuguuaau

SEQ ID NO: 3070939 - RNA, 19 nt, Human
caccacuacauucuguuaa

SEQ ID NO: 3070940 - RNA, 18 nt, Human
caccacaugugcacaugc

SEQ ID NO: 3070941 - RNA, 15 nt, Human
caccacaugugcaca

SEQ ID NO: 3070942 - RNA, 19 nt, Human
caccacaugugcacaugca

SEQ ID NO: 3070943 - RNA, 23 nt, Human
cacauaucuaguaugaaauuaua

SEQ ID NO: 3070944 - RNA, 17 nt, Human
cacauacacacacacgc

SEQ ID NO: 3070945 - RNA, 14 nt, Human
cacaguuuucugag

SEQ ID NO: 3070946 - RNA, 23 nt, Human
cacaggcccggcuccaggcuccu

SEQ ID NO: 3070947 - RNA, 20 nt, Human
cacaggcccggcuccaggcu

SEQ ID NO: 3070948 - RNA, 18 nt, Human
cacagugagucgaggaca

SEQ ID NO: 3070949 - RNA, 20 nt, Human
cacagugagucgaggacagg

SEQ ID NO: 3070950 - RNA, 19 nt, Human
cacagugagucgaggacag

SEQ ID NO: 3070951 - RNA, 16 nt, Human
cacaggaucagucuga

SEQ ID NO: 3070952 - RNA, 15 nt, Human
cacaggaucagucug

SEQ ID NO: 3070953 - RNA, 12 nt, Human
cacaggaucagu

SEQ ID NO: 3070954 - RNA, 19 nt, Human
cacaggaaccacaagacug

SEQ ID NO: 3070955 - RNA, 15 nt, Human
cacaggaaguagagg

SEQ ID NO: 3070956 - RNA, 20 nt, Human
cacaggaaccacaagacugc

SEQ ID NO: 3070957 - RNA, 10 nt, Human
cacaggcagg

SEQ ID NO: 3070958 - RNA, 19 nt, Human
cacaggcccggcuccaggc

SEQ ID NO: 3070959 - RNA, 18 nt, Human
cacaggcccggcuccagg

SEQ ID NO: 3070960 - RNA, 17 nt, Human
cacaggcccggcuccag

SEQ ID NO: 3070961 - RNA, 16 nt, Human
cacaggcccggcucca

SEQ ID NO: 3070962 - RNA, 22 nt, Human
cacagcaguugaaaagacucca

SEQ ID NO: 3070963 - RNA, 20 nt, Human
cacagaugggugcuuggagg

SEQ ID NO: 3070964 - RNA, 14 nt, Human
cacagaugggugcu

SEQ ID NO: 3070965 - RNA, 18 nt, Human
cacagaugggugcuugga

SEQ ID NO: 3070966 - RNA, 20 nt, Human
cacagaguuguuacauuuuu

SEQ ID NO: 3070967 - RNA, 21 nt, Human
cacaaauucugucucuggauu

SEQ ID NO: 3070968 - RNA, 11 nt, Human
cacaacagauu

SEQ ID NO: 3070969 - RNA, 18 nt, Human
cacaaaaguuucucuuuu

SEQ ID NO: 3070970 - RNA, 16 nt, Human
cacaaaaguuucucuu

SEQ ID NO: 3070971 - RNA, 19 nt, Human
caaugcaaaccaucauuga

SEQ ID NO: 3070972 - RNA, 22 nt, Human
caaugcacuuuguucuggcucu

SEQ ID NO: 3070973 - RNA, 23 nt, Human
caaugcacuuuguucuggcucuu

SEQ ID NO: 3070974 - RNA, 14 nt, Human
caaugcaaaccauc

SEQ ID NO: 3070975 - RNA, 17 nt, Human
caaugcaaaccaucauu

SEQ ID NO: 3070976 - RNA, 18 nt, Human
caaugcaaaccaucauug

SEQ ID NO: 3070977 - RNA, 22 nt, Human
caaugaaugaaugaauggcuaa

SEQ ID NO: 3070978 - RNA, 21 nt, Human
caauaggaaaaacugauuuuu

SEQ ID NO: 3070979 - RNA, 21 nt, Human
caauaucuuuuuuuuaauaaa

SEQ ID NO: 3070980 - RNA, 20 nt, Human
caauaggaaaaacugauuuu

SEQ ID NO: 3070981 - RNA, 18 nt, Human
caauaggaaaaacugauu

SEQ ID NO: 3070982 - RNA, 19 nt, Human
cacaacuauuuuuccaaaa

SEQ ID NO: 3070983 - RNA, 14 nt, Human
cacaacuauuuuuc

SEQ ID NO: 3070984 - RNA, 13 nt, Human
cacaacuauauug

SEQ ID NO: 3070985 - RNA, 14 nt, Human
cacacaccagagcc

SEQ ID NO: 3070986 - RNA, 12 nt, Human
cacacagcucug

SEQ ID NO: 3070987 - RNA, 19 nt, Human
cacacagaggcugccucuc

SEQ ID NO: 3070988 - RNA, 13 nt, Human
cacaccagagccc

SEQ ID NO: 3070989 - RNA, 12 nt, Human
cacaccagagcc

SEQ ID NO: 3070990 - RNA, 15 nt, Human
cacaccagagcccac

SEQ ID NO: 3070991 - RNA, 15 nt, Human
cacaccauaagcuac

SEQ ID NO: 3070992 - RNA, 21 nt, Human
cacaccauaagcuacugccau

SEQ ID NO: 3070993 - RNA, 23 nt, Human
cacaccauaagcuacugccaucc

SEQ ID NO: 3070994 - RNA, 21 nt, Human
cacagagaaaguacuucucca

SEQ ID NO: 3070995 - RNA, 17 nt, Human
cacagaguuguuacauu

SEQ ID NO: 3070996 - RNA, 16 nt, Human
cacagaguuguuacau

SEQ ID NO: 3070997 - RNA, 22 nt, Human
cacagacccugcccugugggcc

SEQ ID NO: 3070998 - RNA, 21 nt, Human
cacacuugacaucaacugcau

SEQ ID NO: 3070999 - RNA, 15 nt, Human
cacacuggcucaccc

SEQ ID NO: 3071000 - RNA, 16 nt, Human
cacacuggcucaccca

SEQ ID NO: 3071001 - RNA, 19 nt, Human
cacacuggcucacccaguc

SEQ ID NO: 3071002 - RNA, 12 nt, Human
cacacuggcuca

SEQ ID NO: 3071003 - RNA, 14 nt, Human
cacacugaagaagc

SEQ ID NO: 3071004 - RNA, 19 nt, Human
cacacucaaaucaagaaac

SEQ ID NO: 3071005 - RNA, 16 nt, Human
cacccaagggccuggc

SEQ ID NO: 3071006 - RNA, 17 nt, Human
cacccaagggccuggcc

SEQ ID NO: 3071007 - RNA, 18 nt, Human
cacccaagggccuggccu

SEQ ID NO: 3071008 - RNA, 19 nt, Human
cacccaagggccuggccug

SEQ ID NO: 3071009 - RNA, 20 nt, Human
cacccaagggccuggccuga

SEQ ID NO: 3071010 - RNA, 21 nt, Human
cacccaagggccuggccugag

SEQ ID NO: 3071011 - RNA, 23 nt, Human
cacccaagggccuggccugagcu

SEQ ID NO: 3071012 - RNA, 15 nt, Human
cacccacaccauaag

SEQ ID NO: 3071013 - RNA, 22 nt, Human
cacccaccaucaugucuggcua

SEQ ID NO: 3071014 - RNA, 20 nt, Human
cacccaccaucaugucuggc

SEQ ID NO: 3071015 - RNA, 16 nt, Human
cacccaccucagccuc

SEQ ID NO: 3071016 - RNA, 14 nt, Human
cacccaccucagcc

SEQ ID NO: 3071017 - RNA, 13 nt, Human
cacccaccucagc

SEQ ID NO: 3071018 - RNA, 12 nt, Human
cacccaccucag

SEQ ID NO: 3071019 - RNA, 12 nt, Human
caccccagcccc

SEQ ID NO: 3071020 - RNA, 13 nt, Human
caccccagcccca

SEQ ID NO: 3071021 - RNA, 22 nt, Human
cacccccacccaagggccuggc

SEQ ID NO: 3071022 - RNA, 14 nt, Human
caccccggccaccu

SEQ ID NO: 3071023 - RNA, 15 nt, Human
caccccggccaccug

SEQ ID NO: 3071024 - RNA, 16 nt, Human
caccccggccaccugc

SEQ ID NO: 3071025 - RNA, 17 nt, Human
caccccggccaccugcg

SEQ ID NO: 3071026 - RNA, 15 nt, Human
uuggauuguccccga

SEQ ID NO: 3071027 - RNA, 15 nt, Human
uuggacccugaggcc

SEQ ID NO: 3071028 - RNA, 18 nt, Human
uuggacccugaggcccag

SEQ ID NO: 3071029 - RNA, 19 nt, Human
uuggacccugaggcccaga

SEQ ID NO: 3071030 - RNA, 21 nt, Human
uuggacccugaggcccagagg

SEQ ID NO: 3071031 - RNA, 19 nt, Human
uuggaagcuccgcuuucua

SEQ ID NO: 3071032 - RNA, 18 nt, Human
uuggacaaaauggaauac

SEQ ID NO: 3071033 - RNA, 19 nt, Human
uuggacagaagcagcucuu

SEQ ID NO: 3071034 - RNA, 16 nt, Human
uuggacagaagcagcu

SEQ ID NO: 3071035 - RNA, 21 nt, Human
uugccauguuggccaggcugg

SEQ ID NO: 3071036 - RNA, 20 nt, Human
uugccauguuggccaggcug

SEQ ID NO: 3071037 - RNA, 18 nt, Human
uugcugucccuuuuccuu

SEQ ID NO: 3071038 - RNA, 16 nt, Human
uugcugucccuuuucc

SEQ ID NO: 3071039 - RNA, 14 nt, Human
uugcugcuugaggc

SEQ ID NO: 3071040 - RNA, 16 nt, Human
uugcugcuugaggcaa

SEQ ID NO: 3071041 - RNA, 18 nt, Human
uugcuaagcauuccaacu

SEQ ID NO: 3071042 - RNA, 16 nt, Human
uugcuaagcauuccaa

SEQ ID NO: 3071043 - RNA, 23 nt, Human
uuggcuucacggaagagccuugc

SEQ ID NO: 3071044 - RNA, 20 nt, Human
uuggucugacccacugcuuu

SEQ ID NO: 3071045 - RNA, 13 nt, Human
uugguccugcugc

SEQ ID NO: 3071046 - RNA, 12 nt, Human
uuguaaaauggu

SEQ ID NO: 3071047 - RNA, 13 nt, Human
uuguaaaauggug

SEQ ID NO: 3071048 - RNA, 20 nt, Human
uugguaaggggaauugagga

SEQ ID NO: 3071049 - RNA, 16 nt, Human
uuguacgaagaguauu

SEQ ID NO: 3071050 - RNA, 19 nt, Human
uuguacgaagaguauuuuu

SEQ ID NO: 3071051 - RNA, 16 nt, Human
uuguaccgcaauguga

SEQ ID NO: 3071052 - RNA, 20 nt, Human
uuguaaaauggugugaccac

SEQ ID NO: 3071053 - RNA, 18 nt, Human
uuguacuuuagggaagua

SEQ ID NO: 3071054 - RNA, 22 nt, Human
uuguagaagucacauuccugaa

SEQ ID NO: 3071055 - RNA, 17 nt, Human
uuguagaagucacauuc

SEQ ID NO: 3071056 - RNA, 14 nt, Human
uuguagcacugaca

SEQ ID NO: 3071057 - RNA, 16 nt, Human
uuguagcacugacaga

SEQ ID NO: 3071058 - RNA, 17 nt, Human
uuguagcacugacagau

SEQ ID NO: 3071059 - RNA, 18 nt, Human
uuguagcacugacagauu

SEQ ID NO: 3071060 - RNA, 22 nt, Human
uuguagcacugacagauuucca

SEQ ID NO: 3071061 - RNA, 15 nt, Human
uuguagcauccugga

SEQ ID NO: 3071062 - RNA, 20 nt, Human
uugucuaugggacucaaugc

SEQ ID NO: 3071063 - RNA, 22 nt, Human
uugucuuaaaaaguggaaaaau

SEQ ID NO: 3071064 - RNA, 22 nt, Human
uugucaaaguggugagaggcau

SEQ ID NO: 3071065 - RNA, 14 nt, Human
uugucuaugggacu

SEQ ID NO: 3071066 - RNA, 20 nt, Human
uuguauuuuacuaauaaaau

SEQ ID NO: 3071067 - RNA, 16 nt, Human
uugcauaacguauaaa

SEQ ID NO: 3071068 - RNA, 19 nt, Human
uugccauguuggccaggcu

SEQ ID NO: 3071069 - RNA, 18 nt, Human
uugccauguuggccaggc

SEQ ID NO: 3071070 - RNA, 17 nt, Human
uugccauguuggccagg

SEQ ID NO: 3071071 - RNA, 16 nt, Human
uugccauguuggccag

SEQ ID NO: 3071072 - RNA, 13 nt, Human
uugauucauaaug

SEQ ID NO: 3071073 - RNA, 17 nt, Human
uugauucauaaugacuu

SEQ ID NO: 3071074 - RNA, 22 nt, Human
uugcagacaggcaagcaccucc

SEQ ID NO: 3071075 - RNA, 23 nt, Human
uugcagacaggcaagcaccuccu

SEQ ID NO: 3071076 - RNA, 23 nt, Human
uugcagcucuccccuucucugua

SEQ ID NO: 3071077 - RNA, 17 nt, Human
uugauccagaaagaaaa

SEQ ID NO: 3071078 - RNA, 16 nt, Human
uugauucagcucugca

SEQ ID NO: 3071079 - RNA, 23 nt, Human
uugauucagacagcugccuggga

SEQ ID NO: 3071080 - RNA, 17 nt, Human
uugauucagacagcugc

SEQ ID NO: 3071081 - RNA, 21 nt, Human
uugauucagacagcugccugg

SEQ ID NO: 3071082 - RNA, 16 nt, Human
uugauaugcuuauaca

SEQ ID NO: 3071083 - RNA, 16 nt, Human
uugauaugugaacagu

SEQ ID NO: 3071084 - RNA, 20 nt, Human
uugauaugccuuuucccaac

SEQ ID NO: 3071085 - RNA, 14 nt, Human
uugagccugggagg

SEQ ID NO: 3071086 - RNA, 14 nt, Human
uugagccuugaacu

SEQ ID NO: 3071087 - RNA, 16 nt, Human
uugagccuugaacuuu

SEQ ID NO: 3071088 - RNA, 15 nt, Human
uugagccuugaacuu

SEQ ID NO: 3071089 - RNA, 19 nt, Human
uugagccuugaacuuugac

SEQ ID NO: 3071090 - RNA, 18 nt, Human
uugaaaauuaacaugaau

SEQ ID NO: 3071091 - RNA, 15 nt, Human
uugaacuuugaccuc

SEQ ID NO: 3071092 - RNA, 21 nt, Human
uugaaaaucuuauaauuuaaa

SEQ ID NO: 3071093 - RNA, 21 nt, Human
uucuuuccugaggcugggcuc

SEQ ID NO: 3071094 - RNA, 18 nt, Human
uucuuuccacagaagcuc

SEQ ID NO: 3071095 - RNA, 17 nt, Human
uugaauguuaagcagau

SEQ ID NO: 3071096 - RNA, 14 nt, Human
uugaauguuaagca

SEQ ID NO: 3071097 - RNA, 12 nt, Human
uugaaugaugcc

SEQ ID NO: 3071098 - RNA, 16 nt, Human
uugaaugaugccauga

SEQ ID NO: 3071099 - RNA, 18 nt, Human
uugaacuuugaccucugc

SEQ ID NO: 3071100 - RNA, 17 nt, Human
uugaacuuugaccucug

SEQ ID NO: 3071101 - RNA, 16 nt, Human
uugaagagguuuuaaa

SEQ ID NO: 3071102 - RNA, 13 nt, Human
uugaacuuugacc

SEQ ID NO: 3071103 - RNA, 20 nt, Human
uugaagcacagugaucaagu

SEQ ID NO: 3071104 - RNA, 21 nt, Human
uugaagagguuuuaaagcuuc

SEQ ID NO: 3071105 - RNA, 20 nt, Human
uucuggcagaguugaagaca

SEQ ID NO: 3071106 - RNA, 24 nt, Human
uucuaaguaaaaccacagcaguug

SEQ ID NO: 3071107 - RNA, 17 nt, Human
uucuuagggaaggauac

SEQ ID NO: 3071108 - RNA, 19 nt, Human
uucuuaggguuaugauuaa

SEQ ID NO: 3071109 - RNA, 13 nt, Human
uucuucagagacu

SEQ ID NO: 3071110 - RNA, 16 nt, Human
uuuaaaaugagaaauc

SEQ ID NO: 3071111 - RNA, 12 nt, Human
uuuaaaaugucu

SEQ ID NO: 3071112 - RNA, 13 nt, Human
uuuaacagaaaug

SEQ ID NO: 3071113 - RNA, 13 nt, Human
uuuaaaagauaca

SEQ ID NO: 3071114 - RNA, 17 nt, Human
uuuaaaagaaugauuau

SEQ ID NO: 3071115 - RNA, 14 nt, Human
uuuaaaagaaugau

SEQ ID NO: 3071116 - RNA, 16 nt, Human
uuuaaaaucauuucug

SEQ ID NO: 3071117 - RNA, 19 nt, Human
uuuaaaauacacacucaaa

SEQ ID NO: 3071118 - RNA, 19 nt, Human
uuguucaauaauaaauauu

SEQ ID NO: 3071119 - RNA, 17 nt, Human
uuguuuaaaaucauuuc

SEQ ID NO: 3071120 - RNA, 18 nt, Human
uuguuuaaaaucauuucu

SEQ ID NO: 3071121 - RNA, 15 nt, Human
uugucuuuggacccu

SEQ ID NO: 3071122 - RNA, 20 nt, Human
uugucuuuggacccugaggc

SEQ ID NO: 3071123 - RNA, 24 nt, Human
uugucuuuggacccugaggcccag

SEQ ID NO: 3071124 - RNA, 20 nt, Human
uuguuuggggaugagaaagg

SEQ ID NO: 3071125 - RNA, 15 nt, Human
uuuauacaggucaua

SEQ ID NO: 3071126 - RNA, 20 nt, Human
uuuauacauaaacaagacca

SEQ ID NO: 3071127 - RNA, 12 nt, Human
uuuauacauaaa

SEQ ID NO: 3071128 - RNA, 18 nt, Human
uuuaguugcaacuuugua

SEQ ID NO: 3071129 - RNA, 17 nt, Human
uuuaguugcaacuuugu

SEQ ID NO: 3071130 - RNA, 22 nt, Human
uuuagacccuauugcugcuuga

SEQ ID NO: 3071131 - RNA, 19 nt, Human
uuuagacccuauugcugcu

SEQ ID NO: 3071132 - RNA, 18 nt, Human
uuuauaaacuuuaccuuu

SEQ ID NO: 3071133 - RNA, 13 nt, Human
uuuacagagacag

SEQ ID NO: 3071134 - RNA, 22 nt, Human
uuuaauaaacacucuugaaaaa

SEQ ID NO: 3071135 - RNA, 13 nt, Human
uuuaauaaaccau

SEQ ID NO: 3071136 - RNA, 14 nt, Human
uuuaauaauguuuc

SEQ ID NO: 3071137 - RNA, 15 nt, Human
uuuaauaauguuuca

SEQ ID NO: 3071138 - RNA, 19 nt, Human
uuuaauaauguuucaaaca

SEQ ID NO: 3071139 - RNA, 15 nt, Human
uuuaauaaacacucu

SEQ ID NO: 3071140 - RNA, 14 nt, Human
uuuaauaaacacuc

SEQ ID NO: 3071141 - RNA, 14 nt, Human
uuuaaccucuaaau

SEQ ID NO: 3071142 - RNA, 15 nt, Human
uuuaacagaaaugua

SEQ ID NO: 3071143 - RNA, 14 nt, Human
uuuaacagaaaugu

SEQ ID NO: 3071144 - RNA, 13 nt, Human
uuugaguucuaca

SEQ ID NO: 3071145 - RNA, 16 nt, Human
uuugagaguucuaaau

SEQ ID NO: 3071146 - RNA, 14 nt, Human
uuugagaguucuaa

SEQ ID NO: 3071147 - RNA, 16 nt, Human
uuugagaucagccugg

SEQ ID NO: 3071148 - RNA, 17 nt, Human
uuugagaucagccuggg

SEQ ID NO: 3071149 - RNA, 21 nt, Human
uuugaaauuguauuacaaauc

SEQ ID NO: 3071150 - RNA, 18 nt, Human
uuugaagcacagugauca

SEQ ID NO: 3071151 - RNA, 18 nt, Human
uuucuuaaccagaucauu

SEQ ID NO: 3071152 - RNA, 19 nt, Human
uuucuuguguguuuauugu

SEQ ID NO: 3071153 - RNA, 15 nt, Human
uuuggacccugaggc

SEQ ID NO: 3071154 - RNA, 19 nt, Human
uuuggacccugaggcccag

SEQ ID NO: 3071155 - RNA, 23 nt, Human
uuugcuuuauggguuuggcuugu

SEQ ID NO: 3071156 - RNA, 14 nt, Human
uuugcuugaaagaa

SEQ ID NO: 3071157 - RNA, 16 nt, Human
uuugcuugaaagaaaa

SEQ ID NO: 3071158 - RNA, 14 nt, Human
uuugauaugugaac

SEQ ID NO: 3071159 - RNA, 15 nt, Human
uuugauaugugaaca

SEQ ID NO: 3071160 - RNA, 17 nt, Human
uuugauaugugaacagu

SEQ ID NO: 3071161 - RNA, 18 nt, Human
uuugguaaggggaauuga

SEQ ID NO: 3071162 - RNA, 21 nt, Human
uuucuaacaaaaaaauauauu

SEQ ID NO: 3071163 - RNA, 14 nt, Human
uuucuaaaguaaaa

SEQ ID NO: 3071164 - RNA, 17 nt, Human
uuucuaaaguaaaaaca

SEQ ID NO: 3071165 - RNA, 22 nt, Human
uuucuaaaguaaaaacaaagaa

SEQ ID NO: 3071166 - RNA, 19 nt, Human
uuucuaaaucuccaaaaua

SEQ ID NO: 3071167 - RNA, 19 nt, Human
uuuccuggcacugcuucca

SEQ ID NO: 3071168 - RNA, 23 nt, Human
uuuccuggcacugcuuccaguga

SEQ ID NO: 3071169 - RNA, 18 nt, Human
uuucuacccagcgagccc

SEQ ID NO: 3071170 - RNA, 15 nt, Human
uuucuacccagcgag

SEQ ID NO: 3071171 - RNA, 22 nt, Human
uuucuacccagcgagcccuggu

SEQ ID NO: 3071172 - RNA, 12 nt, Human
uuucucuaggaa

SEQ ID NO: 3071173 - RNA, 14 nt, Human
uuucugaaauaaca

SEQ ID NO: 3071174 - RNA, 12 nt, Human
uuucugaaauuu

SEQ ID NO: 3071175 - RNA, 20 nt, Human
uuuccuaaauauauuuuaag

SEQ ID NO: 3071176 - RNA, 15 nt, Human
uuucacauaucuagu

SEQ ID NO: 3071177 - RNA, 21 nt, Human
uuucacauaucuaguaugaaa

SEQ ID NO: 3071178 - RNA, 16 nt, Human
uuucagccaagaauuc

SEQ ID NO: 3071179 - RNA, 17 nt, Human
uuucagccaagaauucu

SEQ ID NO: 3071180 - RNA, 18 nt, Human
uuaaaagaugaaaauauu

SEQ ID NO: 3071181 - RNA, 15 nt, Human
uuaaaagaugaaaau

SEQ ID NO: 3071182 - RNA, 21 nt, Human
uuaaaauaccagccaguaaau

SEQ ID NO: 3071183 - RNA, 19 nt, Human
uuaaaauacacacucaaau

SEQ ID NO: 3071184 - RNA, 18 nt, Human
uguuuuuuuuuaaagacu

SEQ ID NO: 3071185 - RNA, 17 nt, Human
uuaaaagauacaguuac

SEQ ID NO: 3071186 - RNA, 14 nt, Human
uuaaaagauacagu

SEQ ID NO: 3071187 - RNA, 22 nt, Human
uuaaaagaauauuuuaacuucc

SEQ ID NO: 3071188 - RNA, 21 nt, Human
uuaaaagaauauuuuaacuuc

SEQ ID NO: 3071189 - RNA, 18 nt, Human
uguuuuaaggaugcuugu

SEQ ID NO: 3071190 - RNA, 22 nt, Human
uguuuuaagaggcagggucuca

SEQ ID NO: 3071191 - RNA, 16 nt, Human
uguuuagauaauacac

SEQ ID NO: 3071192 - RNA, 19 nt, Human
uguuucaaacauauauaac

SEQ ID NO: 3071193 - RNA, 15 nt, Human
uguuucaaacuuuac

SEQ ID NO: 3071194 - RNA, 21 nt, Human
uguuucaaacauauauaacaa

SEQ ID NO: 3071195 - RNA, 22 nt, Human
uguuucaaacauauauaacaau

SEQ ID NO: 3071196 - RNA, 20 nt, Human
uguuuuaagaggcagggucu

SEQ ID NO: 3071197 - RNA, 13 nt, Human
uguuugugauuga

SEQ ID NO: 3071198 - RNA, 23 nt, Human
uguuuccuggcacugcuuccagu

SEQ ID NO: 3071199 - RNA, 19 nt, Human
uguuuggggaugagaaagg

SEQ ID NO: 3071200 - RNA, 23 nt, Human
uuaaauguuuuuuuuuaaagacu

SEQ ID NO: 3071201 - RNA, 21 nt, Human
uuaaauguuuuuuuuuaaaga

SEQ ID NO: 3071202 - RNA, 17 nt, Human
uuaaccacuucagcuga

SEQ ID NO: 3071203 - RNA, 21 nt, Human
uuaagcagauggaaugcugug

SEQ ID NO: 3071204 - RNA, 14 nt, Human
uuaacuuuuauaaa

SEQ ID NO: 3071205 - RNA, 17 nt, Human
uuaacuuuuauaaacuu

SEQ ID NO: 3071206 - RNA, 16 nt, Human
uuaacuuuuauaaacu

SEQ ID NO: 3071207 - RNA, 16 nt, Human
uuaacuucacauauug

SEQ ID NO: 3071208 - RNA, 15 nt, Human
uuaacuuuuauaaac

SEQ ID NO: 3071209 - RNA, 21 nt, Human
uuaaugauaaguaaaugcuag

SEQ ID NO: 3071210 - RNA, 17 nt, Human
uuaaugauaaguaaaug

SEQ ID NO: 3071211 - RNA, 22 nt, Human
uuaauauugauaugcuuauaca

SEQ ID NO: 3071212 - RNA, 18 nt, Human
uuaauauugauaugcuua

SEQ ID NO: 3071213 - RNA, 13 nt, Human
uuaauauauuucc

SEQ ID NO: 3071214 - RNA, 14 nt, Human
uuaauauauuucca

SEQ ID NO: 3071215 - RNA, 17 nt, Human
uuaagcuguuacugucu

SEQ ID NO: 3071216 - RNA, 20 nt, Human
uuacaagcgugagccacugc

SEQ ID NO: 3071217 - RNA, 21 nt, Human
uuacaagcgugagccacugca

SEQ ID NO: 3071218 - RNA, 14 nt, Human
uuaguguucauaaa

SEQ ID NO: 3071219 - RNA, 16 nt, Human
uuaguaugaggcauuu

SEQ ID NO: 3071220 - RNA, 18 nt, Human
uuaguaugaggcauuugu

SEQ ID NO: 3071221 - RNA, 17 nt, Human
uuaguagagacaggguu

SEQ ID NO: 3071222 - RNA, 18 nt, Human
uuaggauguugaaaaagu

SEQ ID NO: 3071223 - RNA, 14 nt, Human
uuagaguugauacu

SEQ ID NO: 3071224 - RNA, 14 nt, Human
uuagcggagacgga

SEQ ID NO: 3071225 - RNA, 20 nt, Human
uuagaugcaguucugaagaa

SEQ ID NO: 3071226 - RNA, 21 nt, Human
uuagaugcaguucugaagaag

SEQ ID NO: 3071227 - RNA, 22 nt, Human
uuagauaauacaccacuacauu

SEQ ID NO: 3071228 - RNA, 12 nt, Human
uuagcuggaaaa

SEQ ID NO: 3071229 - RNA, 13 nt, Human
uuagcuggaaaag

SEQ ID NO: 3071230 - RNA, 17 nt, Human
uuacugucuuuuuucua

SEQ ID NO: 3071231 - RNA, 19 nt, Human
uuacugucuuuuuucuaaa

SEQ ID NO: 3071232 - RNA, 21 nt, Human
uuacuuaaaccgccaaggcug

SEQ ID NO: 3071233 - RNA, 23 nt, Human
uuacuucuuauacauuugauaaa

SEQ ID NO: 3071234 - RNA, 12 nt, Human
uuacuucugcua

SEQ ID NO: 3071235 - RNA, 11 nt, Human
uuacuucugcu

SEQ ID NO: 3071236 - RNA, 18 nt, Human
uuacuuagguguggggga

SEQ ID NO: 3071237 - RNA, 17 nt, Human
uuacuaguuucccuugc

SEQ ID NO: 3071238 - RNA, 16 nt, Human
uuacuaauagacaauu

SEQ ID NO: 3071239 - RNA, 14 nt, Human
uuacuaaguuuuua

SEQ ID NO: 3071240 - RNA, 13 nt, Human
uuacuaaguuuuu

SEQ ID NO: 3071241 - RNA, 16 nt, Human
uuagacagucccugcc

SEQ ID NO: 3071242 - RNA, 17 nt, Human
uuagacagucccugcca

SEQ ID NO: 3071243 - RNA, 18 nt, Human
uuagacagucccugccaa

SEQ ID NO: 3071244 - RNA, 14 nt, Human
uuagacagucccug

SEQ ID NO: 3071245 - RNA, 15 nt, Human
uuagacagucccugc

SEQ ID NO: 3071246 - RNA, 14 nt, Human
uuacuuuguguuca

SEQ ID NO: 3071247 - RNA, 18 nt, Human
uuacuuuaaaaggagcca

SEQ ID NO: 3071248 - RNA, 17 nt, Human
uuacuuuaaaaggagcc

SEQ ID NO: 3071249 - RNA, 17 nt, Human
uucccuugaugaagaag

SEQ ID NO: 3071250 - RNA, 20 nt, Human
uucccuuugacgccauccca

SEQ ID NO: 3071251 - RNA, 21 nt, Human
uucccuuugacgccaucccag

SEQ ID NO: 3071252 - RNA, 22 nt, Human
uucccuuugacgccaucccagc

SEQ ID NO: 3071253 - RNA, 13 nt, Human
uuccucauuagca

SEQ ID NO: 3071254 - RNA, 20 nt, Human
uucgggaggucgaggcagga

SEQ ID NO: 3071255 - RNA, 22 nt, Human
uucggccuccauccugaggcuc

SEQ ID NO: 3071256 - RNA, 17 nt, Human
uuccuuggacucauuuu

SEQ ID NO: 3071257 - RNA, 20 nt, Human
uuccuuggacucauuuuaaa

SEQ ID NO: 3071258 - RNA, 13 nt, Human
uucuaaagcugcc

SEQ ID NO: 3071259 - RNA, 17 nt, Human
uucuaaagcugccagcc

SEQ ID NO: 3071260 - RNA, 18 nt, Human
uuccugaugcuucuucag

SEQ ID NO: 3071261 - RNA, 19 nt, Human
uuccugaugcuucuucaga

SEQ ID NO: 3071262 - RNA, 15 nt, Human
uuccugaugcuucuu

SEQ ID NO: 3071263 - RNA, 17 nt, Human
uuccugccaggcauggu

SEQ ID NO: 3071264 - RNA, 14 nt, Human
uuccuggcacugcu

SEQ ID NO: 3071265 - RNA, 19 nt, Human
uuccagauccuggaaauca

SEQ ID NO: 3071266 - RNA, 21 nt, Human
uuccaaaauaauuuuaagaaa

SEQ ID NO: 3071267 - RNA, 13 nt, Human
uuccaaaauaauu

SEQ ID NO: 3071268 - RNA, 15 nt, Human
uuccaaauucugcuu

SEQ ID NO: 3071269 - RNA, 17 nt, Human
uucaugcaaacuuuauu

SEQ ID NO: 3071270 - RNA, 19 nt, Human
uucaugcauagguuuagca

SEQ ID NO: 3071271 - RNA, 12 nt, Human
uuccaaaauaau

SEQ ID NO: 3071272 - RNA, 16 nt, Human
uucauuuccugugucu

SEQ ID NO: 3071273 - RNA, 15 nt, Human
uucauuuccuguguc

SEQ ID NO: 3071274 - RNA, 11 nt, Human
uucaggaagcu

SEQ ID NO: 3071275 - RNA, 13 nt, Human
uucaggaagcuca

SEQ ID NO: 3071276 - RNA, 17 nt, Human
uucaucuugaauuguaa

SEQ ID NO: 3071277 - RNA, 21 nt, Human
uucaucuugaauuguaaggaa

SEQ ID NO: 3071278 - RNA, 17 nt, Human
uucaugaaagauucaau

SEQ ID NO: 3071279 - RNA, 15 nt, Human
uucaugaaagauuca

SEQ ID NO: 3071280 - RNA, 17 nt, Human
uuccccaggaggccagc

SEQ ID NO: 3071281 - RNA, 18 nt, Human
uuccccaggaggccagcc

SEQ ID NO: 3071282 - RNA, 19 nt, Human
uuccccaggaggccagccu

SEQ ID NO: 3071283 - RNA, 20 nt, Human
uuccccaggaggccagccuu

SEQ ID NO: 3071284 - RNA, 21 nt, Human
uuccccaggaggccagccuug

SEQ ID NO: 3071285 - RNA, 20 nt, Human
uucccucccuuccucuuucc

SEQ ID NO: 3071286 - RNA, 17 nt, Human
uucccucccuuccucuu

SEQ ID NO: 3071287 - RNA, 11 nt, Human
uucccucccuu

SEQ ID NO: 3071288 - RNA, 16 nt, Human
uucccauuugcuccuu

SEQ ID NO: 3071289 - RNA, 15 nt, Human
uuccccaggaggcca

SEQ ID NO: 3071290 - RNA, 16 nt, Human
uuccccaggaggccag

SEQ ID NO: 3071291 - RNA, 20 nt, Human
uuauuuuauguugcauagaa

SEQ ID NO: 3071292 - RNA, 17 nt, Human
uuauuuuaauucaguug

SEQ ID NO: 3071293 - RNA, 18 nt, Human
uuauugucaaagugguga

SEQ ID NO: 3071294 - RNA, 15 nt, Human
uuauugucuagugaa

SEQ ID NO: 3071295 - RNA, 17 nt, Human
uuauugucaaaguggug

SEQ ID NO: 3071296 - RNA, 15 nt, Human
uuauuuuaauaaugu

SEQ ID NO: 3071297 - RNA, 16 nt, Human
uuauuuuaauaauguu

SEQ ID NO: 3071298 - RNA, 22 nt, Human
uucagaguugaugguuguacau

SEQ ID NO: 3071299 - RNA, 21 nt, Human
uucagaguugaugguuguaca

SEQ ID NO: 3071300 - RNA, 21 nt, Human
uucagacagcugccugggauc

SEQ ID NO: 3071301 - RNA, 16 nt, Human
uucagacauagaauua

SEQ ID NO: 3071302 - RNA, 19 nt, Human
uucagagacuccugcaggc

SEQ ID NO: 3071303 - RNA, 20 nt, Human
uucagacauagaauuaacac

SEQ ID NO: 3071304 - RNA, 13 nt, Human
uucacucuccuug

SEQ ID NO: 3071305 - RNA, 15 nt, Human
uucacgugguccuaa

SEQ ID NO: 3071306 - RNA, 18 nt, Human
uucacggaagagccuugc

SEQ ID NO: 3071307 - RNA, 13 nt, Human
uucaauaggaaaa

SEQ ID NO: 3071308 - RNA, 15 nt, Human
uucaauaggaaaaac

SEQ ID NO: 3071309 - RNA, 18 nt, Human
uucaauaggaaaaacuga

SEQ ID NO: 3071310 - RNA, 20 nt, Human
uucaauaggaaaaacugauu

SEQ ID NO: 3071311 - RNA, 15 nt, Human
uuauugauaaguuca

SEQ ID NO: 3071312 - RNA, 19 nt, Human
uuauugauaaguucauaca

SEQ ID NO: 3071313 - RNA, 20 nt, Human
uuauugauaaguucauacau

SEQ ID NO: 3071314 - RNA, 15 nt, Human
uuauugcccacgcug

SEQ ID NO: 3071315 - RNA, 11 nt, Human
uuauucugcuc

SEQ ID NO: 3071316 - RNA, 23 nt, Human
uuauuaaaaaucucaaauuucua

SEQ ID NO: 3071317 - RNA, 17 nt, Human
uuauggcuauaggugcu

SEQ ID NO: 3071318 - RNA, 16 nt, Human
uuauuacuguaagaaa

SEQ ID NO: 3071319 - RNA, 17 nt, Human
uuauuacuguaagaaaa

SEQ ID NO: 3071320 - RNA, 18 nt, Human
uuauuacuguaagaaaau

SEQ ID NO: 3071321 - RNA, 13 nt, Human
uuaguugcaacuu

SEQ ID NO: 3071322 - RNA, 16 nt, Human
uuaguuccucauuagc

SEQ ID NO: 3071323 - RNA, 14 nt, Human
uuaguuccuugagu

SEQ ID NO: 3071324 - RNA, 20 nt, Human
uuaguugcaacuuuguauaa

SEQ ID NO: 3071325 - RNA, 16 nt, Human
uuaucuagauacugua

SEQ ID NO: 3071326 - RNA, 14 nt, Human
uuaucuagauacug

SEQ ID NO: 3071327 - RNA, 20 nt, Human
uuaucuugaauaauguaaga

SEQ ID NO: 3071328 - RNA, 17 nt, Human
uuaucuagauacuguau

SEQ ID NO: 3071329 - RNA, 16 nt, Human
uuauggaacacucuga

SEQ ID NO: 3071330 - RNA, 21 nt, Human
uuauggcacuaguauuucuau

SEQ ID NO: 3071331 - RNA, 22 nt, Human
uuaugcaugaaguaauaugcac

SEQ ID NO: 3071332 - RNA, 16 nt, Human
uuaugcaugaaguaau

SEQ ID NO: 3071333 - RNA, 18 nt, Human
ugcauauuauuuuauguu

SEQ ID NO: 3071334 - RNA, 19 nt, Human
ugcaucaagaugugacaug

SEQ ID NO: 3071335 - RNA, 22 nt, Human
ugcaucaauuuuucuuauuuca

SEQ ID NO: 3071336 - RNA, 16 nt, Human
ugcauagguuuagcag

SEQ ID NO: 3071337 - RNA, 16 nt, Human
ugcaguugccagucac

SEQ ID NO: 3071338 - RNA, 12 nt, Human
ugcaguucugaa

SEQ ID NO: 3071339 - RNA, 15 nt, Human
ugcaguugccaguca

SEQ ID NO: 3071340 - RNA, 21 nt, Human
ugcaguuacacuaaaagguga

SEQ ID NO: 3071341 - RNA, 21 nt, Human
ugcaguggugcgaucuggguu

SEQ ID NO: 3071342 - RNA, 20 nt, Human
ugcaguggugcgaucugggu

SEQ ID NO: 3071343 - RNA, 13 nt, Human
ugcagggaguccg

SEQ ID NO: 3071344 - RNA, 21 nt, Human
ugcauuuggugguuucagaaa

SEQ ID NO: 3071345 - RNA, 13 nt, Human
ugcaucagcugcu

SEQ ID NO: 3071346 - RNA, 23 nt, Human
ugcauuuggugguuucagaaaug

SEQ ID NO: 3071347 - RNA, 17 nt, Human
ugccaaagaagcagacc

SEQ ID NO: 3071348 - RNA, 20 nt, Human
ugccaggaagccagcaggcu

SEQ ID NO: 3071349 - RNA, 22 nt, Human
ugccaggaagccagcaggcucu

SEQ ID NO: 3071350 - RNA, 16 nt, Human
ugccacuaaauugaca

SEQ ID NO: 3071351 - RNA, 10 nt, Human
ugccaggcau

SEQ ID NO: 3071352 - RNA, 14 nt, Human
ugccaggcauggug

SEQ ID NO: 3071353 - RNA, 20 nt, Human
ugccacccuggggagaaagu

SEQ ID NO: 3071354 - RNA, 19 nt, Human
ugcccaggcuggcgugcag

SEQ ID NO: 3071355 - RNA, 18 nt, Human
ugcccaggcuggcgugca

SEQ ID NO: 3071356 - RNA, 20 nt, Human
ugcccaggcuggcgugcagu

SEQ ID NO: 3071357 - RNA, 13 nt, Human
ugcccaggcuggc

SEQ ID NO: 3071358 - RNA, 14 nt, Human
ugcccggcugcgga

SEQ ID NO: 3071359 - RNA, 12 nt, Human
ugcccggcugcg

SEQ ID NO: 3071360 - RNA, 16 nt, Human
ugccccuggcagcccc

SEQ ID NO: 3071361 - RNA, 15 nt, Human
ugccucaagagaagg

SEQ ID NO: 3071362 - RNA, 14 nt, Human
ugccucaagagaag

SEQ ID NO: 3071363 - RNA, 16 nt, Human
ugcccugcccaccugg

SEQ ID NO: 3071364 - RNA, 20 nt, Human
ugcccugcccaccuggccuc

SEQ ID NO: 3071365 - RNA, 15 nt, Human
ugcccugcccaccug

SEQ ID NO: 3071366 - RNA, 14 nt, Human
ugcccugcccaccu

SEQ ID NO: 3071367 - RNA, 17 nt, Human
ugcucuugaugccuggc

SEQ ID NO: 3071368 - RNA, 23 nt, Human
ugcucuccgaccagacaccuuga

SEQ ID NO: 3071369 - RNA, 19 nt, Human
ugcucaggagcccugggag

SEQ ID NO: 3071370 - RNA, 18 nt, Human
ugcucaggagcccuggga

SEQ ID NO: 3071371 - RNA, 20 nt, Human
ugcucaggagcccugggagg

SEQ ID NO: 3071372 - RNA, 15 nt, Human
ugcucaggagcccug

SEQ ID NO: 3071373 - RNA, 17 nt, Human
ugcucacauaucuguca

SEQ ID NO: 3071374 - RNA, 21 nt, Human
ugcuaggaacacuccuucaca

SEQ ID NO: 3071375 - RNA, 20 nt, Human
ugcuaggaacacuccuucac

SEQ ID NO: 3071376 - RNA, 22 nt, Human
ugcuaggaacacuccuucacag

SEQ ID NO: 3071377 - RNA, 13 nt, Human
ugcuagaacuccc

SEQ ID NO: 3071378 - RNA, 14 nt, Human
ugcuagaacucccu

SEQ ID NO: 3071379 - RNA, 15 nt, Human
ugcuagaacucccuu

SEQ ID NO: 3071380 - RNA, 17 nt, Human
ugcuagaacucccuuuc

SEQ ID NO: 3071381 - RNA, 20 nt, Human
ugccuugcauaauggucaga

SEQ ID NO: 3071382 - RNA, 22 nt, Human
ugcuacuguccuacccacccuc

SEQ ID NO: 3071383 - RNA, 21 nt, Human
ugcuacuguccuacccacccu

SEQ ID NO: 3071384 - RNA, 17 nt, Human
ugcugccugcuuuuuau

SEQ ID NO: 3071385 - RNA, 15 nt, Human
ugcugccugcuuuuu

SEQ ID NO: 3071386 - RNA, 19 nt, Human
ugcugcauuuaaaagauac

SEQ ID NO: 3071387 - RNA, 18 nt, Human
ugcugcauuuaaaagaua

SEQ ID NO: 3071388 - RNA, 17 nt, Human
ugcugcauuuaaaagau

SEQ ID NO: 3071389 - RNA, 23 nt, Human
ugcugcauuuaaaagauacaguu

SEQ ID NO: 3071390 - RNA, 14 nt, Human
ugcugcauuuaaaa

SEQ ID NO: 3071391 - RNA, 24 nt, Human
ugcugggccccugccucucugcag

SEQ ID NO: 3071392 - RNA, 23 nt, Human
ugcugggccccugccucucugca

SEQ ID NO: 3071393 - RNA, 22 nt, Human
ugcugggccccugccucucugc

SEQ ID NO: 3071394 - RNA, 21 nt, Human
ugcugggccccugccucucug

SEQ ID NO: 3071395 - RNA, 19 nt, Human
ugcugggccccugccucuc

SEQ ID NO: 3071396 - RNA, 18 nt, Human
ugcugggccccugccucu

SEQ ID NO: 3071397 - RNA, 17 nt, Human
ugcugggccccugccuc

SEQ ID NO: 3071398 - RNA, 16 nt, Human
ugcugggccccugccu

SEQ ID NO: 3071399 - RNA, 14 nt, Human
ugcugggccccugc

SEQ ID NO: 3071400 - RNA, 19 nt, Human
ugcugcuugaggcaacuca

SEQ ID NO: 3071401 - RNA, 20 nt, Human
ugcugggauuacagguguga

SEQ ID NO: 3071402 - RNA, 12 nt, Human
ugcugcuugagg

SEQ ID NO: 3071403 - RNA, 19 nt, Human
ugcugcugccccugcacag

SEQ ID NO: 3071404 - RNA, 12 nt, Human
ugcugcugcccc

SEQ ID NO: 3071405 - RNA, 13 nt, Human
ugcugguuuuagu

SEQ ID NO: 3071406 - RNA, 18 nt, Human
ugcuguguuaaauaaacc

SEQ ID NO: 3071407 - RNA, 11 nt, Human
ugcuguguuaa

SEQ ID NO: 3071408 - RNA, 16 nt, Human
ugcuguucaugaaaga

SEQ ID NO: 3071409 - RNA, 17 nt, Human
ugcuguucaugaaagau

SEQ ID NO: 3071410 - RNA, 13 nt, Human
ugcuggguguggc

SEQ ID NO: 3071411 - RNA, 17 nt, Human
ugcugggcuugucugua

SEQ ID NO: 3071412 - RNA, 20 nt, Human
ugcugggggggauuguaaaa

SEQ ID NO: 3071413 - RNA, 19 nt, Human
uggugacuuuccucuuugg

SEQ ID NO: 3071414 - RNA, 22 nt, Human
uggugaccucugccugaaguca

SEQ ID NO: 3071415 - RNA, 17 nt, Human
uggugaccucugccuga

SEQ ID NO: 3071416 - RNA, 16 nt, Human
uggugaccucugccug

SEQ ID NO: 3071417 - RNA, 15 nt, Human
uggugaccucugccu

SEQ ID NO: 3071418 - RNA, 21 nt, Human
uggugcaaugaccuuucaaua

SEQ ID NO: 3071419 - RNA, 20 nt, Human
uggugcaaugaccuuucaau

SEQ ID NO: 3071420 - RNA, 22 nt, Human
uggugauuuagcaggaagcugu

SEQ ID NO: 3071421 - RNA, 16 nt, Human
uggugauuuagcagga

SEQ ID NO: 3071422 - RNA, 15 nt, Human
uggucuacacugugc

SEQ ID NO: 3071423 - RNA, 16 nt, Human
uggucuacacugugcu

SEQ ID NO: 3071424 - RNA, 17 nt, Human
uggucuacacugugcug

SEQ ID NO: 3071425 - RNA, 18 nt, Human
uggucuacacugugcuga

SEQ ID NO: 3071426 - RNA, 14 nt, Human
uggugaccucugcc

SEQ ID NO: 3071427 - RNA, 13 nt, Human
uggugaccucugc

SEQ ID NO: 3071428 - RNA, 17 nt, Human
uggucggaaaacaugcu

SEQ ID NO: 3071429 - RNA, 14 nt, Human
uggucggaaaacau

SEQ ID NO: 3071430 - RNA, 17 nt, Human
ugguccuaaucuucuga

SEQ ID NO: 3071431 - RNA, 19 nt, Human
ugguccuaaucuucugaac

SEQ ID NO: 3071432 - RNA, 13 nt, Human
ugguccugcugca

SEQ ID NO: 3071433 - RNA, 15 nt, Human
ugguccugcugcagu

SEQ ID NO: 3071434 - RNA, 23 nt, Human
ugguccugcugcaguugccaguc

SEQ ID NO: 3071435 - RNA, 15 nt, Human
uggucccccuuccau

SEQ ID NO: 3071436 - RNA, 16 nt, Human
uggucccccuuccaug

SEQ ID NO: 3071437 - RNA, 18 nt, Human
uggucccccuuccaugga

SEQ ID NO: 3071438 - RNA, 23 nt, Human
uggucccccuuccauggacuuug

SEQ ID NO: 3071439 - RNA, 18 nt, Human
ugguaugaucacggcuca

SEQ ID NO: 3071440 - RNA, 13 nt, Human
ugguauguuuuca

SEQ ID NO: 3071441 - RNA, 14 nt, Human
uggucccccuucca

SEQ ID NO: 3071442 - RNA, 13 nt, Human
uggucccacucag

SEQ ID NO: 3071443 - RNA, 22 nt, Human
uggucacaggaaguagaggagg

SEQ ID NO: 3071444 - RNA, 17 nt, Human
uggucacaggaaguaga

SEQ ID NO: 3071445 - RNA, 14 nt, Human
ugggagugggccca

SEQ ID NO: 3071446 - RNA, 16 nt, Human
ugggagugggcccaau

SEQ ID NO: 3071447 - RNA, 20 nt, Human
uggcugggggccucagugcc

SEQ ID NO: 3071448 - RNA, 17 nt, Human
uggcugggggccucagu

SEQ ID NO: 3071449 - RNA, 16 nt, Human
uggcugggggccucag

SEQ ID NO: 3071450 - RNA, 22 nt, Human
ugggcagagcagagaccauccc

SEQ ID NO: 3071451 - RNA, 18 nt, Human
ugggcagagcagagacca

SEQ ID NO: 3071452 - RNA, 22 nt, Human
ugggauuacaagcgugagccac

SEQ ID NO: 3071453 - RNA, 12 nt, Human
ugggauccucca

SEQ ID NO: 3071454 - RNA, 13 nt, Human
ugggauccuccag

SEQ ID NO: 3071455 - RNA, 23 nt, Human
ugggccccugccucucugcaggu

SEQ ID NO: 3071456 - RNA, 21 nt, Human
ugggccccugccucucugcag

SEQ ID NO: 3071457 - RNA, 20 nt, Human
ugggccccugccucucugca

SEQ ID NO: 3071458 - RNA, 14 nt, Human
ugggccuggcuccc

SEQ ID NO: 3071459 - RNA, 23 nt, Human
ugggcagagcagagaccaucccu

SEQ ID NO: 3071460 - RNA, 13 nt, Human
uggggggggugcu

SEQ ID NO: 3071461 - RNA, 16 nt, Human
ugggggaguggccaca

SEQ ID NO: 3071462 - RNA, 18 nt, Human
uggguacuuguggacaca

SEQ ID NO: 3071463 - RNA, 17 nt, Human
uggguacuuguggacac

SEQ ID NO: 3071464 - RNA, 20 nt, Human
uggggccaggcugggucgcc

SEQ ID NO: 3071465 - RNA, 23 nt, Human
uggggaugagaaagguugaagca

SEQ ID NO: 3071466 - RNA, 15 nt, Human
uggggaugagaaagg

SEQ ID NO: 3071467 - RNA, 22 nt, Human
uggggccaggcugggucgcccu

SEQ ID NO: 3071468 - RNA, 21 nt, Human
uggggccaggcugggucgccc

SEQ ID NO: 3071469 - RNA, 20 nt, Human
uggggccaguuggucccccu

SEQ ID NO: 3071470 - RNA, 22 nt, Human
ugggcuucauccuccucagauc

SEQ ID NO: 3071471 - RNA, 15 nt, Human
uggcgggguggggug

SEQ ID NO: 3071472 - RNA, 15 nt, Human
uggcugcuucaagga

SEQ ID NO: 3071473 - RNA, 15 nt, Human
uggcugggggccuca

SEQ ID NO: 3071474 - RNA, 11 nt, Human
uggcugcuuca

SEQ ID NO: 3071475 - RNA, 15 nt, Human
uggcgcugccccugg

SEQ ID NO: 3071476 - RNA, 23 nt, Human
uggcgcugccccuggcagccccu

SEQ ID NO: 3071477 - RNA, 16 nt, Human
uggcgcugccccuggc

SEQ ID NO: 3071478 - RNA, 22 nt, Human
uggcgcagcauauucaggaagc

SEQ ID NO: 3071479 - RNA, 23 nt, Human
uggcgcagcauauucaggaagcu

SEQ ID NO: 3071480 - RNA, 23 nt, Human
uggcgagccauuugucccaagug

SEQ ID NO: 3071481 - RNA, 22 nt, Human
uggcgagccauuugucccaagu

SEQ ID NO: 3071482 - RNA, 23 nt, Human
uggccucccaacucaccccagcc

SEQ ID NO: 3071483 - RNA, 19 nt, Human
uggccagaugcaccagccc

SEQ ID NO: 3071484 - RNA, 15 nt, Human
uggcagaguugaaga

SEQ ID NO: 3071485 - RNA, 21 nt, Human
uggcagaguggauucuugaac

SEQ ID NO: 3071486 - RNA, 17 nt, Human
uggcagaguugaagaca

SEQ ID NO: 3071487 - RNA, 19 nt, Human
uggcagaguugaagacaga

SEQ ID NO: 3071488 - RNA, 18 nt, Human
uggccagaugcaccagcc

SEQ ID NO: 3071489 - RNA, 17 nt, Human
uggccagaugcaccagc

SEQ ID NO: 3071490 - RNA, 13 nt, Human
uggccaggcuggu

SEQ ID NO: 3071491 - RNA, 16 nt, Human
uggcccaggguggcca

SEQ ID NO: 3071492 - RNA, 17 nt, Human
uggcccaggguggccac

SEQ ID NO: 3071493 - RNA, 18 nt, Human
uggcccaggguggccaca

SEQ ID NO: 3071494 - RNA, 16 nt, Human
uggccccugcccggcu

SEQ ID NO: 3071495 - RNA, 15 nt, Human
uggccccugcccggc

SEQ ID NO: 3071496 - RNA, 14 nt, Human
uggccccugcccgg

SEQ ID NO: 3071497 - RNA, 21 nt, Human
uggaggaaggaaacccagcuc

SEQ ID NO: 3071498 - RNA, 23 nt, Human
uggaggaaggaaacccagcucug

SEQ ID NO: 3071499 - RNA, 20 nt, Human
uggcaaacagggccucugcg

SEQ ID NO: 3071500 - RNA, 24 nt, Human
uggcaaacagggccucugcggagc

SEQ ID NO: 3071501 - RNA, 15 nt, Human
uggcaaacagggccu

SEQ ID NO: 3071502 - RNA, 16 nt, Human
uggcaaacagggccuc

SEQ ID NO: 3071503 - RNA, 18 nt, Human
uggcaaacagggccucug

SEQ ID NO: 3071504 - RNA, 19 nt, Human
uggcaaacagggccucugc

SEQ ID NO: 3071505 - RNA, 12 nt, Human
uggcaaaaaggc

SEQ ID NO: 3071506 - RNA, 16 nt, Human
uggcaaaaaggcagga

SEQ ID NO: 3071507 - RNA, 16 nt, Human
uggcacuauaauguaa

SEQ ID NO: 3071508 - RNA, 15 nt, Human
uggcacuauaaugua

SEQ ID NO: 3071509 - RNA, 20 nt, Human
uggcaauagucaaauugugu

SEQ ID NO: 3071510 - RNA, 15 nt, Human
uggcacuaguauuuc

SEQ ID NO: 3071511 - RNA, 19 nt, Human
uggacugagggggccugga

SEQ ID NO: 3071512 - RNA, 23 nt, Human
uggacugagggggccuggaugcc

SEQ ID NO: 3071513 - RNA, 20 nt, Human
uggacugagggggccuggau

SEQ ID NO: 3071514 - RNA, 22 nt, Human
uggacugagggggccuggaugc

SEQ ID NO: 3071515 - RNA, 23 nt, Human
uggacaggcauguucucugagga

SEQ ID NO: 3071516 - RNA, 23 nt, Human
ugacauaaguauuuaauucaugu

SEQ ID NO: 3071517 - RNA, 19 nt, Human
ugacagagugagacucugu

SEQ ID NO: 3071518 - RNA, 17 nt, Human
ugacagagugagacucu

SEQ ID NO: 3071519 - RNA, 14 nt, Human
ugacagagugagac

SEQ ID NO: 3071520 - RNA, 23 nt, Human
ugacagaggcagccccauucugc

SEQ ID NO: 3071521 - RNA, 18 nt, Human
ugacagaggcagccccau

SEQ ID NO: 3071522 - RNA, 17 nt, Human
ugacagaggcagcccca

SEQ ID NO: 3071523 - RNA, 16 nt, Human
ugacagaggcagcccc

SEQ ID NO: 3071524 - RNA, 15 nt, Human
ugacagaggcagccc

SEQ ID NO: 3071525 - RNA, 14 nt, Human
ugacagaggcagcc

SEQ ID NO: 3071526 - RNA, 23 nt, Human
ugacagacacaggcccggcucca

SEQ ID NO: 3071527 - RNA, 20 nt, Human
ugacagacacaggcccggcu

SEQ ID NO: 3071528 - RNA, 13 nt, Human
ugacagaggcagc

SEQ ID NO: 3071529 - RNA, 16 nt, Human
ugacagaauauguuuc

SEQ ID NO: 3071530 - RNA, 18 nt, Human
ugacaaggauugcuacug

SEQ ID NO: 3071531 - RNA, 15 nt, Human
ugacaagcucacaga

SEQ ID NO: 3071532 - RNA, 20 nt, Human
ugacaagcucacagaccuuu

SEQ ID NO: 3071533 - RNA, 12 nt, Human
ugacaagcucac

SEQ ID NO: 3071534 - RNA, 19 nt, Human
ugaccagcaccaucucucc

SEQ ID NO: 3071535 - RNA, 20 nt, Human
ugaccacugcagaagacagu

SEQ ID NO: 3071536 - RNA, 18 nt, Human
ugaccacugcagaagaca

SEQ ID NO: 3071537 - RNA, 15 nt, Human
ugacaugucuuuucu

SEQ ID NO: 3071538 - RNA, 13 nt, Human
ugacaugucuuuu

SEQ ID NO: 3071539 - RNA, 18 nt, Human
ugacaugggacauuugcu

SEQ ID NO: 3071540 - RNA, 16 nt, Human
ugacaugggacauuug

SEQ ID NO: 3071541 - RNA, 17 nt, Human
ugacaugggacauuugc

SEQ ID NO: 3071542 - RNA, 13 nt, Human
ugaccgugaggcc

SEQ ID NO: 3071543 - RNA, 14 nt, Human
ugaccgugaggcca

SEQ ID NO: 3071544 - RNA, 16 nt, Human
ugaccgugaggccaga

SEQ ID NO: 3071545 - RNA, 20 nt, Human
ugaccgugaggccagagaca

SEQ ID NO: 3071546 - RNA, 17 nt, Human
ugaccauucuccaccug

SEQ ID NO: 3071547 - RNA, 18 nt, Human
ugaccauucuccaccugc

SEQ ID NO: 3071548 - RNA, 16 nt, Human
ugaccauucuccaccu

SEQ ID NO: 3071549 - RNA, 16 nt, Human
ugaauuauuuucucuc

SEQ ID NO: 3071550 - RNA, 15 nt, Human
ugaauuaugaaacuu

SEQ ID NO: 3071551 - RNA, 17 nt, Human
ugaauuaugaaacuuuu

SEQ ID NO: 3071552 - RNA, 13 nt, Human
ugaauuaugaaac

SEQ ID NO: 3071553 - RNA, 14 nt, Human
ugaauuacauuugu

SEQ ID NO: 3071554 - RNA, 15 nt, Human
ugaauuacauuugua

SEQ ID NO: 3071555 - RNA, 16 nt, Human
ugaauuacauuuguau

SEQ ID NO: 3071556 - RNA, 18 nt, Human
ugaauuacauuuguauaa

SEQ ID NO: 3071557 - RNA, 23 nt, Human
ugaaucauuuuaccuuugacaaa

SEQ ID NO: 3071558 - RNA, 22 nt, Human
ugaaucauuuuaccuuugacaa

SEQ ID NO: 3071559 - RNA, 20 nt, Human
ugaaugaauggcuaagcaaa

SEQ ID NO: 3071560 - RNA, 20 nt, Human
ugaaggacauugcggacagc

SEQ ID NO: 3071561 - RNA, 19 nt, Human
ugaaggacauugcggacag

SEQ ID NO: 3071562 - RNA, 22 nt, Human
ugaaggacauugcggacagcca

SEQ ID NO: 3071563 - RNA, 15 nt, Human
ugaaggccccgccca

SEQ ID NO: 3071564 - RNA, 16 nt, Human
ugaaggccccgcccag

SEQ ID NO: 3071565 - RNA, 17 nt, Human
ugaacuccuggccucaa

SEQ ID NO: 3071566 - RNA, 14 nt, Human
ugaagauacugaaa

SEQ ID NO: 3071567 - RNA, 15 nt, Human
ugaagauacugaaau

SEQ ID NO: 3071568 - RNA, 16 nt, Human
ugaagauacugaaaua

SEQ ID NO: 3071569 - RNA, 18 nt, Human
ugaagauacugaaauaaa

SEQ ID NO: 3071570 - RNA, 17 nt, Human
ugaaggccccgcccagg

SEQ ID NO: 3071571 - RNA, 11 nt, Human
ugaaguccaag

SEQ ID NO: 3071572 - RNA, 13 nt, Human
ugaaguccaagca

SEQ ID NO: 3071573 - RNA, 17 nt, Human
ucuuucacauuuaaaua

SEQ ID NO: 3071574 - RNA, 23 nt, Human
ucuuucacccuuuucuguuugcu

SEQ ID NO: 3071575 - RNA, 16 nt, Human
ucuuguguguuuauug

SEQ ID NO: 3071576 - RNA, 21 nt, Human
ucuuguguguuuauugucaaa

SEQ ID NO: 3071577 - RNA, 16 nt, Human
ucucccuucauccuuc

SEQ ID NO: 3071578 - RNA, 20 nt, Human
ucuccucugcugcuggcugg

SEQ ID NO: 3071579 - RNA, 23 nt, Human
ucuugcaauggcagccuuggcaa

SEQ ID NO: 3071580 - RNA, 12 nt, Human
ucuuugccaagu

SEQ ID NO: 3071581 - RNA, 17 nt, Human
ucuuuggacacucacac

SEQ ID NO: 3071582 - RNA, 21 nt, Human
ucuuuggacagaagcagcucu

SEQ ID NO: 3071583 - RNA, 19 nt, Human
ucuuuggacagaagcagcu

SEQ ID NO: 3071584 - RNA, 19 nt, Human
ucuuuccacagaagcucca

SEQ ID NO: 3071585 - RNA, 16 nt, Human
ucuuucagccaagaau

SEQ ID NO: 3071586 - RNA, 19 nt, Human
ucuuucagccaagaauucu

SEQ ID NO: 3071587 - RNA, 20 nt, Human
ucuuucagccaagaauucuu

SEQ ID NO: 3071588 - RNA, 21 nt, Human
ucuuucagccaagaauucuua

SEQ ID NO: 3071589 - RNA, 14 nt, Human
ucuuuccaaaguac

SEQ ID NO: 3071590 - RNA, 13 nt, Human
ucuuuccaaagua

SEQ ID NO: 3071591 - RNA, 19 nt, Human
ugaacaguuguguuugaag

SEQ ID NO: 3071592 - RNA, 16 nt, Human
ugaacuccuggccuca

SEQ ID NO: 3071593 - RNA, 20 nt, Human
ugaaccaccacacccagccc

SEQ ID NO: 3071594 - RNA, 17 nt, Human
ugaaccaccacacccag

SEQ ID NO: 3071595 - RNA, 23 nt, Human
ugaaccacaucuugcucugcuga

SEQ ID NO: 3071596 - RNA, 22 nt, Human
ugaaccaagaacuuuccaggaa

SEQ ID NO: 3071597 - RNA, 12 nt, Human
ugaaauuauuca

SEQ ID NO: 3071598 - RNA, 19 nt, Human
ugaaauggacuuuuguaca

SEQ ID NO: 3071599 - RNA, 18 nt, Human
ugaaauauuauguuaaaa

SEQ ID NO: 3071600 - RNA, 16 nt, Human
ugaaauauugacuuuu

SEQ ID NO: 3071601 - RNA, 14 nt, Human
ugaaacauuuuguc

SEQ ID NO: 3071602 - RNA, 22 nt, Human
ugaaacaacaaauaggaauugu

SEQ ID NO: 3071603 - RNA, 13 nt, Human
ugaaaauuuugau

SEQ ID NO: 3071604 - RNA, 12 nt, Human
ugaaaauuuuga

SEQ ID NO: 3071605 - RNA, 21 nt, Human
ugaaaauuuugauguuuuaag

SEQ ID NO: 3071606 - RNA, 19 nt, Human
ugaaaauuuugauguuuua

SEQ ID NO: 3071607 - RNA, 18 nt, Human
ugaaagcccugagcuuuc

SEQ ID NO: 3071608 - RNA, 23 nt, Human
ugaaagcagggacuugaacccau

SEQ ID NO: 3071609 - RNA, 18 nt, Human
ugaaagaggcagcuugaa

SEQ ID NO: 3071610 - RNA, 18 nt, Human
ugaaagggcccagagagg

SEQ ID NO: 3071611 - RNA, 15 nt, Human
ugaaagguacuucaa

SEQ ID NO: 3071612 - RNA, 16 nt, Human
ugaaagguacuucaaa

SEQ ID NO: 3071613 - RNA, 23 nt, Human
ugaaagggaguauuacaaaaaca

SEQ ID NO: 3071614 - RNA, 13 nt, Human
ugaaagggcccag

SEQ ID NO: 3071615 - RNA, 13 nt, Human
ugauuauauguca

SEQ ID NO: 3071616 - RNA, 17 nt, Human
ugauuaugaauuacauu

SEQ ID NO: 3071617 - RNA, 19 nt, Human
ugauuaugaauuacauuug

SEQ ID NO: 3071618 - RNA, 20 nt, Human
ugauguucuuucacccuuuu

SEQ ID NO: 3071619 - RNA, 16 nt, Human
ugauuaccagggacug

SEQ ID NO: 3071620 - RNA, 20 nt, Human
ugauucaacagguuuuccug

SEQ ID NO: 3071621 - RNA, 21 nt, Human
ugauuaugaauuacauuugua

SEQ ID NO: 3071622 - RNA, 22 nt, Human
ugauuaugaauuacauuuguau

SEQ ID NO: 3071623 - RNA, 13 nt, Human
ugauucagacagc

SEQ ID NO: 3071624 - RNA, 14 nt, Human
ugauucagacagcu

SEQ ID NO: 3071625 - RNA, 15 nt, Human
ugauucagacagcug

SEQ ID NO: 3071626 - RNA, 16 nt, Human
ugauucagacagcugc

SEQ ID NO: 3071627 - RNA, 18 nt, Human
ugauucagacagcugccu

SEQ ID NO: 3071628 - RNA, 19 nt, Human
ugauucagacagcugccug

SEQ ID NO: 3071629 - RNA, 20 nt, Human
ugauucagacagcugccugg

SEQ ID NO: 3071630 - RNA, 21 nt, Human
ugauucagacagcugccuggg

SEQ ID NO: 3071631 - RNA, 23 nt, Human
ugauucagacagcugccugggau

SEQ ID NO: 3071632 - RNA, 21 nt, Human
ugauucuccugccucagccuc

SEQ ID NO: 3071633 - RNA, 16 nt, Human
ugauugugucucuugg

SEQ ID NO: 3071634 - RNA, 13 nt, Human
ugauuggaggggg

SEQ ID NO: 3071635 - RNA, 21 nt, Human
ugauuggaggggggagguggg

SEQ ID NO: 3071636 - RNA, 11 nt, Human
ugaugccuggc

SEQ ID NO: 3071637 - RNA, 20 nt, Human
ugaugcuacaggauuugaaa

SEQ ID NO: 3071638 - RNA, 23 nt, Human
ugaugcuacaggauuugaaauug

SEQ ID NO: 3071639 - RNA, 16 nt, Human
ugaucuuugcagacag

SEQ ID NO: 3071640 - RNA, 17 nt, Human
ugaucuuuaaaauacac

SEQ ID NO: 3071641 - RNA, 18 nt, Human
ugauguguuuauuuauag

SEQ ID NO: 3071642 - RNA, 14 nt, Human
ugauguguuuauuu

SEQ ID NO: 3071643 - RNA, 16 nt, Human
ugauguguuaucucuu

SEQ ID NO: 3071644 - RNA, 14 nt, Human
ugaugguuguacau

SEQ ID NO: 3071645 - RNA, 13 nt, Human
ugaugguuguaca

SEQ ID NO: 3071646 - RNA, 16 nt, Human
ugaugcuucuucagag

SEQ ID NO: 3071647 - RNA, 17 nt, Human
ugaugcuucuucagaga

SEQ ID NO: 3071648 - RNA, 15 nt, Human
ugauggugguauguu

SEQ ID NO: 3071649 - RNA, 20 nt, Human
ugaucuucuuuauaauucua

SEQ ID NO: 3071650 - RNA, 14 nt, Human
ugaucuuuaaaaua

SEQ ID NO: 3071651 - RNA, 19 nt, Human
ugauccacccaccucagcc

SEQ ID NO: 3071652 - RNA, 18 nt, Human
ugauccacccaccucagc

SEQ ID NO: 3071653 - RNA, 17 nt, Human
ugauccacccaccucag

SEQ ID NO: 3071654 - RNA, 16 nt, Human
ugauccacccaccuca

SEQ ID NO: 3071655 - RNA, 15 nt, Human
ugauccaagcugguc

SEQ ID NO: 3071656 - RNA, 14 nt, Human
ugauccaagcuggu

SEQ ID NO: 3071657 - RNA, 13 nt, Human
ugauccaagcugg

SEQ ID NO: 3071658 - RNA, 13 nt, Human
ugauagcacagac

SEQ ID NO: 3071659 - RNA, 14 nt, Human
ugauagcacagacc

SEQ ID NO: 3071660 - RNA, 17 nt, Human
ugaucagcuuauugucu

SEQ ID NO: 3071661 - RNA, 24 nt, Human
ugaucagcuuauugucuagugaaa

SEQ ID NO: 3071662 - RNA, 22 nt, Human
ugaguucuacauaaguaauuca

SEQ ID NO: 3071663 - RNA, 14 nt, Human
ugagugagcaugcc

SEQ ID NO: 3071664 - RNA, 16 nt, Human
ugaguugauagcacag

SEQ ID NO: 3071665 - RNA, 20 nt, Human
ugaguugauagcacagaccc

SEQ ID NO: 3071666 - RNA, 16 nt, Human
ugauaacuggaaacuu

SEQ ID NO: 3071667 - RNA, 13 nt, Human
ugagucugaaggc

SEQ ID NO: 3071668 - RNA, 15 nt, Human
ugagucugaaggcug

SEQ ID NO: 3071669 - RNA, 17 nt, Human
ugagucugaaggcuggg

SEQ ID NO: 3071670 - RNA, 18 nt, Human
ugagucugaaggcugggu

SEQ ID NO: 3071671 - RNA, 19 nt, Human
ugagucgaggacagggagg

SEQ ID NO: 3071672 - RNA, 18 nt, Human
ugagucgaggacagggag

SEQ ID NO: 3071673 - RNA, 13 nt, Human
ugaguccagaagu

SEQ ID NO: 3071674 - RNA, 19 nt, Human
ugaguccagaaguuugaga

SEQ ID NO: 3071675 - RNA, 16 nt, Human
ugaggagcuugaaacc

SEQ ID NO: 3071676 - RNA, 13 nt, Human
ugagcugggauga

SEQ ID NO: 3071677 - RNA, 21 nt, Human
ugaggcauuuguuugaacuga

SEQ ID NO: 3071678 - RNA, 17 nt, Human
ugaggcuaguguggugu

SEQ ID NO: 3071679 - RNA, 23 nt, Human
ugaggcuagugugguguuuccug

SEQ ID NO: 3071680 - RNA, 20 nt, Human
ugaggcauuuguuugaacug

SEQ ID NO: 3071681 - RNA, 19 nt, Human
ugaggcauuuguuugaacu

SEQ ID NO: 3071682 - RNA, 12 nt, Human
ugaggcauuugu

SEQ ID NO: 3071683 - RNA, 12 nt, Human
ugaggugggagg

SEQ ID NO: 3071684 - RNA, 13 nt, Human
ugaggugggagga

SEQ ID NO: 3071685 - RNA, 13 nt, Human
ugaggcucugccc

SEQ ID NO: 3071686 - RNA, 14 nt, Human
ugaggcucugcccu

SEQ ID NO: 3071687 - RNA, 18 nt, Human
ugaggcuccacuuggucu

SEQ ID NO: 3071688 - RNA, 20 nt, Human
ugaggcuccacuuggucugu

SEQ ID NO: 3071689 - RNA, 17 nt, Human
ugagggaacagagaggu

SEQ ID NO: 3071690 - RNA, 16 nt, Human
ugagggagaugccaug

SEQ ID NO: 3071691 - RNA, 23 nt, Human
ugagacguuuuuggaagaguagu

SEQ ID NO: 3071692 - RNA, 19 nt, Human
ugagacucgcgacaaugca

SEQ ID NO: 3071693 - RNA, 17 nt, Human
ugagaaauuuauaaacu

SEQ ID NO: 3071694 - RNA, 21 nt, Human
ugaccucaggugauccaccca

SEQ ID NO: 3071695 - RNA, 20 nt, Human
ugaccucaggugauccaccc

SEQ ID NO: 3071696 - RNA, 20 nt, Human
ugagacucgcgacaaugcaa

SEQ ID NO: 3071697 - RNA, 21 nt, Human
ugagacucgcgacaaugcaaa

SEQ ID NO: 3071698 - RNA, 22 nt, Human
ugagacucgcgacaaugcaaac

SEQ ID NO: 3071699 - RNA, 23 nt, Human
ugagacucgcgacaaugcaaacc

SEQ ID NO: 3071700 - RNA, 16 nt, Human
ugagagugaacaaauu

SEQ ID NO: 3071701 - RNA, 15 nt, Human
ugagaucaaaacggu

SEQ ID NO: 3071702 - RNA, 14 nt, Human
ugagaucagccugg

SEQ ID NO: 3071703 - RNA, 15 nt, Human
ugagcagggcucagc

SEQ ID NO: 3071704 - RNA, 14 nt, Human
ugagcagggcucag

SEQ ID NO: 3071705 - RNA, 13 nt, Human
ugagcagggcuca

SEQ ID NO: 3071706 - RNA, 12 nt, Human
ugagcagggcuc

SEQ ID NO: 3071707 - RNA, 15 nt, Human
ugagccucagcaucc

SEQ ID NO: 3071708 - RNA, 17 nt, Human
ugagccucagcauccug

SEQ ID NO: 3071709 - RNA, 21 nt, Human
ugagccgagaucacgccacug

SEQ ID NO: 3071710 - RNA, 19 nt, Human
ugagccgagaucacgccac

SEQ ID NO: 3071711 - RNA, 21 nt, Human
ugagccucagcauccuggcac

SEQ ID NO: 3071712 - RNA, 18 nt, Human
ugagccucagcauccugg

SEQ ID NO: 3071713 - RNA, 22 nt, Human
ugagccucagcauccuggcacc

SEQ ID NO: 3071714 - RNA, 18 nt, Human
ugagcaucaggccaggcc

SEQ ID NO: 3071715 - RNA, 19 nt, Human
ugagcaucaggccaggccc

SEQ ID NO: 3071716 - RNA, 20 nt, Human
ugagcaucaggccaggcccu

SEQ ID NO: 3071717 - RNA, 13 nt, Human
ugagccccaaaag

SEQ ID NO: 3071718 - RNA, 16 nt, Human
ugagcaucaggccagg

SEQ ID NO: 3071719 - RNA, 17 nt, Human
ugagcagggcucagcgg

SEQ ID NO: 3071720 - RNA, 16 nt, Human
ugagcagggcucagcg

SEQ ID NO: 3071721 - RNA, 19 nt, Human
ugagcagggcucagcgggg

SEQ ID NO: 3071722 - RNA, 14 nt, Human
uauggaggcaggag

SEQ ID NO: 3071723 - RNA, 13 nt, Human
uauguguguuuua

SEQ ID NO: 3071724 - RNA, 19 nt, Human
uauggaggcuuugcauaga

SEQ ID NO: 3071725 - RNA, 12 nt, Human
uauguuaaaacu

SEQ ID NO: 3071726 - RNA, 19 nt, Human
uauguuagugcaaauuguc

SEQ ID NO: 3071727 - RNA, 22 nt, Human
uauguucuuaguggauguucug

SEQ ID NO: 3071728 - RNA, 17 nt, Human
uauguucuaagaaguga

SEQ ID NO: 3071729 - RNA, 21 nt, Human
uauguugcccaggcaggucuu

SEQ ID NO: 3071730 - RNA, 16 nt, Human
uauuaagaaagacuau

SEQ ID NO: 3071731 - RNA, 17 nt, Human
uauuaaaugcccagccc

SEQ ID NO: 3071732 - RNA, 19 nt, Human
uauuaaaugcccagccccu

SEQ ID NO: 3071733 - RNA, 15 nt, Human
uauuaaaugcccagc

SEQ ID NO: 3071734 - RNA, 20 nt, Human
uauuauggaggcaggaguuu

SEQ ID NO: 3071735 - RNA, 16 nt, Human
uauuauguuaaaacug

SEQ ID NO: 3071736 - RNA, 12 nt, Human
uauuauguguuu

SEQ ID NO: 3071737 - RNA, 17 nt, Human
uauuauauuuacaaaug

SEQ ID NO: 3071738 - RNA, 14 nt, Human
uauuauaccuuuuu

SEQ ID NO: 3071739 - RNA, 14 nt, Human
uauuaaggaagaca

SEQ ID NO: 3071740 - RNA, 13 nt, Human
uauuauaccuuuu

SEQ ID NO: 3071741 - RNA, 12 nt, Human
uauuauaccuuu

SEQ ID NO: 3071742 - RNA, 14 nt, Human
uauugauaaguuca

SEQ ID NO: 3071743 - RNA, 16 nt, Human
uauugauaaguucaua

SEQ ID NO: 3071744 - RNA, 23 nt, Human
uauugauaaguucauacauugua

SEQ ID NO: 3071745 - RNA, 20 nt, Human
uauugauaugcuuauacacu

SEQ ID NO: 3071746 - RNA, 15 nt, Human
uauugcccacgcugg

SEQ ID NO: 3071747 - RNA, 14 nt, Human
uauugcccacgcug

SEQ ID NO: 3071748 - RNA, 13 nt, Human
uauugcccacgcu

SEQ ID NO: 3071749 - RNA, 23 nt, Human
uauugcugauggugcaaugaccu

SEQ ID NO: 3071750 - RNA, 22 nt, Human
uauugcugauggugcaaugacc

SEQ ID NO: 3071751 - RNA, 15 nt, Human
uauuguuuaaaauca

SEQ ID NO: 3071752 - RNA, 17 nt, Human
uauuguuuaaaaucauu

SEQ ID NO: 3071753 - RNA, 16 nt, Human
uauuguuuaaaaucau

SEQ ID NO: 3071754 - RNA, 14 nt, Human
uauuucuaugaaau

SEQ ID NO: 3071755 - RNA, 15 nt, Human
uauuucuaugaaaua

SEQ ID NO: 3071756 - RNA, 22 nt, Human
uauuuauuaaaugcccagcccc

SEQ ID NO: 3071757 - RNA, 14 nt, Human
uauuuauuacugua

SEQ ID NO: 3071758 - RNA, 13 nt, Human
uauuuauuacugu

SEQ ID NO: 3071759 - RNA, 13 nt, Human
uauuucuaugaaa

SEQ ID NO: 3071760 - RNA, 17 nt, Human
uauuuaugggauccugg

SEQ ID NO: 3071761 - RNA, 20 nt, Human
uauuguuuaaaaucauuucu

SEQ ID NO: 3071762 - RNA, 17 nt, Human
ucaaacauauauaacaa

SEQ ID NO: 3071763 - RNA, 22 nt, Human
ucaaacagucucaggaaaucaa

SEQ ID NO: 3071764 - RNA, 15 nt, Human
ucaaagagagaaaau

SEQ ID NO: 3071765 - RNA, 20 nt, Human
ucaaagagagaaaauaaaga

SEQ ID NO: 3071766 - RNA, 12 nt, Human
ucaaagagguuu

SEQ ID NO: 3071767 - RNA, 23 nt, Human
ucaaagagguuuuaaaaaaaucc

SEQ ID NO: 3071768 - RNA, 17 nt, Human
ucaaauaugcaaagcac

SEQ ID NO: 3071769 - RNA, 16 nt, Human
ucaaauaugcaaagca

SEQ ID NO: 3071770 - RNA, 16 nt, Human
ucaaauccuugaagau

SEQ ID NO: 3071771 - RNA, 15 nt, Human
ucaaauccuugaaga

SEQ ID NO: 3071772 - RNA, 19 nt, Human
ucaaauaugcaaagcacug

SEQ ID NO: 3071773 - RNA, 18 nt, Human
ucaaauaugcaaagcacu

SEQ ID NO: 3071774 - RNA, 20 nt, Human
ucaacucuccuccagaguca

SEQ ID NO: 3071775 - RNA, 19 nt, Human
ucaacuccaaacugacucu

SEQ ID NO: 3071776 - RNA, 22 nt, Human
ucaacuccaaacugacucuuaa

SEQ ID NO: 3071777 - RNA, 19 nt, Human
ucaaccccuucgcuccugu

SEQ ID NO: 3071778 - RNA, 18 nt, Human
ucaaccccuucgcuccug

SEQ ID NO: 3071779 - RNA, 15 nt, Human
ucaaccuccugggcu

SEQ ID NO: 3071780 - RNA, 20 nt, Human
ucaaccccuucgcuccugug

SEQ ID NO: 3071781 - RNA, 16 nt, Human
ucaaccuccugggcua

SEQ ID NO: 3071782 - RNA, 15 nt, Human
ucaaggauccugagc

SEQ ID NO: 3071783 - RNA, 16 nt, Human
ucaaggauccugagcc

SEQ ID NO: 3071784 - RNA, 13 nt, Human
ucaaggauccuga

SEQ ID NO: 3071785 - RNA, 14 nt, Human
ucaaggauccugag

SEQ ID NO: 3071786 - RNA, 19 nt, Human
ucaagcgauucuucugcuu

SEQ ID NO: 3071787 - RNA, 18 nt, Human
ucaagcgauucuucugcu

SEQ ID NO: 3071788 - RNA, 21 nt, Human
ucaagcgauucuucugcuuca

SEQ ID NO: 3071789 - RNA, 12 nt, Human
ucaagccaccaa

SEQ ID NO: 3071790 - RNA, 20 nt, Human
ucaagccaccaacauacucc

SEQ ID NO: 3071791 - RNA, 17 nt, Human
ucaagcgauucuucugc

SEQ ID NO: 3071792 - RNA, 22 nt, Human
ucacauuguauucagaguugau

SEQ ID NO: 3071793 - RNA, 17 nt, Human
ucacauuggaaacaagu

SEQ ID NO: 3071794 - RNA, 12 nt, Human
ucacauuuaaau

SEQ ID NO: 3071795 - RNA, 17 nt, Human
ucaccaacgucugugcc

SEQ ID NO: 3071796 - RNA, 18 nt, Human
ucaccaacgucugugcca

SEQ ID NO: 3071797 - RNA, 21 nt, Human
ucaccaaaucagcugcuacua

SEQ ID NO: 3071798 - RNA, 14 nt, Human
ucacauuuauucug

SEQ ID NO: 3071799 - RNA, 13 nt, Human
ucaccaagcccag

SEQ ID NO: 3071800 - RNA, 16 nt, Human
ucaccacaugugcaca

SEQ ID NO: 3071801 - RNA, 18 nt, Human
ucacccgcuaagagggag

SEQ ID NO: 3071802 - RNA, 12 nt, Human
ucacccuuuucu

SEQ ID NO: 3071803 - RNA, 14 nt, Human
ucaccgaaaacgug

SEQ ID NO: 3071804 - RNA, 19 nt, Human
ucacccgcuaagagggagg

SEQ ID NO: 3071805 - RNA, 15 nt, Human
ucaccgaaaacgugg

SEQ ID NO: 3071806 - RNA, 19 nt, Human
ucaccgaaaacguggcugc

SEQ ID NO: 3071807 - RNA, 20 nt, Human
ucaccgaaaacguggcugcu

SEQ ID NO: 3071808 - RNA, 21 nt, Human
ucaccgaaaacguggcugcuu

SEQ ID NO: 3071809 - RNA, 22 nt, Human
ucaccgaaaacguggcugcuuc

SEQ ID NO: 3071810 - RNA, 23 nt, Human
ucaccgaaaacguggcugcuuca

SEQ ID NO: 3071811 - RNA, 22 nt, Human
ucacacaugagcaucaggccag

SEQ ID NO: 3071812 - RNA, 23 nt, Human
ucacacaugagcaucaggccagg

SEQ ID NO: 3071813 - RNA, 15 nt, Human
ucacacacuuuggcu

SEQ ID NO: 3071814 - RNA, 14 nt, Human
ucacauuggaaaca

SEQ ID NO: 3071815 - RNA, 20 nt, Human
ucacauuccugaacaggaua

SEQ ID NO: 3071816 - RNA, 18 nt, Human
ucacaagacccaaaaggc

SEQ ID NO: 3071817 - RNA, 22 nt, Human
ucacaagacccaaaaggcagaa

SEQ ID NO: 3071818 - RNA, 16 nt, Human
uaugauucccagccag

SEQ ID NO: 3071819 - RNA, 16 nt, Human
uaugauucaaaugucu

SEQ ID NO: 3071820 - RNA, 21 nt, Human
uaugauucaaaugucuauaaa

SEQ ID NO: 3071821 - RNA, 16 nt, Human
uaugacuccagaauuu

SEQ ID NO: 3071822 - RNA, 17 nt, Human
uaugacuccagaauuuc

SEQ ID NO: 3071823 - RNA, 23 nt, Human
uaugacuccagaauuucccaaag

SEQ ID NO: 3071824 - RNA, 18 nt, Human
uaugcaaucaaaucugcu

SEQ ID NO: 3071825 - RNA, 15 nt, Human
uaugcaaagcacuga

SEQ ID NO: 3071826 - RNA, 14 nt, Human
uaugcacacauuuu

SEQ ID NO: 3071827 - RNA, 13 nt, Human
uaugcacacauuu

SEQ ID NO: 3071828 - RNA, 12 nt, Human
uaugcaaagcac

SEQ ID NO: 3071829 - RNA, 14 nt, Human
uaugcaaagcacug

SEQ ID NO: 3071830 - RNA, 13 nt, Human
uaugcaaagcacu

SEQ ID NO: 3071831 - RNA, 20 nt, Human
uaugcauauuauuuuauguu

SEQ ID NO: 3071832 - RNA, 15 nt, Human
uaugcuucuguuuua

SEQ ID NO: 3071833 - RNA, 16 nt, Human
uaugcuucuguuuuau

SEQ ID NO: 3071834 - RNA, 22 nt, Human
uaugcuuauacacuuacacuuu

SEQ ID NO: 3071835 - RNA, 13 nt, Human
uaugcaugaagua

SEQ ID NO: 3071836 - RNA, 13 nt, Human
uauggaacacucu

SEQ ID NO: 3071837 - RNA, 16 nt, Human
uauggaacacucugag

SEQ ID NO: 3071838 - RNA, 17 nt, Human
uauggaacacucugaga

SEQ ID NO: 3071839 - RNA, 18 nt, Human
uauggaacacucugagac

SEQ ID NO: 3071840 - RNA, 19 nt, Human
uauggaacacucugagacu

SEQ ID NO: 3071841 - RNA, 17 nt, Human
uauggacaaugacccag

SEQ ID NO: 3071842 - RNA, 20 nt, Human
uaugaaguuuuuuuuauaca

SEQ ID NO: 3071843 - RNA, 23 nt, Human
uaucugucauuugagcagggcuc

SEQ ID NO: 3071844 - RNA, 21 nt, Human
uaucugucauuugagcagggc

SEQ ID NO: 3071845 - RNA, 20 nt, Human
uaucugucauuugagcaggg

SEQ ID NO: 3071846 - RNA, 19 nt, Human
uaugacauaaaaacaacuu

SEQ ID NO: 3071847 - RNA, 22 nt, Human
uaugacauaaaaacaacuuuau

SEQ ID NO: 3071848 - RNA, 23 nt, Human
uaugacauaaaaacaacuuuaua

SEQ ID NO: 3071849 - RNA, 22 nt, Human
uaugacacaugcaaggucauuu

SEQ ID NO: 3071850 - RNA, 12 nt, Human
uaugacacaugc

SEQ ID NO: 3071851 - RNA, 17 nt, Human
uaugaauuacauuugua

SEQ ID NO: 3071852 - RNA, 23 nt, Human
uaugaauuacauuuguauaaaau

SEQ ID NO: 3071853 - RNA, 17 nt, Human
uauccuuucuaacaaaa

SEQ ID NO: 3071854 - RNA, 15 nt, Human
uauccuucagccuga

SEQ ID NO: 3071855 - RNA, 14 nt, Human
uauccuucagccug

SEQ ID NO: 3071856 - RNA, 18 nt, Human
uaucguaaaauuaagaaa

SEQ ID NO: 3071857 - RNA, 15 nt, Human
uaucguaaaauuaag

SEQ ID NO: 3071858 - RNA, 16 nt, Human
uaucuaaauguugaaa

SEQ ID NO: 3071859 - RNA, 19 nt, Human
uauauguuuuaagaggcag

SEQ ID NO: 3071860 - RNA, 14 nt, Human
uauccucuguugau

SEQ ID NO: 3071861 - RNA, 21 nt, Human
uaucuaauauguaacaagcca

SEQ ID NO: 3071862 - RNA, 15 nt, Human
uauaauucacauugu

SEQ ID NO: 3071863 - RNA, 18 nt, Human
uauaaacuuuaccuuuuu

SEQ ID NO: 3071864 - RNA, 21 nt, Human
uauaugcucugcauguuacau

SEQ ID NO: 3071865 - RNA, 20 nt, Human
uauaugcucugcauguuaca

SEQ ID NO: 3071866 - RNA, 13 nt, Human
uauaugcuucugu

SEQ ID NO: 3071867 - RNA, 21 nt, Human
uauaucuauauuuuacauaaa

SEQ ID NO: 3071868 - RNA, 20 nt, Human
uaguugcaacuuuguauaaa

SEQ ID NO: 3071869 - RNA, 13 nt, Human
uagucaaauugug

SEQ ID NO: 3071870 - RNA, 14 nt, Human
uagugcaaauuguc

SEQ ID NO: 3071871 - RNA, 15 nt, Human
uagugcaaauuguca

SEQ ID NO: 3071872 - RNA, 13 nt, Human
uaguaugaaauua

SEQ ID NO: 3071873 - RNA, 15 nt, Human
uaguaugaaauuaua

SEQ ID NO: 3071874 - RNA, 23 nt, Human
uaguaugaaauuauauaaguauu

SEQ ID NO: 3071875 - RNA, 16 nt, Human
uaguauuucuaugaaa

SEQ ID NO: 3071876 - RNA, 18 nt, Human
uaguauuucuaugaaaua

SEQ ID NO: 3071877 - RNA, 19 nt, Human
uaguauuucuaugaaauau

SEQ ID NO: 3071878 - RNA, 23 nt, Human
uaggugacagagugagacucugu

SEQ ID NO: 3071879 - RNA, 13 nt, Human
uaguaucaaaaga

SEQ ID NO: 3071880 - RNA, 16 nt, Human
uaggaauuguguuuau

SEQ ID NO: 3071881 - RNA, 12 nt, Human
uaggaauugacc

SEQ ID NO: 3071882 - RNA, 15 nt, Human
uaggccuggccagau

SEQ ID NO: 3071883 - RNA, 18 nt, Human
uaggccuggccagaugca

SEQ ID NO: 3071884 - RNA, 19 nt, Human
uaggacccgucuccagcug

SEQ ID NO: 3071885 - RNA, 18 nt, Human
uaggccaugggacaggga

SEQ ID NO: 3071886 - RNA, 16 nt, Human
uaggccaugggacagg

SEQ ID NO: 3071887 - RNA, 16 nt, Human
uagguaaauuacaguu

SEQ ID NO: 3071888 - RNA, 16 nt, Human
uaggucagugcaaaua

SEQ ID NO: 3071889 - RNA, 20 nt, Human
uagggaaaaaccagcgugug

SEQ ID NO: 3071890 - RNA, 21 nt, Human
uagggaaaaaccagcguguga

SEQ ID NO: 3071891 - RNA, 19 nt, Human
uagggaaaaaccagcgugu

SEQ ID NO: 3071892 - RNA, 11 nt, Human
uagggaaaaac

SEQ ID NO: 3071893 - RNA, 14 nt, Human
uccauagagagcaa

SEQ ID NO: 3071894 - RNA, 15 nt, Human
uccauagagagcaag

SEQ ID NO: 3071895 - RNA, 15 nt, Human
uccauacauuugugu

SEQ ID NO: 3071896 - RNA, 20 nt, Human
uccagguuuaagcuguuacu

SEQ ID NO: 3071897 - RNA, 18 nt, Human
uccagguuuaagcuguua

SEQ ID NO: 3071898 - RNA, 19 nt, Human
uccagguagagggugugua

SEQ ID NO: 3071899 - RNA, 12 nt, Human
uccauacauuug

SEQ ID NO: 3071900 - RNA, 12 nt, Human
uccaggagcagc

SEQ ID NO: 3071901 - RNA, 13 nt, Human
uccaggagcagcc

SEQ ID NO: 3071902 - RNA, 14 nt, Human
uccaggagcagcca

SEQ ID NO: 3071903 - RNA, 15 nt, Human
uccaggagcagccac

SEQ ID NO: 3071904 - RNA, 19 nt, Human
uccaggggugggacacccu

SEQ ID NO: 3071905 - RNA, 20 nt, Human
uccaggggugggacacccug

SEQ ID NO: 3071906 - RNA, 23 nt, Human
uccagaaagaaaacuuguauuau

SEQ ID NO: 3071907 - RNA, 16 nt, Human
uccaaaguacacuguu

SEQ ID NO: 3071908 - RNA, 14 nt, Human
uccaaaguacacug

SEQ ID NO: 3071909 - RNA, 21 nt, Human
uccacuuggucugugagaugc

SEQ ID NO: 3071910 - RNA, 17 nt, Human
uccacuuggucugugag

SEQ ID NO: 3071911 - RNA, 20 nt, Human
uccacuuucuagccagagga

SEQ ID NO: 3071912 - RNA, 21 nt, Human
uccacuuucuagccagaggag

SEQ ID NO: 3071913 - RNA, 19 nt, Human
uccacuuucuagccagagg

SEQ ID NO: 3071914 - RNA, 23 nt, Human
uccacuuggucugugagaugcua

SEQ ID NO: 3071915 - RNA, 18 nt, Human
uccccagauugcaacagg

SEQ ID NO: 3071916 - RNA, 13 nt, Human
uccccagauugca

SEQ ID NO: 3071917 - RNA, 20 nt, Human
ucccaugagccucagcaucc

SEQ ID NO: 3071918 - RNA, 17 nt, Human
ucccaugagccucagca

SEQ ID NO: 3071919 - RNA, 22 nt, Human
uccccagcaagugagagcuggg

SEQ ID NO: 3071920 - RNA, 21 nt, Human
uccccagcaagugagagcugg

SEQ ID NO: 3071921 - RNA, 20 nt, Human
uccccagcaagugagagcug

SEQ ID NO: 3071922 - RNA, 23 nt, Human
uccccagauugcaacaggcuggg

SEQ ID NO: 3071923 - RNA, 22 nt, Human
uccccagauugcaacaggcugg

SEQ ID NO: 3071924 - RNA, 20 nt, Human
uccccagauugcaacaggcu

SEQ ID NO: 3071925 - RNA, 19 nt, Human
uccccagauugcaacaggc

SEQ ID NO: 3071926 - RNA, 13 nt, Human
uccccaggaggcc

SEQ ID NO: 3071927 - RNA, 17 nt, Human
ucccccagccccauccu

SEQ ID NO: 3071928 - RNA, 15 nt, Human
uccccaggaggccag

SEQ ID NO: 3071929 - RNA, 16 nt, Human
uccccaggaggccagc

SEQ ID NO: 3071930 - RNA, 20 nt, Human
ucccccagccccauccucug

SEQ ID NO: 3071931 - RNA, 21 nt, Human
ucccccagccccauccucugu

SEQ ID NO: 3071932 - RNA, 14 nt, Human
uccccaggaggcca

SEQ ID NO: 3071933 - RNA, 19 nt, Human
ucccaugagccucagcauc

SEQ ID NO: 3071934 - RNA, 18 nt, Human
ucccaugagccucagcau

SEQ ID NO: 3071935 - RNA, 21 nt, Human
ucccaucugugaaaggaaaga

SEQ ID NO: 3071936 - RNA, 15 nt, Human
ucccaucuuccaagg

SEQ ID NO: 3071937 - RNA, 22 nt, Human
ucccagcugugcucuggacagg

SEQ ID NO: 3071938 - RNA, 21 nt, Human
ucccagcugugcucuggacag

SEQ ID NO: 3071939 - RNA, 23 nt, Human
ucccagcugugcucuggacaggc

SEQ ID NO: 3071940 - RNA, 20 nt, Human
ucccaccuggcucuguggcg

SEQ ID NO: 3071941 - RNA, 23 nt, Human
ucccaggcauuccccaggaggcc

SEQ ID NO: 3071942 - RNA, 24 nt, Human
ucccaggcauuccccaggaggcca

SEQ ID NO: 3071943 - RNA, 20 nt, Human
uccaugugggcuaguugggc

SEQ ID NO: 3071944 - RNA, 22 nt, Human
ucccaccucucucacuccuuga

SEQ ID NO: 3071945 - RNA, 20 nt, Human
ucccagcugugcucuggaca

SEQ ID NO: 3071946 - RNA, 17 nt, Human
ucccaccuuggcugcag

SEQ ID NO: 3071947 - RNA, 16 nt, Human
ucccaccuuggcugca

SEQ ID NO: 3071948 - RNA, 13 nt, Human
ucccaccuuggcu

SEQ ID NO: 3071949 - RNA, 14 nt, Human
ucccaccuggcucu

SEQ ID NO: 3071950 - RNA, 15 nt, Human
ucccaccuggcucug

SEQ ID NO: 3071951 - RNA, 16 nt, Human
ucccaccuggcucugu

SEQ ID NO: 3071952 - RNA, 19 nt, Human
ucccaccuggcucuguggc

SEQ ID NO: 3071953 - RNA, 23 nt, Human
ucagucugauucccaagcucugc

SEQ ID NO: 3071954 - RNA, 22 nt, Human
ucagucugauucccaagcucug

SEQ ID NO: 3071955 - RNA, 21 nt, Human
ucagucugauucccaagcucu

SEQ ID NO: 3071956 - RNA, 19 nt, Human
ucagucugauucccaagcu

SEQ ID NO: 3071957 - RNA, 20 nt, Human
ucagguggggcagcuugagg

SEQ ID NO: 3071958 - RNA, 19 nt, Human
ucagguggggcagcuugag

SEQ ID NO: 3071959 - RNA, 18 nt, Human
ucagguggggcagcuuga

SEQ ID NO: 3071960 - RNA, 23 nt, Human
ucaggugauccacccaccucagc

SEQ ID NO: 3071961 - RNA, 23 nt, Human
ucaggugagaagcagaggaagga

SEQ ID NO: 3071962 - RNA, 16 nt, Human
ucaggugauccaccca

SEQ ID NO: 3071963 - RNA, 15 nt, Human
ucaggagcccuggga

SEQ ID NO: 3071964 - RNA, 14 nt, Human
ucaggagcccuggg

SEQ ID NO: 3071965 - RNA, 12 nt, Human
ucaggagcccug

SEQ ID NO: 3071966 - RNA, 11 nt, Human
ucaggagcccu

SEQ ID NO: 3071967 - RNA, 21 nt, Human
ucaggccugggggcugggcag

SEQ ID NO: 3071968 - RNA, 23 nt, Human
ucaggaagcucagggccuggcuc

SEQ ID NO: 3071969 - RNA, 23 nt, Human
ucagcucugcaagaauugaagca

SEQ ID NO: 3071970 - RNA, 24 nt, Human
ucagcuccagcucaccagccccag

SEQ ID NO: 3071971 - RNA, 23 nt, Human
ucagcuccagcucaccagcccca

SEQ ID NO: 3071972 - RNA, 14 nt, Human
ucauggugcucaga

SEQ ID NO: 3071973 - RNA, 16 nt, Human
ucauuaggauggcuag

SEQ ID NO: 3071974 - RNA, 22 nt, Human
uccaaaaagauuuucagaaaau

SEQ ID NO: 3071975 - RNA, 16 nt, Human
uccaaaccaaauaaaa

SEQ ID NO: 3071976 - RNA, 13 nt, Human
uccaaaguacacu

SEQ ID NO: 3071977 - RNA, 17 nt, Human
uccaaagaaauguaagg

SEQ ID NO: 3071978 - RNA, 14 nt, Human
uccaaagaaaugua

SEQ ID NO: 3071979 - RNA, 16 nt, Human
ucaucuccccaucauu

SEQ ID NO: 3071980 - RNA, 19 nt, Human
ucaucuugaauuguaagga

SEQ ID NO: 3071981 - RNA, 17 nt, Human
ucauccacugugccaug

SEQ ID NO: 3071982 - RNA, 14 nt, Human
ucauccacugugcc

SEQ ID NO: 3071983 - RNA, 17 nt, Human
ucaugcuguucaugaaa

SEQ ID NO: 3071984 - RNA, 20 nt, Human
ucaguguacauggaauaaca

SEQ ID NO: 3071985 - RNA, 12 nt, Human
ucauagcagcuu

SEQ ID NO: 3071986 - RNA, 11 nt, Human
ucauagcagcu

SEQ ID NO: 3071987 - RNA, 14 nt, Human
ucaucauccuaagc

SEQ ID NO: 3071988 - RNA, 17 nt, Human
ucaucaaugaaugaaug

SEQ ID NO: 3071989 - RNA, 14 nt, Human
ucuaccuuccugca

SEQ ID NO: 3071990 - RNA, 15 nt, Human
ucuacagaggccaug

SEQ ID NO: 3071991 - RNA, 21 nt, Human
ucuacacugugcugagucuga

SEQ ID NO: 3071992 - RNA, 17 nt, Human
ucuaugacacaugcaag

SEQ ID NO: 3071993 - RNA, 14 nt, Human
ucuaugacacaugc

SEQ ID NO: 3071994 - RNA, 18 nt, Human
ucuaugaaauauuauguu

SEQ ID NO: 3071995 - RNA, 19 nt, Human
ucuaggaagacuuuggaaa

SEQ ID NO: 3071996 - RNA, 15 nt, Human
ucuaggaagacuuug

SEQ ID NO: 3071997 - RNA, 16 nt, Human
ucuaggaagacuuugg

SEQ ID NO: 3071998 - RNA, 20 nt, Human
ucuaaaggcuaccuuuguau

SEQ ID NO: 3071999 - RNA, 19 nt, Human
ucuaaaggcuaccuuugua

SEQ ID NO: 3072000 - RNA, 17 nt, Human
ucuaaaggcuaccuuug

SEQ ID NO: 3072001 - RNA, 18 nt, Human
ucuaaaggcuaccuuugu

SEQ ID NO: 3072002 - RNA, 13 nt, Human
ucgugacaacacu

SEQ ID NO: 3072003 - RNA, 12 nt, Human
ucggagaagagc

SEQ ID NO: 3072004 - RNA, 16 nt, Human
ucggagaagagcuguu

SEQ ID NO: 3072005 - RNA, 14 nt, Human
ucggagaagagcug

SEQ ID NO: 3072006 - RNA, 18 nt, Human
ucucccugcugcuccuag

SEQ ID NO: 3072007 - RNA, 20 nt, Human
ucucccugcugcuccuagga

SEQ ID NO: 3072008 - RNA, 23 nt, Human
ucucccucagucuggcccuuccu

SEQ ID NO: 3072009 - RNA, 18 nt, Human
ucucccucagucuggccc

SEQ ID NO: 3072010 - RNA, 12 nt, Human
ucucccccagcc

SEQ ID NO: 3072011 - RNA, 22 nt, Human
ucuccagccccuggaugcagcc

SEQ ID NO: 3072012 - RNA, 16 nt, Human
ucuccagccccuggau

SEQ ID NO: 3072013 - RNA, 18 nt, Human
ucuccagccccuggaugc

SEQ ID NO: 3072014 - RNA, 13 nt, Human
ucuccagcugcug

SEQ ID NO: 3072015 - RNA, 15 nt, Human
ucuccagcugcugag

SEQ ID NO: 3072016 - RNA, 12 nt, Human
ucuccagccccu

SEQ ID NO: 3072017 - RNA, 13 nt, Human
ucuccagccccug

SEQ ID NO: 3072018 - RNA, 14 nt, Human
ucuccagccccugg

SEQ ID NO: 3072019 - RNA, 15 nt, Human
ucuccagccccugga

SEQ ID NO: 3072020 - RNA, 14 nt, Human
ucuccaccugccag

SEQ ID NO: 3072021 - RNA, 15 nt, Human
ucuccaccugccagg

SEQ ID NO: 3072022 - RNA, 16 nt, Human
ucuccaccugccaggg

SEQ ID NO: 3072023 - RNA, 17 nt, Human
ucuccaccugccaggga

SEQ ID NO: 3072024 - RNA, 19 nt, Human
ucuccaccugccagggaca

SEQ ID NO: 3072025 - RNA, 22 nt, Human
ucuccaccugccagggacagag

SEQ ID NO: 3072026 - RNA, 16 nt, Human
ucuccacccugcucuc

SEQ ID NO: 3072027 - RNA, 14 nt, Human
ucuccacccugcuc

SEQ ID NO: 3072028 - RNA, 17 nt, Human
ucuccacccugcucucc

SEQ ID NO: 3072029 - RNA, 12 nt, Human
ucuccacccugc

SEQ ID NO: 3072030 - RNA, 13 nt, Human
ucuccacccugcu

SEQ ID NO: 3072031 - RNA, 13 nt, Human
ucuaugggacuca

SEQ ID NO: 3072032 - RNA, 12 nt, Human
ucuaugggacuc

SEQ ID NO: 3072033 - RNA, 19 nt, Human
ucuaugggacucaaugcac

SEQ ID NO: 3072034 - RNA, 23 nt, Human
ucucaguccaugaagauguagag

SEQ ID NO: 3072035 - RNA, 23 nt, Human
ucucauaauuuauacaggucaua

SEQ ID NO: 3072036 - RNA, 18 nt, Human
ucucauacucaccucacc

SEQ ID NO: 3072037 - RNA, 16 nt, Human
ucucauacucaccuca

SEQ ID NO: 3072038 - RNA, 21 nt, Human
uccuauauuguuuucagugua

SEQ ID NO: 3072039 - RNA, 23 nt, Human
uccuauauuguuuucaguguaca

SEQ ID NO: 3072040 - RNA, 23 nt, Human
uccuagugaaagaggcagcuuga

SEQ ID NO: 3072041 - RNA, 14 nt, Human
uccuagugaaagag

SEQ ID NO: 3072042 - RNA, 10 nt, Human
uccuccaggu

SEQ ID NO: 3072043 - RNA, 12 nt, Human
uccucccaccuc

SEQ ID NO: 3072044 - RNA, 18 nt, Human
uccucauuagcauuuugc

SEQ ID NO: 3072045 - RNA, 17 nt, Human
uccucauuagcauuuug

SEQ ID NO: 3072046 - RNA, 22 nt, Human
uccucauuuuuauaaugucccu

SEQ ID NO: 3072047 - RNA, 21 nt, Human
uccuaagcuauucaguaauaa

SEQ ID NO: 3072048 - RNA, 20 nt, Human
uccuaagcuauucaguaaua

SEQ ID NO: 3072049 - RNA, 20 nt, Human
uccgcuuucuacccagcgag

SEQ ID NO: 3072050 - RNA, 18 nt, Human
uccgcuuucuacccagcg

SEQ ID NO: 3072051 - RNA, 16 nt, Human
uccgcuuucuacccag

SEQ ID NO: 3072052 - RNA, 14 nt, Human
uccgccucuugggu

SEQ ID NO: 3072053 - RNA, 16 nt, Human
ucccuuccucuuucca

SEQ ID NO: 3072054 - RNA, 15 nt, Human
ucccuuccucuuucc

SEQ ID NO: 3072055 - RNA, 15 nt, Human
ucccccuuccaugga

SEQ ID NO: 3072056 - RNA, 20 nt, Human
ucccuucacaaacccagugu

SEQ ID NO: 3072057 - RNA, 22 nt, Human
uccugucggagcccugucuccu

SEQ ID NO: 3072058 - RNA, 13 nt, Human
uccuguagcccua

SEQ ID NO: 3072059 - RNA, 11 nt, Human
uccuguagccc

SEQ ID NO: 3072060 - RNA, 22 nt, Human
uccuguaccucuugagccuuga

SEQ ID NO: 3072061 - RNA, 12 nt, Human
uccuggccucaa

SEQ ID NO: 3072062 - RNA, 13 nt, Human
uccuggcccaggg

SEQ ID NO: 3072063 - RNA, 22 nt, Human
uccuggcccagggcaucuggga

SEQ ID NO: 3072064 - RNA, 15 nt, Human
uccuggcccagggca

SEQ ID NO: 3072065 - RNA, 16 nt, Human
uccuggcccagggcau

SEQ ID NO: 3072066 - RNA, 19 nt, Human
uccuggcccagggcaucug

SEQ ID NO: 3072067 - RNA, 13 nt, Human
uccuggcacugcu

SEQ ID NO: 3072068 - RNA, 16 nt, Human
uccuggcacugcuucc

SEQ ID NO: 3072069 - RNA, 22 nt, Human
uccuggcacccggccccugcug

SEQ ID NO: 3072070 - RNA, 23 nt, Human
uccuggcacccggccccugcugg

SEQ ID NO: 3072071 - RNA, 14 nt, Human
uccuggaguucugg

SEQ ID NO: 3072072 - RNA, 22 nt, Human
uccuggacugagggggccugga

SEQ ID NO: 3072073 - RNA, 20 nt, Human
uccuggacugagggggccug

SEQ ID NO: 3072074 - RNA, 14 nt, Human
uccuggacugaggg

SEQ ID NO: 3072075 - RNA, 17 nt, Human
uccugcccuuaccugcc

SEQ ID NO: 3072076 - RNA, 20 nt, Human
uccugcccuuaccugccagg

SEQ ID NO: 3072077 - RNA, 13 nt, Human
uccugccaggcau

SEQ ID NO: 3072078 - RNA, 14 nt, Human
uccugccaggcaug

SEQ ID NO: 3072079 - RNA, 17 nt, Human
uccugaggcuccacuug

SEQ ID NO: 3072080 - RNA, 19 nt, Human
uccugaggcuccacuuggu

SEQ ID NO: 3072081 - RNA, 20 nt, Human
uccugaggcuccacuugguc

SEQ ID NO: 3072082 - RNA, 18 nt, Human
uccugccccugagcccau

SEQ ID NO: 3072083 - RNA, 17 nt, Human
uccugccccugagccca

SEQ ID NO: 3072084 - RNA, 21 nt, Human
uccugagccagauuucacucu

SEQ ID NO: 3072085 - RNA, 11 nt, Human
gugaggccaga

SEQ ID NO: 3072086 - RNA, 20 nt, Human
gugauccacccaccucagcc

SEQ ID NO: 3072087 - RNA, 18 nt, Human
gugauccacccaccucag

SEQ ID NO: 3072088 - RNA, 15 nt, Human
gugauccacccaccu

SEQ ID NO: 3072089 - RNA, 18 nt, Human
gugauccucccaccucag

SEQ ID NO: 3072090 - RNA, 15 nt, Human
gugauccucccaccu

SEQ ID NO: 3072091 - RNA, 14 nt, Human
gugauccucccacc

SEQ ID NO: 3072092 - RNA, 22 nt, Human
gugauccucccaccucagccuc

SEQ ID NO: 3072093 - RNA, 20 nt, Human
gugauccucccaccucagcc

SEQ ID NO: 3072094 - RNA, 12 nt, Human
gugauuuucauu

SEQ ID NO: 3072095 - RNA, 23 nt, Human
gugauucuccugccucagccucc

SEQ ID NO: 3072096 - RNA, 22 nt, Human
gugauucuccugccucagccuc

SEQ ID NO: 3072097 - RNA, 20 nt, Human
gugauucuccugccucagcc

SEQ ID NO: 3072098 - RNA, 19 nt, Human
gugauucuccugccucagc

SEQ ID NO: 3072099 - RNA, 18 nt, Human
gugauucuccugccucag

SEQ ID NO: 3072100 - RNA, 17 nt, Human
gugauucuccugccuca

SEQ ID NO: 3072101 - RNA, 16 nt, Human
gugauucuccugccuc

SEQ ID NO: 3072102 - RNA, 14 nt, Human
gugauucuccugcc

SEQ ID NO: 3072103 - RNA, 20 nt, Human
gugcccacaggaucagucug

SEQ ID NO: 3072104 - RNA, 19 nt, Human
gugcauaaguuaacuucca

SEQ ID NO: 3072105 - RNA, 18 nt, Human
gugcaaauugucacagga

SEQ ID NO: 3072106 - RNA, 14 nt, Human
gugcauaccacuuu

SEQ ID NO: 3072107 - RNA, 13 nt, Human
gugcauaccacuu

SEQ ID NO: 3072108 - RNA, 22 nt, Human
gugccagguuuuuggucugacc

SEQ ID NO: 3072109 - RNA, 20 nt, Human
gugccagguuuuuggucuga

SEQ ID NO: 3072110 - RNA, 20 nt, Human
gugaaauuauucauaauuau

SEQ ID NO: 3072111 - RNA, 18 nt, Human
gugaaauuauucauaauu

SEQ ID NO: 3072112 - RNA, 14 nt, Human
gugaauaccccaag

SEQ ID NO: 3072113 - RNA, 23 nt, Human
gugaauaccccaagacucccaug

SEQ ID NO: 3072114 - RNA, 13 nt, Human
gugaaaucauuca

SEQ ID NO: 3072115 - RNA, 17 nt, Human
gugaaaguacauuugga

SEQ ID NO: 3072116 - RNA, 19 nt, Human
gugaaaggaaagagggagg

SEQ ID NO: 3072117 - RNA, 12 nt, Human
gugaaaauuauu

SEQ ID NO: 3072118 - RNA, 15 nt, Human
gugaaaauuauuuug

SEQ ID NO: 3072119 - RNA, 14 nt, Human
gugaaaagaaaaau

SEQ ID NO: 3072120 - RNA, 23 nt, Human
gugaaaagaaaaaugagccuggc

SEQ ID NO: 3072121 - RNA, 19 nt, Human
gugaaagaaaauaacaaua

SEQ ID NO: 3072122 - RNA, 12 nt, Human
gugaaacuggau

SEQ ID NO: 3072123 - RNA, 20 nt, Human
gugaaacucguuaauuugua

SEQ ID NO: 3072124 - RNA, 14 nt, Human
gugagcuacaaaug

SEQ ID NO: 3072125 - RNA, 16 nt, Human
gugaggaagccgcugg

SEQ ID NO: 3072126 - RNA, 19 nt, Human
gugaggaagccgcuggggc

SEQ ID NO: 3072127 - RNA, 11 nt, Human
gugaggaagcc

SEQ ID NO: 3072128 - RNA, 17 nt, Human
gugacugaucucucgug

SEQ ID NO: 3072129 - RNA, 16 nt, Human
gugagcagucaggaaa

SEQ ID NO: 3072130 - RNA, 13 nt, Human
gugagccacugca

SEQ ID NO: 3072131 - RNA, 15 nt, Human
gugacugaauuucuu

SEQ ID NO: 3072132 - RNA, 18 nt, Human
gugacugaauuucuuuug

SEQ ID NO: 3072133 - RNA, 16 nt, Human
gugacugaauuucuuu

SEQ ID NO: 3072134 - RNA, 16 nt, Human
gugacaacacuugugu

SEQ ID NO: 3072135 - RNA, 15 nt, Human
gugaccucugccuga

SEQ ID NO: 3072136 - RNA, 11 nt, Human
guggcagucug

SEQ ID NO: 3072137 - RNA, 15 nt, Human
guggcagugggagcu

SEQ ID NO: 3072138 - RNA, 17 nt, Human
guggcagugggagcugc

SEQ ID NO: 3072139 - RNA, 16 nt, Human
guggcagugggagcug

SEQ ID NO: 3072140 - RNA, 19 nt, Human
guggcagcugcuuuugucu

SEQ ID NO: 3072141 - RNA, 13 nt, Human
guggcagcugcuu

SEQ ID NO: 3072142 - RNA, 12 nt, Human
guggcagcugcu

SEQ ID NO: 3072143 - RNA, 23 nt, Human
guggcagcugcgguccacccagg

SEQ ID NO: 3072144 - RNA, 22 nt, Human
guggcagcugcgguccacccag

SEQ ID NO: 3072145 - RNA, 21 nt, Human
guggcagcugcgguccaccca

SEQ ID NO: 3072146 - RNA, 20 nt, Human
guggaugccugguggcagcu

SEQ ID NO: 3072147 - RNA, 19 nt, Human
guggcagcugcgguccacc

SEQ ID NO: 3072148 - RNA, 21 nt, Human
guggcagugggagcugccugu

SEQ ID NO: 3072149 - RNA, 19 nt, Human
guggcagugggagcugccu

SEQ ID NO: 3072150 - RNA, 22 nt, Human
guggccacaccucuaucccggc

SEQ ID NO: 3072151 - RNA, 23 nt, Human
guggccacaccucuaucccggcu

SEQ ID NO: 3072152 - RNA, 17 nt, Human
guggaguucaucuugaa

SEQ ID NO: 3072153 - RNA, 18 nt, Human
guggaugccugguggcag

SEQ ID NO: 3072154 - RNA, 16 nt, Human
guggaugccugguggc

SEQ ID NO: 3072155 - RNA, 20 nt, Human
guggagaagcggcuggcagc

SEQ ID NO: 3072156 - RNA, 16 nt, Human
gugcucuggacaggca

SEQ ID NO: 3072157 - RNA, 15 nt, Human
gugcucuggacaggc

SEQ ID NO: 3072158 - RNA, 21 nt, Human
gugccuuggggacaagagcag

SEQ ID NO: 3072159 - RNA, 23 nt, Human
gugcugaaugguuuucaaaauaa

SEQ ID NO: 3072160 - RNA, 20 nt, Human
gugcugaaugguuuucaaaa

SEQ ID NO: 3072161 - RNA, 19 nt, Human
gugcugaaugguuuucaaa

SEQ ID NO: 3072162 - RNA, 18 nt, Human
gugcucuggacaggcaug

SEQ ID NO: 3072163 - RNA, 17 nt, Human
gugcucuggacaggcau

SEQ ID NO: 3072164 - RNA, 16 nt, Human
gugcugagucugaagg

SEQ ID NO: 3072165 - RNA, 17 nt, Human
gugcugagucugaaggc

SEQ ID NO: 3072166 - RNA, 18 nt, Human
gugcugagucugaaggcu

SEQ ID NO: 3072167 - RNA, 19 nt, Human
gugcugagucugaaggcug

SEQ ID NO: 3072168 - RNA, 12 nt, Human
gugcugagucug

SEQ ID NO: 3072169 - RNA, 19 nt, Human
gugcugccauccagguuca

SEQ ID NO: 3072170 - RNA, 18 nt, Human
gugcugccauccagguuc

SEQ ID NO: 3072171 - RNA, 15 nt, Human
gugcugccauccagg

SEQ ID NO: 3072172 - RNA, 20 nt, Human
gugcugcauuuaaaagauac

SEQ ID NO: 3072173 - RNA, 19 nt, Human
gugcugcauuuaaaagaua

SEQ ID NO: 3072174 - RNA, 12 nt, Human
gugcugcauuua

SEQ ID NO: 3072175 - RNA, 18 nt, Human
guggaaaaauagccugcc

SEQ ID NO: 3072176 - RNA, 13 nt, Human
gugcuuggaggaa

SEQ ID NO: 3072177 - RNA, 15 nt, Human
gugcuuggaggaagg

SEQ ID NO: 3072178 - RNA, 12 nt, Human
gugcuuggagga

SEQ ID NO: 3072179 - RNA, 11 nt, Human
gugcugcccug

SEQ ID NO: 3072180 - RNA, 22 nt, Human
gugcugccauccagguucagcu

SEQ ID NO: 3072181 - RNA, 23 nt, Human
gucuaagauaguaacaaugaaga

SEQ ID NO: 3072182 - RNA, 17 nt, Human
gucuacacuaagagaga

SEQ ID NO: 3072183 - RNA, 15 nt, Human
gucuacacugugcug

SEQ ID NO: 3072184 - RNA, 23 nt, Human
gucuacacuaagagagaaugaga

SEQ ID NO: 3072185 - RNA, 16 nt, Human
guccuuaccagcagag

SEQ ID NO: 3072186 - RNA, 17 nt, Human
guccuuaccagcagagc

SEQ ID NO: 3072187 - RNA, 15 nt, Human
guccuuaccagcaga

SEQ ID NO: 3072188 - RNA, 23 nt, Human
gucucacuguugcccaggcuggc

SEQ ID NO: 3072189 - RNA, 22 nt, Human
gucucacuguugcccaggcugg

SEQ ID NO: 3072190 - RNA, 21 nt, Human
gucucacuguugcccaggcug

SEQ ID NO: 3072191 - RNA, 20 nt, Human
gucucacuguugcccaggcu

SEQ ID NO: 3072192 - RNA, 19 nt, Human
gucucacuguugcccaggc

SEQ ID NO: 3072193 - RNA, 18 nt, Human
gucucacuguugcccagg

SEQ ID NO: 3072194 - RNA, 17 nt, Human
gucucacuguugcccag

SEQ ID NO: 3072195 - RNA, 16 nt, Human
gucucacuguugccca

SEQ ID NO: 3072196 - RNA, 23 nt, Human
gucucacuauguugcccaggcag

SEQ ID NO: 3072197 - RNA, 13 nt, Human
gucucacuguugc

SEQ ID NO: 3072198 - RNA, 21 nt, Human
gucucacuauguugcccaggc

SEQ ID NO: 3072199 - RNA, 20 nt, Human
gucucacuauguugcccagg

SEQ ID NO: 3072200 - RNA, 19 nt, Human
gucugaggaauccagaccc

SEQ ID NO: 3072201 - RNA, 18 nt, Human
gucugaggaauccagacc

SEQ ID NO: 3072202 - RNA, 15 nt, Human
gucugacccacugcu

SEQ ID NO: 3072203 - RNA, 14 nt, Human
gucugacccacugc

SEQ ID NO: 3072204 - RNA, 13 nt, Human
gucugacccacug

SEQ ID NO: 3072205 - RNA, 21 nt, Human
gucugauucccaagcucugcu

SEQ ID NO: 3072206 - RNA, 20 nt, Human
gucugauucccaagcucugc

SEQ ID NO: 3072207 - RNA, 21 nt, Human
gucugaggaauccagacccgg

SEQ ID NO: 3072208 - RNA, 19 nt, Human
gucugauucccaagcucug

SEQ ID NO: 3072209 - RNA, 18 nt, Human
gucugauucccaagcucu

SEQ ID NO: 3072210 - RNA, 17 nt, Human
gucugauucccaagcuc

SEQ ID NO: 3072211 - RNA, 12 nt, Human
gucccagugccg

SEQ ID NO: 3072212 - RNA, 23 nt, Human
guccuagaaauuccccacccuga

SEQ ID NO: 3072213 - RNA, 23 nt, Human
guccuacucugugucaggugggg

SEQ ID NO: 3072214 - RNA, 15 nt, Human
guccuacucuguguc

SEQ ID NO: 3072215 - RNA, 16 nt, Human
gucccugguggcagcu

SEQ ID NO: 3072216 - RNA, 17 nt, Human
gucccugguggcagcuc

SEQ ID NO: 3072217 - RNA, 13 nt, Human
guccuacucugug

SEQ ID NO: 3072218 - RNA, 23 nt, Human
guccucccaucucacacaugagc

SEQ ID NO: 3072219 - RNA, 13 nt, Human
guccucccaucuc

SEQ ID NO: 3072220 - RNA, 14 nt, Human
guccucccaucuca

SEQ ID NO: 3072221 - RNA, 12 nt, Human
guccucccaucu

SEQ ID NO: 3072222 - RNA, 17 nt, Human
guccuggcaugggaaug

SEQ ID NO: 3072223 - RNA, 16 nt, Human
guccugggagugagcu

SEQ ID NO: 3072224 - RNA, 15 nt, Human
guccugggagugagc

SEQ ID NO: 3072225 - RNA, 18 nt, Human
guccugggagugagcugg

SEQ ID NO: 3072226 - RNA, 17 nt, Human
guccugggagugagcug

SEQ ID NO: 3072227 - RNA, 19 nt, Human
guccugggagugagcuggu

SEQ ID NO: 3072228 - RNA, 21 nt, Human
guccugucggagcccugucuc

SEQ ID NO: 3072229 - RNA, 20 nt, Human
guccugucggagcccugucu

SEQ ID NO: 3072230 - RNA, 18 nt, Human
guccugucggagcccugu

SEQ ID NO: 3072231 - RNA, 21 nt, Human
guauuugagaguucuaaauuu

SEQ ID NO: 3072232 - RNA, 19 nt, Human
guauuugagaguucuaaau

SEQ ID NO: 3072233 - RNA, 17 nt, Human
guauuucuaugaaauau

SEQ ID NO: 3072234 - RNA, 22 nt, Human
guauuucuaugaaauauuaugu

SEQ ID NO: 3072235 - RNA, 15 nt, Human
guauuauguguguuu

SEQ ID NO: 3072236 - RNA, 14 nt, Human
guauuauaccuuuu

SEQ ID NO: 3072237 - RNA, 15 nt, Human
guauuacuucugcua

SEQ ID NO: 3072238 - RNA, 14 nt, Human
guauuacuucugcu

SEQ ID NO: 3072239 - RNA, 13 nt, Human
guauuacuucugc

SEQ ID NO: 3072240 - RNA, 22 nt, Human
guauuacaguggggaaugaaga

SEQ ID NO: 3072241 - RNA, 15 nt, Human
guagagugggagcug

SEQ ID NO: 3072242 - RNA, 20 nt, Human
guauuacaguggggaaugaa

SEQ ID NO: 3072243 - RNA, 13 nt, Human
guagagugggagc

SEQ ID NO: 3072244 - RNA, 16 nt, Human
gucaagugaaaaagga

SEQ ID NO: 3072245 - RNA, 18 nt, Human
gucaagugaaaaaggagg

SEQ ID NO: 3072246 - RNA, 19 nt, Human
gucaagugaaaaaggagga

SEQ ID NO: 3072247 - RNA, 19 nt, Human
gucaagagggucugaggaa

SEQ ID NO: 3072248 - RNA, 18 nt, Human
gucaagagggucugagga

SEQ ID NO: 3072249 - RNA, 16 nt, Human
guauuuuaaaagaaug

SEQ ID NO: 3072250 - RNA, 17 nt, Human
guauuuuaaaagaauga

SEQ ID NO: 3072251 - RNA, 20 nt, Human
gucaccugaagacucauucu

SEQ ID NO: 3072252 - RNA, 14 nt, Human
gucaccucauggaa

SEQ ID NO: 3072253 - RNA, 13 nt, Human
gucaccccggcca

SEQ ID NO: 3072254 - RNA, 13 nt, Human
gucaauuacagga

SEQ ID NO: 3072255 - RNA, 15 nt, Human
gucaauuacaggaag

SEQ ID NO: 3072256 - RNA, 16 nt, Human
gucaauuacaggaagu

SEQ ID NO: 3072257 - RNA, 21 nt, Human
gucaauaaaauccauacauuu

SEQ ID NO: 3072258 - RNA, 15 nt, Human
gucaauaaaauccau

SEQ ID NO: 3072259 - RNA, 17 nt, Human
gucccagauacuugggg

SEQ ID NO: 3072260 - RNA, 14 nt, Human
gucccacucagucc

SEQ ID NO: 3072261 - RNA, 15 nt, Human
gucccacucagucca

SEQ ID NO: 3072262 - RNA, 16 nt, Human
guccacccaggagccc

SEQ ID NO: 3072263 - RNA, 15 nt, Human
guccacccaggagcc

SEQ ID NO: 3072264 - RNA, 13 nt, Human
guccacccaggag

SEQ ID NO: 3072265 - RNA, 14 nt, Human
guccacccaggagc

SEQ ID NO: 3072266 - RNA, 21 nt, Human
gucauauaagauucauauuua

SEQ ID NO: 3072267 - RNA, 15 nt, Human
guacagacagaaaaa

SEQ ID NO: 3072268 - RNA, 16 nt, Human
guacagacaacaaacc

SEQ ID NO: 3072269 - RNA, 20 nt, Human
guacacuguuucaaacuuua

SEQ ID NO: 3072270 - RNA, 19 nt, Human
guacacuguuucaaacuuu

SEQ ID NO: 3072271 - RNA, 21 nt, Human
guacacuguuucaaacuuuac

SEQ ID NO: 3072272 - RNA, 23 nt, Human
guacacugccuucucaacuccaa

SEQ ID NO: 3072273 - RNA, 12 nt, Human
guacagagccca

SEQ ID NO: 3072274 - RNA, 18 nt, Human
guacagagcccacgcccc

SEQ ID NO: 3072275 - RNA, 22 nt, Human
guacagagcccacgcccccacu

SEQ ID NO: 3072276 - RNA, 20 nt, Human
guacagcaaggagauuuaca

SEQ ID NO: 3072277 - RNA, 20 nt, Human
guacauaaugcgugcauacc

SEQ ID NO: 3072278 - RNA, 15 nt, Human
guacccacugcucug

SEQ ID NO: 3072279 - RNA, 13 nt, Human
guaaugaaaacca

SEQ ID NO: 3072280 - RNA, 11 nt, Human
guaaugaaaac

SEQ ID NO: 3072281 - RNA, 19 nt, Human
guaaugauaacuggaaacu

SEQ ID NO: 3072282 - RNA, 14 nt, Human
guaauucaagaaaa

SEQ ID NO: 3072283 - RNA, 13 nt, Human
guaauucaagaaa

SEQ ID NO: 3072284 - RNA, 18 nt, Human
guacacuguuucaaacuu

SEQ ID NO: 3072285 - RNA, 15 nt, Human
guaauuggaaaggca

SEQ ID NO: 3072286 - RNA, 21 nt, Human
guaauuaaguacuauguauca

SEQ ID NO: 3072287 - RNA, 20 nt, Human
guaauuaaguacuauguauc

SEQ ID NO: 3072288 - RNA, 17 nt, Human
guaauuaaguacuaugu

SEQ ID NO: 3072289 - RNA, 14 nt, Human
guaauuaaguacua

SEQ ID NO: 3072290 - RNA, 15 nt, Human
guacgaagaguauuu

SEQ ID NO: 3072291 - RNA, 15 nt, Human
guacgucugacaggc

SEQ ID NO: 3072292 - RNA, 14 nt, Human
guacgucugacagg

SEQ ID NO: 3072293 - RNA, 16 nt, Human
guacguugugcauuug

SEQ ID NO: 3072294 - RNA, 15 nt, Human
guacguugugcauuu

SEQ ID NO: 3072295 - RNA, 14 nt, Human
guacguugugcauu

SEQ ID NO: 3072296 - RNA, 17 nt, Human
guacgucugacaggcaa

SEQ ID NO: 3072297 - RNA, 23 nt, Human
guacuaaggaaucuuucugcuuu

SEQ ID NO: 3072298 - RNA, 15 nt, Human
guacuaaggaaucuu

SEQ ID NO: 3072299 - RNA, 17 nt, Human
guacguugugcauuugg

SEQ ID NO: 3072300 - RNA, 15 nt, Human
guacuucuccacccu

SEQ ID NO: 3072301 - RNA, 14 nt, Human
guacuucuccaccc

SEQ ID NO: 3072302 - RNA, 15 nt, Human
guacuucaugcuguc

SEQ ID NO: 3072303 - RNA, 16 nt, Human
guacccacugcucugg

SEQ ID NO: 3072304 - RNA, 15 nt, Human
guaccgcaaugugac

SEQ ID NO: 3072305 - RNA, 22 nt, Human
guaccucuugagccuugaacuu

SEQ ID NO: 3072306 - RNA, 21 nt, Human
guaccucuugagccuugaacu

SEQ ID NO: 3072307 - RNA, 13 nt, Human
guaccucuugagc

SEQ ID NO: 3072308 - RNA, 23 nt, Human
guacuuuauuuucuauaauuuaa

SEQ ID NO: 3072309 - RNA, 21 nt, Human
guacuuguggacacagcucuu

SEQ ID NO: 3072310 - RNA, 18 nt, Human
guagagccagggucucac

SEQ ID NO: 3072311 - RNA, 16 nt, Human
guagagcggagaaagg

SEQ ID NO: 3072312 - RNA, 15 nt, Human
guagaggagaaacug

SEQ ID NO: 3072313 - RNA, 19 nt, Human
guacuugcucuugaugccu

SEQ ID NO: 3072314 - RNA, 18 nt, Human
guacuugcucuugaugcc

SEQ ID NO: 3072315 - RNA, 16 nt, Human
guacuugcucuugaug

SEQ ID NO: 3072316 - RNA, 15 nt, Human
guacuugcucuugau

SEQ ID NO: 3072317 - RNA, 22 nt, Human
guacuugcucuugaugccuggc

SEQ ID NO: 3072318 - RNA, 20 nt, Human
guacuuguggacacagcucu

SEQ ID NO: 3072319 - RNA, 16 nt, Human
guacuuguggacacag

SEQ ID NO: 3072320 - RNA, 14 nt, Human
guacuugcucuuga

SEQ ID NO: 3072321 - RNA, 21 nt, Human
guacuucuccacccugcucuc

SEQ ID NO: 3072322 - RNA, 20 nt, Human
guacuucuccacccugcucu

SEQ ID NO: 3072323 - RNA, 19 nt, Human
guacuucuccacccugcuc

SEQ ID NO: 3072324 - RNA, 18 nt, Human
guacuucuccacccugcu

SEQ ID NO: 3072325 - RNA, 17 nt, Human
guacuucuccacccugc

SEQ ID NO: 3072326 - RNA, 16 nt, Human
guacuucuccacccug

SEQ ID NO: 3072327 - RNA, 18 nt, Human
guaaaaacaaagaaauua

SEQ ID NO: 3072328 - RNA, 20 nt, Human
guaaaaacaaagaaauuaug

SEQ ID NO: 3072329 - RNA, 23 nt, Human
guaaaaccacagcaguugaaaag

SEQ ID NO: 3072330 - RNA, 18 nt, Human
guaaaaccacagcaguug

SEQ ID NO: 3072331 - RNA, 16 nt, Human
guaaaaccacagcagu

SEQ ID NO: 3072332 - RNA, 15 nt, Human
guaaaaccacagcag

SEQ ID NO: 3072333 - RNA, 14 nt, Human
guaaaaccacagca

SEQ ID NO: 3072334 - RNA, 13 nt, Human
gguuuucuguucu

SEQ ID NO: 3072335 - RNA, 12 nt, Human
gguuuucuguuc

SEQ ID NO: 3072336 - RNA, 15 nt, Human
gguuuucuguucuuu

SEQ ID NO: 3072337 - RNA, 20 nt, Human
gguuuucacauuggaaacaa

SEQ ID NO: 3072338 - RNA, 23 nt, Human
gguuuugccauguuggccaggcu

SEQ ID NO: 3072339 - RNA, 14 nt, Human
gguugaagcaccaa

SEQ ID NO: 3072340 - RNA, 23 nt, Human
gguucaagcgauucuucugcuuc

SEQ ID NO: 3072341 - RNA, 22 nt, Human
gguucaagcgauucuucugcuu

SEQ ID NO: 3072342 - RNA, 20 nt, Human
gguucacugcaaccuccgcc

SEQ ID NO: 3072343 - RNA, 17 nt, Human
gguggccucccaacuca

SEQ ID NO: 3072344 - RNA, 21 nt, Human
gguucaagcgauucuucugcu

SEQ ID NO: 3072345 - RNA, 13 nt, Human
gguggccucccaa

SEQ ID NO: 3072346 - RNA, 14 nt, Human
gguugggcuggugu

SEQ ID NO: 3072347 - RNA, 13 nt, Human
gguuuaagcuguu

SEQ ID NO: 3072348 - RNA, 13 nt, Human
gguuggugggggc

SEQ ID NO: 3072349 - RNA, 15 nt, Human
guaaauaguauuuga

SEQ ID NO: 3072350 - RNA, 17 nt, Human
guaaauaguauuugaga

SEQ ID NO: 3072351 - RNA, 16 nt, Human
guaaauaguauuugag

SEQ ID NO: 3072352 - RNA, 20 nt, Human
guaaaugggggugcauuuga

SEQ ID NO: 3072353 - RNA, 19 nt, Human
guaaaugggggugcauuug

SEQ ID NO: 3072354 - RNA, 18 nt, Human
guaaaugggggugcauuu

SEQ ID NO: 3072355 - RNA, 22 nt, Human
guaaauuaacuuuuauaaacuu

SEQ ID NO: 3072356 - RNA, 21 nt, Human
guaaauuaacuuuuauaaacu

SEQ ID NO: 3072357 - RNA, 17 nt, Human
guaaauuaacuuuuaua

SEQ ID NO: 3072358 - RNA, 16 nt, Human
guaaauuaacuuuuau

SEQ ID NO: 3072359 - RNA, 15 nt, Human
guaaauuaacuuuua

SEQ ID NO: 3072360 - RNA, 22 nt, Human
guaaguauucuuauuuaaugaa

SEQ ID NO: 3072361 - RNA, 17 nt, Human
guaagggaaacugccag

SEQ ID NO: 3072362 - RNA, 18 nt, Human
guaagggaaacugccagc

SEQ ID NO: 3072363 - RNA, 20 nt, Human
guaaggaauaccuguccccc

SEQ ID NO: 3072364 - RNA, 21 nt, Human
guaaggaauaccugucccccu

SEQ ID NO: 3072365 - RNA, 23 nt, Human
guaaggaauaccugucccccuga

SEQ ID NO: 3072366 - RNA, 13 nt, Human
guaaggaaugauu

SEQ ID NO: 3072367 - RNA, 18 nt, Human
guaaggaauaccuguccc

SEQ ID NO: 3072368 - RNA, 23 nt, Human
guaaauuaacuuuuauaaacuuu

SEQ ID NO: 3072369 - RNA, 22 nt, Human
ggucccaccccacacacgccag

SEQ ID NO: 3072370 - RNA, 14 nt, Human
ggucccacucaguc

SEQ ID NO: 3072371 - RNA, 12 nt, Human
ggucccacucag

SEQ ID NO: 3072372 - RNA, 22 nt, Human
ggucccacucaguccauagcag

SEQ ID NO: 3072373 - RNA, 18 nt, Human
ggucccccuuccauggac

SEQ ID NO: 3072374 - RNA, 23 nt, Human
ggucccccuuccauggacuuugu

SEQ ID NO: 3072375 - RNA, 13 nt, Human
ggucccccuucca

SEQ ID NO: 3072376 - RNA, 16 nt, Human
ggucagagccugcagu

SEQ ID NO: 3072377 - RNA, 15 nt, Human
ggucagagccugcag

SEQ ID NO: 3072378 - RNA, 14 nt, Human
ggucagagccugca

SEQ ID NO: 3072379 - RNA, 13 nt, Human
ggucagagccugc

SEQ ID NO: 3072380 - RNA, 16 nt, Human
ggucacucuggcagcu

SEQ ID NO: 3072381 - RNA, 20 nt, Human
ggucacucuggcagcucaga

SEQ ID NO: 3072382 - RNA, 22 nt, Human
ggucacucuggcagcucagaga

SEQ ID NO: 3072383 - RNA, 12 nt, Human
ggucagagccug

SEQ ID NO: 3072384 - RNA, 12 nt, Human
ggucacucuggc

SEQ ID NO: 3072385 - RNA, 15 nt, Human
gguagacacacauga

SEQ ID NO: 3072386 - RNA, 22 nt, Human
gguagacacacaugaaguccaa

SEQ ID NO: 3072387 - RNA, 19 nt, Human
gggugcugggccccugccu

SEQ ID NO: 3072388 - RNA, 18 nt, Human
gggugcugggccccugcc

SEQ ID NO: 3072389 - RNA, 21 nt, Human
ggguagccacuggacugacga

SEQ ID NO: 3072390 - RNA, 19 nt, Human
ggguuggccccugcccggc

SEQ ID NO: 3072391 - RNA, 16 nt, Human
ggguuggccccugccc

SEQ ID NO: 3072392 - RNA, 17 nt, Human
ggguucuacccaggugc

SEQ ID NO: 3072393 - RNA, 22 nt, Human
ggguucuacccaggugcuagga

SEQ ID NO: 3072394 - RNA, 23 nt, Human
ggguucccuuuuuuggcugcuga

SEQ ID NO: 3072395 - RNA, 21 nt, Human
gguacuuguggacacagcucu

SEQ ID NO: 3072396 - RNA, 22 nt, Human
gguacuucaaauccuugaagau

SEQ ID NO: 3072397 - RNA, 22 nt, Human
gguacuuguggacacagcucuu

SEQ ID NO: 3072398 - RNA, 20 nt, Human
gguacuuguggacacagcuc

SEQ ID NO: 3072399 - RNA, 15 nt, Human
ggguugggcuggugu

SEQ ID NO: 3072400 - RNA, 16 nt, Human
gguacccacugcucug

SEQ ID NO: 3072401 - RNA, 17 nt, Human
gguacccacugcucugg

SEQ ID NO: 3072402 - RNA, 17 nt, Human
ggucccuaauaaagcug

SEQ ID NO: 3072403 - RNA, 16 nt, Human
ggucccuaauaaagcu

SEQ ID NO: 3072404 - RNA, 13 nt, Human
ggucccuaauaaa

SEQ ID NO: 3072405 - RNA, 12 nt, Human
ggucccuaauaa

SEQ ID NO: 3072406 - RNA, 18 nt, Human
ggucccuaauaaagcugu

SEQ ID NO: 3072407 - RNA, 14 nt, Human
ggucccugguggca

SEQ ID NO: 3072408 - RNA, 22 nt, Human
ggucccugguggcagcucaccu

SEQ ID NO: 3072409 - RNA, 22 nt, Human
ggucucacuauguugcccaggc

SEQ ID NO: 3072410 - RNA, 18 nt, Human
ggugaagugaagacaaug

SEQ ID NO: 3072411 - RNA, 16 nt, Human
ggugaacuugguuccc

SEQ ID NO: 3072412 - RNA, 19 nt, Human
ggucugaggaauccagacc

SEQ ID NO: 3072413 - RNA, 12 nt, Human
ggucucacucug

SEQ ID NO: 3072414 - RNA, 21 nt, Human
ggucucacuauguugcccagg

SEQ ID NO: 3072415 - RNA, 16 nt, Human
ggucugacccacugcu

SEQ ID NO: 3072416 - RNA, 15 nt, Human
ggucugacccacugc

SEQ ID NO: 3072417 - RNA, 14 nt, Human
ggugaccucugccu

SEQ ID NO: 3072418 - RNA, 16 nt, Human
ggugaccucugccuga

SEQ ID NO: 3072419 - RNA, 15 nt, Human
ggugcgaucuggguu

SEQ ID NO: 3072420 - RNA, 19 nt, Human
ggugcuacaaaaacacagc

SEQ ID NO: 3072421 - RNA, 23 nt, Human
ggugcuaucucccccagccccau

SEQ ID NO: 3072422 - RNA, 21 nt, Human
ggugcuaucucccccagcccc

SEQ ID NO: 3072423 - RNA, 22 nt, Human
ggugcuaucucccccagcccca

SEQ ID NO: 3072424 - RNA, 13 nt, Human
gguggcagcugcg

SEQ ID NO: 3072425 - RNA, 12 nt, Human
gguggcagcugc

SEQ ID NO: 3072426 - RNA, 13 nt, Human
gguggcagcucac

SEQ ID NO: 3072427 - RNA, 11 nt, Human
gguggcagcug

SEQ ID NO: 3072428 - RNA, 23 nt, Human
gguggcagcugcgguccacccag

SEQ ID NO: 3072429 - RNA, 15 nt, Human
gguggcagcugcggu

SEQ ID NO: 3072430 - RNA, 20 nt, Human
gggcuucauccuccucagau

SEQ ID NO: 3072431 - RNA, 20 nt, Human
gggcuuggggaccagagcug

SEQ ID NO: 3072432 - RNA, 19 nt, Human
gggcuucauccuccucaga

SEQ ID NO: 3072433 - RNA, 20 nt, Human
gggcuucaguggcagcugcu

SEQ ID NO: 3072434 - RNA, 19 nt, Human
gggcuucaguggcagcugc

SEQ ID NO: 3072435 - RNA, 18 nt, Human
gggcuucaguggcagcug

SEQ ID NO: 3072436 - RNA, 17 nt, Human
gggcuucaguggcagcu

SEQ ID NO: 3072437 - RNA, 16 nt, Human
gggcuucaguggcagc

SEQ ID NO: 3072438 - RNA, 15 nt, Human
gggcuucaguggcag

SEQ ID NO: 3072439 - RNA, 17 nt, Human
ggggaucacagccucug

SEQ ID NO: 3072440 - RNA, 13 nt, Human
ggggaguggccac

SEQ ID NO: 3072441 - RNA, 21 nt, Human
gggcuuggggaccagagcugc

SEQ ID NO: 3072442 - RNA, 11 nt, Human
ggggagaaagu

SEQ ID NO: 3072443 - RNA, 18 nt, Human
ggguacccacugcucugg

SEQ ID NO: 3072444 - RNA, 15 nt, Human
ggguacccacugcuc

SEQ ID NO: 3072445 - RNA, 13 nt, Human
ggguacccacugc

SEQ ID NO: 3072446 - RNA, 23 nt, Human
ggguagagcggagaaaggaaggg

SEQ ID NO: 3072447 - RNA, 23 nt, Human
ggguacuuguggacacagcucuu

SEQ ID NO: 3072448 - RNA, 22 nt, Human
ggguacuuguggacacagcucu

SEQ ID NO: 3072449 - RNA, 19 nt, Human
ggguacuuguggacacagc

SEQ ID NO: 3072450 - RNA, 23 nt, Human
gggguucccuuuuuuggcugcug

SEQ ID NO: 3072451 - RNA, 13 nt, Human
ggggcugggacau

SEQ ID NO: 3072452 - RNA, 16 nt, Human
ggggcugggcagagga

SEQ ID NO: 3072453 - RNA, 17 nt, Human
ggggcugggcagaggaa

SEQ ID NO: 3072454 - RNA, 14 nt, Human
ggggcugcucccac

SEQ ID NO: 3072455 - RNA, 23 nt, Human
ggggcugcaccggcuggccuggc

SEQ ID NO: 3072456 - RNA, 18 nt, Human
ggggcugcucccaccugg

SEQ ID NO: 3072457 - RNA, 16 nt, Human
gggcgcgguggcucac

SEQ ID NO: 3072458 - RNA, 13 nt, Human
gggcucccuuccc

SEQ ID NO: 3072459 - RNA, 14 nt, Human
gggcucccuuccca

SEQ ID NO: 3072460 - RNA, 17 nt, Human
gggcucccuucccaccu

SEQ ID NO: 3072461 - RNA, 18 nt, Human
gggcucccuucccaccuc

SEQ ID NO: 3072462 - RNA, 23 nt, Human
gggcucccuucccaccucucuca

SEQ ID NO: 3072463 - RNA, 18 nt, Human
gggccuggucguuuucaa

SEQ ID NO: 3072464 - RNA, 14 nt, Human
gggccuggcucagg

SEQ ID NO: 3072465 - RNA, 16 nt, Human
gggccuggcucaggug

SEQ ID NO: 3072466 - RNA, 12 nt, Human
gggccuggcuca

SEQ ID NO: 3072467 - RNA, 19 nt, Human
gggccuggccugagcuggg

SEQ ID NO: 3072468 - RNA, 12 nt, Human
gggccuggaugc

SEQ ID NO: 3072469 - RNA, 18 nt, Human
ggcucccagccaggcccu

SEQ ID NO: 3072470 - RNA, 16 nt, Human
ggcucccagccaggcc

SEQ ID NO: 3072471 - RNA, 17 nt, Human
ggcucccagccaggccc

SEQ ID NO: 3072472 - RNA, 14 nt, Human
ggcucccagccagg

SEQ ID NO: 3072473 - RNA, 15 nt, Human
ggcucccagccaggc

SEQ ID NO: 3072474 - RNA, 15 nt, Human
gggcucugccuccca

SEQ ID NO: 3072475 - RNA, 16 nt, Human
gggcucugccucccau

SEQ ID NO: 3072476 - RNA, 17 nt, Human
gggcucugccucccauc

SEQ ID NO: 3072477 - RNA, 20 nt, Human
gggcucugccucccaucacc

SEQ ID NO: 3072478 - RNA, 13 nt, Human
gggcucugccucc

SEQ ID NO: 3072479 - RNA, 16 nt, Human
gggcugaggugggagg

SEQ ID NO: 3072480 - RNA, 14 nt, Human
gggcugcaccggcu

SEQ ID NO: 3072481 - RNA, 14 nt, Human
gggcuucaguggca

SEQ ID NO: 3072482 - RNA, 17 nt, Human
gcucuugaugccuggcg

SEQ ID NO: 3072483 - RNA, 20 nt, Human
gcugacagacacaggcccgg

SEQ ID NO: 3072484 - RNA, 21 nt, Human
gcugacagacacaggcccggc

SEQ ID NO: 3072485 - RNA, 16 nt, Human
gcucuugaugccuggc

SEQ ID NO: 3072486 - RNA, 15 nt, Human
gcucuugaugccugg

SEQ ID NO: 3072487 - RNA, 14 nt, Human
gcucuugaugccug

SEQ ID NO: 3072488 - RNA, 16 nt, Human
gcucuucuccaggcug

SEQ ID NO: 3072489 - RNA, 14 nt, Human
gcucuucuccaggc

SEQ ID NO: 3072490 - RNA, 19 nt, Human
gcucuuccaggcugggaga

SEQ ID NO: 3072491 - RNA, 18 nt, Human
gcucuuccaggcugggag

SEQ ID NO: 3072492 - RNA, 12 nt, Human
gcucuucuccag

SEQ ID NO: 3072493 - RNA, 22 nt, Human
gcucuuccaggcugggagagcc

SEQ ID NO: 3072494 - RNA, 19 nt, Human
gcugagucugaaggcuggg

SEQ ID NO: 3072495 - RNA, 16 nt, Human
gcugagucugaaggcu

SEQ ID NO: 3072496 - RNA, 18 nt, Human
gcugagucugaaggcugg

SEQ ID NO: 3072497 - RNA, 15 nt, Human
gcugagucugaaggc

SEQ ID NO: 3072498 - RNA, 15 nt, Human
gcugauggugcaaug

SEQ ID NO: 3072499 - RNA, 16 nt, Human
gcugauggugcaauga

SEQ ID NO: 3072500 - RNA, 22 nt, Human
gcugagugggggaucacagccu

SEQ ID NO: 3072501 - RNA, 23 nt, Human
gcugagugggggaucacagccuc

SEQ ID NO: 3072502 - RNA, 18 nt, Human
gcugauggugcaaugacc

SEQ ID NO: 3072503 - RNA, 21 nt, Human
gcugauggugcaaugaccuuu

SEQ ID NO: 3072504 - RNA, 18 nt, Human
gcugcaguugccagucac

SEQ ID NO: 3072505 - RNA, 20 nt, Human
gcugcaguugccagucaccc

SEQ ID NO: 3072506 - RNA, 21 nt, Human
gcugcaguugccagucacccc

SEQ ID NO: 3072507 - RNA, 17 nt, Human
gcugcaguugccaguca

SEQ ID NO: 3072508 - RNA, 17 nt, Human
gcucuccgaccagacac

SEQ ID NO: 3072509 - RNA, 13 nt, Human
gcucuccgaccag

SEQ ID NO: 3072510 - RNA, 19 nt, Human
gcucuccgaccagacaccu

SEQ ID NO: 3072511 - RNA, 12 nt, Human
gcucucuggccu

SEQ ID NO: 3072512 - RNA, 13 nt, Human
gcucucuggccuu

SEQ ID NO: 3072513 - RNA, 11 nt, Human
gcucucuggcc

SEQ ID NO: 3072514 - RNA, 21 nt, Human
gcuccuucuguccuacucugu

SEQ ID NO: 3072515 - RNA, 15 nt, Human
gcuccuucuguccua

SEQ ID NO: 3072516 - RNA, 16 nt, Human
gcucccuucccaccuc

SEQ ID NO: 3072517 - RNA, 18 nt, Human
gcucccuucccaccucuc

SEQ ID NO: 3072518 - RNA, 15 nt, Human
gcucccuucccaccu

SEQ ID NO: 3072519 - RNA, 16 nt, Human
gcucgagcaugccugg

SEQ ID NO: 3072520 - RNA, 23 nt, Human
gcucugcccuugguuaggcauug

SEQ ID NO: 3072521 - RNA, 11 nt, Human
gcucugccucc

SEQ ID NO: 3072522 - RNA, 13 nt, Human
gcucugcccuugg

SEQ ID NO: 3072523 - RNA, 14 nt, Human
gcucugcccuuggu

SEQ ID NO: 3072524 - RNA, 14 nt, Human
gcucucuggccuuc

SEQ ID NO: 3072525 - RNA, 15 nt, Human
gcucucuggccuucg

SEQ ID NO: 3072526 - RNA, 19 nt, Human
gcucucuggccuucggccu

SEQ ID NO: 3072527 - RNA, 20 nt, Human
gcucucuggccuucggccuc

SEQ ID NO: 3072528 - RNA, 13 nt, Human
gcucugccuccca

SEQ ID NO: 3072529 - RNA, 14 nt, Human
gcucugccucccau

SEQ ID NO: 3072530 - RNA, 15 nt, Human
gcucugccucccauc

SEQ ID NO: 3072531 - RNA, 22 nt, Human
gcucugccucccaucacccgcu

SEQ ID NO: 3072532 - RNA, 14 nt, Human
gcucugcuccucuc

SEQ ID NO: 3072533 - RNA, 13 nt, Human
gcucugcuccucu

SEQ ID NO: 3072534 - RNA, 23 nt, Human
gcucugcugacagacacaggccc

SEQ ID NO: 3072535 - RNA, 20 nt, Human
gcucugcugacagacacagg

SEQ ID NO: 3072536 - RNA, 19 nt, Human
gcucugcugacagacacag

SEQ ID NO: 3072537 - RNA, 18 nt, Human
gcucugcugacagacaca

SEQ ID NO: 3072538 - RNA, 14 nt, Human
gcucugcugacaga

SEQ ID NO: 3072539 - RNA, 13 nt, Human
gcucugcugacag

SEQ ID NO: 3072540 - RNA, 21 nt, Human
gcucugcuccucuccccagca

SEQ ID NO: 3072541 - RNA, 19 nt, Human
gcucugcuccucuccccag

SEQ ID NO: 3072542 - RNA, 22 nt, Human
gcucuggacaggcauguucucu

SEQ ID NO: 3072543 - RNA, 21 nt, Human
gcucuggacaggcauguucuc

SEQ ID NO: 3072544 - RNA, 16 nt, Human
gcucuggacaggcaug

SEQ ID NO: 3072545 - RNA, 15 nt, Human
gcucuggacaggcau

SEQ ID NO: 3072546 - RNA, 14 nt, Human
gcucuggacaggca

SEQ ID NO: 3072547 - RNA, 23 nt, Human
gccugugagcuaggaauuguguu

SEQ ID NO: 3072548 - RNA, 16 nt, Human
gcgguccacccaggag

SEQ ID NO: 3072549 - RNA, 13 nt, Human
gcggggacagcuc

SEQ ID NO: 3072550 - RNA, 15 nt, Human
gcgggcuuccuccug

SEQ ID NO: 3072551 - RNA, 12 nt, Human
gcggggacagcu

SEQ ID NO: 3072552 - RNA, 19 nt, Human
gcgguccacccaggagccc

SEQ ID NO: 3072553 - RNA, 18 nt, Human
gcgguccacccaggagcc

SEQ ID NO: 3072554 - RNA, 23 nt, Human
gcgugagccacugcaccgggcca

SEQ ID NO: 3072555 - RNA, 18 nt, Human
gcgugagccacugcaccg

SEQ ID NO: 3072556 - RNA, 16 nt, Human
gcgugagccacugcac

SEQ ID NO: 3072557 - RNA, 21 nt, Human
gcuaagagggagggagggcuc

SEQ ID NO: 3072558 - RNA, 22 nt, Human
gcuaagagggagggagggcucc

SEQ ID NO: 3072559 - RNA, 13 nt, Human
gcuaaaugugaau

SEQ ID NO: 3072560 - RNA, 16 nt, Human
gcuaaaugugaaugau

SEQ ID NO: 3072561 - RNA, 23 nt, Human
gcuaagagggagggagggcucca

SEQ ID NO: 3072562 - RNA, 17 nt, Human
gcuaagcaaaaugugau

SEQ ID NO: 3072563 - RNA, 14 nt, Human
gcuaagcauuccaa

SEQ ID NO: 3072564 - RNA, 14 nt, Human
gcuacccgggaagg

SEQ ID NO: 3072565 - RNA, 15 nt, Human
gcuacccgggaaggg

SEQ ID NO: 3072566 - RNA, 18 nt, Human
gcuagagguucaaagaua

SEQ ID NO: 3072567 - RNA, 21 nt, Human
gcuagagguucaaagauauuu

SEQ ID NO: 3072568 - RNA, 19 nt, Human
gcuagagguucaaagauau

SEQ ID NO: 3072569 - RNA, 21 nt, Human
gcuacccgggaagggggcugg

SEQ ID NO: 3072570 - RNA, 20 nt, Human
gcuaccuuuguauucucucc

SEQ ID NO: 3072571 - RNA, 16 nt, Human
gcuaucucccccagcc

SEQ ID NO: 3072572 - RNA, 17 nt, Human
gcuaucucccccagccc

SEQ ID NO: 3072573 - RNA, 18 nt, Human
gcuaucucccccagcccc

SEQ ID NO: 3072574 - RNA, 22 nt, Human
gcuagcagcagggagggcuucu

SEQ ID NO: 3072575 - RNA, 19 nt, Human
gcuaucucccccagcccca

SEQ ID NO: 3072576 - RNA, 20 nt, Human
gcuaucucccccagccccau

SEQ ID NO: 3072577 - RNA, 21 nt, Human
gcuaucucccccagccccauc

SEQ ID NO: 3072578 - RNA, 22 nt, Human
gcuaucucccccagccccaucc

SEQ ID NO: 3072579 - RNA, 23 nt, Human
gcuaucucccccagccccauccu

SEQ ID NO: 3072580 - RNA, 15 nt, Human
gcuaucucccccagc

SEQ ID NO: 3072581 - RNA, 13 nt, Human
gcuccaaacccuc

SEQ ID NO: 3072582 - RNA, 16 nt, Human
gcuccaaacccucgag

SEQ ID NO: 3072583 - RNA, 18 nt, Human
gcuccaaacccucgaggc

SEQ ID NO: 3072584 - RNA, 17 nt, Human
gcuccaaacccucgagg

SEQ ID NO: 3072585 - RNA, 19 nt, Human
gcucaggugucccugcacu

SEQ ID NO: 3072586 - RNA, 15 nt, Human
gcucagcggggacag

SEQ ID NO: 3072587 - RNA, 19 nt, Human
gcucagcggggacagcucc

SEQ ID NO: 3072588 - RNA, 20 nt, Human
gcucagcggggacagcuccu

SEQ ID NO: 3072589 - RNA, 17 nt, Human
gcucaggugucccugca

SEQ ID NO: 3072590 - RNA, 18 nt, Human
gcucaggugucccugcac

SEQ ID NO: 3072591 - RNA, 22 nt, Human
gcucagcggggacagcuccuuc

SEQ ID NO: 3072592 - RNA, 21 nt, Human
gcucagcggggacagcuccuu

SEQ ID NO: 3072593 - RNA, 18 nt, Human
gcucaccagccccagugc

SEQ ID NO: 3072594 - RNA, 19 nt, Human
gcucaccagccccagugcc

SEQ ID NO: 3072595 - RNA, 23 nt, Human
gcucaccagccccagugcccaca

SEQ ID NO: 3072596 - RNA, 20 nt, Human
gcucaccagccccagugccc

SEQ ID NO: 3072597 - RNA, 15 nt, Human
gcucacccaguccug

SEQ ID NO: 3072598 - RNA, 17 nt, Human
gcucagcaaaagaugcu

SEQ ID NO: 3072599 - RNA, 20 nt, Human
gcucagcaaaagaugcuucu

SEQ ID NO: 3072600 - RNA, 22 nt, Human
gcucagcaaaagaugcuucuca

SEQ ID NO: 3072601 - RNA, 23 nt, Human
gcucagcaaaagaugcuucucac

SEQ ID NO: 3072602 - RNA, 23 nt, Human
gcuccaggcuccuuuagcgccca

SEQ ID NO: 3072603 - RNA, 16 nt, Human
gcuccaggcuccuuua

SEQ ID NO: 3072604 - RNA, 11 nt, Human
gcuccagcugu

SEQ ID NO: 3072605 - RNA, 13 nt, Human
gcuccaggcuccu

SEQ ID NO: 3072606 - RNA, 16 nt, Human
gcuccaagcucccagg

SEQ ID NO: 3072607 - RNA, 17 nt, Human
gcuccaagcucccaggc

SEQ ID NO: 3072608 - RNA, 18 nt, Human
gcuccaagcucccaggca

SEQ ID NO: 3072609 - RNA, 19 nt, Human
gcuccaagcucccaggcau

SEQ ID NO: 3072610 - RNA, 21 nt, Human
gcuccaagcucccaggcauuc

SEQ ID NO: 3072611 - RNA, 14 nt, Human
gcuccaagcuccca

SEQ ID NO: 3072612 - RNA, 15 nt, Human
gcuccaagcucccag

SEQ ID NO: 3072613 - RNA, 13 nt, Human
gcuccaagcuccc

SEQ ID NO: 3072614 - RNA, 14 nt, Human
gcuccaagaauuuc

SEQ ID NO: 3072615 - RNA, 19 nt, Human
gcuccaaacccucgaggcg

SEQ ID NO: 3072616 - RNA, 19 nt, Human
gccucucugcaggucccua

SEQ ID NO: 3072617 - RNA, 22 nt, Human
gccucucccugcugcuccuagg

SEQ ID NO: 3072618 - RNA, 18 nt, Human
gccucucccugcugcucc

SEQ ID NO: 3072619 - RNA, 19 nt, Human
gccucucccugcugcuccu

SEQ ID NO: 3072620 - RNA, 20 nt, Human
gccucucccugcugcuccua

SEQ ID NO: 3072621 - RNA, 21 nt, Human
gccucucccugcugcuccuag

SEQ ID NO: 3072622 - RNA, 17 nt, Human
gccucucccugcugcuc

SEQ ID NO: 3072623 - RNA, 15 nt, Human
gccucccgaguagcu

SEQ ID NO: 3072624 - RNA, 23 nt, Human
gccucccgaauagcugggacuac

SEQ ID NO: 3072625 - RNA, 21 nt, Human
gccucccacgacugcccggca

SEQ ID NO: 3072626 - RNA, 14 nt, Human
gccucccacgacug

SEQ ID NO: 3072627 - RNA, 21 nt, Human
gccucccgaauagcugggacu

SEQ ID NO: 3072628 - RNA, 22 nt, Human
gccucccaacucaccccagccc

SEQ ID NO: 3072629 - RNA, 23 nt, Human
gccucccaacucaccccagcccc

SEQ ID NO: 3072630 - RNA, 21 nt, Human
gccucccaacucaccccagcc

SEQ ID NO: 3072631 - RNA, 15 nt, Human
gccucagugccacua

SEQ ID NO: 3072632 - RNA, 21 nt, Human
gccucacaguccuuaccagca

SEQ ID NO: 3072633 - RNA, 23 nt, Human
gccucagccucccaaagugcugg

SEQ ID NO: 3072634 - RNA, 14 nt, Human
gccucagugccacu

SEQ ID NO: 3072635 - RNA, 12 nt, Human
gccucagugcca

SEQ ID NO: 3072636 - RNA, 21 nt, Human
gccucaagugauucuccugcc

SEQ ID NO: 3072637 - RNA, 20 nt, Human
gccucaagugauucuccugc

SEQ ID NO: 3072638 - RNA, 19 nt, Human
gccucaagugauucuccug

SEQ ID NO: 3072639 - RNA, 16 nt, Human
gccucaaccuccuggg

SEQ ID NO: 3072640 - RNA, 14 nt, Human
gccucaaccuccug

SEQ ID NO: 3072641 - RNA, 19 nt, Human
gccgagauagccaaggcca

SEQ ID NO: 3072642 - RNA, 17 nt, Human
gccuaagugcagccccg

SEQ ID NO: 3072643 - RNA, 22 nt, Human
gccuauauuuuuuguuaaauga

SEQ ID NO: 3072644 - RNA, 22 nt, Human
gccuggccagaugcaccagccc

SEQ ID NO: 3072645 - RNA, 15 nt, Human
gccuggccagaugca

SEQ ID NO: 3072646 - RNA, 14 nt, Human
gccuggccagaugc

SEQ ID NO: 3072647 - RNA, 15 nt, Human
gccugggcagaagga

SEQ ID NO: 3072648 - RNA, 15 nt, Human
gccuggauggggcug

SEQ ID NO: 3072649 - RNA, 14 nt, Human
gccuggauggggcu

SEQ ID NO: 3072650 - RNA, 16 nt, Human
gccugggcagaaggaa

SEQ ID NO: 3072651 - RNA, 17 nt, Human
gccugggcagaaggaag

SEQ ID NO: 3072652 - RNA, 20 nt, Human
gccugggggcugggcagagg

SEQ ID NO: 3072653 - RNA, 21 nt, Human
gccucucugcaggucccuaau

SEQ ID NO: 3072654 - RNA, 20 nt, Human
gccucucugcaggucccuaa

SEQ ID NO: 3072655 - RNA, 18 nt, Human
gccucucugcaggucccu

SEQ ID NO: 3072656 - RNA, 18 nt, Human
gccucugccucugacaca

SEQ ID NO: 3072657 - RNA, 22 nt, Human
gccugaagucacacagugaguc

SEQ ID NO: 3072658 - RNA, 19 nt, Human
gccucugcggagcacacug

SEQ ID NO: 3072659 - RNA, 21 nt, Human
gccucugcggagcacacuggc

SEQ ID NO: 3072660 - RNA, 24 nt, Human
gccucugcggagcacacuggcuca

SEQ ID NO: 3072661 - RNA, 22 nt, Human
gccugcuuuuuauggccuguga

SEQ ID NO: 3072662 - RNA, 19 nt, Human
gccugcuuuuuauggccug

SEQ ID NO: 3072663 - RNA, 18 nt, Human
gccugcuuuuuauggccu

SEQ ID NO: 3072664 - RNA, 16 nt, Human
gccugcuccagcuguu

SEQ ID NO: 3072665 - RNA, 18 nt, Human
gccugcuccagcuguuca

SEQ ID NO: 3072666 - RNA, 15 nt, Human
gccugcuccagcugu

SEQ ID NO: 3072667 - RNA, 22 nt, Human
gcccuggacugugugcucagga

SEQ ID NO: 3072668 - RNA, 16 nt, Human
gcccuggacugugugc

SEQ ID NO: 3072669 - RNA, 12 nt, Human
gcccuggacugu

SEQ ID NO: 3072670 - RNA, 12 nt, Human
gcccucugccca

SEQ ID NO: 3072671 - RNA, 16 nt, Human
gcccugagcuuucugc

SEQ ID NO: 3072672 - RNA, 14 nt, Human
gcccugagcuuucu

SEQ ID NO: 3072673 - RNA, 18 nt, Human
gcccggcuccaggcuccu

SEQ ID NO: 3072674 - RNA, 17 nt, Human
gcccggcuccaggcucc

SEQ ID NO: 3072675 - RNA, 15 nt, Human
gcagacucuacagag

SEQ ID NO: 3072676 - RNA, 21 nt, Human
gccccuguucuggcagaguug

SEQ ID NO: 3072677 - RNA, 17 nt, Human
gccccuguucuggcaga

SEQ ID NO: 3072678 - RNA, 15 nt, Human
gccccugccacccug

SEQ ID NO: 3072679 - RNA, 14 nt, Human
gccccugccacccu

SEQ ID NO: 3072680 - RNA, 13 nt, Human
gccccugccaccc

SEQ ID NO: 3072681 - RNA, 16 nt, Human
gcccggcuccaggcuc

SEQ ID NO: 3072682 - RNA, 15 nt, Human
gcccggcuccaggcu

SEQ ID NO: 3072683 - RNA, 21 nt, Human
gcccugggaggcucuggagcc

SEQ ID NO: 3072684 - RNA, 19 nt, Human
gcccugggaggcucuggag

SEQ ID NO: 3072685 - RNA, 18 nt, Human
gcccugggaggcucugga

SEQ ID NO: 3072686 - RNA, 17 nt, Human
gcccugggaggcucugg

SEQ ID NO: 3072687 - RNA, 23 nt, Human
gcccugggaggcucuggagccca

SEQ ID NO: 3072688 - RNA, 16 nt, Human
gcccugggaggcucug

SEQ ID NO: 3072689 - RNA, 15 nt, Human
gcccugggaggcucu

SEQ ID NO: 3072690 - RNA, 14 nt, Human
gcccugggaggcuc

SEQ ID NO: 3072691 - RNA, 13 nt, Human
gcccugggaggcu

SEQ ID NO: 3072692 - RNA, 23 nt, Human
gcccugguggcagugggagcugc

SEQ ID NO: 3072693 - RNA, 22 nt, Human
gcccugguggcagugggagcug

SEQ ID NO: 3072694 - RNA, 21 nt, Human
gcccugguggcagugggagcu

SEQ ID NO: 3072695 - RNA, 20 nt, Human
gcccugguggcagugggagc

SEQ ID NO: 3072696 - RNA, 19 nt, Human
gcccugguggcagugggag

SEQ ID NO: 3072697 - RNA, 18 nt, Human
gcccugguggcaguggga

SEQ ID NO: 3072698 - RNA, 17 nt, Human
gcccugguggcaguggg

SEQ ID NO: 3072699 - RNA, 14 nt, Human
gcccugguggcagu

SEQ ID NO: 3072700 - RNA, 19 nt, Human
gcccuucucuccagccccu

SEQ ID NO: 3072701 - RNA, 21 nt, Human
gcccuucucuccagccccugg

SEQ ID NO: 3072702 - RNA, 22 nt, Human
gcccuucucuccagccccugga

SEQ ID NO: 3072703 - RNA, 18 nt, Human
gccgagauugcaccacug

SEQ ID NO: 3072704 - RNA, 17 nt, Human
gccgagauugcaccacu

SEQ ID NO: 3072705 - RNA, 19 nt, Human
gccgagaucacgccacugc

SEQ ID NO: 3072706 - RNA, 18 nt, Human
gccgagaucacgccacug

SEQ ID NO: 3072707 - RNA, 16 nt, Human
gccgagaucacgccac

SEQ ID NO: 3072708 - RNA, 11 nt, Human
ggccugugagc

SEQ ID NO: 3072709 - RNA, 14 nt, Human
ggccugggggcugg

SEQ ID NO: 3072710 - RNA, 20 nt, Human
ggccugggggcugggcagag

SEQ ID NO: 3072711 - RNA, 22 nt, Human
ggccugggggcugggcagagga

SEQ ID NO: 3072712 - RNA, 19 nt, Human
ggccuggccugagcuggga

SEQ ID NO: 3072713 - RNA, 18 nt, Human
ggcgcugccccuggcagc

SEQ ID NO: 3072714 - RNA, 19 nt, Human
ggcgcugccccuggcagcc

SEQ ID NO: 3072715 - RNA, 21 nt, Human
ggcgcugccccuggcagcccc

SEQ ID NO: 3072716 - RNA, 23 nt, Human
ggcgcugccccuggcagccccug

SEQ ID NO: 3072717 - RNA, 15 nt, Human
ggcuccaggcuccuu

SEQ ID NO: 3072718 - RNA, 11 nt, Human
ggcuccaggcu

SEQ ID NO: 3072719 - RNA, 18 nt, Human
ggcuccaggagcagccac

SEQ ID NO: 3072720 - RNA, 16 nt, Human
ggcuccaggcuccuuu

SEQ ID NO: 3072721 - RNA, 19 nt, Human
ggcuccaggagcagccaca

SEQ ID NO: 3072722 - RNA, 12 nt, Human
ggcuccaggagc

SEQ ID NO: 3072723 - RNA, 21 nt, Human
ggcucaaguccucuuuucuga

SEQ ID NO: 3072724 - RNA, 15 nt, Human
ggcucaaguccucuu

SEQ ID NO: 3072725 - RNA, 15 nt, Human
ggcuaugcauuugaa

SEQ ID NO: 3072726 - RNA, 23 nt, Human
ggcuagugugguguuuccuggca

SEQ ID NO: 3072727 - RNA, 15 nt, Human
ggcuaguugggcuuc

SEQ ID NO: 3072728 - RNA, 16 nt, Human
ggcuaguugggcuucc

SEQ ID NO: 3072729 - RNA, 14 nt, Human
ggcuaugcauuuga

SEQ ID NO: 3072730 - RNA, 22 nt, Human
ggcuaggaccccuccauguggg

SEQ ID NO: 3072731 - RNA, 16 nt, Human
ggcuaggaccccucca

SEQ ID NO: 3072732 - RNA, 16 nt, Human
ggcuagagguucaaag

SEQ ID NO: 3072733 - RNA, 17 nt, Human
ggcuagagguucaaaga

SEQ ID NO: 3072734 - RNA, 22 nt, Human
ggcuagagguucaaagauauuu

SEQ ID NO: 3072735 - RNA, 23 nt, Human
ggccuagcauacguacacauuuu

SEQ ID NO: 3072736 - RNA, 13 nt, Human
ggccucugcacuc

SEQ ID NO: 3072737 - RNA, 14 nt, Human
ggccucugcacucc

SEQ ID NO: 3072738 - RNA, 15 nt, Human
ggccucugcacuccc

SEQ ID NO: 3072739 - RNA, 20 nt, Human
ggccucugcggagcacacug

SEQ ID NO: 3072740 - RNA, 18 nt, Human
ggccucuuaugggcuggg

SEQ ID NO: 3072741 - RNA, 17 nt, Human
ggccucuuaugggcugg

SEQ ID NO: 3072742 - RNA, 13 nt, Human
ggcccugccuccu

SEQ ID NO: 3072743 - RNA, 14 nt, Human
ggcccugccuccuu

SEQ ID NO: 3072744 - RNA, 15 nt, Human
ggcccugccuccuuu

SEQ ID NO: 3072745 - RNA, 21 nt, Human
ggcccucugcccacucccugc

SEQ ID NO: 3072746 - RNA, 19 nt, Human
ggcccucugcccacucccu

SEQ ID NO: 3072747 - RNA, 20 nt, Human
ggcccucugcccacucccug

SEQ ID NO: 3072748 - RNA, 13 nt, Human
ggcccucugccca

SEQ ID NO: 3072749 - RNA, 15 nt, Human
ggcccucugcccacu

SEQ ID NO: 3072750 - RNA, 16 nt, Human
ggcccucugcccacuc

SEQ ID NO: 3072751 - RNA, 17 nt, Human
ggcccucugcccacucc

SEQ ID NO: 3072752 - RNA, 11 nt, Human
ggcccagagag

SEQ ID NO: 3072753 - RNA, 19 nt, Human
ggaugcagccucacagucc

SEQ ID NO: 3072754 - RNA, 19 nt, Human
ggauuacaagcgugagcca

SEQ ID NO: 3072755 - RNA, 15 nt, Human
ggaugcuuguacaua

SEQ ID NO: 3072756 - RNA, 17 nt, Human
ggaugcugcugccccug

SEQ ID NO: 3072757 - RNA, 12 nt, Human
ggauccuccagg

SEQ ID NO: 3072758 - RNA, 13 nt, Human
ggauccuccaggu

SEQ ID NO: 3072759 - RNA, 23 nt, Human
ggaugcacagaguuguuacauuu

SEQ ID NO: 3072760 - RNA, 21 nt, Human
ggaugauuggaggggggaggu

SEQ ID NO: 3072761 - RNA, 16 nt, Human
ggaugcagccucacag

SEQ ID NO: 3072762 - RNA, 17 nt, Human
ggaugcagccucacagu

SEQ ID NO: 3072763 - RNA, 22 nt, Human
ggaucccucauccucauaccca

SEQ ID NO: 3072764 - RNA, 13 nt, Human
ggaucccucaucc

SEQ ID NO: 3072765 - RNA, 17 nt, Human
ggaucccucauccucau

SEQ ID NO: 3072766 - RNA, 23 nt, Human
ggagugaguugauagcacagacc

SEQ ID NO: 3072767 - RNA, 21 nt, Human
ggagaugccaugagccgccca

SEQ ID NO: 3072768 - RNA, 12 nt, Human
ggagugcaguga

SEQ ID NO: 3072769 - RNA, 14 nt, Human
ggagugcagugagc

SEQ ID NO: 3072770 - RNA, 18 nt, Human
ggauacaaaagcauguga

SEQ ID NO: 3072771 - RNA, 17 nt, Human
ggauugcuacuguccua

SEQ ID NO: 3072772 - RNA, 17 nt, Human
ggcaacccccagccugc

SEQ ID NO: 3072773 - RNA, 16 nt, Human
ggcaacccccagccug

SEQ ID NO: 3072774 - RNA, 15 nt, Human
ggauuguaaaauggu

SEQ ID NO: 3072775 - RNA, 23 nt, Human
ggauuacaagcgugagccacugc

SEQ ID NO: 3072776 - RNA, 16 nt, Human
ggauucuuauggacaa

SEQ ID NO: 3072777 - RNA, 19 nt, Human
ggcaaucauggugcucaga

SEQ ID NO: 3072778 - RNA, 18 nt, Human
ggcaacccccagccugcu

SEQ ID NO: 3072779 - RNA, 23 nt, Human
ggcaaugcuggcuguuggcuggg

SEQ ID NO: 3072780 - RNA, 15 nt, Human
ggcaaugcuggcugu

SEQ ID NO: 3072781 - RNA, 14 nt, Human
ggcaaugcuggcug

SEQ ID NO: 3072782 - RNA, 22 nt, Human
ggcacccggccccugcugguuc

SEQ ID NO: 3072783 - RNA, 23 nt, Human
ggcacccaccaucaugucuggcu

SEQ ID NO: 3072784 - RNA, 20 nt, Human
ggcacccaccaucaugucug

SEQ ID NO: 3072785 - RNA, 13 nt, Human
ggcagcucagaga

SEQ ID NO: 3072786 - RNA, 21 nt, Human
ggcagcucagagaggguggga

SEQ ID NO: 3072787 - RNA, 17 nt, Human
ggcagcuugaggguugg

SEQ ID NO: 3072788 - RNA, 22 nt, Human
ggcagcugcuuuugucuauggg

SEQ ID NO: 3072789 - RNA, 12 nt, Human
ggcagcucaccu

SEQ ID NO: 3072790 - RNA, 14 nt, Human
ggcagcucaccucu

SEQ ID NO: 3072791 - RNA, 16 nt, Human
ggcagugggagcugcc

SEQ ID NO: 3072792 - RNA, 14 nt, Human
ggcagugggagcug

SEQ ID NO: 3072793 - RNA, 13 nt, Human
ggcagugggagcu

SEQ ID NO: 3072794 - RNA, 20 nt, Human
ggcagggucucacucugucg

SEQ ID NO: 3072795 - RNA, 19 nt, Human
ggcagggucucacucuguc

SEQ ID NO: 3072796 - RNA, 18 nt, Human
ggcaugacacgaauauug

SEQ ID NO: 3072797 - RNA, 15 nt, Human
ggcaugaagacagau

SEQ ID NO: 3072798 - RNA, 16 nt, Human
ggccaugggccuccug

SEQ ID NO: 3072799 - RNA, 23 nt, Human
ggccagcugcuugggcuucaucc

SEQ ID NO: 3072800 - RNA, 18 nt, Human
ggccaggcccucugccca

SEQ ID NO: 3072801 - RNA, 22 nt, Human
ggccagccuugaccauucucca

SEQ ID NO: 3072802 - RNA, 17 nt, Human
ggccagcugcuugggcu

SEQ ID NO: 3072803 - RNA, 20 nt, Human
ggccagccuugaccauucuc

SEQ ID NO: 3072804 - RNA, 22 nt, Human
ggcaugggaaugaaugucagug

SEQ ID NO: 3072805 - RNA, 17 nt, Human
ggcauuccccaggaggc

SEQ ID NO: 3072806 - RNA, 18 nt, Human
ggcaugggaaugaauguc

SEQ ID NO: 3072807 - RNA, 14 nt, Human
ggcauggcugggaa

SEQ ID NO: 3072808 - RNA, 18 nt, Human
ggcauuccccaggaggcc

SEQ ID NO: 3072809 - RNA, 19 nt, Human
ggcauuccccaggaggcca

SEQ ID NO: 3072810 - RNA, 16 nt, Human
ggcauuccccaggagg

SEQ ID NO: 3072811 - RNA, 16 nt, Human
ggccaccgccuugccc

SEQ ID NO: 3072812 - RNA, 17 nt, Human
ggagaagcggcuggcag

SEQ ID NO: 3072813 - RNA, 18 nt, Human
ggagaagcggcuggcagc

SEQ ID NO: 3072814 - RNA, 15 nt, Human
ggagaaucacuugaa

SEQ ID NO: 3072815 - RNA, 19 nt, Human
ggagaaucacuugaacccg

SEQ ID NO: 3072816 - RNA, 13 nt, Human
ggacgcucucugg

SEQ ID NO: 3072817 - RNA, 14 nt, Human
ggacgcucucuggc

SEQ ID NO: 3072818 - RNA, 20 nt, Human
ggacauugcggacagccacg

SEQ ID NO: 3072819 - RNA, 14 nt, Human
ggacauggacaagg

SEQ ID NO: 3072820 - RNA, 21 nt, Human
ggacagccacggccaggccag

SEQ ID NO: 3072821 - RNA, 20 nt, Human
ggacagccacggccaggcca

SEQ ID NO: 3072822 - RNA, 19 nt, Human
ggacagccacggccaggcc

SEQ ID NO: 3072823 - RNA, 15 nt, Human
ggacagccacggcca

SEQ ID NO: 3072824 - RNA, 17 nt, Human
ggacacucaaaagcugg

SEQ ID NO: 3072825 - RNA, 19 nt, Human
ggacgcuacccgggaaggg

SEQ ID NO: 3072826 - RNA, 20 nt, Human
ggacgcuacccgggaagggg

SEQ ID NO: 3072827 - RNA, 17 nt, Human
ggacgcuacccgggaag

SEQ ID NO: 3072828 - RNA, 17 nt, Human
ggaccuugaacugggua

SEQ ID NO: 3072829 - RNA, 15 nt, Human
ggaccuugaacuggg

SEQ ID NO: 3072830 - RNA, 19 nt, Human
ggaccucaggugagaagca

SEQ ID NO: 3072831 - RNA, 20 nt, Human
ggaccucaggccugggggcu

SEQ ID NO: 3072832 - RNA, 23 nt, Human
ggaccucaggugagaagcagagg

SEQ ID NO: 3072833 - RNA, 13 nt, Human
ggaccagagcugc

SEQ ID NO: 3072834 - RNA, 12 nt, Human
ggaauuguguuu

SEQ ID NO: 3072835 - RNA, 16 nt, Human
ggaauuggagcucgug

SEQ ID NO: 3072836 - RNA, 22 nt, Human
ggaauuggagcucgugggacag

SEQ ID NO: 3072837 - RNA, 23 nt, Human
ggaauuucucccagucauuuaau

SEQ ID NO: 3072838 - RNA, 19 nt, Human
ggaauuuucaucuaggauu

SEQ ID NO: 3072839 - RNA, 16 nt, Human
ggacaaaauggaauac

SEQ ID NO: 3072840 - RNA, 17 nt, Human
ggacaaaauggaauacu

SEQ ID NO: 3072841 - RNA, 14 nt, Human
ggaaugcuguguua

SEQ ID NO: 3072842 - RNA, 24 nt, Human
ggaaugauuaauuaaaacacaaca

SEQ ID NO: 3072843 - RNA, 12 nt, Human
ggaaugcagugg

SEQ ID NO: 3072844 - RNA, 19 nt, Human
ggaauguuugccucugccu

SEQ ID NO: 3072845 - RNA, 18 nt, Human
ggaagugcuaauuuugaa

SEQ ID NO: 3072846 - RNA, 14 nt, Human
ggaaugauuaauua

SEQ ID NO: 3072847 - RNA, 20 nt, Human
ggaagugacgguuuaauggg

SEQ ID NO: 3072848 - RNA, 12 nt, Human
ggaaguacugga

SEQ ID NO: 3072849 - RNA, 16 nt, Human
ggaaguacuggagaaa

SEQ ID NO: 3072850 - RNA, 18 nt, Human
ggaaguacuggagaaaau

SEQ ID NO: 3072851 - RNA, 23 nt, Human
ggaaggggagauaaggguaucug

SEQ ID NO: 3072852 - RNA, 18 nt, Human
gcuucaguggcagcugcu

SEQ ID NO: 3072853 - RNA, 17 nt, Human
gcuucaguggcagcugc

SEQ ID NO: 3072854 - RNA, 12 nt, Human
gcuucauccucc

SEQ ID NO: 3072855 - RNA, 15 nt, Human
gcuucauccuccuca

SEQ ID NO: 3072856 - RNA, 16 nt, Human
gcuucauuuccugugu

SEQ ID NO: 3072857 - RNA, 13 nt, Human
gcuucauuuccug

SEQ ID NO: 3072858 - RNA, 12 nt, Human
gcuuauacacuu

SEQ ID NO: 3072859 - RNA, 13 nt, Human
gcuuaucucaggg

SEQ ID NO: 3072860 - RNA, 19 nt, Human
gcuuaucucaggggugugc

SEQ ID NO: 3072861 - RNA, 15 nt, Human
gcuucaguggcagcu

SEQ ID NO: 3072862 - RNA, 16 nt, Human
gcuucaguggcagcug

SEQ ID NO: 3072863 - RNA, 16 nt, Human
gcuuccagugaggcuc

SEQ ID NO: 3072864 - RNA, 17 nt, Human
gcuucauuuccuguguc

SEQ ID NO: 3072865 - RNA, 15 nt, Human
gcuuccagugaggcu

SEQ ID NO: 3072866 - RNA, 16 nt, Human
gcuugaggguugggcu

SEQ ID NO: 3072867 - RNA, 22 nt, Human
gcuucucccccacccccuaggg

SEQ ID NO: 3072868 - RNA, 21 nt, Human
gcuuagucacugagacagccc

SEQ ID NO: 3072869 - RNA, 19 nt, Human
gcuuagucacugagacagc

SEQ ID NO: 3072870 - RNA, 20 nt, Human
gcuuagucacugagacagcc

SEQ ID NO: 3072871 - RNA, 15 nt, Human
gcuuagucacugaga

SEQ ID NO: 3072872 - RNA, 17 nt, Human
gcuuagucacugagaca

SEQ ID NO: 3072873 - RNA, 14 nt, Human
gcuguucagcuggu

SEQ ID NO: 3072874 - RNA, 13 nt, Human
gcuguucagcugg

SEQ ID NO: 3072875 - RNA, 12 nt, Human
gcuguucaugaa

SEQ ID NO: 3072876 - RNA, 21 nt, Human
gcuguucaugaaagauucaau

SEQ ID NO: 3072877 - RNA, 20 nt, Human
gcugucuacacuaagagaga

SEQ ID NO: 3072878 - RNA, 16 nt, Human
gcugccaaugggagcu

SEQ ID NO: 3072879 - RNA, 19 nt, Human
gcugccaaugggagcucau

SEQ ID NO: 3072880 - RNA, 15 nt, Human
gcugccaaugggagc

SEQ ID NO: 3072881 - RNA, 16 nt, Human
ggaacaggaaacugau

SEQ ID NO: 3072882 - RNA, 14 nt, Human
ggaaaucaccgaaa

SEQ ID NO: 3072883 - RNA, 17 nt, Human
ggaaaucaaauaugcaa

SEQ ID NO: 3072884 - RNA, 21 nt, Human
ggaaaucaccgaaaacguggc

SEQ ID NO: 3072885 - RNA, 16 nt, Human
ggaaaucaaauaugca

SEQ ID NO: 3072886 - RNA, 23 nt, Human
ggaaaaucagccugcuccagcug

SEQ ID NO: 3072887 - RNA, 19 nt, Human
ggaaaaucagccugcucca

SEQ ID NO: 3072888 - RNA, 13 nt, Human
ggaaaggcuccag

SEQ ID NO: 3072889 - RNA, 14 nt, Human
ggaaaggcuccagg

SEQ ID NO: 3072890 - RNA, 12 nt, Human
ggaaaggcucca

SEQ ID NO: 3072891 - RNA, 17 nt, Human
ggaaaggcuccaggagc

SEQ ID NO: 3072892 - RNA, 19 nt, Human
ggaaaggcuccaggagcag

SEQ ID NO: 3072893 - RNA, 20 nt, Human
ggaaaggcuccaggagcagc

SEQ ID NO: 3072894 - RNA, 21 nt, Human
ggaaaggcuccaggagcagcc

SEQ ID NO: 3072895 - RNA, 22 nt, Human
ggaaaggcuccaggagcagcca

SEQ ID NO: 3072896 - RNA, 23 nt, Human
ggaaagggauuuucagcccucag

SEQ ID NO: 3072897 - RNA, 14 nt, Human
ggaaaagcugcuga

SEQ ID NO: 3072898 - RNA, 20 nt, Human
ggaaaagcugcugacagugu

SEQ ID NO: 3072899 - RNA, 18 nt, Human
ggaaaagcugcugacagu

SEQ ID NO: 3072900 - RNA, 18 nt, Human
ggaaaacaugcuacacac

SEQ ID NO: 3072901 - RNA, 21 nt, Human
gcuuuguuuguugucagcuga

SEQ ID NO: 3072902 - RNA, 15 nt, Human
gcuuugugauuuuug

SEQ ID NO: 3072903 - RNA, 20 nt, Human
gcuugaggguugggcuggug

SEQ ID NO: 3072904 - RNA, 18 nt, Human
gcuugaggguugggcugg

SEQ ID NO: 3072905 - RNA, 21 nt, Human
gauucaaugccccugaauuua

SEQ ID NO: 3072906 - RNA, 19 nt, Human
gauucaaugccccugaauu

SEQ ID NO: 3072907 - RNA, 20 nt, Human
gauucaaugccccugaauuu

SEQ ID NO: 3072908 - RNA, 14 nt, Human
gauuuaacagaaau

SEQ ID NO: 3072909 - RNA, 13 nt, Human
gauuuaacagaaa

SEQ ID NO: 3072910 - RNA, 12 nt, Human
gauuuaaaucag

SEQ ID NO: 3072911 - RNA, 22 nt, Human
gauuuccguuaaaauaccagcc

SEQ ID NO: 3072912 - RNA, 15 nt, Human
gauuuaacagaaaug

SEQ ID NO: 3072913 - RNA, 18 nt, Human
gauuuccguuaaaauacc

SEQ ID NO: 3072914 - RNA, 23 nt, Human
gcaaaugugaaucauuuuaccuu

SEQ ID NO: 3072915 - RNA, 16 nt, Human
gcaaauugucacagga

SEQ ID NO: 3072916 - RNA, 21 nt, Human
gcaaagcugaugacaacuucc

SEQ ID NO: 3072917 - RNA, 12 nt, Human
gcaaaccaucau

SEQ ID NO: 3072918 - RNA, 21 nt, Human
gauuuugaaauuuuuauuaaa

SEQ ID NO: 3072919 - RNA, 19 nt, Human
gauuuugauccaagcuggu

SEQ ID NO: 3072920 - RNA, 16 nt, Human
gauguuuaguaaucau

SEQ ID NO: 3072921 - RNA, 19 nt, Human
gauguugaaaaaguucugc

SEQ ID NO: 3072922 - RNA, 23 nt, Human
gauuacaagcgugagccacugca

SEQ ID NO: 3072923 - RNA, 15 nt, Human
gauuaaacuuaaucu

SEQ ID NO: 3072924 - RNA, 22 nt, Human
gauuacaagcgugagccacugc

SEQ ID NO: 3072925 - RNA, 17 nt, Human
gauggugcaaugaccuu

SEQ ID NO: 3072926 - RNA, 15 nt, Human
gauggugcaaugacc

SEQ ID NO: 3072927 - RNA, 16 nt, Human
gauggugcaaugaccu

SEQ ID NO: 3072928 - RNA, 12 nt, Human
gauggugcaaug

SEQ ID NO: 3072929 - RNA, 14 nt, Human
gauggugcaaugac

SEQ ID NO: 3072930 - RNA, 19 nt, Human
gaugggugcuuggaggaag

SEQ ID NO: 3072931 - RNA, 15 nt, Human
gauggggcugcaccg

SEQ ID NO: 3072932 - RNA, 13 nt, Human
gauggggcugcac

SEQ ID NO: 3072933 - RNA, 24 nt, Human
gauggggcccugccuccuuuguga

SEQ ID NO: 3072934 - RNA, 21 nt, Human
gaugggcaacccccagccugc

SEQ ID NO: 3072935 - RNA, 20 nt, Human
gaugggcaacccccagccug

SEQ ID NO: 3072936 - RNA, 22 nt, Human
gauggccgggcgcgguggcuca

SEQ ID NO: 3072937 - RNA, 20 nt, Human
gaugcccaaagaugcagccg

SEQ ID NO: 3072938 - RNA, 22 nt, Human
gaugccaugagccgcccaaggc

SEQ ID NO: 3072939 - RNA, 19 nt, Human
gaugcccaaagaugcagcc

SEQ ID NO: 3072940 - RNA, 18 nt, Human
gaugcuagaacucccuuu

SEQ ID NO: 3072941 - RNA, 20 nt, Human
gaugcuagaacucccuuuca

SEQ ID NO: 3072942 - RNA, 14 nt, Human
gcaaugugauaaaa

SEQ ID NO: 3072943 - RNA, 14 nt, Human
gcaacucaucuuag

SEQ ID NO: 3072944 - RNA, 15 nt, Human
gcaauggcagccuug

SEQ ID NO: 3072945 - RNA, 13 nt, Human
gcaacucugaagg

SEQ ID NO: 3072946 - RNA, 14 nt, Human
gcaauuucauaugc

SEQ ID NO: 3072947 - RNA, 14 nt, Human
gcacaaacagaggc

SEQ ID NO: 3072948 - RNA, 15 nt, Human
gcacaaacagaggcc

SEQ ID NO: 3072949 - RNA, 16 nt, Human
gcacaaacagaggccg

SEQ ID NO: 3072950 - RNA, 23 nt, Human
gcacaaauucugucucuggauua

SEQ ID NO: 3072951 - RNA, 18 nt, Human
gcacaagcuccaagcucc

SEQ ID NO: 3072952 - RNA, 15 nt, Human
gcacaagcuccaagc

SEQ ID NO: 3072953 - RNA, 17 nt, Human
gcacaagcuccaagcuc

SEQ ID NO: 3072954 - RNA, 20 nt, Human
gcacaccgggcacucagaag

SEQ ID NO: 3072955 - RNA, 13 nt, Human
gcacacuggcuca

SEQ ID NO: 3072956 - RNA, 20 nt, Human
gcacagaaaauggaagacag

SEQ ID NO: 3072957 - RNA, 18 nt, Human
gcacacuuuggcccaggg

SEQ ID NO: 3072958 - RNA, 16 nt, Human
gcacacuuuggcccag

SEQ ID NO: 3072959 - RNA, 13 nt, Human
gcacacugucugc

SEQ ID NO: 3072960 - RNA, 19 nt, Human
gcacacuggcucacccagu

SEQ ID NO: 3072961 - RNA, 22 nt, Human
gcacacuggcucacccaguccu

SEQ ID NO: 3072962 - RNA, 22 nt, Human
gcacagacccugcccugugggc

SEQ ID NO: 3072963 - RNA, 15 nt, Human
gcacagaguuguuac

SEQ ID NO: 3072964 - RNA, 18 nt, Human
gcacagacccugcccugu

SEQ ID NO: 3072965 - RNA, 19 nt, Human
gcacagacccugcccugug

SEQ ID NO: 3072966 - RNA, 20 nt, Human
gcacagacccugcccugugg

SEQ ID NO: 3072967 - RNA, 21 nt, Human
gcacagacccugcccuguggg

SEQ ID NO: 3072968 - RNA, 14 nt, Human
gcacagacccugcc

SEQ ID NO: 3072969 - RNA, 15 nt, Human
gcacagacccugccc

SEQ ID NO: 3072970 - RNA, 16 nt, Human
gcacagacccugcccu

SEQ ID NO: 3072971 - RNA, 17 nt, Human
gcacagacccugcccug

SEQ ID NO: 3072972 - RNA, 21 nt, Human
gcacagaaaauggaagacagc

SEQ ID NO: 3072973 - RNA, 22 nt, Human
gcacagaaaauggaagacagcu

SEQ ID NO: 3072974 - RNA, 23 nt, Human
gcacagaaaauggaagacagcuc

SEQ ID NO: 3072975 - RNA, 22 nt, Human
gcaccccagcuggggccaggcu

SEQ ID NO: 3072976 - RNA, 12 nt, Human
gcaccauaacuu

SEQ ID NO: 3072977 - RNA, 20 nt, Human
gcaccuuagacagucccugc

SEQ ID NO: 3072978 - RNA, 21 nt, Human
gcaccuuagacagucccugcc

SEQ ID NO: 3072979 - RNA, 15 nt, Human
gcacgauuucuguuu

SEQ ID NO: 3072980 - RNA, 13 nt, Human
gcacgauuucugu

SEQ ID NO: 3072981 - RNA, 19 nt, Human
gcaccuuagacagucccug

SEQ ID NO: 3072982 - RNA, 21 nt, Human
gcacagaguuguuacauuuuu

SEQ ID NO: 3072983 - RNA, 19 nt, Human
gcacagaguuguuacauuu

SEQ ID NO: 3072984 - RNA, 18 nt, Human
gcacagaguuguuacauu

SEQ ID NO: 3072985 - RNA, 16 nt, Human
gcacagaguuguuaca

SEQ ID NO: 3072986 - RNA, 22 nt, Human
gcacagaguuguuacauuuuua

SEQ ID NO: 3072987 - RNA, 19 nt, Human
gcacuggcaaacagggccu

SEQ ID NO: 3072988 - RNA, 20 nt, Human
gcacuggcaaacagggccuc

SEQ ID NO: 3072989 - RNA, 22 nt, Human
gcacuggcaaacagggccucug

SEQ ID NO: 3072990 - RNA, 23 nt, Human
gcacuggcaaacagggccucugc

SEQ ID NO: 3072991 - RNA, 23 nt, Human
gcacugcuuccagugaggcucug

SEQ ID NO: 3072992 - RNA, 22 nt, Human
gcacugcuuccagugaggcucu

SEQ ID NO: 3072993 - RNA, 17 nt, Human
gcacuggcaaacagggc

SEQ ID NO: 3072994 - RNA, 16 nt, Human
gcacgauuucuguuua

SEQ ID NO: 3072995 - RNA, 15 nt, Human
gcacugacuucuaag

SEQ ID NO: 3072996 - RNA, 18 nt, Human
gcacugacuucuaaguaa

SEQ ID NO: 3072997 - RNA, 18 nt, Human
gcagacaggaccagggau

SEQ ID NO: 3072998 - RNA, 12 nt, Human
gcagacaggcaa

SEQ ID NO: 3072999 - RNA, 14 nt, Human
gcagacaggcaagc

SEQ ID NO: 3073000 - RNA, 13 nt, Human
gcagacaggcaag

SEQ ID NO: 3073001 - RNA, 18 nt, Human
gcagaaggaagacuucau

SEQ ID NO: 3073002 - RNA, 15 nt, Human
gagggggccuggaug

SEQ ID NO: 3073003 - RNA, 15 nt, Human
gagggggcugcuccc

SEQ ID NO: 3073004 - RNA, 17 nt, Human
gaggggguggccuccca

SEQ ID NO: 3073005 - RNA, 13 nt, Human
gaggguaaggcug

SEQ ID NO: 3073006 - RNA, 19 nt, Human
gagggagggcuccagacac

SEQ ID NO: 3073007 - RNA, 20 nt, Human
gaggcugggcucccuuccca

SEQ ID NO: 3073008 - RNA, 20 nt, Human
gagggagggcuccagacaca

SEQ ID NO: 3073009 - RNA, 16 nt, Human
gagggagggcuccaga

SEQ ID NO: 3073010 - RNA, 16 nt, Human
gagggagugacagagg

SEQ ID NO: 3073011 - RNA, 18 nt, Human
gagggagugacagaggca

SEQ ID NO: 3073012 - RNA, 22 nt, Human
gagggagugacagaggcagccc

SEQ ID NO: 3073013 - RNA, 21 nt, Human
gagggagugacagaggcagcc

SEQ ID NO: 3073014 - RNA, 14 nt, Human
gagggucugaggaa

SEQ ID NO: 3073015 - RNA, 13 nt, Human
gagggucugagga

SEQ ID NO: 3073016 - RNA, 22 nt, Human
gagggugucccaaaaagaaagg

SEQ ID NO: 3073017 - RNA, 21 nt, Human
gaggguggugaccucugccug

SEQ ID NO: 3073018 - RNA, 15 nt, Human
gagggugggaguggg

SEQ ID NO: 3073019 - RNA, 14 nt, Human
gaggguggugaccu

SEQ ID NO: 3073020 - RNA, 21 nt, Human
gagggugaagugaagacaaug

SEQ ID NO: 3073021 - RNA, 12 nt, Human
gaggguggaaua

SEQ ID NO: 3073022 - RNA, 17 nt, Human
gaggucaaggcugcagu

SEQ ID NO: 3073023 - RNA, 13 nt, Human
gaggucagagccu

SEQ ID NO: 3073024 - RNA, 12 nt, Human
gaggucagagcc

SEQ ID NO: 3073025 - RNA, 14 nt, Human
gaggguugggcugg

SEQ ID NO: 3073026 - RNA, 15 nt, Human
gaggguugggcuggu

SEQ ID NO: 3073027 - RNA, 21 nt, Human
gagguaaggaauaccuguccc

SEQ ID NO: 3073028 - RNA, 24 nt, Human
gagguaaggaauaccugucccccu

SEQ ID NO: 3073029 - RNA, 16 nt, Human
gaggccuucucugaag

SEQ ID NO: 3073030 - RNA, 19 nt, Human
gaggccuucucugaaggac

SEQ ID NO: 3073031 - RNA, 18 nt, Human
gaggccuucucugaagga

SEQ ID NO: 3073032 - RNA, 21 nt, Human
gaggcgcaugaauuugugaag

SEQ ID NO: 3073033 - RNA, 14 nt, Human
gaggcugccucucc

SEQ ID NO: 3073034 - RNA, 16 nt, Human
gaggcugggcucccuu

SEQ ID NO: 3073035 - RNA, 11 nt, Human
gaggcccagag

SEQ ID NO: 3073036 - RNA, 13 nt, Human
gaggcccagaggg

SEQ ID NO: 3073037 - RNA, 14 nt, Human
gaggcccagagggc

SEQ ID NO: 3073038 - RNA, 19 nt, Human
gaggcccagagggccugca

SEQ ID NO: 3073039 - RNA, 15 nt, Human
gaggcccagagggcc

SEQ ID NO: 3073040 - RNA, 16 nt, Human
gaggcccagagggccu

SEQ ID NO: 3073041 - RNA, 21 nt, Human
gaggcccuucucuccagcccc

SEQ ID NO: 3073042 - RNA, 15 nt, Human
gaggcccuucucucc

SEQ ID NO: 3073043 - RNA, 20 nt, Human
gaggcccuucucuccagccc

SEQ ID NO: 3073044 - RNA, 14 nt, Human
gaggcccuucucuc

SEQ ID NO: 3073045 - RNA, 9 nt, Human
gaggcaggg

SEQ ID NO: 3073046 - RNA, 20 nt, Human
gaggcagccccauucugccu

SEQ ID NO: 3073047 - RNA, 18 nt, Human
gaggcagccccauucugc

SEQ ID NO: 3073048 - RNA, 19 nt, Human
gaggcagccccauucugcc

SEQ ID NO: 3073049 - RNA, 23 nt, Human
gaggccaugggccuccugugugu

SEQ ID NO: 3073050 - RNA, 21 nt, Human
gaggccaugggccuccugugu

SEQ ID NO: 3073051 - RNA, 20 nt, Human
gaggccaugggccuccugug

SEQ ID NO: 3073052 - RNA, 18 nt, Human
gaggccaugggccuccug

SEQ ID NO: 3073053 - RNA, 17 nt, Human
gaggccaugggccuccu

SEQ ID NO: 3073054 - RNA, 14 nt, Human
gaggccaugggccu

SEQ ID NO: 3073055 - RNA, 20 nt, Human
gaggauugcuugagcucagg

SEQ ID NO: 3073056 - RNA, 16 nt, Human
gaggaucucuugagcc

SEQ ID NO: 3073057 - RNA, 19 nt, Human
gaggaucucuugagccugg

SEQ ID NO: 3073058 - RNA, 22 nt, Human
gaggaucucuugagccugggag

SEQ ID NO: 3073059 - RNA, 13 nt, Human
gaggaucucuuga

SEQ ID NO: 3073060 - RNA, 12 nt, Human
gagcccugucuc

SEQ ID NO: 3073061 - RNA, 18 nt, Human
gaguguacuuaacuauuc

SEQ ID NO: 3073062 - RNA, 17 nt, Human
gagugacagaggcagcc

SEQ ID NO: 3073063 - RNA, 23 nt, Human
gagugggggaucacagccucuga

SEQ ID NO: 3073064 - RNA, 13 nt, Human
gagugggugaaua

SEQ ID NO: 3073065 - RNA, 20 nt, Human
gagugugccugaagucccag

SEQ ID NO: 3073066 - RNA, 12 nt, Human
gaguuacagaca

SEQ ID NO: 3073067 - RNA, 13 nt, Human
gaguuacagacaa

SEQ ID NO: 3073068 - RNA, 15 nt, Human
gaguuacagacaaag

SEQ ID NO: 3073069 - RNA, 19 nt, Human
gaguucaucuugaauugua

SEQ ID NO: 3073070 - RNA, 14 nt, Human
gaguucaucuugaa

SEQ ID NO: 3073071 - RNA, 20 nt, Human
gaguucauacccuguuacca

SEQ ID NO: 3073072 - RNA, 15 nt, Human
gaguugaagacagag

SEQ ID NO: 3073073 - RNA, 17 nt, Human
gaguugaagacagagcu

SEQ ID NO: 3073074 - RNA, 21 nt, Human
gaguugaagacagagcuacac

SEQ ID NO: 3073075 - RNA, 14 nt, Human
gaguugaagacaga

SEQ ID NO: 3073076 - RNA, 19 nt, Human
gauacaggaaaagcugcug

SEQ ID NO: 3073077 - RNA, 23 nt, Human
gauacaggaaaagcugcugacag

SEQ ID NO: 3073078 - RNA, 21 nt, Human
gauacaggaaaagcugcugac

SEQ ID NO: 3073079 - RNA, 22 nt, Human
gauaagaaccuuuugagugccu

SEQ ID NO: 3073080 - RNA, 20 nt, Human
gauacaggaaaagcugcuga

SEQ ID NO: 3073081 - RNA, 22 nt, Human
gauagccaaggccaaaggaagc

SEQ ID NO: 3073082 - RNA, 14 nt, Human
gauagccaaggcca

SEQ ID NO: 3073083 - RNA, 15 nt, Human
gauagcacagacccu

SEQ ID NO: 3073084 - RNA, 15 nt, Human
gauauaagugugugu

SEQ ID NO: 3073085 - RNA, 24 nt, Human
gauaugauucaaaugucuauaaac

SEQ ID NO: 3073086 - RNA, 14 nt, Human
gauaugauucaaau

SEQ ID NO: 3073087 - RNA, 22 nt, Human
gauaugauucaaaugucuauaa

SEQ ID NO: 3073088 - RNA, 16 nt, Human
gaucacggcucacugc

SEQ ID NO: 3073089 - RNA, 15 nt, Human
gaucacggcucacug

SEQ ID NO: 3073090 - RNA, 18 nt, Human
gaucacggcucacugcag

SEQ ID NO: 3073091 - RNA, 22 nt, Human
gaguaauccaagcaaaugugaa

SEQ ID NO: 3073092 - RNA, 20 nt, Human
gaguacuacaguccucccau

SEQ ID NO: 3073093 - RNA, 21 nt, Human
gaguacuacaguccucccauc

SEQ ID NO: 3073094 - RNA, 23 nt, Human
gaguacuacaguccucccaucuc

SEQ ID NO: 3073095 - RNA, 13 nt, Human
gaguaggaagacu

SEQ ID NO: 3073096 - RNA, 17 nt, Human
gaguaggaagacuuugg

SEQ ID NO: 3073097 - RNA, 12 nt, Human
gaguaggaagac

SEQ ID NO: 3073098 - RNA, 22 nt, Human
gaguagcugggacuacaggcac

SEQ ID NO: 3073099 - RNA, 19 nt, Human
gaguagcugggacuacagg

SEQ ID NO: 3073100 - RNA, 16 nt, Human
gagguuucaaaccucc

SEQ ID NO: 3073101 - RNA, 15 nt, Human
gagguugggaggcca

SEQ ID NO: 3073102 - RNA, 17 nt, Human
gagguugggaggccauu

SEQ ID NO: 3073103 - RNA, 20 nt, Human
gaggucagagccugcaguua

SEQ ID NO: 3073104 - RNA, 17 nt, Human
gaggucagagccugcag

SEQ ID NO: 3073105 - RNA, 11 nt, Human
gaguauauguc

SEQ ID NO: 3073106 - RNA, 18 nt, Human
gaguaggaagacuuugga

SEQ ID NO: 3073107 - RNA, 19 nt, Human
gaguaggaagacuuuggaa

SEQ ID NO: 3073108 - RNA, 14 nt, Human
gagucgaggacagg

SEQ ID NO: 3073109 - RNA, 19 nt, Human
gaguccgaaagggacuugg

SEQ ID NO: 3073110 - RNA, 15 nt, Human
gagucgaggacaggg

SEQ ID NO: 3073111 - RNA, 17 nt, Human
gagugaagcugggagaa

SEQ ID NO: 3073112 - RNA, 23 nt, Human
gagugaacaaauuuacagagaca

SEQ ID NO: 3073113 - RNA, 16 nt, Human
gagugacagaggcagc

SEQ ID NO: 3073114 - RNA, 15 nt, Human
gagugacagaggcag

SEQ ID NO: 3073115 - RNA, 14 nt, Human
gagugacagaggca

SEQ ID NO: 3073116 - RNA, 12 nt, Human
gagucugaaggc

SEQ ID NO: 3073117 - RNA, 13 nt, Human
gagucugaaggcu

SEQ ID NO: 3073118 - RNA, 21 nt, Human
gagucuauuuacggaacucaa

SEQ ID NO: 3073119 - RNA, 14 nt, Human
gagucugaaggcug

SEQ ID NO: 3073120 - RNA, 14 nt, Human
gaauguuaagcaga

SEQ ID NO: 3073121 - RNA, 13 nt, Human
gaaugucagugug

SEQ ID NO: 3073122 - RNA, 15 nt, Human
gaauguuaagcagau

SEQ ID NO: 3073123 - RNA, 18 nt, Human
gaauucuugaaggaaaau

SEQ ID NO: 3073124 - RNA, 14 nt, Human
gaauugaagcagga

SEQ ID NO: 3073125 - RNA, 16 nt, Human
gaauugacccacaaga

SEQ ID NO: 3073126 - RNA, 21 nt, Human
gaauugacccacaagaaauga

SEQ ID NO: 3073127 - RNA, 16 nt, Human
gaauuggagcucgugg

SEQ ID NO: 3073128 - RNA, 18 nt, Human
gaaucucauaauuuauac

SEQ ID NO: 3073129 - RNA, 20 nt, Human
gaauccagacccggcugcgu

SEQ ID NO: 3073130 - RNA, 18 nt, Human
gaauccagacccggcugc

SEQ ID NO: 3073131 - RNA, 19 nt, Human
gaaucucauaauuuauaca

SEQ ID NO: 3073132 - RNA, 21 nt, Human
gaaugaaagggcccagagagg

SEQ ID NO: 3073133 - RNA, 20 nt, Human
gaaugcacaaacagaggccg

SEQ ID NO: 3073134 - RNA, 14 nt, Human
gaaugcuguguuaa

SEQ ID NO: 3073135 - RNA, 13 nt, Human
gaaugcuguguua

SEQ ID NO: 3073136 - RNA, 21 nt, Human
gaaugcacaaacagaggccgc

SEQ ID NO: 3073137 - RNA, 15 nt, Human
gaauuguaaggaaug

SEQ ID NO: 3073138 - RNA, 19 nt, Human
gaauuucuaggacugaauu

SEQ ID NO: 3073139 - RNA, 20 nt, Human
gaauuucuaggacugaauua

SEQ ID NO: 3073140 - RNA, 22 nt, Human
gaauuucuuuugccguuauuaa

SEQ ID NO: 3073141 - RNA, 20 nt, Human
gaauuugauaugugaacagu

SEQ ID NO: 3073142 - RNA, 22 nt, Human
gacaacacucauugaccugagg

SEQ ID NO: 3073143 - RNA, 23 nt, Human
gacaacacucauugaccugaggc

SEQ ID NO: 3073144 - RNA, 15 nt, Human
gacaagcucacagac

SEQ ID NO: 3073145 - RNA, 16 nt, Human
gacaaggaaaaaauaa

SEQ ID NO: 3073146 - RNA, 19 nt, Human
gacaaggauugcuacuguc

SEQ ID NO: 3073147 - RNA, 21 nt, Human
gacaaggaugaucuaggaaga

SEQ ID NO: 3073148 - RNA, 18 nt, Human
gacaaggauugcuacugu

SEQ ID NO: 3073149 - RNA, 12 nt, Human
gacaaugugaaa

SEQ ID NO: 3073150 - RNA, 18 nt, Human
gacaaugugaaaagaaaa

SEQ ID NO: 3073151 - RNA, 22 nt, Human
gacaaugcaaaccaucauugaa

SEQ ID NO: 3073152 - RNA, 19 nt, Human
gacaaugugaaaagaaaaa

SEQ ID NO: 3073153 - RNA, 20 nt, Human
gacaaugugaaaagaaaaau

SEQ ID NO: 3073154 - RNA, 13 nt, Human
gacacaacuauuu

SEQ ID NO: 3073155 - RNA, 19 nt, Human
gacacaggcccggcuccag

SEQ ID NO: 3073156 - RNA, 16 nt, Human
gacacaagccuucggc

SEQ ID NO: 3073157 - RNA, 21 nt, Human
gacacaggcccggcuccaggc

SEQ ID NO: 3073158 - RNA, 20 nt, Human
gacacaggcccggcuccagg

SEQ ID NO: 3073159 - RNA, 14 nt, Human
gacacaugcaaggu

SEQ ID NO: 3073160 - RNA, 19 nt, Human
gacacaugcaaggucauuu

SEQ ID NO: 3073161 - RNA, 15 nt, Human
gacacauguccaaga

SEQ ID NO: 3073162 - RNA, 20 nt, Human
gacacauguccaagaagccc

SEQ ID NO: 3073163 - RNA, 23 nt, Human
gacacauguccaagaagcccagg

SEQ ID NO: 3073164 - RNA, 19 nt, Human
gaccauucuccaccugcca

SEQ ID NO: 3073165 - RNA, 20 nt, Human
gaccauucuccaccugccag

SEQ ID NO: 3073166 - RNA, 21 nt, Human
gaccauucuccaccugccagg

SEQ ID NO: 3073167 - RNA, 22 nt, Human
gaccauucuccaccugccaggg

SEQ ID NO: 3073168 - RNA, 17 nt, Human
gaccauucuccaccugc

SEQ ID NO: 3073169 - RNA, 17 nt, Human
gaccauuggggcuccca

SEQ ID NO: 3073170 - RNA, 19 nt, Human
gaccauuggggcucccagc

SEQ ID NO: 3073171 - RNA, 20 nt, Human
gaccauuggggcucccagcc

SEQ ID NO: 3073172 - RNA, 21 nt, Human
gaccauuggggcucccagcca

SEQ ID NO: 3073173 - RNA, 13 nt, Human
gaccagagcugcc

SEQ ID NO: 3073174 - RNA, 14 nt, Human
gaccagagcugcca

SEQ ID NO: 3073175 - RNA, 15 nt, Human
gaccagagcugccac

SEQ ID NO: 3073176 - RNA, 17 nt, Human
gaccagagcugccaccu

SEQ ID NO: 3073177 - RNA, 18 nt, Human
gaccagagcugccaccug

SEQ ID NO: 3073178 - RNA, 19 nt, Human
gaccagagcugccaccugc

SEQ ID NO: 3073179 - RNA, 14 nt, Human
gaccacguuucuaa

SEQ ID NO: 3073180 - RNA, 21 nt, Human
gaccacugcagaagacaguau

SEQ ID NO: 3073181 - RNA, 18 nt, Human
gaccacugcagaagacag

SEQ ID NO: 3073182 - RNA, 11 nt, Human
gaccagagcug

SEQ ID NO: 3073183 - RNA, 24 nt, Human
gaccagacaccuugacagggcaca

SEQ ID NO: 3073184 - RNA, 18 nt, Human
gacaugggaaaggggaag

SEQ ID NO: 3073185 - RNA, 16 nt, Human
gacaugggacauuugc

SEQ ID NO: 3073186 - RNA, 22 nt, Human
gacccugaggcccagagggccu

SEQ ID NO: 3073187 - RNA, 21 nt, Human
gaccccuccaugugggcuagu

SEQ ID NO: 3073188 - RNA, 18 nt, Human
gaccccuccaugugggcu

SEQ ID NO: 3073189 - RNA, 14 nt, Human
gaccccuccaugug

SEQ ID NO: 3073190 - RNA, 23 nt, Human
gacccugaggcccagagggccug

SEQ ID NO: 3073191 - RNA, 20 nt, Human
gacccaaaaggcagaagcaa

SEQ ID NO: 3073192 - RNA, 16 nt, Human
gacccaaaaggcagaa

SEQ ID NO: 3073193 - RNA, 15 nt, Human
gacccacaagaaaug

SEQ ID NO: 3073194 - RNA, 15 nt, Human
gaccgugaggccaga

SEQ ID NO: 3073195 - RNA, 18 nt, Human
gaccgugaggccagagac

SEQ ID NO: 3073196 - RNA, 16 nt, Human
gaccgugaggccagag

SEQ ID NO: 3073197 - RNA, 17 nt, Human
gaccgugaggccagaga

SEQ ID NO: 3073198 - RNA, 15 nt, Human
gacccuugugguccc

SEQ ID NO: 3073199 - RNA, 21 nt, Human
gacccuuguggucccacccca

SEQ ID NO: 3073200 - RNA, 19 nt, Human
gacccuuguggucccaccc

SEQ ID NO: 3073201 - RNA, 20 nt, Human
gacccuuguggucccacccc

SEQ ID NO: 3073202 - RNA, 12 nt, Human
gacccugucuca

SEQ ID NO: 3073203 - RNA, 21 nt, Human
gacagagcaagugagacccug

SEQ ID NO: 3073204 - RNA, 16 nt, Human
gacagaggcagcccca

SEQ ID NO: 3073205 - RNA, 14 nt, Human
gacagaggcagccc

SEQ ID NO: 3073206 - RNA, 12 nt, Human
gacagaggcagc

SEQ ID NO: 3073207 - RNA, 19 nt, Human
gacagagccccacccucag

SEQ ID NO: 3073208 - RNA, 21 nt, Human
gacagaggggguggccuccca

SEQ ID NO: 3073209 - RNA, 22 nt, Human
gacagaggggguggccucccaa

SEQ ID NO: 3073210 - RNA, 19 nt, Human
gacagagugagacucuguc

SEQ ID NO: 3073211 - RNA, 23 nt, Human
gacagaggggguggccucccaac

SEQ ID NO: 3073212 - RNA, 18 nt, Human
gacagaggggguggccuc

SEQ ID NO: 3073213 - RNA, 19 nt, Human
gacagaggggguggccucc

SEQ ID NO: 3073214 - RNA, 15 nt, Human
gacagaggggguggc

SEQ ID NO: 3073215 - RNA, 17 nt, Human
gacagaggcagccccau

SEQ ID NO: 3073216 - RNA, 16 nt, Human
gacagcugccugggau

SEQ ID NO: 3073217 - RNA, 17 nt, Human
gacagcugccugggauc

SEQ ID NO: 3073218 - RNA, 21 nt, Human
gacagccacggccaggccaga

SEQ ID NO: 3073219 - RNA, 20 nt, Human
gacagccacggccaggccag

SEQ ID NO: 3073220 - RNA, 18 nt, Human
gacagcugccugggaucc

SEQ ID NO: 3073221 - RNA, 21 nt, Human
gacagcugccugggaucccuc

SEQ ID NO: 3073222 - RNA, 19 nt, Human
gacagccacggccaggcca

SEQ ID NO: 3073223 - RNA, 18 nt, Human
gacagccacggccaggcc

SEQ ID NO: 3073224 - RNA, 17 nt, Human
gacagccacggccaggc

SEQ ID NO: 3073225 - RNA, 14 nt, Human
gacagccacggcca

SEQ ID NO: 3073226 - RNA, 22 nt, Human
gacagagugagacucugucuca

SEQ ID NO: 3073227 - RNA, 20 nt, Human
gacagagugagacucugucu

SEQ ID NO: 3073228 - RNA, 13 nt, Human
gacagagggggug

SEQ ID NO: 3073229 - RNA, 13 nt, Human
gacagccacggcc

SEQ ID NO: 3073230 - RNA, 14 nt, Human
gacaugggaaaggg

SEQ ID NO: 3073231 - RNA, 14 nt, Human
gacaugaucuucuu

SEQ ID NO: 3073232 - RNA, 20 nt, Human
gacauagaauuaacacauga

SEQ ID NO: 3073233 - RNA, 15 nt, Human
gacaggaccagggau

SEQ ID NO: 3073234 - RNA, 23 nt, Human
gacaggaccagggauuuccauga

SEQ ID NO: 3073235 - RNA, 14 nt, Human
gacaggaccaggga

SEQ ID NO: 3073236 - RNA, 17 nt, Human
gacagggaggacgcucu

SEQ ID NO: 3073237 - RNA, 24 nt, Human
gacagggcacaccgggcacucaga

SEQ ID NO: 3073238 - RNA, 14 nt, Human
gacaguuaagagaa

SEQ ID NO: 3073239 - RNA, 16 nt, Human
gacagggaggugaccc

SEQ ID NO: 3073240 - RNA, 18 nt, Human
gacagggaggacgcucuc

SEQ ID NO: 3073241 - RNA, 23 nt, Human
gacagggcacaccgggcacucag

SEQ ID NO: 3073242 - RNA, 12 nt, Human
gagaaaugaaaa

SEQ ID NO: 3073243 - RNA, 21 nt, Human
gagaaaugaaaaaauauauau

SEQ ID NO: 3073244 - RNA, 14 nt, Human
gagaaaugagcuug

SEQ ID NO: 3073245 - RNA, 21 nt, Human
gagaaccuagggugauauuaa

SEQ ID NO: 3073246 - RNA, 22 nt, Human
gagaaccuagggugauauuaac

SEQ ID NO: 3073247 - RNA, 16 nt, Human
gagaaagguugaagca

SEQ ID NO: 3073248 - RNA, 16 nt, Human
gagaagagaaugcaca

SEQ ID NO: 3073249 - RNA, 16 nt, Human
gagaagcagaggaagg

SEQ ID NO: 3073250 - RNA, 17 nt, Human
gagaaugagagacacac

SEQ ID NO: 3073251 - RNA, 14 nt, Human
gagaagagaaugca

SEQ ID NO: 3073252 - RNA, 22 nt, Human
gagaacuuccagauccuggaaa

SEQ ID NO: 3073253 - RNA, 23 nt, Human
gagaacuuccagauccuggaaau

SEQ ID NO: 3073254 - RNA, 19 nt, Human
gacuuaagcacacuugaca

SEQ ID NO: 3073255 - RNA, 16 nt, Human
gacuucuaaguaaaac

SEQ ID NO: 3073256 - RNA, 18 nt, Human
gacuucuaaguaaaacca

SEQ ID NO: 3073257 - RNA, 17 nt, Human
gacuucuaaguaaaacc

SEQ ID NO: 3073258 - RNA, 23 nt, Human
gacuucugucuucacaacagauu

SEQ ID NO: 3073259 - RNA, 20 nt, Human
gacuucugucuucacaacag

SEQ ID NO: 3073260 - RNA, 24 nt, Human
gacuucuaaguaaaaccacagcag

SEQ ID NO: 3073261 - RNA, 23 nt, Human
gacuucuaaguaaaaccacagca

SEQ ID NO: 3073262 - RNA, 19 nt, Human
gacuucuaaguaaaaccac

SEQ ID NO: 3073263 - RNA, 23 nt, Human
gacugaguacguugugcauuugg

SEQ ID NO: 3073264 - RNA, 14 nt, Human
gacugcauuauauu

SEQ ID NO: 3073265 - RNA, 16 nt, Human
gacugcauuauauuua

SEQ ID NO: 3073266 - RNA, 15 nt, Human
gacugcccggcaggg

SEQ ID NO: 3073267 - RNA, 13 nt, Human
gacugcccggcag

SEQ ID NO: 3073268 - RNA, 18 nt, Human
gacugaguacguugugca

SEQ ID NO: 3073269 - RNA, 22 nt, Human
gacugaguacguugugcauuug

SEQ ID NO: 3073270 - RNA, 21 nt, Human
gacugaguacguugugcauuu

SEQ ID NO: 3073271 - RNA, 17 nt, Human
gacucgcgacaaugcaa

SEQ ID NO: 3073272 - RNA, 18 nt, Human
gacuggaagcacagcuuc

SEQ ID NO: 3073273 - RNA, 16 nt, Human
gacuggaagcacagcu

SEQ ID NO: 3073274 - RNA, 15 nt, Human
gacuggaagcacagc

SEQ ID NO: 3073275 - RNA, 14 nt, Human
gacuggaagcacag

SEQ ID NO: 3073276 - RNA, 12 nt, Human
gacuccugcagg

SEQ ID NO: 3073277 - RNA, 13 nt, Human
gacuccugcaggc

SEQ ID NO: 3073278 - RNA, 21 nt, Human
gacuccugcaggcagccaggc

SEQ ID NO: 3073279 - RNA, 13 nt, Human
gacucgcgacaau

SEQ ID NO: 3073280 - RNA, 16 nt, Human
gacuccaaagaaaugu

SEQ ID NO: 3073281 - RNA, 15 nt, Human
gacuccaaagaaaug

SEQ ID NO: 3073282 - RNA, 12 nt, Human
gacuccaaagaa

SEQ ID NO: 3073283 - RNA, 11 nt, Human
gacuccaaaga

SEQ ID NO: 3073284 - RNA, 21 nt, Human
gacucauuuuaaaaaauggaa

SEQ ID NO: 3073285 - RNA, 15 nt, Human
gacucauucuucugu

SEQ ID NO: 3073286 - RNA, 14 nt, Human
gacucauucuucug

SEQ ID NO: 3073287 - RNA, 21 nt, Human
gacuacaggugugagucacca

SEQ ID NO: 3073288 - RNA, 18 nt, Human
gacuacaggugugaguca

SEQ ID NO: 3073289 - RNA, 13 nt, Human
gacuacaggugug

SEQ ID NO: 3073290 - RNA, 20 nt, Human
gagacagcucugcauacuca

SEQ ID NO: 3073291 - RNA, 23 nt, Human
gagaaugcacaaacagaggccgc

SEQ ID NO: 3073292 - RNA, 20 nt, Human
gagaaugagagacacacuga

SEQ ID NO: 3073293 - RNA, 18 nt, Human
gagaccaucccugaaggc

SEQ ID NO: 3073294 - RNA, 21 nt, Human
gagaccaucccugaaggcccc

SEQ ID NO: 3073295 - RNA, 14 nt, Human
gagaccaucccuga

SEQ ID NO: 3073296 - RNA, 12 nt, Human
gagaccaucccu

SEQ ID NO: 3073297 - RNA, 22 nt, Human
gagacaggguuuugccauguug

SEQ ID NO: 3073298 - RNA, 20 nt, Human
gagacucgcgacaaugcaaa

SEQ ID NO: 3073299 - RNA, 21 nt, Human
gagacucgcgacaaugcaaac

SEQ ID NO: 3073300 - RNA, 18 nt, Human
gagacucgcgacaaugca

SEQ ID NO: 3073301 - RNA, 20 nt, Human
gagacuccugcaggcagcca

SEQ ID NO: 3073302 - RNA, 21 nt, Human
gagacuccugcaggcagccag

SEQ ID NO: 3073303 - RNA, 19 nt, Human
gagacuccugcaggcagcc

SEQ ID NO: 3073304 - RNA, 18 nt, Human
gagacuccugcaggcagc

SEQ ID NO: 3073305 - RNA, 15 nt, Human
gagaguagaacagau

SEQ ID NO: 3073306 - RNA, 14 nt, Human
gagagggugggagu

SEQ ID NO: 3073307 - RNA, 16 nt, Human
gagagggugggagugg

SEQ ID NO: 3073308 - RNA, 13 nt, Human
gagaggggcacag

SEQ ID NO: 3073309 - RNA, 19 nt, Human
gagaggggaacagacugga

SEQ ID NO: 3073310 - RNA, 19 nt, Human
gagagacacacugaagaag

SEQ ID NO: 3073311 - RNA, 23 nt, Human
gagcccacuguacuugcucuuga

SEQ ID NO: 3073312 - RNA, 19 nt, Human
gagccagggucucacuaug

SEQ ID NO: 3073313 - RNA, 23 nt, Human
gagccagauuucacucuccuugg

SEQ ID NO: 3073314 - RNA, 14 nt, Human
gagccagggucuca

SEQ ID NO: 3073315 - RNA, 18 nt, Human
gagcccugguggcagugg

SEQ ID NO: 3073316 - RNA, 20 nt, Human
gagccagauuucacucuccu

SEQ ID NO: 3073317 - RNA, 19 nt, Human
gagccaauuuaaagaaaac

SEQ ID NO: 3073318 - RNA, 12 nt, Human
gagcagagacca

SEQ ID NO: 3073319 - RNA, 16 nt, Human
gagcagagaauucucu

SEQ ID NO: 3073320 - RNA, 16 nt, Human
gagauagccaaggcca

SEQ ID NO: 3073321 - RNA, 23 nt, Human
gagaucaaccccuucgcuccugu

SEQ ID NO: 3073322 - RNA, 14 nt, Human
gagauagccaaggc

SEQ ID NO: 3073323 - RNA, 18 nt, Human
gagaucacgccacugcac

SEQ ID NO: 3073324 - RNA, 19 nt, Human
gagaucacgccacugcacu

SEQ ID NO: 3073325 - RNA, 21 nt, Human
gagcaccuuagacagucccug

SEQ ID NO: 3073326 - RNA, 22 nt, Human
gagcaccuuagacagucccugc

SEQ ID NO: 3073327 - RNA, 15 nt, Human
gagcacuaaggugug

SEQ ID NO: 3073328 - RNA, 19 nt, Human
gagcaccuuagacaguccc

SEQ ID NO: 3073329 - RNA, 21 nt, Human
gagcacuaaggugugcucuga

SEQ ID NO: 3073330 - RNA, 20 nt, Human
gagcaccuuagacagucccu

SEQ ID NO: 3073331 - RNA, 23 nt, Human
gagcaagacgcugugcugcccug

SEQ ID NO: 3073332 - RNA, 21 nt, Human
cugugugcucaggagcccugg

SEQ ID NO: 3073333 - RNA, 20 nt, Human
cugugugcucaggagcccug

SEQ ID NO: 3073334 - RNA, 16 nt, Human
cugugugcucaggagc

SEQ ID NO: 3073335 - RNA, 19 nt, Human
cugugugcucaggagcccu

SEQ ID NO: 3073336 - RNA, 23 nt, Human
cugugugcucaggagcccuggga

SEQ ID NO: 3073337 - RNA, 15 nt, Human
cuguguggcagucug

SEQ ID NO: 3073338 - RNA, 22 nt, Human
cugugucuugcaauggcagccu

SEQ ID NO: 3073339 - RNA, 20 nt, Human
cugugucuugcaauggcagc

SEQ ID NO: 3073340 - RNA, 21 nt, Human
cugugucuugcaauggcagcc

SEQ ID NO: 3073341 - RNA, 20 nt, Human
cugugugugcgccuacagga

SEQ ID NO: 3073342 - RNA, 18 nt, Human
cugugugugcgccuacag

SEQ ID NO: 3073343 - RNA, 23 nt, Human
cuguuaaaagaugaaaauauuug

SEQ ID NO: 3073344 - RNA, 21 nt, Human
cuguuaaaagaugaaaauauu

SEQ ID NO: 3073345 - RNA, 20 nt, Human
cuguuaaaagaugaaaauau

SEQ ID NO: 3073346 - RNA, 18 nt, Human
cuguucagcugguugagg

SEQ ID NO: 3073347 - RNA, 19 nt, Human
cuguucagcugguugaggu

SEQ ID NO: 3073348 - RNA, 21 nt, Human
cuguucagcugguugagguuu

SEQ ID NO: 3073349 - RNA, 18 nt, Human
cuguucaugaaagauuca

SEQ ID NO: 3073350 - RNA, 23 nt, Human
cuguucaugaaagauucaaugcc

SEQ ID NO: 3073351 - RNA, 17 nt, Human
cuguucaugaaagauuc

SEQ ID NO: 3073352 - RNA, 14 nt, Human
cuguucucugcccu

SEQ ID NO: 3073353 - RNA, 15 nt, Human
cuguucucugcccuc

SEQ ID NO: 3073354 - RNA, 16 nt, Human
cuguucucugcccucc

SEQ ID NO: 3073355 - RNA, 17 nt, Human
cuguucucugcccucca

SEQ ID NO: 3073356 - RNA, 18 nt, Human
cuguucucugcccuccaa

SEQ ID NO: 3073357 - RNA, 19 nt, Human
cuguucucugcccuccaag

SEQ ID NO: 3073358 - RNA, 20 nt, Human
cuguucucugcccuccaaga

SEQ ID NO: 3073359 - RNA, 13 nt, Human
cuguucucugccc

SEQ ID NO: 3073360 - RNA, 18 nt, Human
cugucuccauguuugaug

SEQ ID NO: 3073361 - RNA, 18 nt, Human
cugugauggggcccugcc

SEQ ID NO: 3073362 - RNA, 17 nt, Human
cugugauggggcccugc

SEQ ID NO: 3073363 - RNA, 20 nt, Human
cugugaguacuacaguccuc

SEQ ID NO: 3073364 - RNA, 21 nt, Human
cugugaguacuacaguccucc

SEQ ID NO: 3073365 - RNA, 23 nt, Human
cugugaguacuacaguccuccca

SEQ ID NO: 3073366 - RNA, 18 nt, Human
cugugccaugugccaggu

SEQ ID NO: 3073367 - RNA, 16 nt, Human
cugugccaugugccag

SEQ ID NO: 3073368 - RNA, 14 nt, Human
cugugccauuuugu

SEQ ID NO: 3073369 - RNA, 19 nt, Human
cugugauggggcccugccu

SEQ ID NO: 3073370 - RNA, 20 nt, Human
cugugauggggcccugccuc

SEQ ID NO: 3073371 - RNA, 16 nt, Human
cugugccucugggacu

SEQ ID NO: 3073372 - RNA, 14 nt, Human
cugugccucuggga

SEQ ID NO: 3073373 - RNA, 21 nt, Human
cugugcugcccugcccaccug

SEQ ID NO: 3073374 - RNA, 17 nt, Human
cugugccucugggacug

SEQ ID NO: 3073375 - RNA, 22 nt, Human
cugugcugcccugcccaccugg

SEQ ID NO: 3073376 - RNA, 14 nt, Human
cugugggcccccaa

SEQ ID NO: 3073377 - RNA, 22 nt, Human
cuguggcgagccauuuguccca

SEQ ID NO: 3073378 - RNA, 23 nt, Human
cuguggcgagccauuugucccaa

SEQ ID NO: 3073379 - RNA, 17 nt, Human
cuguggaugauaaaaca

SEQ ID NO: 3073380 - RNA, 14 nt, Human
cuguggaugcugcu

SEQ ID NO: 3073381 - RNA, 22 nt, Human
cuguggaugcugcugccccugc

SEQ ID NO: 3073382 - RNA, 23 nt, Human
cuguggaugcugcugccccugca

SEQ ID NO: 3073383 - RNA, 16 nt, Human
cuguggaugcugcugc

SEQ ID NO: 3073384 - RNA, 18 nt, Human
cuguggaugcugcugccc

SEQ ID NO: 3073385 - RNA, 19 nt, Human
cuguggaugcugcugcccc

SEQ ID NO: 3073386 - RNA, 21 nt, Human
cuguggaugcugcugccccug

SEQ ID NO: 3073387 - RNA, 16 nt, Human
cugguuccauggccuc

SEQ ID NO: 3073388 - RNA, 22 nt, Human
cuguaauaaacucauuucuagc

SEQ ID NO: 3073389 - RNA, 23 nt, Human
cuguaaucacagcuacuugggag

SEQ ID NO: 3073390 - RNA, 13 nt, Human
cuguacaaaguag

SEQ ID NO: 3073391 - RNA, 22 nt, Human
cuguaauuugugauacaaugcu

SEQ ID NO: 3073392 - RNA, 15 nt, Human
cuguacaaaguagaa

SEQ ID NO: 3073393 - RNA, 20 nt, Human
cuguaauccuagcacuuugg

SEQ ID NO: 3073394 - RNA, 19 nt, Human
cuguaauccuagcacuuug

SEQ ID NO: 3073395 - RNA, 14 nt, Human
cugguggcagcugc

SEQ ID NO: 3073396 - RNA, 13 nt, Human
cugguggcagcug

SEQ ID NO: 3073397 - RNA, 21 nt, Human
cugguggcagcucaccucucc

SEQ ID NO: 3073398 - RNA, 23 nt, Human
cugguggcagcucaccucucccu

SEQ ID NO: 3073399 - RNA, 18 nt, Human
cugggggcugggcagagg

SEQ ID NO: 3073400 - RNA, 19 nt, Human
cugggggcugggcagagga

SEQ ID NO: 3073401 - RNA, 22 nt, Human
cugggggggauuguaaaauggu

SEQ ID NO: 3073402 - RNA, 15 nt, Human
cugggggaagaagcu

SEQ ID NO: 3073403 - RNA, 24 nt, Human
cugggcuucaguggcagcugcuuu

SEQ ID NO: 3073404 - RNA, 23 nt, Human
cugggcuucaguggcagcugcuu

SEQ ID NO: 3073405 - RNA, 13 nt, Human
cugggggaagaag

SEQ ID NO: 3073406 - RNA, 22 nt, Human
cuggguaacuagggaagauaau

SEQ ID NO: 3073407 - RNA, 20 nt, Human
cuggguaacuagggaagaua

SEQ ID NO: 3073408 - RNA, 14 nt, Human
cuggguucuaccca

SEQ ID NO: 3073409 - RNA, 15 nt, Human
cuggguucuacccag

SEQ ID NO: 3073410 - RNA, 16 nt, Human
cuggguucuacccagg

SEQ ID NO: 3073411 - RNA, 17 nt, Human
cuggguucuacccaggu

SEQ ID NO: 3073412 - RNA, 20 nt, Human
cugucuacacuaagagagaa

SEQ ID NO: 3073413 - RNA, 15 nt, Human
cuguccgagcuuuga

SEQ ID NO: 3073414 - RNA, 14 nt, Human
cuguccuacccacc

SEQ ID NO: 3073415 - RNA, 18 nt, Human
cugucucaaaaaaagaaa

SEQ ID NO: 3073416 - RNA, 16 nt, Human
cugucucaaaaaaaga

SEQ ID NO: 3073417 - RNA, 23 nt, Human
cugucucaaaaaaacacaaaagu

SEQ ID NO: 3073418 - RNA, 17 nt, Human
cuguccccgcacugggc

SEQ ID NO: 3073419 - RNA, 18 nt, Human
cuguccccgcacugggcu

SEQ ID NO: 3073420 - RNA, 19 nt, Human
cuguccccgcacugggcuu

SEQ ID NO: 3073421 - RNA, 22 nt, Human
cuguccccgcacugggcuuggg

SEQ ID NO: 3073422 - RNA, 14 nt, Human
cuguccgagcuuug

SEQ ID NO: 3073423 - RNA, 20 nt, Human
cugucccuuacgugaguccu

SEQ ID NO: 3073424 - RNA, 13 nt, Human
cuguacagagccc

SEQ ID NO: 3073425 - RNA, 23 nt, Human
cuguaucccaugagccucagcau

SEQ ID NO: 3073426 - RNA, 22 nt, Human
cuguauuuuaaaagaaugauua

SEQ ID NO: 3073427 - RNA, 20 nt, Human
cuguauuuuaaaagaaugau

SEQ ID NO: 3073428 - RNA, 19 nt, Human
cuguauuuuaaaagaauga

SEQ ID NO: 3073429 - RNA, 23 nt, Human
cugcugguucaggguuggccccu

SEQ ID NO: 3073430 - RNA, 15 nt, Human
cugcugguucagggu

SEQ ID NO: 3073431 - RNA, 13 nt, Human
cugcugguucagg

SEQ ID NO: 3073432 - RNA, 19 nt, Human
cugcuuccagugaggcucu

SEQ ID NO: 3073433 - RNA, 20 nt, Human
cugcuuccagugaggcucug

SEQ ID NO: 3073434 - RNA, 21 nt, Human
cugcuuccagugaggcucugc

SEQ ID NO: 3073435 - RNA, 23 nt, Human
cugcuuccagugaggcucugccc

SEQ ID NO: 3073436 - RNA, 16 nt, Human
cugcuuccagugaggc

SEQ ID NO: 3073437 - RNA, 18 nt, Human
cugcuuccagugaggcuc

SEQ ID NO: 3073438 - RNA, 15 nt, Human
cugcuuccagugagg

SEQ ID NO: 3073439 - RNA, 14 nt, Human
cugcugcuggcugg

SEQ ID NO: 3073440 - RNA, 15 nt, Human
cugcugcuggcuggu

SEQ ID NO: 3073441 - RNA, 15 nt, Human
cugcugcuccuagga

SEQ ID NO: 3073442 - RNA, 18 nt, Human
cugcugcuccuaggaccc

SEQ ID NO: 3073443 - RNA, 11 nt, Human
cugcugaaggc

SEQ ID NO: 3073444 - RNA, 18 nt, Human
cugcugaaacaacaaaua

SEQ ID NO: 3073445 - RNA, 15 nt, Human
cugcugcaguugcca

SEQ ID NO: 3073446 - RNA, 16 nt, Human
cugcugccccugcaca

SEQ ID NO: 3073447 - RNA, 14 nt, Human
cugcugccccugca

SEQ ID NO: 3073448 - RNA, 22 nt, Human
cugcugccccugcacagcaggc

SEQ ID NO: 3073449 - RNA, 23 nt, Human
cugcugccccugcacagcaggcu

SEQ ID NO: 3073450 - RNA, 19 nt, Human
cugcucuccgaccagacac

SEQ ID NO: 3073451 - RNA, 15 nt, Human
cugcucccaccuggc

SEQ ID NO: 3073452 - RNA, 10 nt, Human
cugcucccac

SEQ ID NO: 3073453 - RNA, 19 nt, Human
cugcuccagcuguucagcu

SEQ ID NO: 3073454 - RNA, 20 nt, Human
cugcuccagcuguucagcug

SEQ ID NO: 3073455 - RNA, 15 nt, Human
cugcuccagcuguuc

SEQ ID NO: 3073456 - RNA, 19 nt, Human
cugcgaccacaagaaggau

SEQ ID NO: 3073457 - RNA, 19 nt, Human
cugccucucugcagguccc

SEQ ID NO: 3073458 - RNA, 15 nt, Human
cugccucuucucuac

SEQ ID NO: 3073459 - RNA, 14 nt, Human
cugccucuucucua

SEQ ID NO: 3073460 - RNA, 17 nt, Human
cugccugcccaggcccc

SEQ ID NO: 3073461 - RNA, 16 nt, Human
cugccugcccaggccc

SEQ ID NO: 3073462 - RNA, 15 nt, Human
cugccugcccaggcc

SEQ ID NO: 3073463 - RNA, 15 nt, Human
cugccugaagucaca

SEQ ID NO: 3073464 - RNA, 21 nt, Human
cugccugggaucccucauccu

SEQ ID NO: 3073465 - RNA, 20 nt, Human
cugccugcccaggccccugc

SEQ ID NO: 3073466 - RNA, 21 nt, Human
cugccucucugcaggucccua

SEQ ID NO: 3073467 - RNA, 20 nt, Human
cugccucucugcaggucccu

SEQ ID NO: 3073468 - RNA, 22 nt, Human
cugccucucugcaggucccuaa

SEQ ID NO: 3073469 - RNA, 23 nt, Human
cugccucugacacacagcucugu

SEQ ID NO: 3073470 - RNA, 22 nt, Human
cugccucugacacacagcucug

SEQ ID NO: 3073471 - RNA, 12 nt, Human
cugccucccauc

SEQ ID NO: 3073472 - RNA, 14 nt, Human
cugccucccaucac

SEQ ID NO: 3073473 - RNA, 16 nt, Human
cugccucccaucaccc

SEQ ID NO: 3073474 - RNA, 19 nt, Human
cugccucccaucacccgcu

SEQ ID NO: 3073475 - RNA, 11 nt, Human
cugccucccau

SEQ ID NO: 3073476 - RNA, 14 nt, Human
cugccgcagcccug

SEQ ID NO: 3073477 - RNA, 15 nt, Human
cugccgcagcccugc

SEQ ID NO: 3073478 - RNA, 17 nt, Human
cugccgcagcccugcag

SEQ ID NO: 3073479 - RNA, 18 nt, Human
cugccgcagcccugcaga

SEQ ID NO: 3073480 - RNA, 14 nt, Human
cucccuucccaccu

SEQ ID NO: 3073481 - RNA, 15 nt, Human
cucccuucccaccuc

SEQ ID NO: 3073482 - RNA, 16 nt, Human
cucccuucccaccucu

SEQ ID NO: 3073483 - RNA, 17 nt, Human
cucccuucccaccucuc

SEQ ID NO: 3073484 - RNA, 12 nt, Human
cugcccuccaag

SEQ ID NO: 3073485 - RNA, 15 nt, Human
cuggcccacugcauc

SEQ ID NO: 3073486 - RNA, 14 nt, Human
cuggccagaugcac

SEQ ID NO: 3073487 - RNA, 20 nt, Human
cuggagugcagugagccgag

SEQ ID NO: 3073488 - RNA, 20 nt, Human
cuggcacaguuuucugagaa

SEQ ID NO: 3073489 - RNA, 22 nt, Human
cuggcacaguuuucugagaaag

SEQ ID NO: 3073490 - RNA, 21 nt, Human
cuggcacaguuuucugagaaa

SEQ ID NO: 3073491 - RNA, 19 nt, Human
cuggcacccggccccugcu

SEQ ID NO: 3073492 - RNA, 21 nt, Human
cuggcacccggccccugcugg

SEQ ID NO: 3073493 - RNA, 20 nt, Human
cuggcacccggccccugcug

SEQ ID NO: 3073494 - RNA, 19 nt, Human
cuggcacugcuuccaguga

SEQ ID NO: 3073495 - RNA, 20 nt, Human
cuggcacugcuuccagugag

SEQ ID NO: 3073496 - RNA, 23 nt, Human
cuggcacugcuuccagugaggcu

SEQ ID NO: 3073497 - RNA, 18 nt, Human
cuggcacugcuuccagug

SEQ ID NO: 3073498 - RNA, 22 nt, Human
cuggcacuggcaaacagggccu

SEQ ID NO: 3073499 - RNA, 24 nt, Human
cuggcucuuccaggcugggagagc

SEQ ID NO: 3073500 - RNA, 21 nt, Human
cuggcucuuccaggcugggag

SEQ ID NO: 3073501 - RNA, 22 nt, Human
cuggcucuuccaggcugggaga

SEQ ID NO: 3073502 - RNA, 15 nt, Human
cuggcgugcaguggu

SEQ ID NO: 3073503 - RNA, 14 nt, Human
cuggcgugcagugg

SEQ ID NO: 3073504 - RNA, 23 nt, Human
cuggccuucggccuccauccuga

SEQ ID NO: 3073505 - RNA, 24 nt, Human
cuggccuggccccucagggucccu

SEQ ID NO: 3073506 - RNA, 22 nt, Human
cuggccuucggccuccauccug

SEQ ID NO: 3073507 - RNA, 19 nt, Human
cuggccuggccccucaggg

SEQ ID NO: 3073508 - RNA, 18 nt, Human
cuggccucugcacucccc

SEQ ID NO: 3073509 - RNA, 20 nt, Human
cuggccucugcacuccccug

SEQ ID NO: 3073510 - RNA, 21 nt, Human
cuggccucugcacuccccugc

SEQ ID NO: 3073511 - RNA, 16 nt, Human
cuggccucugcacucc

SEQ ID NO: 3073512 - RNA, 17 nt, Human
cuggagugcagugagcc

SEQ ID NO: 3073513 - RNA, 16 nt, Human
cuggagugcagugagc

SEQ ID NO: 3073514 - RNA, 15 nt, Human
cuggagugcagugag

SEQ ID NO: 3073515 - RNA, 14 nt, Human
cuggagugcaguga

SEQ ID NO: 3073516 - RNA, 17 nt, Human
cuggagguacgaaaaga

SEQ ID NO: 3073517 - RNA, 22 nt, Human
cuggagguacgaaaagagggga

SEQ ID NO: 3073518 - RNA, 12 nt, Human
cuggagcucugc

SEQ ID NO: 3073519 - RNA, 13 nt, Human
cuggagcucugcc

SEQ ID NO: 3073520 - RNA, 16 nt, Human
cuggagcucugcccau

SEQ ID NO: 3073521 - RNA, 13 nt, Human
cuggaauuugaaa

SEQ ID NO: 3073522 - RNA, 17 nt, Human
cuggacaggcauguucu

SEQ ID NO: 3073523 - RNA, 14 nt, Human
cuggacaggcaugu

SEQ ID NO: 3073524 - RNA, 23 nt, Human
cuggacaggcauguucucugagg

SEQ ID NO: 3073525 - RNA, 20 nt, Human
cuggaccuugaacuggguac

SEQ ID NO: 3073526 - RNA, 17 nt, Human
cuggaccuugaacuggg

SEQ ID NO: 3073527 - RNA, 21 nt, Human
cuggaccuugaacuggguacu

SEQ ID NO: 3073528 - RNA, 15 nt, Human
cuggacccuguggau

SEQ ID NO: 3073529 - RNA, 16 nt, Human
cuggaccuugaacugg

SEQ ID NO: 3073530 - RNA, 13 nt, Human
cuuauauuaugga

SEQ ID NO: 3073531 - RNA, 19 nt, Human
cuuauaucuauauuuuaca

SEQ ID NO: 3073532 - RNA, 15 nt, Human
cuuauacauuugaua

SEQ ID NO: 3073533 - RNA, 16 nt, Human
cuguucuggcagaguu

SEQ ID NO: 3073534 - RNA, 20 nt, Human
cuuagaugcaguucugaaga

SEQ ID NO: 3073535 - RNA, 13 nt, Human
cuuagauguauau

SEQ ID NO: 3073536 - RNA, 22 nt, Human
cuuagaugcaguucugaagaag

SEQ ID NO: 3073537 - RNA, 16 nt, Human
cuuagucacugagaca

SEQ ID NO: 3073538 - RNA, 18 nt, Human
cuuagucacugagacagc

SEQ ID NO: 3073539 - RNA, 19 nt, Human
cuuagucacugagacagcc

SEQ ID NO: 3073540 - RNA, 14 nt, Human
cuuagucacugaga

SEQ ID NO: 3073541 - RNA, 13 nt, Human
cuucaaggauccu

SEQ ID NO: 3073542 - RNA, 15 nt, Human
cuucaaggauccuga

SEQ ID NO: 3073543 - RNA, 10 nt, Human
cuucaaggau

SEQ ID NO: 3073544 - RNA, 23 nt, Human
cuucacagaugggugcuuggagg

SEQ ID NO: 3073545 - RNA, 18 nt, Human
cuuauuuaaugaaagacu

SEQ ID NO: 3073546 - RNA, 14 nt, Human
cuuauuucauuucu

SEQ ID NO: 3073547 - RNA, 17 nt, Human
cuuauuuaaugaaagac

SEQ ID NO: 3073548 - RNA, 15 nt, Human
cuuauuuccucauuu

SEQ ID NO: 3073549 - RNA, 15 nt, Human
cuuauuucauuucuu

SEQ ID NO: 3073550 - RNA, 13 nt, Human
cuucccuuucugc

SEQ ID NO: 3073551 - RNA, 15 nt, Human
cuuccaggcugggag

SEQ ID NO: 3073552 - RNA, 16 nt, Human
cuuccaggcugggaga

SEQ ID NO: 3073553 - RNA, 19 nt, Human
cuuccaggcugggagagcc

SEQ ID NO: 3073554 - RNA, 14 nt, Human
cuuccagggguggg

SEQ ID NO: 3073555 - RNA, 15 nt, Human
cuuccagggguggga

SEQ ID NO: 3073556 - RNA, 17 nt, Human
cuuccaggggugggaca

SEQ ID NO: 3073557 - RNA, 17 nt, Human
cuuccccuggcacuggc

SEQ ID NO: 3073558 - RNA, 16 nt, Human
cuucaguaagccguga

SEQ ID NO: 3073559 - RNA, 23 nt, Human
cuucaguaagccgugauuuucau

SEQ ID NO: 3073560 - RNA, 16 nt, Human
cuucaguggcagcugc

SEQ ID NO: 3073561 - RNA, 15 nt, Human
cuucaguggcagcug

SEQ ID NO: 3073562 - RNA, 14 nt, Human
cuucaguggcagcu

SEQ ID NO: 3073563 - RNA, 13 nt, Human
cuucaguggcagc

SEQ ID NO: 3073564 - RNA, 18 nt, Human
cuucagugccuuauggaa

SEQ ID NO: 3073565 - RNA, 22 nt, Human
cuucagugccuuauggaacacu

SEQ ID NO: 3073566 - RNA, 15 nt, Human
cuucaguaagccgug

SEQ ID NO: 3073567 - RNA, 20 nt, Human
cuucauucaacccaccugcg

SEQ ID NO: 3073568 - RNA, 19 nt, Human
cuuccacaagagcccaggc

SEQ ID NO: 3073569 - RNA, 21 nt, Human
cuuccacaagagcccaggccu

SEQ ID NO: 3073570 - RNA, 17 nt, Human
cuuccacaagagcccag

SEQ ID NO: 3073571 - RNA, 16 nt, Human
cuuccacaagagccca

SEQ ID NO: 3073572 - RNA, 12 nt, Human
cuuccaggcugg

SEQ ID NO: 3073573 - RNA, 14 nt, Human
cuuccaggcuggga

SEQ ID NO: 3073574 - RNA, 13 nt, Human
cuugaaaauuaac

SEQ ID NO: 3073575 - RNA, 12 nt, Human
cuugaaaauuaa

SEQ ID NO: 3073576 - RNA, 18 nt, Human
cuugaaaauuaacaugaa

SEQ ID NO: 3073577 - RNA, 18 nt, Human
cuugaaaaaugcauguug

SEQ ID NO: 3073578 - RNA, 12 nt, Human
cuugaaaaaugc

SEQ ID NO: 3073579 - RNA, 14 nt, Human
cuugaaaacacugu

SEQ ID NO: 3073580 - RNA, 23 nt, Human
cuugaaaacacuguucucugccc

SEQ ID NO: 3073581 - RNA, 14 nt, Human
cuucugugaaagua

SEQ ID NO: 3073582 - RNA, 14 nt, Human
cuucuguggguuuc

SEQ ID NO: 3073583 - RNA, 21 nt, Human
cuucuguggguuucuaaagcu

SEQ ID NO: 3073584 - RNA, 13 nt, Human
cuucuguggguuu

SEQ ID NO: 3073585 - RNA, 20 nt, Human
cuugaggguugggcuggugu

SEQ ID NO: 3073586 - RNA, 19 nt, Human
cuugaggguugggcuggug

SEQ ID NO: 3073587 - RNA, 21 nt, Human
cuugaguugauucagcucugc

SEQ ID NO: 3073588 - RNA, 21 nt, Human
cuugaggguugggcugguguc

SEQ ID NO: 3073589 - RNA, 13 nt, Human
cuugagcucagga

SEQ ID NO: 3073590 - RNA, 18 nt, Human
cuugagccuugaacuuug

SEQ ID NO: 3073591 - RNA, 17 nt, Human
cuugagccuugaacuuu

SEQ ID NO: 3073592 - RNA, 15 nt, Human
cuugagccuugaacu

SEQ ID NO: 3073593 - RNA, 16 nt, Human
cuugagccugggaggu

SEQ ID NO: 3073594 - RNA, 17 nt, Human
cuugaccgugaggccag

SEQ ID NO: 3073595 - RNA, 22 nt, Human
cuugaccauucuccaccugcca

SEQ ID NO: 3073596 - RNA, 23 nt, Human
cuugaccauucuccaccugccag

SEQ ID NO: 3073597 - RNA, 18 nt, Human
cuugaccgugaggccaga

SEQ ID NO: 3073598 - RNA, 20 nt, Human
cuugaccgugaggccagaga

SEQ ID NO: 3073599 - RNA, 21 nt, Human
cuugaccgugaggccagagac

SEQ ID NO: 3073600 - RNA, 13 nt, Human
cuugaccucaggu

SEQ ID NO: 3073601 - RNA, 13 nt, Human
cuugaacuccugg

SEQ ID NO: 3073602 - RNA, 21 nt, Human
cuugaacuuugaccucugcag

SEQ ID NO: 3073603 - RNA, 17 nt, Human
cuugaacuuugaccucu

SEQ ID NO: 3073604 - RNA, 21 nt, Human
cuucuguccuacucuguguca

SEQ ID NO: 3073605 - RNA, 18 nt, Human
cuucugucuucacaacag

SEQ ID NO: 3073606 - RNA, 22 nt, Human
cuucugucuucacaacagauua

SEQ ID NO: 3073607 - RNA, 21 nt, Human
cuucugucuucacaacagauu

SEQ ID NO: 3073608 - RNA, 19 nt, Human
cuucuguccuacucugugu

SEQ ID NO: 3073609 - RNA, 18 nt, Human
cuucuguccuacucugug

SEQ ID NO: 3073610 - RNA, 17 nt, Human
cuucuguccuacucugu

SEQ ID NO: 3073611 - RNA, 16 nt, Human
cuucuguccuacucug

SEQ ID NO: 3073612 - RNA, 20 nt, Human
cuucuguacgucugacaggc

SEQ ID NO: 3073613 - RNA, 18 nt, Human
cuucuguacgucugacag

SEQ ID NO: 3073614 - RNA, 15 nt, Human
cuucuguacgucuga

SEQ ID NO: 3073615 - RNA, 14 nt, Human
cuucuguacgucug

SEQ ID NO: 3073616 - RNA, 21 nt, Human
cuucuguacgucugacaggca

SEQ ID NO: 3073617 - RNA, 20 nt, Human
cuucugccauuucugagauc

SEQ ID NO: 3073618 - RNA, 13 nt, Human
cuucucugaagga

SEQ ID NO: 3073619 - RNA, 13 nt, Human
cuucucuccagcc

SEQ ID NO: 3073620 - RNA, 15 nt, Human
cuucucuccagcccc

SEQ ID NO: 3073621 - RNA, 17 nt, Human
cuucucuccagccccug

SEQ ID NO: 3073622 - RNA, 19 nt, Human
cuucucuccagccccugga

SEQ ID NO: 3073623 - RNA, 12 nt, Human
cuucucuccagc

SEQ ID NO: 3073624 - RNA, 11 nt, Human
cuucuccacuu

SEQ ID NO: 3073625 - RNA, 20 nt, Human
cuucuccacuuucuagccag

SEQ ID NO: 3073626 - RNA, 13 nt, Human
cuucuccaggcug

SEQ ID NO: 3073627 - RNA, 12 nt, Human
cuucuccaggcu

SEQ ID NO: 3073628 - RNA, 21 nt, Human
gaaagaguacucuuguuuccu

SEQ ID NO: 3073629 - RNA, 15 nt, Human
gaaagaguaggaaga

SEQ ID NO: 3073630 - RNA, 22 nt, Human
gaaagcagaacagugauuacca

SEQ ID NO: 3073631 - RNA, 14 nt, Human
gaaagcagaacagu

SEQ ID NO: 3073632 - RNA, 17 nt, Human
gaaagcagaacagugau

SEQ ID NO: 3073633 - RNA, 19 nt, Human
gaaagacuuuuccaacccu

SEQ ID NO: 3073634 - RNA, 17 nt, Human
gaaagagaacuuccaga

SEQ ID NO: 3073635 - RNA, 17 nt, Human
gaaagacuguacaaagu

SEQ ID NO: 3073636 - RNA, 21 nt, Human
gaaagaggaaugaaguacuca

SEQ ID NO: 3073637 - RNA, 20 nt, Human
gaaagaggcagcuugaaacu

SEQ ID NO: 3073638 - RNA, 21 nt, Human
gaaagcccugagcuuucugcu

SEQ ID NO: 3073639 - RNA, 22 nt, Human
gaaagcccugagcuuucugcua

SEQ ID NO: 3073640 - RNA, 17 nt, Human
gaaagcccugagcuuuc

SEQ ID NO: 3073641 - RNA, 14 nt, Human
gaaagcagggacuu

SEQ ID NO: 3073642 - RNA, 20 nt, Human
gaaaaugauacgcaacauaa

SEQ ID NO: 3073643 - RNA, 21 nt, Human
gaaacaagucagucauucaga

SEQ ID NO: 3073644 - RNA, 11 nt, Human
gaaacauuugg

SEQ ID NO: 3073645 - RNA, 16 nt, Human
gaaacacaacuauauu

SEQ ID NO: 3073646 - RNA, 15 nt, Human
gaaacccagcucugg

SEQ ID NO: 3073647 - RNA, 16 nt, Human
gaaacccagcucuggu

SEQ ID NO: 3073648 - RNA, 18 nt, Human
gaaacccagcucuggucc

SEQ ID NO: 3073649 - RNA, 19 nt, Human
gaaacccagcucuggucca

SEQ ID NO: 3073650 - RNA, 13 nt, Human
gaaacccagcucu

SEQ ID NO: 3073651 - RNA, 14 nt, Human
gaaacccagcucug

SEQ ID NO: 3073652 - RNA, 23 nt, Human
gaaacccagcucugguccauaga

SEQ ID NO: 3073653 - RNA, 14 nt, Human
gaaacccugucucu

SEQ ID NO: 3073654 - RNA, 23 nt, Human
gaaacucguuaauuuguaguguu

SEQ ID NO: 3073655 - RNA, 18 nt, Human
gaaaaucuuauaauuuaa

SEQ ID NO: 3073656 - RNA, 20 nt, Human
gaaaaucagccugcuccagc

SEQ ID NO: 3073657 - RNA, 22 nt, Human
gaaaaucagccugcuccagcug

SEQ ID NO: 3073658 - RNA, 22 nt, Human
gaaaaucuacacuccagugaga

SEQ ID NO: 3073659 - RNA, 21 nt, Human
gaaaauauuauguguuuccau

SEQ ID NO: 3073660 - RNA, 18 nt, Human
gaaaauauuuguaucaca

SEQ ID NO: 3073661 - RNA, 20 nt, Human
gaaaacguggcugcuucaag

SEQ ID NO: 3073662 - RNA, 22 nt, Human
gaaaacguggcugcuucaagga

SEQ ID NO: 3073663 - RNA, 19 nt, Human
gaaaacguggcugcuucaa

SEQ ID NO: 3073664 - RNA, 19 nt, Human
gaaaagcugcugacagugu

SEQ ID NO: 3073665 - RNA, 22 nt, Human
gaaaacacuguucucugcccuc

SEQ ID NO: 3073666 - RNA, 24 nt, Human
gaaaacacuguucucugcccucca

SEQ ID NO: 3073667 - RNA, 14 nt, Human
gaaaaguugaauuu

SEQ ID NO: 3073668 - RNA, 15 nt, Human
gaaaaguugaauuuu

SEQ ID NO: 3073669 - RNA, 17 nt, Human
cuuuuuauggccuguga

SEQ ID NO: 3073670 - RNA, 18 nt, Human
cuuuguuaguuucuccaa

SEQ ID NO: 3073671 - RNA, 12 nt, Human
cuuuuguucuug

SEQ ID NO: 3073672 - RNA, 11 nt, Human
cuuuuguucuu

SEQ ID NO: 3073673 - RNA, 19 nt, Human
gaaaacacauuuuucuuag

SEQ ID NO: 3073674 - RNA, 18 nt, Human
gaaaacacauuuuucuua

SEQ ID NO: 3073675 - RNA, 14 nt, Human
gaaaacacauuuuu

SEQ ID NO: 3073676 - RNA, 12 nt, Human
gaaaaaggagga

SEQ ID NO: 3073677 - RNA, 15 nt, Human
gaaaaaggaggaaga

SEQ ID NO: 3073678 - RNA, 16 nt, Human
cuuuuuuggcugcuga

SEQ ID NO: 3073679 - RNA, 20 nt, Human
cuuuuuuggcugcugaaggc

SEQ ID NO: 3073680 - RNA, 22 nt, Human
cuuuuuuggcugcugaaggcuc

SEQ ID NO: 3073681 - RNA, 17 nt, Human
cuuuuuuggcugcugaa

SEQ ID NO: 3073682 - RNA, 21 nt, Human
cuuuaucaaagggugaaaauu

SEQ ID NO: 3073683 - RNA, 22 nt, Human
cuuuaucaaagggugaaaauua

SEQ ID NO: 3073684 - RNA, 19 nt, Human
cuuuauaauucuacuuuga

SEQ ID NO: 3073685 - RNA, 13 nt, Human
cuuuauaauucua

SEQ ID NO: 3073686 - RNA, 14 nt, Human
cuuuagcgcccagu

SEQ ID NO: 3073687 - RNA, 21 nt, Human
cuuuaucuugaauaauguaag

SEQ ID NO: 3073688 - RNA, 18 nt, Human
cuuuaucuugaauaaugu

SEQ ID NO: 3073689 - RNA, 23 nt, Human
cuuuaucuugaauaauguaagac

SEQ ID NO: 3073690 - RNA, 15 nt, Human
cuuuaugcacaaaau

SEQ ID NO: 3073691 - RNA, 22 nt, Human
cuuuaccuuuuuuauacauaaa

SEQ ID NO: 3073692 - RNA, 13 nt, Human
cuuuacuauggcc

SEQ ID NO: 3073693 - RNA, 19 nt, Human
cuugaguuuaaauuguaau

SEQ ID NO: 3073694 - RNA, 23 nt, Human
cuuggggggcugaggugggagga

SEQ ID NO: 3073695 - RNA, 22 nt, Human
cuuggggggcugaggugggagg

SEQ ID NO: 3073696 - RNA, 16 nt, Human
cuuguaaauagcucag

SEQ ID NO: 3073697 - RNA, 21 nt, Human
cuuguacauaaugcgugcaua

SEQ ID NO: 3073698 - RNA, 19 nt, Human
cuuguacauaaugcgugca

SEQ ID NO: 3073699 - RNA, 22 nt, Human
cuuguacauaaugcgugcauac

SEQ ID NO: 3073700 - RNA, 12 nt, Human
cuuguacauaau

SEQ ID NO: 3073701 - RNA, 15 nt, Human
cuuguacauaaugcg

SEQ ID NO: 3073702 - RNA, 18 nt, Human
cuuguaaauagcucaggu

SEQ ID NO: 3073703 - RNA, 17 nt, Human
cuuguaaauagcucagg

SEQ ID NO: 3073704 - RNA, 23 nt, Human
cuugucaauaaaauccauacauu

SEQ ID NO: 3073705 - RNA, 16 nt, Human
cuuuggcccagggugg

SEQ ID NO: 3073706 - RNA, 14 nt, Human
cuuuggcccagggu

SEQ ID NO: 3073707 - RNA, 15 nt, Human
cuuuggcccagggug

SEQ ID NO: 3073708 - RNA, 19 nt, Human
cuuuggcuauuagagauca

SEQ ID NO: 3073709 - RNA, 13 nt, Human
cuuuggcccaggg

SEQ ID NO: 3073710 - RNA, 14 nt, Human
cuuuguccccaccg

SEQ ID NO: 3073711 - RNA, 19 nt, Human
cuuugugauuuuuguaauu

SEQ ID NO: 3073712 - RNA, 15 nt, Human
cuuugugaggaagcc

SEQ ID NO: 3073713 - RNA, 15 nt, Human
cuuuguccccaccgc

SEQ ID NO: 3073714 - RNA, 24 nt, Human
cuuugaccucugcagcaauaaagc

SEQ ID NO: 3073715 - RNA, 20 nt, Human
cuuugaccucugcagcaaua

SEQ ID NO: 3073716 - RNA, 18 nt, Human
cuuugaccucugcagcaa

SEQ ID NO: 3073717 - RNA, 17 nt, Human
cuuugaccucugcagca

SEQ ID NO: 3073718 - RNA, 15 nt, Human
cuuugaccucugcag

SEQ ID NO: 3073719 - RNA, 14 nt, Human
cuuugaccucugca

SEQ ID NO: 3073720 - RNA, 13 nt, Human
cuuugaccucugc

SEQ ID NO: 3073721 - RNA, 16 nt, Human
cuuugcagacaggcaa

SEQ ID NO: 3073722 - RNA, 20 nt, Human
cuuugcagacaggcaagcac

SEQ ID NO: 3073723 - RNA, 16 nt, Human
cuuucugcuuguguua

SEQ ID NO: 3073724 - RNA, 13 nt, Human
cuuuccugaggcu

SEQ ID NO: 3073725 - RNA, 15 nt, Human
cuuuccugaggcugg

SEQ ID NO: 3073726 - RNA, 20 nt, Human
cuuucuggcuaugcauuuga

SEQ ID NO: 3073727 - RNA, 19 nt, Human
cuuucuggcuaugcauuug

SEQ ID NO: 3073728 - RNA, 18 nt, Human
cuuucuggcuaugcauuu

SEQ ID NO: 3073729 - RNA, 17 nt, Human
cuuucuggcuaugcauu

SEQ ID NO: 3073730 - RNA, 15 nt, Human
cuuuccaucuacccu

SEQ ID NO: 3073731 - RNA, 15 nt, Human
cuuuccaggaaggcu

SEQ ID NO: 3073732 - RNA, 16 nt, Human
cuuucccucccuuccu

SEQ ID NO: 3073733 - RNA, 14 nt, Human
cuuucccucccuuc

SEQ ID NO: 3073734 - RNA, 13 nt, Human
cuuucccucccuu

SEQ ID NO: 3073735 - RNA, 11 nt, Human
cuuucccuccc

SEQ ID NO: 3073736 - RNA, 12 nt, Human
cuuuccugaggc

SEQ ID NO: 3073737 - RNA, 16 nt, Human
cuuuccucuuuggucu

SEQ ID NO: 3073738 - RNA, 15 nt, Human
cuaaauuuuauaucu

SEQ ID NO: 3073739 - RNA, 16 nt, Human
cuaaauuuuauaucuu

SEQ ID NO: 3073740 - RNA, 13 nt, Human
cuaaauuuuauau

SEQ ID NO: 3073741 - RNA, 20 nt, Human
cuaaauuuuauaucuuguag

SEQ ID NO: 3073742 - RNA, 16 nt, Human
cuaaauucaugcugcu

SEQ ID NO: 3073743 - RNA, 19 nt, Human
cuaaauucuuucauuuuag

SEQ ID NO: 3073744 - RNA, 19 nt, Human
cuaaauugacacuuaaaaa

SEQ ID NO: 3073745 - RNA, 14 nt, Human
cuaaccacgcugga

SEQ ID NO: 3073746 - RNA, 12 nt, Human
cuaaccacgcug

SEQ ID NO: 3073747 - RNA, 16 nt, Human
cuaagauaguaacaau

SEQ ID NO: 3073748 - RNA, 23 nt, Human
cuaagagggagggagggcuccag

SEQ ID NO: 3073749 - RNA, 15 nt, Human
cuaagagggagggag

SEQ ID NO: 3073750 - RNA, 22 nt, Human
cuaagagggagggagggcucca

SEQ ID NO: 3073751 - RNA, 13 nt, Human
cuaagagggaggg

SEQ ID NO: 3073752 - RNA, 14 nt, Human
cuaagagagaauga

SEQ ID NO: 3073753 - RNA, 15 nt, Human
cuaagagagaaugag

SEQ ID NO: 3073754 - RNA, 21 nt, Human
cgggaggauguucugggacac

SEQ ID NO: 3073755 - RNA, 23 nt, Human
cgggaggauguucugggacacag

SEQ ID NO: 3073756 - RNA, 20 nt, Human
cgggaggcagagguugcagu

SEQ ID NO: 3073757 - RNA, 23 nt, Human
cgggaccccgagccuggcuccaa

SEQ ID NO: 3073758 - RNA, 20 nt, Human
cuaaaucuccaaaauaaaac

SEQ ID NO: 3073759 - RNA, 21 nt, Human
cuaaaucuccaaaauaaaacu

SEQ ID NO: 3073760 - RNA, 22 nt, Human
cuaaaugaaaaucgugacaaca

SEQ ID NO: 3073761 - RNA, 21 nt, Human
cuaagcuucacuguaaaauaa

SEQ ID NO: 3073762 - RNA, 22 nt, Human
cuaagcuauucaguaauaacuc

SEQ ID NO: 3073763 - RNA, 14 nt, Human
cuaauaaagcugug

SEQ ID NO: 3073764 - RNA, 19 nt, Human
cuaaguaaaaccacagcag

SEQ ID NO: 3073765 - RNA, 18 nt, Human
cuaaguaaaaccacagca

SEQ ID NO: 3073766 - RNA, 14 nt, Human
cuaaguaaaaccac

SEQ ID NO: 3073767 - RNA, 23 nt, Human
cuaauagacaauuuauuauggca

SEQ ID NO: 3073768 - RNA, 19 nt, Human
cuaauagacaauuuauuau

SEQ ID NO: 3073769 - RNA, 17 nt, Human
cuaauagacaauuuauu

SEQ ID NO: 3073770 - RNA, 23 nt, Human
cuacacgagauacagaauuuuau

SEQ ID NO: 3073771 - RNA, 14 nt, Human
cuacacuaagagag

SEQ ID NO: 3073772 - RNA, 21 nt, Human
cuacacaggggaaaagaggag

SEQ ID NO: 3073773 - RNA, 21 nt, Human
cuacacacugcauguuuguga

SEQ ID NO: 3073774 - RNA, 13 nt, Human
cuaaugggacacu

SEQ ID NO: 3073775 - RNA, 12 nt, Human
cuaaugggacac

SEQ ID NO: 3073776 - RNA, 22 nt, Human
cuacauuauaaaugucucuuua

SEQ ID NO: 3073777 - RNA, 14 nt, Human
cuacauucuguuaa

SEQ ID NO: 3073778 - RNA, 13 nt, Human
cuacauucuguua

SEQ ID NO: 3073779 - RNA, 18 nt, Human
cuaccauccccuguagag

SEQ ID NO: 3073780 - RNA, 17 nt, Human
cuacccagcgagcccug

SEQ ID NO: 3073781 - RNA, 15 nt, Human
cuacccagcgagccc

SEQ ID NO: 3073782 - RNA, 12 nt, Human
cuacccaggugc

SEQ ID NO: 3073783 - RNA, 13 nt, Human
cuacccaggugcu

SEQ ID NO: 3073784 - RNA, 18 nt, Human
cuacccagcgagcccugg

SEQ ID NO: 3073785 - RNA, 17 nt, Human
cuacccucuuagaaaaa

SEQ ID NO: 3073786 - RNA, 13 nt, Human
cuacacugugcug

SEQ ID NO: 3073787 - RNA, 14 nt, Human
cuacacugugcuga

SEQ ID NO: 3073788 - RNA, 17 nt, Human
cuacacugugcugaguc

SEQ ID NO: 3073789 - RNA, 17 nt, Human
cuacagaggccaugggc

SEQ ID NO: 3073790 - RNA, 20 nt, Human
cuacagaggccaugggccuc

SEQ ID NO: 3073791 - RNA, 18 nt, Human
cuacagaggccaugggcc

SEQ ID NO: 3073792 - RNA, 22 nt, Human
cuacagaggccaugggccuccu

SEQ ID NO: 3073793 - RNA, 19 nt, Human
cuacagcuugaccgugagg

SEQ ID NO: 3073794 - RNA, 22 nt, Human
cuacagcuugaccgugaggcca

SEQ ID NO: 3073795 - RNA, 23 nt, Human
cuacagcuugaccgugaggccag

SEQ ID NO: 3073796 - RNA, 16 nt, Human
cuacaggagugagcac

SEQ ID NO: 3073797 - RNA, 15 nt, Human
cuacaggagugagca

SEQ ID NO: 3073798 - RNA, 14 nt, Human
cuacaggagugagc

SEQ ID NO: 3073799 - RNA, 17 nt, Human
cuacaggcacccaccau

SEQ ID NO: 3073800 - RNA, 15 nt, Human
cuacaggcacccacc

SEQ ID NO: 3073801 - RNA, 20 nt, Human
cuacauggaguauaugucaa

SEQ ID NO: 3073802 - RNA, 18 nt, Human
cuacauggaguauauguc

SEQ ID NO: 3073803 - RNA, 13 nt, Human
cuacaguccuccc

SEQ ID NO: 3073804 - RNA, 14 nt, Human
cuacaggugugagu

SEQ ID NO: 3073805 - RNA, 16 nt, Human
cuacaggugugaguca

SEQ ID NO: 3073806 - RNA, 13 nt, Human
cucaaauuucuaa

SEQ ID NO: 3073807 - RNA, 17 nt, Human
cucaaauuucuaaaucu

SEQ ID NO: 3073808 - RNA, 15 nt, Human
cucaaauuucuaaau

SEQ ID NO: 3073809 - RNA, 14 nt, Human
cucaacucuccucc

SEQ ID NO: 3073810 - RNA, 14 nt, Human
cucaaauuucuaaa

SEQ ID NO: 3073811 - RNA, 23 nt, Human
cucacacggacacucaaaagcug

SEQ ID NO: 3073812 - RNA, 16 nt, Human
cucaacucuccuccag

SEQ ID NO: 3073813 - RNA, 18 nt, Human
cucaacucuccuccagag

SEQ ID NO: 3073814 - RNA, 18 nt, Human
cuauuguuagucucuuga

SEQ ID NO: 3073815 - RNA, 16 nt, Human
cuauugcugcuugagg

SEQ ID NO: 3073816 - RNA, 21 nt, Human
cuauucaggagaguagaacag

SEQ ID NO: 3073817 - RNA, 17 nt, Human
cuauucaguaauaacuc

SEQ ID NO: 3073818 - RNA, 13 nt, Human
cuauguaucaaug

SEQ ID NO: 3073819 - RNA, 23 nt, Human
cuauucaguaauaacucuacccu

SEQ ID NO: 3073820 - RNA, 22 nt, Human
cuaugaaguuuuuuuuauacag

SEQ ID NO: 3073821 - RNA, 21 nt, Human
cuaugcauuugaaaauuuuga

SEQ ID NO: 3073822 - RNA, 18 nt, Human
cuaugaaauauuauguua

SEQ ID NO: 3073823 - RNA, 19 nt, Human
cuaugaaauauuauguuaa

SEQ ID NO: 3073824 - RNA, 12 nt, Human
cuauaauuuaaa

SEQ ID NO: 3073825 - RNA, 20 nt, Human
cuaggaacacuccuucacag

SEQ ID NO: 3073826 - RNA, 15 nt, Human
cuaggaagacuuugg

SEQ ID NO: 3073827 - RNA, 17 nt, Human
cuaggaagacuuuggaa

SEQ ID NO: 3073828 - RNA, 21 nt, Human
cuauagccuaggugacagagu

SEQ ID NO: 3073829 - RNA, 20 nt, Human
cuauagccuaggugacagag

SEQ ID NO: 3073830 - RNA, 18 nt, Human
cuauagccuaggugacag

SEQ ID NO: 3073831 - RNA, 19 nt, Human
cuauagccuaggugacaga

SEQ ID NO: 3073832 - RNA, 22 nt, Human
cuagcuaauguaauaacuguga

SEQ ID NO: 3073833 - RNA, 23 nt, Human
cuagccuuagaagucacacagua

SEQ ID NO: 3073834 - RNA, 22 nt, Human
cuagccuuagaagucacacagu

SEQ ID NO: 3073835 - RNA, 19 nt, Human
cuagccugugccucuggga

SEQ ID NO: 3073836 - RNA, 21 nt, Human
cuagccugugccucugggacu

SEQ ID NO: 3073837 - RNA, 22 nt, Human
cuagccugugccucugggacug

SEQ ID NO: 3073838 - RNA, 21 nt, Human
cuagccuuagaagucacacag

SEQ ID NO: 3073839 - RNA, 16 nt, Human
cuagauacuguaucau

SEQ ID NO: 3073840 - RNA, 13 nt, Human
cuagauacuguau

SEQ ID NO: 3073841 - RNA, 24 nt, Human
cuagauacuguaucaugacaaaga

SEQ ID NO: 3073842 - RNA, 14 nt, Human
cuaggaaauauuua

SEQ ID NO: 3073843 - RNA, 15 nt, Human
cuaggaaauauuuau

SEQ ID NO: 3073844 - RNA, 19 nt, Human
cuaggaaauauuuauuuua

SEQ ID NO: 3073845 - RNA, 20 nt, Human
cuaggaaauauuuauuuuaa

SEQ ID NO: 3073846 - RNA, 23 nt, Human
cuacugccauccuggcccagggc

SEQ ID NO: 3073847 - RNA, 14 nt, Human
cuacugccauccug

SEQ ID NO: 3073848 - RNA, 15 nt, Human
cuacugccauccugg

SEQ ID NO: 3073849 - RNA, 16 nt, Human
cuacugccauccuggc

SEQ ID NO: 3073850 - RNA, 17 nt, Human
cuacugccauccuggcc

SEQ ID NO: 3073851 - RNA, 18 nt, Human
cuacugccauccuggccc

SEQ ID NO: 3073852 - RNA, 19 nt, Human
cuacugccauccuggccca

SEQ ID NO: 3073853 - RNA, 20 nt, Human
cuacugccauccuggcccag

SEQ ID NO: 3073854 - RNA, 22 nt, Human
cuacugccauccuggcccaggg

SEQ ID NO: 3073855 - RNA, 21 nt, Human
cuacuguaauuugugauacaa

SEQ ID NO: 3073856 - RNA, 19 nt, Human
cuacuguccuacccacccu

SEQ ID NO: 3073857 - RNA, 12 nt, Human
cuacucuguguc

SEQ ID NO: 3073858 - RNA, 16 nt, Human
cuacucgaguuacaga

SEQ ID NO: 3073859 - RNA, 19 nt, Human
cuacucgaguuacagacaa

SEQ ID NO: 3073860 - RNA, 15 nt, Human
cuacucgaguuacag

SEQ ID NO: 3073861 - RNA, 15 nt, Human
cuagagguucaaaga

SEQ ID NO: 3073862 - RNA, 18 nt, Human
cuagaguuuagcuggaaa

SEQ ID NO: 3073863 - RNA, 19 nt, Human
cuagaguuuagcuggaaaa

SEQ ID NO: 3073864 - RNA, 21 nt, Human
cuagagguucaaagauauuuu

SEQ ID NO: 3073865 - RNA, 18 nt, Human
cuagagguucaaagauau

SEQ ID NO: 3073866 - RNA, 17 nt, Human
cuagagguucaaagaua

SEQ ID NO: 3073867 - RNA, 20 nt, Human
cuacuguccuacccacccuc

SEQ ID NO: 3073868 - RNA, 24 nt, Human
cucaggagcccugggaggcucugg

SEQ ID NO: 3073869 - RNA, 18 nt, Human
cucaggcaggugggaugg

SEQ ID NO: 3073870 - RNA, 15 nt, Human
cucaggcagguggga

SEQ ID NO: 3073871 - RNA, 19 nt, Human
cucagggccuggcucaggu

SEQ ID NO: 3073872 - RNA, 20 nt, Human
cucagggccuggcucaggug

SEQ ID NO: 3073873 - RNA, 18 nt, Human
cucagggccuggcucagg

SEQ ID NO: 3073874 - RNA, 23 nt, Human
cucaggugauccacccaccucag

SEQ ID NO: 3073875 - RNA, 22 nt, Human
cucaggugauccacccaccuca

SEQ ID NO: 3073876 - RNA, 19 nt, Human
cucagguggggucacucug

SEQ ID NO: 3073877 - RNA, 20 nt, Human
cucagguggggucacucugg

SEQ ID NO: 3073878 - RNA, 21 nt, Human
cucagguggggucacucuggc

SEQ ID NO: 3073879 - RNA, 14 nt, Human
cucagggccugguc

SEQ ID NO: 3073880 - RNA, 20 nt, Human
cucagggucccugguggcag

SEQ ID NO: 3073881 - RNA, 21 nt, Human
cucagggucccugguggcagc

SEQ ID NO: 3073882 - RNA, 22 nt, Human
cucagggucccugguggcagcu

SEQ ID NO: 3073883 - RNA, 24 nt, Human
cucagggucccugguggcagcuca

SEQ ID NO: 3073884 - RNA, 18 nt, Human
cucagggucccugguggc

SEQ ID NO: 3073885 - RNA, 23 nt, Human
cucaggagcccugggaggcucug

SEQ ID NO: 3073886 - RNA, 22 nt, Human
cucaggagcccugggaggcucu

SEQ ID NO: 3073887 - RNA, 21 nt, Human
cucaggagcccugggaggcuc

SEQ ID NO: 3073888 - RNA, 20 nt, Human
cucaggagcccugggaggcu

SEQ ID NO: 3073889 - RNA, 17 nt, Human
cucaggagcccugggag

SEQ ID NO: 3073890 - RNA, 16 nt, Human
cucaggagcccuggga

SEQ ID NO: 3073891 - RNA, 15 nt, Human
cucaggagcccuggg

SEQ ID NO: 3073892 - RNA, 14 nt, Human
cucaggagcccugg

SEQ ID NO: 3073893 - RNA, 13 nt, Human
cucaggagcccug

SEQ ID NO: 3073894 - RNA, 12 nt, Human
cucaggagcccu

SEQ ID NO: 3073895 - RNA, 22 nt, Human
cucaggaaaucaaauaugcaaa

SEQ ID NO: 3073896 - RNA, 19 nt, Human
cucagcaaaagaugcuucu

SEQ ID NO: 3073897 - RNA, 20 nt, Human
cucagcaaaagaugcuucuc

SEQ ID NO: 3073898 - RNA, 16 nt, Human
cucagcaggggagggu

SEQ ID NO: 3073899 - RNA, 22 nt, Human
cucagcauccuggcacccggcc

SEQ ID NO: 3073900 - RNA, 21 nt, Human
cucagcauccuggcacccggc

SEQ ID NO: 3073901 - RNA, 13 nt, Human
cucagcauccugg

SEQ ID NO: 3073902 - RNA, 21 nt, Human
cucagcggggacagcuccuuc

SEQ ID NO: 3073903 - RNA, 20 nt, Human
cucagcggggacagcuccuu

SEQ ID NO: 3073904 - RNA, 19 nt, Human
cucagcggggacagcuccu

SEQ ID NO: 3073905 - RNA, 18 nt, Human
cucagcggggacagcucc

SEQ ID NO: 3073906 - RNA, 16 nt, Human
cucagcggggacagcu

SEQ ID NO: 3073907 - RNA, 15 nt, Human
cucagcggggacagc

SEQ ID NO: 3073908 - RNA, 14 nt, Human
cucagcggggacag

SEQ ID NO: 3073909 - RNA, 23 nt, Human
cucagcggggacagcuccuucug

SEQ ID NO: 3073910 - RNA, 13 nt, Human
cucagcggggaca

SEQ ID NO: 3073911 - RNA, 14 nt, Human
cucacugcagccuc

SEQ ID NO: 3073912 - RNA, 16 nt, Human
cucacugcagccucaa

SEQ ID NO: 3073913 - RNA, 15 nt, Human
cucacugcagccuca

SEQ ID NO: 3073914 - RNA, 15 nt, Human
cucacuguugcccag

SEQ ID NO: 3073915 - RNA, 14 nt, Human
cucacuguugccca

SEQ ID NO: 3073916 - RNA, 16 nt, Human
cucagaucuucugugg

SEQ ID NO: 3073917 - RNA, 21 nt, Human
cucagaugcacaugagcuggc

SEQ ID NO: 3073918 - RNA, 19 nt, Human
cucacuguugcccaggcug

SEQ ID NO: 3073919 - RNA, 18 nt, Human
cucacuguugcccaggcu

SEQ ID NO: 3073920 - RNA, 17 nt, Human
cucacuguugcccaggc

SEQ ID NO: 3073921 - RNA, 16 nt, Human
cucacuguugcccagg

SEQ ID NO: 3073922 - RNA, 23 nt, Human
cucagagagggugggagugggcc

SEQ ID NO: 3073923 - RNA, 19 nt, Human
cucagagagggugggagug

SEQ ID NO: 3073924 - RNA, 18 nt, Human
cucagagagggugggagu

SEQ ID NO: 3073925 - RNA, 14 nt, Human
cuccccucggagaa

SEQ ID NO: 3073926 - RNA, 14 nt, Human
cuccccugcugggu

SEQ ID NO: 3073927 - RNA, 21 nt, Human
cuccccugcuggguguggcgc

SEQ ID NO: 3073928 - RNA, 23 nt, Human
cuccccugcuggguguggcgcag

SEQ ID NO: 3073929 - RNA, 15 nt, Human
cucccuucauccuuc

SEQ ID NO: 3073930 - RNA, 14 nt, Human
cucccugcugcucc

SEQ ID NO: 3073931 - RNA, 16 nt, Human
cucccugcugcuccua

SEQ ID NO: 3073932 - RNA, 17 nt, Human
cucccugcugcuccuag

SEQ ID NO: 3073933 - RNA, 19 nt, Human
cucccgaauagcugggacu

SEQ ID NO: 3073934 - RNA, 23 nt, Human
cucccgaauagcugggacuacag

SEQ ID NO: 3073935 - RNA, 20 nt, Human
cucccgaauagcugggacua

SEQ ID NO: 3073936 - RNA, 23 nt, Human
cucccaaagugcugggauuacag

SEQ ID NO: 3073937 - RNA, 16 nt, Human
cucccaaagugcuggg

SEQ ID NO: 3073938 - RNA, 14 nt, Human
cucccaacucaccc

SEQ ID NO: 3073939 - RNA, 15 nt, Human
cucccaacucacccc

SEQ ID NO: 3073940 - RNA, 15 nt, Human
cucccacaaaggaga

SEQ ID NO: 3073941 - RNA, 21 nt, Human
cuccagcugcugagauccugg

SEQ ID NO: 3073942 - RNA, 23 nt, Human
cuccagcugcugagauccuggac

SEQ ID NO: 3073943 - RNA, 20 nt, Human
cuccagcugcugagauccug

SEQ ID NO: 3073944 - RNA, 14 nt, Human
cuccagcugcugag

SEQ ID NO: 3073945 - RNA, 16 nt, Human
cucccaucacuucccu

SEQ ID NO: 3073946 - RNA, 14 nt, Human
cucccaucacccgc

SEQ ID NO: 3073947 - RNA, 24 nt, Human
cucccaugagggagaugccaugag

SEQ ID NO: 3073948 - RNA, 21 nt, Human
cucauaaaaagccugcaauuu

SEQ ID NO: 3073949 - RNA, 17 nt, Human
cucauugaccugaggcc

SEQ ID NO: 3073950 - RNA, 22 nt, Human
cucauucuccuuguguuacuaa

SEQ ID NO: 3073951 - RNA, 18 nt, Human
cucauucuccuuguguua

SEQ ID NO: 3073952 - RNA, 19 nt, Human
cucauugaccugaggcccu

SEQ ID NO: 3073953 - RNA, 21 nt, Human
cucauugaccugaggcccuuc

SEQ ID NO: 3073954 - RNA, 18 nt, Human
cucauuugucacacacuu

SEQ ID NO: 3073955 - RNA, 17 nt, Human
cucauuuccaagcaagu

SEQ ID NO: 3073956 - RNA, 21 nt, Human
cucauuugucacacacuuugg

SEQ ID NO: 3073957 - RNA, 13 nt, Human
cucauuuccaagc

SEQ ID NO: 3073958 - RNA, 14 nt, Human
cucauuuccaagca

SEQ ID NO: 3073959 - RNA, 12 nt, Human
cucauuuccaag

SEQ ID NO: 3073960 - RNA, 17 nt, Human
cuccaagcucccaggca

SEQ ID NO: 3073961 - RNA, 21 nt, Human
cuccaaacccucgaggcggau

SEQ ID NO: 3073962 - RNA, 18 nt, Human
cuccaaaauaaaacuuuu

SEQ ID NO: 3073963 - RNA, 23 nt, Human
cucauuuuuauaaugucccuuca

SEQ ID NO: 3073964 - RNA, 17 nt, Human
cuccaaacccucgaggc

SEQ ID NO: 3073965 - RNA, 15 nt, Human
cuccaaacccucgag

SEQ ID NO: 3073966 - RNA, 16 nt, Human
cuccagagucagaagu

SEQ ID NO: 3073967 - RNA, 18 nt, Human
cuccagagccccacagcc

SEQ ID NO: 3073968 - RNA, 21 nt, Human
cuccagagccccacagcccca

SEQ ID NO: 3073969 - RNA, 16 nt, Human
cuccagagccccacag

SEQ ID NO: 3073970 - RNA, 13 nt, Human
cuccagccccugg

SEQ ID NO: 3073971 - RNA, 14 nt, Human
cuccagccccugga

SEQ ID NO: 3073972 - RNA, 11 nt, Human
cuccagccccu

SEQ ID NO: 3073973 - RNA, 18 nt, Human
cuccagcucaccagcccc

SEQ ID NO: 3073974 - RNA, 16 nt, Human
cuccagcucaccagcc

SEQ ID NO: 3073975 - RNA, 15 nt, Human
cuccagcucaccagc

SEQ ID NO: 3073976 - RNA, 14 nt, Human
cuccagcucaccag

SEQ ID NO: 3073977 - RNA, 20 nt, Human
ccugugccucugggacugga

SEQ ID NO: 3073978 - RNA, 18 nt, Human
ccuguggaucaaauccag

SEQ ID NO: 3073979 - RNA, 20 nt, Human
ccuguggaugauaaaacaca

SEQ ID NO: 3073980 - RNA, 17 nt, Human
ccuguggaugcugcugc

SEQ ID NO: 3073981 - RNA, 19 nt, Human
ccuguggaugcugcugccc

SEQ ID NO: 3073982 - RNA, 20 nt, Human
ccugugggcccccaaaugga

SEQ ID NO: 3073983 - RNA, 17 nt, Human
ccuuccauggacuuugu

SEQ ID NO: 3073984 - RNA, 13 nt, Human
ccuuccaggggug

SEQ ID NO: 3073985 - RNA, 16 nt, Human
ccuucggccuccaucc

SEQ ID NO: 3073986 - RNA, 17 nt, Human
ccuucggccuccauccu

SEQ ID NO: 3073987 - RNA, 18 nt, Human
ccuucggccuccauccug

SEQ ID NO: 3073988 - RNA, 12 nt, Human
ccuucucuccag

SEQ ID NO: 3073989 - RNA, 13 nt, Human
ccuucucuccagc

SEQ ID NO: 3073990 - RNA, 15 nt, Human
ccuucucuccagccc

SEQ ID NO: 3073991 - RNA, 16 nt, Human
ccuucucuccagcccc

SEQ ID NO: 3073992 - RNA, 19 nt, Human
ccuucucuccagccccugg

SEQ ID NO: 3073993 - RNA, 15 nt, Human
ccuuggauugucccc

SEQ ID NO: 3073994 - RNA, 15 nt, Human
ccuuggacucauuuu

SEQ ID NO: 3073995 - RNA, 22 nt, Human
ccuuggcucaaguccucuuuuc

SEQ ID NO: 3073996 - RNA, 17 nt, Human
ccuucucuccagccccu

SEQ ID NO: 3073997 - RNA, 18 nt, Human
ccuucucuccagccccug

SEQ ID NO: 3073998 - RNA, 21 nt, Human
ccuugacagggcacaccgggc

SEQ ID NO: 3073999 - RNA, 18 nt, Human
ccuugacagggcacaccg

SEQ ID NO: 3074000 - RNA, 14 nt, Human
ccuuggggagcagg

SEQ ID NO: 3074001 - RNA, 16 nt, Human
ccuuggcugcagggag

SEQ ID NO: 3074002 - RNA, 14 nt, Human
ccuuggcugcaggg

SEQ ID NO: 3074003 - RNA, 19 nt, Human
ccuuggugucgggcaugac

SEQ ID NO: 3074004 - RNA, 20 nt, Human
ccuuggugucgggcaugaca

SEQ ID NO: 3074005 - RNA, 14 nt, Human
ccuuuguccccacc

SEQ ID NO: 3074006 - RNA, 16 nt, Human
ccuuuguccccaccgc

SEQ ID NO: 3074007 - RNA, 18 nt, Human
ccuuuguccccaccgcag

SEQ ID NO: 3074008 - RNA, 23 nt, Human
ccuuuguauucucuccuguaccu

SEQ ID NO: 3074009 - RNA, 22 nt, Human
ccuuuguauucucuccuguacc

SEQ ID NO: 3074010 - RNA, 24 nt, Human
ccuuuguauucucuccuguaccuc

SEQ ID NO: 3074011 - RNA, 23 nt, Human
ccuugucggccccaccagugccu

SEQ ID NO: 3074012 - RNA, 15 nt, Human
ccuuuuuuggcugcu

SEQ ID NO: 3074013 - RNA, 19 nt, Human
ccuuuuuuauacauaaaca

SEQ ID NO: 3074014 - RNA, 15 nt, Human
ccuuugugaggaagc

SEQ ID NO: 3074015 - RNA, 16 nt, Human
ccuuugugaggaagcc

SEQ ID NO: 3074016 - RNA, 17 nt, Human
ccuuugugaggaagccg

SEQ ID NO: 3074017 - RNA, 23 nt, Human
ccuuugugaggaagccgcugggg

SEQ ID NO: 3074018 - RNA, 22 nt, Human
ccuuuguccccaccgcagacag

SEQ ID NO: 3074019 - RNA, 23 nt, Human
ccuuuguccccaccgcagacagg

SEQ ID NO: 3074020 - RNA, 14 nt, Human
ccuuugugaggaag

SEQ ID NO: 3074021 - RNA, 23 nt, Human
cgaagaguauuuuugacagaaua

SEQ ID NO: 3074022 - RNA, 23 nt, Human
cgaacauguuuuucuucucccuc

SEQ ID NO: 3074023 - RNA, 21 nt, Human
cgaacauguuuuucuucuccc

SEQ ID NO: 3074024 - RNA, 17 nt, Human
ccuuuuuuggcugcuga

SEQ ID NO: 3074025 - RNA, 18 nt, Human
ccuuuuuuggcugcugaa

SEQ ID NO: 3074026 - RNA, 20 nt, Human
ccuuuuuuggcugcugaagg

SEQ ID NO: 3074027 - RNA, 22 nt, Human
ccuuuuuuggcugcugaaggcu

SEQ ID NO: 3074028 - RNA, 23 nt, Human
cgaaagggacuuggaagcuccgc

SEQ ID NO: 3074029 - RNA, 12 nt, Human
cgaauauugcug

SEQ ID NO: 3074030 - RNA, 14 nt, Human
cgaauauugcugau

SEQ ID NO: 3074031 - RNA, 11 nt, Human
cgaauauugcu

SEQ ID NO: 3074032 - RNA, 16 nt, Human
cgaauagcugggacua

SEQ ID NO: 3074033 - RNA, 15 nt, Human
cgaauagcugggacu

SEQ ID NO: 3074034 - RNA, 15 nt, Human
cgaauauugcugaug

SEQ ID NO: 3074035 - RNA, 17 nt, Human
cgaauauugcugauggu

SEQ ID NO: 3074036 - RNA, 19 nt, Human
cgcgguggcucacgccugu

SEQ ID NO: 3074037 - RNA, 14 nt, Human
cgcgacaaugcaaa

SEQ ID NO: 3074038 - RNA, 16 nt, Human
cgccuugcccagccug

SEQ ID NO: 3074039 - RNA, 19 nt, Human
cgccuugcccagccuggau

SEQ ID NO: 3074040 - RNA, 15 nt, Human
cgccuugcccagccu

SEQ ID NO: 3074041 - RNA, 17 nt, Human
cgcuacccgggaagggg

SEQ ID NO: 3074042 - RNA, 18 nt, Human
cgcuacccgggaaggggg

SEQ ID NO: 3074043 - RNA, 21 nt, Human
cgcuacccgggaagggggcug

SEQ ID NO: 3074044 - RNA, 24 nt, Human
cgcuacccgggaagggggcuggga

SEQ ID NO: 3074045 - RNA, 12 nt, Human
cgcccagucugg

SEQ ID NO: 3074046 - RNA, 17 nt, Human
cgcccaaggccuucccc

SEQ ID NO: 3074047 - RNA, 21 nt, Human
cgcccagucuggaaugcagug

SEQ ID NO: 3074048 - RNA, 19 nt, Human
cgcccagucuggaaugcag

SEQ ID NO: 3074049 - RNA, 13 nt, Human
cgcccagucugga

SEQ ID NO: 3074050 - RNA, 12 nt, Human
cgcccaaggccu

SEQ ID NO: 3074051 - RNA, 18 nt, Human
cgcagcccugcagagggc

SEQ ID NO: 3074052 - RNA, 19 nt, Human
cgcagcccugcagagggca

SEQ ID NO: 3074053 - RNA, 20 nt, Human
cggacagccacggccaggcc

SEQ ID NO: 3074054 - RNA, 14 nt, Human
cggaauaguuggcu

SEQ ID NO: 3074055 - RNA, 17 nt, Human
cggaauaguuggcuagg

SEQ ID NO: 3074056 - RNA, 16 nt, Human
cggaauaguuggcuag

SEQ ID NO: 3074057 - RNA, 16 nt, Human
cgcuuucuacccagcg

SEQ ID NO: 3074058 - RNA, 14 nt, Human
cgcuuucuacccag

SEQ ID NO: 3074059 - RNA, 22 nt, Human
cggacagccacggccaggccag

SEQ ID NO: 3074060 - RNA, 21 nt, Human
cggacagccacggccaggcca

SEQ ID NO: 3074061 - RNA, 17 nt, Human
cggagaaaggaagggcu

SEQ ID NO: 3074062 - RNA, 15 nt, Human
cggagaaaggaaggg

SEQ ID NO: 3074063 - RNA, 13 nt, Human
cgcugugcugccc

SEQ ID NO: 3074064 - RNA, 14 nt, Human
cgcugugcugcccu

SEQ ID NO: 3074065 - RNA, 11 nt, Human
cgcugugcugc

SEQ ID NO: 3074066 - RNA, 21 nt, Human
cgcugugcugcccugcccacc

SEQ ID NO: 3074067 - RNA, 23 nt, Human
cgcugugcugcccugcccaccug

SEQ ID NO: 3074068 - RNA, 19 nt, Human
cgcugugcugcccugccca

SEQ ID NO: 3074069 - RNA, 18 nt, Human
cgcugugcugcccugccc

SEQ ID NO: 3074070 - RNA, 18 nt, Human
cgggaauuuucaucuagg

SEQ ID NO: 3074071 - RNA, 20 nt, Human
cgggaauuuucaucuaggau

SEQ ID NO: 3074072 - RNA, 19 nt, Human
cgggaagggggcugggaca

SEQ ID NO: 3074073 - RNA, 20 nt, Human
cgggaagggggcugggacau

SEQ ID NO: 3074074 - RNA, 16 nt, Human
cgggaagggggcuggg

SEQ ID NO: 3074075 - RNA, 23 nt, Human
cggcuggcagcccaccccucaac

SEQ ID NO: 3074076 - RNA, 13 nt, Human
cggcuggccuggc

SEQ ID NO: 3074077 - RNA, 14 nt, Human
cggcuggcagccca

SEQ ID NO: 3074078 - RNA, 16 nt, Human
cggcccuccagagccc

SEQ ID NO: 3074079 - RNA, 20 nt, Human
cggcccuccagagccccaca

SEQ ID NO: 3074080 - RNA, 11 nt, Human
cggccaggcca

SEQ ID NO: 3074081 - RNA, 20 nt, Human
cggccaggccagagggagug

SEQ ID NO: 3074082 - RNA, 12 nt, Human
cggccaggccag

SEQ ID NO: 3074083 - RNA, 13 nt, Human
cggcccuccagag

SEQ ID NO: 3074084 - RNA, 13 nt, Human
cgcacugggcuug

SEQ ID NO: 3074085 - RNA, 19 nt, Human
cgcagcauauucaggaagc

SEQ ID NO: 3074086 - RNA, 20 nt, Human
cgcagcauauucaggaagcu

SEQ ID NO: 3074087 - RNA, 15 nt, Human
cgcagcccugcagag

SEQ ID NO: 3074088 - RNA, 17 nt, Human
cgcagcccugcagaggg

SEQ ID NO: 3074089 - RNA, 17 nt, Human
cgcacugggcuugggga

SEQ ID NO: 3074090 - RNA, 19 nt, Human
cgagcccugguggcagugg

SEQ ID NO: 3074091 - RNA, 14 nt, Human
cgaggacagggagg

SEQ ID NO: 3074092 - RNA, 13 nt, Human
cgagccuggcucc

SEQ ID NO: 3074093 - RNA, 18 nt, Human
cgagcccugguggcagug

SEQ ID NO: 3074094 - RNA, 16 nt, Human
cgaggacagggaggug

SEQ ID NO: 3074095 - RNA, 18 nt, Human
ccugguggcagcugcggu

SEQ ID NO: 3074096 - RNA, 17 nt, Human
ccugguggcagcugcgg

SEQ ID NO: 3074097 - RNA, 16 nt, Human
ccugguggcagcugcg

SEQ ID NO: 3074098 - RNA, 15 nt, Human
ccugguggcagcugc

SEQ ID NO: 3074099 - RNA, 19 nt, Human
ccugguggcagcucaccuc

SEQ ID NO: 3074100 - RNA, 21 nt, Human
ccugguggcagcucaccucuc

SEQ ID NO: 3074101 - RNA, 22 nt, Human
ccugguggcagcucaccucucc

SEQ ID NO: 3074102 - RNA, 14 nt, Human
ccugguggcagcug

SEQ ID NO: 3074103 - RNA, 13 nt, Human
ccugucccccuga

SEQ ID NO: 3074104 - RNA, 14 nt, Human
ccugucccccugac

SEQ ID NO: 3074105 - RNA, 15 nt, Human
ccugucccccugaca

SEQ ID NO: 3074106 - RNA, 12 nt, Human
ccugucccccug

SEQ ID NO: 3074107 - RNA, 13 nt, Human
ccuguagcccuaa

SEQ ID NO: 3074108 - RNA, 15 nt, Human
ccuguagagugggag

SEQ ID NO: 3074109 - RNA, 16 nt, Human
ccuguagagugggagc

SEQ ID NO: 3074110 - RNA, 14 nt, Human
ccugguggcagugg

SEQ ID NO: 3074111 - RNA, 13 nt, Human
ccugguggcagug

SEQ ID NO: 3074112 - RNA, 10 nt, Human
ccuguaccuc

SEQ ID NO: 3074113 - RNA, 20 nt, Human
ccugggggcugggcagagga

SEQ ID NO: 3074114 - RNA, 21 nt, Human
ccugggggcugggcagaggaa

SEQ ID NO: 3074115 - RNA, 19 nt, Human
ccugggggcugggcagagg

SEQ ID NO: 3074116 - RNA, 18 nt, Human
ccugggggcugggcagag

SEQ ID NO: 3074117 - RNA, 15 nt, Human
ccugggcagaaggaa

SEQ ID NO: 3074118 - RNA, 18 nt, Human
ccugggagugagcugguu

SEQ ID NO: 3074119 - RNA, 16 nt, Human
ccugggcagaaggaag

SEQ ID NO: 3074120 - RNA, 22 nt, Human
ccugggaggucaaggcugcagu

SEQ ID NO: 3074121 - RNA, 16 nt, Human
ccugggagugagcugg

SEQ ID NO: 3074122 - RNA, 16 nt, Human
ccuggcccacugcauc

SEQ ID NO: 3074123 - RNA, 16 nt, Human
ccuggcccagggcauc

SEQ ID NO: 3074124 - RNA, 21 nt, Human
ccuggcccagggcaucuggga

SEQ ID NO: 3074125 - RNA, 13 nt, Human
ccuggcccagggc

SEQ ID NO: 3074126 - RNA, 14 nt, Human
ccuggcccagggca

SEQ ID NO: 3074127 - RNA, 15 nt, Human
ccuggcccagggcau

SEQ ID NO: 3074128 - RNA, 12 nt, Human
ccuggcccaggg

SEQ ID NO: 3074129 - RNA, 13 nt, Human
ccuggcacugcuu

SEQ ID NO: 3074130 - RNA, 16 nt, Human
ccuggcacugcuucca

SEQ ID NO: 3074131 - RNA, 13 nt, Human
ccuggcaugggaa

SEQ ID NO: 3074132 - RNA, 23 nt, Human
ccuggcaugggaaugaaugucag

SEQ ID NO: 3074133 - RNA, 20 nt, Human
ccuggccagaugcaccagcc

SEQ ID NO: 3074134 - RNA, 23 nt, Human
ccuggccagaugcaccagcccuu

SEQ ID NO: 3074135 - RNA, 21 nt, Human
ccuggccagaugcaccagccc

SEQ ID NO: 3074136 - RNA, 13 nt, Human
ccuggcccacugc

SEQ ID NO: 3074137 - RNA, 14 nt, Human
ccuggcccacugca

SEQ ID NO: 3074138 - RNA, 12 nt, Human
ccuggcacugcu

SEQ ID NO: 3074139 - RNA, 22 nt, Human
ccuggcacuauaauguaagcuc

SEQ ID NO: 3074140 - RNA, 18 nt, Human
ccuggcacccggccccug

SEQ ID NO: 3074141 - RNA, 21 nt, Human
ccuggcacccggccccugcug

SEQ ID NO: 3074142 - RNA, 20 nt, Human
ccuggcacccggccccugcu

SEQ ID NO: 3074143 - RNA, 19 nt, Human
ccuggcacccggccccugc

SEQ ID NO: 3074144 - RNA, 18 nt, Human
ccugccuguugggccagg

SEQ ID NO: 3074145 - RNA, 19 nt, Human
ccugccuguugggccagga

SEQ ID NO: 3074146 - RNA, 20 nt, Human
ccugccuguugggccaggag

SEQ ID NO: 3074147 - RNA, 21 nt, Human
ccugcuaauuccccagauugc

SEQ ID NO: 3074148 - RNA, 17 nt, Human
ccugcuaauuccccaga

SEQ ID NO: 3074149 - RNA, 15 nt, Human
ccugcccugugggcc

SEQ ID NO: 3074150 - RNA, 19 nt, Human
ccugcccuuaccugccagg

SEQ ID NO: 3074151 - RNA, 21 nt, Human
ccugcccuuaccugccaggaa

SEQ ID NO: 3074152 - RNA, 22 nt, Human
ccugcccuuaccugccaggaag

SEQ ID NO: 3074153 - RNA, 14 nt, Human
ccugccuguugggc

SEQ ID NO: 3074154 - RNA, 11 nt, Human
ccugccucagc

SEQ ID NO: 3074155 - RNA, 12 nt, Human
ccugccucagcc

SEQ ID NO: 3074156 - RNA, 14 nt, Human
ccugccucagccuc

SEQ ID NO: 3074157 - RNA, 13 nt, Human
ccugccucagccu

SEQ ID NO: 3074158 - RNA, 12 nt, Human
ccugcccugugg

SEQ ID NO: 3074159 - RNA, 14 nt, Human
ccugcccugugggc

SEQ ID NO: 3074160 - RNA, 11 nt, Human
ccugcccugug

SEQ ID NO: 3074161 - RNA, 16 nt, Human
ccugcccggcugcgga

SEQ ID NO: 3074162 - RNA, 14 nt, Human
ccugcccggcugcg

SEQ ID NO: 3074163 - RNA, 17 nt, Human
ccugccccugagcccau

SEQ ID NO: 3074164 - RNA, 12 nt, Human
ccugccaggcau

SEQ ID NO: 3074165 - RNA, 22 nt, Human
ccugccagggacagagggggug

SEQ ID NO: 3074166 - RNA, 22 nt, Human
ccugccuguugggccaggagcc

SEQ ID NO: 3074167 - RNA, 21 nt, Human
ccugaagacucauucuucugu

SEQ ID NO: 3074168 - RNA, 18 nt, Human
ccugaaagcccugagcuu

SEQ ID NO: 3074169 - RNA, 13 nt, Human
ccugaaagcccug

SEQ ID NO: 3074170 - RNA, 14 nt, Human
ccugaaagcccuga

SEQ ID NO: 3074171 - RNA, 22 nt, Human
ccugaaggccccgcccaggcuu

SEQ ID NO: 3074172 - RNA, 20 nt, Human
ccugaaggccccgcccaggc

SEQ ID NO: 3074173 - RNA, 21 nt, Human
ccugaaggccccgcccaggcu

SEQ ID NO: 3074174 - RNA, 18 nt, Human
ccugaaggccccgcccag

SEQ ID NO: 3074175 - RNA, 19 nt, Human
ccugaaggccccgcccagg

SEQ ID NO: 3074176 - RNA, 14 nt, Human
ccugaaggccccgc

SEQ ID NO: 3074177 - RNA, 15 nt, Human
ccugagcugggauga

SEQ ID NO: 3074178 - RNA, 23 nt, Human
ccugcacagcaggcugccagugc

SEQ ID NO: 3074179 - RNA, 14 nt, Human
ccugcacagcaggc

SEQ ID NO: 3074180 - RNA, 17 nt, Human
ccugcacagcaggcugc

SEQ ID NO: 3074181 - RNA, 19 nt, Human
ccugcacagcaggcugcca

SEQ ID NO: 3074182 - RNA, 20 nt, Human
ccugcacagcaggcugccag

SEQ ID NO: 3074183 - RNA, 21 nt, Human
ccugcacagcaggcugccagu

SEQ ID NO: 3074184 - RNA, 13 nt, Human
ccugccacccugg

SEQ ID NO: 3074185 - RNA, 12 nt, Human
ccugccacccug

SEQ ID NO: 3074186 - RNA, 14 nt, Human
ccugccacccuggg

SEQ ID NO: 3074187 - RNA, 22 nt, Human
ccugccacccuggggagaaagu

SEQ ID NO: 3074188 - RNA, 16 nt, Human
ccugccacccugggga

SEQ ID NO: 3074189 - RNA, 19 nt, Human
ccugccaauggacuaacuu

SEQ ID NO: 3074190 - RNA, 15 nt, Human
ccugaggcccagagg

SEQ ID NO: 3074191 - RNA, 16 nt, Human
ccugaggcccagaggg

SEQ ID NO: 3074192 - RNA, 17 nt, Human
ccugaggcccagagggc

SEQ ID NO: 3074193 - RNA, 12 nt, Human
ccugagcuggga

SEQ ID NO: 3074194 - RNA, 13 nt, Human
ccugaggcugggc

SEQ ID NO: 3074195 - RNA, 14 nt, Human
ccugaggcugggcu

SEQ ID NO: 3074196 - RNA, 15 nt, Human
ccugaggcugggcuc

SEQ ID NO: 3074197 - RNA, 13 nt, Human
ccugaggcuccac

SEQ ID NO: 3074198 - RNA, 14 nt, Human
ccugaggcuccacu

SEQ ID NO: 3074199 - RNA, 15 nt, Human
ccugagccagauuuc

SEQ ID NO: 3074200 - RNA, 12 nt, Human
ccugagccagau

SEQ ID NO: 3074201 - RNA, 16 nt, Human
ccugagccagauuuca

SEQ ID NO: 3074202 - RNA, 18 nt, Human
ccugagccagauuucacu

SEQ ID NO: 3074203 - RNA, 19 nt, Human
ccugaagucacacagugag

SEQ ID NO: 3074204 - RNA, 20 nt, Human
ccugaagucacacagugagu

SEQ ID NO: 3074205 - RNA, 22 nt, Human
ccugaagucuuuguacagacaa

SEQ ID NO: 3074206 - RNA, 19 nt, Human
ccagccccaaaacucuccu

SEQ ID NO: 3074207 - RNA, 20 nt, Human
ccagccgagauagccaaggc

SEQ ID NO: 3074208 - RNA, 22 nt, Human
ccagccgagauagccaaggcca

SEQ ID NO: 3074209 - RNA, 17 nt, Human
ccagccgagauagccaa

SEQ ID NO: 3074210 - RNA, 19 nt, Human
ccagccgccaugcuccugg

SEQ ID NO: 3074211 - RNA, 19 nt, Human
ccagcaggcucucaggcca

SEQ ID NO: 3074212 - RNA, 20 nt, Human
ccagcaggcucucaggccag

SEQ ID NO: 3074213 - RNA, 21 nt, Human
ccagcaggcucucaggccagc

SEQ ID NO: 3074214 - RNA, 23 nt, Human
ccagcaggcucucaggccagcug

SEQ ID NO: 3074215 - RNA, 17 nt, Human
ccagcccacuucugcca

SEQ ID NO: 3074216 - RNA, 16 nt, Human
ccagcccacuucugcc

SEQ ID NO: 3074217 - RNA, 19 nt, Human
ccagccugagcgacaguga

SEQ ID NO: 3074218 - RNA, 23 nt, Human
ccagccuugaccauucuccaccu

SEQ ID NO: 3074219 - RNA, 22 nt, Human
ccagccuugaccauucuccacc

SEQ ID NO: 3074220 - RNA, 13 nt, Human
ccagccuggguga

SEQ ID NO: 3074221 - RNA, 18 nt, Human
ccagauuucacucuccuu

SEQ ID NO: 3074222 - RNA, 19 nt, Human
ccagauuucacucuccuug

SEQ ID NO: 3074223 - RNA, 15 nt, Human
ccagauuucacucuc

SEQ ID NO: 3074224 - RNA, 22 nt, Human
ccagauugcaacaggcugggcu

SEQ ID NO: 3074225 - RNA, 23 nt, Human
ccagauugcaacaggcugggcuu

SEQ ID NO: 3074226 - RNA, 14 nt, Human
ccagagcccaccuu

SEQ ID NO: 3074227 - RNA, 16 nt, Human
ccagagccccacagcc

SEQ ID NO: 3074228 - RNA, 13 nt, Human
ccagagccccaca

SEQ ID NO: 3074229 - RNA, 16 nt, Human
ccagauugcaacaggc

SEQ ID NO: 3074230 - RNA, 14 nt, Human
ccagauugcaacag

SEQ ID NO: 3074231 - RNA, 17 nt, Human
ccagagccccacagccc

SEQ ID NO: 3074232 - RNA, 23 nt, Human
ccagagccccacagccccaucug

SEQ ID NO: 3074233 - RNA, 17 nt, Human
ccagcaggcucucaggc

SEQ ID NO: 3074234 - RNA, 18 nt, Human
ccagcaggcucucaggcc

SEQ ID NO: 3074235 - RNA, 16 nt, Human
ccagcaggcucucagg

SEQ ID NO: 3074236 - RNA, 17 nt, Human
ccagcaccaucucuccu

SEQ ID NO: 3074237 - RNA, 18 nt, Human
ccagcaccaucucuccuc

SEQ ID NO: 3074238 - RNA, 19 nt, Human
ccagcaagugagagcuggg

SEQ ID NO: 3074239 - RNA, 18 nt, Human
ccagcaagugagagcugg

SEQ ID NO: 3074240 - RNA, 17 nt, Human
ccagcaagugagagcug

SEQ ID NO: 3074241 - RNA, 18 nt, Human
ccagaaaccuuuguuugc

SEQ ID NO: 3074242 - RNA, 22 nt, Human
ccagaagaaaauagugguguga

SEQ ID NO: 3074243 - RNA, 16 nt, Human
ccacugugccaugugc

SEQ ID NO: 3074244 - RNA, 15 nt, Human
ccacugugccaugug

SEQ ID NO: 3074245 - RNA, 19 nt, Human
ccacugugccaugugccag

SEQ ID NO: 3074246 - RNA, 22 nt, Human
ccacuuuuguucuugguuugua

SEQ ID NO: 3074247 - RNA, 21 nt, Human
ccacugcaucguuucaucuuc

SEQ ID NO: 3074248 - RNA, 23 nt, Human
ccacugcaucguuucaucuucca

SEQ ID NO: 3074249 - RNA, 15 nt, Human
ccacugcucugguua

SEQ ID NO: 3074250 - RNA, 13 nt, Human
ccacugcucuggu

SEQ ID NO: 3074251 - RNA, 12 nt, Human
ccacugcucugg

SEQ ID NO: 3074252 - RNA, 11 nt, Human
ccacugcucug

SEQ ID NO: 3074253 - RNA, 20 nt, Human
ccacugcuuuuggucugugu

SEQ ID NO: 3074254 - RNA, 22 nt, Human
ccacugcuuuuggucuguguga

SEQ ID NO: 3074255 - RNA, 23 nt, Human
ccacuggugacaugucuuuucuu

SEQ ID NO: 3074256 - RNA, 15 nt, Human
ccacugguucuucuu

SEQ ID NO: 3074257 - RNA, 14 nt, Human
ccacugugaagaga

SEQ ID NO: 3074258 - RNA, 15 nt, Human
ccacugugaagagaa

SEQ ID NO: 3074259 - RNA, 17 nt, Human
ccagacacauguccaag

SEQ ID NO: 3074260 - RNA, 20 nt, Human
ccagacacauguccaagaag

SEQ ID NO: 3074261 - RNA, 22 nt, Human
ccagacacauguccaagaagcc

SEQ ID NO: 3074262 - RNA, 14 nt, Human
ccagacaucaacag

SEQ ID NO: 3074263 - RNA, 15 nt, Human
ccagacccggcugcg

SEQ ID NO: 3074264 - RNA, 14 nt, Human
ccagacccggcugc

SEQ ID NO: 3074265 - RNA, 19 nt, Human
ccacccccacccaagggcc

SEQ ID NO: 3074266 - RNA, 19 nt, Human
ccaccccucaacaccucug

SEQ ID NO: 3074267 - RNA, 12 nt, Human
ccacccccuagg

SEQ ID NO: 3074268 - RNA, 18 nt, Human
ccacccugaaagcccuga

SEQ ID NO: 3074269 - RNA, 14 nt, Human
ccacccuccuuuca

SEQ ID NO: 3074270 - RNA, 12 nt, Human
ccacccugcucu

SEQ ID NO: 3074271 - RNA, 11 nt, Human
ccacccugcuc

SEQ ID NO: 3074272 - RNA, 14 nt, Human
ccaccucucucacu

SEQ ID NO: 3074273 - RNA, 16 nt, Human
ccaccucucucacucc

SEQ ID NO: 3074274 - RNA, 19 nt, Human
ccaccucucucacuccuug

SEQ ID NO: 3074275 - RNA, 20 nt, Human
ccaccucucucacuccuuga

SEQ ID NO: 3074276 - RNA, 13 nt, Human
ccaccuggccucu

SEQ ID NO: 3074277 - RNA, 18 nt, Human
ccaccuggccucugcacu

SEQ ID NO: 3074278 - RNA, 20 nt, Human
ccaccuggccucugcacucc

SEQ ID NO: 3074279 - RNA, 14 nt, Human
ccaccuggcucugu

SEQ ID NO: 3074280 - RNA, 16 nt, Human
ccaccuggcucugugg

SEQ ID NO: 3074281 - RNA, 13 nt, Human
ccaccuggcucug

SEQ ID NO: 3074282 - RNA, 12 nt, Human
ccaccuggcucu

SEQ ID NO: 3074283 - RNA, 13 nt, Human
ccaccugccaggg

SEQ ID NO: 3074284 - RNA, 14 nt, Human
ccaccugccaggga

SEQ ID NO: 3074285 - RNA, 12 nt, Human
ccaccugccagg

SEQ ID NO: 3074286 - RNA, 15 nt, Human
ccaccugccagggac

SEQ ID NO: 3074287 - RNA, 13 nt, Human
ccaggcccucugc

SEQ ID NO: 3074288 - RNA, 14 nt, Human
ccaggcccucugcc

SEQ ID NO: 3074289 - RNA, 16 nt, Human
ccaggccccugccacc

SEQ ID NO: 3074290 - RNA, 15 nt, Human
ccaggccccugccac

SEQ ID NO: 3074291 - RNA, 14 nt, Human
ccaggccccugcca

SEQ ID NO: 3074292 - RNA, 21 nt, Human
ccaggccacaagacccuugug

SEQ ID NO: 3074293 - RNA, 20 nt, Human
ccaggaggccagccuugacc

SEQ ID NO: 3074294 - RNA, 15 nt, Human
ccaggaggccagccu

SEQ ID NO: 3074295 - RNA, 18 nt, Human
ccaggaggccagccuuga

SEQ ID NO: 3074296 - RNA, 14 nt, Human
ccaggaggccagcc

SEQ ID NO: 3074297 - RNA, 24 nt, Human
ccaggcugggucgcccuggacugu

SEQ ID NO: 3074298 - RNA, 23 nt, Human
ccaggcugggucgcccuggacug

SEQ ID NO: 3074299 - RNA, 22 nt, Human
ccaggcugggucgcccuggacu

SEQ ID NO: 3074300 - RNA, 21 nt, Human
ccaggcugggucgcccuggac

SEQ ID NO: 3074301 - RNA, 16 nt, Human
ccaggcugggucgccc

SEQ ID NO: 3074302 - RNA, 12 nt, Human
ccaggcuggguc

SEQ ID NO: 3074303 - RNA, 15 nt, Human
ccaggcccucugccc

SEQ ID NO: 3074304 - RNA, 23 nt, Human
ccaggcugggagagccuuccagg

SEQ ID NO: 3074305 - RNA, 22 nt, Human
ccaggcuuagucacugagacag

SEQ ID NO: 3074306 - RNA, 23 nt, Human
ccaggcuuagucacugagacagc

SEQ ID NO: 3074307 - RNA, 21 nt, Human
ccaggcuuagucacugagaca

SEQ ID NO: 3074308 - RNA, 18 nt, Human
ccaggguggccacaccuc

SEQ ID NO: 3074309 - RNA, 24 nt, Human
ccaggguggccacaccucuauccc

SEQ ID NO: 3074310 - RNA, 20 nt, Human
ccagguagaggguguguaag

SEQ ID NO: 3074311 - RNA, 23 nt, Human
ccagugaauucuugaaggaaaau

SEQ ID NO: 3074312 - RNA, 21 nt, Human
ccaggugcuaggaacacuccu

SEQ ID NO: 3074313 - RNA, 12 nt, Human
ccaggugccagu

SEQ ID NO: 3074314 - RNA, 22 nt, Human
ccaguaaaugggggugcauuug

SEQ ID NO: 3074315 - RNA, 21 nt, Human
ccaguaaaugggggugcauuu

SEQ ID NO: 3074316 - RNA, 20 nt, Human
ccaguaaaugggggugcauu

SEQ ID NO: 3074317 - RNA, 13 nt, Human
ccagguuuaagcu

SEQ ID NO: 3074318 - RNA, 16 nt, Human
ccagguuucuaugugu

SEQ ID NO: 3074319 - RNA, 14 nt, Human
ccaucauugaaauc

SEQ ID NO: 3074320 - RNA, 16 nt, Human
ccaucauugaaaucuu

SEQ ID NO: 3074321 - RNA, 17 nt, Human
ccaucauugaaaucuuu

SEQ ID NO: 3074322 - RNA, 18 nt, Human
ccauccugaggcuccacu

SEQ ID NO: 3074323 - RNA, 13 nt, Human
ccaucuacccucc

SEQ ID NO: 3074324 - RNA, 16 nt, Human
ccauccugaggcucca

SEQ ID NO: 3074325 - RNA, 20 nt, Human
ccauccugaggcuccacuug

SEQ ID NO: 3074326 - RNA, 14 nt, Human
ccaucucacacaug

SEQ ID NO: 3074327 - RNA, 15 nt, Human
ccaucucacacauga

SEQ ID NO: 3074328 - RNA, 17 nt, Human
ccaucucacacaugagc

SEQ ID NO: 3074329 - RNA, 18 nt, Human
ccaucucacacaugagca

SEQ ID NO: 3074330 - RNA, 20 nt, Human
ccaucucacacaugagcauc

SEQ ID NO: 3074331 - RNA, 21 nt, Human
ccaucucacacaugagcauca

SEQ ID NO: 3074332 - RNA, 15 nt, Human
ccaucucuccuccuu

SEQ ID NO: 3074333 - RNA, 23 nt, Human
ccagugugacaaggauugcuacu

SEQ ID NO: 3074334 - RNA, 14 nt, Human
ccagugugacaagg

SEQ ID NO: 3074335 - RNA, 13 nt, Human
ccauaugccuggg

SEQ ID NO: 3074336 - RNA, 12 nt, Human
ccaucaagccac

SEQ ID NO: 3074337 - RNA, 15 nt, Human
ccauaugccugggca

SEQ ID NO: 3074338 - RNA, 16 nt, Human
ccaucaagccaccaac

SEQ ID NO: 3074339 - RNA, 13 nt, Human
ccaucaagccacc

SEQ ID NO: 3074340 - RNA, 14 nt, Human
ccaucaagccacca

SEQ ID NO: 3074341 - RNA, 12 nt, Human
ccaucauugaaa

SEQ ID NO: 3074342 - RNA, 13 nt, Human
ccaucaugucugg

SEQ ID NO: 3074343 - RNA, 12 nt, Human
ccaucaugucug

SEQ ID NO: 3074344 - RNA, 21 nt, Human
cccacgcuggagugcagugag

SEQ ID NO: 3074345 - RNA, 15 nt, Human
cccaccuuggcugca

SEQ ID NO: 3074346 - RNA, 14 nt, Human
cccaccuuggcugc

SEQ ID NO: 3074347 - RNA, 22 nt, Human
cccaccuuggcucaaguccucu

SEQ ID NO: 3074348 - RNA, 15 nt, Human
cccaccuuggcucaa

SEQ ID NO: 3074349 - RNA, 15 nt, Human
cccacgcccccacug

SEQ ID NO: 3074350 - RNA, 17 nt, Human
cccacgcccccacuggu

SEQ ID NO: 3074351 - RNA, 19 nt, Human
cccacgcccccacugguga

SEQ ID NO: 3074352 - RNA, 14 nt, Human
cccaccucucucac

SEQ ID NO: 3074353 - RNA, 17 nt, Human
cccaccucucucacucc

SEQ ID NO: 3074354 - RNA, 13 nt, Human
cccaccucucuca

SEQ ID NO: 3074355 - RNA, 21 nt, Human
cccaccucagccucccaaagu

SEQ ID NO: 3074356 - RNA, 12 nt, Human
cccaccuuggcu

SEQ ID NO: 3074357 - RNA, 14 nt, Human
cccaccuggcucug

SEQ ID NO: 3074358 - RNA, 15 nt, Human
cccaccucagccucc

SEQ ID NO: 3074359 - RNA, 14 nt, Human
cccaccucagccuc

SEQ ID NO: 3074360 - RNA, 12 nt, Human
cccaccucagcc

SEQ ID NO: 3074361 - RNA, 20 nt, Human
ccauuuugcugucccuuuuc

SEQ ID NO: 3074362 - RNA, 21 nt, Human
ccauuuuguauuuuacuaaua

SEQ ID NO: 3074363 - RNA, 12 nt, Human
cccaagggccug

SEQ ID NO: 3074364 - RNA, 14 nt, Human
cccaagggccuggc

SEQ ID NO: 3074365 - RNA, 13 nt, Human
cccacaggaucag

SEQ ID NO: 3074366 - RNA, 17 nt, Human
cccacaggaucagucug

SEQ ID NO: 3074367 - RNA, 16 nt, Human
cccacagccccaucug

SEQ ID NO: 3074368 - RNA, 16 nt, Human
cccaagggccuggccu

SEQ ID NO: 3074369 - RNA, 13 nt, Human
cccaagugccaaa

SEQ ID NO: 3074370 - RNA, 15 nt, Human
cccaagugccaaaga

SEQ ID NO: 3074371 - RNA, 18 nt, Human
ccauguuuuguuuacggu

SEQ ID NO: 3074372 - RNA, 13 nt, Human
ccauuugcuccuu

SEQ ID NO: 3074373 - RNA, 15 nt, Human
ccauucugccugccc

SEQ ID NO: 3074374 - RNA, 14 nt, Human
cccaguugggugga

SEQ ID NO: 3074375 - RNA, 19 nt, Human
cccaucucuacaaaaagca

SEQ ID NO: 3074376 - RNA, 22 nt, Human
cccaucugcgggggcagugcuc

SEQ ID NO: 3074377 - RNA, 21 nt, Human
cccaucugcgggggcagugcu

SEQ ID NO: 3074378 - RNA, 22 nt, Human
cccaugagccucagcauccugg

SEQ ID NO: 3074379 - RNA, 20 nt, Human
cccaugagggagaugccaug

SEQ ID NO: 3074380 - RNA, 21 nt, Human
cccaugagggagaugccauga

SEQ ID NO: 3074381 - RNA, 14 nt, Human
cccaugagccucag

SEQ ID NO: 3074382 - RNA, 21 nt, Human
ccccacccaagggccuggccu

SEQ ID NO: 3074383 - RNA, 15 nt, Human
ccccaccgcagacag

SEQ ID NO: 3074384 - RNA, 19 nt, Human
ccccaccgcagacaggacc

SEQ ID NO: 3074385 - RNA, 14 nt, Human
ccccacuggugaca

SEQ ID NO: 3074386 - RNA, 16 nt, Human
ccccacuccggcccuc

SEQ ID NO: 3074387 - RNA, 20 nt, Human
ccccacuccggcccuccaga

SEQ ID NO: 3074388 - RNA, 22 nt, Human
ccccucagggucccugguggca

SEQ ID NO: 3074389 - RNA, 16 nt, Human
ccccucagggucccug

SEQ ID NO: 3074390 - RNA, 12 nt, Human
ccccuccaugug

SEQ ID NO: 3074391 - RNA, 15 nt, Human
ccccucggagaagag

SEQ ID NO: 3074392 - RNA, 15 nt, Human
ccccucaacaccucu

SEQ ID NO: 3074393 - RNA, 16 nt, Human
ccccucaacaccucug

SEQ ID NO: 3074394 - RNA, 23 nt, Human
ccccucaacucuccuccagaguc

SEQ ID NO: 3074395 - RNA, 12 nt, Human
cccccagccugc

SEQ ID NO: 3074396 - RNA, 19 nt, Human
cccccugacaacacucauu

SEQ ID NO: 3074397 - RNA, 17 nt, Human
cccccugacaacacuca

SEQ ID NO: 3074398 - RNA, 17 nt, Human
ccccaucauugguaccc

SEQ ID NO: 3074399 - RNA, 14 nt, Human
ccccauccucugua

SEQ ID NO: 3074400 - RNA, 13 nt, Human
cccccacccaagg

SEQ ID NO: 3074401 - RNA, 24 nt, Human
cccccacccaagggccuggccuga

SEQ ID NO: 3074402 - RNA, 15 nt, Human
cccccacuggugaca

SEQ ID NO: 3074403 - RNA, 11 nt, Human
cccccacuggu

SEQ ID NO: 3074404 - RNA, 13 nt, Human
cccccacugguga

SEQ ID NO: 3074405 - RNA, 20 nt, Human
ccccagugcccacaggauca

SEQ ID NO: 3074406 - RNA, 16 nt, Human
ccccagugcccacagg

SEQ ID NO: 3074407 - RNA, 15 nt, Human
ccccagugcccacag

SEQ ID NO: 3074408 - RNA, 14 nt, Human
ccccagugcccaca

SEQ ID NO: 3074409 - RNA, 17 nt, Human
ccccugccucucugcag

SEQ ID NO: 3074410 - RNA, 16 nt, Human
ccccugccucucugca

SEQ ID NO: 3074411 - RNA, 19 nt, Human
ccccugccucucugcaggu

SEQ ID NO: 3074412 - RNA, 15 nt, Human
ccccugccucucugc

SEQ ID NO: 3074413 - RNA, 14 nt, Human
ccccugccucucug

SEQ ID NO: 3074414 - RNA, 19 nt, Human
ccccugcccggcugcggaa

SEQ ID NO: 3074415 - RNA, 17 nt, Human
ccccugcccggcugcgg

SEQ ID NO: 3074416 - RNA, 20 nt, Human
ccccugcugguucaggguug

SEQ ID NO: 3074417 - RNA, 15 nt, Human
ccccugcugguucag

SEQ ID NO: 3074418 - RNA, 13 nt, Human
ccccugcugguuc

SEQ ID NO: 3074419 - RNA, 11 nt, Human
ccccugcuggu

SEQ ID NO: 3074420 - RNA, 14 nt, Human
ccccugcugggugu

SEQ ID NO: 3074421 - RNA, 17 nt, Human
ccccugcuggguguggc

SEQ ID NO: 3074422 - RNA, 18 nt, Human
ccccuggaugcagccuca

SEQ ID NO: 3074423 - RNA, 19 nt, Human
ccccuggaugcagccucac

SEQ ID NO: 3074424 - RNA, 14 nt, Human
ccccuggcacuggc

SEQ ID NO: 3074425 - RNA, 16 nt, Human
ccccuggcacuggcaa

SEQ ID NO: 3074426 - RNA, 15 nt, Human
ccccuggaugcagcc

SEQ ID NO: 3074427 - RNA, 19 nt, Human
ccccuguggaugcugcugc

SEQ ID NO: 3074428 - RNA, 20 nt, Human
ccccuguggaugcugcugcc

SEQ ID NO: 3074429 - RNA, 22 nt, Human
ccccuguggaugcugcugcccc

SEQ ID NO: 3074430 - RNA, 13 nt, Human
ccccuuccaugga

SEQ ID NO: 3074431 - RNA, 20 nt, Human
ccccuuccauggacuuuguu

SEQ ID NO: 3074432 - RNA, 22 nt, Human
cccgaauagcugggacuacagg

SEQ ID NO: 3074433 - RNA, 20 nt, Human
cccgcccaggcuuagucacu

SEQ ID NO: 3074434 - RNA, 22 nt, Human
cccgcccaggcuuagucacuga

SEQ ID NO: 3074435 - RNA, 22 nt, Human
cccgcuaagagggagggagggc

SEQ ID NO: 3074436 - RNA, 23 nt, Human
cccgcuaagagggagggagggcu

SEQ ID NO: 3074437 - RNA, 15 nt, Human
cccgagccuggcucc

SEQ ID NO: 3074438 - RNA, 13 nt, Human
cccgagccuggcu

SEQ ID NO: 3074439 - RNA, 20 nt, Human
cccugcagagggcacagaaa

SEQ ID NO: 3074440 - RNA, 12 nt, Human
cccugaggccca

SEQ ID NO: 3074441 - RNA, 14 nt, Human
cccugccucucugc

SEQ ID NO: 3074442 - RNA, 13 nt, Human
cccugccucucug

SEQ ID NO: 3074443 - RNA, 11 nt, Human
cccugccuccu

SEQ ID NO: 3074444 - RNA, 15 nt, Human
cccugccucucugca

SEQ ID NO: 3074445 - RNA, 21 nt, Human
cccugcucuccgaccagacac

SEQ ID NO: 3074446 - RNA, 22 nt, Human
cccugcucuccgaccagacacc

SEQ ID NO: 3074447 - RNA, 12 nt, Human
cccugcugcucc

SEQ ID NO: 3074448 - RNA, 14 nt, Human
cccugcugcuccua

SEQ ID NO: 3074449 - RNA, 12 nt, Human
cccuuccaugga

SEQ ID NO: 3074450 - RNA, 15 nt, Human
cccuuacgugagucc

SEQ ID NO: 3074451 - RNA, 17 nt, Human
cccuuacgugaguccug

SEQ ID NO: 3074452 - RNA, 14 nt, Human
cccuuagcagggaa

SEQ ID NO: 3074453 - RNA, 23 nt, Human
cccuuagcagggaaacagcuaau

SEQ ID NO: 3074454 - RNA, 20 nt, Human
cccuuaccugccaggaagcc

SEQ ID NO: 3074455 - RNA, 23 nt, Human
cccuuaccugccaggaagccagc

SEQ ID NO: 3074456 - RNA, 17 nt, Human
cccuuaccugccaggaa

SEQ ID NO: 3074457 - RNA, 19 nt, Human
cccuuaccucggugccuuc

SEQ ID NO: 3074458 - RNA, 19 nt, Human
cccuguuuguuucugaaag

SEQ ID NO: 3074459 - RNA, 16 nt, Human
cccuguuuguuucuga

SEQ ID NO: 3074460 - RNA, 13 nt, Human
cccuguucuggca

SEQ ID NO: 3074461 - RNA, 14 nt, Human
cccuguucuggcag

SEQ ID NO: 3074462 - RNA, 21 nt, Human
cccuggugaccagcaccaucu

SEQ ID NO: 3074463 - RNA, 21 nt, Human
cccugguggcagcucaccucu

SEQ ID NO: 3074464 - RNA, 13 nt, Human
cccugguggcagu

SEQ ID NO: 3074465 - RNA, 21 nt, Human
cccuguagagugggagcugag

SEQ ID NO: 3074466 - RNA, 14 nt, Human
cccugguggcagug

SEQ ID NO: 3074467 - RNA, 15 nt, Human
cccucugcccacucc

SEQ ID NO: 3074468 - RNA, 18 nt, Human
cccucugcccacucccug

SEQ ID NO: 3074469 - RNA, 11 nt, Human
cccucugccca

SEQ ID NO: 3074470 - RNA, 19 nt, Human
cccucugcccacucccugc

SEQ ID NO: 3074471 - RNA, 20 nt, Human
cccucuuucccucccuuccu

SEQ ID NO: 3074472 - RNA, 17 nt, Human
cccucuuucccucccuu

SEQ ID NO: 3074473 - RNA, 12 nt, Human
cccucuuucccu

SEQ ID NO: 3074474 - RNA, 23 nt, Human
cccucccucuuucccucccuucc

SEQ ID NO: 3074475 - RNA, 12 nt, Human
cccucccacagc

SEQ ID NO: 3074476 - RNA, 14 nt, Human
cccucccacagcgc

SEQ ID NO: 3074477 - RNA, 18 nt, Human
ccuacaggagugagcacu

SEQ ID NO: 3074478 - RNA, 18 nt, Human
ccuaggugacagagugag

SEQ ID NO: 3074479 - RNA, 23 nt, Human
ccuaggcauuugcugaauacaga

SEQ ID NO: 3074480 - RNA, 14 nt, Human
ccgcuggggccagu

SEQ ID NO: 3074481 - RNA, 11 nt, Human
ccgcuggggcc

SEQ ID NO: 3074482 - RNA, 18 nt, Human
ccgugaggccagagacac

SEQ ID NO: 3074483 - RNA, 18 nt, Human
ccgggcucugccucccau

SEQ ID NO: 3074484 - RNA, 13 nt, Human
ccgggcucugccu

SEQ ID NO: 3074485 - RNA, 14 nt, Human
ccgggcucugccuc

SEQ ID NO: 3074486 - RNA, 15 nt, Human
ccgggcucugccucc

SEQ ID NO: 3074487 - RNA, 13 nt, Human
ccgggccacagag

SEQ ID NO: 3074488 - RNA, 22 nt, Human
ccgggcacucagaagacacuga

SEQ ID NO: 3074489 - RNA, 20 nt, Human
ccgggcacucagaagacacu

SEQ ID NO: 3074490 - RNA, 21 nt, Human
ccggcuccaggcuccuuuagc

SEQ ID NO: 3074491 - RNA, 16 nt, Human
ccggcuccaggcuccu

SEQ ID NO: 3074492 - RNA, 15 nt, Human
ccggcuccaggcucc

SEQ ID NO: 3074493 - RNA, 15 nt, Human
ccgagauugcaccac

SEQ ID NO: 3074494 - RNA, 19 nt, Human
ccgagauugcaccacugca

SEQ ID NO: 3074495 - RNA, 21 nt, Human
ccgagauugcaccacugcacu

SEQ ID NO: 3074496 - RNA, 23 nt, Human
ccgcacugggcuuggggaccaga

SEQ ID NO: 3074497 - RNA, 19 nt, Human
ccgcacugggcuuggggac

SEQ ID NO: 3074498 - RNA, 14 nt, Human
ccgaguagcuggga

SEQ ID NO: 3074499 - RNA, 19 nt, Human
ccgagcuuugaaaauucag

SEQ ID NO: 3074500 - RNA, 22 nt, Human
cugagaggacuuuucuuugugg

SEQ ID NO: 3074501 - RNA, 21 nt, Human
cugagaggacuuuucuuugug

SEQ ID NO: 3074502 - RNA, 17 nt, Human
cugagaguagagucacu

SEQ ID NO: 3074503 - RNA, 22 nt, Human
cugagacucgcgacaaugcaaa

SEQ ID NO: 3074504 - RNA, 23 nt, Human
cugagacagcccgggcucugccu

SEQ ID NO: 3074505 - RNA, 21 nt, Human
cugagacucgcgacaaugcaa

SEQ ID NO: 3074506 - RNA, 20 nt, Human
cugagacucgcgacaaugca

SEQ ID NO: 3074507 - RNA, 21 nt, Human
cugacccaugcugcccuguga

SEQ ID NO: 3074508 - RNA, 22 nt, Human
cugacccaugcugcccugugag

SEQ ID NO: 3074509 - RNA, 21 nt, Human
cugagauccuggacugagggg

SEQ ID NO: 3074510 - RNA, 21 nt, Human
cugagaucaaaacgguuuuac

SEQ ID NO: 3074511 - RNA, 13 nt, Human
cugagauccugga

SEQ ID NO: 3074512 - RNA, 15 nt, Human
cugagauccuggacu

SEQ ID NO: 3074513 - RNA, 17 nt, Human
cugagauccuggacuga

SEQ ID NO: 3074514 - RNA, 14 nt, Human
cugagcuuucugcu

SEQ ID NO: 3074515 - RNA, 15 nt, Human
cugagcuuucugcua

SEQ ID NO: 3074516 - RNA, 14 nt, Human
cugaggaauccaga

SEQ ID NO: 3074517 - RNA, 20 nt, Human
cugaggaauccagacccggc

SEQ ID NO: 3074518 - RNA, 17 nt, Human
cugaggaauccagaccc

SEQ ID NO: 3074519 - RNA, 20 nt, Human
cugaggacacuaaccacgcu

SEQ ID NO: 3074520 - RNA, 23 nt, Human
cugaggacacuaaccacgcugga

SEQ ID NO: 3074521 - RNA, 20 nt, Human
cugaguacguugugcauuug

SEQ ID NO: 3074522 - RNA, 19 nt, Human
cugaguacguugugcauuu

SEQ ID NO: 3074523 - RNA, 17 nt, Human
cugaguacguugugcau

SEQ ID NO: 3074524 - RNA, 18 nt, Human
cugaguacguugugcauu

SEQ ID NO: 3074525 - RNA, 21 nt, Human
cugaguacguugugcauuugg

SEQ ID NO: 3074526 - RNA, 13 nt, Human
cucugcagguccc

SEQ ID NO: 3074527 - RNA, 21 nt, Human
cucugcacuccccugcugggu

SEQ ID NO: 3074528 - RNA, 20 nt, Human
cucugcacuccccugcuggg

SEQ ID NO: 3074529 - RNA, 18 nt, Human
cucugcacuccccugcug

SEQ ID NO: 3074530 - RNA, 16 nt, Human
cucuccccuucucugu

SEQ ID NO: 3074531 - RNA, 17 nt, Human
cucugcaggucccuaau

SEQ ID NO: 3074532 - RNA, 16 nt, Human
cucugcaggucccuaa

SEQ ID NO: 3074533 - RNA, 15 nt, Human
cucugcaggucccua

SEQ ID NO: 3074534 - RNA, 14 nt, Human
cucugcaggucccu

SEQ ID NO: 3074535 - RNA, 18 nt, Human
cucugcuccucuccccag

SEQ ID NO: 3074536 - RNA, 13 nt, Human
cucugcuccucuc

SEQ ID NO: 3074537 - RNA, 14 nt, Human
cucugguccauaga

SEQ ID NO: 3074538 - RNA, 16 nt, Human
cucugcugacagacac

SEQ ID NO: 3074539 - RNA, 14 nt, Human
cucugcugacagac

SEQ ID NO: 3074540 - RNA, 13 nt, Human
cucugcugacaga

SEQ ID NO: 3074541 - RNA, 13 nt, Human
cucuuauugccca

SEQ ID NO: 3074542 - RNA, 22 nt, Human
cucuuagaugcaguucugaaga

SEQ ID NO: 3074543 - RNA, 21 nt, Human
cucuuagaugcaguucugaag

SEQ ID NO: 3074544 - RNA, 20 nt, Human
cucuuauugcccacgcugga

SEQ ID NO: 3074545 - RNA, 19 nt, Human
cucuuauugcccacgcugg

SEQ ID NO: 3074546 - RNA, 15 nt, Human
cucuuauugcccacg

SEQ ID NO: 3074547 - RNA, 14 nt, Human
cucuuauugcccac

SEQ ID NO: 3074548 - RNA, 19 nt, Human
cucuucagaucucuaacuu

SEQ ID NO: 3074549 - RNA, 18 nt, Human
cucuucagaucucuaacu

SEQ ID NO: 3074550 - RNA, 14 nt, Human
cucuucaaucucuu

SEQ ID NO: 3074551 - RNA, 21 nt, Human
cucuugaugccuggcggggug

SEQ ID NO: 3074552 - RNA, 16 nt, Human
cucuugaugccuggcg

SEQ ID NO: 3074553 - RNA, 15 nt, Human
cucuugaugccuggc

SEQ ID NO: 3074554 - RNA, 13 nt, Human
cucuugaugccug

SEQ ID NO: 3074555 - RNA, 13 nt, Human
cugaaacuucccu

SEQ ID NO: 3074556 - RNA, 22 nt, Human
cugaaaauugaugggauuuggu

SEQ ID NO: 3074557 - RNA, 15 nt, Human
cugaaacaacaaaua

SEQ ID NO: 3074558 - RNA, 22 nt, Human
cugaagcuaucguaaaauuaag

SEQ ID NO: 3074559 - RNA, 21 nt, Human
cugaagcuaucguaaaauuaa

SEQ ID NO: 3074560 - RNA, 21 nt, Human
cugaaggacauugcggacagc

SEQ ID NO: 3074561 - RNA, 23 nt, Human
cugaaggacauugcggacagcca

SEQ ID NO: 3074562 - RNA, 18 nt, Human
cugaaggccccgcccagg

SEQ ID NO: 3074563 - RNA, 19 nt, Human
cugaaggccccgcccaggc

SEQ ID NO: 3074564 - RNA, 21 nt, Human
cugaaggccccgcccaggcuu

SEQ ID NO: 3074565 - RNA, 22 nt, Human
cugacaacacucauugaccuga

SEQ ID NO: 3074566 - RNA, 23 nt, Human
cugacaacacucauugaccugag

SEQ ID NO: 3074567 - RNA, 17 nt, Human
cucuugagccuugaacu

SEQ ID NO: 3074568 - RNA, 16 nt, Human
cucuugagccuugaac

SEQ ID NO: 3074569 - RNA, 18 nt, Human
cucuugagccuugaacuu

SEQ ID NO: 3074570 - RNA, 14 nt, Human
cucgaacuggcugc

SEQ ID NO: 3074571 - RNA, 13 nt, Human
cucgaacuggcug

SEQ ID NO: 3074572 - RNA, 15 nt, Human
cucgaacuggcugca

SEQ ID NO: 3074573 - RNA, 14 nt, Human
cucguuaauuugua

SEQ ID NO: 3074574 - RNA, 18 nt, Human
cuccucugcugcuggcug

SEQ ID NO: 3074575 - RNA, 15 nt, Human
cuccucugcugcugg

SEQ ID NO: 3074576 - RNA, 16 nt, Human
cuccucugcugcuggc

SEQ ID NO: 3074577 - RNA, 16 nt, Human
cuccuggcccacugca

SEQ ID NO: 3074578 - RNA, 18 nt, Human
cuccuggcccacugcauc

SEQ ID NO: 3074579 - RNA, 15 nt, Human
cucccccagccccau

SEQ ID NO: 3074580 - RNA, 20 nt, Human
cucccccagccccauccucu

SEQ ID NO: 3074581 - RNA, 22 nt, Human
cucccccagccccauccucugu

SEQ ID NO: 3074582 - RNA, 13 nt, Human
cuccaagcuccca

SEQ ID NO: 3074583 - RNA, 14 nt, Human
cuccaagcucccag

SEQ ID NO: 3074584 - RNA, 15 nt, Human
cuccaagcucccagg

SEQ ID NO: 3074585 - RNA, 16 nt, Human
cuccaagcucccaggc

SEQ ID NO: 3074586 - RNA, 13 nt, Human
cuccacuuggucu

SEQ ID NO: 3074587 - RNA, 15 nt, Human
cuccacuuggucugu

SEQ ID NO: 3074588 - RNA, 16 nt, Human
cuccacuuggucugug

SEQ ID NO: 3074589 - RNA, 17 nt, Human
cuccacuuggucuguga

SEQ ID NO: 3074590 - RNA, 21 nt, Human
cuccacuuggucugugagaug

SEQ ID NO: 3074591 - RNA, 22 nt, Human
cuccacuuggucugugagaugc

SEQ ID NO: 3074592 - RNA, 13 nt, Human
cuccaagaauuuc

SEQ ID NO: 3074593 - RNA, 13 nt, Human
cuccaagcaggac

SEQ ID NO: 3074594 - RNA, 14 nt, Human
cuccaagcaggaca

SEQ ID NO: 3074595 - RNA, 22 nt, Human
cuccaagcaggacauggacaag

SEQ ID NO: 3074596 - RNA, 24 nt, Human
cuccaagcaggacauggacaagga

SEQ ID NO: 3074597 - RNA, 22 nt, Human
cuccaagaccuucuccuucacc

SEQ ID NO: 3074598 - RNA, 21 nt, Human
cuccaagaccuucuccuucac

SEQ ID NO: 3074599 - RNA, 14 nt, Human
cuccaagaauuucu

SEQ ID NO: 3074600 - RNA, 16 nt, Human
cuccacuuucuagcca

SEQ ID NO: 3074601 - RNA, 19 nt, Human
cuccacuuucuagccagag

SEQ ID NO: 3074602 - RNA, 23 nt, Human
cuccacuuggucugugagaugcu

SEQ ID NO: 3074603 - RNA, 15 nt, Human
cucccaccuggcucu

SEQ ID NO: 3074604 - RNA, 22 nt, Human
cucccaccuggcucuguggcga

SEQ ID NO: 3074605 - RNA, 13 nt, Human
cucccaccuggcu

SEQ ID NO: 3074606 - RNA, 14 nt, Human
cucccaccuggcuc

SEQ ID NO: 3074607 - RNA, 19 nt, Human
cuccccaugauguuuagaa

SEQ ID NO: 3074608 - RNA, 12 nt, Human
cuagccagagga

SEQ ID NO: 3074609 - RNA, 13 nt, Human
cuagccagaggag

SEQ ID NO: 3074610 - RNA, 15 nt, Human
cuagccagaggagag

SEQ ID NO: 3074611 - RNA, 13 nt, Human
cuaguuugauuaa

SEQ ID NO: 3074612 - RNA, 22 nt, Human
cuaguuguuugauucagacagc

SEQ ID NO: 3074613 - RNA, 23 nt, Human
cuaguuguuugauucagacagcu

SEQ ID NO: 3074614 - RNA, 22 nt, Human
cuaguuugauuaaauucuugca

SEQ ID NO: 3074615 - RNA, 21 nt, Human
cuaguuugauuaaauucuugc

SEQ ID NO: 3074616 - RNA, 18 nt, Human
cuaucguaaaauuaagaa

SEQ ID NO: 3074617 - RNA, 17 nt, Human
cuaucguaaaauuaaga

SEQ ID NO: 3074618 - RNA, 14 nt, Human
cuaucuaaauguug

SEQ ID NO: 3074619 - RNA, 15 nt, Human
cuaucucccccagcc

SEQ ID NO: 3074620 - RNA, 14 nt, Human
cuaucucccccagc

SEQ ID NO: 3074621 - RNA, 15 nt, Human
cucaaugcacugaca

SEQ ID NO: 3074622 - RNA, 13 nt, Human
cucaaugcacuga

SEQ ID NO: 3074623 - RNA, 20 nt, Human
cucaaacucuugaccucagg

SEQ ID NO: 3074624 - RNA, 18 nt, Human
cucaaaagcugggcaggu

SEQ ID NO: 3074625 - RNA, 23 nt, Human
cucaaaauaccaugccauuuaaa

SEQ ID NO: 3074626 - RNA, 17 nt, Human
cucaaaacugcacuguc

SEQ ID NO: 3074627 - RNA, 16 nt, Human
cuaucucccccagccc

SEQ ID NO: 3074628 - RNA, 17 nt, Human
cuaucucccccagcccc

SEQ ID NO: 3074629 - RNA, 23 nt, Human
cuaaguuuuuauggcuuuugugc

SEQ ID NO: 3074630 - RNA, 20 nt, Human
cuaaguuuuuauggcuuuug

SEQ ID NO: 3074631 - RNA, 21 nt, Human
cuaagugguacuaacuuuccu

SEQ ID NO: 3074632 - RNA, 23 nt, Human
cuaagugauccucccaccucagc

SEQ ID NO: 3074633 - RNA, 23 nt, Human
cuaaguaaaaccacagcaguuga

SEQ ID NO: 3074634 - RNA, 22 nt, Human
cuaaguaaaaccacagcaguug

SEQ ID NO: 3074635 - RNA, 20 nt, Human
cgugugugugcguccugucg

SEQ ID NO: 3074636 - RNA, 20 nt, Human
cuaaguaaaaccacagcagu

SEQ ID NO: 3074637 - RNA, 19 nt, Human
cuacaguccucccaucuca

SEQ ID NO: 3074638 - RNA, 18 nt, Human
cuacaaaaacacagcaag

SEQ ID NO: 3074639 - RNA, 17 nt, Human
cuacaaaaacacagcaa

SEQ ID NO: 3074640 - RNA, 16 nt, Human
cuacaaaaacacagca

SEQ ID NO: 3074641 - RNA, 15 nt, Human
cuacaaaaacacagc

SEQ ID NO: 3074642 - RNA, 22 nt, Human
cuacaguugaaaaacagcugag

SEQ ID NO: 3074643 - RNA, 18 nt, Human
cuacauacaauuccaaac

SEQ ID NO: 3074644 - RNA, 18 nt, Human
cuacauacuauggaauuu

SEQ ID NO: 3074645 - RNA, 19 nt, Human
cuacaguugaaaaacagcu

SEQ ID NO: 3074646 - RNA, 21 nt, Human
cuacaguugaaaaacagcuga

SEQ ID NO: 3074647 - RNA, 20 nt, Human
cuacaguccucccaucucac

SEQ ID NO: 3074648 - RNA, 18 nt, Human
cuacaguccucccaucuc

SEQ ID NO: 3074649 - RNA, 17 nt, Human
cuaccuuuguauucucu

SEQ ID NO: 3074650 - RNA, 20 nt, Human
cuacaugagguacugagagu

SEQ ID NO: 3074651 - RNA, 18 nt, Human
cuacaugagguacugaga

SEQ ID NO: 3074652 - RNA, 22 nt, Human
cuagaagauuuugaaauuuuua

SEQ ID NO: 3074653 - RNA, 12 nt, Human
cuagaacucccu

SEQ ID NO: 3074654 - RNA, 23 nt, Human
cuagcauacguacacauuuuauu

SEQ ID NO: 3074655 - RNA, 21 nt, Human
cuagcauacguacacauuuua

SEQ ID NO: 3074656 - RNA, 20 nt, Human
cuagcauacguacacauuuu

SEQ ID NO: 3074657 - RNA, 23 nt, Human
cuagaauuugauaugugaacagu

SEQ ID NO: 3074658 - RNA, 12 nt, Human
cgacaaugcaaa

SEQ ID NO: 3074659 - RNA, 13 nt, Human
cgacaaugcaaac

SEQ ID NO: 3074660 - RNA, 19 nt, Human
cgacccuugccgucuaccu

SEQ ID NO: 3074661 - RNA, 20 nt, Human
cgacccuugccgucuaccug

SEQ ID NO: 3074662 - RNA, 17 nt, Human
cgacugcccggcagggu

SEQ ID NO: 3074663 - RNA, 14 nt, Human
ccuuuaagagaaau

SEQ ID NO: 3074664 - RNA, 16 nt, Human
ccuugccgucuaccug

SEQ ID NO: 3074665 - RNA, 15 nt, Human
ccuuuugagugccuu

SEQ ID NO: 3074666 - RNA, 17 nt, Human
ccuuuugagugccuuac

SEQ ID NO: 3074667 - RNA, 21 nt, Human
ccuuucaauaggaaaaacuga

SEQ ID NO: 3074668 - RNA, 18 nt, Human
ccuuucaauaggaaaaac

SEQ ID NO: 3074669 - RNA, 23 nt, Human
cgccacuguuuugaaucucauaa

SEQ ID NO: 3074670 - RNA, 14 nt, Human
cgccuacaggagug

SEQ ID NO: 3074671 - RNA, 22 nt, Human
cgcaggauucuuccucccuccc

SEQ ID NO: 3074672 - RNA, 18 nt, Human
cgcaggcccccaggugcc

SEQ ID NO: 3074673 - RNA, 14 nt, Human
cgauagugguggug

SEQ ID NO: 3074674 - RNA, 16 nt, Human
cgaguagcugggacua

SEQ ID NO: 3074675 - RNA, 14 nt, Human
cguaaaauuaagaa

SEQ ID NO: 3074676 - RNA, 16 nt, Human
cgguuuuacugcagcu

SEQ ID NO: 3074677 - RNA, 17 nt, Human
cgugaggccagagacac

SEQ ID NO: 3074678 - RNA, 16 nt, Human
cgugaguccuggcaug

SEQ ID NO: 3074679 - RNA, 17 nt, Human
cgugaguccuggcaugg

SEQ ID NO: 3074680 - RNA, 16 nt, Human
cgugaggccagagaca

SEQ ID NO: 3074681 - RNA, 20 nt, Human
cguguaaccauggacccaau

SEQ ID NO: 3074682 - RNA, 15 nt, Human
cguggugauuuagca

SEQ ID NO: 3074683 - RNA, 22 nt, Human
cguggugauuuagcaggaagcu

SEQ ID NO: 3074684 - RNA, 11 nt, Human
cgggcucagca

SEQ ID NO: 3074685 - RNA, 14 nt, Human
cgggcucugccucc

SEQ ID NO: 3074686 - RNA, 16 nt, Human
cgggcucugccuccca

SEQ ID NO: 3074687 - RNA, 15 nt, Human
cgggcucagcaaaag

SEQ ID NO: 3074688 - RNA, 13 nt, Human
cgggcucugccuc

SEQ ID NO: 3074689 - RNA, 17 nt, Human
cgggcucugccucccau

SEQ ID NO: 3074690 - RNA, 14 nt, Human
cggggacagcuccu

SEQ ID NO: 3074691 - RNA, 18 nt, Human
cgguguggagaagcggcu

SEQ ID NO: 3074692 - RNA, 13 nt, Human
cgguguggagaag

SEQ ID NO: 3074693 - RNA, 15 nt, Human
cggggacagcuccuu

SEQ ID NO: 3074694 - RNA, 14 nt, Human
cggcucacugcagc

SEQ ID NO: 3074695 - RNA, 15 nt, Human
cggcucacugcagcc

SEQ ID NO: 3074696 - RNA, 20 nt, Human
cggagucccaccuuggcugc

SEQ ID NO: 3074697 - RNA, 18 nt, Human
cggagucccaccuuggcu

SEQ ID NO: 3074698 - RNA, 16 nt, Human
cggcucacugcagccu

SEQ ID NO: 3074699 - RNA, 14 nt, Human
cggagucccaccuu

SEQ ID NO: 3074700 - RNA, 12 nt, Human
cggcuccaggcu

SEQ ID NO: 3074701 - RNA, 16 nt, Human
cggcuccaggcuccuu

SEQ ID NO: 3074702 - RNA, 15 nt, Human
cggcuccaggcuccu

SEQ ID NO: 3074703 - RNA, 14 nt, Human
cggcuccaggcucc

SEQ ID NO: 3074704 - RNA, 13 nt, Human
cggcuccaggcuc

SEQ ID NO: 3074705 - RNA, 14 nt, Human
cgggccacagagaa

SEQ ID NO: 3074706 - RNA, 12 nt, Human
cgggccacagag

SEQ ID NO: 3074707 - RNA, 16 nt, Human
cggagucccaccuugg

SEQ ID NO: 3074708 - RNA, 12 nt, Human
ccagucaccccg

SEQ ID NO: 3074709 - RNA, 20 nt, Human
ccagucaccccggccaccug

SEQ ID NO: 3074710 - RNA, 21 nt, Human
ccagucaccccggccaccugc

SEQ ID NO: 3074711 - RNA, 19 nt, Human
ccagucaccccggccaccu

SEQ ID NO: 3074712 - RNA, 19 nt, Human
ccaggcuggcgugcagugg

SEQ ID NO: 3074713 - RNA, 22 nt, Human
ccaggcugggagagccuuccag

SEQ ID NO: 3074714 - RNA, 15 nt, Human
ccaggcugggagagc

SEQ ID NO: 3074715 - RNA, 17 nt, Human
ccaggcugggagagccu

SEQ ID NO: 3074716 - RNA, 18 nt, Human
ccaggcugggagagccuu

SEQ ID NO: 3074717 - RNA, 21 nt, Human
ccaggcugggagagccuucca

SEQ ID NO: 3074718 - RNA, 13 nt, Human
ccaggcugggaga

SEQ ID NO: 3074719 - RNA, 14 nt, Human
ccaggcugggagag

SEQ ID NO: 3074720 - RNA, 19 nt, Human
ccagcagccuggacccugu

SEQ ID NO: 3074721 - RNA, 18 nt, Human
ccagccccuggaugcagc

SEQ ID NO: 3074722 - RNA, 15 nt, Human
ccagcagccuggacc

SEQ ID NO: 3074723 - RNA, 14 nt, Human
ccagcagccuggac

SEQ ID NO: 3074724 - RNA, 10 nt, Human
ccagccccuu

SEQ ID NO: 3074725 - RNA, 21 nt, Human
ccagccccuggaugcagccuc

SEQ ID NO: 3074726 - RNA, 22 nt, Human
ccaggaaaggcuccaggagcag

SEQ ID NO: 3074727 - RNA, 23 nt, Human
ccaggaaaggcuccaggagcagc

SEQ ID NO: 3074728 - RNA, 21 nt, Human
ccaggaaaggcuccaggagca

SEQ ID NO: 3074729 - RNA, 16 nt, Human
ccagcuuaucucaggg

SEQ ID NO: 3074730 - RNA, 23 nt, Human
ccagcagagcaccuuagacaguc

SEQ ID NO: 3074731 - RNA, 19 nt, Human
ccagcagagcaccuuagac

SEQ ID NO: 3074732 - RNA, 13 nt, Human
ccaugagccucag

SEQ ID NO: 3074733 - RNA, 16 nt, Human
ccauccccuguagagu

SEQ ID NO: 3074734 - RNA, 14 nt, Human
ccaugaguccccug

SEQ ID NO: 3074735 - RNA, 15 nt, Human
ccaugaguccccugu

SEQ ID NO: 3074736 - RNA, 16 nt, Human
ccaugaguccccuguu

SEQ ID NO: 3074737 - RNA, 13 nt, Human
ccaugggccuccu

SEQ ID NO: 3074738 - RNA, 13 nt, Human
ccaugaguccccu

SEQ ID NO: 3074739 - RNA, 19 nt, Human
ccaugagccucagcauccu

SEQ ID NO: 3074740 - RNA, 18 nt, Human
ccaugagccucagcaucc

SEQ ID NO: 3074741 - RNA, 14 nt, Human
ccaugagccucagc

SEQ ID NO: 3074742 - RNA, 12 nt, Human
ccaucccagccc

SEQ ID NO: 3074743 - RNA, 23 nt, Human
ccaucccaaacccuucagugcca

SEQ ID NO: 3074744 - RNA, 13 nt, Human
ccauacauuugug

SEQ ID NO: 3074745 - RNA, 20 nt, Human
ccaucccaaacccuucagug

SEQ ID NO: 3074746 - RNA, 15 nt, Human
ccaugggccuccugu

SEQ ID NO: 3074747 - RNA, 14 nt, Human
ccaugggccuccug

SEQ ID NO: 3074748 - RNA, 22 nt, Human
ccauuuaaagcuuauuaaaacu

SEQ ID NO: 3074749 - RNA, 21 nt, Human
cccaggcuggcgugcaguggu

SEQ ID NO: 3074750 - RNA, 15 nt, Human
cccaggcuuagucac

SEQ ID NO: 3074751 - RNA, 19 nt, Human
cccaggaaaggcuccagga

SEQ ID NO: 3074752 - RNA, 23 nt, Human
cccagcugugcucuggacaggca

SEQ ID NO: 3074753 - RNA, 21 nt, Human
cccagcugugcucuggacagg

SEQ ID NO: 3074754 - RNA, 21 nt, Human
cccaggaaaggcuccaggagc

SEQ ID NO: 3074755 - RNA, 22 nt, Human
cccaggaaaggcuccaggagca

SEQ ID NO: 3074756 - RNA, 23 nt, Human
cccaggaaaggcuccaggagcag

SEQ ID NO: 3074757 - RNA, 14 nt, Human
cccagcccacuucu

SEQ ID NO: 3074758 - RNA, 22 nt, Human
cccauucugccugcccaggccc

SEQ ID NO: 3074759 - RNA, 21 nt, Human
cccauucugccugcccaggcc

SEQ ID NO: 3074760 - RNA, 20 nt, Human
cccauucugccugcccaggc

SEQ ID NO: 3074761 - RNA, 19 nt, Human
ccccauccucuguacagag

SEQ ID NO: 3074762 - RNA, 21 nt, Human
ccccauccucuguacagagcc

SEQ ID NO: 3074763 - RNA, 22 nt, Human
ccccauccucuguacagagccc

SEQ ID NO: 3074764 - RNA, 24 nt, Human
ccccaucugcgggggcagugcuca

SEQ ID NO: 3074765 - RNA, 17 nt, Human
ccccauccucuguacag

SEQ ID NO: 3074766 - RNA, 20 nt, Human
ccccagcaagugagagcugg

SEQ ID NO: 3074767 - RNA, 19 nt, Human
ccccagcaagugagagcug

SEQ ID NO: 3074768 - RNA, 17 nt, Human
ccccagcaagugagagc

SEQ ID NO: 3074769 - RNA, 23 nt, Human
ccccagauugcaacaggcugggc

SEQ ID NO: 3074770 - RNA, 22 nt, Human
ccccagauugcaacaggcuggg

SEQ ID NO: 3074771 - RNA, 21 nt, Human
ccccagauugcaacaggcugg

SEQ ID NO: 3074772 - RNA, 17 nt, Human
ccccuucgcuccugugu

SEQ ID NO: 3074773 - RNA, 15 nt, Human
ccccuucgcuccugu

SEQ ID NO: 3074774 - RNA, 14 nt, Human
ccccuucgcuccug

SEQ ID NO: 3074775 - RNA, 19 nt, Human
ccccuucgcuccugugucu

SEQ ID NO: 3074776 - RNA, 18 nt, Human
ccccugcacuccagccug

SEQ ID NO: 3074777 - RNA, 14 nt, Human
ccccauucugccug

SEQ ID NO: 3074778 - RNA, 13 nt, Human
ccccauucugccu

SEQ ID NO: 3074779 - RNA, 15 nt, Human
ccccauucugccugc

SEQ ID NO: 3074780 - RNA, 12 nt, Human
cccggcugcgga

SEQ ID NO: 3074781 - RNA, 18 nt, Human
cccggcuuuggugcgggg

SEQ ID NO: 3074782 - RNA, 16 nt, Human
ccccuucugacccaug

SEQ ID NO: 3074783 - RNA, 17 nt, Human
ccccuucugacccaugc

SEQ ID NO: 3074784 - RNA, 20 nt, Human
cccucaacucuccuccagag

SEQ ID NO: 3074785 - RNA, 16 nt, Human
ccugucggagcccugu

SEQ ID NO: 3074786 - RNA, 21 nt, Human
ccugucggagcccugucuccu

SEQ ID NO: 3074787 - RNA, 17 nt, Human
ccugucggagcccuguc

SEQ ID NO: 3074788 - RNA, 15 nt, Human
ccuguaaucacagcu

SEQ ID NO: 3074789 - RNA, 21 nt, Human
ccugguggcagugggagcugc

SEQ ID NO: 3074790 - RNA, 22 nt, Human
ccugucuaaugaaaccuguguc

SEQ ID NO: 3074791 - RNA, 15 nt, Human
ccugucuaaugaaac

SEQ ID NO: 3074792 - RNA, 22 nt, Human
ccugucggagcccugucuccuc

SEQ ID NO: 3074793 - RNA, 16 nt, Human
ccuggccucugcacuc

SEQ ID NO: 3074794 - RNA, 22 nt, Human
ccuggccuagcauacguacaca

SEQ ID NO: 3074795 - RNA, 20 nt, Human
ccuggccucugcacuccccu

SEQ ID NO: 3074796 - RNA, 21 nt, Human
ccuggccucugcacuccccug

SEQ ID NO: 3074797 - RNA, 22 nt, Human
ccuggccucugcacuccccugc

SEQ ID NO: 3074798 - RNA, 11 nt, Human
ccucuuucccu

SEQ ID NO: 3074799 - RNA, 13 nt, Human
ccucuuucccucc

SEQ ID NO: 3074800 - RNA, 17 nt, Human
ccugcacuugcagacuc

SEQ ID NO: 3074801 - RNA, 16 nt, Human
ccugcacuugcagacu

SEQ ID NO: 3074802 - RNA, 14 nt, Human
ccugcagagggcac

SEQ ID NO: 3074803 - RNA, 18 nt, Human
ccugcacuugcagacucu

SEQ ID NO: 3074804 - RNA, 17 nt, Human
ccugcugcaguugccag

SEQ ID NO: 3074805 - RNA, 19 nt, Human
ccugcugcaguugccaguc

SEQ ID NO: 3074806 - RNA, 23 nt, Human
ccugccucgaacuggcugcaaag

SEQ ID NO: 3074807 - RNA, 21 nt, Human
ccugccucgaacuggcugcaa

SEQ ID NO: 3074808 - RNA, 19 nt, Human
ccugccucgaacuggcugc

SEQ ID NO: 3074809 - RNA, 20 nt, Human
ccugcugcaguugccaguca

SEQ ID NO: 3074810 - RNA, 13 nt, Human
ccugcugcuccua

SEQ ID NO: 3074811 - RNA, 15 nt, Human
ccugcugcuccuagg

SEQ ID NO: 3074812 - RNA, 16 nt, Human
ccugcugcuccuagga

SEQ ID NO: 3074813 - RNA, 17 nt, Human
ccugcugcuccuaggac

SEQ ID NO: 3074814 - RNA, 12 nt, Human
ccugcccaccug

SEQ ID NO: 3074815 - RNA, 14 nt, Human
ccugcccaccuggc

SEQ ID NO: 3074816 - RNA, 20 nt, Human
ccugcccaccuggccucugc

SEQ ID NO: 3074817 - RNA, 13 nt, Human
ccugcccaccugg

SEQ ID NO: 3074818 - RNA, 13 nt, Human
ccugcccaggccc

SEQ ID NO: 3074819 - RNA, 13 nt, Human
ccggccccugcug

SEQ ID NO: 3074820 - RNA, 22 nt, Human
cccuucucuccagccccuggau

SEQ ID NO: 3074821 - RNA, 23 nt, Human
ccgcagcccugcagagggcacag

SEQ ID NO: 3074822 - RNA, 21 nt, Human
cccuucucuccagccccugga

SEQ ID NO: 3074823 - RNA, 15 nt, Human
cccuucgcuccugug

SEQ ID NO: 3074824 - RNA, 14 nt, Human
cccuucgcuccugu

SEQ ID NO: 3074825 - RNA, 20 nt, Human
cccugucucaaaaaaagaaa

SEQ ID NO: 3074826 - RNA, 23 nt, Human
cccugucucaaaaaaagaaaaag

SEQ ID NO: 3074827 - RNA, 16 nt, Human
cccugucuaaugaaac

SEQ ID NO: 3074828 - RNA, 13 nt, Human
cccugucuaauga

SEQ ID NO: 3074829 - RNA, 18 nt, Human
cccugugauggggcccug

SEQ ID NO: 3074830 - RNA, 19 nt, Human
cccugugauggggcccugc

SEQ ID NO: 3074831 - RNA, 20 nt, Human
cccugugauggggcccugcc

SEQ ID NO: 3074832 - RNA, 13 nt, Human
cccuucgcuccug

SEQ ID NO: 3074833 - RNA, 17 nt, Human
cccugugauggggcccu

SEQ ID NO: 3074834 - RNA, 19 nt, Human
cccugucuccucucucugu

SEQ ID NO: 3074835 - RNA, 14 nt, Human
ccggccccugcugg

SEQ ID NO: 3074836 - RNA, 13 nt, Human
ccucccaucucac

SEQ ID NO: 3074837 - RNA, 16 nt, Human
ccucccaucucacaca

SEQ ID NO: 3074838 - RNA, 15 nt, Human
ccucccaccucagcc

SEQ ID NO: 3074839 - RNA, 21 nt, Human
ccucauuuuuauaaugucccu

SEQ ID NO: 3074840 - RNA, 23 nt, Human
ccucauggaauuggagcucgugg

SEQ ID NO: 3074841 - RNA, 14 nt, Human
caugggaaugaaug

SEQ ID NO: 3074842 - RNA, 15 nt, Human
caugggaaugaaugu

SEQ ID NO: 3074843 - RNA, 16 nt, Human
caugggaaugaauguc

SEQ ID NO: 3074844 - RNA, 17 nt, Human
caugggaaugaauguca

SEQ ID NO: 3074845 - RNA, 20 nt, Human
caugcuccuggcccacugca

SEQ ID NO: 3074846 - RNA, 23 nt, Human
caugcuacacacugcauguuugu

SEQ ID NO: 3074847 - RNA, 20 nt, Human
caugcuacacacugcauguu

SEQ ID NO: 3074848 - RNA, 14 nt, Human
caugcuacacacug

SEQ ID NO: 3074849 - RNA, 13 nt, Human
caugauguuuucc

SEQ ID NO: 3074850 - RNA, 14 nt, Human
caugauguuuagaa

SEQ ID NO: 3074851 - RNA, 15 nt, Human
cauguuggccaggcu

SEQ ID NO: 3074852 - RNA, 14 nt, Human
cauguuggccaggc

SEQ ID NO: 3074853 - RNA, 16 nt, Human
cauguuggccaggcug

SEQ ID NO: 3074854 - RNA, 19 nt, Human
cauguuggccaggcugguc

SEQ ID NO: 3074855 - RNA, 14 nt, Human
cauucuccaccugc

SEQ ID NO: 3074856 - RNA, 16 nt, Human
cauucuccaccugcca

SEQ ID NO: 3074857 - RNA, 13 nt, Human
cauucuccaccug

SEQ ID NO: 3074858 - RNA, 23 nt, Human
cauaugcuguauauccuuucuaa

SEQ ID NO: 3074859 - RNA, 22 nt, Human
caguggugguuuucuguucuuu

SEQ ID NO: 3074860 - RNA, 21 nt, Human
caguggugguuuucuguucuu

SEQ ID NO: 3074861 - RNA, 20 nt, Human
caguggugguuuucuguucu

SEQ ID NO: 3074862 - RNA, 19 nt, Human
caguggugguuuucuguuc

SEQ ID NO: 3074863 - RNA, 19 nt, Human
cauauuaauauauuuccau

SEQ ID NO: 3074864 - RNA, 14 nt, Human
cauauuaauauauu

SEQ ID NO: 3074865 - RNA, 15 nt, Human
cauauuaauauauuu

SEQ ID NO: 3074866 - RNA, 17 nt, Human
cauauucuguuggccag

SEQ ID NO: 3074867 - RNA, 22 nt, Human
cauauucaggaagcucagggcc

SEQ ID NO: 3074868 - RNA, 15 nt, Human
cauccuggcacccgg

SEQ ID NO: 3074869 - RNA, 14 nt, Human
caucacuucccuac

SEQ ID NO: 3074870 - RNA, 12 nt, Human
caucacuucccu

SEQ ID NO: 3074871 - RNA, 21 nt, Human
cauccccuguagagugggagc

SEQ ID NO: 3074872 - RNA, 22 nt, Human
cauccuggcacccggccccugc

SEQ ID NO: 3074873 - RNA, 12 nt, Human
cauccuggaaua

SEQ ID NO: 3074874 - RNA, 17 nt, Human
ccaaugggagcucaugg

SEQ ID NO: 3074875 - RNA, 14 nt, Human
ccaaugggagcuca

SEQ ID NO: 3074876 - RNA, 23 nt, Human
ccaaauggaaaugggcagagcag

SEQ ID NO: 3074877 - RNA, 14 nt, Human
ccaacucaccccag

SEQ ID NO: 3074878 - RNA, 17 nt, Human
ccaaauguucaucaaug

SEQ ID NO: 3074879 - RNA, 16 nt, Human
ccaacucaccccagcc

SEQ ID NO: 3074880 - RNA, 17 nt, Human
ccaacucaccccagccc

SEQ ID NO: 3074881 - RNA, 18 nt, Human
ccaacucaccccagcccc

SEQ ID NO: 3074882 - RNA, 13 nt, Human
ccaagcucugcuc

SEQ ID NO: 3074883 - RNA, 17 nt, Human
ccaagcucugcuccucu

SEQ ID NO: 3074884 - RNA, 12 nt, Human
ccaagcucugcu

SEQ ID NO: 3074885 - RNA, 18 nt, Human
ccaagcucugcuccucuc

SEQ ID NO: 3074886 - RNA, 14 nt, Human
ccaaugcacuuugu

SEQ ID NO: 3074887 - RNA, 15 nt, Human
ccaaugauggucacc

SEQ ID NO: 3074888 - RNA, 17 nt, Human
ccaauauuuaccagacc

SEQ ID NO: 3074889 - RNA, 20 nt, Human
ccaaaacucuccucugcugc

SEQ ID NO: 3074890 - RNA, 21 nt, Human
ccaaaacucuccucugcugcu

SEQ ID NO: 3074891 - RNA, 16 nt, Human
cauuuguguugaagag

SEQ ID NO: 3074892 - RNA, 19 nt, Human
cauuuguauaaaauaauuu

SEQ ID NO: 3074893 - RNA, 20 nt, Human
cauuuguauaaaauaauuuu

SEQ ID NO: 3074894 - RNA, 17 nt, Human
cauuuguauaaaauaau

SEQ ID NO: 3074895 - RNA, 22 nt, Human
ccacuccggcccuccagagccc

SEQ ID NO: 3074896 - RNA, 21 nt, Human
ccacuccggcccuccagagcc

SEQ ID NO: 3074897 - RNA, 20 nt, Human
ccacuccggcccuccagagc

SEQ ID NO: 3074898 - RNA, 17 nt, Human
ccacucccugcaaccug

SEQ ID NO: 3074899 - RNA, 21 nt, Human
ccaccuuugaagaaguaagga

SEQ ID NO: 3074900 - RNA, 22 nt, Human
ccaccgcagacaggaccaggga

SEQ ID NO: 3074901 - RNA, 19 nt, Human
ccaccgcagacaggaccag

SEQ ID NO: 3074902 - RNA, 16 nt, Human
ccacgcccccacuggu

SEQ ID NO: 3074903 - RNA, 17 nt, Human
ccacgcccccacuggug

SEQ ID NO: 3074904 - RNA, 18 nt, Human
ccacgcccccacugguga

SEQ ID NO: 3074905 - RNA, 19 nt, Human
ccacgcccccacuggugac

SEQ ID NO: 3074906 - RNA, 13 nt, Human
ccacgcccccacu

SEQ ID NO: 3074907 - RNA, 17 nt, Human
ccaccacacccagccca

SEQ ID NO: 3074908 - RNA, 13 nt, Human
ccaccaucaagcc

SEQ ID NO: 3074909 - RNA, 14 nt, Human
ccaccaucaagcca

SEQ ID NO: 3074910 - RNA, 20 nt, Human
ccaccagugccucucccugc

SEQ ID NO: 3074911 - RNA, 24 nt, Human
ccaccagugccucucccugcugcu

SEQ ID NO: 3074912 - RNA, 23 nt, Human
ccacagcaguugaaaagacucca

SEQ ID NO: 3074913 - RNA, 18 nt, Human
ccacagcaguugaaaaga

SEQ ID NO: 3074914 - RNA, 17 nt, Human
ccacagcaguugaaaag

SEQ ID NO: 3074915 - RNA, 23 nt, Human
ccacagcgcuggccgggaccccg

SEQ ID NO: 3074916 - RNA, 12 nt, Human
ccacagcaguug

SEQ ID NO: 3074917 - RNA, 19 nt, Human
caggggaaaaucagccugc

SEQ ID NO: 3074918 - RNA, 17 nt, Human
caggggaaaaucagccu

SEQ ID NO: 3074919 - RNA, 20 nt, Human
caggggaaaaucagccugcu

SEQ ID NO: 3074920 - RNA, 20 nt, Human
cagggcucagcggggacagc

SEQ ID NO: 3074921 - RNA, 23 nt, Human
cagggcucagcggggacagcucc

SEQ ID NO: 3074922 - RNA, 21 nt, Human
cagggcucagcggggacagcu

SEQ ID NO: 3074923 - RNA, 12 nt, Human
caggcugggaga

SEQ ID NO: 3074924 - RNA, 14 nt, Human
caggcugggagagc

SEQ ID NO: 3074925 - RNA, 20 nt, Human
caggcugggcuucaguggca

SEQ ID NO: 3074926 - RNA, 22 nt, Human
caggcugggcuucaguggcagc

SEQ ID NO: 3074927 - RNA, 21 nt, Human
caggcugggcuucaguggcag

SEQ ID NO: 3074928 - RNA, 19 nt, Human
caggccaggcccucugccc

SEQ ID NO: 3074929 - RNA, 17 nt, Human
caggccaggcccucugc

SEQ ID NO: 3074930 - RNA, 18 nt, Human
caggccaggcccucugcc

SEQ ID NO: 3074931 - RNA, 17 nt, Human
caggccagcugcuuggg

SEQ ID NO: 3074932 - RNA, 19 nt, Human
caggccagcugcuugggcu

SEQ ID NO: 3074933 - RNA, 21 nt, Human
caggccagcugcuugggcuuc

SEQ ID NO: 3074934 - RNA, 23 nt, Human
caggccagcugcuugggcuucau

SEQ ID NO: 3074935 - RNA, 15 nt, Human
caggccagagggagu

SEQ ID NO: 3074936 - RNA, 13 nt, Human
caggccagaggga

SEQ ID NO: 3074937 - RNA, 18 nt, Human
caggcagauacaggaaaa

SEQ ID NO: 3074938 - RNA, 23 nt, Human
caguaaagaacaucccuccuggg

SEQ ID NO: 3074939 - RNA, 16 nt, Human
cagguuuuccugaaga

SEQ ID NO: 3074940 - RNA, 14 nt, Human
cagguuuaagcugu

SEQ ID NO: 3074941 - RNA, 12 nt, Human
cagguuuuccug

SEQ ID NO: 3074942 - RNA, 21 nt, Human
caggugcacaagcuccaagcu

SEQ ID NO: 3074943 - RNA, 19 nt, Human
caggugccaguuauggcua

SEQ ID NO: 3074944 - RNA, 21 nt, Human
cagguuggugggggccucggu

SEQ ID NO: 3074945 - RNA, 20 nt, Human
caggugauccacccaccuca

SEQ ID NO: 3074946 - RNA, 21 nt, Human
caggugauccacccaccucag

SEQ ID NO: 3074947 - RNA, 17 nt, Human
caggugcacaagcucca

SEQ ID NO: 3074948 - RNA, 18 nt, Human
caggugcacaagcuccaa

SEQ ID NO: 3074949 - RNA, 19 nt, Human
caggugcacaagcuccaag

SEQ ID NO: 3074950 - RNA, 20 nt, Human
caggugcacaagcuccaagc

SEQ ID NO: 3074951 - RNA, 23 nt, Human
caggugauccacccaccucagcc

SEQ ID NO: 3074952 - RNA, 22 nt, Human
caggugauccacccaccucagc

SEQ ID NO: 3074953 - RNA, 15 nt, Human
caggugcacaagcuc

SEQ ID NO: 3074954 - RNA, 15 nt, Human
cagucaccucaugga

SEQ ID NO: 3074955 - RNA, 19 nt, Human
cagucaccucauggaauug

SEQ ID NO: 3074956 - RNA, 15 nt, Human
cagucacauuccaag

SEQ ID NO: 3074957 - RNA, 16 nt, Human
cagucaccucauggaa

SEQ ID NO: 3074958 - RNA, 14 nt, Human
caguggggaaugaa

SEQ ID NO: 3074959 - RNA, 18 nt, Human
caguggugguuuucuguu

SEQ ID NO: 3074960 - RNA, 21 nt, Human
caguggugcgaucuggguuca

SEQ ID NO: 3074961 - RNA, 20 nt, Human
caguggugcgaucuggguuc

SEQ ID NO: 3074962 - RNA, 23 nt, Human
cagugggagcugccuguucagcu

SEQ ID NO: 3074963 - RNA, 20 nt, Human
cagugggagcugccuguuca

SEQ ID NO: 3074964 - RNA, 17 nt, Human
cagugcccacaggauca

SEQ ID NO: 3074965 - RNA, 16 nt, Human
cagugcaugcuguccc

SEQ ID NO: 3074966 - RNA, 17 nt, Human
cagugcaugcugucccu

SEQ ID NO: 3074967 - RNA, 15 nt, Human
cagugcccacaggau

SEQ ID NO: 3074968 - RNA, 13 nt, Human
cagugcccacagg

SEQ ID NO: 3074969 - RNA, 20 nt, Human
cagucugacuguuuccauca

SEQ ID NO: 3074970 - RNA, 17 nt, Human
cagucuggaaugcagug

SEQ ID NO: 3074971 - RNA, 15 nt, Human
cagucuggaaugcag

SEQ ID NO: 3074972 - RNA, 13 nt, Human
cagugcaugcugu

SEQ ID NO: 3074973 - RNA, 14 nt, Human
cagugcaugcuguc

SEQ ID NO: 3074974 - RNA, 13 nt, Human
cagcauaauacuu

SEQ ID NO: 3074975 - RNA, 22 nt, Human
cagcaguugaaaagacuccaaa

SEQ ID NO: 3074976 - RNA, 19 nt, Human
cagcacgauuucuguuuag

SEQ ID NO: 3074977 - RNA, 18 nt, Human
cagcacgauuucuguuua

SEQ ID NO: 3074978 - RNA, 16 nt, Human
cagcacgauuucuguu

SEQ ID NO: 3074979 - RNA, 20 nt, Human
cagauucuuuccugaggcug

SEQ ID NO: 3074980 - RNA, 22 nt, Human
cagauucuuuccugaggcuggg

SEQ ID NO: 3074981 - RNA, 17 nt, Human
cagauugcaacaggcug

SEQ ID NO: 3074982 - RNA, 20 nt, Human
cagcaucauggagguuugaa

SEQ ID NO: 3074983 - RNA, 21 nt, Human
cagaguaauccaagcaaaugu

SEQ ID NO: 3074984 - RNA, 17 nt, Human
cagagguugcagugagc

SEQ ID NO: 3074985 - RNA, 16 nt, Human
cagagguugcagugag

SEQ ID NO: 3074986 - RNA, 22 nt, Human
cagaggggguggccucccaacu

SEQ ID NO: 3074987 - RNA, 23 nt, Human
cagaggggguggccucccaacuc

SEQ ID NO: 3074988 - RNA, 12 nt, Human
cagauccuggaa

SEQ ID NO: 3074989 - RNA, 15 nt, Human
cagauucuuuccuga

SEQ ID NO: 3074990 - RNA, 17 nt, Human
cagauucuuuccugagg

SEQ ID NO: 3074991 - RNA, 18 nt, Human
cagauucuuuccugaggc

SEQ ID NO: 3074992 - RNA, 19 nt, Human
cagauucuuuccugaggcu

SEQ ID NO: 3074993 - RNA, 19 nt, Human
cagcuguucagcugguuga

SEQ ID NO: 3074994 - RNA, 24 nt, Human
cagcugugcucuggacaggcaugu

SEQ ID NO: 3074995 - RNA, 20 nt, Human
cagcugugcucuggacaggc

SEQ ID NO: 3074996 - RNA, 19 nt, Human
cagcugugcucuggacagg

SEQ ID NO: 3074997 - RNA, 13 nt, Human
cagcugccuggga

SEQ ID NO: 3074998 - RNA, 14 nt, Human
cagcugccugggau

SEQ ID NO: 3074999 - RNA, 12 nt, Human
cagcugccuggg

SEQ ID NO: 3075000 - RNA, 19 nt, Human
cagcugagggugagugggu

SEQ ID NO: 3075001 - RNA, 20 nt, Human
cagcuccccucggagaagag

SEQ ID NO: 3075002 - RNA, 22 nt, Human
cagcuccccucggagaagagcu

SEQ ID NO: 3075003 - RNA, 21 nt, Human
cagcuccccucggagaagagc

SEQ ID NO: 3075004 - RNA, 16 nt, Human
caggaaaagcugcuga

SEQ ID NO: 3075005 - RNA, 15 nt, Human
caggaaaagcugcug

SEQ ID NO: 3075006 - RNA, 18 nt, Human
caggaaaagcugcugaca

SEQ ID NO: 3075007 - RNA, 17 nt, Human
cagccucugaaaaccaa

SEQ ID NO: 3075008 - RNA, 19 nt, Human
cagccgagauagccaaggc

SEQ ID NO: 3075009 - RNA, 12 nt, Human
cagccugcucca

SEQ ID NO: 3075010 - RNA, 19 nt, Human
cagccugcuaauuccccag

SEQ ID NO: 3075011 - RNA, 21 nt, Human
cagcggggacagcuccuucug

SEQ ID NO: 3075012 - RNA, 19 nt, Human
cagcggggacagcuccuuc

SEQ ID NO: 3075013 - RNA, 18 nt, Human
cagcggggacagcuccuu

SEQ ID NO: 3075014 - RNA, 17 nt, Human
auugauccagaaagaaa

SEQ ID NO: 3075015 - RNA, 16 nt, Human
auugauccagaaagaa

SEQ ID NO: 3075016 - RNA, 18 nt, Human
auugacuuuuuauggcac

SEQ ID NO: 3075017 - RNA, 17 nt, Human
auucuugccaaauauaa

SEQ ID NO: 3075018 - RNA, 16 nt, Human
auucucuccuguaccu

SEQ ID NO: 3075019 - RNA, 21 nt, Human
auucucuccuguaccucuuga

SEQ ID NO: 3075020 - RNA, 19 nt, Human
auucucuccuguaccucuu

SEQ ID NO: 3075021 - RNA, 21 nt, Human
auuccugaugcuucuucagag

SEQ ID NO: 3075022 - RNA, 13 nt, Human
auuccugaacagg

SEQ ID NO: 3075023 - RNA, 13 nt, Human
auucuuuccugag

SEQ ID NO: 3075024 - RNA, 17 nt, Human
auucuuuccugaggcug

SEQ ID NO: 3075025 - RNA, 22 nt, Human
auucuuuccugaggcugggcuc

SEQ ID NO: 3075026 - RNA, 22 nt, Human
auucaagaaaacaacuucaaua

SEQ ID NO: 3075027 - RNA, 18 nt, Human
auucacaagacccaaaag

SEQ ID NO: 3075028 - RNA, 21 nt, Human
auuauguguguuuuaaaauga

SEQ ID NO: 3075029 - RNA, 20 nt, Human
auuauguguguuuuaaaaug

SEQ ID NO: 3075030 - RNA, 15 nt, Human
auuauguguguuuua

SEQ ID NO: 3075031 - RNA, 23 nt, Human
auuaugugccagauuuaugcaua

SEQ ID NO: 3075032 - RNA, 18 nt, Human
auuaaauuuugaguucua

SEQ ID NO: 3075033 - RNA, 20 nt, Human
auuaaauucuugcaaaguau

SEQ ID NO: 3075034 - RNA, 18 nt, Human
auuaaauucuugcaaagu

SEQ ID NO: 3075035 - RNA, 14 nt, Human
auuaaauucuugca

SEQ ID NO: 3075036 - RNA, 19 nt, Human
auucauauuuacuucuuau

SEQ ID NO: 3075037 - RNA, 18 nt, Human
auucauauuuacuucuua

SEQ ID NO: 3075038 - RNA, 20 nt, Human
auucauauuuacuucuuaua

SEQ ID NO: 3075039 - RNA, 19 nt, Human
auuuauacaggucauauua

SEQ ID NO: 3075040 - RNA, 22 nt, Human
auuuaaugauaaguaaaugcua

SEQ ID NO: 3075041 - RNA, 14 nt, Human
auuuaaugaaagac

SEQ ID NO: 3075042 - RNA, 12 nt, Human
auuucuguuuag

SEQ ID NO: 3075043 - RNA, 16 nt, Human
auuucuguuuagauaa

SEQ ID NO: 3075044 - RNA, 14 nt, Human
auuucuguuuagau

SEQ ID NO: 3075045 - RNA, 15 nt, Human
auuucuaugaaauau

SEQ ID NO: 3075046 - RNA, 18 nt, Human
auuucuaugaaauauuau

SEQ ID NO: 3075047 - RNA, 14 nt, Human
auuucuaugaaaua

SEQ ID NO: 3075048 - RNA, 19 nt, Human
auugauccagaaagaaaac

SEQ ID NO: 3075049 - RNA, 18 nt, Human
auugauccagaaagaaaa

SEQ ID NO: 3075050 - RNA, 22 nt, Human
auugauccagaaagaaaacuug

SEQ ID NO: 3075051 - RNA, 18 nt, Human
auuguaagcaugcacaaa

SEQ ID NO: 3075052 - RNA, 15 nt, Human
auuguaaggaaugau

SEQ ID NO: 3075053 - RNA, 16 nt, Human
auuguaaggaaugauu

SEQ ID NO: 3075054 - RNA, 17 nt, Human
auuguaaaugugcuuuu

SEQ ID NO: 3075055 - RNA, 15 nt, Human
auuguaaaugugcuu

SEQ ID NO: 3075056 - RNA, 14 nt, Human
auuguaaaugugcu

SEQ ID NO: 3075057 - RNA, 19 nt, Human
auuguucuuaguuugcagu

SEQ ID NO: 3075058 - RNA, 15 nt, Human
auuguuuaaaaucau

SEQ ID NO: 3075059 - RNA, 19 nt, Human
auuguuuaaaaucauuucu

SEQ ID NO: 3075060 - RNA, 18 nt, Human
caaaaaaauauauuuaau

SEQ ID NO: 3075061 - RNA, 13 nt, Human
auuuuuaagugcu

SEQ ID NO: 3075062 - RNA, 13 nt, Human
auuuuuuuuuccu

SEQ ID NO: 3075063 - RNA, 16 nt, Human
auuuuuuuuuccuuca

SEQ ID NO: 3075064 - RNA, 12 nt, Human
auuuuuuuuucc

SEQ ID NO: 3075065 - RNA, 15 nt, Human
caaaagcugggcagg

SEQ ID NO: 3075066 - RNA, 13 nt, Human
auuuguuugaacu

SEQ ID NO: 3075067 - RNA, 16 nt, Human
auuuguuugaacugau

SEQ ID NO: 3075068 - RNA, 14 nt, Human
auuuguuugaacug

SEQ ID NO: 3075069 - RNA, 20 nt, Human
caacuauuuuuccaaaauaa

SEQ ID NO: 3075070 - RNA, 21 nt, Human
caacuaucucauuuccaagca

SEQ ID NO: 3075071 - RNA, 17 nt, Human
caacccccagccugcua

SEQ ID NO: 3075072 - RNA, 16 nt, Human
caacccccagccugcu

SEQ ID NO: 3075073 - RNA, 15 nt, Human
caacccccagccugc

SEQ ID NO: 3075074 - RNA, 19 nt, Human
caacccaaauguucaucaa

SEQ ID NO: 3075075 - RNA, 18 nt, Human
caagacccuugugguccc

SEQ ID NO: 3075076 - RNA, 19 nt, Human
caagacccuugugguccca

SEQ ID NO: 3075077 - RNA, 22 nt, Human
caagacccuuguggucccaccc

SEQ ID NO: 3075078 - RNA, 23 nt, Human
caagaauuucuaggacugaauua

SEQ ID NO: 3075079 - RNA, 16 nt, Human
caacucaccccagccc

SEQ ID NO: 3075080 - RNA, 13 nt, Human
caacucaccccag

SEQ ID NO: 3075081 - RNA, 15 nt, Human
caacucaccccagcc

SEQ ID NO: 3075082 - RNA, 20 nt, Human
caagaauuucuaggacugaa

SEQ ID NO: 3075083 - RNA, 18 nt, Human
caaccacugcgaccacaa

SEQ ID NO: 3075084 - RNA, 23 nt, Human
caacaaaccuguuucugcagcca

SEQ ID NO: 3075085 - RNA, 15 nt, Human
caaauccuugaagau

SEQ ID NO: 3075086 - RNA, 22 nt, Human
caaauccagccugcugccugcu

SEQ ID NO: 3075087 - RNA, 17 nt, Human
caaaucagcugcuacua

SEQ ID NO: 3075088 - RNA, 20 nt, Human
caaaguacacuguuucaaac

SEQ ID NO: 3075089 - RNA, 16 nt, Human
caaaguacacuguuuc

SEQ ID NO: 3075090 - RNA, 21 nt, Human
caaaguacacuguuucaaacu

SEQ ID NO: 3075091 - RNA, 13 nt, Human
caaagaugcagcc

SEQ ID NO: 3075092 - RNA, 20 nt, Human
caacaccucugcacaagcug

SEQ ID NO: 3075093 - RNA, 22 nt, Human
caacaccucugcacaagcugca

SEQ ID NO: 3075094 - RNA, 20 nt, Human
caacaccuuguuucccucuc

SEQ ID NO: 3075095 - RNA, 17 nt, Human
cacucuugaaaaaugca

SEQ ID NO: 3075096 - RNA, 19 nt, Human
cacucuuauugcccacgcu

SEQ ID NO: 3075097 - RNA, 18 nt, Human
cacucuuauugcccacgc

SEQ ID NO: 3075098 - RNA, 17 nt, Human
cacucuuauugcccacg

SEQ ID NO: 3075099 - RNA, 23 nt, Human
cacuacggaauaguuggcuagga

SEQ ID NO: 3075100 - RNA, 16 nt, Human
cacggccaggccagag

SEQ ID NO: 3075101 - RNA, 15 nt, Human
cacggccaggccaga

SEQ ID NO: 3075102 - RNA, 14 nt, Human
cacggccaggccag

SEQ ID NO: 3075103 - RNA, 20 nt, Human
cacggagggugacgggggug

SEQ ID NO: 3075104 - RNA, 14 nt, Human
caccugccagggac

SEQ ID NO: 3075105 - RNA, 16 nt, Human
caccugccagggacag

SEQ ID NO: 3075106 - RNA, 13 nt, Human
caccugccaggga

SEQ ID NO: 3075107 - RNA, 23 nt, Human
caccucaaaauaccaugccauuu

SEQ ID NO: 3075108 - RNA, 21 nt, Human
caccuacaugagguacugaga

SEQ ID NO: 3075109 - RNA, 16 nt, Human
caccguuaucgguguc

SEQ ID NO: 3075110 - RNA, 14 nt, Human
caccuuugucccca

SEQ ID NO: 3075111 - RNA, 15 nt, Human
caccuuuguccccac

SEQ ID NO: 3075112 - RNA, 17 nt, Human
caccuuuguccccaccg

SEQ ID NO: 3075113 - RNA, 14 nt, Human
caccuuugaagaag

SEQ ID NO: 3075114 - RNA, 13 nt, Human
caccuuggcucaa

SEQ ID NO: 3075115 - RNA, 22 nt, Human
caccuugcagcucuccccuucu

SEQ ID NO: 3075116 - RNA, 17 nt, Human
caccugccagggacaga

SEQ ID NO: 3075117 - RNA, 19 nt, Human
caccuugacagggcacacc

SEQ ID NO: 3075118 - RNA, 18 nt, Human
caccuugacagggcacac

SEQ ID NO: 3075119 - RNA, 15 nt, Human
caccuugcagcucuc

SEQ ID NO: 3075120 - RNA, 13 nt, Human
caccuugcagcuc

SEQ ID NO: 3075121 - RNA, 13 nt, Human
cagaauauguuuc

SEQ ID NO: 3075122 - RNA, 14 nt, Human
cagaauauguuuca

SEQ ID NO: 3075123 - RNA, 15 nt, Human
cagaauauguuucaa

SEQ ID NO: 3075124 - RNA, 17 nt, Human
cagaauauguuucaaac

SEQ ID NO: 3075125 - RNA, 18 nt, Human
cagaauauguuucaaacu

SEQ ID NO: 3075126 - RNA, 20 nt, Human
cagaauauguuucaaacuuu

SEQ ID NO: 3075127 - RNA, 13 nt, Human
cagaauauugcuu

SEQ ID NO: 3075128 - RNA, 12 nt, Human
cagaauauguuu

SEQ ID NO: 3075129 - RNA, 23 nt, Human
cagaaguuugagaucagccuggg

SEQ ID NO: 3075130 - RNA, 22 nt, Human
cagaaguuucugccgcagcccu

SEQ ID NO: 3075131 - RNA, 20 nt, Human
cagaaguuucugccgcagcc

SEQ ID NO: 3075132 - RNA, 21 nt, Human
cagaaguuucugccgcagccc

SEQ ID NO: 3075133 - RNA, 17 nt, Human
cagaaauguguuaucac

SEQ ID NO: 3075134 - RNA, 19 nt, Human
cagaaguuucugccgcagc

SEQ ID NO: 3075135 - RNA, 23 nt, Human
cacugggcuuggggaccagagcu

SEQ ID NO: 3075136 - RNA, 22 nt, Human
cacugggcuuggggaccagagc

SEQ ID NO: 3075137 - RNA, 20 nt, Human
cacugggcuuggggaccaga

SEQ ID NO: 3075138 - RNA, 17 nt, Human
cacuggugacaugucuu

SEQ ID NO: 3075139 - RNA, 16 nt, Human
cacuguugcccaggcu

SEQ ID NO: 3075140 - RNA, 15 nt, Human
cacuguugcccaggc

SEQ ID NO: 3075141 - RNA, 14 nt, Human
cacuguugcccagg

SEQ ID NO: 3075142 - RNA, 19 nt, Human
cacuguuucaaacuuuacu

SEQ ID NO: 3075143 - RNA, 17 nt, Human
cacuuggucugugagau

SEQ ID NO: 3075144 - RNA, 20 nt, Human
cacuuggucugugagaugcu

SEQ ID NO: 3075145 - RNA, 18 nt, Human
cacaguauuacuucugcu

SEQ ID NO: 3075146 - RNA, 16 nt, Human
cacaguauuacuucug

SEQ ID NO: 3075147 - RNA, 20 nt, Human
cacagacccugcccuguggg

SEQ ID NO: 3075148 - RNA, 21 nt, Human
cacagacccugcccugugggc

SEQ ID NO: 3075149 - RNA, 19 nt, Human
cacagacccugcccugugg

SEQ ID NO: 3075150 - RNA, 15 nt, Human
cacagcuaacaugga

SEQ ID NO: 3075151 - RNA, 16 nt, Human
cacagcuaacauggaa

SEQ ID NO: 3075152 - RNA, 18 nt, Human
cacagacccugcccugug

SEQ ID NO: 3075153 - RNA, 19 nt, Human
cacagcucuguccugggag

SEQ ID NO: 3075154 - RNA, 23 nt, Human
cacagcucuguccugggagugag

SEQ ID NO: 3075155 - RNA, 20 nt, Human
cacagcucuguccugggagu

SEQ ID NO: 3075156 - RNA, 22 nt, Human
cacagcuaacauggaaguacua

SEQ ID NO: 3075157 - RNA, 17 nt, Human
cacccagcccacuucug

SEQ ID NO: 3075158 - RNA, 16 nt, Human
cacccagcccacuucu

SEQ ID NO: 3075159 - RNA, 23 nt, Human
caccaacauacucccaucuguga

SEQ ID NO: 3075160 - RNA, 14 nt, Human
caccagcagccugg

SEQ ID NO: 3075161 - RNA, 12 nt, Human
caccagcagccu

SEQ ID NO: 3075162 - RNA, 15 nt, Human
caccagcagccugga

SEQ ID NO: 3075163 - RNA, 21 nt, Human
caccagcccuuagcagggaaa

SEQ ID NO: 3075164 - RNA, 23 nt, Human
cacccaggagccccgaggccuuc

SEQ ID NO: 3075165 - RNA, 20 nt, Human
cacccaggagccccgaggcc

SEQ ID NO: 3075166 - RNA, 19 nt, Human
cacccagcccacuucugcc

SEQ ID NO: 3075167 - RNA, 24 nt, Human
cacccaggagccccgaggccuucu

SEQ ID NO: 3075168 - RNA, 21 nt, Human
cacauuuuuuaaaugcaccug

SEQ ID NO: 3075169 - RNA, 17 nt, Human
cacauuuuuuaaaugca

SEQ ID NO: 3075170 - RNA, 14 nt, Human
cacauuuuucuuag

SEQ ID NO: 3075171 - RNA, 13 nt, Human
cacauuuuucuua

SEQ ID NO: 3075172 - RNA, 20 nt, Human
caccaacauacucccaucug

SEQ ID NO: 3075173 - RNA, 21 nt, Human
caccaacauacucccaucugu

SEQ ID NO: 3075174 - RNA, 17 nt, Human
caccaacauacucccau

SEQ ID NO: 3075175 - RNA, 15 nt, Human
cacauuuuauuuuau

SEQ ID NO: 3075176 - RNA, 18 nt, Human
cacaucuugcucugcuga

SEQ ID NO: 3075177 - RNA, 21 nt, Human
cacaucagcacgauuucuguu

SEQ ID NO: 3075178 - RNA, 20 nt, Human
cacaucagcacgauuucugu

SEQ ID NO: 3075179 - RNA, 19 nt, Human
cacaucagcacgauuucug

SEQ ID NO: 3075180 - RNA, 22 nt, Human
cacaucagcacgauuucuguuu

SEQ ID NO: 3075181 - RNA, 17 nt, Human
cacaucuugcucugcug

SEQ ID NO: 3075182 - RNA, 16 nt, Human
cacaucuugcucugcu

SEQ ID NO: 3075183 - RNA, 23 nt, Human
caaugcuggcuguuggcuggggg

SEQ ID NO: 3075184 - RNA, 22 nt, Human
caaugcuggcuguuggcugggg

SEQ ID NO: 3075185 - RNA, 14 nt, Human
caaugcuguauuuu

SEQ ID NO: 3075186 - RNA, 23 nt, Human
caaugcuguauuuuaaaagaaug

SEQ ID NO: 3075187 - RNA, 12 nt, Human
caauauuucaga

SEQ ID NO: 3075188 - RNA, 20 nt, Human
caauauuucagauaaucaca

SEQ ID NO: 3075189 - RNA, 22 nt, Human
caaugcugugcccuaaagugua

SEQ ID NO: 3075190 - RNA, 14 nt, Human
cacaagacccuugu

SEQ ID NO: 3075191 - RNA, 16 nt, Human
cacaagacccuugugg

SEQ ID NO: 3075192 - RNA, 12 nt, Human
caauuuaaaaaa

SEQ ID NO: 3075193 - RNA, 16 nt, Human
cacaagacugcacauc

SEQ ID NO: 3075194 - RNA, 23 nt, Human
cacaagacccaaaaggcagaagc

SEQ ID NO: 3075195 - RNA, 14 nt, Human
cacaagccuucggc

SEQ ID NO: 3075196 - RNA, 20 nt, Human
caaguauuagaauaccacag

SEQ ID NO: 3075197 - RNA, 14 nt, Human
caaguauuagaaua

SEQ ID NO: 3075198 - RNA, 18 nt, Human
cuucugacccaugcugcc

SEQ ID NO: 3075199 - RNA, 16 nt, Human
cuucugacccaugcug

SEQ ID NO: 3075200 - RNA, 17 nt, Human
cuucugacccaugcugc

SEQ ID NO: 3075201 - RNA, 16 nt, Human
cuucuuauacauuuga

SEQ ID NO: 3075202 - RNA, 13 nt, Human
cuucuuauacauu

SEQ ID NO: 3075203 - RNA, 14 nt, Human
cuuccucccucccu

SEQ ID NO: 3075204 - RNA, 13 nt, Human
cuuccucccuccc

SEQ ID NO: 3075205 - RNA, 12 nt, Human
cuuccucccucc

SEQ ID NO: 3075206 - RNA, 15 nt, Human
cuucugacccaugcu

SEQ ID NO: 3075207 - RNA, 22 nt, Human
cuucugaacuuggcgcugcccc

SEQ ID NO: 3075208 - RNA, 19 nt, Human
cuucugaacuuggcgcugc

SEQ ID NO: 3075209 - RNA, 22 nt, Human
cuucucuguauuccuagaaacu

SEQ ID NO: 3075210 - RNA, 17 nt, Human
cuuucaauaggaaaaac

SEQ ID NO: 3075211 - RNA, 20 nt, Human
cuuuaaugucacaggcaggu

SEQ ID NO: 3075212 - RNA, 19 nt, Human
cuuuaaugucacaggcagg

SEQ ID NO: 3075213 - RNA, 18 nt, Human
cuuuaaugucacaggcag

SEQ ID NO: 3075214 - RNA, 17 nt, Human
cuuuaaugucacaggca

SEQ ID NO: 3075215 - RNA, 14 nt, Human
cuuucaauaggaaa

SEQ ID NO: 3075216 - RNA, 15 nt, Human
cuuucaauaggaaaa

SEQ ID NO: 3075217 - RNA, 22 nt, Human
cuuuaaugucacaggcaggucc

SEQ ID NO: 3075218 - RNA, 21 nt, Human
cuugucuuuggacccugaggc

SEQ ID NO: 3075219 - RNA, 22 nt, Human
cuugucuuuggacccugaggcc

SEQ ID NO: 3075220 - RNA, 16 nt, Human
cuugguucccauuugc

SEQ ID NO: 3075221 - RNA, 20 nt, Human
cuugguucccauuugcuccu

SEQ ID NO: 3075222 - RNA, 22 nt, Human
cuugguccugcugcaguugcca

SEQ ID NO: 3075223 - RNA, 23 nt, Human
cuuggucucagugucaaugcagc

SEQ ID NO: 3075224 - RNA, 20 nt, Human
cuuggugucgggcaugacac

SEQ ID NO: 3075225 - RNA, 19 nt, Human
cuugucuuuggacccugag

SEQ ID NO: 3075226 - RNA, 20 nt, Human
cuugucuuuggacccugagg

SEQ ID NO: 3075227 - RNA, 13 nt, Human
cuugucuguagau

SEQ ID NO: 3075228 - RNA, 16 nt, Human
cuugguccugcugcag

SEQ ID NO: 3075229 - RNA, 17 nt, Human
cuugguccugcugcagu

SEQ ID NO: 3075230 - RNA, 18 nt, Human
cuugguccugcugcaguu

SEQ ID NO: 3075231 - RNA, 20 nt, Human
cuugguccugcugcaguugc

SEQ ID NO: 3075232 - RNA, 15 nt, Human
cuugguccugcugca

SEQ ID NO: 3075233 - RNA, 13 nt, Human
cuugaugccuggc

SEQ ID NO: 3075234 - RNA, 12 nt, Human
cuugauucauaa

SEQ ID NO: 3075235 - RNA, 18 nt, Human
cuugccgucuaccugagg

SEQ ID NO: 3075236 - RNA, 19 nt, Human
cuugccgucuaccugaggg

SEQ ID NO: 3075237 - RNA, 19 nt, Human
cuugauucauaaugacuua

SEQ ID NO: 3075238 - RNA, 15 nt, Human
cuuggauuguccccg

SEQ ID NO: 3075239 - RNA, 18 nt, Human
cuuggauuguccccgacc

SEQ ID NO: 3075240 - RNA, 20 nt, Human
cuuggauuguccccgacccu

SEQ ID NO: 3075241 - RNA, 14 nt, Human
cuuggauugucccc

SEQ ID NO: 3075242 - RNA, 23 nt, Human
cuuggcgcugccccuggcagccc

SEQ ID NO: 3075243 - RNA, 21 nt, Human
cuuggcgcugccccuggcagc

SEQ ID NO: 3075244 - RNA, 22 nt, Human
cuuggcgcugccccuggcagcc

SEQ ID NO: 3075245 - RNA, 14 nt, Human
gaacaaggcaaggc

SEQ ID NO: 3075246 - RNA, 15 nt, Human
gaacaaggcaaggcu

SEQ ID NO: 3075247 - RNA, 17 nt, Human
gaacaaggcaaggcugu

SEQ ID NO: 3075248 - RNA, 18 nt, Human
gaacaaggcaaggcuguc

SEQ ID NO: 3075249 - RNA, 21 nt, Human
gaacaaggcaaggcugucaau

SEQ ID NO: 3075250 - RNA, 23 nt, Human
gaaacuucagcgguuuauauaag

SEQ ID NO: 3075251 - RNA, 16 nt, Human
gaacaagaugguucua

SEQ ID NO: 3075252 - RNA, 23 nt, Human
gaacaaauuuacagagacagaaa

SEQ ID NO: 3075253 - RNA, 19 nt, Human
gaaauuuuuauuaaauuau

SEQ ID NO: 3075254 - RNA, 17 nt, Human
gaacaaauuuacagaga

SEQ ID NO: 3075255 - RNA, 18 nt, Human
gaacaaauuuacagagac

SEQ ID NO: 3075256 - RNA, 17 nt, Human
gaaaucaccgaaaacgu

SEQ ID NO: 3075257 - RNA, 17 nt, Human
gaaaugaaagcagggac

SEQ ID NO: 3075258 - RNA, 23 nt, Human
gaaaucaaauaugcaaagcacug

SEQ ID NO: 3075259 - RNA, 18 nt, Human
gaaauuuuuauuaaauua

SEQ ID NO: 3075260 - RNA, 18 nt, Human
gaaaugaaagcagggacu

SEQ ID NO: 3075261 - RNA, 19 nt, Human
gaaaucaaagagagaaaau

SEQ ID NO: 3075262 - RNA, 16 nt, Human
gaaaucaaauaugcaa

SEQ ID NO: 3075263 - RNA, 21 nt, Human
gaaaucaaauaugcaaagcac

SEQ ID NO: 3075264 - RNA, 21 nt, Human
gaaaguacuucuccacccugc

SEQ ID NO: 3075265 - RNA, 17 nt, Human
gaaaggcuccaggagca

SEQ ID NO: 3075266 - RNA, 18 nt, Human
gaaaggcuccaggagcag

SEQ ID NO: 3075267 - RNA, 19 nt, Human
gaaaggcuccaggagcagc

SEQ ID NO: 3075268 - RNA, 16 nt, Human
gaaaggcuccaggagc

SEQ ID NO: 3075269 - RNA, 18 nt, Human
gaaagacuaucuaaaugu

SEQ ID NO: 3075270 - RNA, 19 nt, Human
cuuuuaugugaaacauguu

SEQ ID NO: 3075271 - RNA, 18 nt, Human
cuuuuaugugaaacaugu

SEQ ID NO: 3075272 - RNA, 17 nt, Human
cuuuugucuaugggacu

SEQ ID NO: 3075273 - RNA, 19 nt, Human
cuuuuguagaagucacauu

SEQ ID NO: 3075274 - RNA, 16 nt, Human
cuuuuggucuguguga

SEQ ID NO: 3075275 - RNA, 15 nt, Human
cuuuuggucugugug

SEQ ID NO: 3075276 - RNA, 16 nt, Human
cuuuugccguuauuaa

SEQ ID NO: 3075277 - RNA, 18 nt, Human
cuuuugccguuauuaaaa

SEQ ID NO: 3075278 - RNA, 14 nt, Human
gaaaaaauauauau

SEQ ID NO: 3075279 - RNA, 19 nt, Human
gaaaaaauauuuuccugcc

SEQ ID NO: 3075280 - RNA, 21 nt, Human
cuuuuuuuuuuuuuuugacaa

SEQ ID NO: 3075281 - RNA, 18 nt, Human
cuuuugugcauuaucuag

SEQ ID NO: 3075282 - RNA, 14 nt, Human
cuuuugugcauuau

SEQ ID NO: 3075283 - RNA, 14 nt, Human
gaaaauuaacauga

SEQ ID NO: 3075284 - RNA, 21 nt, Human
gaaaagacuccaaagaaaugu

SEQ ID NO: 3075285 - RNA, 18 nt, Human
gaaaagacuccaaagaaa

SEQ ID NO: 3075286 - RNA, 20 nt, Human
gaaaagacuccaaagaaaug

SEQ ID NO: 3075287 - RNA, 14 nt, Human
gaaaauuuuaaaaa

SEQ ID NO: 3075288 - RNA, 18 nt, Human
gaaaauuuugauguuuua

SEQ ID NO: 3075289 - RNA, 22 nt, Human
cugucuaaugaaaccugugucu

SEQ ID NO: 3075290 - RNA, 23 nt, Human
cugucggagcccugucuccucuc

SEQ ID NO: 3075291 - RNA, 14 nt, Human
cugucauuugagca

SEQ ID NO: 3075292 - RNA, 14 nt, Human
cuguccugggagug

SEQ ID NO: 3075293 - RNA, 13 nt, Human
cuguccugggagu

SEQ ID NO: 3075294 - RNA, 20 nt, Human
cuguccugggagugagcugg

SEQ ID NO: 3075295 - RNA, 20 nt, Human
cuguacuugcucuugaugcc

SEQ ID NO: 3075296 - RNA, 19 nt, Human
cuguacuugcucuugaugc

SEQ ID NO: 3075297 - RNA, 16 nt, Human
cuguacuugcucuuga

SEQ ID NO: 3075298 - RNA, 15 nt, Human
cuguagagugggagc

SEQ ID NO: 3075299 - RNA, 20 nt, Human
cuguaagaaaauaucacuug

SEQ ID NO: 3075300 - RNA, 18 nt, Human
cuggucuuauuuguaaag

SEQ ID NO: 3075301 - RNA, 22 nt, Human
cuggugacaugucuuuucuugc

SEQ ID NO: 3075302 - RNA, 18 nt, Human
cuguugcccaggcuggcg

SEQ ID NO: 3075303 - RNA, 12 nt, Human
cuguuggccagu

SEQ ID NO: 3075304 - RNA, 19 nt, Human
cuuaaauaaugugaaacug

SEQ ID NO: 3075305 - RNA, 16 nt, Human
cuuaaauaaugugaaa

SEQ ID NO: 3075306 - RNA, 14 nt, Human
cuuaaauaauguga

SEQ ID NO: 3075307 - RNA, 13 nt, Human
cuuaaauaaugug

SEQ ID NO: 3075308 - RNA, 13 nt, Human
cuuaaaaaugguu

SEQ ID NO: 3075309 - RNA, 20 nt, Human
cuuaaaaaugguuuaaaugg

SEQ ID NO: 3075310 - RNA, 12 nt, Human
cuuaaaaauggu

SEQ ID NO: 3075311 - RNA, 23 nt, Human
cugugaaguuuacauuguaaaua

SEQ ID NO: 3075312 - RNA, 18 nt, Human
cugugaaguuuacauugu

SEQ ID NO: 3075313 - RNA, 15 nt, Human
cugugcucuggacag

SEQ ID NO: 3075314 - RNA, 17 nt, Human
cugugcucuggacaggc

SEQ ID NO: 3075315 - RNA, 23 nt, Human
cugugagaugcuagaacucccuu

SEQ ID NO: 3075316 - RNA, 21 nt, Human
cugugagaugcuagaacuccc

SEQ ID NO: 3075317 - RNA, 12 nt, Human
cuguucagcugg

SEQ ID NO: 3075318 - RNA, 22 nt, Human
cuguucagcuccagcucaccag

SEQ ID NO: 3075319 - RNA, 19 nt, Human
cuguucagcuccagcucac

SEQ ID NO: 3075320 - RNA, 18 nt, Human
cuguucagcuccagcuca

SEQ ID NO: 3075321 - RNA, 16 nt, Human
cuguucagcuccagcu

SEQ ID NO: 3075322 - RNA, 19 nt, Human
cuguucacagccagacugg

SEQ ID NO: 3075323 - RNA, 12 nt, Human
cuguucacagcc

SEQ ID NO: 3075324 - RNA, 15 nt, Human
cuguucagcuccagc

SEQ ID NO: 3075325 - RNA, 14 nt, Human
cuguucagcuccag

SEQ ID NO: 3075326 - RNA, 22 nt, Human
cuguucacagccagacuggcac

SEQ ID NO: 3075327 - RNA, 13 nt, Human
cuguuacugucuu

SEQ ID NO: 3075328 - RNA, 19 nt, Human
cuguuauaaucuuucacag

SEQ ID NO: 3075329 - RNA, 17 nt, Human
cuguuacugucuucagu

SEQ ID NO: 3075330 - RNA, 22 nt, Human
cugugucagguggggcagcuug

SEQ ID NO: 3075331 - RNA, 18 nt, Human
cugugcucuggacaggca

SEQ ID NO: 3075332 - RNA, 16 nt, Human
cugcugagauccugga

SEQ ID NO: 3075333 - RNA, 17 nt, Human
cugcugagauccuggac

SEQ ID NO: 3075334 - RNA, 18 nt, Human
cugcugagauccuggacu

SEQ ID NO: 3075335 - RNA, 19 nt, Human
cugcugagauccuggacug

SEQ ID NO: 3075336 - RNA, 23 nt, Human
cugcugagauccuggacugaggg

SEQ ID NO: 3075337 - RNA, 24 nt, Human
cugcugaaggcucgagcaugccug

SEQ ID NO: 3075338 - RNA, 23 nt, Human
cugcugaaggcucgagcaugccu

SEQ ID NO: 3075339 - RNA, 18 nt, Human
cugcugaaggcucgagca

SEQ ID NO: 3075340 - RNA, 17 nt, Human
cugcuaucaaagagguu

SEQ ID NO: 3075341 - RNA, 23 nt, Human
cugccuguucagcuccagcucac

SEQ ID NO: 3075342 - RNA, 20 nt, Human
cugccuguucagcuccagcu

SEQ ID NO: 3075343 - RNA, 14 nt, Human
cugccuccuuugug

SEQ ID NO: 3075344 - RNA, 17 nt, Human
cugccuccuuugugagg

SEQ ID NO: 3075345 - RNA, 21 nt, Human
cugccuccuuugugaggaagc

SEQ ID NO: 3075346 - RNA, 23 nt, Human
cugccuccuuugugaggaagccg

SEQ ID NO: 3075347 - RNA, 14 nt, Human
cugccucgaacugg

SEQ ID NO: 3075348 - RNA, 20 nt, Human
cugccucgaacuggcugcaa

SEQ ID NO: 3075349 - RNA, 19 nt, Human
cugccucgaacuggcugca

SEQ ID NO: 3075350 - RNA, 19 nt, Human
cugcccuuaccugccagga

SEQ ID NO: 3075351 - RNA, 12 nt, Human
cugcccuguggg

SEQ ID NO: 3075352 - RNA, 11 nt, Human
cugcccugugg

SEQ ID NO: 3075353 - RNA, 22 nt, Human
cugcccuuaccugccaggaagc

SEQ ID NO: 3075354 - RNA, 23 nt, Human
cugcccuuaccugccaggaagcc

SEQ ID NO: 3075355 - RNA, 24 nt, Human
cugcccugugaguacuacaguccu

SEQ ID NO: 3075356 - RNA, 13 nt, Human
cugcccugugagu

SEQ ID NO: 3075357 - RNA, 18 nt, Human
cuggaugcagccucacag

SEQ ID NO: 3075358 - RNA, 15 nt, Human
cuggaugcagccuca

SEQ ID NO: 3075359 - RNA, 16 nt, Human
cuggaugcagccucac

SEQ ID NO: 3075360 - RNA, 17 nt, Human
cuggaugcagccucaca

SEQ ID NO: 3075361 - RNA, 14 nt, Human
cugcuuccagugag

SEQ ID NO: 3075362 - RNA, 23 nt, Human
cugcuucagccucccgaguagcu

SEQ ID NO: 3075363 - RNA, 23 nt, Human
cuggaaaaguauguuagugcaaa

SEQ ID NO: 3075364 - RNA, 19 nt, Human
cugcuucaaggauccugag

SEQ ID NO: 3075365 - RNA, 13 nt, Human
cugcuucaaggau

SEQ ID NO: 3075366 - RNA, 14 nt, Human
cugcuucaaggauc

SEQ ID NO: 3075367 - RNA, 16 nt, Human
cugcuucaaggauccu

SEQ ID NO: 3075368 - RNA, 21 nt, Human
cuggagaaaauggacguguua

SEQ ID NO: 3075369 - RNA, 13 nt, Human
cuggcagccccug

SEQ ID NO: 3075370 - RNA, 22 nt, Human
cuggcagaguugaagacagagc

SEQ ID NO: 3075371 - RNA, 23 nt, Human
cuggcagccccuguucuggcaga

SEQ ID NO: 3075372 - RNA, 20 nt, Human
cuggcagaguugaagacaga

SEQ ID NO: 3075373 - RNA, 21 nt, Human
cuggcagaguugaagacagag

SEQ ID NO: 3075374 - RNA, 19 nt, Human
cuggcagaguugaagacag

SEQ ID NO: 3075375 - RNA, 17 nt, Human
cugggacuacaggugug

SEQ ID NO: 3075376 - RNA, 21 nt, Human
cugggacuacaggcacccacc

SEQ ID NO: 3075377 - RNA, 17 nt, Human
cugggacuacaggcacc

SEQ ID NO: 3075378 - RNA, 16 nt, Human
cugggacuacaggcac

SEQ ID NO: 3075379 - RNA, 13 nt, Human
cuggcucuguggc

SEQ ID NO: 3075380 - RNA, 14 nt, Human
cuggcucuguggcg

SEQ ID NO: 3075381 - RNA, 23 nt, Human
cuggcucuguggcgagccauuug

SEQ ID NO: 3075382 - RNA, 14 nt, Human
cuggcucuuccagg

SEQ ID NO: 3075383 - RNA, 15 nt, Human
cuggcucuuccaggc

SEQ ID NO: 3075384 - RNA, 13 nt, Human
cuggcucuuccag

SEQ ID NO: 3075385 - RNA, 12 nt, Human
cuggcucugugg

SEQ ID NO: 3075386 - RNA, 15 nt, Human
cuggcagcucagaga

SEQ ID NO: 3075387 - RNA, 17 nt, Human
cuggcagcucagagagg

SEQ ID NO: 3075388 - RNA, 19 nt, Human
cuggcagcucagagagggu

SEQ ID NO: 3075389 - RNA, 16 nt, Human
cuggcagcucagagag

SEQ ID NO: 3075390 - RNA, 17 nt, Human
gaugcuucuucagagac

SEQ ID NO: 3075391 - RNA, 20 nt, Human
gaugcuucuucagagacucc

SEQ ID NO: 3075392 - RNA, 21 nt, Human
gaugcuucuucagagacuccu

SEQ ID NO: 3075393 - RNA, 23 nt, Human
gaugcuucucacugccaugccag

SEQ ID NO: 3075394 - RNA, 22 nt, Human
gaugauuggaggggggaggugg

SEQ ID NO: 3075395 - RNA, 13 nt, Human
gaugauccuaggc

SEQ ID NO: 3075396 - RNA, 18 nt, Human
gaucucuugagccuggga

SEQ ID NO: 3075397 - RNA, 19 nt, Human
gaucucuugagccugggag

SEQ ID NO: 3075398 - RNA, 15 nt, Human
gaucucuaacuucac

SEQ ID NO: 3075399 - RNA, 21 nt, Human
gauacuguaucaugacaaaga

SEQ ID NO: 3075400 - RNA, 17 nt, Human
gauacuguaucaugaca

SEQ ID NO: 3075401 - RNA, 12 nt, Human
gauacugaaaua

SEQ ID NO: 3075402 - RNA, 23 nt, Human
gauacaguuacucagaauucucu

SEQ ID NO: 3075403 - RNA, 19 nt, Human
gauacaguuacucagaauu

SEQ ID NO: 3075404 - RNA, 16 nt, Human
gauacaguuacucaga

SEQ ID NO: 3075405 - RNA, 17 nt, Human
gauacuugaaaauuaac

SEQ ID NO: 3075406 - RNA, 20 nt, Human
gaucaaaagguuaauaaagu

SEQ ID NO: 3075407 - RNA, 17 nt, Human
gauauuuuuuucuuuuc

SEQ ID NO: 3075408 - RNA, 23 nt, Human
gaucaaaagguuaauaaaguaau

SEQ ID NO: 3075409 - RNA, 19 nt, Human
gauccacccaccucagccu

SEQ ID NO: 3075410 - RNA, 18 nt, Human
gauccacccaccucagcc

SEQ ID NO: 3075411 - RNA, 21 nt, Human
gauccaagcuggucccacuca

SEQ ID NO: 3075412 - RNA, 21 nt, Human
gauccacccaccucagccucc

SEQ ID NO: 3075413 - RNA, 20 nt, Human
gauccacccaccucagccuc

SEQ ID NO: 3075414 - RNA, 22 nt, Human
gauccacccaccucagccuccc

SEQ ID NO: 3075415 - RNA, 19 nt, Human
gauccaagcuggucccacu

SEQ ID NO: 3075416 - RNA, 17 nt, Human
gauccaagcugguccca

SEQ ID NO: 3075417 - RNA, 16 nt, Human
gauccaagcugguccc

SEQ ID NO: 3075418 - RNA, 12 nt, Human
gauccaagcugg

SEQ ID NO: 3075419 - RNA, 15 nt, Human
gcaagugagagcugg

SEQ ID NO: 3075420 - RNA, 16 nt, Human
gcaagugagagcuggg

SEQ ID NO: 3075421 - RNA, 20 nt, Human
gcaaccuccgccucuugggu

SEQ ID NO: 3075422 - RNA, 19 nt, Human
gcaaccuccgccucuuggg

SEQ ID NO: 3075423 - RNA, 16 nt, Human
gcaacccccagccugc

SEQ ID NO: 3075424 - RNA, 15 nt, Human
gcaacccccagccug

SEQ ID NO: 3075425 - RNA, 14 nt, Human
gcaacccccagccu

SEQ ID NO: 3075426 - RNA, 13 nt, Human
gcaacaggcuggg

SEQ ID NO: 3075427 - RNA, 15 nt, Human
gcaacaggcugggcu

SEQ ID NO: 3075428 - RNA, 14 nt, Human
gcaacaggcugggc

SEQ ID NO: 3075429 - RNA, 19 nt, Human
gcaacaggcugggcuucag

SEQ ID NO: 3075430 - RNA, 16 nt, Human
gcaacaggcugggcuu

SEQ ID NO: 3075431 - RNA, 16 nt, Human
gcaaccaccaccaacc

SEQ ID NO: 3075432 - RNA, 18 nt, Human
gcaaccaccaccaaccac

SEQ ID NO: 3075433 - RNA, 13 nt, Human
gcaaccaccacca

SEQ ID NO: 3075434 - RNA, 19 nt, Human
gauuuaacagaaauguaca

SEQ ID NO: 3075435 - RNA, 18 nt, Human
gauuuaacagaaauguac

SEQ ID NO: 3075436 - RNA, 17 nt, Human
gauuuaacagaaaugua

SEQ ID NO: 3075437 - RNA, 16 nt, Human
gauuuaacagaaaugu

SEQ ID NO: 3075438 - RNA, 15 nt, Human
gauucuucugcuuca

SEQ ID NO: 3075439 - RNA, 13 nt, Human
gauucuucugcuu

SEQ ID NO: 3075440 - RNA, 12 nt, Human
gauucuucugcu

SEQ ID NO: 3075441 - RNA, 21 nt, Human
gauuuuuuuuuccuucagugc

SEQ ID NO: 3075442 - RNA, 14 nt, Human
gcaaaaaggcagga

SEQ ID NO: 3075443 - RNA, 22 nt, Human
gcaaaagaugcuucucacugcc

SEQ ID NO: 3075444 - RNA, 17 nt, Human
gcaaaagaugcuucuca

SEQ ID NO: 3075445 - RNA, 16 nt, Human
gauuuuuuuuuccuuc

SEQ ID NO: 3075446 - RNA, 12 nt, Human
gauuucacucuc

SEQ ID NO: 3075447 - RNA, 17 nt, Human
gauuuuuuuuuccuuca

SEQ ID NO: 3075448 - RNA, 18 nt, Human
gauuuuuuuuuccuucag

SEQ ID NO: 3075449 - RNA, 11 nt, Human
gauuucacucu

SEQ ID NO: 3075450 - RNA, 14 nt, Human
gcauacguacacau

SEQ ID NO: 3075451 - RNA, 17 nt, Human
gcauacguacacauuuu

SEQ ID NO: 3075452 - RNA, 16 nt, Human
gcauacguacacauuu

SEQ ID NO: 3075453 - RNA, 15 nt, Human
gcauacguacacauu

SEQ ID NO: 3075454 - RNA, 13 nt, Human
gcagugaugucac

SEQ ID NO: 3075455 - RNA, 22 nt, Human
gcaguuguugcccacagcugua

SEQ ID NO: 3075456 - RNA, 14 nt, Human
gcauccaguaucuu

SEQ ID NO: 3075457 - RNA, 17 nt, Human
gcauccaguaucuugaa

SEQ ID NO: 3075458 - RNA, 18 nt, Human
gcauccaguaucuugaag

SEQ ID NO: 3075459 - RNA, 13 nt, Human
gcauccuggcacc

SEQ ID NO: 3075460 - RNA, 21 nt, Human
gcauggcugccaaugggagcu

SEQ ID NO: 3075461 - RNA, 17 nt, Human
gcauuuaaaagauacag

SEQ ID NO: 3075462 - RNA, 16 nt, Human
gcauuuaaaagauaca

SEQ ID NO: 3075463 - RNA, 16 nt, Human
gcauugugggaagggg

SEQ ID NO: 3075464 - RNA, 18 nt, Human
gcauugugggaaggggag

SEQ ID NO: 3075465 - RNA, 22 nt, Human
gcauuuaaaagauacaguuacu

SEQ ID NO: 3075466 - RNA, 18 nt, Human
gcauuuaaaagauacagu

SEQ ID NO: 3075467 - RNA, 15 nt, Human
gcauuuacuuugugu

SEQ ID NO: 3075468 - RNA, 13 nt, Human
gcauugugggaag

SEQ ID NO: 3075469 - RNA, 15 nt, Human
gcauugugggaaggg

SEQ ID NO: 3075470 - RNA, 21 nt, Human
gcaugugaugagaggaaauca

SEQ ID NO: 3075471 - RNA, 18 nt, Human
gcaugugaugagaggaaa

SEQ ID NO: 3075472 - RNA, 19 nt, Human
gcaugugaugagaggaaau

SEQ ID NO: 3075473 - RNA, 16 nt, Human
gcaugguuuggagcug

SEQ ID NO: 3075474 - RNA, 18 nt, Human
gcaagugagagcugggug

SEQ ID NO: 3075475 - RNA, 17 nt, Human
gcacucagaagacacug

SEQ ID NO: 3075476 - RNA, 20 nt, Human
gcacucagaagacacugaug

SEQ ID NO: 3075477 - RNA, 22 nt, Human
gcacuuuguucuggcucuucca

SEQ ID NO: 3075478 - RNA, 12 nt, Human
gcagaacaguga

SEQ ID NO: 3075479 - RNA, 13 nt, Human
gcagaacagugau

SEQ ID NO: 3075480 - RNA, 12 nt, Human
gcacuccccugc

SEQ ID NO: 3075481 - RNA, 15 nt, Human
gcacuccccugcugg

SEQ ID NO: 3075482 - RNA, 18 nt, Human
gcacuuuguucuggcucu

SEQ ID NO: 3075483 - RNA, 19 nt, Human
gcacuuuguucuggcucuu

SEQ ID NO: 3075484 - RNA, 13 nt, Human
gcacuccccugcu

SEQ ID NO: 3075485 - RNA, 14 nt, Human
gcacuccccugcug

SEQ ID NO: 3075486 - RNA, 14 nt, Human
gcacuccagccugg

SEQ ID NO: 3075487 - RNA, 18 nt, Human
gcagaacagugauuacca

SEQ ID NO: 3075488 - RNA, 22 nt, Human
gcagaacagugauuaccaggga

SEQ ID NO: 3075489 - RNA, 13 nt, Human
gcagaggaaagca

SEQ ID NO: 3075490 - RNA, 14 nt, Human
gcagaggaaagcaa

SEQ ID NO: 3075491 - RNA, 18 nt, Human
gcagaggaaagcaaagga

SEQ ID NO: 3075492 - RNA, 20 nt, Human
gcagaggaaagcaaaggaga

SEQ ID NO: 3075493 - RNA, 21 nt, Human
gcagaggaaagcaaaggagau

SEQ ID NO: 3075494 - RNA, 14 nt, Human
gcagagggcacaga

SEQ ID NO: 3075495 - RNA, 17 nt, Human
gcagcauauucaggaag

SEQ ID NO: 3075496 - RNA, 18 nt, Human
gcagcauauucaggaagc

SEQ ID NO: 3075497 - RNA, 19 nt, Human
gcagcauauucaggaagcu

SEQ ID NO: 3075498 - RNA, 23 nt, Human
gcagcauauucaggaagcucagg

SEQ ID NO: 3075499 - RNA, 15 nt, Human
gcagcucuccccuuc

SEQ ID NO: 3075500 - RNA, 16 nt, Human
gcagccaggccacaag

SEQ ID NO: 3075501 - RNA, 15 nt, Human
gcagccacauuccug

SEQ ID NO: 3075502 - RNA, 19 nt, Human
gacuuuuccaacccucauc

SEQ ID NO: 3075503 - RNA, 22 nt, Human
gacuuuuuauggcacuaguauu

SEQ ID NO: 3075504 - RNA, 14 nt, Human
gacuuuuccaaccc

SEQ ID NO: 3075505 - RNA, 14 nt, Human
gagacggaguccca

SEQ ID NO: 3075506 - RNA, 19 nt, Human
gagacggagucccaccuug

SEQ ID NO: 3075507 - RNA, 16 nt, Human
gagacggagucccacc

SEQ ID NO: 3075508 - RNA, 18 nt, Human
gagacgggggcagagagg

SEQ ID NO: 3075509 - RNA, 21 nt, Human
gagacccugucucaaaaaaag

SEQ ID NO: 3075510 - RNA, 23 nt, Human
gagaaugaaagggcccagagagg

SEQ ID NO: 3075511 - RNA, 15 nt, Human
gagaaugaaagggcc

SEQ ID NO: 3075512 - RNA, 14 nt, Human
gagauuggaaggaa

SEQ ID NO: 3075513 - RNA, 21 nt, Human
gagauugugccccugcacucc

SEQ ID NO: 3075514 - RNA, 21 nt, Human
gagauugcaccacugcacucc

SEQ ID NO: 3075515 - RNA, 20 nt, Human
gagaugcuagaacucccuuu

SEQ ID NO: 3075516 - RNA, 16 nt, Human
gagaugcuagaacucc

SEQ ID NO: 3075517 - RNA, 13 nt, Human
gagacuccugcag

SEQ ID NO: 3075518 - RNA, 14 nt, Human
gagagccuuccagg

SEQ ID NO: 3075519 - RNA, 15 nt, Human
gagagccuuccaggg

SEQ ID NO: 3075520 - RNA, 16 nt, Human
gagagccuuccagggg

SEQ ID NO: 3075521 - RNA, 18 nt, Human
gagagccuuccaggggug

SEQ ID NO: 3075522 - RNA, 20 nt, Human
gagagccuuccagggguggg

SEQ ID NO: 3075523 - RNA, 15 nt, Human
gagagcuagcagcag

SEQ ID NO: 3075524 - RNA, 21 nt, Human
gagagcuagcagcagggaggg

SEQ ID NO: 3075525 - RNA, 13 nt, Human
gagagcugggugu

SEQ ID NO: 3075526 - RNA, 15 nt, Human
gagaggacccccuga

SEQ ID NO: 3075527 - RNA, 20 nt, Human
gagagcugggugucaagagg

SEQ ID NO: 3075528 - RNA, 12 nt, Human
gagaggaaauca

SEQ ID NO: 3075529 - RNA, 17 nt, Human
gagggccugcaagggag

SEQ ID NO: 3075530 - RNA, 21 nt, Human
gagggccugcaagggagugag

SEQ ID NO: 3075531 - RNA, 14 nt, Human
gagggccugcaagg

SEQ ID NO: 3075532 - RNA, 20 nt, Human
gaggcucuggagcccacugu

SEQ ID NO: 3075533 - RNA, 18 nt, Human
gaggcugagaugggagaa

SEQ ID NO: 3075534 - RNA, 17 nt, Human
gaggcuccacuuggucu

SEQ ID NO: 3075535 - RNA, 19 nt, Human
gaggcauuuguuugaacug

SEQ ID NO: 3075536 - RNA, 22 nt, Human
gaggcaugugaugagaggaaau

SEQ ID NO: 3075537 - RNA, 20 nt, Human
gaggcaugugaugagaggaa

SEQ ID NO: 3075538 - RNA, 21 nt, Human
gaggcaugugaugagaggaaa

SEQ ID NO: 3075539 - RNA, 21 nt, Human
gaggcauuuguuugaacugau

SEQ ID NO: 3075540 - RNA, 15 nt, Human
gaggcuccacuuggu

SEQ ID NO: 3075541 - RNA, 12 nt, Human
gaggcuccacuu

SEQ ID NO: 3075542 - RNA, 21 nt, Human
gaggacgcucucuggccuucg

SEQ ID NO: 3075543 - RNA, 20 nt, Human
gaggacgcucucuggccuuc

SEQ ID NO: 3075544 - RNA, 16 nt, Human
gaggacuuuucuuugu

SEQ ID NO: 3075545 - RNA, 23 nt, Human
gaggacuuuucuuuguggcuucc

SEQ ID NO: 3075546 - RNA, 20 nt, Human
gaggacuuuucuuuguggcu

SEQ ID NO: 3075547 - RNA, 14 nt, Human
gaggagagaggacc

SEQ ID NO: 3075548 - RNA, 15 nt, Human
gaggagagaggaccc

SEQ ID NO: 3075549 - RNA, 12 nt, Human
gaggagagagga

SEQ ID NO: 3075550 - RNA, 12 nt, Human
gaggagaaacug

SEQ ID NO: 3075551 - RNA, 14 nt, Human
gaggagaaacugga

SEQ ID NO: 3075552 - RNA, 20 nt, Human
gaggcagggucucacucugu

SEQ ID NO: 3075553 - RNA, 19 nt, Human
gaggcagggucucacucug

SEQ ID NO: 3075554 - RNA, 18 nt, Human
gaggcagggucucacucu

SEQ ID NO: 3075555 - RNA, 22 nt, Human
gagcuguucacagccagacugg

SEQ ID NO: 3075556 - RNA, 14 nt, Human
gagcccugguggca

SEQ ID NO: 3075557 - RNA, 13 nt, Human
gagcccugguggc

SEQ ID NO: 3075558 - RNA, 20 nt, Human
gagcuguucacagccagacu

SEQ ID NO: 3075559 - RNA, 17 nt, Human
gagcuguucacagccag

SEQ ID NO: 3075560 - RNA, 21 nt, Human
gagcagggcucagcggggaca

SEQ ID NO: 3075561 - RNA, 14 nt, Human
gagcaucaggccag

SEQ ID NO: 3075562 - RNA, 14 nt, Human
gagcagucaggaaa

SEQ ID NO: 3075563 - RNA, 13 nt, Human
gagcaugccugga

SEQ ID NO: 3075564 - RNA, 15 nt, Human
gagcaucaggccagg

SEQ ID NO: 3075565 - RNA, 16 nt, Human
gagcaucaggccaggc

SEQ ID NO: 3075566 - RNA, 13 nt, Human
gagcaucaggcca

SEQ ID NO: 3075567 - RNA, 20 nt, Human
gagcccugggaggcucugga

SEQ ID NO: 3075568 - RNA, 19 nt, Human
gagcccugggaggcucugg

SEQ ID NO: 3075569 - RNA, 18 nt, Human
gagcccugggaggcucug

SEQ ID NO: 3075570 - RNA, 16 nt, Human
gagcccugggaggcuc

SEQ ID NO: 3075571 - RNA, 12 nt, Human
gagcccugggag

SEQ ID NO: 3075572 - RNA, 17 nt, Human
gagccccgaggccuucu

SEQ ID NO: 3075573 - RNA, 20 nt, Human
gagccccacagccccaucug

SEQ ID NO: 3075574 - RNA, 14 nt, Human
gagccccgaggccu

SEQ ID NO: 3075575 - RNA, 13 nt, Human
gagccccgaggcc

SEQ ID NO: 3075576 - RNA, 16 nt, Human
gagccccacccucaga

SEQ ID NO: 3075577 - RNA, 12 nt, Human
gagccccacagc

SEQ ID NO: 3075578 - RNA, 13 nt, Human
gagccccacagcc

SEQ ID NO: 3075579 - RNA, 14 nt, Human
gagccccacagccc

SEQ ID NO: 3075580 - RNA, 23 nt, Human
gacauugcggacagccacggcca

SEQ ID NO: 3075581 - RNA, 17 nt, Human
gacauugcggacagcca

SEQ ID NO: 3075582 - RNA, 17 nt, Human
gacauuugcucauggaa

SEQ ID NO: 3075583 - RNA, 19 nt, Human
gacagcuccuucuguccua

SEQ ID NO: 3075584 - RNA, 12 nt, Human
gacagcucugca

SEQ ID NO: 3075585 - RNA, 10 nt, Human
gacagcucuu

SEQ ID NO: 3075586 - RNA, 11 nt, Human
gacagcucuua

SEQ ID NO: 3075587 - RNA, 18 nt, Human
gacagucaccucauggaa

SEQ ID NO: 3075588 - RNA, 12 nt, Human
gacagucccugc

SEQ ID NO: 3075589 - RNA, 14 nt, Human
gacagucccugcca

SEQ ID NO: 3075590 - RNA, 15 nt, Human
gacagucccugccaa

SEQ ID NO: 3075591 - RNA, 16 nt, Human
gacagucccugccaau

SEQ ID NO: 3075592 - RNA, 20 nt, Human
gacagucccugccaauggac

SEQ ID NO: 3075593 - RNA, 14 nt, Human
gacagcccgggcuc

SEQ ID NO: 3075594 - RNA, 18 nt, Human
gacagcuccuucuguccu

SEQ ID NO: 3075595 - RNA, 17 nt, Human
gacagcuccuucugucc

SEQ ID NO: 3075596 - RNA, 16 nt, Human
gacagcccgggcucug

SEQ ID NO: 3075597 - RNA, 16 nt, Human
gacagcuccuucuguc

SEQ ID NO: 3075598 - RNA, 22 nt, Human
gacgcuacccgggaagggggcu

SEQ ID NO: 3075599 - RNA, 23 nt, Human
gacgcuacccgggaagggggcug

SEQ ID NO: 3075600 - RNA, 14 nt, Human
gacgcucucuggcc

SEQ ID NO: 3075601 - RNA, 16 nt, Human
gacgcugugcugcccu

SEQ ID NO: 3075602 - RNA, 17 nt, Human
gacgcugugcugcccug

SEQ ID NO: 3075603 - RNA, 18 nt, Human
gacgcugugcugcccugc

SEQ ID NO: 3075604 - RNA, 15 nt, Human
gacgcugugcugccc

SEQ ID NO: 3075605 - RNA, 22 nt, Human
gaccucugcagcaauaaagcag

SEQ ID NO: 3075606 - RNA, 18 nt, Human
gaccucugcagcaauaaa

SEQ ID NO: 3075607 - RNA, 16 nt, Human
gaccucugcagcaaua

SEQ ID NO: 3075608 - RNA, 12 nt, Human
gacgccauccca

SEQ ID NO: 3075609 - RNA, 13 nt, Human
gacgccaucccag

SEQ ID NO: 3075610 - RNA, 19 nt, Human
gacgccaucccagccccaa

SEQ ID NO: 3075611 - RNA, 21 nt, Human
gacgccaucccagccccaaug

SEQ ID NO: 3075612 - RNA, 18 nt, Human
gaccucaggugagaagca

SEQ ID NO: 3075613 - RNA, 19 nt, Human
gaccucaggugagaagcag

SEQ ID NO: 3075614 - RNA, 19 nt, Human
gaccucaggccugggggcu

SEQ ID NO: 3075615 - RNA, 21 nt, Human
gaccucaggugauccacccac

SEQ ID NO: 3075616 - RNA, 20 nt, Human
gaccucaggugauccaccca

SEQ ID NO: 3075617 - RNA, 21 nt, Human
gaccucaggugagaagcagag

SEQ ID NO: 3075618 - RNA, 19 nt, Human
gaccucaggugauccaccc

SEQ ID NO: 3075619 - RNA, 14 nt, Human
gaccucaggccugg

SEQ ID NO: 3075620 - RNA, 13 nt, Human
gaccucaggccug

SEQ ID NO: 3075621 - RNA, 14 nt, Human
gaaugaauggcuaa

SEQ ID NO: 3075622 - RNA, 15 nt, Human
gaauauauaaccagu

SEQ ID NO: 3075623 - RNA, 12 nt, Human
gaauauugcuga

SEQ ID NO: 3075624 - RNA, 13 nt, Human
gaauauugcugau

SEQ ID NO: 3075625 - RNA, 11 nt, Human
gaauauugcug

SEQ ID NO: 3075626 - RNA, 22 nt, Human
gaauaucuccgucaacucauau

SEQ ID NO: 3075627 - RNA, 24 nt, Human
gaauauugcugauggugcaaugac

SEQ ID NO: 3075628 - RNA, 22 nt, Human
gaauauugcugauggugcaaug

SEQ ID NO: 3075629 - RNA, 23 nt, Human
gaauauugcugauggugcaauga

SEQ ID NO: 3075630 - RNA, 21 nt, Human
gacacagcucuucuccaggcu

SEQ ID NO: 3075631 - RNA, 17 nt, Human
gacacagcucuucucca

SEQ ID NO: 3075632 - RNA, 20 nt, Human
gacacagcucuucuccaggc

SEQ ID NO: 3075633 - RNA, 19 nt, Human
gacacagcucuucuccagg

SEQ ID NO: 3075634 - RNA, 12 nt, Human
gacacagcucuu

SEQ ID NO: 3075635 - RNA, 14 nt, Human
gaauuaugaaacuu

SEQ ID NO: 3075636 - RNA, 18 nt, Human
gaaugcacaaacagaggc

SEQ ID NO: 3075637 - RNA, 22 nt, Human
gaaugauuaugaauuacauuug

SEQ ID NO: 3075638 - RNA, 17 nt, Human
gaauguuugccucugcc

SEQ ID NO: 3075639 - RNA, 16 nt, Human
gaauguuugccucugc

SEQ ID NO: 3075640 - RNA, 19 nt, Human
gaaugcacaaacagaggcc

SEQ ID NO: 3075641 - RNA, 15 nt, Human
gaauguuugccucug

SEQ ID NO: 3075642 - RNA, 20 nt, Human
gaaugaugauccuaggcauu

SEQ ID NO: 3075643 - RNA, 14 nt, Human
gaaugaugccauga

SEQ ID NO: 3075644 - RNA, 14 nt, Human
gaaugauuaauuaa

SEQ ID NO: 3075645 - RNA, 14 nt, Human
gaaugauuaugaau

SEQ ID NO: 3075646 - RNA, 15 nt, Human
gaaugaauggcuaag

SEQ ID NO: 3075647 - RNA, 19 nt, Human
gaauguuugccucugccuc

SEQ ID NO: 3075648 - RNA, 18 nt, Human
gaauguuugccucugccu

SEQ ID NO: 3075649 - RNA, 14 nt, Human
gaauuaacacauga

SEQ ID NO: 3075650 - RNA, 15 nt, Human
gaauuaacacaugau

SEQ ID NO: 3075651 - RNA, 20 nt, Human
gaauuacauuuguauaaaau

SEQ ID NO: 3075652 - RNA, 15 nt, Human
gaauuacauuuguau

SEQ ID NO: 3075653 - RNA, 18 nt, Human
gaauuacauuuguauaaa

SEQ ID NO: 3075654 - RNA, 13 nt, Human
gaauuacauuugu

SEQ ID NO: 3075655 - RNA, 21 nt, Human
ggaagccagcaggcucucagg

SEQ ID NO: 3075656 - RNA, 18 nt, Human
ggaagccgcuggggccag

SEQ ID NO: 3075657 - RNA, 22 nt, Human
ggaagccagcaggcucucaggc

SEQ ID NO: 3075658 - RNA, 23 nt, Human
ggaagccagcaggcucucaggcc

SEQ ID NO: 3075659 - RNA, 23 nt, Human
ggaaaucaccgaaaacguggcug

SEQ ID NO: 3075660 - RNA, 19 nt, Human
ggaaaucaggguuaguauu

SEQ ID NO: 3075661 - RNA, 21 nt, Human
ggacagucaccucauggaauu

SEQ ID NO: 3075662 - RNA, 17 nt, Human
ggacagucaccucaugg

SEQ ID NO: 3075663 - RNA, 18 nt, Human
ggacagucaccucaugga

SEQ ID NO: 3075664 - RNA, 13 nt, Human
ggacacccuguga

SEQ ID NO: 3075665 - RNA, 23 nt, Human
ggacacccugugauggggcccug

SEQ ID NO: 3075666 - RNA, 17 nt, Human
ggacagggaggugaccc

SEQ ID NO: 3075667 - RNA, 23 nt, Human
ggacaggcauguucucugaggac

SEQ ID NO: 3075668 - RNA, 13 nt, Human
ggacauggacaag

SEQ ID NO: 3075669 - RNA, 18 nt, Human
ggaaugaagcaaugcuuc

SEQ ID NO: 3075670 - RNA, 19 nt, Human
ggaaugaaugucaguguga

SEQ ID NO: 3075671 - RNA, 12 nt, Human
ggacacagcucu

SEQ ID NO: 3075672 - RNA, 12 nt, Human
ggacacccugug

SEQ ID NO: 3075673 - RNA, 21 nt, Human
ggacacagcucuucuccaggc

SEQ ID NO: 3075674 - RNA, 13 nt, Human
ggacacagcucuu

SEQ ID NO: 3075675 - RNA, 16 nt, Human
ggaagcucagggccug

SEQ ID NO: 3075676 - RNA, 17 nt, Human
ggaagcucagggccugg

SEQ ID NO: 3075677 - RNA, 21 nt, Human
ggaagcucagggccuggcuca

SEQ ID NO: 3075678 - RNA, 15 nt, Human
ggaauaccugucccc

SEQ ID NO: 3075679 - RNA, 16 nt, Human
ggaauaccuguccccc

SEQ ID NO: 3075680 - RNA, 19 nt, Human
ggaauaccugucccccuga

SEQ ID NO: 3075681 - RNA, 19 nt, Human
ggaauacucuuauaucuau

SEQ ID NO: 3075682 - RNA, 16 nt, Human
ggaauauauaaccagu

SEQ ID NO: 3075683 - RNA, 19 nt, Human
gcuucuucagagacuccug

SEQ ID NO: 3075684 - RNA, 21 nt, Human
gcuucuucagagacuccugca

SEQ ID NO: 3075685 - RNA, 16 nt, Human
gcuugaccgugaggcc

SEQ ID NO: 3075686 - RNA, 17 nt, Human
gcuugaccgugaggcca

SEQ ID NO: 3075687 - RNA, 18 nt, Human
gcuugaccgugaggccag

SEQ ID NO: 3075688 - RNA, 19 nt, Human
gcuugaccgugaggccaga

SEQ ID NO: 3075689 - RNA, 23 nt, Human
gcuugggcuucauccuccucaga

SEQ ID NO: 3075690 - RNA, 16 nt, Human
gcuuggggaccagagc

SEQ ID NO: 3075691 - RNA, 16 nt, Human
gcuuaacuucacauau

SEQ ID NO: 3075692 - RNA, 16 nt, Human
gcuucuucagagacuc

SEQ ID NO: 3075693 - RNA, 17 nt, Human
gcuuaacuucacauauu

SEQ ID NO: 3075694 - RNA, 14 nt, Human
gcuuaacuucacau

SEQ ID NO: 3075695 - RNA, 22 nt, Human
gcuuucuacccagcgagcccug

SEQ ID NO: 3075696 - RNA, 19 nt, Human
gcuuucuacccagcgagcc

SEQ ID NO: 3075697 - RNA, 13 nt, Human
gcuuucuacccag

SEQ ID NO: 3075698 - RNA, 17 nt, Human
gcuuggggaccagagcu

SEQ ID NO: 3075699 - RNA, 18 nt, Human
gcuuggggaccagagcug

SEQ ID NO: 3075700 - RNA, 20 nt, Human
gcuuggggaccagagcugcc

SEQ ID NO: 3075701 - RNA, 21 nt, Human
gcuuggggaccagagcugcca

SEQ ID NO: 3075702 - RNA, 22 nt, Human
gcuuggggaccagagcugccac

SEQ ID NO: 3075703 - RNA, 19 nt, Human
gcuugggcuucauccuccu

SEQ ID NO: 3075704 - RNA, 20 nt, Human
gcuuuucccuuuuuuuaagu

SEQ ID NO: 3075705 - RNA, 21 nt, Human
gcuuuucccuuuuuuuaagua

SEQ ID NO: 3075706 - RNA, 21 nt, Human
ggaaacuaggugcauauuuau

SEQ ID NO: 3075707 - RNA, 13 nt, Human
ggaaacugccagc

SEQ ID NO: 3075708 - RNA, 15 nt, Human
ggaaacccagcucug

SEQ ID NO: 3075709 - RNA, 20 nt, Human
ggaaacagcuaaugggacac

SEQ ID NO: 3075710 - RNA, 16 nt, Human
ggaaaaaauaacaaug

SEQ ID NO: 3075711 - RNA, 19 nt, Human
gcuuuugugcauuaucuag

SEQ ID NO: 3075712 - RNA, 13 nt, Human
gcuuuugugcauu

SEQ ID NO: 3075713 - RNA, 15 nt, Human
gcuuuuuaauauuga

SEQ ID NO: 3075714 - RNA, 19 nt, Human
ggaaagcaaaggagauugg

SEQ ID NO: 3075715 - RNA, 16 nt, Human
ggaaagaguaggaaga

SEQ ID NO: 3075716 - RNA, 17 nt, Human
ggaaagaguaggaagac

SEQ ID NO: 3075717 - RNA, 20 nt, Human
ggaaagacuuuuccaacccu

SEQ ID NO: 3075718 - RNA, 14 nt, Human
ggaaagaggcucug

SEQ ID NO: 3075719 - RNA, 18 nt, Human
gcugagggugagugggug

SEQ ID NO: 3075720 - RNA, 23 nt, Human
gcugagggugagugggugaauaa

SEQ ID NO: 3075721 - RNA, 14 nt, Human
gcugaggugggagg

SEQ ID NO: 3075722 - RNA, 16 nt, Human
gcugagauccuggacu

SEQ ID NO: 3075723 - RNA, 14 nt, Human
gcugagauccugga

SEQ ID NO: 3075724 - RNA, 22 nt, Human
gcugagauccuggacugagggg

SEQ ID NO: 3075725 - RNA, 23 nt, Human
gcugcaaaggguaucaggugcug

SEQ ID NO: 3075726 - RNA, 18 nt, Human
gcugcacccucaggcagg

SEQ ID NO: 3075727 - RNA, 19 nt, Human
gcugcacccucaggcaggu

SEQ ID NO: 3075728 - RNA, 13 nt, Human
gcugcaccggcug

SEQ ID NO: 3075729 - RNA, 16 nt, Human
gcugcacccucaggca

SEQ ID NO: 3075730 - RNA, 17 nt, Human
gcugccccuggcagccc

SEQ ID NO: 3075731 - RNA, 20 nt, Human
gcugccccuggcagccccug

SEQ ID NO: 3075732 - RNA, 18 nt, Human
gcugccccuggcagcccc

SEQ ID NO: 3075733 - RNA, 19 nt, Human
gcugccccuggcagccccu

SEQ ID NO: 3075734 - RNA, 16 nt, Human
gcugccucucccauca

SEQ ID NO: 3075735 - RNA, 20 nt, Human
gcugccugggaucccucauc

SEQ ID NO: 3075736 - RNA, 13 nt, Human
gcugccuguucag

SEQ ID NO: 3075737 - RNA, 12 nt, Human
gcugccuguuca

SEQ ID NO: 3075738 - RNA, 17 nt, Human
gcugccuguucagcucc

SEQ ID NO: 3075739 - RNA, 21 nt, Human
gcugccugggaucccucaucc

SEQ ID NO: 3075740 - RNA, 17 nt, Human
gcuguaucccaugagcc

SEQ ID NO: 3075741 - RNA, 21 nt, Human
gcuguauuuuaaaagaaugau

SEQ ID NO: 3075742 - RNA, 20 nt, Human
gcuguauuuuaaaagaauga

SEQ ID NO: 3075743 - RNA, 18 nt, Human
gcuguauuuuaaaagaau

SEQ ID NO: 3075744 - RNA, 15 nt, Human
gcugugcugcccugc

SEQ ID NO: 3075745 - RNA, 16 nt, Human
gcugugcugcccugcc

SEQ ID NO: 3075746 - RNA, 17 nt, Human
gcugugcugcccugccc

SEQ ID NO: 3075747 - RNA, 15 nt, Human
gcuguuggcuggggg

SEQ ID NO: 3075748 - RNA, 20 nt, Human
gcuguuggcugggggccuca

SEQ ID NO: 3075749 - RNA, 16 nt, Human
gcuguuggcugggggc

SEQ ID NO: 3075750 - RNA, 14 nt, Human
gcuguuggcugggg

SEQ ID NO: 3075751 - RNA, 16 nt, Human
gcugugcucuggacag

SEQ ID NO: 3075752 - RNA, 15 nt, Human
gcugugcucuggaca

SEQ ID NO: 3075753 - RNA, 14 nt, Human
gcugugcugcccug

SEQ ID NO: 3075754 - RNA, 13 nt, Human
gcugugcucugga

SEQ ID NO: 3075755 - RNA, 12 nt, Human
gcugcugaaggc

SEQ ID NO: 3075756 - RNA, 13 nt, Human
gcugcugaaacaa

SEQ ID NO: 3075757 - RNA, 14 nt, Human
gcuggcgugcagug

SEQ ID NO: 3075758 - RNA, 19 nt, Human
gcuggcuguuggcuggggg

SEQ ID NO: 3075759 - RNA, 18 nt, Human
gcuggcuguuggcugggg

SEQ ID NO: 3075760 - RNA, 18 nt, Human
gcuggcgugcaguggugc

SEQ ID NO: 3075761 - RNA, 15 nt, Human
gcuggcgugcagugg

SEQ ID NO: 3075762 - RNA, 14 nt, Human
gcugggcagguugg

SEQ ID NO: 3075763 - RNA, 23 nt, Human
gcuggcuguuggcugggggccuc

SEQ ID NO: 3075764 - RNA, 20 nt, Human
gcuggcuguuggcugggggc

SEQ ID NO: 3075765 - RNA, 17 nt, Human
gcuggcuguuggcuggg

SEQ ID NO: 3075766 - RNA, 14 nt, Human
gcugggccccugcc

SEQ ID NO: 3075767 - RNA, 13 nt, Human
gcugggccccugc

SEQ ID NO: 3075768 - RNA, 12 nt, Human
gcugggccccug

SEQ ID NO: 3075769 - RNA, 18 nt, Human
gcugggccccugccucuc

SEQ ID NO: 3075770 - RNA, 17 nt, Human
gcugggguggggaccuc

SEQ ID NO: 3075771 - RNA, 19 nt, Human
gcugggguggggaccucag

SEQ ID NO: 3075772 - RNA, 22 nt, Human
gcugggguggggaccucaggcc

SEQ ID NO: 3075773 - RNA, 18 nt, Human
gcuggguucuacccaggu

SEQ ID NO: 3075774 - RNA, 17 nt, Human
gcuggguucuacccagg

SEQ ID NO: 3075775 - RNA, 20 nt, Human
gcuggguucuacccaggugc

SEQ ID NO: 3075776 - RNA, 21 nt, Human
gcuggguucuacccaggugcu

SEQ ID NO: 3075777 - RNA, 16 nt, Human
gccccuggcagccccu

SEQ ID NO: 3075778 - RNA, 17 nt, Human
gccccuggcagccccug

SEQ ID NO: 3075779 - RNA, 16 nt, Human
gccuacaggagugagc

SEQ ID NO: 3075780 - RNA, 16 nt, Human
gcccugugggccccca

SEQ ID NO: 3075781 - RNA, 17 nt, Human
gcccugugggcccccaa

SEQ ID NO: 3075782 - RNA, 21 nt, Human
gcccuuaccugccaggaagcc

SEQ ID NO: 3075783 - RNA, 22 nt, Human
gcccuuaccugccaggaagcca

SEQ ID NO: 3075784 - RNA, 23 nt, Human
gcccuuaccugccaggaagccag

SEQ ID NO: 3075785 - RNA, 14 nt, Human
gcccugcccaccug

SEQ ID NO: 3075786 - RNA, 17 nt, Human
gccuacaggagugagca

SEQ ID NO: 3075787 - RNA, 12 nt, Human
gccuagcauacg

SEQ ID NO: 3075788 - RNA, 22 nt, Human
gccucauguccacugguucuuc

SEQ ID NO: 3075789 - RNA, 22 nt, Human
gccuccuuugugaggaagccgc

SEQ ID NO: 3075790 - RNA, 13 nt, Human
gccucgaacuggc

SEQ ID NO: 3075791 - RNA, 16 nt, Human
gccucgaacuggcugc

SEQ ID NO: 3075792 - RNA, 14 nt, Human
gccucugggacugg

SEQ ID NO: 3075793 - RNA, 12 nt, Human
gccuccauccug

SEQ ID NO: 3075794 - RNA, 13 nt, Human
gccuccauccuga

SEQ ID NO: 3075795 - RNA, 14 nt, Human
gccuccauccugag

SEQ ID NO: 3075796 - RNA, 16 nt, Human
gccccaccagugccuc

SEQ ID NO: 3075797 - RNA, 17 nt, Human
gccccaccagugccucu

SEQ ID NO: 3075798 - RNA, 18 nt, Human
gccccaccagugccucuc

SEQ ID NO: 3075799 - RNA, 22 nt, Human
gccccaccagugccucucccug

SEQ ID NO: 3075800 - RNA, 13 nt, Human
gccccaccagugc

SEQ ID NO: 3075801 - RNA, 14 nt, Human
gccccaccagugcc

SEQ ID NO: 3075802 - RNA, 15 nt, Human
gccccaccagugccu

SEQ ID NO: 3075803 - RNA, 18 nt, Human
gccccacagccccaucug

SEQ ID NO: 3075804 - RNA, 20 nt, Human
gccccaaaacucuccucugc

SEQ ID NO: 3075805 - RNA, 21 nt, Human
gccccaaaacucuccucugcu

SEQ ID NO: 3075806 - RNA, 11 nt, Human
gccccaaaagg

SEQ ID NO: 3075807 - RNA, 19 nt, Human
gccccaaaacucuccucug

SEQ ID NO: 3075808 - RNA, 12 nt, Human
gccccuggcagc

SEQ ID NO: 3075809 - RNA, 15 nt, Human
gccccuggcagcccc

SEQ ID NO: 3075810 - RNA, 16 nt, Human
gccccugcugguucag

SEQ ID NO: 3075811 - RNA, 15 nt, Human
gccccugcugguuca

SEQ ID NO: 3075812 - RNA, 12 nt, Human
gccccugcuggu

SEQ ID NO: 3075813 - RNA, 12 nt, Human
gcccaggccccu

SEQ ID NO: 3075814 - RNA, 11 nt, Human
gcccaggcccc

SEQ ID NO: 3075815 - RNA, 21 nt, Human
gcccaggccccugccacccug

SEQ ID NO: 3075816 - RNA, 20 nt, Human
gcccaggccccugccacccu

SEQ ID NO: 3075817 - RNA, 18 nt, Human
gcccaggccccugccacc

SEQ ID NO: 3075818 - RNA, 11 nt, Human
gcccaggcagg

SEQ ID NO: 3075819 - RNA, 16 nt, Human
gcccaggcaggucuug

SEQ ID NO: 3075820 - RNA, 20 nt, Human
gcccacuguacuugcucuug

SEQ ID NO: 3075821 - RNA, 15 nt, Human
gcccacuguacuugc

SEQ ID NO: 3075822 - RNA, 22 nt, Human
gcccacuguacuugcucuugau

SEQ ID NO: 3075823 - RNA, 21 nt, Human
gcccacgcuggagugcaguga

SEQ ID NO: 3075824 - RNA, 19 nt, Human
gcccacgcuggagugcagu

SEQ ID NO: 3075825 - RNA, 23 nt, Human
gcccacgcuggagugcagugagc

SEQ ID NO: 3075826 - RNA, 24 nt, Human
gcccaggaaaggcuccaggagcag

SEQ ID NO: 3075827 - RNA, 21 nt, Human
gcccaggaaaggcuccaggag

SEQ ID NO: 3075828 - RNA, 22 nt, Human
gcccaggaaaggcuccaggagc

SEQ ID NO: 3075829 - RNA, 23 nt, Human
gcccaggaaaggcuccaggagca

SEQ ID NO: 3075830 - RNA, 13 nt, Human
gcccacuucugcc

SEQ ID NO: 3075831 - RNA, 15 nt, Human
gcccacgcccccacu

SEQ ID NO: 3075832 - RNA, 16 nt, Human
gcccacgcccccacug

SEQ ID NO: 3075833 - RNA, 17 nt, Human
gcccacgcccccacugg

SEQ ID NO: 3075834 - RNA, 21 nt, Human
gcccacgcccccacuggugac

SEQ ID NO: 3075835 - RNA, 18 nt, Human
gcauuuacuuuguguuca

SEQ ID NO: 3075836 - RNA, 12 nt, Human
gcauuuagaugu

SEQ ID NO: 3075837 - RNA, 19 nt, Human
gcauuuaggccaugggaca

SEQ ID NO: 3075838 - RNA, 13 nt, Human
gcauuuagaugua

SEQ ID NO: 3075839 - RNA, 22 nt, Human
gcuaagugauccucccaccuca

SEQ ID NO: 3075840 - RNA, 18 nt, Human
gcuaagugauccucccac

SEQ ID NO: 3075841 - RNA, 21 nt, Human
gcuaggaauuguguuuauaau

SEQ ID NO: 3075842 - RNA, 20 nt, Human
gcuaggaccccuccaugugg

SEQ ID NO: 3075843 - RNA, 16 nt, Human
gcuaguugggcuuccu

SEQ ID NO: 3075844 - RNA, 14 nt, Human
gcuaguugggcuuc

SEQ ID NO: 3075845 - RNA, 20 nt, Human
gcucagggccuggcucaggu

SEQ ID NO: 3075846 - RNA, 16 nt, Human
gcucagagcaguguuu

SEQ ID NO: 3075847 - RNA, 22 nt, Human
gcucagagagggugggaguggg

SEQ ID NO: 3075848 - RNA, 23 nt, Human
gcucaggagcccugggaggcucu

SEQ ID NO: 3075849 - RNA, 21 nt, Human
gcucaggagcccugggaggcu

SEQ ID NO: 3075850 - RNA, 22 nt, Human
gcucaggagcccugggaggcuc

SEQ ID NO: 3075851 - RNA, 18 nt, Human
gcucagggccuggcucag

SEQ ID NO: 3075852 - RNA, 19 nt, Human
gcucagggccuggcucagg

SEQ ID NO: 3075853 - RNA, 13 nt, Human
gcucaggaguuug

SEQ ID NO: 3075854 - RNA, 17 nt, Human
gcucagggccuggcuca

SEQ ID NO: 3075855 - RNA, 21 nt, Human
gccuugaccauucuccaccug

SEQ ID NO: 3075856 - RNA, 22 nt, Human
gccuugaccauucuccaccugc

SEQ ID NO: 3075857 - RNA, 23 nt, Human
gccuugaacuuugaccucugcag

SEQ ID NO: 3075858 - RNA, 17 nt, Human
gcgauucuucugcuuca

SEQ ID NO: 3075859 - RNA, 22 nt, Human
gcgauucuucugcuucagccuc

SEQ ID NO: 3075860 - RNA, 23 nt, Human
gccuugaccauucuccaccugcc

SEQ ID NO: 3075861 - RNA, 23 nt, Human
gcgauucuucugcuucagccucc

SEQ ID NO: 3075862 - RNA, 20 nt, Human
gcgcagcauauucaggaagc

SEQ ID NO: 3075863 - RNA, 21 nt, Human
gcgcagcauauucaggaagcu

SEQ ID NO: 3075864 - RNA, 16 nt, Human
gccuucucugaaggac

SEQ ID NO: 3075865 - RNA, 15 nt, Human
gccuucucugaagga

SEQ ID NO: 3075866 - RNA, 23 nt, Human
gccuucggccuccauccugaggc

SEQ ID NO: 3075867 - RNA, 17 nt, Human
gccuguucagcuccagc

SEQ ID NO: 3075868 - RNA, 16 nt, Human
gccuguucagcuccag

SEQ ID NO: 3075869 - RNA, 14 nt, Human
gccuguucagcucc

SEQ ID NO: 3075870 - RNA, 15 nt, Human
gccuguucagcucca

SEQ ID NO: 3075871 - RNA, 14 nt, Human
gccuugaacuuuga

SEQ ID NO: 3075872 - RNA, 19 nt, Human
gccugugccucugggacug

SEQ ID NO: 3075873 - RNA, 23 nt, Human
gccugggaucccucauccucaua

SEQ ID NO: 3075874 - RNA, 21 nt, Human
gccugggaucccucauccuca

SEQ ID NO: 3075875 - RNA, 11 nt, Human
gccugggcaga

SEQ ID NO: 3075876 - RNA, 23 nt, Human
gccuggcuccaaacccucgaggc

SEQ ID NO: 3075877 - RNA, 16 nt, Human
gcggccuuuggcuuca

SEQ ID NO: 3075878 - RNA, 15 nt, Human
gcggcuggcagccca

SEQ ID NO: 3075879 - RNA, 22 nt, Human
ggaggugggauccuccaggugc

SEQ ID NO: 3075880 - RNA, 23 nt, Human
ggaggugggauccuccaggugca

SEQ ID NO: 3075881 - RNA, 21 nt, Human
ggagggugacgggggugaacu

SEQ ID NO: 3075882 - RNA, 22 nt, Human
ggagguaaggaauaccuguccc

SEQ ID NO: 3075883 - RNA, 13 nt, Human
ggaggggggaggu

SEQ ID NO: 3075884 - RNA, 14 nt, Human
ggaggggggaggug

SEQ ID NO: 3075885 - RNA, 16 nt, Human
ggaguggccacagaaa

SEQ ID NO: 3075886 - RNA, 12 nt, Human
ggagugggccca

SEQ ID NO: 3075887 - RNA, 22 nt, Human
ggagugggcccaaugcacuuug

SEQ ID NO: 3075888 - RNA, 15 nt, Human
ggaguggccacagaa

SEQ ID NO: 3075889 - RNA, 14 nt, Human
ggauuguaguccca

SEQ ID NO: 3075890 - RNA, 13 nt, Human
ggauuguccccga

SEQ ID NO: 3075891 - RNA, 14 nt, Human
ggaugaaaaaauaa

SEQ ID NO: 3075892 - RNA, 22 nt, Human
ggaucuuuggacagaagcagcu

SEQ ID NO: 3075893 - RNA, 17 nt, Human
ggauuuaacagaaaugu

SEQ ID NO: 3075894 - RNA, 16 nt, Human
ggauuuaacagaaaug

SEQ ID NO: 3075895 - RNA, 22 nt, Human
ggauuuaacagaaauguacagc

SEQ ID NO: 3075896 - RNA, 16 nt, Human
ggauuguccccgaccc

SEQ ID NO: 3075897 - RNA, 20 nt, Human
ggauuguccccgacccuugc

SEQ ID NO: 3075898 - RNA, 12 nt, Human
ggauuuaacaga

SEQ ID NO: 3075899 - RNA, 23 nt, Human
ggaucuucaucugacuaugacau

SEQ ID NO: 3075900 - RNA, 21 nt, Human
ggaucuuuggacagaagcagc

SEQ ID NO: 3075901 - RNA, 16 nt, Human
ggaguucaucuugaau

SEQ ID NO: 3075902 - RNA, 15 nt, Human
ggauccugagccaga

SEQ ID NO: 3075903 - RNA, 16 nt, Human
ggauccugagccagau

SEQ ID NO: 3075904 - RNA, 18 nt, Human
ggauccugagccagauuu

SEQ ID NO: 3075905 - RNA, 19 nt, Human
ggauccugagccagauuuc

SEQ ID NO: 3075906 - RNA, 20 nt, Human
ggauccugagccagauuuca

SEQ ID NO: 3075907 - RNA, 23 nt, Human
ggauccugagccagauuucacuc

SEQ ID NO: 3075908 - RNA, 14 nt, Human
ggcauuugcugaau

SEQ ID NO: 3075909 - RNA, 17 nt, Human
ggccagagacacaagcc

SEQ ID NO: 3075910 - RNA, 18 nt, Human
ggccagagacacaagccu

SEQ ID NO: 3075911 - RNA, 19 nt, Human
ggccagagggagugacaga

SEQ ID NO: 3075912 - RNA, 17 nt, Human
ggccagagggagugaca

SEQ ID NO: 3075913 - RNA, 13 nt, Human
ggccaaaggaagc

SEQ ID NO: 3075914 - RNA, 17 nt, Human
ggcauuuguuugaacug

SEQ ID NO: 3075915 - RNA, 14 nt, Human
ggccaaaggaagca

SEQ ID NO: 3075916 - RNA, 16 nt, Human
ggccaaaggaagcaca

SEQ ID NO: 3075917 - RNA, 19 nt, Human
ggccaaaggaagcacaugc

SEQ ID NO: 3075918 - RNA, 18 nt, Human
ggcacaccgggcacucag

SEQ ID NO: 3075919 - RNA, 16 nt, Human
ggcacugcuuccagug

SEQ ID NO: 3075920 - RNA, 18 nt, Human
ggcacaucagcacgauuu

SEQ ID NO: 3075921 - RNA, 15 nt, Human
ggcaaaaaggcagga

SEQ ID NO: 3075922 - RNA, 18 nt, Human
ggcaggaggaucacuuga

SEQ ID NO: 3075923 - RNA, 20 nt, Human
ggcacugcuuccagugaggc

SEQ ID NO: 3075924 - RNA, 13 nt, Human
ggcagccaggcca

SEQ ID NO: 3075925 - RNA, 22 nt, Human
ggcagccccauucugccugccc

SEQ ID NO: 3075926 - RNA, 21 nt, Human
ggcagccccauucugccugcc

SEQ ID NO: 3075927 - RNA, 20 nt, Human
ggcagccccauucugccugc

SEQ ID NO: 3075928 - RNA, 16 nt, Human
ggcagccccauucugc

SEQ ID NO: 3075929 - RNA, 14 nt, Human
ggcuggccuggccc

SEQ ID NO: 3075930 - RNA, 15 nt, Human
ggcuggccuggcccc

SEQ ID NO: 3075931 - RNA, 13 nt, Human
ggcuggccuggcc

SEQ ID NO: 3075932 - RNA, 23 nt, Human
aaaaagauuuucagaaaauauua

SEQ ID NO: 3075933 - RNA, 22 nt, Human
aaaaaacugcugacuguuuucu

SEQ ID NO: 3075934 - RNA, 14 nt, Human
aaaaauaaaaaaca

SEQ ID NO: 3075935 - RNA, 20 nt, Human
aaaaagccugcaauuucaua

SEQ ID NO: 3075936 - RNA, 14 nt, Human
aaaaaggaggaaga

SEQ ID NO: 3075937 - RNA, 12 nt, Human
aaaaaggcagga

SEQ ID NO: 3075938 - RNA, 21 nt, Human
aaaaaggaugcacagaguugu

SEQ ID NO: 3075939 - RNA, 22 nt, Human
ggcuggguucuacccaggugcu

SEQ ID NO: 3075940 - RNA, 14 nt, Human
ggcuggguuggagg

SEQ ID NO: 3075941 - RNA, 13 nt, Human
aaaaauacaaaaa

SEQ ID NO: 3075942 - RNA, 15 nt, Human
ggcucacugcagccu

SEQ ID NO: 3075943 - RNA, 14 nt, Human
ggcucacugcagcc

SEQ ID NO: 3075944 - RNA, 13 nt, Human
ggcucacugcagc

SEQ ID NO: 3075945 - RNA, 17 nt, Human
ggcucuuccaggcuggg

SEQ ID NO: 3075946 - RNA, 18 nt, Human
ggcucuuccaggcuggga

SEQ ID NO: 3075947 - RNA, 15 nt, Human
ggcucuuccaggcug

SEQ ID NO: 3075948 - RNA, 14 nt, Human
ggcucuuccaggcu

SEQ ID NO: 3075949 - RNA, 13 nt, Human
ggcucccuuccca

SEQ ID NO: 3075950 - RNA, 19 nt, Human
ggccccugccucucugcag

SEQ ID NO: 3075951 - RNA, 18 nt, Human
ggccccugccucucugca

SEQ ID NO: 3075952 - RNA, 17 nt, Human
ggccccugccucucugc

SEQ ID NO: 3075953 - RNA, 13 nt, Human
ggccccugccucu

SEQ ID NO: 3075954 - RNA, 16 nt, Human
ggccagaugcaccagc

SEQ ID NO: 3075955 - RNA, 15 nt, Human
ggccagaugcaccag

SEQ ID NO: 3075956 - RNA, 18 nt, Human
ggccucccaacucacccc

SEQ ID NO: 3075957 - RNA, 19 nt, Human
ggccucccaacucacccca

SEQ ID NO: 3075958 - RNA, 17 nt, Human
ggccucccaacucaccc

SEQ ID NO: 3075959 - RNA, 13 nt, Human
ggccucagugcca

SEQ ID NO: 3075960 - RNA, 20 nt, Human
ggccucccaacucaccccag

SEQ ID NO: 3075961 - RNA, 22 nt, Human
ggccucccaacucaccccagcc

SEQ ID NO: 3075962 - RNA, 23 nt, Human
ggccucccaacucaccccagccc

SEQ ID NO: 3075963 - RNA, 20 nt, Human
ggcuaagcuucacuguaaaa

SEQ ID NO: 3075964 - RNA, 21 nt, Human
ggcgagccauuugucccaagu

SEQ ID NO: 3075965 - RNA, 20 nt, Human
ggccuuccccuggcacuggc

SEQ ID NO: 3075966 - RNA, 18 nt, Human
ggccuucggccuccaucc

SEQ ID NO: 3075967 - RNA, 16 nt, Human
ggccuucggccuccau

SEQ ID NO: 3075968 - RNA, 14 nt, Human
ggccuuccccuggc

SEQ ID NO: 3075969 - RNA, 14 nt, Human
ggcuaccuuuguau

SEQ ID NO: 3075970 - RNA, 13 nt, Human
ggcuaccuuugua

SEQ ID NO: 3075971 - RNA, 16 nt, Human
ggcuaauguacugcau

SEQ ID NO: 3075972 - RNA, 20 nt, Human
ggcuaagugauccucccacc

SEQ ID NO: 3075973 - RNA, 15 nt, Human
ggccuggccagaugc

SEQ ID NO: 3075974 - RNA, 12 nt, Human
ggccuggccaga

SEQ ID NO: 3075975 - RNA, 11 nt, Human
ggccuggaugc

SEQ ID NO: 3075976 - RNA, 20 nt, Human
ggccuggaugcccccugugg

SEQ ID NO: 3075977 - RNA, 16 nt, Human
ggccugcaagggagug

SEQ ID NO: 3075978 - RNA, 12 nt, Human
aaaaugagaaau

SEQ ID NO: 3075979 - RNA, 11 nt, Human
aaaaugagaaa

SEQ ID NO: 3075980 - RNA, 16 nt, Human
aaaauauauuuaauga

SEQ ID NO: 3075981 - RNA, 15 nt, Human
aaaauauauuuaaug

SEQ ID NO: 3075982 - RNA, 16 nt, Human
aaaauauuuuccugcc

SEQ ID NO: 3075983 - RNA, 17 nt, Human
aaaaucucaauauuuca

SEQ ID NO: 3075984 - RNA, 16 nt, Human
aaaagguuaauaaagu

SEQ ID NO: 3075985 - RNA, 17 nt, Human
aaaagguuaauaaagua

SEQ ID NO: 3075986 - RNA, 11 nt, Human
aaaaggcagga

SEQ ID NO: 3075987 - RNA, 19 nt, Human
aaaagguaugcaaucaaau

SEQ ID NO: 3075988 - RNA, 22 nt, Human
aaaaggaugcacagaguuguua

SEQ ID NO: 3075989 - RNA, 19 nt, Human
aaaaggaugcacagaguug

SEQ ID NO: 3075990 - RNA, 15 nt, Human
aaaaggaugcacaga

SEQ ID NO: 3075991 - RNA, 14 nt, Human
aaaaggaugcacag

SEQ ID NO: 3075992 - RNA, 13 nt, Human
aaaaggaugcaca

SEQ ID NO: 3075993 - RNA, 22 nt, Human
aaaaggagccaauuuaaagaaa

SEQ ID NO: 3075994 - RNA, 13 nt, Human
aaaauaccaagga

SEQ ID NO: 3075995 - RNA, 14 nt, Human
aaaauacacacuca

SEQ ID NO: 3075996 - RNA, 16 nt, Human
aaaauaauuuuuauau

SEQ ID NO: 3075997 - RNA, 17 nt, Human
aaaauaauuuuuauauu

SEQ ID NO: 3075998 - RNA, 11 nt, Human
aaaauaauuuu

SEQ ID NO: 3075999 - RNA, 22 nt, Human
gggcugggccucggaccccacu

SEQ ID NO: 3076000 - RNA, 17 nt, Human
gggcuggguucuaccca

SEQ ID NO: 3076001 - RNA, 16 nt, Human
aaaaugguuuaaaugg

SEQ ID NO: 3076002 - RNA, 18 nt, Human
aaaaugguuuaaaugguc

SEQ ID NO: 3076003 - RNA, 12 nt, Human
gggcugggcaga

SEQ ID NO: 3076004 - RNA, 15 nt, Human
gggcugggcagagga

SEQ ID NO: 3076005 - RNA, 18 nt, Human
gggcugcucccaccuggc

SEQ ID NO: 3076006 - RNA, 21 nt, Human
gggcugcucccaccuggcucu

SEQ ID NO: 3076007 - RNA, 22 nt, Human
gggcugcucccaccuggcucug

SEQ ID NO: 3076008 - RNA, 23 nt, Human
gggcugcucccaccuggcucugu

SEQ ID NO: 3076009 - RNA, 20 nt, Human
gggcugcaccggcuggccug

SEQ ID NO: 3076010 - RNA, 21 nt, Human
gggcugcaccggcuggccugg

SEQ ID NO: 3076011 - RNA, 13 nt, Human
gggcugcucccac

SEQ ID NO: 3076012 - RNA, 19 nt, Human
gggcucagcggggacagcu

SEQ ID NO: 3076013 - RNA, 17 nt, Human
gggcucagcggggacag

SEQ ID NO: 3076014 - RNA, 15 nt, Human
gggcuaguugggcuu

SEQ ID NO: 3076015 - RNA, 18 nt, Human
gggcucagcaaaagaugc

SEQ ID NO: 3076016 - RNA, 22 nt, Human
gggcucagcaaaagaugcuucu

SEQ ID NO: 3076017 - RNA, 10 nt, Human
gggcuccaga

SEQ ID NO: 3076018 - RNA, 13 nt, Human
gggcuccagacac

SEQ ID NO: 3076019 - RNA, 21 nt, Human
gggcucagcggggacagcucc

SEQ ID NO: 3076020 - RNA, 17 nt, Human
gggcugcaccggcuggc

SEQ ID NO: 3076021 - RNA, 19 nt, Human
gggcugcaccggcuggccu

SEQ ID NO: 3076022 - RNA, 15 nt, Human
gggcucccagccagg

SEQ ID NO: 3076023 - RNA, 17 nt, Human
gggcucccagccaggcc

SEQ ID NO: 3076024 - RNA, 19 nt, Human
gggcucccagccaggcccu

SEQ ID NO: 3076025 - RNA, 22 nt, Human
gggccucgguguggagaagcgg

SEQ ID NO: 3076026 - RNA, 21 nt, Human
gggccucugcggagcacacug

SEQ ID NO: 3076027 - RNA, 23 nt, Human
gggccucugcggagcacacuggc

SEQ ID NO: 3076028 - RNA, 18 nt, Human
gggccucuuaugggcugg

SEQ ID NO: 3076029 - RNA, 15 nt, Human
gggccucagugccac

SEQ ID NO: 3076030 - RNA, 14 nt, Human
gggccucagugcca

SEQ ID NO: 3076031 - RNA, 13 nt, Human
gggccucagugcc

SEQ ID NO: 3076032 - RNA, 21 nt, Human
gggcggugagaggggaacaga

SEQ ID NO: 3076033 - RNA, 12 nt, Human
gggccaggagcc

SEQ ID NO: 3076034 - RNA, 13 nt, Human
gggccaggagccu

SEQ ID NO: 3076035 - RNA, 14 nt, Human
gggccaggagccuc

SEQ ID NO: 3076036 - RNA, 14 nt, Human
gggucacucuggca

SEQ ID NO: 3076037 - RNA, 20 nt, Human
gggucacucuggcagcucag

SEQ ID NO: 3076038 - RNA, 19 nt, Human
aaacauuuugucauauaag

SEQ ID NO: 3076039 - RNA, 22 nt, Human
aaaccugugucucugagaguag

SEQ ID NO: 3076040 - RNA, 15 nt, Human
gggggcugggcagag

SEQ ID NO: 3076041 - RNA, 13 nt, Human
ggggguggccucc

SEQ ID NO: 3076042 - RNA, 21 nt, Human
ggggucacucuggcagcucag

SEQ ID NO: 3076043 - RNA, 21 nt, Human
gggggcagugcucacccacac

SEQ ID NO: 3076044 - RNA, 11 nt, Human
gggggcuggga

SEQ ID NO: 3076045 - RNA, 14 nt, Human
gggggcugcuccca

SEQ ID NO: 3076046 - RNA, 17 nt, Human
gggggaucacagccucu

SEQ ID NO: 3076047 - RNA, 19 nt, Human
ggggccaguuggucccccu

SEQ ID NO: 3076048 - RNA, 14 nt, Human
ggggaccagagcug

SEQ ID NO: 3076049 - RNA, 18 nt, Human
aaaauguauguguaagua

SEQ ID NO: 3076050 - RNA, 12 nt, Human
ggggaccagagc

SEQ ID NO: 3076051 - RNA, 13 nt, Human
ggggaccagagcu

SEQ ID NO: 3076052 - RNA, 20 nt, Human
gguaaggaauaccugucccc

SEQ ID NO: 3076053 - RNA, 14 nt, Human
gguaucaggugcug

SEQ ID NO: 3076054 - RNA, 20 nt, Human
gguaggguaagugagagagg

SEQ ID NO: 3076055 - RNA, 21 nt, Human
aaacuucccuuucugcuugug

SEQ ID NO: 3076056 - RNA, 22 nt, Human
aaacuugauguguuaucucuua

SEQ ID NO: 3076057 - RNA, 18 nt, Human
aaacuuuacuauggcccu

SEQ ID NO: 3076058 - RNA, 14 nt, Human
ggucagugcaaaua

SEQ ID NO: 3076059 - RNA, 19 nt, Human
gguaucaggugcugccauc

SEQ ID NO: 3076060 - RNA, 22 nt, Human
gguaaaucagacuaugaaguuu

SEQ ID NO: 3076061 - RNA, 18 nt, Human
gguaacuagggaagauaa

SEQ ID NO: 3076062 - RNA, 12 nt, Human
ggguggugaccu

SEQ ID NO: 3076063 - RNA, 20 nt, Human
ggguuuugccauguuggcca

SEQ ID NO: 3076064 - RNA, 20 nt, Human
ggguuuuauuguuuaaaauc

SEQ ID NO: 3076065 - RNA, 23 nt, Human
ggguuuugccauguuggccaggc

SEQ ID NO: 3076066 - RNA, 19 nt, Human
aaacuuaaucuaaauggaa

SEQ ID NO: 3076067 - RNA, 15 nt, Human
gggugggacacccug

SEQ ID NO: 3076068 - RNA, 18 nt, Human
gggugggacacccuguga

SEQ ID NO: 3076069 - RNA, 14 nt, Human
ggguggccucccaa

SEQ ID NO: 3076070 - RNA, 19 nt, Human
aaacuguuaauaguucagg

SEQ ID NO: 3076071 - RNA, 20 nt, Human
aaacguggcugcuucaagga

SEQ ID NO: 3076072 - RNA, 21 nt, Human
aaacguggcugcuucaaggau

SEQ ID NO: 3076073 - RNA, 14 nt, Human
aaauauauuuaaug

SEQ ID NO: 3076074 - RNA, 14 nt, Human
aaauauauaucaaa

SEQ ID NO: 3076075 - RNA, 18 nt, Human
aaauauaugcuaagucuu

SEQ ID NO: 3076076 - RNA, 22 nt, Human
aaauauauuuuaagacgaaaca

SEQ ID NO: 3076077 - RNA, 16 nt, Human
aaauauauuuuaagac

SEQ ID NO: 3076078 - RNA, 15 nt, Human
aaauauauuuaauga

SEQ ID NO: 3076079 - RNA, 22 nt, Human
aaauaucacuugucaauaaaau

SEQ ID NO: 3076080 - RNA, 21 nt, Human
aaauaccagccaguaaauggg

SEQ ID NO: 3076081 - RNA, 20 nt, Human
aaauaccagccaguaaaugg

SEQ ID NO: 3076082 - RNA, 21 nt, Human
aaauaccaugccauuuaaagc

SEQ ID NO: 3076083 - RNA, 19 nt, Human
aaauaccagccaguaaaug

SEQ ID NO: 3076084 - RNA, 16 nt, Human
guacacacacauacac

SEQ ID NO: 3076085 - RNA, 15 nt, Human
aaauauaggaacuua

SEQ ID NO: 3076086 - RNA, 20 nt, Human
aaauacgugggcauucaaau

SEQ ID NO: 3076087 - RNA, 21 nt, Human
aaauacgugggcauucaaaug

SEQ ID NO: 3076088 - RNA, 20 nt, Human
aaauauuguguugugaaugu

SEQ ID NO: 3076089 - RNA, 23 nt, Human
aaaucagccugcuccagcuguuc

SEQ ID NO: 3076090 - RNA, 19 nt, Human
aaaucagccugcuccagcu

SEQ ID NO: 3076091 - RNA, 21 nt, Human
aaaucagccugcuccagcugu

SEQ ID NO: 3076092 - RNA, 23 nt, Human
aaauaucugaaaauguaugugua

SEQ ID NO: 3076093 - RNA, 22 nt, Human
aaauaucugaaaauguaugugu

SEQ ID NO: 3076094 - RNA, 21 nt, Human
aaauaucugaaaauguaugug

SEQ ID NO: 3076095 - RNA, 19 nt, Human
aaauaucugaaaauguaug

SEQ ID NO: 3076096 - RNA, 18 nt, Human
aaauaucugaaaauguau

SEQ ID NO: 3076097 - RNA, 17 nt, Human
aaauaucugaaaaugua

SEQ ID NO: 3076098 - RNA, 14 nt, Human
aaauaucugaaaau

SEQ ID NO: 3076099 - RNA, 12 nt, Human
aaauaucugaaa

SEQ ID NO: 3076100 - RNA, 17 nt, Human
aaauaugcaaagcacug

SEQ ID NO: 3076101 - RNA, 16 nt, Human
aaauaugcaaagcacu

SEQ ID NO: 3076102 - RNA, 15 nt, Human
aaauaugcaaagcac

SEQ ID NO: 3076103 - RNA, 13 nt, Human
aaauaugcaaagc

SEQ ID NO: 3076104 - RNA, 13 nt, Human
guaaaccuuuuau

SEQ ID NO: 3076105 - RNA, 22 nt, Human
aaaguguauuuuuuuacuaaua

SEQ ID NO: 3076106 - RNA, 22 nt, Human
aaauaaugugaaacuggauuaa

SEQ ID NO: 3076107 - RNA, 14 nt, Human
aaauaaugugaaac

SEQ ID NO: 3076108 - RNA, 16 nt, Human
guaacaagccacccca

SEQ ID NO: 3076109 - RNA, 19 nt, Human
guaacaggaaaauuuuaaa

SEQ ID NO: 3076110 - RNA, 15 nt, Human
guaauagagcaaaau

SEQ ID NO: 3076111 - RNA, 13 nt, Human
guaauaaacucau

SEQ ID NO: 3076112 - RNA, 21 nt, Human
guaauuuuuuuaucgucacug

SEQ ID NO: 3076113 - RNA, 20 nt, Human
guaauuugugauacaaugcu

SEQ ID NO: 3076114 - RNA, 17 nt, Human
guaauuugugauacaau

SEQ ID NO: 3076115 - RNA, 15 nt, Human
guaauuugugauaca

SEQ ID NO: 3076116 - RNA, 23 nt, Human
guaauccuagcacuuugggaggc

SEQ ID NO: 3076117 - RNA, 18 nt, Human
aaagguucaugcaaacuu

SEQ ID NO: 3076118 - RNA, 20 nt, Human
aaagggcccagagagggugg

SEQ ID NO: 3076119 - RNA, 20 nt, Human
aaagggauggcaagaugugg

SEQ ID NO: 3076120 - RNA, 20 nt, Human
aaagggcuguuauaaucuuu

SEQ ID NO: 3076121 - RNA, 22 nt, Human
aaagggcuguuauaaucuuuca

SEQ ID NO: 3076122 - RNA, 21 nt, Human
aaaguaaaaacaaagaaauua

SEQ ID NO: 3076123 - RNA, 12 nt, Human
gguggcuggguu

SEQ ID NO: 3076124 - RNA, 18 nt, Human
gguggcuggguuggaggg

SEQ ID NO: 3076125 - RNA, 17 nt, Human
ggugggacacccuguga

SEQ ID NO: 3076126 - RNA, 13 nt, Human
ggugggacacccu

SEQ ID NO: 3076127 - RNA, 16 nt, Human
ggugggacacccugug

SEQ ID NO: 3076128 - RNA, 19 nt, Human
gguggggaccucaggccug

SEQ ID NO: 3076129 - RNA, 14 nt, Human
aaagcuguguggca

SEQ ID NO: 3076130 - RNA, 22 nt, Human
aaagcugccagccgagauagcc

SEQ ID NO: 3076131 - RNA, 12 nt, Human
aaagcugccagc

SEQ ID NO: 3076132 - RNA, 13 nt, Human
aaagcugccagcc

SEQ ID NO: 3076133 - RNA, 13 nt, Human
aaagcagugcaug

SEQ ID NO: 3076134 - RNA, 16 nt, Human
aaagcuaggccuggcc

SEQ ID NO: 3076135 - RNA, 14 nt, Human
aaagcuaggccugg

SEQ ID NO: 3076136 - RNA, 21 nt, Human
ggugcugccauccagguucag

SEQ ID NO: 3076137 - RNA, 12 nt, Human
aaacuuuaugcu

SEQ ID NO: 3076138 - RNA, 19 nt, Human
aaacuuuaugcuaagugaa

SEQ ID NO: 3076139 - RNA, 14 nt, Human
gguggcaccagcag

SEQ ID NO: 3076140 - RNA, 20 nt, Human
gguggcaccagcagccugga

SEQ ID NO: 3076141 - RNA, 16 nt, Human
aaagcagaacagugau

SEQ ID NO: 3076142 - RNA, 20 nt, Human
gguuuguaaauuaacuuuua

SEQ ID NO: 3076143 - RNA, 17 nt, Human
gguuuucacauuggaaa

SEQ ID NO: 3076144 - RNA, 19 nt, Human
gguuuuauuguuuaaaauc

SEQ ID NO: 3076145 - RNA, 22 nt, Human
gguuucuaaagcugccagccga

SEQ ID NO: 3076146 - RNA, 16 nt, Human
gguuucuaaagcugcc

SEQ ID NO: 3076147 - RNA, 15 nt, Human
gguuucagaaaugug

SEQ ID NO: 3076148 - RNA, 19 nt, Human
aaaguacacuguuucaaac

SEQ ID NO: 3076149 - RNA, 18 nt, Human
aaaguacacuguuucaaa

SEQ ID NO: 3076150 - RNA, 22 nt, Human
aaaguagaagucuuagauguau

SEQ ID NO: 3076151 - RNA, 20 nt, Human
aaaguagaagucuuagaugu

SEQ ID NO: 3076152 - RNA, 21 nt, Human
aaaguaucccuacuguaauuu

SEQ ID NO: 3076153 - RNA, 21 nt, Human
aaaguguauuuuuuuacuaau

SEQ ID NO: 3076154 - RNA, 14 nt, Human
aaaguguauuuuuu

SEQ ID NO: 3076155 - RNA, 17 nt, Human
gguguuuuaaaaaaucu

SEQ ID NO: 3076156 - RNA, 17 nt, Human
gguucccauuugcuccu

SEQ ID NO: 3076157 - RNA, 17 nt, Human
gguguuuccuggcacug

SEQ ID NO: 3076158 - RNA, 19 nt, Human
gguguuuccuggcacugcu

SEQ ID NO: 3076159 - RNA, 20 nt, Human
gguucuagcauggcauauuu

SEQ ID NO: 3076160 - RNA, 22 nt, Human
gguucccuuuuuuggcugcuga

SEQ ID NO: 3076161 - RNA, 23 nt, Human
gguucccuuugacgccaucccag

SEQ ID NO: 3076162 - RNA, 22 nt, Human
gguucccuuugacgccauccca

SEQ ID NO: 3076163 - RNA, 12 nt, Human
gguguggagaag

SEQ ID NO: 3076164 - RNA, 14 nt, Human
gguguggagaagcg

SEQ ID NO: 3076165 - RNA, 23 nt, Human
gguguggagaagcggcuggcagc

SEQ ID NO: 3076166 - RNA, 13 nt, Human
ggugggggccucg

SEQ ID NO: 3076167 - RNA, 11 nt, Human
gguguggggga

SEQ ID NO: 3076168 - RNA, 13 nt, Human
ggugugggggaag

SEQ ID NO: 3076169 - RNA, 17 nt, Human
auucagaguugaugguu

SEQ ID NO: 3076170 - RNA, 14 nt, Human
auucaggaagcuca

SEQ ID NO: 3076171 - RNA, 19 nt, Human
auucagacagcugccuggg

SEQ ID NO: 3076172 - RNA, 17 nt, Human
auucaggaagcucaggg

SEQ ID NO: 3076173 - RNA, 19 nt, Human
auucaggaagcucagggcc

SEQ ID NO: 3076174 - RNA, 18 nt, Human
auucagauaugauucaaa

SEQ ID NO: 3076175 - RNA, 19 nt, Human
auucaguaauaacucuacc

SEQ ID NO: 3076176 - RNA, 15 nt, Human
auucaguaauaacuc

SEQ ID NO: 3076177 - RNA, 15 nt, Human
auucccaagcucugc

SEQ ID NO: 3076178 - RNA, 14 nt, Human
auucccaagcucug

SEQ ID NO: 3076179 - RNA, 16 nt, Human
auucccaagcucugcu

SEQ ID NO: 3076180 - RNA, 18 nt, Human
auucuccaccugccaggg

SEQ ID NO: 3076181 - RNA, 21 nt, Human
auucuccaccugccagggaca

SEQ ID NO: 3076182 - RNA, 13 nt, Human
auucuccugccuc

SEQ ID NO: 3076183 - RNA, 14 nt, Human
auucuccugccuca

SEQ ID NO: 3076184 - RNA, 11 nt, Human
auucuccugcc

SEQ ID NO: 3076185 - RNA, 17 nt, Human
auucuccugccucagcc

SEQ ID NO: 3076186 - RNA, 15 nt, Human
auucuccugccucag

SEQ ID NO: 3076187 - RNA, 19 nt, Human
auucuccugccucagccuc

SEQ ID NO: 3076188 - RNA, 20 nt, Human
auucuccugccucagccucc

SEQ ID NO: 3076189 - RNA, 16 nt, Human
auucuccuuguguuac

SEQ ID NO: 3076190 - RNA, 19 nt, Human
auucuccaccugccaggga

SEQ ID NO: 3076191 - RNA, 20 nt, Human
auucuccaccugccagggac

SEQ ID NO: 3076192 - RNA, 17 nt, Human
auguuuaguaaucauau

SEQ ID NO: 3076193 - RNA, 15 nt, Human
auguuuucaggcuag

SEQ ID NO: 3076194 - RNA, 17 nt, Human
auguuuucaggcuagau

SEQ ID NO: 3076195 - RNA, 21 nt, Human
auguuuucaggcuagauguau

SEQ ID NO: 3076196 - RNA, 20 nt, Human
auuaaaaaucucaaauuucu

SEQ ID NO: 3076197 - RNA, 23 nt, Human
auuaaaacacaacaucuuuuucu

SEQ ID NO: 3076198 - RNA, 19 nt, Human
auuaaaaaucucaaauuuc

SEQ ID NO: 3076199 - RNA, 15 nt, Human
auuaaaaaucucaaa

SEQ ID NO: 3076200 - RNA, 15 nt, Human
uuuuccaaaauaauu

SEQ ID NO: 3076201 - RNA, 20 nt, Human
uuuucauuuaggugaggaag

SEQ ID NO: 3076202 - RNA, 14 nt, Human
uuuucucuaggaaa

SEQ ID NO: 3076203 - RNA, 18 nt, Human
uuuucugagaaagacuau

SEQ ID NO: 3076204 - RNA, 15 nt, Human
uuuucugagaaagac

SEQ ID NO: 3076205 - RNA, 13 nt, Human
uuuuauuaugcau

SEQ ID NO: 3076206 - RNA, 11 nt, Human
uuuuauuuuau

SEQ ID NO: 3076207 - RNA, 14 nt, Human
uuuucaguguacau

SEQ ID NO: 3076208 - RNA, 20 nt, Human
auguugcccuguugcugccu

SEQ ID NO: 3076209 - RNA, 20 nt, Human
auguugcccaggcaggucuu

SEQ ID NO: 3076210 - RNA, 18 nt, Human
auguugcauagaauaaaa

SEQ ID NO: 3076211 - RNA, 17 nt, Human
auguugcauagaauaaa

SEQ ID NO: 3076212 - RNA, 18 nt, Human
auguucaucaaugaauga

SEQ ID NO: 3076213 - RNA, 15 nt, Human
auguugcauagaaua

SEQ ID NO: 3076214 - RNA, 12 nt, Human
auguugcccagg

SEQ ID NO: 3076215 - RNA, 17 nt, Human
auguugcccaggcaggu

SEQ ID NO: 3076216 - RNA, 16 nt, Human
auguugcccaggcagg

SEQ ID NO: 3076217 - RNA, 13 nt, Human
auguuaagcagau

SEQ ID NO: 3076218 - RNA, 23 nt, Human
auguguguuuuaaaaugagaaau

SEQ ID NO: 3076219 - RNA, 15 nt, Human
auguguguuuuaaaa

SEQ ID NO: 3076220 - RNA, 20 nt, Human
auguggaguucaucuugaau

SEQ ID NO: 3076221 - RNA, 24 nt, Human
auguggaguucaucuugaauugua

SEQ ID NO: 3076222 - RNA, 14 nt, Human
uuuuaauaaacacu

SEQ ID NO: 3076223 - RNA, 20 nt, Human
auggggcccugccuccuuug

SEQ ID NO: 3076224 - RNA, 12 nt, Human
uuuuaauaaugu

SEQ ID NO: 3076225 - RNA, 13 nt, Human
uuuuaauaauguu

SEQ ID NO: 3076226 - RNA, 14 nt, Human
uuuuaauaauguuu

SEQ ID NO: 3076227 - RNA, 21 nt, Human
augugccagguuuuuggucug

SEQ ID NO: 3076228 - RNA, 22 nt, Human
augugccagguuuuuggucuga

SEQ ID NO: 3076229 - RNA, 16 nt, Human
uuuuaauaauguuuca

SEQ ID NO: 3076230 - RNA, 19 nt, Human
augugcuaguaauuggaaa

SEQ ID NO: 3076231 - RNA, 20 nt, Human
auuauauaaguauucuaaau

SEQ ID NO: 3076232 - RNA, 14 nt, Human
auuauauaaguauu

SEQ ID NO: 3076233 - RNA, 17 nt, Human
auuauauaaguauucua

SEQ ID NO: 3076234 - RNA, 19 nt, Human
uuuuugugaaaagcuccau

SEQ ID NO: 3076235 - RNA, 20 nt, Human
uuuuuguagagccagggucu

SEQ ID NO: 3076236 - RNA, 19 nt, Human
uuuuuguagagccaggguc

SEQ ID NO: 3076237 - RNA, 21 nt, Human
auuaaguaaugauaacuggaa

SEQ ID NO: 3076238 - RNA, 23 nt, Human
auuaaguaaugauaacuggaaac

SEQ ID NO: 3076239 - RNA, 21 nt, Human
uuuuuauggcuuuugugcauu

SEQ ID NO: 3076240 - RNA, 20 nt, Human
uuuuuauggcuuuugugcau

SEQ ID NO: 3076241 - RNA, 22 nt, Human
uuuuuauggcuuuugugcauua

SEQ ID NO: 3076242 - RNA, 14 nt, Human
auuaaguacuaugu

SEQ ID NO: 3076243 - RNA, 21 nt, Human
auuacaguggggaaugaagau

SEQ ID NO: 3076244 - RNA, 16 nt, Human
auuacauuuguauaaa

SEQ ID NO: 3076245 - RNA, 12 nt, Human
auuaccagggac

SEQ ID NO: 3076246 - RNA, 17 nt, Human
auuacauuuguauaaaa

SEQ ID NO: 3076247 - RNA, 18 nt, Human
auuacauuuguauaaaau

SEQ ID NO: 3076248 - RNA, 14 nt, Human
uuuugaguucuaca

SEQ ID NO: 3076249 - RNA, 17 nt, Human
uuuugauccaagcuggu

SEQ ID NO: 3076250 - RNA, 17 nt, Human
uuuugagugccuuacac

SEQ ID NO: 3076251 - RNA, 23 nt, Human
uuuugccauguuggccaggcugg

SEQ ID NO: 3076252 - RNA, 12 nt, Human
uuuuuaucaugu

SEQ ID NO: 3076253 - RNA, 20 nt, Human
uuuuuaucgucacugcuuaa

SEQ ID NO: 3076254 - RNA, 12 nt, Human
uuuuuauggcuu

SEQ ID NO: 3076255 - RNA, 19 nt, Human
uuuuuauauuugaaauauu

SEQ ID NO: 3076256 - RNA, 17 nt, Human
uuuuuauauuugaaaua

SEQ ID NO: 3076257 - RNA, 11 nt, Human
uuuuuacuaau

SEQ ID NO: 3076258 - RNA, 22 nt, Human
uuuuuagacagagucucacugu

SEQ ID NO: 3076259 - RNA, 14 nt, Human
uuuuguucauacau

SEQ ID NO: 3076260 - RNA, 20 nt, Human
uuuugugcauuaucuagaua

SEQ ID NO: 3076261 - RNA, 17 nt, Human
uuuugugcauuaucuag

SEQ ID NO: 3076262 - RNA, 17 nt, Human
uuuuguucauacauauu

SEQ ID NO: 3076263 - RNA, 15 nt, Human
uuuuguuccacaagu

SEQ ID NO: 3076264 - RNA, 21 nt, Human
uuuuguuccacaaguuaaaua

SEQ ID NO: 3076265 - RNA, 21 nt, Human
auuuuauuuuuuucugaauua

SEQ ID NO: 3076266 - RNA, 17 nt, Human
auuuucagaaaauauua

SEQ ID NO: 3076267 - RNA, 14 nt, Human
auuuucagaaaaua

SEQ ID NO: 3076268 - RNA, 22 nt, Human
auuuucaguuauuauauuuaca

SEQ ID NO: 3076269 - RNA, 23 nt, Human
auuugugaagguggaaauaaacu

SEQ ID NO: 3076270 - RNA, 19 nt, Human
auuuguauaaaauaauuuu

SEQ ID NO: 3076271 - RNA, 15 nt, Human
auuuguauaaaauaa

SEQ ID NO: 3076272 - RNA, 18 nt, Human
auuuguauaaaauaauuu

SEQ ID NO: 3076273 - RNA, 14 nt, Human
auuugugauacaau

SEQ ID NO: 3076274 - RNA, 17 nt, Human
auuuuaaaagaaugauu

SEQ ID NO: 3076275 - RNA, 15 nt, Human
auuuuaauucaguug

SEQ ID NO: 3076276 - RNA, 13 nt, Human
auuuuacauaaau

SEQ ID NO: 3076277 - RNA, 16 nt, Human
auuuuacauaaauuua

SEQ ID NO: 3076278 - RNA, 17 nt, Human
auuuuacauaaauuuag

SEQ ID NO: 3076279 - RNA, 21 nt, Human
auuuuacuuuaaaaggagcca

SEQ ID NO: 3076280 - RNA, 18 nt, Human
auuuuaaaagaaugauua

SEQ ID NO: 3076281 - RNA, 22 nt, Human
auuuuaaaagaaugauuaugaa

SEQ ID NO: 3076282 - RNA, 20 nt, Human
auuggggcucccagccaggc

SEQ ID NO: 3076283 - RNA, 21 nt, Human
auuggggcucccagccaggcc

SEQ ID NO: 3076284 - RNA, 22 nt, Human
auuggggcucccagccaggccc

SEQ ID NO: 3076285 - RNA, 23 nt, Human
auuggggcucccagccaggcccu

SEQ ID NO: 3076286 - RNA, 15 nt, Human
auuggggcucccagc

SEQ ID NO: 3076287 - RNA, 15 nt, Human
auugaaaaaccauuu

SEQ ID NO: 3076288 - RNA, 18 nt, Human
auugacaggauuauugga

SEQ ID NO: 3076289 - RNA, 18 nt, Human
auugacccacaagaaaug

SEQ ID NO: 3076290 - RNA, 24 nt, Human
auucugucucuggauuauauuaug

SEQ ID NO: 3076291 - RNA, 22 nt, Human
auucuuccucccucccucuuuc

SEQ ID NO: 3076292 - RNA, 13 nt, Human
auucuuccucccu

SEQ ID NO: 3076293 - RNA, 13 nt, Human
auucuucuccacu

SEQ ID NO: 3076294 - RNA, 18 nt, Human
auucuuauuuaaugaaag

SEQ ID NO: 3076295 - RNA, 14 nt, Human
auucuuauuuaaug

SEQ ID NO: 3076296 - RNA, 13 nt, Human
auucuuauuuaau

SEQ ID NO: 3076297 - RNA, 13 nt, Human
auuguauucagag

SEQ ID NO: 3076298 - RNA, 15 nt, Human
auuguauuacaaauc

SEQ ID NO: 3076299 - RNA, 17 nt, Human
auuguccccgacccuug

SEQ ID NO: 3076300 - RNA, 19 nt, Human
auuguccccgacccuugcc

SEQ ID NO: 3076301 - RNA, 20 nt, Human
auuguccccgacccuugccg

SEQ ID NO: 3076302 - RNA, 18 nt, Human
auugugucucuugguccu

SEQ ID NO: 3076303 - RNA, 14 nt, Human
auuuaaaaaaaauc

SEQ ID NO: 3076304 - RNA, 14 nt, Human
auugugucucuugg

SEQ ID NO: 3076305 - RNA, 13 nt, Human
auuuaguguucau

SEQ ID NO: 3076306 - RNA, 20 nt, Human
auuuaguaucuuuuuauuca

SEQ ID NO: 3076307 - RNA, 18 nt, Human
auuuaguauuuuguuuca

SEQ ID NO: 3076308 - RNA, 13 nt, Human
auuuagauguaua

SEQ ID NO: 3076309 - RNA, 22 nt, Human
auuuauaaaaauaaaaaacacu

SEQ ID NO: 3076310 - RNA, 17 nt, Human
auuuauaaaaauaaaaa

SEQ ID NO: 3076311 - RNA, 22 nt, Human
auuuauuaaaugcccagccccu

SEQ ID NO: 3076312 - RNA, 15 nt, Human
auuuagaaauauaau

SEQ ID NO: 3076313 - RNA, 16 nt, Human
auuuacuucuuauaca

SEQ ID NO: 3076314 - RNA, 14 nt, Human
auuuacuucuuaua

SEQ ID NO: 3076315 - RNA, 17 nt, Human
auuuacuucuuauacau

SEQ ID NO: 3076316 - RNA, 14 nt, Human
auuuaacagaaaug

SEQ ID NO: 3076317 - RNA, 12 nt, Human
auuuaacagaaa

SEQ ID NO: 3076318 - RNA, 14 nt, Human
auuuauucugcuca

SEQ ID NO: 3076319 - RNA, 16 nt, Human
auuuccguuaaaauac

SEQ ID NO: 3076320 - RNA, 15 nt, Human
auuuccguuaaaaua

SEQ ID NO: 3076321 - RNA, 14 nt, Human
auuugaaaauuuug

SEQ ID NO: 3076322 - RNA, 14 nt, Human
auuugaaauauuga

SEQ ID NO: 3076323 - RNA, 17 nt, Human
auuuccagccaaagccu

SEQ ID NO: 3076324 - RNA, 19 nt, Human
auuuauuuuaauaauguuu

SEQ ID NO: 3076325 - RNA, 20 nt, Human
auuuauuuuaauaauguuuc

SEQ ID NO: 3076326 - RNA, 12 nt, Human
auuucauuucuu

SEQ ID NO: 3076327 - RNA, 13 nt, Human
auuuauucugcuc

SEQ ID NO: 3076328 - RNA, 17 nt, Human
auuuauuuuaauaaugu

SEQ ID NO: 3076329 - RNA, 21 nt, Human
auaugagcuuccuucugugaa

SEQ ID NO: 3076330 - RNA, 22 nt, Human
auaugagcuuccuucugugaaa

SEQ ID NO: 3076331 - RNA, 14 nt, Human
auaugcaaagcacu

SEQ ID NO: 3076332 - RNA, 13 nt, Human
auaugcaaagcac

SEQ ID NO: 3076333 - RNA, 20 nt, Human
auauguggaguucaucuuga

SEQ ID NO: 3076334 - RNA, 21 nt, Human
auauguggaguucaucuugaa

SEQ ID NO: 3076335 - RNA, 23 nt, Human
auauguaccuaacgaaguauccu

SEQ ID NO: 3076336 - RNA, 20 nt, Human
uucaugcuguucaugaaaga

SEQ ID NO: 3076337 - RNA, 22 nt, Human
uucaugcuguucaugaaagauu

SEQ ID NO: 3076338 - RNA, 21 nt, Human
uuccacaagagcccaggccuc

SEQ ID NO: 3076339 - RNA, 13 nt, Human
uuccaggcuggga

SEQ ID NO: 3076340 - RNA, 15 nt, Human
uuccaggcugggaga

SEQ ID NO: 3076341 - RNA, 17 nt, Human
uuccaggcugggagagc

SEQ ID NO: 3076342 - RNA, 18 nt, Human
uuccagguuuaagcuguu

SEQ ID NO: 3076343 - RNA, 17 nt, Human
uuccagguuuaagcugu

SEQ ID NO: 3076344 - RNA, 22 nt, Human
uuccaauuuacauacucugcuu

SEQ ID NO: 3076345 - RNA, 14 nt, Human
uucauuaucucaaa

SEQ ID NO: 3076346 - RNA, 19 nt, Human
uucagauaugauucaaaug

SEQ ID NO: 3076347 - RNA, 16 nt, Human
uucagauaugauucaa

SEQ ID NO: 3076348 - RNA, 17 nt, Human
uucagauaugauucaaa

SEQ ID NO: 3076349 - RNA, 18 nt, Human
uucagauaugauucaaau

SEQ ID NO: 3076350 - RNA, 16 nt, Human
uucagaaauguguuau

SEQ ID NO: 3076351 - RNA, 16 nt, Human
uucagguaacaggcag

SEQ ID NO: 3076352 - RNA, 15 nt, Human
uucagguaacaggca

SEQ ID NO: 3076353 - RNA, 22 nt, Human
uucaggguuggccccugcccgg

SEQ ID NO: 3076354 - RNA, 19 nt, Human
uucaggguuggccccugcc

SEQ ID NO: 3076355 - RNA, 17 nt, Human
uucaggguuggccccug

SEQ ID NO: 3076356 - RNA, 16 nt, Human
uucaggguuggccccu

SEQ ID NO: 3076357 - RNA, 14 nt, Human
uucaggguuggccc

SEQ ID NO: 3076358 - RNA, 17 nt, Human
uucagcgguuuauauaa

SEQ ID NO: 3076359 - RNA, 13 nt, Human
auauaugcuaagu

SEQ ID NO: 3076360 - RNA, 15 nt, Human
uucaucaaugaauga

SEQ ID NO: 3076361 - RNA, 15 nt, Human
auauauuuuaagacg

SEQ ID NO: 3076362 - RNA, 16 nt, Human
auauauuuaaugauaa

SEQ ID NO: 3076363 - RNA, 22 nt, Human
auauauguuuuaagaggcaggg

SEQ ID NO: 3076364 - RNA, 21 nt, Human
auauauguuuuaagaggcagg

SEQ ID NO: 3076365 - RNA, 14 nt, Human
uucaguaagccgug

SEQ ID NO: 3076366 - RNA, 17 nt, Human
uucagguaacaggcaga

SEQ ID NO: 3076367 - RNA, 13 nt, Human
auauuuacaaaug

SEQ ID NO: 3076368 - RNA, 23 nt, Human
auauuuaaugauaaguaaaugcu

SEQ ID NO: 3076369 - RNA, 13 nt, Human
auauuuaaugaua

SEQ ID NO: 3076370 - RNA, 12 nt, Human
auauuuaaugau

SEQ ID NO: 3076371 - RNA, 13 nt, Human
auauuguuuucag

SEQ ID NO: 3076372 - RNA, 14 nt, Human
auauuguuugcuaa

SEQ ID NO: 3076373 - RNA, 15 nt, Human
auauugauaugcuua

SEQ ID NO: 3076374 - RNA, 18 nt, Human
auauucucacagcuccaa

SEQ ID NO: 3076375 - RNA, 22 nt, Human
auauugcugauggugcaaugac

SEQ ID NO: 3076376 - RNA, 17 nt, Human
uucccagugaauucuug

SEQ ID NO: 3076377 - RNA, 16 nt, Human
auauguucugacauaa

SEQ ID NO: 3076378 - RNA, 15 nt, Human
uuccagugaggcucu

SEQ ID NO: 3076379 - RNA, 16 nt, Human
uuccagugaggcucug

SEQ ID NO: 3076380 - RNA, 13 nt, Human
auauguuucaaac

SEQ ID NO: 3076381 - RNA, 14 nt, Human
auauguuucaaacu

SEQ ID NO: 3076382 - RNA, 16 nt, Human
auauguuucaaacuuu

SEQ ID NO: 3076383 - RNA, 17 nt, Human
auauuaagaaagacuau

SEQ ID NO: 3076384 - RNA, 15 nt, Human
auauuaagaaagacu

SEQ ID NO: 3076385 - RNA, 16 nt, Human
auauuaagaaagacua

SEQ ID NO: 3076386 - RNA, 17 nt, Human
auauuaccacagacaua

SEQ ID NO: 3076387 - RNA, 18 nt, Human
auauuuuucacauaucua

SEQ ID NO: 3076388 - RNA, 15 nt, Human
auauuuuuguagcac

SEQ ID NO: 3076389 - RNA, 16 nt, Human
auauuuuuguagcacu

SEQ ID NO: 3076390 - RNA, 23 nt, Human
auauuuuuguagcacugacagau

SEQ ID NO: 3076391 - RNA, 15 nt, Human
aucaaauaugcaaag

SEQ ID NO: 3076392 - RNA, 21 nt, Human
aucaacugcaucaagauguga

SEQ ID NO: 3076393 - RNA, 16 nt, Human
aucaaggguacacugc

SEQ ID NO: 3076394 - RNA, 18 nt, Human
aucaaauaugcaaagcac

SEQ ID NO: 3076395 - RNA, 17 nt, Human
aucaaauaugcaaagca

SEQ ID NO: 3076396 - RNA, 16 nt, Human
aucaaauaugcaaagc

SEQ ID NO: 3076397 - RNA, 17 nt, Human
aucacgccacugcacua

SEQ ID NO: 3076398 - RNA, 15 nt, Human
aucacgccacugcac

SEQ ID NO: 3076399 - RNA, 14 nt, Human
aucaauuuuucuua

SEQ ID NO: 3076400 - RNA, 14 nt, Human
aucacgccacugca

SEQ ID NO: 3076401 - RNA, 21 nt, Human
aucaaggguacacugccuucu

SEQ ID NO: 3076402 - RNA, 13 nt, Human
aucaauuuaaaaa

SEQ ID NO: 3076403 - RNA, 15 nt, Human
uucccuuuuuuuaag

SEQ ID NO: 3076404 - RNA, 21 nt, Human
uuccuaaauauauuuuaagac

SEQ ID NO: 3076405 - RNA, 20 nt, Human
uuccuaaauauauuuuaaga

SEQ ID NO: 3076406 - RNA, 22 nt, Human
uuccucuuuuuauuuaguuccu

SEQ ID NO: 3076407 - RNA, 19 nt, Human
uuccuggcacugcuuccag

SEQ ID NO: 3076408 - RNA, 12 nt, Human
uuccugaacagg

SEQ ID NO: 3076409 - RNA, 20 nt, Human
uuccuggcacugcuuccagu

SEQ ID NO: 3076410 - RNA, 22 nt, Human
uuccuggcacugcuuccaguga

SEQ ID NO: 3076411 - RNA, 22 nt, Human
uucuuaaccagaucauugugaa

SEQ ID NO: 3076412 - RNA, 18 nt, Human
uucuguuuagauaauaca

SEQ ID NO: 3076413 - RNA, 13 nt, Human
uucuguuuagaua

SEQ ID NO: 3076414 - RNA, 21 nt, Human
uucuguuggccagugugacaa

SEQ ID NO: 3076415 - RNA, 17 nt, Human
uucuguuuuauaauuuu

SEQ ID NO: 3076416 - RNA, 16 nt, Human
uucuguuuuauaauuu

SEQ ID NO: 3076417 - RNA, 20 nt, Human
uucuuucuggcuaugcauuu

SEQ ID NO: 3076418 - RNA, 17 nt, Human
uucuuucuggcuaugca

SEQ ID NO: 3076419 - RNA, 12 nt, Human
uucuuucuggcu

SEQ ID NO: 3076420 - RNA, 13 nt, Human
uucuugcaaagua

SEQ ID NO: 3076421 - RNA, 22 nt, Human
uucuucuccacuuucuagccag

SEQ ID NO: 3076422 - RNA, 16 nt, Human
auccaagcaaauguga

SEQ ID NO: 3076423 - RNA, 16 nt, Human
uucugccugcccaggc

SEQ ID NO: 3076424 - RNA, 15 nt, Human
uucugccugcccagg

SEQ ID NO: 3076425 - RNA, 14 nt, Human
auccaguaucuuga

SEQ ID NO: 3076426 - RNA, 17 nt, Human
auccagguucagcuugu

SEQ ID NO: 3076427 - RNA, 16 nt, Human
aucccaugagccucag

SEQ ID NO: 3076428 - RNA, 13 nt, Human
aucccaugagccu

SEQ ID NO: 3076429 - RNA, 11 nt, Human
aucccagcccc

SEQ ID NO: 3076430 - RNA, 18 nt, Human
aucccaugagccucagca

SEQ ID NO: 3076431 - RNA, 17 nt, Human
aucccaugagccucagc

SEQ ID NO: 3076432 - RNA, 17 nt, Human
aucccugaaggccccgc

SEQ ID NO: 3076433 - RNA, 22 nt, Human
aucccugaaggccccgcccagg

SEQ ID NO: 3076434 - RNA, 23 nt, Human
aucagugugucuaaauuugaaug

SEQ ID NO: 3076435 - RNA, 19 nt, Human
aucagucugauucccaagc

SEQ ID NO: 3076436 - RNA, 14 nt, Human
aucaggugcugcca

SEQ ID NO: 3076437 - RNA, 15 nt, Human
aucaggugcugccau

SEQ ID NO: 3076438 - RNA, 23 nt, Human
aucacuugaacccgggaggcaga

SEQ ID NO: 3076439 - RNA, 19 nt, Human
aucaggugcugccauccag

SEQ ID NO: 3076440 - RNA, 17 nt, Human
aucaggugcugccaucc

SEQ ID NO: 3076441 - RNA, 16 nt, Human
aucauuaggugugacu

SEQ ID NO: 3076442 - RNA, 23 nt, Human
aucauccacugugccaugugcca

SEQ ID NO: 3076443 - RNA, 21 nt, Human
aucauccacugugccaugugc

SEQ ID NO: 3076444 - RNA, 15 nt, Human
aucauaaaacuugau

SEQ ID NO: 3076445 - RNA, 23 nt, Human
aucauaguggcuuaaaacaacac

SEQ ID NO: 3076446 - RNA, 15 nt, Human
aucauugugaaauua

SEQ ID NO: 3076447 - RNA, 13 nt, Human
aucauugugaaau

SEQ ID NO: 3076448 - RNA, 19 nt, Human
aucauugugaaauuauuca

SEQ ID NO: 3076449 - RNA, 12 nt, Human
aucauugaaauc

SEQ ID NO: 3076450 - RNA, 21 nt, Human
uucucuaguuugauuaaauuc

SEQ ID NO: 3076451 - RNA, 14 nt, Human
uucugaagaagaug

SEQ ID NO: 3076452 - RNA, 20 nt, Human
uucucuaguuugauuaaauu

SEQ ID NO: 3076453 - RNA, 19 nt, Human
uucugcagccacuauuguu

SEQ ID NO: 3076454 - RNA, 17 nt, Human
uugaagggaaauuucag

SEQ ID NO: 3076455 - RNA, 16 nt, Human
uugaaggaugcugucu

SEQ ID NO: 3076456 - RNA, 14 nt, Human
uugaaggaugcugu

SEQ ID NO: 3076457 - RNA, 17 nt, Human
uugacacuuaaaaaugg

SEQ ID NO: 3076458 - RNA, 17 nt, Human
uugaaggaaaaugauac

SEQ ID NO: 3076459 - RNA, 15 nt, Human
aucuaaauguugaaa

SEQ ID NO: 3076460 - RNA, 19 nt, Human
aucuaaauggaaccacucu

SEQ ID NO: 3076461 - RNA, 14 nt, Human
aucgucacugcuua

SEQ ID NO: 3076462 - RNA, 18 nt, Human
aucgucacugcuuaacuu

SEQ ID NO: 3076463 - RNA, 15 nt, Human
aucgugacaacacuu

SEQ ID NO: 3076464 - RNA, 14 nt, Human
aucgugacaacacu

SEQ ID NO: 3076465 - RNA, 14 nt, Human
uugagaguucuaaa

SEQ ID NO: 3076466 - RNA, 24 nt, Human
uugaccauucuccaccugccaggg

SEQ ID NO: 3076467 - RNA, 19 nt, Human
uugacagggcacaccgggc

SEQ ID NO: 3076468 - RNA, 19 nt, Human
uugacacuuaaaaaugguu

SEQ ID NO: 3076469 - RNA, 18 nt, Human
uugaccauucuccaccug

SEQ ID NO: 3076470 - RNA, 19 nt, Human
uugaccauucuccaccugc

SEQ ID NO: 3076471 - RNA, 17 nt, Human
uugaccauucuccaccu

SEQ ID NO: 3076472 - RNA, 17 nt, Human
uugauaaguucauacau

SEQ ID NO: 3076473 - RNA, 16 nt, Human
uugauaaguucauaca

SEQ ID NO: 3076474 - RNA, 16 nt, Human
uugaggucuguucuuu

SEQ ID NO: 3076475 - RNA, 15 nt, Human
uugaggucuguucuu

SEQ ID NO: 3076476 - RNA, 12 nt, Human
uugauaaaguaa

SEQ ID NO: 3076477 - RNA, 14 nt, Human
aucguaaaauuaag

SEQ ID NO: 3076478 - RNA, 13 nt, Human
aucguaaaauuaa

SEQ ID NO: 3076479 - RNA, 17 nt, Human
aucguaaaauuaagaaa

SEQ ID NO: 3076480 - RNA, 12 nt, Human
aucguaaaauua

SEQ ID NO: 3076481 - RNA, 21 nt, Human
auccuggcacccggccccugc

SEQ ID NO: 3076482 - RNA, 20 nt, Human
auccuggcacccggccccug

SEQ ID NO: 3076483 - RNA, 19 nt, Human
auccuggcacccggccccu

SEQ ID NO: 3076484 - RNA, 17 nt, Human
auccuggcacccggccc

SEQ ID NO: 3076485 - RNA, 15 nt, Human
auccuggaguucugg

SEQ ID NO: 3076486 - RNA, 16 nt, Human
auccuggacugagggg

SEQ ID NO: 3076487 - RNA, 23 nt, Human
auccuggcacccggccccugcug

SEQ ID NO: 3076488 - RNA, 22 nt, Human
auccuggcacccggccccugcu

SEQ ID NO: 3076489 - RNA, 23 nt, Human
auccuggacugagggggccugga

SEQ ID NO: 3076490 - RNA, 17 nt, Human
auccuggcccagggcau

SEQ ID NO: 3076491 - RNA, 18 nt, Human
auccuggcccagggcauc

SEQ ID NO: 3076492 - RNA, 21 nt, Human
auccuggcccagggcaucugg

SEQ ID NO: 3076493 - RNA, 20 nt, Human
uucuuuugccguuauuaaaa

SEQ ID NO: 3076494 - RNA, 18 nt, Human
auccucuguacagagccc

SEQ ID NO: 3076495 - RNA, 20 nt, Human
auccucuguacagagcccac

SEQ ID NO: 3076496 - RNA, 13 nt, Human
auccucuguugau

SEQ ID NO: 3076497 - RNA, 17 nt, Human
auccucuuugagugaag

SEQ ID NO: 3076498 - RNA, 12 nt, Human
auccugagccag

SEQ ID NO: 3076499 - RNA, 13 nt, Human
auccugagccaga

SEQ ID NO: 3076500 - RNA, 11 nt, Human
auccugagcca

SEQ ID NO: 3076501 - RNA, 14 nt, Human
auccugagccagau

SEQ ID NO: 3076502 - RNA, 15 nt, Human
auccugagccagauu

SEQ ID NO: 3076503 - RNA, 17 nt, Human
auccugagccagauuuc

SEQ ID NO: 3076504 - RNA, 21 nt, Human
auccugagccagauuucacuc

SEQ ID NO: 3076505 - RNA, 11 nt, Human
auccugaggcu

SEQ ID NO: 3076506 - RNA, 13 nt, Human
auccugaggcucc

SEQ ID NO: 3076507 - RNA, 16 nt, Human
auccugaggcuccacu

SEQ ID NO: 3076508 - RNA, 18 nt, Human
auccugaggcuccacuug

SEQ ID NO: 3076509 - RNA, 13 nt, Human
auccugccccuga

SEQ ID NO: 3076510 - RNA, 22 nt, Human
auccugaggcuccacuuggucu

SEQ ID NO: 3076511 - RNA, 16 nt, Human
auccugcaauuccacu

SEQ ID NO: 3076512 - RNA, 14 nt, Human
uuuaugugaaacau

SEQ ID NO: 3076513 - RNA, 15 nt, Human
uuuaugugaaacaug

SEQ ID NO: 3076514 - RNA, 19 nt, Human
uuuauuaaaugcccagccc

SEQ ID NO: 3076515 - RNA, 16 nt, Human
uuuauuacuguaagaa

SEQ ID NO: 3076516 - RNA, 17 nt, Human
uuuauaugcuucuguuu

SEQ ID NO: 3076517 - RNA, 15 nt, Human
uuuagauaauacacc

SEQ ID NO: 3076518 - RNA, 13 nt, Human
uuuagauaauaca

SEQ ID NO: 3076519 - RNA, 18 nt, Human
uuuagaguugauacuaca

SEQ ID NO: 3076520 - RNA, 17 nt, Human
uuuagggguagcauuug

SEQ ID NO: 3076521 - RNA, 24 nt, Human
uuuaaagcuuauuaaaacucauuu

SEQ ID NO: 3076522 - RNA, 16 nt, Human
uuuaaagcuuccauug

SEQ ID NO: 3076523 - RNA, 13 nt, Human
augcuaagugaaa

SEQ ID NO: 3076524 - RNA, 21 nt, Human
uuuaccuuuuuuauacauaaa

SEQ ID NO: 3076525 - RNA, 17 nt, Human
uuuacuaauagacaauu

SEQ ID NO: 3076526 - RNA, 14 nt, Human
uuuacuaauagaca

SEQ ID NO: 3076527 - RNA, 18 nt, Human
uuuacuaauagacaauuu

SEQ ID NO: 3076528 - RNA, 18 nt, Human
augcuacacacugcaugu

SEQ ID NO: 3076529 - RNA, 22 nt, Human
uuuaccugaagucuuuguacag

SEQ ID NO: 3076530 - RNA, 17 nt, Human
augcuacacacugcaug

SEQ ID NO: 3076531 - RNA, 20 nt, Human
uuuaccuuuuuuauacauaa

SEQ ID NO: 3076532 - RNA, 19 nt, Human
uuuaccuuuuuuauacaua

SEQ ID NO: 3076533 - RNA, 14 nt, Human
uuuaccuuuuuuau

SEQ ID NO: 3076534 - RNA, 19 nt, Human
augcuguauauccuuucua

SEQ ID NO: 3076535 - RNA, 22 nt, Human
augcuggcuguuggcugggggc

SEQ ID NO: 3076536 - RNA, 19 nt, Human
uuuauuacuguaagaaaau

SEQ ID NO: 3076537 - RNA, 19 nt, Human
augcugugcccuaaagugu

SEQ ID NO: 3076538 - RNA, 23 nt, Human
augcugucuacacuaagagagaa

SEQ ID NO: 3076539 - RNA, 14 nt, Human
augcuguauuuuaa

SEQ ID NO: 3076540 - RNA, 15 nt, Human
auggaauaacaugua

SEQ ID NO: 3076541 - RNA, 14 nt, Human
auggaauaacaugu

SEQ ID NO: 3076542 - RNA, 16 nt, Human
uuuauuuuaauaaugu

SEQ ID NO: 3076543 - RNA, 21 nt, Human
auggaaguacuauaauuuacc

SEQ ID NO: 3076544 - RNA, 16 nt, Human
auggaacauaaaauac

SEQ ID NO: 3076545 - RNA, 18 nt, Human
auggaacacucugagacu

SEQ ID NO: 3076546 - RNA, 17 nt, Human
auggaacacucugagac

SEQ ID NO: 3076547 - RNA, 17 nt, Human
uuuauuuuuuucugaau

SEQ ID NO: 3076548 - RNA, 14 nt, Human
uuucacucuccuug

SEQ ID NO: 3076549 - RNA, 12 nt, Human
uuucauaaagca

SEQ ID NO: 3076550 - RNA, 22 nt, Human
uuucagaaaauauuauguguuu

SEQ ID NO: 3076551 - RNA, 15 nt, Human
uuucacucuccuugg

SEQ ID NO: 3076552 - RNA, 24 nt, Human
uuucacucuuauugcccacgcugg

SEQ ID NO: 3076553 - RNA, 19 nt, Human
uuuccagguuuaagcuguu

SEQ ID NO: 3076554 - RNA, 23 nt, Human
auggaauuggagcucgugggaca

SEQ ID NO: 3076555 - RNA, 19 nt, Human
uuugaaacacuuugcauaa

SEQ ID NO: 3076556 - RNA, 17 nt, Human
uuugaaacacuuugcau

SEQ ID NO: 3076557 - RNA, 23 nt, Human
augggcuggguucuacccaggug

SEQ ID NO: 3076558 - RNA, 14 nt, Human
uuugaaauauugac

SEQ ID NO: 3076559 - RNA, 14 nt, Human
auggggcccugccu

SEQ ID NO: 3076560 - RNA, 13 nt, Human
auggggcccugcc

SEQ ID NO: 3076561 - RNA, 13 nt, Human
uuucuuuguggcu

SEQ ID NO: 3076562 - RNA, 21 nt, Human
uuucuaugacacaugcaaggu

SEQ ID NO: 3076563 - RNA, 15 nt, Human
uuucuaugacacaug

SEQ ID NO: 3076564 - RNA, 13 nt, Human
uuucuaugaaaua

SEQ ID NO: 3076565 - RNA, 14 nt, Human
uuucuaugaaauau

SEQ ID NO: 3076566 - RNA, 20 nt, Human
uuucuaugaaauauuauguu

SEQ ID NO: 3076567 - RNA, 22 nt, Human
uuucuaggacugaauuaugaaa

SEQ ID NO: 3076568 - RNA, 21 nt, Human
uuucuaggacugaauuaugaa

SEQ ID NO: 3076569 - RNA, 17 nt, Human
uuucuaggacugaauua

SEQ ID NO: 3076570 - RNA, 21 nt, Human
uuucugcagccacuauuguua

SEQ ID NO: 3076571 - RNA, 14 nt, Human
uuucugccgcagcc

SEQ ID NO: 3076572 - RNA, 16 nt, Human
uuucugccgcagcccu

SEQ ID NO: 3076573 - RNA, 14 nt, Human
uuucugcaucagcu

SEQ ID NO: 3076574 - RNA, 18 nt, Human
auggccucuucagaucuc

SEQ ID NO: 3076575 - RNA, 19 nt, Human
auggcuauaggugcuacaa

SEQ ID NO: 3076576 - RNA, 16 nt, Human
auggcuauaggugcua

SEQ ID NO: 3076577 - RNA, 21 nt, Human
auggcuauaggugcuacaaaa

SEQ ID NO: 3076578 - RNA, 22 nt, Human
augggacauuugcucauggaau

SEQ ID NO: 3076579 - RNA, 21 nt, Human
augggacauuugcucauggaa

SEQ ID NO: 3076580 - RNA, 19 nt, Human
auggacaugaucuucuuua

SEQ ID NO: 3076581 - RNA, 17 nt, Human
auggaauuucucccagu

SEQ ID NO: 3076582 - RNA, 21 nt, Human
auggacccaauauuuaccaga

SEQ ID NO: 3076583 - RNA, 13 nt, Human
augggcagagcag

SEQ ID NO: 3076584 - RNA, 14 nt, Human
augggcagagcaga

SEQ ID NO: 3076585 - RNA, 15 nt, Human
augggcagagcagag

SEQ ID NO: 3076586 - RNA, 15 nt, Human
augggccuccugugu

SEQ ID NO: 3076587 - RNA, 17 nt, Human
augggccaccgccuugc

SEQ ID NO: 3076588 - RNA, 18 nt, Human
augggccaccgccuugcc

SEQ ID NO: 3076589 - RNA, 21 nt, Human
augggcaacccccagccugcu

SEQ ID NO: 3076590 - RNA, 19 nt, Human
augggcaacccccagccug

SEQ ID NO: 3076591 - RNA, 18 nt, Human
augggcaacccccagccu

SEQ ID NO: 3076592 - RNA, 13 nt, Human
augggagcucaug

SEQ ID NO: 3076593 - RNA, 15 nt, Human
auggcuauaggugcu

SEQ ID NO: 3076594 - RNA, 18 nt, Human
uuucgcaggauucuuccu

SEQ ID NO: 3076595 - RNA, 22 nt, Human
uuucgcaggauucuuccucccu

SEQ ID NO: 3076596 - RNA, 21 nt, Human
uuuccuucauucaacccaccu

SEQ ID NO: 3076597 - RNA, 22 nt, Human
uuuccuucagugccuuauggaa

SEQ ID NO: 3076598 - RNA, 18 nt, Human
uuuccuucagugccuuau

SEQ ID NO: 3076599 - RNA, 21 nt, Human
uuuccuucagugccuuaugga

SEQ ID NO: 3076600 - RNA, 23 nt, Human
uuuccuucauucaacccaccugc

SEQ ID NO: 3076601 - RNA, 12 nt, Human
uuuccugugucu

SEQ ID NO: 3076602 - RNA, 22 nt, Human
augggccaccgccuugcccagc

SEQ ID NO: 3076603 - RNA, 12 nt, Human
uuuccuucagug

SEQ ID NO: 3076604 - RNA, 15 nt, Human
uuuccuucagugccu

SEQ ID NO: 3076605 - RNA, 11 nt, Human
uuuccuucagu

SEQ ID NO: 3076606 - RNA, 16 nt, Human
uugcuuuuaaaaucca

SEQ ID NO: 3076607 - RNA, 17 nt, Human
uuggaaagaguaggaag

SEQ ID NO: 3076608 - RNA, 17 nt, Human
uugcugauggugcaaug

SEQ ID NO: 3076609 - RNA, 18 nt, Human
uugcugauggugcaauga

SEQ ID NO: 3076610 - RNA, 12 nt, Human
uugcucauggaa

SEQ ID NO: 3076611 - RNA, 11 nt, Human
uugcucaugga

SEQ ID NO: 3076612 - RNA, 19 nt, Human
uugcugaauacagaggcaa

SEQ ID NO: 3076613 - RNA, 20 nt, Human
uugcuaagugaggaugaaaa

SEQ ID NO: 3076614 - RNA, 11 nt, Human
uuggcugcuga

SEQ ID NO: 3076615 - RNA, 15 nt, Human
uuggcugcugaaggc

SEQ ID NO: 3076616 - RNA, 14 nt, Human
uuggcugcagggag

SEQ ID NO: 3076617 - RNA, 13 nt, Human
uuggcugcaggga

SEQ ID NO: 3076618 - RNA, 22 nt, Human
uuggcuagagguucaaagauau

SEQ ID NO: 3076619 - RNA, 22 nt, Human
uuggcuaggaccccuccaugug

SEQ ID NO: 3076620 - RNA, 21 nt, Human
uuggcuagagguucaaagaua

SEQ ID NO: 3076621 - RNA, 18 nt, Human
uuggaaagaguaggaaga

SEQ ID NO: 3076622 - RNA, 19 nt, Human
augaaagacuguacaaagu

SEQ ID NO: 3076623 - RNA, 20 nt, Human
augaaagacuguacaaagua

SEQ ID NO: 3076624 - RNA, 21 nt, Human
augaaauauuauguuaaaacu

SEQ ID NO: 3076625 - RNA, 20 nt, Human
augaaauauuauguuaaaac

SEQ ID NO: 3076626 - RNA, 22 nt, Human
uuguaagcaugcacaaauucug

SEQ ID NO: 3076627 - RNA, 14 nt, Human
uuguaaggaaugau

SEQ ID NO: 3076628 - RNA, 19 nt, Human
uugguuaggcauuguggga

SEQ ID NO: 3076629 - RNA, 22 nt, Human
uugggguacccacugcucuggu

SEQ ID NO: 3076630 - RNA, 20 nt, Human
augaaccacaucuugcucug

SEQ ID NO: 3076631 - RNA, 17 nt, Human
augaauuacauuuguau

SEQ ID NO: 3076632 - RNA, 13 nt, Human
augaaccacaucu

SEQ ID NO: 3076633 - RNA, 18 nt, Human
augaauuacauuuguaua

SEQ ID NO: 3076634 - RNA, 19 nt, Human
augaauuacauuuguauaa

SEQ ID NO: 3076635 - RNA, 19 nt, Human
uuggggaagaacgaagcca

SEQ ID NO: 3076636 - RNA, 17 nt, Human
uugggguacccacugcu

SEQ ID NO: 3076637 - RNA, 13 nt, Human
uuguaaugaaaac

SEQ ID NO: 3076638 - RNA, 12 nt, Human
uuguaaugaaaa

SEQ ID NO: 3076639 - RNA, 20 nt, Human
uuguaaggaaugauuaauua

SEQ ID NO: 3076640 - RNA, 23 nt, Human
uuguaguguuggagaagaacuga

SEQ ID NO: 3076641 - RNA, 13 nt, Human
uuguauaaaauaa

SEQ ID NO: 3076642 - RNA, 19 nt, Human
uuguauaaaauaauuuuua

SEQ ID NO: 3076643 - RNA, 19 nt, Human
augacacgaauauugcuga

SEQ ID NO: 3076644 - RNA, 20 nt, Human
augacacgaauauugcugau

SEQ ID NO: 3076645 - RNA, 23 nt, Human
augaauuaguuuuauaugcuucu

SEQ ID NO: 3076646 - RNA, 22 nt, Human
augaauuacauuuguauaaaau

SEQ ID NO: 3076647 - RNA, 21 nt, Human
augaauuaguuuuauaugcuu

SEQ ID NO: 3076648 - RNA, 22 nt, Human
augcaaacuuuauuuuguguuu

SEQ ID NO: 3076649 - RNA, 16 nt, Human
augcaaggucauuuuu

SEQ ID NO: 3076650 - RNA, 14 nt, Human
augcaaggucauuu

SEQ ID NO: 3076651 - RNA, 14 nt, Human
augcaccuggaaua

SEQ ID NO: 3076652 - RNA, 16 nt, Human
augcaccuggaauaua

SEQ ID NO: 3076653 - RNA, 22 nt, Human
augcaaggucauuuuuuuuaag

SEQ ID NO: 3076654 - RNA, 15 nt, Human
augaucuucuuuaua

SEQ ID NO: 3076655 - RNA, 16 nt, Human
augcaaaccaucauug

SEQ ID NO: 3076656 - RNA, 18 nt, Human
augcaaaccaucauugaa

SEQ ID NO: 3076657 - RNA, 19 nt, Human
augcaaaccaucauugaaa

SEQ ID NO: 3076658 - RNA, 20 nt, Human
augcaaaccaucauugaaau

SEQ ID NO: 3076659 - RNA, 21 nt, Human
augcaaaccaucauugaaauc

SEQ ID NO: 3076660 - RNA, 22 nt, Human
augcaaaccaucauugaaaucu

SEQ ID NO: 3076661 - RNA, 19 nt, Human
augcaccuggaauauauaa

SEQ ID NO: 3076662 - RNA, 20 nt, Human
uuuaaaaaagaaacauuugg

SEQ ID NO: 3076663 - RNA, 18 nt, Human
uugugaagguggaaauaa

SEQ ID NO: 3076664 - RNA, 17 nt, Human
uugugaagguggaaaua

SEQ ID NO: 3076665 - RNA, 18 nt, Human
uugugaagcaaaauuuuu

SEQ ID NO: 3076666 - RNA, 14 nt, Human
augaucuucuuuau

SEQ ID NO: 3076667 - RNA, 16 nt, Human
augauccuaggcauuu

SEQ ID NO: 3076668 - RNA, 23 nt, Human
augaucacggcucacugcagccu

SEQ ID NO: 3076669 - RNA, 15 nt, Human
augaucacggcucac

SEQ ID NO: 3076670 - RNA, 19 nt, Human
augaucacggcucacugca

SEQ ID NO: 3076671 - RNA, 18 nt, Human
augaucacggcucacugc

SEQ ID NO: 3076672 - RNA, 19 nt, Human
augacauaaaaacaacuuu

SEQ ID NO: 3076673 - RNA, 12 nt, Human
augagaggaaau

SEQ ID NO: 3076674 - RNA, 13 nt, Human
augagaggaaauc

SEQ ID NO: 3076675 - RNA, 23 nt, Human
augagagacacacugaagaagca

SEQ ID NO: 3076676 - RNA, 14 nt, Human
augagaggaaauca

SEQ ID NO: 3076677 - RNA, 15 nt, Human
augagaggaaaucac

SEQ ID NO: 3076678 - RNA, 16 nt, Human
augagaggaaaucacc

SEQ ID NO: 3076679 - RNA, 16 nt, Human
augagccucagcaucc

SEQ ID NO: 3076680 - RNA, 15 nt, Human
augagccucagcauc

SEQ ID NO: 3076681 - RNA, 12 nt, Human
augagccucagc

SEQ ID NO: 3076682 - RNA, 16 nt, Human
augagccgcccaaggc

SEQ ID NO: 3076683 - RNA, 18 nt, Human
augagccgcccaaggccu

SEQ ID NO: 3076684 - RNA, 19 nt, Human
augagccgcccaaggccuu

SEQ ID NO: 3076685 - RNA, 21 nt, Human
augagccgcccaaggccuucc

SEQ ID NO: 3076686 - RNA, 22 nt, Human
augagccgcccaaggccuuccc

SEQ ID NO: 3076687 - RNA, 22 nt, Human
augagcaucaggccaggcccuc

SEQ ID NO: 3076688 - RNA, 15 nt, Human
augagccgcccaagg

SEQ ID NO: 3076689 - RNA, 18 nt, Human
augagcaucaggccaggc

SEQ ID NO: 3076690 - RNA, 19 nt, Human
augagcaucaggccaggcc

SEQ ID NO: 3076691 - RNA, 20 nt, Human
augagcaucaggccaggccc

SEQ ID NO: 3076692 - RNA, 21 nt, Human
augagcaucaggccaggcccu

SEQ ID NO: 3076693 - RNA, 16 nt, Human
augagcaucaggccag

SEQ ID NO: 3076694 - RNA, 17 nt, Human
augagcaucaggccagg

SEQ ID NO: 3076695 - RNA, 15 nt, Human
augagcaucaggcca

SEQ ID NO: 3076696 - RNA, 13 nt, Human
uugugaaauuauu

SEQ ID NO: 3076697 - RNA, 21 nt, Human
uugucggccccaccagugccu

SEQ ID NO: 3076698 - RNA, 16 nt, Human
uuguccccgacccuug

SEQ ID NO: 3076699 - RNA, 18 nt, Human
uugucacacacuuuggcu

SEQ ID NO: 3076700 - RNA, 14 nt, Human
augauaacuggaaa

SEQ ID NO: 3076701 - RNA, 15 nt, Human
augauaaaacacaaa

SEQ ID NO: 3076702 - RNA, 18 nt, Human
augagccucagcauccug

SEQ ID NO: 3076703 - RNA, 17 nt, Human
augagccucagcauccu

SEQ ID NO: 3076704 - RNA, 22 nt, Human
augaggucagagccugcaguua

SEQ ID NO: 3076705 - RNA, 23 nt, Human
augaguccccuguuuguuucuga

SEQ ID NO: 3076706 - RNA, 14 nt, Human
ugaugggauuuggu

SEQ ID NO: 3076707 - RNA, 19 nt, Human
ugaugggaaagcauuguaa

SEQ ID NO: 3076708 - RNA, 14 nt, Human
ugauggggcccugc

SEQ ID NO: 3076709 - RNA, 15 nt, Human
ugauggggcccugcc

SEQ ID NO: 3076710 - RNA, 16 nt, Human
ugauggggcccugccu

SEQ ID NO: 3076711 - RNA, 19 nt, Human
ugauggggcccugccuccu

SEQ ID NO: 3076712 - RNA, 13 nt, Human
ugaugagaggaaa

SEQ ID NO: 3076713 - RNA, 14 nt, Human
ugaugagaggaaau

SEQ ID NO: 3076714 - RNA, 15 nt, Human
ugaugagaggaaauc

SEQ ID NO: 3076715 - RNA, 16 nt, Human
ugaugagaggaaauca

SEQ ID NO: 3076716 - RNA, 23 nt, Human
ugaugcuucuucagagacuccug

SEQ ID NO: 3076717 - RNA, 14 nt, Human
ugaugggaaagcau

SEQ ID NO: 3076718 - RNA, 16 nt, Human
ugauccuaguuccacc

SEQ ID NO: 3076719 - RNA, 15 nt, Human
ugauccucccaccuc

SEQ ID NO: 3076720 - RNA, 21 nt, Human
ugauccucccaccucagccuc

SEQ ID NO: 3076721 - RNA, 22 nt, Human
ugauccucccaccucagccucc

SEQ ID NO: 3076722 - RNA, 11 nt, Human
ugaugaagaag

SEQ ID NO: 3076723 - RNA, 12 nt, Human
ugaugaagaagu

SEQ ID NO: 3076724 - RNA, 15 nt, Human
agccacgguguucug

SEQ ID NO: 3076725 - RNA, 23 nt, Human
ugauuaaguaaugauaacuggaa

SEQ ID NO: 3076726 - RNA, 16 nt, Human
agccacugcaccgggc

SEQ ID NO: 3076727 - RNA, 19 nt, Human
ugauuaaccacuucagcug

SEQ ID NO: 3076728 - RNA, 18 nt, Human
ugauuaaguaaugauaac

SEQ ID NO: 3076729 - RNA, 20 nt, Human
ugauuaaauucuugcaaagu

SEQ ID NO: 3076730 - RNA, 19 nt, Human
ugauuaaauucuugcaaag

SEQ ID NO: 3076731 - RNA, 15 nt, Human
ugauggugcaaugac

SEQ ID NO: 3076732 - RNA, 13 nt, Human
ugauggugcaaug

SEQ ID NO: 3076733 - RNA, 10 nt, Human
agccagagga

SEQ ID NO: 3076734 - RNA, 11 nt, Human
agccagaggag

SEQ ID NO: 3076735 - RNA, 19 nt, Human
agccacugcaccgggccac

SEQ ID NO: 3076736 - RNA, 18 nt, Human
agccacugcaccgggcca

SEQ ID NO: 3076737 - RNA, 19 nt, Human
agccagacuggcacaguuu

SEQ ID NO: 3076738 - RNA, 16 nt, Human
agcccacuguacuugc

SEQ ID NO: 3076739 - RNA, 14 nt, Human
agcccacuguacuu

SEQ ID NO: 3076740 - RNA, 15 nt, Human
agcccacuucugcca

SEQ ID NO: 3076741 - RNA, 14 nt, Human
agcccacuucugcc

SEQ ID NO: 3076742 - RNA, 13 nt, Human
agcccacuucugc

SEQ ID NO: 3076743 - RNA, 13 nt, Human
agccaguaaaugg

SEQ ID NO: 3076744 - RNA, 21 nt, Human
agccaguaaaugggggugcau

SEQ ID NO: 3076745 - RNA, 14 nt, Human
agcccaggaaaggc

SEQ ID NO: 3076746 - RNA, 15 nt, Human
ugauucauaaugacu

SEQ ID NO: 3076747 - RNA, 16 nt, Human
ugauucauaaugacuu

SEQ ID NO: 3076748 - RNA, 21 nt, Human
ugauucauaaugacuuaagca

SEQ ID NO: 3076749 - RNA, 23 nt, Human
ugauucccaagcucugcuccucu

SEQ ID NO: 3076750 - RNA, 22 nt, Human
ugauucccaagcucugcuccuc

SEQ ID NO: 3076751 - RNA, 17 nt, Human
ugauuuggggauauuuu

SEQ ID NO: 3076752 - RNA, 22 nt, Human
ugauuuccguuaaaauaccagc

SEQ ID NO: 3076753 - RNA, 18 nt, Human
ugauuuccguuaaaauac

SEQ ID NO: 3076754 - RNA, 17 nt, Human
ugauuuagcaggaagcu

SEQ ID NO: 3076755 - RNA, 20 nt, Human
ugauuuagcaggaagcugug

SEQ ID NO: 3076756 - RNA, 18 nt, Human
ugcacacaccagagccca

SEQ ID NO: 3076757 - RNA, 17 nt, Human
ugcacacaccagagccc

SEQ ID NO: 3076758 - RNA, 21 nt, Human
ugcacacaccagagcccaccu

SEQ ID NO: 3076759 - RNA, 16 nt, Human
agcccugguggcagug

SEQ ID NO: 3076760 - RNA, 15 nt, Human
agcccugguggcagu

SEQ ID NO: 3076761 - RNA, 14 nt, Human
agcccugguggcag

SEQ ID NO: 3076762 - RNA, 22 nt, Human
agccccauucugccugcccagg

SEQ ID NO: 3076763 - RNA, 21 nt, Human
agccccauucugccugcccag

SEQ ID NO: 3076764 - RNA, 18 nt, Human
agccccaaaacucuccuc

SEQ ID NO: 3076765 - RNA, 20 nt, Human
agccccauucugccugccca

SEQ ID NO: 3076766 - RNA, 16 nt, Human
agccccaaaacucucc

SEQ ID NO: 3076767 - RNA, 17 nt, Human
agccccaaaacucuccu

SEQ ID NO: 3076768 - RNA, 21 nt, Human
agcccaggccuccuacagcuu

SEQ ID NO: 3076769 - RNA, 21 nt, Human
ugcaaaccaucauugaaaucu

SEQ ID NO: 3076770 - RNA, 20 nt, Human
ugcaaaccaucauugaaauc

SEQ ID NO: 3076771 - RNA, 19 nt, Human
agccucaaccuccugggcu

SEQ ID NO: 3076772 - RNA, 20 nt, Human
agccucaaccuccugggcua

SEQ ID NO: 3076773 - RNA, 17 nt, Human
agccucacaguccuuac

SEQ ID NO: 3076774 - RNA, 18 nt, Human
agccucacaguccuuacc

SEQ ID NO: 3076775 - RNA, 23 nt, Human
agccucugaaaaccaauguucuc

SEQ ID NO: 3076776 - RNA, 21 nt, Human
ugcagccucaaccuccugggc

SEQ ID NO: 3076777 - RNA, 20 nt, Human
ugcagccucaaccuccuggg

SEQ ID NO: 3076778 - RNA, 22 nt, Human
ugcagccucaaccuccugggcu

SEQ ID NO: 3076779 - RNA, 22 nt, Human
ugcagacaggcaagcaccuccu

SEQ ID NO: 3076780 - RNA, 15 nt, Human
ugcagaagacaguau

SEQ ID NO: 3076781 - RNA, 14 nt, Human
ugcagaagacagua

SEQ ID NO: 3076782 - RNA, 15 nt, Human
ugcacacauuuuuua

SEQ ID NO: 3076783 - RNA, 13 nt, Human
ugcacacauuuuu

SEQ ID NO: 3076784 - RNA, 12 nt, Human
ugcacacauuuu

SEQ ID NO: 3076785 - RNA, 11 nt, Human
ugcacacauuu

SEQ ID NO: 3076786 - RNA, 16 nt, Human
ugcacuccccugcugg

SEQ ID NO: 3076787 - RNA, 17 nt, Human
ugcacuccccugcuggg

SEQ ID NO: 3076788 - RNA, 19 nt, Human
ugcacuccccugcugggug

SEQ ID NO: 3076789 - RNA, 20 nt, Human
agccgagauagccaaggcca

SEQ ID NO: 3076790 - RNA, 21 nt, Human
agccgagauagccaaggccaa

SEQ ID NO: 3076791 - RNA, 17 nt, Human
agccgagaucacgccac

SEQ ID NO: 3076792 - RNA, 21 nt, Human
agcccuuagcagggaaacagc

SEQ ID NO: 3076793 - RNA, 17 nt, Human
ugcagacucuacagagg

SEQ ID NO: 3076794 - RNA, 16 nt, Human
ugcagacucuacagag

SEQ ID NO: 3076795 - RNA, 16 nt, Human
agcccuuagcagggaa

SEQ ID NO: 3076796 - RNA, 18 nt, Human
agcccugucuccucucuc

SEQ ID NO: 3076797 - RNA, 11 nt, Human
agcccugucuc

SEQ ID NO: 3076798 - RNA, 16 nt, Human
ugccagugccugggug

SEQ ID NO: 3076799 - RNA, 12 nt, Human
ugccagugccug

SEQ ID NO: 3076800 - RNA, 15 nt, Human
ugccagugccugggu

SEQ ID NO: 3076801 - RNA, 13 nt, Human
agcggcuggcagc

SEQ ID NO: 3076802 - RNA, 18 nt, Human
ugccagcuuaucucaggg

SEQ ID NO: 3076803 - RNA, 23 nt, Human
agcggcuggcagcccaccccuca

SEQ ID NO: 3076804 - RNA, 20 nt, Human
agcggggacagcuccuucug

SEQ ID NO: 3076805 - RNA, 19 nt, Human
agcggggacagcuccuucu

SEQ ID NO: 3076806 - RNA, 22 nt, Human
agcggggacagcuccuucuguc

SEQ ID NO: 3076807 - RNA, 21 nt, Human
ugcauuugaggucuguucuuu

SEQ ID NO: 3076808 - RNA, 20 nt, Human
ugcauuugaggucuguucuu

SEQ ID NO: 3076809 - RNA, 20 nt, Human
ugcauuuaaaagauacaguu

SEQ ID NO: 3076810 - RNA, 18 nt, Human
ugcauuugaggucuguuc

SEQ ID NO: 3076811 - RNA, 19 nt, Human
ugcauuugaggucuguucu

SEQ ID NO: 3076812 - RNA, 16 nt, Human
agcgcuggccgggacc

SEQ ID NO: 3076813 - RNA, 22 nt, Human
agcgcuggccgggaccccgagc

SEQ ID NO: 3076814 - RNA, 22 nt, Human
agccuugaacuuugaccucugc

SEQ ID NO: 3076815 - RNA, 16 nt, Human
agccuugaacuuugac

SEQ ID NO: 3076816 - RNA, 13 nt, Human
agccuugaacuuu

SEQ ID NO: 3076817 - RNA, 22 nt, Human
agccuugaccauucuccaccug

SEQ ID NO: 3076818 - RNA, 23 nt, Human
agccuugaccauucuccaccugc

SEQ ID NO: 3076819 - RNA, 22 nt, Human
agcgauucuucugcuucagccu

SEQ ID NO: 3076820 - RNA, 15 nt, Human
agccuugaacuuuga

SEQ ID NO: 3076821 - RNA, 18 nt, Human
agccuuccagggguggga

SEQ ID NO: 3076822 - RNA, 20 nt, Human
ugcagcucuccccuucucug

SEQ ID NO: 3076823 - RNA, 22 nt, Human
ugcagcucuccccuucucugua

SEQ ID NO: 3076824 - RNA, 17 nt, Human
agcuaucguaaaauuaa

SEQ ID NO: 3076825 - RNA, 19 nt, Human
agcuauggugucauaggcu

SEQ ID NO: 3076826 - RNA, 16 nt, Human
agcuaggccuggccag

SEQ ID NO: 3076827 - RNA, 21 nt, Human
agcuaggccuggccagaugca

SEQ ID NO: 3076828 - RNA, 15 nt, Human
agcuccaagcuccca

SEQ ID NO: 3076829 - RNA, 18 nt, Human
agcuccaagaauuucuag

SEQ ID NO: 3076830 - RNA, 15 nt, Human
agcuccaagaauuuc

SEQ ID NO: 3076831 - RNA, 22 nt, Human
ugccauuuaaagcuuauuaaaa

SEQ ID NO: 3076832 - RNA, 20 nt, Human
agcucagggccuggcucagg

SEQ ID NO: 3076833 - RNA, 18 nt, Human
agcucagggccuggcuca

SEQ ID NO: 3076834 - RNA, 19 nt, Human
agcucagggccuggcucag

SEQ ID NO: 3076835 - RNA, 12 nt, Human
agcucagggccu

SEQ ID NO: 3076836 - RNA, 13 nt, Human
agcucagggccug

SEQ ID NO: 3076837 - RNA, 19 nt, Human
agcuauucaguaauaacuc

SEQ ID NO: 3076838 - RNA, 20 nt, Human
ugcccuaaaguguauuuuuu

SEQ ID NO: 3076839 - RNA, 23 nt, Human
ugccccgaacauguuuuucuucu

SEQ ID NO: 3076840 - RNA, 16 nt, Human
ugccccauucaacauc

SEQ ID NO: 3076841 - RNA, 18 nt, Human
ugcccaggccccugccac

SEQ ID NO: 3076842 - RNA, 17 nt, Human
ugcccaggccccugcca

SEQ ID NO: 3076843 - RNA, 15 nt, Human
ugcccaggccccugc

SEQ ID NO: 3076844 - RNA, 14 nt, Human
ugcccaggccccug

SEQ ID NO: 3076845 - RNA, 13 nt, Human
ugcccagccccuu

SEQ ID NO: 3076846 - RNA, 12 nt, Human
ugcccagccccu

SEQ ID NO: 3076847 - RNA, 16 nt, Human
ugcccagccccuucug

SEQ ID NO: 3076848 - RNA, 17 nt, Human
ugcccagccccuucuga

SEQ ID NO: 3076849 - RNA, 17 nt, Human
ugcccaaagaugcagcc

SEQ ID NO: 3076850 - RNA, 20 nt, Human
ugcccaaagaugcagccggu

SEQ ID NO: 3076851 - RNA, 12 nt, Human
ugccucucugca

SEQ ID NO: 3076852 - RNA, 11 nt, Human
ugccucucugc

SEQ ID NO: 3076853 - RNA, 17 nt, Human
ugccucucucaggccaa

SEQ ID NO: 3076854 - RNA, 16 nt, Human
ugccucucucaggcca

SEQ ID NO: 3076855 - RNA, 22 nt, Human
ugccucccaucacccgcuaaga

SEQ ID NO: 3076856 - RNA, 18 nt, Human
ugccucagaaaacaagga

SEQ ID NO: 3076857 - RNA, 14 nt, Human
ugccgcagcccugc

SEQ ID NO: 3076858 - RNA, 20 nt, Human
ugccgcagcccugcagaggg

SEQ ID NO: 3076859 - RNA, 19 nt, Human
ugcccuuaccugccaggaa

SEQ ID NO: 3076860 - RNA, 15 nt, Human
ugccucaccccuugc

SEQ ID NO: 3076861 - RNA, 23 nt, Human
ugcccugugaguacuacaguccu

SEQ ID NO: 3076862 - RNA, 16 nt, Human
agcucuucuccaggcu

SEQ ID NO: 3076863 - RNA, 15 nt, Human
agcucuucuccaggc

SEQ ID NO: 3076864 - RNA, 15 nt, Human
ugcccugugggcccc

SEQ ID NO: 3076865 - RNA, 18 nt, Human
ugcccugugggcccccaa

SEQ ID NO: 3076866 - RNA, 22 nt, Human
ugcccuuaccugccaggaagcc

SEQ ID NO: 3076867 - RNA, 24 nt, Human
agcugcuuuugucuaugggacuca

SEQ ID NO: 3076868 - RNA, 23 nt, Human
agcugcuuuugucuaugggacuc

SEQ ID NO: 3076869 - RNA, 15 nt, Human
agcugggacuacagg

SEQ ID NO: 3076870 - RNA, 10 nt, Human
agcugccugu

SEQ ID NO: 3076871 - RNA, 22 nt, Human
agcugcuuuugucuaugggacu

SEQ ID NO: 3076872 - RNA, 13 nt, Human
agcugccuguuca

SEQ ID NO: 3076873 - RNA, 23 nt, Human
ugccucucugcaggucccuaaua

SEQ ID NO: 3076874 - RNA, 15 nt, Human
ugccucucugcaggu

SEQ ID NO: 3076875 - RNA, 16 nt, Human
ugccucugacacacag

SEQ ID NO: 3076876 - RNA, 14 nt, Human
ugccucugacacac

SEQ ID NO: 3076877 - RNA, 21 nt, Human
ugccucucugcaggucccuaa

SEQ ID NO: 3076878 - RNA, 11 nt, Human
ugccucugccu

SEQ ID NO: 3076879 - RNA, 19 nt, Human
ugccugcccaggccccugc

SEQ ID NO: 3076880 - RNA, 18 nt, Human
ugccugcccaggccccug

SEQ ID NO: 3076881 - RNA, 17 nt, Human
ugccugcccaggccccu

SEQ ID NO: 3076882 - RNA, 23 nt, Human
agcucuguccugggagugagcug

SEQ ID NO: 3076883 - RNA, 23 nt, Human
agcucugcccauccugccccuga

SEQ ID NO: 3076884 - RNA, 19 nt, Human
agcuccagcucaccagccc

SEQ ID NO: 3076885 - RNA, 18 nt, Human
agcuccagcucaccagcc

SEQ ID NO: 3076886 - RNA, 21 nt, Human
agcuccagcucaccagcccca

SEQ ID NO: 3076887 - RNA, 23 nt, Human
agcuccuucuguccuacucugug

SEQ ID NO: 3076888 - RNA, 22 nt, Human
agcuccuucuguccuacucugu

SEQ ID NO: 3076889 - RNA, 17 nt, Human
agcuccaagcucccagg

SEQ ID NO: 3076890 - RNA, 16 nt, Human
agcuccaagcucccag

SEQ ID NO: 3076891 - RNA, 18 nt, Human
agcuccaagcucccaggc

SEQ ID NO: 3076892 - RNA, 19 nt, Human
agcuccaagcucccaggca

SEQ ID NO: 3076893 - RNA, 17 nt, Human
agcuccagcucaccagc

SEQ ID NO: 3076894 - RNA, 13 nt, Human
agcuccagcucac

SEQ ID NO: 3076895 - RNA, 19 nt, Human
aggcucuggagcccacugu

SEQ ID NO: 3076896 - RNA, 18 nt, Human
aggcucuggagcccacug

SEQ ID NO: 3076897 - RNA, 15 nt, Human
aggcucuggagccca

SEQ ID NO: 3076898 - RNA, 14 nt, Human
aggcucuggagccc

SEQ ID NO: 3076899 - RNA, 13 nt, Human
aggcucuggagcc

SEQ ID NO: 3076900 - RNA, 16 nt, Human
aggcucugcccuuggu

SEQ ID NO: 3076901 - RNA, 17 nt, Human
aggcuggcgugcagugg

SEQ ID NO: 3076902 - RNA, 13 nt, Human
aggcuggcgugca

SEQ ID NO: 3076903 - RNA, 12 nt, Human
aggcucgagcau

SEQ ID NO: 3076904 - RNA, 19 nt, Human
aggcuccuuuagcgcccag

SEQ ID NO: 3076905 - RNA, 15 nt, Human
aggcucgagcaugcc

SEQ ID NO: 3076906 - RNA, 17 nt, Human
aggcucgagcaugccug

SEQ ID NO: 3076907 - RNA, 18 nt, Human
aggcucgagcaugccugg

SEQ ID NO: 3076908 - RNA, 19 nt, Human
aggcucgagcaugccugga

SEQ ID NO: 3076909 - RNA, 21 nt, Human
aggcucgagcaugccuggaug

SEQ ID NO: 3076910 - RNA, 11 nt, Human
aggcucucagg

SEQ ID NO: 3076911 - RNA, 12 nt, Human
aggcucucaggc

SEQ ID NO: 3076912 - RNA, 14 nt, Human
aggcucucaggcca

SEQ ID NO: 3076913 - RNA, 15 nt, Human
aggcucucaggccag

SEQ ID NO: 3076914 - RNA, 16 nt, Human
aggcucucaggccagc

SEQ ID NO: 3076915 - RNA, 18 nt, Human
aggcucucaggccagcug

SEQ ID NO: 3076916 - RNA, 19 nt, Human
aggcucucaggccagcugc

SEQ ID NO: 3076917 - RNA, 20 nt, Human
aggcucucaggccagcugcu

SEQ ID NO: 3076918 - RNA, 14 nt, Human
aggcucugcccuug

SEQ ID NO: 3076919 - RNA, 15 nt, Human
aggcucugcccuugg

SEQ ID NO: 3076920 - RNA, 13 nt, Human
aggcucugcccuu

SEQ ID NO: 3076921 - RNA, 12 nt, Human
aggcucugcccu

SEQ ID NO: 3076922 - RNA, 11 nt, Human
aggcucugccc

SEQ ID NO: 3076923 - RNA, 21 nt, Human
aggcucucaggccagcugcuu

SEQ ID NO: 3076924 - RNA, 19 nt, Human
uggcuaugcauuugaaaau

SEQ ID NO: 3076925 - RNA, 22 nt, Human
uggcuauuagagaucaaccccu

SEQ ID NO: 3076926 - RNA, 14 nt, Human
uggcuaugcauuug

SEQ ID NO: 3076927 - RNA, 17 nt, Human
uggcuaugcauuugaaa

SEQ ID NO: 3076928 - RNA, 15 nt, Human
uggcuaugcauuuga

SEQ ID NO: 3076929 - RNA, 20 nt, Human
aggcuggcgugcaguggugc

SEQ ID NO: 3076930 - RNA, 18 nt, Human
aggcuggcgugcaguggu

SEQ ID NO: 3076931 - RNA, 22 nt, Human
uggcuagagguucaaagauauu

SEQ ID NO: 3076932 - RNA, 14 nt, Human
aggcugggagagcc

SEQ ID NO: 3076933 - RNA, 12 nt, Human
uggcugcaaagg

SEQ ID NO: 3076934 - RNA, 20 nt, Human
uggcucuuccaggcugggag

SEQ ID NO: 3076935 - RNA, 21 nt, Human
uggcucuuccaggcugggaga

SEQ ID NO: 3076936 - RNA, 19 nt, Human
uggcucuuccaggcuggga

SEQ ID NO: 3076937 - RNA, 18 nt, Human
uggcucaaguccucuuuu

SEQ ID NO: 3076938 - RNA, 18 nt, Human
uggcugccaaugggagcu

SEQ ID NO: 3076939 - RNA, 20 nt, Human
uggcugccaaugggagcuca

SEQ ID NO: 3076940 - RNA, 14 nt, Human
uggcugcagggagu

SEQ ID NO: 3076941 - RNA, 13 nt, Human
uggcugcagggag

SEQ ID NO: 3076942 - RNA, 15 nt, Human
uggcugcagggaguc

SEQ ID NO: 3076943 - RNA, 17 nt, Human
uggcuuaaaacaacacu

SEQ ID NO: 3076944 - RNA, 15 nt, Human
uggcuguuggcuggg

SEQ ID NO: 3076945 - RNA, 14 nt, Human
uggcugugucuccc

SEQ ID NO: 3076946 - RNA, 13 nt, Human
uggcuguuggcug

SEQ ID NO: 3076947 - RNA, 22 nt, Human
uggcuucacggaagagccuugc

SEQ ID NO: 3076948 - RNA, 23 nt, Human
uggcuucacggaagagccuugcg

SEQ ID NO: 3076949 - RNA, 16 nt, Human
ugggaaaggggaaguu

SEQ ID NO: 3076950 - RNA, 20 nt, Human
ugggaaagggauuuucagcc

SEQ ID NO: 3076951 - RNA, 21 nt, Human
ugggaaagcauuguaaaugug

SEQ ID NO: 3076952 - RNA, 18 nt, Human
uggacgagaaaacaauaa

SEQ ID NO: 3076953 - RNA, 16 nt, Human
aggccaaacucaccug

SEQ ID NO: 3076954 - RNA, 18 nt, Human
aggcauuuguuugaacug

SEQ ID NO: 3076955 - RNA, 14 nt, Human
aggccaaaggaagc

SEQ ID NO: 3076956 - RNA, 20 nt, Human
aggccaaacucaccugcccc

SEQ ID NO: 3076957 - RNA, 23 nt, Human
aggccaaaggaagcacaugccuc

SEQ ID NO: 3076958 - RNA, 20 nt, Human
aggccaaaggaagcacaugc

SEQ ID NO: 3076959 - RNA, 18 nt, Human
aggccaaggugggaggau

SEQ ID NO: 3076960 - RNA, 19 nt, Human
uggaugccugguggcagcu

SEQ ID NO: 3076961 - RNA, 18 nt, Human
uggaugccugguggcagc

SEQ ID NO: 3076962 - RNA, 16 nt, Human
uggaguucaucuugaa

SEQ ID NO: 3076963 - RNA, 17 nt, Human
uggaguucaucuugaau

SEQ ID NO: 3076964 - RNA, 20 nt, Human
uggaguucaucuugaauugu

SEQ ID NO: 3076965 - RNA, 15 nt, Human
uggaugccugguggc

SEQ ID NO: 3076966 - RNA, 15 nt, Human
aggccacaagacccu

SEQ ID NO: 3076967 - RNA, 20 nt, Human
aggccacaagacccuugugg

SEQ ID NO: 3076968 - RNA, 12 nt, Human
uggcagccccug

SEQ ID NO: 3076969 - RNA, 18 nt, Human
uggcaccagcagccugga

SEQ ID NO: 3076970 - RNA, 20 nt, Human
uggcacaucagcacgauuuc

SEQ ID NO: 3076971 - RNA, 22 nt, Human
uggcacaguuuucugagaaaga

SEQ ID NO: 3076972 - RNA, 22 nt, Human
uggauuaaacuuaaucuaaaug

SEQ ID NO: 3076973 - RNA, 20 nt, Human
uggcacaguuuucugagaaa

SEQ ID NO: 3076974 - RNA, 12 nt, Human
uggauguucuga

SEQ ID NO: 3076975 - RNA, 21 nt, Human
uggcagaguugaagacagagc

SEQ ID NO: 3076976 - RNA, 15 nt, Human
uggcacccggccccu

SEQ ID NO: 3076977 - RNA, 22 nt, Human
uggcagaguugaagacagagcu

SEQ ID NO: 3076978 - RNA, 20 nt, Human
uggccccugcccggcugcgg

SEQ ID NO: 3076979 - RNA, 21 nt, Human
uggccccugcccggcugcgga

SEQ ID NO: 3076980 - RNA, 23 nt, Human
uggccgggaccccgagccuggcu

SEQ ID NO: 3076981 - RNA, 17 nt, Human
uggccgggaccccgagc

SEQ ID NO: 3076982 - RNA, 15 nt, Human
uggccgggaccccga

SEQ ID NO: 3076983 - RNA, 14 nt, Human
uggccucugcacuc

SEQ ID NO: 3076984 - RNA, 15 nt, Human
uggccucugcacucc

SEQ ID NO: 3076985 - RNA, 17 nt, Human
uggccucugcacucccc

SEQ ID NO: 3076986 - RNA, 13 nt, Human
uggccucugcacu

SEQ ID NO: 3076987 - RNA, 21 nt, Human
aggccuggccagaugcaccag

SEQ ID NO: 3076988 - RNA, 17 nt, Human
aggccuggccagaugca

SEQ ID NO: 3076989 - RNA, 16 nt, Human
aggccuggccagaugc

SEQ ID NO: 3076990 - RNA, 15 nt, Human
aggccuggccagaug

SEQ ID NO: 3076991 - RNA, 23 nt, Human
aggccugggggcugggcagagga

SEQ ID NO: 3076992 - RNA, 23 nt, Human
aggccuggccagaugcaccagcc

SEQ ID NO: 3076993 - RNA, 22 nt, Human
aggccuggccagaugcaccagc

SEQ ID NO: 3076994 - RNA, 13 nt, Human
aggcccucugccc

SEQ ID NO: 3076995 - RNA, 14 nt, Human
aggcccucugccca

SEQ ID NO: 3076996 - RNA, 12 nt, Human
uggcaugggaau

SEQ ID NO: 3076997 - RNA, 15 nt, Human
uggcaugggaaugaa

SEQ ID NO: 3076998 - RNA, 17 nt, Human
uggccaggcuggucuca

SEQ ID NO: 3076999 - RNA, 15 nt, Human
uggccaggcuggucu

SEQ ID NO: 3077000 - RNA, 19 nt, Human
aggagcccugggaggcucu

SEQ ID NO: 3077001 - RNA, 17 nt, Human
aggagccuccugcccuu

SEQ ID NO: 3077002 - RNA, 21 nt, Human
ugcuuggaggaaggaaaccca

SEQ ID NO: 3077003 - RNA, 12 nt, Human
ugcuugggcuuc

SEQ ID NO: 3077004 - RNA, 16 nt, Human
ugcuugggcuucaucc

SEQ ID NO: 3077005 - RNA, 19 nt, Human
ugcuugggcuucauccucc

SEQ ID NO: 3077006 - RNA, 17 nt, Human
ugcuuuuaaaaaaaaau

SEQ ID NO: 3077007 - RNA, 15 nt, Human
uggaaauauuaagaa

SEQ ID NO: 3077008 - RNA, 18 nt, Human
aggagcccugggaggcuc

SEQ ID NO: 3077009 - RNA, 22 nt, Human
aggagccccgaggccuucucug

SEQ ID NO: 3077010 - RNA, 14 nt, Human
aggagcagccacau

SEQ ID NO: 3077011 - RNA, 23 nt, Human
aggacuuuucuuuguggcuuccu

SEQ ID NO: 3077012 - RNA, 11 nt, Human
aggagaaacug

SEQ ID NO: 3077013 - RNA, 17 nt, Human
aggagauuggaaggaac

SEQ ID NO: 3077014 - RNA, 18 nt, Human
aggacauugcggacagcc

SEQ ID NO: 3077015 - RNA, 17 nt, Human
aggacauugcggacagc

SEQ ID NO: 3077016 - RNA, 15 nt, Human
aggacauugcggaca

SEQ ID NO: 3077017 - RNA, 23 nt, Human
aggacauugcggacagccacggc

SEQ ID NO: 3077018 - RNA, 19 nt, Human
aggacauugcggacagcca

SEQ ID NO: 3077019 - RNA, 19 nt, Human
aggacugaauuaugaaacu

SEQ ID NO: 3077020 - RNA, 20 nt, Human
aggacugaauuaugaaacuu

SEQ ID NO: 3077021 - RNA, 18 nt, Human
uggaauuggagcucgugg

SEQ ID NO: 3077022 - RNA, 17 nt, Human
aggcaacucaucuuagg

SEQ ID NO: 3077023 - RNA, 20 nt, Human
aggaugaucuaggaagacuu

SEQ ID NO: 3077024 - RNA, 14 nt, Human
aggaugcccaaaga

SEQ ID NO: 3077025 - RNA, 19 nt, Human
aggaugcccaaagaugcag

SEQ ID NO: 3077026 - RNA, 19 nt, Human
aggauuuugauccaagcug

SEQ ID NO: 3077027 - RNA, 16 nt, Human
uggacacagcucuucu

SEQ ID NO: 3077028 - RNA, 15 nt, Human
uggacacagcucuuc

SEQ ID NO: 3077029 - RNA, 18 nt, Human
uggacacagcucuucucc

SEQ ID NO: 3077030 - RNA, 14 nt, Human
uggacccugaggcc

SEQ ID NO: 3077031 - RNA, 12 nt, Human
uggacccugagg

SEQ ID NO: 3077032 - RNA, 13 nt, Human
uggacccugaggc

SEQ ID NO: 3077033 - RNA, 23 nt, Human
uggaaaugggcagagcagagacc

SEQ ID NO: 3077034 - RNA, 18 nt, Human
uggaaaugggcagagcag

SEQ ID NO: 3077035 - RNA, 20 nt, Human
uggaaauauuaagaaagacu

SEQ ID NO: 3077036 - RNA, 21 nt, Human
aggaucucuugagccugggag

SEQ ID NO: 3077037 - RNA, 22 nt, Human
aggaucucuugagccugggagg

SEQ ID NO: 3077038 - RNA, 17 nt, Human
aggauccugagccagau

SEQ ID NO: 3077039 - RNA, 18 nt, Human
aggauccugagccagauu

SEQ ID NO: 3077040 - RNA, 16 nt, Human
aggaugaucuaggaag

SEQ ID NO: 3077041 - RNA, 17 nt, Human
aggaugaucuaggaaga

SEQ ID NO: 3077042 - RNA, 15 nt, Human
aggauccugagccag

SEQ ID NO: 3077043 - RNA, 16 nt, Human
aggauccugagccaga

SEQ ID NO: 3077044 - RNA, 21 nt, Human
aggauacaaaagcaugugaga

SEQ ID NO: 3077045 - RNA, 19 nt, Human
aggacacuaaccacgcugg

SEQ ID NO: 3077046 - RNA, 23 nt, Human
aggacacuaaccacgcuggaccu

SEQ ID NO: 3077047 - RNA, 14 nt, Human
aggacacugauaug

SEQ ID NO: 3077048 - RNA, 22 nt, Human
aggacagggaggugaccccagg

SEQ ID NO: 3077049 - RNA, 23 nt, Human
aggacagcccuucuuuccacaga

SEQ ID NO: 3077050 - RNA, 16 nt, Human
ugcuucaaggauccug

SEQ ID NO: 3077051 - RNA, 18 nt, Human
ugcuucaaggauccugag

SEQ ID NO: 3077052 - RNA, 19 nt, Human
ugcuucaaggauccugagc

SEQ ID NO: 3077053 - RNA, 14 nt, Human
ugcuucagccuccc

SEQ ID NO: 3077054 - RNA, 13 nt, Human
ugcuucagccucc

SEQ ID NO: 3077055 - RNA, 12 nt, Human
ugcuucaaggau

SEQ ID NO: 3077056 - RNA, 13 nt, Human
ugcuuauacacuu

SEQ ID NO: 3077057 - RNA, 15 nt, Human
ugcugcccugugagu

SEQ ID NO: 3077058 - RNA, 13 nt, Human
ugcuggagcucug

SEQ ID NO: 3077059 - RNA, 14 nt, Human
ugcuggagcucugc

SEQ ID NO: 3077060 - RNA, 13 nt, Human
ugcugcccuguga

SEQ ID NO: 3077061 - RNA, 14 nt, Human
ugcugcccugugag

SEQ ID NO: 3077062 - RNA, 12 nt, Human
ugcugcccugug

SEQ ID NO: 3077063 - RNA, 16 nt, Human
ugcuggcugguuagag

SEQ ID NO: 3077064 - RNA, 18 nt, Human
ugcuguaacuuucugaaa

SEQ ID NO: 3077065 - RNA, 23 nt, Human
ugcuguauuuuaaaagaaugauu

SEQ ID NO: 3077066 - RNA, 23 nt, Human
aggaauuguguuuauaauuuuaa

SEQ ID NO: 3077067 - RNA, 11 nt, Human
aggaauuuaaa

SEQ ID NO: 3077068 - RNA, 23 nt, Human
aggaauugacccacaagaaauga

SEQ ID NO: 3077069 - RNA, 19 nt, Human
aggaaggaaacccagcucu

SEQ ID NO: 3077070 - RNA, 15 nt, Human
aggaaggagaggaga

SEQ ID NO: 3077071 - RNA, 17 nt, Human
aggaagccagcaggcuc

SEQ ID NO: 3077072 - RNA, 13 nt, Human
aggaagccagcag

SEQ ID NO: 3077073 - RNA, 18 nt, Human
aggaaggaaacccagcuc

SEQ ID NO: 3077074 - RNA, 18 nt, Human
aggaagcugugagagcag

SEQ ID NO: 3077075 - RNA, 16 nt, Human
ugcugagucugaaggc

SEQ ID NO: 3077076 - RNA, 17 nt, Human
ugcugagucugaaggcu

SEQ ID NO: 3077077 - RNA, 18 nt, Human
ugcugagucugaaggcug

SEQ ID NO: 3077078 - RNA, 21 nt, Human
ugcugagucugaaggcugggu

SEQ ID NO: 3077079 - RNA, 22 nt, Human
ugcugagucugaaggcuggguu

SEQ ID NO: 3077080 - RNA, 13 nt, Human
aggaagacuucau

SEQ ID NO: 3077081 - RNA, 19 nt, Human
aggaagacuucaucccucu

SEQ ID NO: 3077082 - RNA, 13 nt, Human
aggaagacuuugg

SEQ ID NO: 3077083 - RNA, 14 nt, Human
aggaagacuuugga

SEQ ID NO: 3077084 - RNA, 23 nt, Human
aggaagcacaugccucucucagg

SEQ ID NO: 3077085 - RNA, 24 nt, Human
aggaagcacaugccucucucaggc

SEQ ID NO: 3077086 - RNA, 14 nt, Human
aggaagccagcagg

SEQ ID NO: 3077087 - RNA, 15 nt, Human
aggaagccagcaggc

SEQ ID NO: 3077088 - RNA, 22 nt, Human
aggaagcacaugccucucucag

SEQ ID NO: 3077089 - RNA, 19 nt, Human
agcugggacuacaggcacc

SEQ ID NO: 3077090 - RNA, 18 nt, Human
agcugggacuacaggcac

SEQ ID NO: 3077091 - RNA, 16 nt, Human
agcugggacuacaggc

SEQ ID NO: 3077092 - RNA, 16 nt, Human
ugcuccagcuguucag

SEQ ID NO: 3077093 - RNA, 19 nt, Human
ugcuccagcuguucagcug

SEQ ID NO: 3077094 - RNA, 16 nt, Human
ugcucccaccuggcuc

SEQ ID NO: 3077095 - RNA, 18 nt, Human
ugcucccaccuggcucug

SEQ ID NO: 3077096 - RNA, 17 nt, Human
ugcucccaccuggcucu

SEQ ID NO: 3077097 - RNA, 22 nt, Human
ugcucugcugacagacacaggc

SEQ ID NO: 3077098 - RNA, 21 nt, Human
ugcucugcugacagacacagg

SEQ ID NO: 3077099 - RNA, 15 nt, Human
ugcugagucugaagg

SEQ ID NO: 3077100 - RNA, 14 nt, Human
ugcugagucugaag

SEQ ID NO: 3077101 - RNA, 16 nt, Human
ugcucugcugacagac

SEQ ID NO: 3077102 - RNA, 15 nt, Human
aguuucguuuucaaa

SEQ ID NO: 3077103 - RNA, 16 nt, Human
aguuucguuuucaaaa

SEQ ID NO: 3077104 - RNA, 13 nt, Human
aguuucuccaagc

SEQ ID NO: 3077105 - RNA, 15 nt, Human
aguuucuccaagcag

SEQ ID NO: 3077106 - RNA, 21 nt, Human
aguuucuccaagcaggacaug

SEQ ID NO: 3077107 - RNA, 13 nt, Human
uuaaauucuugca

SEQ ID NO: 3077108 - RNA, 16 nt, Human
uuaaauucuugcaaag

SEQ ID NO: 3077109 - RNA, 22 nt, Human
aguuuucacucuuauugcccac

SEQ ID NO: 3077110 - RNA, 16 nt, Human
aguuugguuucuagca

SEQ ID NO: 3077111 - RNA, 22 nt, Human
aguugcauagguuuaauaauuu

SEQ ID NO: 3077112 - RNA, 20 nt, Human
aguugccagucaccccggcc

SEQ ID NO: 3077113 - RNA, 15 nt, Human
uuaaaaaagaaacau

SEQ ID NO: 3077114 - RNA, 18 nt, Human
uuaaaaaagaaacauuug

SEQ ID NO: 3077115 - RNA, 17 nt, Human
uuaaaacaacacucaca

SEQ ID NO: 3077116 - RNA, 20 nt, Human
uuaaaaaugguuuaaauggu

SEQ ID NO: 3077117 - RNA, 18 nt, Human
uuaaaaaguggaaaaaua

SEQ ID NO: 3077118 - RNA, 17 nt, Human
uuaaaccgccaaggcug

SEQ ID NO: 3077119 - RNA, 21 nt, Human
uuaaauaaugugaaacuggau

SEQ ID NO: 3077120 - RNA, 20 nt, Human
uuaaauaaugugaaacugga

SEQ ID NO: 3077121 - RNA, 22 nt, Human
uuaaauaaugugaaacuggauu

SEQ ID NO: 3077122 - RNA, 19 nt, Human
uuaaauaaugugaaacugg

SEQ ID NO: 3077123 - RNA, 15 nt, Human
uuaaauaaaucauaa

SEQ ID NO: 3077124 - RNA, 13 nt, Human
uuaaauaaaucau

SEQ ID NO: 3077125 - RNA, 16 nt, Human
aguucucuccuucuuc

SEQ ID NO: 3077126 - RNA, 13 nt, Human
aguucucuccuuc

SEQ ID NO: 3077127 - RNA, 12 nt, Human
aguucucuccuu

SEQ ID NO: 3077128 - RNA, 15 nt, Human
uguuuucucuugaga

SEQ ID NO: 3077129 - RNA, 14 nt, Human
uguuuuaggagcau

SEQ ID NO: 3077130 - RNA, 13 nt, Human
uguuuuauaauuu

SEQ ID NO: 3077131 - RNA, 20 nt, Human
uguuuuauaauuuugugaag

SEQ ID NO: 3077132 - RNA, 15 nt, Human
uguuuucaguguaca

SEQ ID NO: 3077133 - RNA, 15 nt, Human
uguuugcaucugaaa

SEQ ID NO: 3077134 - RNA, 14 nt, Human
uguuugccucugcc

SEQ ID NO: 3077135 - RNA, 16 nt, Human
uguuugccucugccuc

SEQ ID NO: 3077136 - RNA, 15 nt, Human
uguuugcuaagcauu

SEQ ID NO: 3077137 - RNA, 14 nt, Human
uguugucagcugaa

SEQ ID NO: 3077138 - RNA, 15 nt, Human
uguuuggggaugaga

SEQ ID NO: 3077139 - RNA, 19 nt, Human
uguuugcuaagcauuccaa

SEQ ID NO: 3077140 - RNA, 19 nt, Human
aguugcaacuuuguauaaa

SEQ ID NO: 3077141 - RNA, 23 nt, Human
aguugauucagcucugcaagaau

SEQ ID NO: 3077142 - RNA, 14 nt, Human
aguugauucagcuc

SEQ ID NO: 3077143 - RNA, 15 nt, Human
aguugauucagcucu

SEQ ID NO: 3077144 - RNA, 17 nt, Human
aguugauucagcucugc

SEQ ID NO: 3077145 - RNA, 18 nt, Human
aguugauucagcucugca

SEQ ID NO: 3077146 - RNA, 22 nt, Human
aguugauagcacagacccugcc

SEQ ID NO: 3077147 - RNA, 23 nt, Human
aguugauagcacagacccugccc

SEQ ID NO: 3077148 - RNA, 21 nt, Human
aguugauaugccuuuucccaa

SEQ ID NO: 3077149 - RNA, 13 nt, Human
aguugauucagcu

SEQ ID NO: 3077150 - RNA, 15 nt, Human
aguugauagcacaga

SEQ ID NO: 3077151 - RNA, 19 nt, Human
aguugauagcacagacccu

SEQ ID NO: 3077152 - RNA, 20 nt, Human
aguugauagcacagacccug

SEQ ID NO: 3077153 - RNA, 21 nt, Human
aguugauagcacagacccugc

SEQ ID NO: 3077154 - RNA, 14 nt, Human
aguugauagcacag

SEQ ID NO: 3077155 - RNA, 15 nt, Human
aguucugaagaagau

SEQ ID NO: 3077156 - RNA, 13 nt, Human
aguucugaagaag

SEQ ID NO: 3077157 - RNA, 14 nt, Human
aguucugaagaaga

SEQ ID NO: 3077158 - RNA, 20 nt, Human
aguuauuauauuuacaaaug

SEQ ID NO: 3077159 - RNA, 19 nt, Human
aguuauggcuauaggugcu

SEQ ID NO: 3077160 - RNA, 17 nt, Human
aguuauugauaaguuca

SEQ ID NO: 3077161 - RNA, 19 nt, Human
aguuauugauaaguucaua

SEQ ID NO: 3077162 - RNA, 21 nt, Human
aguuauugauaaguucauaca

SEQ ID NO: 3077163 - RNA, 22 nt, Human
aguuauugauaaguucauacau

SEQ ID NO: 3077164 - RNA, 23 nt, Human
aguuauugauaaguucauacauu

SEQ ID NO: 3077165 - RNA, 18 nt, Human
uguucuuuccaaaguaca

SEQ ID NO: 3077166 - RNA, 18 nt, Human
aguuacccaaauuaagag

SEQ ID NO: 3077167 - RNA, 17 nt, Human
aguuacccaaauuaaga

SEQ ID NO: 3077168 - RNA, 20 nt, Human
aguucggugagcuacaaaug

SEQ ID NO: 3077169 - RNA, 21 nt, Human
aguuauuuuuauuuauuuaaa

SEQ ID NO: 3077170 - RNA, 15 nt, Human
aguucuaaauuuugu

SEQ ID NO: 3077171 - RNA, 13 nt, Human
uguugggccagga

SEQ ID NO: 3077172 - RNA, 16 nt, Human
uguugggccaggagcc

SEQ ID NO: 3077173 - RNA, 13 nt, Human
uguugucagcuga

SEQ ID NO: 3077174 - RNA, 13 nt, Human
uguucugggacac

SEQ ID NO: 3077175 - RNA, 12 nt, Human
uguucugggaca

SEQ ID NO: 3077176 - RNA, 16 nt, Human
uguucuuaauucuuag

SEQ ID NO: 3077177 - RNA, 14 nt, Human
uguucuuaauucuu

SEQ ID NO: 3077178 - RNA, 15 nt, Human
uguucugggacacag

SEQ ID NO: 3077179 - RNA, 14 nt, Human
uguucugggacaca

SEQ ID NO: 3077180 - RNA, 18 nt, Human
uguucuugguuuguaaau

SEQ ID NO: 3077181 - RNA, 17 nt, Human
uguucuugguuuguaaa

SEQ ID NO: 3077182 - RNA, 14 nt, Human
uguucuuuccaaag

SEQ ID NO: 3077183 - RNA, 13 nt, Human
uguucuuuccaaa

SEQ ID NO: 3077184 - RNA, 19 nt, Human
uguucuuucacccuuuucu

SEQ ID NO: 3077185 - RNA, 23 nt, Human
aguguacauggaauaacauguaa

SEQ ID NO: 3077186 - RNA, 22 nt, Human
aguguacauggaauaacaugua

SEQ ID NO: 3077187 - RNA, 21 nt, Human
aguguacauggaauaacaugu

SEQ ID NO: 3077188 - RNA, 21 nt, Human
agugguuccuaauccucuagg

SEQ ID NO: 3077189 - RNA, 19 nt, Human
agugggugaauaauacagu

SEQ ID NO: 3077190 - RNA, 20 nt, Human
aguggcagcugcuuuugucu

SEQ ID NO: 3077191 - RNA, 14 nt, Human
aguggcagcugcuu

SEQ ID NO: 3077192 - RNA, 13 nt, Human
aguggcagcugcu

SEQ ID NO: 3077193 - RNA, 12 nt, Human
aguggcagcugc

SEQ ID NO: 3077194 - RNA, 11 nt, Human
aguggcagcug

SEQ ID NO: 3077195 - RNA, 13 nt, Human
agugggugaauaa

SEQ ID NO: 3077196 - RNA, 18 nt, Human
agugggugaauaauacag

SEQ ID NO: 3077197 - RNA, 19 nt, Human
agugggggaguggccacag

SEQ ID NO: 3077198 - RNA, 20 nt, Human
agugggggaguggccacaga

SEQ ID NO: 3077199 - RNA, 17 nt, Human
uuaucaugugaaaucau

SEQ ID NO: 3077200 - RNA, 20 nt, Human
uuaucaugugaaaucauuca

SEQ ID NO: 3077201 - RNA, 18 nt, Human
uuaucaugugaaaucauu

SEQ ID NO: 3077202 - RNA, 22 nt, Human
uuaucaugugaaaucauucauu

SEQ ID NO: 3077203 - RNA, 22 nt, Human
uuaucaaagggugaaaauuauu

SEQ ID NO: 3077204 - RNA, 19 nt, Human
auaccagccaguaaauggg

SEQ ID NO: 3077205 - RNA, 17 nt, Human
auaccagccaguaaaug

SEQ ID NO: 3077206 - RNA, 21 nt, Human
auacuaaccagcagaaaugcc

SEQ ID NO: 3077207 - RNA, 20 nt, Human
auacuacaguuuguuaguau

SEQ ID NO: 3077208 - RNA, 16 nt, Human
auacuacaguuuguua

SEQ ID NO: 3077209 - RNA, 15 nt, Human
auacuacaguuuguu

SEQ ID NO: 3077210 - RNA, 13 nt, Human
auacuacaguuug

SEQ ID NO: 3077211 - RNA, 15 nt, Human
auacaggucauauua

SEQ ID NO: 3077212 - RNA, 21 nt, Human
auacaggucauauuaauauau

SEQ ID NO: 3077213 - RNA, 21 nt, Human
auacaguucggugagcuacaa

SEQ ID NO: 3077214 - RNA, 20 nt, Human
auacaggaaaagcugcugac

SEQ ID NO: 3077215 - RNA, 19 nt, Human
auacaggaaaagcugcuga

SEQ ID NO: 3077216 - RNA, 14 nt, Human
auacaggaaaagcu

SEQ ID NO: 3077217 - RNA, 19 nt, Human
auacauauuuuuguagcac

SEQ ID NO: 3077218 - RNA, 20 nt, Human
auacaucccuuaccugggaa

SEQ ID NO: 3077219 - RNA, 14 nt, Human
auacauuguacgaa

SEQ ID NO: 3077220 - RNA, 21 nt, Human
auacauuguacgaagaguauu

SEQ ID NO: 3077221 - RNA, 22 nt, Human
auacauuguacgaagaguauuu

SEQ ID NO: 3077222 - RNA, 16 nt, Human
auacauuugauaaagu

SEQ ID NO: 3077223 - RNA, 14 nt, Human
uuauauaaguauuc

SEQ ID NO: 3077224 - RNA, 16 nt, Human
uuauauaaguauucua

SEQ ID NO: 3077225 - RNA, 13 nt, Human
uuauauaaguauu

SEQ ID NO: 3077226 - RNA, 18 nt, Human
uuauauaagcuuguauuc

SEQ ID NO: 3077227 - RNA, 21 nt, Human
auaauuuuaagaaaucaaaga

SEQ ID NO: 3077228 - RNA, 15 nt, Human
auaauuuuaagaaau

SEQ ID NO: 3077229 - RNA, 14 nt, Human
auaauuuuaagaaa

SEQ ID NO: 3077230 - RNA, 22 nt, Human
uuauauauauuuuuuucugaaa

SEQ ID NO: 3077231 - RNA, 15 nt, Human
auacaaaagcaugug

SEQ ID NO: 3077232 - RNA, 13 nt, Human
auacaaaagcaug

SEQ ID NO: 3077233 - RNA, 12 nt, Human
auacaaaagcau

SEQ ID NO: 3077234 - RNA, 22 nt, Human
auacaaaaaaaaaaaaaaauua

SEQ ID NO: 3077235 - RNA, 21 nt, Human
auaauuuuuauauuugaaaua

SEQ ID NO: 3077236 - RNA, 22 nt, Human
auaauuuuuauauuugaaauau

SEQ ID NO: 3077237 - RNA, 14 nt, Human
auaauuuuuauauu

SEQ ID NO: 3077238 - RNA, 16 nt, Human
auaauuuuuauauuug

SEQ ID NO: 3077239 - RNA, 19 nt, Human
auaauuuuuauauuugaaa

SEQ ID NO: 3077240 - RNA, 13 nt, Human
auaauuuugugaa

SEQ ID NO: 3077241 - RNA, 14 nt, Human
auaauuuugugaag

SEQ ID NO: 3077242 - RNA, 15 nt, Human
auaauuuugugaagc

SEQ ID NO: 3077243 - RNA, 20 nt, Human
auaauuuugugaagcaaaau

SEQ ID NO: 3077244 - RNA, 23 nt, Human
uuauagaguguacuuaacuauuc

SEQ ID NO: 3077245 - RNA, 18 nt, Human
uuauacccagaaaguuau

SEQ ID NO: 3077246 - RNA, 19 nt, Human
uuauacccagaaaguuauu

SEQ ID NO: 3077247 - RNA, 23 nt, Human
uuauacccagaaaguuauugaua

SEQ ID NO: 3077248 - RNA, 13 nt, Human
uuauacauaaaca

SEQ ID NO: 3077249 - RNA, 21 nt, Human
uuagccguggugauuuagcag

SEQ ID NO: 3077250 - RNA, 20 nt, Human
auaaucagugugucuaaauu

SEQ ID NO: 3077251 - RNA, 21 nt, Human
auaaucuuucacaggggacag

SEQ ID NO: 3077252 - RNA, 19 nt, Human
auaauacaguaucucaggg

SEQ ID NO: 3077253 - RNA, 14 nt, Human
auaaugaauacuuu

SEQ ID NO: 3077254 - RNA, 14 nt, Human
auaauucuacuuug

SEQ ID NO: 3077255 - RNA, 18 nt, Human
uuagcaggaagcugugag

SEQ ID NO: 3077256 - RNA, 23 nt, Human
uuagaugcaguucugaagaagau

SEQ ID NO: 3077257 - RNA, 22 nt, Human
uuagaugcaguucugaagaaga

SEQ ID NO: 3077258 - RNA, 11 nt, Human
auaaguucaua

SEQ ID NO: 3077259 - RNA, 13 nt, Human
auaaguucauaca

SEQ ID NO: 3077260 - RNA, 14 nt, Human
auaaguucauacau

SEQ ID NO: 3077261 - RNA, 15 nt, Human
auaaguucauacauu

SEQ ID NO: 3077262 - RNA, 21 nt, Human
auaaguucauacauuguacga

SEQ ID NO: 3077263 - RNA, 22 nt, Human
auaaguuaacuuccaauuuaca

SEQ ID NO: 3077264 - RNA, 21 nt, Human
auaauacaccacuacauucug

SEQ ID NO: 3077265 - RNA, 23 nt, Human
auaauacaccacuacauucuguu

SEQ ID NO: 3077266 - RNA, 22 nt, Human
auaagaaccuuuugagugccuu

SEQ ID NO: 3077267 - RNA, 17 nt, Human
auaaguuaacuuccaau

SEQ ID NO: 3077268 - RNA, 23 nt, Human
auaagaaccuuuugagugccuua

SEQ ID NO: 3077269 - RNA, 18 nt, Human
auaaacacucuugaaaaa

SEQ ID NO: 3077270 - RNA, 16 nt, Human
auaaaccucaaaaugu

SEQ ID NO: 3077271 - RNA, 16 nt, Human
auaaaccgaacugaug

SEQ ID NO: 3077272 - RNA, 23 nt, Human
auaaacacucuugaaaaaugcau

SEQ ID NO: 3077273 - RNA, 17 nt, Human
aguuuucugagaaagac

SEQ ID NO: 3077274 - RNA, 14 nt, Human
aguuuucugagaaa

SEQ ID NO: 3077275 - RNA, 13 nt, Human
aguuuucugagaa

SEQ ID NO: 3077276 - RNA, 12 nt, Human
aguuuucugaga

SEQ ID NO: 3077277 - RNA, 15 nt, Human
auaaacucauuucua

SEQ ID NO: 3077278 - RNA, 18 nt, Human
auaaacgucuuaaauauu

SEQ ID NO: 3077279 - RNA, 15 nt, Human
auaaacgucuuaaau

SEQ ID NO: 3077280 - RNA, 16 nt, Human
auaaacgucuuaaaua

SEQ ID NO: 3077281 - RNA, 15 nt, Human
auaaacuuuaccuuu

SEQ ID NO: 3077282 - RNA, 13 nt, Human
auaaacuuuaccu

SEQ ID NO: 3077283 - RNA, 14 nt, Human
auaaauaaaaauaa

SEQ ID NO: 3077284 - RNA, 12 nt, Human
auaacugugaag

SEQ ID NO: 3077285 - RNA, 15 nt, Human
uuacaggaaguacug

SEQ ID NO: 3077286 - RNA, 16 nt, Human
uuacaggaaguacugg

SEQ ID NO: 3077287 - RNA, 18 nt, Human
uuacaggaaguacuggag

SEQ ID NO: 3077288 - RNA, 22 nt, Human
uuacaggaaguacuggagaaaa

SEQ ID NO: 3077289 - RNA, 23 nt, Human
uuaccauuuugggguacccacug

SEQ ID NO: 3077290 - RNA, 19 nt, Human
auaaauaaaguuuguugaa

SEQ ID NO: 3077291 - RNA, 13 nt, Human
auaaauaaaguuu

SEQ ID NO: 3077292 - RNA, 19 nt, Human
auaaaugugccuucauuuu

SEQ ID NO: 3077293 - RNA, 20 nt, Human
auaacauguaauuaaguacu

SEQ ID NO: 3077294 - RNA, 12 nt, Human
auaacuggaaac

SEQ ID NO: 3077295 - RNA, 15 nt, Human
uguacuugcucuuga

SEQ ID NO: 3077296 - RNA, 21 nt, Human
uguagaagucacauuccugaa

SEQ ID NO: 3077297 - RNA, 15 nt, Human
uguacuuaacuauuc

SEQ ID NO: 3077298 - RNA, 18 nt, Human
uguacaugaaaacacauu

SEQ ID NO: 3077299 - RNA, 17 nt, Human
uguacaugaaaacacau

SEQ ID NO: 3077300 - RNA, 19 nt, Human
uguacaugaaaacacauuu

SEQ ID NO: 3077301 - RNA, 15 nt, Human
uguaaggcaaucaug

SEQ ID NO: 3077302 - RNA, 16 nt, Human
uguaauuugugauaca

SEQ ID NO: 3077303 - RNA, 18 nt, Human
uguaaggaaugauuaauu

SEQ ID NO: 3077304 - RNA, 21 nt, Human
uguaauuugugauacaaugcu

SEQ ID NO: 3077305 - RNA, 17 nt, Human
uguaauuugugauacaa

SEQ ID NO: 3077306 - RNA, 14 nt, Human
uguacauauaagug

SEQ ID NO: 3077307 - RNA, 23 nt, Human
uguacaaaguagaagucuuagau

SEQ ID NO: 3077308 - RNA, 19 nt, Human
uguacaaaguagaagucuu

SEQ ID NO: 3077309 - RNA, 14 nt, Human
aggugugagucacc

SEQ ID NO: 3077310 - RNA, 20 nt, Human
aggugugacugaauuucuuu

SEQ ID NO: 3077311 - RNA, 22 nt, Human
aggugugaaccaccacacccag

SEQ ID NO: 3077312 - RNA, 18 nt, Human
aggugugacugaauuucu

SEQ ID NO: 3077313 - RNA, 23 nt, Human
aggugugaaccaccacacccagc

SEQ ID NO: 3077314 - RNA, 13 nt, Human
agguggggcagcu

SEQ ID NO: 3077315 - RNA, 23 nt, Human
agguggggucacucuggcagcuc

SEQ ID NO: 3077316 - RNA, 14 nt, Human
agguggggcagcuu

SEQ ID NO: 3077317 - RNA, 22 nt, Human
uguaagcucuacugaggugcua

SEQ ID NO: 3077318 - RNA, 17 nt, Human
uguaagaaaauaucacu

SEQ ID NO: 3077319 - RNA, 18 nt, Human
uguaagaaaauaucacuu

SEQ ID NO: 3077320 - RNA, 14 nt, Human
uguaaggaaugauu

SEQ ID NO: 3077321 - RNA, 15 nt, Human
uguaaggaaugauua

SEQ ID NO: 3077322 - RNA, 13 nt, Human
uguaaggaaugau

SEQ ID NO: 3077323 - RNA, 14 nt, Human
ugguuauggagagg

SEQ ID NO: 3077324 - RNA, 15 nt, Human
ugguguuuccuggca

SEQ ID NO: 3077325 - RNA, 17 nt, Human
ugguguuuccuggcacu

SEQ ID NO: 3077326 - RNA, 22 nt, Human
ugguucaggguuggccccugcc

SEQ ID NO: 3077327 - RNA, 20 nt, Human
ugguucaggguuggccccug

SEQ ID NO: 3077328 - RNA, 23 nt, Human
ugguucaggguuggccccugccc

SEQ ID NO: 3077329 - RNA, 12 nt, Human
ugguggcagcug

SEQ ID NO: 3077330 - RNA, 23 nt, Human
uggugugaccacugcagaagaca

SEQ ID NO: 3077331 - RNA, 15 nt, Human
ugguggcagagugga

SEQ ID NO: 3077332 - RNA, 12 nt, Human
ugguggcagcuc

SEQ ID NO: 3077333 - RNA, 16 nt, Human
ugguggcagcucaccu

SEQ ID NO: 3077334 - RNA, 19 nt, Human
ugguggcagcucaccucuc

SEQ ID NO: 3077335 - RNA, 20 nt, Human
ugguggcagcucaccucucc

SEQ ID NO: 3077336 - RNA, 23 nt, Human
ugguggcagcucaccucucccuu

SEQ ID NO: 3077337 - RNA, 18 nt, Human
ugguuuuaguugcaacuu

SEQ ID NO: 3077338 - RNA, 12 nt, Human
ugguuuucuguu

SEQ ID NO: 3077339 - RNA, 21 nt, Human
ugguuuguaaauuaacuuuua

SEQ ID NO: 3077340 - RNA, 15 nt, Human
ugguuucagaaaugu

SEQ ID NO: 3077341 - RNA, 14 nt, Human
ugguuucagaaaug

SEQ ID NO: 3077342 - RNA, 15 nt, Human
ugguuucuagcauga

SEQ ID NO: 3077343 - RNA, 15 nt, Human
ugguuuucuguucuu

SEQ ID NO: 3077344 - RNA, 13 nt, Human
ugguuuucuguuc

SEQ ID NO: 3077345 - RNA, 23 nt, Human
aggugauccacccaccucagccu

SEQ ID NO: 3077346 - RNA, 21 nt, Human
aggugauccacccaccucagc

SEQ ID NO: 3077347 - RNA, 17 nt, Human
aggguugggcugguguc

SEQ ID NO: 3077348 - RNA, 20 nt, Human
aggguuuauguuuaggaugu

SEQ ID NO: 3077349 - RNA, 15 nt, Human
aggucagugcaaaua

SEQ ID NO: 3077350 - RNA, 21 nt, Human
aggucaaggcugcagugagcc

SEQ ID NO: 3077351 - RNA, 23 nt, Human
aggucauuuuuuuuaagaaaaag

SEQ ID NO: 3077352 - RNA, 22 nt, Human
aggucauuuuuuuuaagaaaaa

SEQ ID NO: 3077353 - RNA, 21 nt, Human
aggucuugaacuccuggccuc

SEQ ID NO: 3077354 - RNA, 20 nt, Human
aggucuugaacuccuggccu

SEQ ID NO: 3077355 - RNA, 20 nt, Human
aggucauuuuuuuuaagaaa

SEQ ID NO: 3077356 - RNA, 18 nt, Human
aggucuugaacuccuggc

SEQ ID NO: 3077357 - RNA, 18 nt, Human
uggucugacccacugcuu

SEQ ID NO: 3077358 - RNA, 16 nt, Human
uggucuuauuuguaaa

SEQ ID NO: 3077359 - RNA, 12 nt, Human
uggucuguguga

SEQ ID NO: 3077360 - RNA, 22 nt, Human
uggucugugagaugcuagaacu

SEQ ID NO: 3077361 - RNA, 22 nt, Human
ugguccaugggccauaugaaaa

SEQ ID NO: 3077362 - RNA, 19 nt, Human
ugguccauagagagcaaga

SEQ ID NO: 3077363 - RNA, 19 nt, Human
aggguggugaccucugccu

SEQ ID NO: 3077364 - RNA, 17 nt, Human
aggguuaugauuaagua

SEQ ID NO: 3077365 - RNA, 18 nt, Human
aggguggugaccucugcc

SEQ ID NO: 3077366 - RNA, 17 nt, Human
aggguggugaccucugc

SEQ ID NO: 3077367 - RNA, 19 nt, Human
uggugaacagaacaaaagg

SEQ ID NO: 3077368 - RNA, 15 nt, Human
aggguugggcuggug

SEQ ID NO: 3077369 - RNA, 13 nt, Human
aggguugggcugg

SEQ ID NO: 3077370 - RNA, 14 nt, Human
aggguuggccccug

SEQ ID NO: 3077371 - RNA, 13 nt, Human
aggguuggccccu

SEQ ID NO: 3077372 - RNA, 16 nt, Human
aggggaauugaggaca

SEQ ID NO: 3077373 - RNA, 13 nt, Human
agggggcugggac

SEQ ID NO: 3077374 - RNA, 16 nt, Human
aggguaucaggugcug

SEQ ID NO: 3077375 - RNA, 19 nt, Human
aggguacuaaggaaucuuu

SEQ ID NO: 3077376 - RNA, 15 nt, Human
agggugaaaauuauu

SEQ ID NO: 3077377 - RNA, 22 nt, Human
agggugaugggaaagcauugua

SEQ ID NO: 3077378 - RNA, 21 nt, Human
agggugaugggaaagcauugu

SEQ ID NO: 3077379 - RNA, 14 nt, Human
uggguggaugccug

SEQ ID NO: 3077380 - RNA, 23 nt, Human
uggguggaugccugguggcagcu

SEQ ID NO: 3077381 - RNA, 15 nt, Human
ugguccauagagagc

SEQ ID NO: 3077382 - RNA, 16 nt, Human
ugguccauagagagca

SEQ ID NO: 3077383 - RNA, 21 nt, Human
uggucaccaaaucagcugcua

SEQ ID NO: 3077384 - RNA, 23 nt, Human
uggucaccaaaucagcugcuacu

SEQ ID NO: 3077385 - RNA, 20 nt, Human
uggucaccaaaucagcugcu

SEQ ID NO: 3077386 - RNA, 14 nt, Human
ugucaaagugguga

SEQ ID NO: 3077387 - RNA, 15 nt, Human
ugucaaaguggugag

SEQ ID NO: 3077388 - RNA, 14 nt, Human
aguagcugggacua

SEQ ID NO: 3077389 - RNA, 13 nt, Human
aguagcugggacu

SEQ ID NO: 3077390 - RNA, 16 nt, Human
ugucaaaguggugaga

SEQ ID NO: 3077391 - RNA, 19 nt, Human
ugucaaaguggugagaggc

SEQ ID NO: 3077392 - RNA, 15 nt, Human
uguagagccaggguc

SEQ ID NO: 3077393 - RNA, 12 nt, Human
uguagagccagg

SEQ ID NO: 3077394 - RNA, 23 nt, Human
agguuuggacaaaauggaauacu

SEQ ID NO: 3077395 - RNA, 15 nt, Human
uguaucccaugagcc

SEQ ID NO: 3077396 - RNA, 14 nt, Human
uguauguguaagua

SEQ ID NO: 3077397 - RNA, 21 nt, Human
aguauuuaauucauguugccu

SEQ ID NO: 3077398 - RNA, 15 nt, Human
aguauuguccagguc

SEQ ID NO: 3077399 - RNA, 16 nt, Human
aguauuguccaggucu

SEQ ID NO: 3077400 - RNA, 15 nt, Human
ugucagcauagaagu

SEQ ID NO: 3077401 - RNA, 17 nt, Human
agucacugagacagccc

SEQ ID NO: 3077402 - RNA, 15 nt, Human
agucacugagacagc

SEQ ID NO: 3077403 - RNA, 16 nt, Human
agucacugagacagcc

SEQ ID NO: 3077404 - RNA, 20 nt, Human
agucacauuccaagccucau

SEQ ID NO: 3077405 - RNA, 14 nt, Human
aguauguguaaaau

SEQ ID NO: 3077406 - RNA, 22 nt, Human
aguagcugggacuacaggcacc

SEQ ID NO: 3077407 - RNA, 21 nt, Human
aguagcugggacuacaggcac

SEQ ID NO: 3077408 - RNA, 19 nt, Human
aguagcugggacuacaggc

SEQ ID NO: 3077409 - RNA, 21 nt, Human
aguauuagaauaccacaggaa

SEQ ID NO: 3077410 - RNA, 18 nt, Human
aguauguuagugcaaauu

SEQ ID NO: 3077411 - RNA, 21 nt, Human
aguauguuagugcaaauuguc

SEQ ID NO: 3077412 - RNA, 14 nt, Human
aguauuauaccuuu

SEQ ID NO: 3077413 - RNA, 15 nt, Human
aguauuauaccuuuu

SEQ ID NO: 3077414 - RNA, 14 nt, Human
ugucuaagauagua

SEQ ID NO: 3077415 - RNA, 15 nt, Human
ugucuaagauaguaa

SEQ ID NO: 3077416 - RNA, 18 nt, Human
ugucuaaauuugaauguu

SEQ ID NO: 3077417 - RNA, 19 nt, Human
agucagggguucccuuuuu

SEQ ID NO: 3077418 - RNA, 15 nt, Human
agucagucauucaga

SEQ ID NO: 3077419 - RNA, 21 nt, Human
agucagucauucagauaugau

SEQ ID NO: 3077420 - RNA, 20 nt, Human
agucccaccuuggcugcagg

SEQ ID NO: 3077421 - RNA, 23 nt, Human
agucccaccuuggcugcagggag

SEQ ID NO: 3077422 - RNA, 21 nt, Human
agucccaccuuggcugcaggg

SEQ ID NO: 3077423 - RNA, 14 nt, Human
aguccccuguuugu

SEQ ID NO: 3077424 - RNA, 19 nt, Human
aguccccuguuuguuucug

SEQ ID NO: 3077425 - RNA, 12 nt, Human
ugucccuuuucc

SEQ ID NO: 3077426 - RNA, 16 nt, Human
ugucagccauuccugu

SEQ ID NO: 3077427 - RNA, 23 nt, Human
ugucagcuccccucggagaagag

SEQ ID NO: 3077428 - RNA, 21 nt, Human
ugucagcuccccucggagaag

SEQ ID NO: 3077429 - RNA, 20 nt, Human
ugucagcuccccucggagaa

SEQ ID NO: 3077430 - RNA, 16 nt, Human
ugugauguauucuagc

SEQ ID NO: 3077431 - RNA, 17 nt, Human
ugugauggggcccugcc

SEQ ID NO: 3077432 - RNA, 14 nt, Human
agugagagcugggu

SEQ ID NO: 3077433 - RNA, 21 nt, Human
agugagcagucaggaaagaga

SEQ ID NO: 3077434 - RNA, 22 nt, Human
agugagcacuaaggugugcucu

SEQ ID NO: 3077435 - RNA, 15 nt, Human
ugugauggggcccug

SEQ ID NO: 3077436 - RNA, 16 nt, Human
ugugauggggcccugc

SEQ ID NO: 3077437 - RNA, 16 nt, Human
agugagccgagauugu

SEQ ID NO: 3077438 - RNA, 17 nt, Human
agugaaagaaaauaaca

SEQ ID NO: 3077439 - RNA, 16 nt, Human
agugaaagaggcagcu

SEQ ID NO: 3077440 - RNA, 14 nt, Human
agugagacagcucu

SEQ ID NO: 3077441 - RNA, 22 nt, Human
agugaaagaggcagcuugaaac

SEQ ID NO: 3077442 - RNA, 17 nt, Human
agugagacucugucuca

SEQ ID NO: 3077443 - RNA, 16 nt, Human
agugagacucugucuc

SEQ ID NO: 3077444 - RNA, 22 nt, Human
agugagacucugucucaaaaaa

SEQ ID NO: 3077445 - RNA, 17 nt, Human
agugagacccugucuca

SEQ ID NO: 3077446 - RNA, 21 nt, Human
agugagacccugucucaaaaa

SEQ ID NO: 3077447 - RNA, 13 nt, Human
agugagacucugu

SEQ ID NO: 3077448 - RNA, 19 nt, Human
agucuccaaagucucugga

SEQ ID NO: 3077449 - RNA, 14 nt, Human
ugugaagcaaaauu

SEQ ID NO: 3077450 - RNA, 14 nt, Human
ugugaagagaacca

SEQ ID NO: 3077451 - RNA, 19 nt, Human
ugugagcacaaagguagcu

SEQ ID NO: 3077452 - RNA, 22 nt, Human
ugugagaugcuagaacucccuu

SEQ ID NO: 3077453 - RNA, 11 nt, Human
agugaaaaagg

SEQ ID NO: 3077454 - RNA, 17 nt, Human
agugaaaaaggaggaag

SEQ ID NO: 3077455 - RNA, 20 nt, Human
agugaaaaaggaggaagaga

SEQ ID NO: 3077456 - RNA, 23 nt, Human
agugaaaaaggaggaagagaaaa

SEQ ID NO: 3077457 - RNA, 22 nt, Human
ugucucuggauuauauuaugaa

SEQ ID NO: 3077458 - RNA, 13 nt, Human
ugucucugagagu

SEQ ID NO: 3077459 - RNA, 17 nt, Human
ugucucuacuaaaaaua

SEQ ID NO: 3077460 - RNA, 15 nt, Human
ugucuccucucucug

SEQ ID NO: 3077461 - RNA, 23 nt, Human
aguccccuguuuguuucugaaag

SEQ ID NO: 3077462 - RNA, 13 nt, Human
agucccugccaau

SEQ ID NO: 3077463 - RNA, 14 nt, Human
agucccugccaaug

SEQ ID NO: 3077464 - RNA, 16 nt, Human
agucccugccaaugga

SEQ ID NO: 3077465 - RNA, 22 nt, Human
ugucucuugguccugcugcagu

SEQ ID NO: 3077466 - RNA, 21 nt, Human
ugucucuuuaaugucacaggc

SEQ ID NO: 3077467 - RNA, 22 nt, Human
ugucucuuuaaugucacaggca

SEQ ID NO: 3077468 - RNA, 12 nt, Human
ugucuuaauuaa

SEQ ID NO: 3077469 - RNA, 14 nt, Human
ugucuuaauuaaaa

SEQ ID NO: 3077470 - RNA, 18 nt, Human
ugucucuugguccugcug

SEQ ID NO: 3077471 - RNA, 19 nt, Human
ugucucuugguccugcugc

SEQ ID NO: 3077472 - RNA, 20 nt, Human
ugucucuugguccugcugca

SEQ ID NO: 3077473 - RNA, 21 nt, Human
ugucucuugguccugcugcag

SEQ ID NO: 3077474 - RNA, 15 nt, Human
ugugaaccaccacac

SEQ ID NO: 3077475 - RNA, 22 nt, Human
ugugaacaguuguguuugaagc

SEQ ID NO: 3077476 - RNA, 23 nt, Human
ugugaaccaccacacccagccca

SEQ ID NO: 3077477 - RNA, 22 nt, Human
ugugaaccaccacacccagccc

SEQ ID NO: 3077478 - RNA, 16 nt, Human
ugugaaccaccacacc

SEQ ID NO: 3077479 - RNA, 21 nt, Human
ugucuugcaauggcagccuug

SEQ ID NO: 3077480 - RNA, 20 nt, Human
ugucuugcaauggcagccuu

SEQ ID NO: 3077481 - RNA, 18 nt, Human
ugucuugcaauggcagcc

SEQ ID NO: 3077482 - RNA, 17 nt, Human
ugucuugcaauggcagc

SEQ ID NO: 3077483 - RNA, 15 nt, Human
ugucuugcaauggca

SEQ ID NO: 3077484 - RNA, 14 nt, Human
ugucuucacaacag

SEQ ID NO: 3077485 - RNA, 18 nt, Human
ugaauauuuaguguucau

SEQ ID NO: 3077486 - RNA, 23 nt, Human
ugaauaauguaagacaaauaugu

SEQ ID NO: 3077487 - RNA, 13 nt, Human
ugaauaauacagu

SEQ ID NO: 3077488 - RNA, 12 nt, Human
ugaauaauacag

SEQ ID NO: 3077489 - RNA, 13 nt, Human
ugaagucacacag

SEQ ID NO: 3077490 - RNA, 17 nt, Human
ugaaguacucauacaug

SEQ ID NO: 3077491 - RNA, 22 nt, Human
ugaaguaauaugcacacauuuu

SEQ ID NO: 3077492 - RNA, 21 nt, Human
ugaaguaauaugcacacauuu

SEQ ID NO: 3077493 - RNA, 20 nt, Human
ugaaguaauaugcacacauu

SEQ ID NO: 3077494 - RNA, 16 nt, Human
ugaaguaauaugcaca

SEQ ID NO: 3077495 - RNA, 15 nt, Human
ugaaguaauaugcac

SEQ ID NO: 3077496 - RNA, 17 nt, Human
ugaagauuuaccacuug

SEQ ID NO: 3077497 - RNA, 20 nt, Human
ugaagauuuaccacuugugu

SEQ ID NO: 3077498 - RNA, 20 nt, Human
agaguaauccaagcaaaugu

SEQ ID NO: 3077499 - RNA, 18 nt, Human
agaguaauccaagcaaau

SEQ ID NO: 3077500 - RNA, 19 nt, Human
agagguucaaagauauuuu

SEQ ID NO: 3077501 - RNA, 16 nt, Human
agagguucaaagauau

SEQ ID NO: 3077502 - RNA, 20 nt, Human
agagguucaaagauauuuug

SEQ ID NO: 3077503 - RNA, 22 nt, Human
agaggcugccucucccaucacu

SEQ ID NO: 3077504 - RNA, 13 nt, Human
agagguucaaaga

SEQ ID NO: 3077505 - RNA, 20 nt, Human
agagggagugacagaggcag

SEQ ID NO: 3077506 - RNA, 15 nt, Human
agagggagugacaga

SEQ ID NO: 3077507 - RNA, 15 nt, Human
agagggagguaagga

SEQ ID NO: 3077508 - RNA, 23 nt, Human
agaggcagccccauucugccugc

SEQ ID NO: 3077509 - RNA, 21 nt, Human
agaggcagggucucacucugu

SEQ ID NO: 3077510 - RNA, 22 nt, Human
agaggcagccccauucugccug

SEQ ID NO: 3077511 - RNA, 21 nt, Human
agaggcagccccauucugccu

SEQ ID NO: 3077512 - RNA, 18 nt, Human
agagcuguucacagccag

SEQ ID NO: 3077513 - RNA, 16 nt, Human
ugaaauaacauggccu

SEQ ID NO: 3077514 - RNA, 17 nt, Human
ugaaauaacauggccuu

SEQ ID NO: 3077515 - RNA, 13 nt, Human
ugaaauaaacguc

SEQ ID NO: 3077516 - RNA, 18 nt, Human
ugaaauaaacgucuuaaa

SEQ ID NO: 3077517 - RNA, 22 nt, Human
ugaaauaaacgucuuaaauauu

SEQ ID NO: 3077518 - RNA, 23 nt, Human
ugaaauaaacgucuuaaauauuc

SEQ ID NO: 3077519 - RNA, 20 nt, Human
ugaaauuuuuauuaaauuau

SEQ ID NO: 3077520 - RNA, 21 nt, Human
ugaaauuuccugggagcuuuu

SEQ ID NO: 3077521 - RNA, 19 nt, Human
ugaaauuuuuauuaaauua

SEQ ID NO: 3077522 - RNA, 15 nt, Human
ugaaauuuccuggga

SEQ ID NO: 3077523 - RNA, 21 nt, Human
ugaaccaccacacccagccca

SEQ ID NO: 3077524 - RNA, 13 nt, Human
ugaacaaauuuac

SEQ ID NO: 3077525 - RNA, 22 nt, Human
ugaaccaccacacccagcccac

SEQ ID NO: 3077526 - RNA, 22 nt, Human
ugaacccauauuuguacaccaa

SEQ ID NO: 3077527 - RNA, 18 nt, Human
ugaacccgggaggcagag

SEQ ID NO: 3077528 - RNA, 21 nt, Human
ugaagacaaugacuuacugua

SEQ ID NO: 3077529 - RNA, 23 nt, Human
ugaagacaaugacuuacuguaca

SEQ ID NO: 3077530 - RNA, 22 nt, Human
ugaagacaaugacuuacuguac

SEQ ID NO: 3077531 - RNA, 22 nt, Human
ugaagaagcaccaaucaugaau

SEQ ID NO: 3077532 - RNA, 12 nt, Human
agacuuuuauga

SEQ ID NO: 3077533 - RNA, 19 nt, Human
agacuuuggaaagaguagg

SEQ ID NO: 3077534 - RNA, 15 nt, Human
agacuuuuaugauac

SEQ ID NO: 3077535 - RNA, 15 nt, Human
agacuuuuccaaccc

SEQ ID NO: 3077536 - RNA, 16 nt, Human
agagacacaagccuuc

SEQ ID NO: 3077537 - RNA, 19 nt, Human
agagacacaagccuucggc

SEQ ID NO: 3077538 - RNA, 15 nt, Human
agagacacaagccuu

SEQ ID NO: 3077539 - RNA, 20 nt, Human
agacugguuccauggccucu

SEQ ID NO: 3077540 - RNA, 17 nt, Human
agacuuuggaaagacuu

SEQ ID NO: 3077541 - RNA, 15 nt, Human
agacuuuggaaagag

SEQ ID NO: 3077542 - RNA, 15 nt, Human
agacuuuggaaagac

SEQ ID NO: 3077543 - RNA, 22 nt, Human
ucuuuuuucuaaaguaaaaaca

SEQ ID NO: 3077544 - RNA, 21 nt, Human
ucuuuuuucuaaaguaaaaac

SEQ ID NO: 3077545 - RNA, 16 nt, Human
ucuuuguaaugaaaac

SEQ ID NO: 3077546 - RNA, 14 nt, Human
ucuuuguacagaca

SEQ ID NO: 3077547 - RNA, 15 nt, Human
ucuuuguacagacaa

SEQ ID NO: 3077548 - RNA, 20 nt, Human
ucuuuguacagacaacaaac

SEQ ID NO: 3077549 - RNA, 14 nt, Human
agagacagaaagca

SEQ ID NO: 3077550 - RNA, 16 nt, Human
agagacacacugaaga

SEQ ID NO: 3077551 - RNA, 22 nt, Human
agacuccaaagaaauguaaggg

SEQ ID NO: 3077552 - RNA, 20 nt, Human
agacaggcaagcaccuccug

SEQ ID NO: 3077553 - RNA, 15 nt, Human
ucuuuaaugucacag

SEQ ID NO: 3077554 - RNA, 18 nt, Human
ucuuuaaugucacaggca

SEQ ID NO: 3077555 - RNA, 13 nt, Human
agacuccugcagg

SEQ ID NO: 3077556 - RNA, 16 nt, Human
agacucccaugaggga

SEQ ID NO: 3077557 - RNA, 23 nt, Human
agacuggcacaguuuucugagaa

SEQ ID NO: 3077558 - RNA, 18 nt, Human
agacuggcacaguuuucu

SEQ ID NO: 3077559 - RNA, 21 nt, Human
agacuggcacaguuuucugag

SEQ ID NO: 3077560 - RNA, 20 nt, Human
agacuggcacaguuuucuga

SEQ ID NO: 3077561 - RNA, 20 nt, Human
ugaaaaucuuauaauuuaaa

SEQ ID NO: 3077562 - RNA, 22 nt, Human
ugaaaauauuuguaucacaaau

SEQ ID NO: 3077563 - RNA, 21 nt, Human
ugaaaauauuuguaucacaaa

SEQ ID NO: 3077564 - RNA, 14 nt, Human
ugaaaauuaacaug

SEQ ID NO: 3077565 - RNA, 22 nt, Human
ugaaacugagaugugaacacau

SEQ ID NO: 3077566 - RNA, 13 nt, Human
ugaaagaaaauaa

SEQ ID NO: 3077567 - RNA, 18 nt, Human
ugaaacuggauuaaacuu

SEQ ID NO: 3077568 - RNA, 17 nt, Human
ugaaacuggauuaaacu

SEQ ID NO: 3077569 - RNA, 19 nt, Human
ugaaaacacauuuuucuua

SEQ ID NO: 3077570 - RNA, 17 nt, Human
ugaaaacacauuuuucu

SEQ ID NO: 3077571 - RNA, 15 nt, Human
ugaaaacacauuuuu

SEQ ID NO: 3077572 - RNA, 17 nt, Human
ugaaaauauuuguauca

SEQ ID NO: 3077573 - RNA, 13 nt, Human
ugaaaacacauuu

SEQ ID NO: 3077574 - RNA, 12 nt, Human
ugaaaacacauu

SEQ ID NO: 3077575 - RNA, 14 nt, Human
ugaaaacacauuuu

SEQ ID NO: 3077576 - RNA, 13 nt, Human
agagacuccugca

SEQ ID NO: 3077577 - RNA, 14 nt, Human
agagacuccugcag

SEQ ID NO: 3077578 - RNA, 12 nt, Human
agagacuccugc

SEQ ID NO: 3077579 - RNA, 11 nt, Human
agagacuccug

SEQ ID NO: 3077580 - RNA, 22 nt, Human
ugaaagaaaauaccaaggaaca

SEQ ID NO: 3077581 - RNA, 12 nt, Human
ugaaacuuuugg

SEQ ID NO: 3077582 - RNA, 16 nt, Human
ugaaagacuguacaaa

SEQ ID NO: 3077583 - RNA, 19 nt, Human
ugaaagacuguacaaagua

SEQ ID NO: 3077584 - RNA, 18 nt, Human
ugaaagacuguacaaagu

SEQ ID NO: 3077585 - RNA, 22 nt, Human
ugaaagacuguacaaaguagaa

SEQ ID NO: 3077586 - RNA, 17 nt, Human
ugaaagaggaaugaagu

SEQ ID NO: 3077587 - RNA, 19 nt, Human
agagaccaucccugaaggc

SEQ ID NO: 3077588 - RNA, 21 nt, Human
agagaccaucccugaaggccc

SEQ ID NO: 3077589 - RNA, 18 nt, Human
agagaccaucccugaagg

SEQ ID NO: 3077590 - RNA, 18 nt, Human
ugaaagaggaaugaagua

SEQ ID NO: 3077591 - RNA, 22 nt, Human
agagaccaucccugaaggcccc

SEQ ID NO: 3077592 - RNA, 23 nt, Human
agagaccaucccugaaggccccg

SEQ ID NO: 3077593 - RNA, 21 nt, Human
agauguagccccucuccugga

SEQ ID NO: 3077594 - RNA, 22 nt, Human
agauguagccccucuccuggaa

SEQ ID NO: 3077595 - RNA, 21 nt, Human
agaugcuagaacucccuuuca

SEQ ID NO: 3077596 - RNA, 15 nt, Human
agaugcuagaacucc

SEQ ID NO: 3077597 - RNA, 13 nt, Human
agaugcacaugag

SEQ ID NO: 3077598 - RNA, 16 nt, Human
agaugcacaugagcug

SEQ ID NO: 3077599 - RNA, 20 nt, Human
agaugcaguucugaagaaga

SEQ ID NO: 3077600 - RNA, 21 nt, Human
agaugcaguucugaagaagau

SEQ ID NO: 3077601 - RNA, 19 nt, Human
agaugcuagaacucccuuu

SEQ ID NO: 3077602 - RNA, 13 nt, Human
agauccuggaaau

SEQ ID NO: 3077603 - RNA, 22 nt, Human
ugacagggcacaccgggcacuc

SEQ ID NO: 3077604 - RNA, 21 nt, Human
ugacagggcacaccgggcacu

SEQ ID NO: 3077605 - RNA, 19 nt, Human
ugacaggcaaugcuggcug

SEQ ID NO: 3077606 - RNA, 17 nt, Human
ugacaggcaaugcuggc

SEQ ID NO: 3077607 - RNA, 13 nt, Human
ugacauguuuuau

SEQ ID NO: 3077608 - RNA, 16 nt, Human
ugacacgaauauugcu

SEQ ID NO: 3077609 - RNA, 19 nt, Human
ugacacgaauauugcugau

SEQ ID NO: 3077610 - RNA, 22 nt, Human
ugacagagugagacucugucuc

SEQ ID NO: 3077611 - RNA, 15 nt, Human
ugacacuuaaaaaug

SEQ ID NO: 3077612 - RNA, 14 nt, Human
ugacuaugacauaa

SEQ ID NO: 3077613 - RNA, 12 nt, Human
ugaccuuucaau

SEQ ID NO: 3077614 - RNA, 21 nt, Human
ugacuguuuucucuugagagg

SEQ ID NO: 3077615 - RNA, 15 nt, Human
ugaccuuuaagagaa

SEQ ID NO: 3077616 - RNA, 22 nt, Human
agaugugaacacaucagcuugc

SEQ ID NO: 3077617 - RNA, 17 nt, Human
agaugugaacacaucag

SEQ ID NO: 3077618 - RNA, 22 nt, Human
agauguauguacuucaugcugu

SEQ ID NO: 3077619 - RNA, 20 nt, Human
ugacuuacuguacaugaaaa

SEQ ID NO: 3077620 - RNA, 12 nt, Human
ugacuuacugua

SEQ ID NO: 3077621 - RNA, 19 nt, Human
ugacuuacuguacaugaaa

SEQ ID NO: 3077622 - RNA, 16 nt, Human
agauucauauuuacuu

SEQ ID NO: 3077623 - RNA, 13 nt, Human
agauucauauuua

SEQ ID NO: 3077624 - RNA, 19 nt, Human
agauuucacucuccuuggu

SEQ ID NO: 3077625 - RNA, 17 nt, Human
agauuucacucuccuug

SEQ ID NO: 3077626 - RNA, 21 nt, Human
agauugugccccugcacucca

SEQ ID NO: 3077627 - RNA, 15 nt, Human
agcaagucagaauag

SEQ ID NO: 3077628 - RNA, 22 nt, Human
agcaagggugaugggaaagcau

SEQ ID NO: 3077629 - RNA, 20 nt, Human
agcaagggugaugggaaagc

SEQ ID NO: 3077630 - RNA, 16 nt, Human
agcaagugagagcugg

SEQ ID NO: 3077631 - RNA, 15 nt, Human
agcaagugagagcug

SEQ ID NO: 3077632 - RNA, 16 nt, Human
agcaagugagacccug

SEQ ID NO: 3077633 - RNA, 19 nt, Human
agcaaggagauuuacaacu

SEQ ID NO: 3077634 - RNA, 17 nt, Human
agcaaggagauuuacaa

SEQ ID NO: 3077635 - RNA, 14 nt, Human
agcaaggagauuua

SEQ ID NO: 3077636 - RNA, 16 nt, Human
agcaagggugauggga

SEQ ID NO: 3077637 - RNA, 18 nt, Human
ugagccagauuucacucu

SEQ ID NO: 3077638 - RNA, 19 nt, Human
ugagccagauuucacucuc

SEQ ID NO: 3077639 - RNA, 14 nt, Human
ugagccacugcacc

SEQ ID NO: 3077640 - RNA, 20 nt, Human
ugagccagauuucacucucc

SEQ ID NO: 3077641 - RNA, 13 nt, Human
ugagccacugcac

SEQ ID NO: 3077642 - RNA, 12 nt, Human
ugagccacugca

SEQ ID NO: 3077643 - RNA, 16 nt, Human
agcaccuccugccucg

SEQ ID NO: 3077644 - RNA, 14 nt, Human
agcaccuccugccu

SEQ ID NO: 3077645 - RNA, 13 nt, Human
agcaccuccugcc

SEQ ID NO: 3077646 - RNA, 16 nt, Human
agcaccaucucuccuc

SEQ ID NO: 3077647 - RNA, 23 nt, Human
agcacaugccucucucaggccaa

SEQ ID NO: 3077648 - RNA, 19 nt, Human
agcacaugccucucucagg

SEQ ID NO: 3077649 - RNA, 20 nt, Human
agcacaugccucucucaggc

SEQ ID NO: 3077650 - RNA, 21 nt, Human
agcacaugccucucucaggcc

SEQ ID NO: 3077651 - RNA, 22 nt, Human
agcacaugccucucucaggcca

SEQ ID NO: 3077652 - RNA, 18 nt, Human
agcacaugccucucucag

SEQ ID NO: 3077653 - RNA, 16 nt, Human
agcacaugccucucuc

SEQ ID NO: 3077654 - RNA, 21 nt, Human
agcacagcuucauuuccugug

SEQ ID NO: 3077655 - RNA, 17 nt, Human
agcaagugagagcuggg

SEQ ID NO: 3077656 - RNA, 14 nt, Human
ugagauguguucac

SEQ ID NO: 3077657 - RNA, 24 nt, Human
ugagaugugaacacaucagcuugc

SEQ ID NO: 3077658 - RNA, 19 nt, Human
ugagaugugaacacaucag

SEQ ID NO: 3077659 - RNA, 18 nt, Human
ugagaugugaacacauca

SEQ ID NO: 3077660 - RNA, 23 nt, Human
ugagauguagccccucuccugga

SEQ ID NO: 3077661 - RNA, 13 nt, Human
ugagaugugaaca

SEQ ID NO: 3077662 - RNA, 17 nt, Human
ugagaggaaaucaccga

SEQ ID NO: 3077663 - RNA, 23 nt, Human
ugagaggacuuuucuuuguggcu

SEQ ID NO: 3077664 - RNA, 10 nt, Human
ugagaggaaa

SEQ ID NO: 3077665 - RNA, 14 nt, Human
ugagagcugggugu

SEQ ID NO: 3077666 - RNA, 11 nt, Human
ugagaggaaau

SEQ ID NO: 3077667 - RNA, 12 nt, Human
ugagaggaaauc

SEQ ID NO: 3077668 - RNA, 13 nt, Human
ugagaggaaauca

SEQ ID NO: 3077669 - RNA, 14 nt, Human
ugagaggaaaucac

SEQ ID NO: 3077670 - RNA, 23 nt, Human
ugagagcaguuugguuucuagca

SEQ ID NO: 3077671 - RNA, 21 nt, Human
ugagagcaguuugguuucuag

SEQ ID NO: 3077672 - RNA, 21 nt, Human
ugagagacacacugaagaagc

SEQ ID NO: 3077673 - RNA, 22 nt, Human
ugagagacacacugaagaagca

SEQ ID NO: 3077674 - RNA, 17 nt, Human
ugagacagcccgggcuc

SEQ ID NO: 3077675 - RNA, 18 nt, Human
ugagacagcccgggcucu

SEQ ID NO: 3077676 - RNA, 19 nt, Human
ugagacagcccgggcucug

SEQ ID NO: 3077677 - RNA, 20 nt, Human
ugagacagcccgggcucugc

SEQ ID NO: 3077678 - RNA, 22 nt, Human
ugagacagcccgggcucugccu

SEQ ID NO: 3077679 - RNA, 20 nt, Human
ugagacucugucucaaaaaa

SEQ ID NO: 3077680 - RNA, 20 nt, Human
ugagacucugucucagucca

SEQ ID NO: 3077681 - RNA, 16 nt, Human
ugagagacacacugaa

SEQ ID NO: 3077682 - RNA, 17 nt, Human
ugagagacacacugaag

SEQ ID NO: 3077683 - RNA, 19 nt, Human
ugagagacacacugaagaa

SEQ ID NO: 3077684 - RNA, 20 nt, Human
ugagagacacacugaagaag

SEQ ID NO: 3077685 - RNA, 13 nt, Human
ugagacagcccgg

SEQ ID NO: 3077686 - RNA, 21 nt, Human
ugagacagaguuuucacucuu

SEQ ID NO: 3077687 - RNA, 11 nt, Human
ugagacagagu

SEQ ID NO: 3077688 - RNA, 20 nt, Human
ugagaagcagaggaaggaga

SEQ ID NO: 3077689 - RNA, 16 nt, Human
agauuuuccugaaaac

SEQ ID NO: 3077690 - RNA, 15 nt, Human
agauuuuccugaaaa

SEQ ID NO: 3077691 - RNA, 14 nt, Human
agauuuuccugaaa

SEQ ID NO: 3077692 - RNA, 12 nt, Human
ucugcagguccc

SEQ ID NO: 3077693 - RNA, 11 nt, Human
ucugcaggucc

SEQ ID NO: 3077694 - RNA, 13 nt, Human
ucugcaggucccu

SEQ ID NO: 3077695 - RNA, 15 nt, Human
agaaauguacagcaa

SEQ ID NO: 3077696 - RNA, 14 nt, Human
agaaauguacagca

SEQ ID NO: 3077697 - RNA, 17 nt, Human
ucugcagcaauaaagca

SEQ ID NO: 3077698 - RNA, 13 nt, Human
ucugcacuccccu

SEQ ID NO: 3077699 - RNA, 18 nt, Human
ucugcagauaaacaguag

SEQ ID NO: 3077700 - RNA, 15 nt, Human
ucugcagauaaacag

SEQ ID NO: 3077701 - RNA, 14 nt, Human
ucugcacuccccug

SEQ ID NO: 3077702 - RNA, 15 nt, Human
ucugcacuccccugc

SEQ ID NO: 3077703 - RNA, 16 nt, Human
ucugcacuccccugcu

SEQ ID NO: 3077704 - RNA, 21 nt, Human
ucugaucauccacugugccau

SEQ ID NO: 3077705 - RNA, 17 nt, Human
ucugaucauccacugug

SEQ ID NO: 3077706 - RNA, 21 nt, Human
ucugagacucgcgacaaugca

SEQ ID NO: 3077707 - RNA, 15 nt, Human
ucugaauuauuuucu

SEQ ID NO: 3077708 - RNA, 12 nt, Human
ucugacacacag

SEQ ID NO: 3077709 - RNA, 14 nt, Human
ucugacacacagcu

SEQ ID NO: 3077710 - RNA, 13 nt, Human
ucugacacacagc

SEQ ID NO: 3077711 - RNA, 15 nt, Human
ucugacacacagcuc

SEQ ID NO: 3077712 - RNA, 10 nt, Human
ucugaauuau

SEQ ID NO: 3077713 - RNA, 21 nt, Human
ucugaaggacauugcggacag

SEQ ID NO: 3077714 - RNA, 14 nt, Human
agaaaugaaagcag

SEQ ID NO: 3077715 - RNA, 14 nt, Human
agaagaacugaaau

SEQ ID NO: 3077716 - RNA, 13 nt, Human
agaagaacugaaa

SEQ ID NO: 3077717 - RNA, 18 nt, Human
agaagaugguaccaccag

SEQ ID NO: 3077718 - RNA, 18 nt, Human
agaagauuuugaaauuuu

SEQ ID NO: 3077719 - RNA, 12 nt, Human
agaagcccagga

SEQ ID NO: 3077720 - RNA, 16 nt, Human
agaagcccaggaaagg

SEQ ID NO: 3077721 - RNA, 18 nt, Human
agaagcccaggaaaggcu

SEQ ID NO: 3077722 - RNA, 20 nt, Human
agaagcccaggaaaggcucc

SEQ ID NO: 3077723 - RNA, 21 nt, Human
agaagcccaggaaaggcucca

SEQ ID NO: 3077724 - RNA, 22 nt, Human
agaagcccaggaaaggcuccag

SEQ ID NO: 3077725 - RNA, 16 nt, Human
ucugcccacucccugc

SEQ ID NO: 3077726 - RNA, 17 nt, Human
ucugcccacucccugca

SEQ ID NO: 3077727 - RNA, 15 nt, Human
ucugcuucagccucc

SEQ ID NO: 3077728 - RNA, 14 nt, Human
ucugcuucagccuc

SEQ ID NO: 3077729 - RNA, 13 nt, Human
ucugcuucagccu

SEQ ID NO: 3077730 - RNA, 20 nt, Human
ucugcucacauaucugucau

SEQ ID NO: 3077731 - RNA, 19 nt, Human
ucugcucacauaucuguca

SEQ ID NO: 3077732 - RNA, 17 nt, Human
ucugcucacauaucugu

SEQ ID NO: 3077733 - RNA, 22 nt, Human
ucugccgcagcccugcagaggg

SEQ ID NO: 3077734 - RNA, 22 nt, Human
ucugccugcccaggccccugcc

SEQ ID NO: 3077735 - RNA, 21 nt, Human
ucugccugcccaggccccugc

SEQ ID NO: 3077736 - RNA, 18 nt, Human
ucugcgggggcagugcuc

SEQ ID NO: 3077737 - RNA, 20 nt, Human
ucugcgggggcagugcucac

SEQ ID NO: 3077738 - RNA, 22 nt, Human
ucugcggagcacacuggcucac

SEQ ID NO: 3077739 - RNA, 21 nt, Human
ucugcggagcacacuggcuca

SEQ ID NO: 3077740 - RNA, 14 nt, Human
ucugcggagcacac

SEQ ID NO: 3077741 - RNA, 18 nt, Human
ucugcccacucccugcaa

SEQ ID NO: 3077742 - RNA, 21 nt, Human
ucugcccacucccugcaaccu

SEQ ID NO: 3077743 - RNA, 18 nt, Human
ucugcccuccaagaccuu

SEQ ID NO: 3077744 - RNA, 19 nt, Human
ucugcccuccaagaccuuc

SEQ ID NO: 3077745 - RNA, 14 nt, Human
ucugccgcagcccu

SEQ ID NO: 3077746 - RNA, 15 nt, Human
ucugccgcagcccug

SEQ ID NO: 3077747 - RNA, 16 nt, Human
ucugugaaaguacauu

SEQ ID NO: 3077748 - RNA, 22 nt, Human
ucugugaaaggaaagagggagg

SEQ ID NO: 3077749 - RNA, 14 nt, Human
ucugugagaugcua

SEQ ID NO: 3077750 - RNA, 23 nt, Human
ucugugagaugcuagaacucccu

SEQ ID NO: 3077751 - RNA, 17 nt, Human
ucugugagaugcuagaa

SEQ ID NO: 3077752 - RNA, 22 nt, Human
ucugugagaugcuagaacuccc

SEQ ID NO: 3077753 - RNA, 13 nt, Human
ucuguucuuucca

SEQ ID NO: 3077754 - RNA, 22 nt, Human
ucuguucuuuccaaaguacacu

SEQ ID NO: 3077755 - RNA, 17 nt, Human
ucuguuggccaguguga

SEQ ID NO: 3077756 - RNA, 12 nt, Human
ucuguuggccag

SEQ ID NO: 3077757 - RNA, 16 nt, Human
agacacauguccaaga

SEQ ID NO: 3077758 - RNA, 18 nt, Human
agacaccuugacagggca

SEQ ID NO: 3077759 - RNA, 17 nt, Human
agacaccuugacagggc

SEQ ID NO: 3077760 - RNA, 16 nt, Human
agacaggaccagggau

SEQ ID NO: 3077761 - RNA, 24 nt, Human
agacagagccccacccucagaugc

SEQ ID NO: 3077762 - RNA, 22 nt, Human
agacagagccccacccucagau

SEQ ID NO: 3077763 - RNA, 13 nt, Human
agacacaggcccg

SEQ ID NO: 3077764 - RNA, 12 nt, Human
agacacaggccc

SEQ ID NO: 3077765 - RNA, 12 nt, Human
agacacacauga

SEQ ID NO: 3077766 - RNA, 21 nt, Human
agaauuugauaugugaacagu

SEQ ID NO: 3077767 - RNA, 22 nt, Human
agaauuugauaugugaacaguu

SEQ ID NO: 3077768 - RNA, 14 nt, Human
agaauaaaauuuuu

SEQ ID NO: 3077769 - RNA, 12 nt, Human
agaauaaaauuu

SEQ ID NO: 3077770 - RNA, 17 nt, Human
agaauaaaauuuuuaau

SEQ ID NO: 3077771 - RNA, 13 nt, Human
agaauauguuuca

SEQ ID NO: 3077772 - RNA, 17 nt, Human
agaauauguuucaaacu

SEQ ID NO: 3077773 - RNA, 18 nt, Human
agaauauguuucaaacuu

SEQ ID NO: 3077774 - RNA, 19 nt, Human
agaauauguuucaaacuuu

SEQ ID NO: 3077775 - RNA, 21 nt, Human
agaauauguuucaaacuuugg

SEQ ID NO: 3077776 - RNA, 14 nt, Human
ucugcuuguguuaa

SEQ ID NO: 3077777 - RNA, 21 nt, Human
agaaguuucugccgcagcccu

SEQ ID NO: 3077778 - RNA, 22 nt, Human
agaaguuucugccgcagcccug

SEQ ID NO: 3077779 - RNA, 23 nt, Human
agaaguuucugccgcagcccugc

SEQ ID NO: 3077780 - RNA, 15 nt, Human
agaauuaacacauga

SEQ ID NO: 3077781 - RNA, 14 nt, Human
acuugcuuuuaaaa

SEQ ID NO: 3077782 - RNA, 19 nt, Human
acuuguauuauguguguuu

SEQ ID NO: 3077783 - RNA, 18 nt, Human
acuuguauuauguguguu

SEQ ID NO: 3077784 - RNA, 15 nt, Human
acuugucaauaaaau

SEQ ID NO: 3077785 - RNA, 15 nt, Human
acuuguauuaugugu

SEQ ID NO: 3077786 - RNA, 22 nt, Human
acuuguggacacagcucuucuc

SEQ ID NO: 3077787 - RNA, 19 nt, Human
acuuguggacacagcucuu

SEQ ID NO: 3077788 - RNA, 20 nt, Human
acuugucuuuggacccugag

SEQ ID NO: 3077789 - RNA, 18 nt, Human
acuugucuuuggacccug

SEQ ID NO: 3077790 - RNA, 21 nt, Human
acuugucuuuggacccugagg

SEQ ID NO: 3077791 - RNA, 18 nt, Human
acuugcucuugaugccug

SEQ ID NO: 3077792 - RNA, 17 nt, Human
acuugcucuugaugccu

SEQ ID NO: 3077793 - RNA, 20 nt, Human
acuugcucuugaugccuggc

SEQ ID NO: 3077794 - RNA, 14 nt, Human
acuugcucuugaug

SEQ ID NO: 3077795 - RNA, 16 nt, Human
acuugcucuugaugcc

SEQ ID NO: 3077796 - RNA, 23 nt, Human
acuugcagacucuacagaggcca

SEQ ID NO: 3077797 - RNA, 22 nt, Human
acuugcagacucuacagaggcc

SEQ ID NO: 3077798 - RNA, 19 nt, Human
acuugcagacucuacagag

SEQ ID NO: 3077799 - RNA, 23 nt, Human
ucucacuauguugcccaggcagg

SEQ ID NO: 3077800 - RNA, 22 nt, Human
ucucacuauguugcccaggcag

SEQ ID NO: 3077801 - RNA, 21 nt, Human
ucucacuauguugcccaggca

SEQ ID NO: 3077802 - RNA, 20 nt, Human
ucucacuauguugcccaggc

SEQ ID NO: 3077803 - RNA, 14 nt, Human
ucucauuugucaca

SEQ ID NO: 3077804 - RNA, 15 nt, Human
ucucauuuccaagca

SEQ ID NO: 3077805 - RNA, 15 nt, Human
ucuccaagcaggaca

SEQ ID NO: 3077806 - RNA, 16 nt, Human
ucuccaagcaggacau

SEQ ID NO: 3077807 - RNA, 16 nt, Human
ucucauuugucacaca

SEQ ID NO: 3077808 - RNA, 17 nt, Human
ucucaggccagcugcuu

SEQ ID NO: 3077809 - RNA, 18 nt, Human
ucucaggccagcugcuug

SEQ ID NO: 3077810 - RNA, 21 nt, Human
ucucaggccagcugcuugggc

SEQ ID NO: 3077811 - RNA, 12 nt, Human
ucucaggccagc

SEQ ID NO: 3077812 - RNA, 13 nt, Human
ucucaggccagcu

SEQ ID NO: 3077813 - RNA, 12 nt, Human
ucucaggccaaa

SEQ ID NO: 3077814 - RNA, 10 nt, Human
ucucaggcca

SEQ ID NO: 3077815 - RNA, 12 nt, Human
ucucaggaaauc

SEQ ID NO: 3077816 - RNA, 23 nt, Human
ucucaggaaaucaaauaugcaaa

SEQ ID NO: 3077817 - RNA, 21 nt, Human
ucucaggaaaucaaauaugca

SEQ ID NO: 3077818 - RNA, 14 nt, Human
ucucaggaaaucaa

SEQ ID NO: 3077819 - RNA, 15 nt, Human
acuuuggaacaagau

SEQ ID NO: 3077820 - RNA, 13 nt, Human
acuuugaccucug

SEQ ID NO: 3077821 - RNA, 12 nt, Human
acuuugaccucu

SEQ ID NO: 3077822 - RNA, 13 nt, Human
acuuuuguucuug

SEQ ID NO: 3077823 - RNA, 12 nt, Human
acuuuuguucuu

SEQ ID NO: 3077824 - RNA, 21 nt, Human
acuuuguuaguuucuccaagc

SEQ ID NO: 3077825 - RNA, 14 nt, Human
acuuuguucuggcu

SEQ ID NO: 3077826 - RNA, 20 nt, Human
acuuuguuaguuucuccaag

SEQ ID NO: 3077827 - RNA, 18 nt, Human
acuuuguguucaccuugu

SEQ ID NO: 3077828 - RNA, 21 nt, Human
ucuccuuguguuacuaaguuu

SEQ ID NO: 3077829 - RNA, 13 nt, Human
ucuccuuguguua

SEQ ID NO: 3077830 - RNA, 16 nt, Human
ucuccuucaccuuugu

SEQ ID NO: 3077831 - RNA, 14 nt, Human
ucuccuucaccuuu

SEQ ID NO: 3077832 - RNA, 15 nt, Human
ucuccuucaccuuug

SEQ ID NO: 3077833 - RNA, 17 nt, Human
agaaaaaauauuuuccc

SEQ ID NO: 3077834 - RNA, 23 nt, Human
acuuuuguucuugguuuguaaau

SEQ ID NO: 3077835 - RNA, 15 nt, Human
acuuuuguucuuggu

SEQ ID NO: 3077836 - RNA, 23 nt, Human
ucuccgaccagacaccuugacag

SEQ ID NO: 3077837 - RNA, 17 nt, Human
ucuccgaccagacaccu

SEQ ID NO: 3077838 - RNA, 21 nt, Human
ucucccuuggauuguccccga

SEQ ID NO: 3077839 - RNA, 23 nt, Human
ucuccccagcaagugagagcugg

SEQ ID NO: 3077840 - RNA, 18 nt, Human
ucuccaagcaggacaugg

SEQ ID NO: 3077841 - RNA, 19 nt, Human
ucuccaagcaggacaugga

SEQ ID NO: 3077842 - RNA, 12 nt, Human
acuuuaccuuuu

SEQ ID NO: 3077843 - RNA, 20 nt, Human
acuuucugaaauaacauggc

SEQ ID NO: 3077844 - RNA, 14 nt, Human
acuuucugaaauaa

SEQ ID NO: 3077845 - RNA, 17 nt, Human
ucuccucugcugcuggc

SEQ ID NO: 3077846 - RNA, 18 nt, Human
ucuccucugcugcuggcu

SEQ ID NO: 3077847 - RNA, 15 nt, Human
ucuccucugcugcug

SEQ ID NO: 3077848 - RNA, 16 nt, Human
ucuccucugcugcugg

SEQ ID NO: 3077849 - RNA, 15 nt, Human
ucuccuccagaguca

SEQ ID NO: 3077850 - RNA, 23 nt, Human
acuuaacuauucaggagaguaga

SEQ ID NO: 3077851 - RNA, 20 nt, Human
acuuaaauaaugugaaacug

SEQ ID NO: 3077852 - RNA, 16 nt, Human
acuuacacuuuaugca

SEQ ID NO: 3077853 - RNA, 22 nt, Human
acuuaaucuaaauggaaccacu

SEQ ID NO: 3077854 - RNA, 19 nt, Human
acuuaaucuaaauggaacc

SEQ ID NO: 3077855 - RNA, 17 nt, Human
acuuaaucuaaauggaa

SEQ ID NO: 3077856 - RNA, 13 nt, Human
acuuaagcacacu

SEQ ID NO: 3077857 - RNA, 16 nt, Human
acuuacuguacaugaa

SEQ ID NO: 3077858 - RNA, 21 nt, Human
acuuacuguacaugaaaacac

SEQ ID NO: 3077859 - RNA, 17 nt, Human
acuuacacuuuaugcac

SEQ ID NO: 3077860 - RNA, 22 nt, Human
acuuacuguacaugaaaacaca

SEQ ID NO: 3077861 - RNA, 15 nt, Human
acuuagguguggggg

SEQ ID NO: 3077862 - RNA, 18 nt, Human
uccugggagugagcuggu

SEQ ID NO: 3077863 - RNA, 19 nt, Human
ucuaaguaaaaccacagca

SEQ ID NO: 3077864 - RNA, 15 nt, Human
ucuaaguaaaaccac

SEQ ID NO: 3077865 - RNA, 14 nt, Human
ucuaaguaaaacca

SEQ ID NO: 3077866 - RNA, 16 nt, Human
ucuacagaggccaugg

SEQ ID NO: 3077867 - RNA, 19 nt, Human
ucuacccagcgagcccugg

SEQ ID NO: 3077868 - RNA, 21 nt, Human
ucuacagaggccaugggccuc

SEQ ID NO: 3077869 - RNA, 14 nt, Human
ucuacccuggcacu

SEQ ID NO: 3077870 - RNA, 19 nt, Human
ucuacccuggcacuauaau

SEQ ID NO: 3077871 - RNA, 14 nt, Human
ucuacccaggugcu

SEQ ID NO: 3077872 - RNA, 20 nt, Human
ucuacccagcgagcccuggu

SEQ ID NO: 3077873 - RNA, 21 nt, Human
ucuacccuggcacuauaaugu

SEQ ID NO: 3077874 - RNA, 16 nt, Human
acuguucucugcccuc

SEQ ID NO: 3077875 - RNA, 17 nt, Human
acuguucucugcccucc

SEQ ID NO: 3077876 - RNA, 18 nt, Human
acuguucucugcccucca

SEQ ID NO: 3077877 - RNA, 15 nt, Human
acuguucucugcccu

SEQ ID NO: 3077878 - RNA, 21 nt, Human
ucuagcauggcauauuuuuca

SEQ ID NO: 3077879 - RNA, 22 nt, Human
ucuagcauggcauauuuuucac

SEQ ID NO: 3077880 - RNA, 23 nt, Human
ucuagcauggcauauuuuucaca

SEQ ID NO: 3077881 - RNA, 18 nt, Human
ucuagcauggcugccaau

SEQ ID NO: 3077882 - RNA, 22 nt, Human
ucuaguuguuugauucagacag

SEQ ID NO: 3077883 - RNA, 12 nt, Human
ucuaggaagacu

SEQ ID NO: 3077884 - RNA, 16 nt, Human
ucuaggaaauauuuau

SEQ ID NO: 3077885 - RNA, 17 nt, Human
ucuaggaaauauuuauu

SEQ ID NO: 3077886 - RNA, 21 nt, Human
ucuaguuugauuaaauucuug

SEQ ID NO: 3077887 - RNA, 23 nt, Human
ucuaguuguuugauucagacagc

SEQ ID NO: 3077888 - RNA, 13 nt, Human
ucuauaaaccgaa

SEQ ID NO: 3077889 - RNA, 16 nt, Human
ucucacuauguugccc

SEQ ID NO: 3077890 - RNA, 19 nt, Human
ucucacuauguugcccagg

SEQ ID NO: 3077891 - RNA, 17 nt, Human
ucucacuauguugccca

SEQ ID NO: 3077892 - RNA, 23 nt, Human
ucuaugggacucaaugcacugac

SEQ ID NO: 3077893 - RNA, 13 nt, Human
accuuuuuuauac

SEQ ID NO: 3077894 - RNA, 20 nt, Human
accuuuuggucuggagggaa

SEQ ID NO: 3077895 - RNA, 21 nt, Human
uccacugugccaugugccagg

SEQ ID NO: 3077896 - RNA, 22 nt, Human
uccacugguucuucuuggucuc

SEQ ID NO: 3077897 - RNA, 22 nt, Human
accuuuguuugcaucugaaaau

SEQ ID NO: 3077898 - RNA, 18 nt, Human
accuuuggagcaaagcug

SEQ ID NO: 3077899 - RNA, 18 nt, Human
accuuuguccccaccgca

SEQ ID NO: 3077900 - RNA, 18 nt, Human
accuuugacaaagguaaa

SEQ ID NO: 3077901 - RNA, 17 nt, Human
accuuugacaaagguaa

SEQ ID NO: 3077902 - RNA, 17 nt, Human
accuuuguccccaccgc

SEQ ID NO: 3077903 - RNA, 20 nt, Human
accuugaacuggguacuugu

SEQ ID NO: 3077904 - RNA, 19 nt, Human
accuugaaaacuuuaugcu

SEQ ID NO: 3077905 - RNA, 20 nt, Human
uccagccugcugccugcuuu

SEQ ID NO: 3077906 - RNA, 14 nt, Human
uccagaauuuccca

SEQ ID NO: 3077907 - RNA, 15 nt, Human
uccagaauuucccaa

SEQ ID NO: 3077908 - RNA, 13 nt, Human
uccagacacaugu

SEQ ID NO: 3077909 - RNA, 20 nt, Human
uccaggcugggagagccuuc

SEQ ID NO: 3077910 - RNA, 21 nt, Human
uccaggcugggagagccuucc

SEQ ID NO: 3077911 - RNA, 12 nt, Human
uccaggcuccuu

SEQ ID NO: 3077912 - RNA, 10 nt, Human
uccaggcucc

SEQ ID NO: 3077913 - RNA, 23 nt, Human
uccaggcugggagagccuuccag

SEQ ID NO: 3077914 - RNA, 22 nt, Human
accuuuuuuauacauaaacaag

SEQ ID NO: 3077915 - RNA, 15 nt, Human
acgaauauugcugau

SEQ ID NO: 3077916 - RNA, 18 nt, Human
acgaauauugcugauggu

SEQ ID NO: 3077917 - RNA, 13 nt, Human
acgcuggaccuug

SEQ ID NO: 3077918 - RNA, 11 nt, Human
acgcucucugg

SEQ ID NO: 3077919 - RNA, 16 nt, Human
acgcuggagugcagug

SEQ ID NO: 3077920 - RNA, 15 nt, Human
acgcuggagugcagu

SEQ ID NO: 3077921 - RNA, 23 nt, Human
acgcuggaccuugaacuggguac

SEQ ID NO: 3077922 - RNA, 20 nt, Human
acgcuggaccuugaacuggg

SEQ ID NO: 3077923 - RNA, 17 nt, Human
acgcuggagugcaguga

SEQ ID NO: 3077924 - RNA, 21 nt, Human
acggagucccaccuuggcugc

SEQ ID NO: 3077925 - RNA, 23 nt, Human
acggagucccaccuuggcugcag

SEQ ID NO: 3077926 - RNA, 21 nt, Human
acgaauauugcugauggugca

SEQ ID NO: 3077927 - RNA, 14 nt, Human
acgaauauugcuga

SEQ ID NO: 3077928 - RNA, 21 nt, Human
acgcuacccgggaagggggcu

SEQ ID NO: 3077929 - RNA, 18 nt, Human
acgcuacccgggaagggg

SEQ ID NO: 3077930 - RNA, 12 nt, Human
acggccaggcca

SEQ ID NO: 3077931 - RNA, 18 nt, Human
acggcucacugcagccuc

SEQ ID NO: 3077932 - RNA, 17 nt, Human
acggcucacugcagccu

SEQ ID NO: 3077933 - RNA, 15 nt, Human
acggcucacugcagc

SEQ ID NO: 3077934 - RNA, 16 nt, Human
acggcucacugcagcc

SEQ ID NO: 3077935 - RNA, 18 nt, Human
acggcuuuuacuuaaacc

SEQ ID NO: 3077936 - RNA, 14 nt, Human
uccaguaucuugaa

SEQ ID NO: 3077937 - RNA, 15 nt, Human
uccaguaucuugaag

SEQ ID NO: 3077938 - RNA, 15 nt, Human
uccagugaggcucug

SEQ ID NO: 3077939 - RNA, 18 nt, Human
uccagugagacagcucug

SEQ ID NO: 3077940 - RNA, 16 nt, Human
uccagugaggcucugc

SEQ ID NO: 3077941 - RNA, 22 nt, Human
uccagugaggcucugcccuugg

SEQ ID NO: 3077942 - RNA, 23 nt, Human
uccagugaggcucugcccuuggu

SEQ ID NO: 3077943 - RNA, 16 nt, Human
uccaguaucuugaaga

SEQ ID NO: 3077944 - RNA, 18 nt, Human
uccaguaucuugaagacu

SEQ ID NO: 3077945 - RNA, 15 nt, Human
acuaauuuuaaaaug

SEQ ID NO: 3077946 - RNA, 22 nt, Human
acguuucuaaaggcuaccuuug

SEQ ID NO: 3077947 - RNA, 16 nt, Human
ucccagauacuugggg

SEQ ID NO: 3077948 - RNA, 12 nt, Human
ucccagccccaa

SEQ ID NO: 3077949 - RNA, 18 nt, Human
ucccagauacuugggggg

SEQ ID NO: 3077950 - RNA, 17 nt, Human
acgguuuuacugcagcu

SEQ ID NO: 3077951 - RNA, 12 nt, Human
uccauccugagg

SEQ ID NO: 3077952 - RNA, 15 nt, Human
uccauccugaggcuc

SEQ ID NO: 3077953 - RNA, 11 nt, Human
uccauccugag

SEQ ID NO: 3077954 - RNA, 13 nt, Human
acguugugcauuu

SEQ ID NO: 3077955 - RNA, 15 nt, Human
acguugugcauuugg

SEQ ID NO: 3077956 - RNA, 14 nt, Human
acguugugcauuug

SEQ ID NO: 3077957 - RNA, 16 nt, Human
acguuucuaaaggcua

SEQ ID NO: 3077958 - RNA, 15 nt, Human
acguuucuaaaggcu

SEQ ID NO: 3077959 - RNA, 17 nt, Human
acguggcugcuucaagg

SEQ ID NO: 3077960 - RNA, 18 nt, Human
acguggcugcuucaagga

SEQ ID NO: 3077961 - RNA, 19 nt, Human
acguggcugcuucaaggau

SEQ ID NO: 3077962 - RNA, 21 nt, Human
acguggcugcuucaaggaucc

SEQ ID NO: 3077963 - RNA, 21 nt, Human
acuaucuaaauguugaaagau

SEQ ID NO: 3077964 - RNA, 16 nt, Human
acuaucuaaauguuga

SEQ ID NO: 3077965 - RNA, 15 nt, Human
acuaucucauuucca

SEQ ID NO: 3077966 - RNA, 16 nt, Human
acuaucucauuuccaa

SEQ ID NO: 3077967 - RNA, 17 nt, Human
acuaucucauuuccaag

SEQ ID NO: 3077968 - RNA, 18 nt, Human
acuauagccuaggugaca

SEQ ID NO: 3077969 - RNA, 17 nt, Human
acuauauuguuugcuaa

SEQ ID NO: 3077970 - RNA, 22 nt, Human
acuauauuguuugcuaagcauu

SEQ ID NO: 3077971 - RNA, 22 nt, Human
acuauagccuaggugacagagu

SEQ ID NO: 3077972 - RNA, 20 nt, Human
acuauagccuaggugacaga

SEQ ID NO: 3077973 - RNA, 16 nt, Human
acucaaugcacugaca

SEQ ID NO: 3077974 - RNA, 16 nt, Human
acuauguugcccaggc

SEQ ID NO: 3077975 - RNA, 15 nt, Human
acuauguugcccagg

SEQ ID NO: 3077976 - RNA, 22 nt, Human
acuauggcccuggccuagcaua

SEQ ID NO: 3077977 - RNA, 14 nt, Human
acuauguugcccag

SEQ ID NO: 3077978 - RNA, 23 nt, Human
uccccacccugaaagcccugagc

SEQ ID NO: 3077979 - RNA, 15 nt, Human
uccccaccgcagaca

SEQ ID NO: 3077980 - RNA, 16 nt, Human
uccccaccgcagacag

SEQ ID NO: 3077981 - RNA, 18 nt, Human
uccccaggaggccagccu

SEQ ID NO: 3077982 - RNA, 12 nt, Human
uccccacccuga

SEQ ID NO: 3077983 - RNA, 17 nt, Human
uccccaggaggccagcc

SEQ ID NO: 3077984 - RNA, 20 nt, Human
uccccaggaggccagccuug

SEQ ID NO: 3077985 - RNA, 21 nt, Human
uccccaggaggccagccuuga

SEQ ID NO: 3077986 - RNA, 11 nt, Human
ucccccagccc

SEQ ID NO: 3077987 - RNA, 13 nt, Human
ucccccagcccca

SEQ ID NO: 3077988 - RNA, 15 nt, Human
ucccccagccccauc

SEQ ID NO: 3077989 - RNA, 16 nt, Human
ucccccagccccaucc

SEQ ID NO: 3077990 - RNA, 21 nt, Human
acucuugaaaaaugcauguug

SEQ ID NO: 3077991 - RNA, 14 nt, Human
acucuugaccucag

SEQ ID NO: 3077992 - RNA, 16 nt, Human
acucuuauaucuauau

SEQ ID NO: 3077993 - RNA, 17 nt, Human
acucuuauaucuauauu

SEQ ID NO: 3077994 - RNA, 18 nt, Human
acucuuauaucuauauuu

SEQ ID NO: 3077995 - RNA, 21 nt, Human
acucuuaagaagacugcauua

SEQ ID NO: 3077996 - RNA, 16 nt, Human
acucuugaccucaggu

SEQ ID NO: 3077997 - RNA, 15 nt, Human
acucuugaccucagg

SEQ ID NO: 3077998 - RNA, 19 nt, Human
acucuuauaucuauauuuu

SEQ ID NO: 3077999 - RNA, 22 nt, Human
uccucauacccacccccaccca

SEQ ID NO: 3078000 - RNA, 22 nt, Human
uccucauaguaugguggcuggg

SEQ ID NO: 3078001 - RNA, 23 nt, Human
uccucauacccacccccacccaa

SEQ ID NO: 3078002 - RNA, 23 nt, Human
acuccuugaaaacacuguucucu

SEQ ID NO: 3078003 - RNA, 24 nt, Human
acuccuugaaaacacuguucucug

SEQ ID NO: 3078004 - RNA, 14 nt, Human
acucuccuccagag

SEQ ID NO: 3078005 - RNA, 17 nt, Human
acucuccuccagaguca

SEQ ID NO: 3078006 - RNA, 18 nt, Human
acucuccuggaaauauua

SEQ ID NO: 3078007 - RNA, 15 nt, Human
acucuccuugguguc

SEQ ID NO: 3078008 - RNA, 21 nt, Human
acucuccucugcugcuggcug

SEQ ID NO: 3078009 - RNA, 13 nt, Human
acucuccucugcu

SEQ ID NO: 3078010 - RNA, 14 nt, Human
acucuccucugcug

SEQ ID NO: 3078011 - RNA, 12 nt, Human
acucuccucugc

SEQ ID NO: 3078012 - RNA, 13 nt, Human
acucuggcagcuc

SEQ ID NO: 3078013 - RNA, 15 nt, Human
acucuggcagcucag

SEQ ID NO: 3078014 - RNA, 16 nt, Human
acucuccuuggugucg

SEQ ID NO: 3078015 - RNA, 23 nt, Human
acucuccuuggugucgggcauga

SEQ ID NO: 3078016 - RNA, 11 nt, Human
acucugagacu

SEQ ID NO: 3078017 - RNA, 22 nt, Human
acucugagacucgcgacaaugc

SEQ ID NO: 3078018 - RNA, 13 nt, Human
ucccuuuuuuuaa

SEQ ID NO: 3078019 - RNA, 23 nt, Human
ucccuuuuuuggcugcugaaggc

SEQ ID NO: 3078020 - RNA, 20 nt, Human
ucccuuuuuuggcugcugaa

SEQ ID NO: 3078021 - RNA, 22 nt, Human
ucccuuuuuuggcugcugaagg

SEQ ID NO: 3078022 - RNA, 19 nt, Human
ucccuuugacgccauccca

SEQ ID NO: 3078023 - RNA, 17 nt, Human
ucccuuuuuuggcugcu

SEQ ID NO: 3078024 - RNA, 19 nt, Human
ucccuuuuuuggcugcuga

SEQ ID NO: 3078025 - RNA, 22 nt, Human
ucccugguggcagcucaccucu

SEQ ID NO: 3078026 - RNA, 19 nt, Human
ucccuuggauuguccccga

SEQ ID NO: 3078027 - RNA, 20 nt, Human
ucccuuggauuguccccgac

SEQ ID NO: 3078028 - RNA, 16 nt, Human
ucccuuugacgccauc

SEQ ID NO: 3078029 - RNA, 18 nt, Human
ucccuuugacgccauccc

SEQ ID NO: 3078030 - RNA, 21 nt, Human
ucccuuuuuuuaaguaaggaa

SEQ ID NO: 3078031 - RNA, 16 nt, Human
ucccuuuuuuuaagua

SEQ ID NO: 3078032 - RNA, 14 nt, Human
uccuacucuguguc

SEQ ID NO: 3078033 - RNA, 13 nt, Human
uccuacucugugu

SEQ ID NO: 3078034 - RNA, 12 nt, Human
uccuacucugug

SEQ ID NO: 3078035 - RNA, 15 nt, Human
uccuacucuguguca

SEQ ID NO: 3078036 - RNA, 20 nt, Human
uccuaggacccgucuccagc

SEQ ID NO: 3078037 - RNA, 14 nt, Human
acuccuggccucaa

SEQ ID NO: 3078038 - RNA, 13 nt, Human
acuccuggccuca

SEQ ID NO: 3078039 - RNA, 13 nt, Human
uccuaggcauuug

SEQ ID NO: 3078040 - RNA, 12 nt, Human
acuccuggccuc

SEQ ID NO: 3078041 - RNA, 14 nt, Human
acucaccccagccc

SEQ ID NO: 3078042 - RNA, 15 nt, Human
acucaccccagcccc

SEQ ID NO: 3078043 - RNA, 16 nt, Human
acucaccccagcccca

SEQ ID NO: 3078044 - RNA, 13 nt, Human
acucaccccagcc

SEQ ID NO: 3078045 - RNA, 19 nt, Human
acuccagugagacagcucu

SEQ ID NO: 3078046 - RNA, 18 nt, Human
ucccugguggcagcucac

SEQ ID NO: 3078047 - RNA, 19 nt, Human
ucccugguggcagcucacc

SEQ ID NO: 3078048 - RNA, 20 nt, Human
ucccugguggcagcucaccu

SEQ ID NO: 3078049 - RNA, 21 nt, Human
ucccugguggcagcucaccuc

SEQ ID NO: 3078050 - RNA, 16 nt, Human
ucccugguggcagcuc

SEQ ID NO: 3078051 - RNA, 17 nt, Human
ucccugguggcagcuca

SEQ ID NO: 3078052 - RNA, 11 nt, Human
acuccuggccu

SEQ ID NO: 3078053 - RNA, 15 nt, Human
acuccugcaggcagc

SEQ ID NO: 3078054 - RNA, 16 nt, Human
acuccugcaggcagcc

SEQ ID NO: 3078055 - RNA, 22 nt, Human
acuccugcaggcagccaggcca

SEQ ID NO: 3078056 - RNA, 12 nt, Human
acuccugcaggc

SEQ ID NO: 3078057 - RNA, 14 nt, Human
acuccugcaggcag

SEQ ID NO: 3078058 - RNA, 15 nt, Human
acucuuguuuccuua

SEQ ID NO: 3078059 - RNA, 22 nt, Human
uccucuuuggucuacacugugc

SEQ ID NO: 3078060 - RNA, 22 nt, Human
uccugaaaacccuugccaugug

SEQ ID NO: 3078061 - RNA, 12 nt, Human
uccucuuuccau

SEQ ID NO: 3078062 - RNA, 11 nt, Human
uccucuuucca

SEQ ID NO: 3078063 - RNA, 14 nt, Human
uccucccucccucu

SEQ ID NO: 3078064 - RNA, 11 nt, Human
uccucccuccc

SEQ ID NO: 3078065 - RNA, 19 nt, Human
uccucuuuggucuacacug

SEQ ID NO: 3078066 - RNA, 21 nt, Human
uccucuuuggucuacacugug

SEQ ID NO: 3078067 - RNA, 19 nt, Human
uccucuuuccaucuacccu

SEQ ID NO: 3078068 - RNA, 21 nt, Human
acugagaaauuuauaaacuuu

SEQ ID NO: 3078069 - RNA, 17 nt, Human
acugagaaauuuauaaa

SEQ ID NO: 3078070 - RNA, 12 nt, Human
acugagaaauuu

SEQ ID NO: 3078071 - RNA, 15 nt, Human
acugagacagcccgg

SEQ ID NO: 3078072 - RNA, 18 nt, Human
acugagacagcccgggcu

SEQ ID NO: 3078073 - RNA, 21 nt, Human
acugagacagcccgggcucug

SEQ ID NO: 3078074 - RNA, 22 nt, Human
acugagacagcccgggcucugc

SEQ ID NO: 3078075 - RNA, 23 nt, Human
acugagacagcccgggcucugcc

SEQ ID NO: 3078076 - RNA, 18 nt, Human
acugagagugaacaaauu

SEQ ID NO: 3078077 - RNA, 22 nt, Human
acugagaugugaacacaucagc

SEQ ID NO: 3078078 - RNA, 17 nt, Human
acugagaugugaacaca

SEQ ID NO: 3078079 - RNA, 13 nt, Human
acugacucuuaag

SEQ ID NO: 3078080 - RNA, 14 nt, Human
acugacucuuaaga

SEQ ID NO: 3078081 - RNA, 15 nt, Human
acugacucuuaagaa

SEQ ID NO: 3078082 - RNA, 16 nt, Human
acugacucuuaagaag

SEQ ID NO: 3078083 - RNA, 22 nt, Human
acugacuucuaaguaaaaccac

SEQ ID NO: 3078084 - RNA, 16 nt, Human
acugacuucuaaguaa

SEQ ID NO: 3078085 - RNA, 15 nt, Human
acugacuucuaagua

SEQ ID NO: 3078086 - RNA, 13 nt, Human
acugacuucuaag

SEQ ID NO: 3078087 - RNA, 17 nt, Human
acugacucuuaagaaga

SEQ ID NO: 3078088 - RNA, 18 nt, Human
acugacucuuaagaagac

SEQ ID NO: 3078089 - RNA, 20 nt, Human
acugacucuuaagaagacug

SEQ ID NO: 3078090 - RNA, 23 nt, Human
uccuggaagugcuaauuuugaaa

SEQ ID NO: 3078091 - RNA, 22 nt, Human
uccuggaauaucuccgucaacu

SEQ ID NO: 3078092 - RNA, 15 nt, Human
uccuggaaauauuaa

SEQ ID NO: 3078093 - RNA, 16 nt, Human
uccuggaaaucagggu

SEQ ID NO: 3078094 - RNA, 17 nt, Human
uccugggagugagcugg

SEQ ID NO: 3078095 - RNA, 14 nt, Human
uccugggagugagc

SEQ ID NO: 3078096 - RNA, 12 nt, Human
uccugggaguga

SEQ ID NO: 3078097 - RNA, 15 nt, Human
uccugggagcuuuug

SEQ ID NO: 3078098 - RNA, 21 nt, Human
uccugcugcaguugccaguca

SEQ ID NO: 3078099 - RNA, 12 nt, Human
uccugcaggcag

SEQ ID NO: 3078100 - RNA, 13 nt, Human
uccugcaggcagc

SEQ ID NO: 3078101 - RNA, 14 nt, Human
uccugcaggcagcc

SEQ ID NO: 3078102 - RNA, 21 nt, Human
uccugccucgaacuggcugca

SEQ ID NO: 3078103 - RNA, 20 nt, Human
uccugaugcuucuucagaga

SEQ ID NO: 3078104 - RNA, 21 nt, Human
uccugaugcuucuucagagac

SEQ ID NO: 3078105 - RNA, 19 nt, Human
uccugaugcuucuucagag

SEQ ID NO: 3078106 - RNA, 19 nt, Human
acugcacuccagccugggu

SEQ ID NO: 3078107 - RNA, 20 nt, Human
acugcacuccagccugggug

SEQ ID NO: 3078108 - RNA, 18 nt, Human
acugcacuccagccuggg

SEQ ID NO: 3078109 - RNA, 17 nt, Human
acugcacuccagccugg

SEQ ID NO: 3078110 - RNA, 14 nt, Human
acugcacuccagcc

SEQ ID NO: 3078111 - RNA, 21 nt, Human
acugcacuauagccuagguga

SEQ ID NO: 3078112 - RNA, 20 nt, Human
acugcacuauagccuaggug

SEQ ID NO: 3078113 - RNA, 16 nt, Human
acugcaccgggccaca

SEQ ID NO: 3078114 - RNA, 14 nt, Human
acugcaccgggcca

SEQ ID NO: 3078115 - RNA, 21 nt, Human
acugauaaagaugagugagca

SEQ ID NO: 3078116 - RNA, 13 nt, Human
acugauaaagaug

SEQ ID NO: 3078117 - RNA, 19 nt, Human
acauucuuccaaaaagauu

SEQ ID NO: 3078118 - RNA, 23 nt, Human
ucaaugaaugaaugaauggcuaa

SEQ ID NO: 3078119 - RNA, 19 nt, Human
ucaauauuucagauaauca

SEQ ID NO: 3078120 - RNA, 15 nt, Human
ucaauauuucagaua

SEQ ID NO: 3078121 - RNA, 18 nt, Human
ucaauauccaaaccaaau

SEQ ID NO: 3078122 - RNA, 22 nt, Human
ucaauaucuuuuuuuuaauaaa

SEQ ID NO: 3078123 - RNA, 17 nt, Human
ucaagaaaacaacuuca

SEQ ID NO: 3078124 - RNA, 22 nt, Human
ucaaguccucuuuucugagagg

SEQ ID NO: 3078125 - RNA, 19 nt, Human
acauuguacgaagaguauu

SEQ ID NO: 3078126 - RNA, 20 nt, Human
acauuuuauuuuauuaugca

SEQ ID NO: 3078127 - RNA, 19 nt, Human
acauuuuauuuuauuaugc

SEQ ID NO: 3078128 - RNA, 14 nt, Human
acauuuuauuuuau

SEQ ID NO: 3078129 - RNA, 18 nt, Human
acauuuuauuuuauuaug

SEQ ID NO: 3078130 - RNA, 19 nt, Human
acauuuuuaagugcugcau

SEQ ID NO: 3078131 - RNA, 23 nt, Human
acauuuuuaagugcugcauuuaa

SEQ ID NO: 3078132 - RNA, 22 nt, Human
acauuuuuaagugcugcauuua

SEQ ID NO: 3078133 - RNA, 21 nt, Human
acauuuuuaagugcugcauuu

SEQ ID NO: 3078134 - RNA, 16 nt, Human
acauuuuuuaaaugca

SEQ ID NO: 3078135 - RNA, 14 nt, Human
acauuuuuuaaaug

SEQ ID NO: 3078136 - RNA, 17 nt, Human
acauuuuuuaaaugcac

SEQ ID NO: 3078137 - RNA, 23 nt, Human
accaaaaaucucaauauuucaga

SEQ ID NO: 3078138 - RNA, 20 nt, Human
acaugaauauuuaguguuca

SEQ ID NO: 3078139 - RNA, 16 nt, Human
acaugaaguccaagca

SEQ ID NO: 3078140 - RNA, 16 nt, Human
acaugagguacugaga

SEQ ID NO: 3078141 - RNA, 20 nt, Human
acaugagguacugagaguga

SEQ ID NO: 3078142 - RNA, 21 nt, Human
acaugcuacacacugcauguu

SEQ ID NO: 3078143 - RNA, 15 nt, Human
acaugcuacacacug

SEQ ID NO: 3078144 - RNA, 23 nt, Human
acaugagguacugagagugaaca

SEQ ID NO: 3078145 - RNA, 22 nt, Human
acauguaauuaaguacuaugua

SEQ ID NO: 3078146 - RNA, 21 nt, Human
acauguaauuaaguacuaugu

SEQ ID NO: 3078147 - RNA, 19 nt, Human
acauguaauuaaguacuau

SEQ ID NO: 3078148 - RNA, 17 nt, Human
acauguaauuaaguacu

SEQ ID NO: 3078149 - RNA, 15 nt, Human
acauguaauuaagua

SEQ ID NO: 3078150 - RNA, 22 nt, Human
acauggcuggagcuagaauuug

SEQ ID NO: 3078151 - RNA, 11 nt, Human
acaugggacau

SEQ ID NO: 3078152 - RNA, 14 nt, Human
acaugggacauuug

SEQ ID NO: 3078153 - RNA, 21 nt, Human
acaugggacauuugcucaugg

SEQ ID NO: 3078154 - RNA, 15 nt, Human
acaugggacauuugc

SEQ ID NO: 3078155 - RNA, 20 nt, Human
acaugggacauuugcucaug

SEQ ID NO: 3078156 - RNA, 14 nt, Human
ucaaccagcagaug

SEQ ID NO: 3078157 - RNA, 20 nt, Human
ucaacugcaucaagauguga

SEQ ID NO: 3078158 - RNA, 13 nt, Human
ucaaauuucuaaa

SEQ ID NO: 3078159 - RNA, 14 nt, Human
acauuccugaugcu

SEQ ID NO: 3078160 - RNA, 14 nt, Human
acauuccugaacag

SEQ ID NO: 3078161 - RNA, 15 nt, Human
acauuccugaacagg

SEQ ID NO: 3078162 - RNA, 15 nt, Human
ucaaauugugugaaa

SEQ ID NO: 3078163 - RNA, 18 nt, Human
ucaaauugugugaaaggu

SEQ ID NO: 3078164 - RNA, 23 nt, Human
acauguaauuaaguacuauguau

SEQ ID NO: 3078165 - RNA, 15 nt, Human
acauguccaagaagc

SEQ ID NO: 3078166 - RNA, 16 nt, Human
ucacaguucucuccuu

SEQ ID NO: 3078167 - RNA, 20 nt, Human
ucacaguucucuccuucuuc

SEQ ID NO: 3078168 - RNA, 13 nt, Human
ucacagccucuga

SEQ ID NO: 3078169 - RNA, 20 nt, Human
ucacagaugggugcuuggag

SEQ ID NO: 3078170 - RNA, 16 nt, Human
ucaauucuugccaaau

SEQ ID NO: 3078171 - RNA, 17 nt, Human
ucacaaaggaugcccaa

SEQ ID NO: 3078172 - RNA, 21 nt, Human
ucacaacagauuauuaccuua

SEQ ID NO: 3078173 - RNA, 14 nt, Human
ucacauaucuagua

SEQ ID NO: 3078174 - RNA, 24 nt, Human
accacauuggagauguuuaguaau

SEQ ID NO: 3078175 - RNA, 16 nt, Human
accacaucuugcucug

SEQ ID NO: 3078176 - RNA, 18 nt, Human
accacaugugcacaugca

SEQ ID NO: 3078177 - RNA, 20 nt, Human
accaccacacccagcccacu

SEQ ID NO: 3078178 - RNA, 15 nt, Human
accaccacacccagc

SEQ ID NO: 3078179 - RNA, 19 nt, Human
accacaucuugcucugcug

SEQ ID NO: 3078180 - RNA, 18 nt, Human
accacaucuugcucugcu

SEQ ID NO: 3078181 - RNA, 17 nt, Human
accacaucuugcucugc

SEQ ID NO: 3078182 - RNA, 15 nt, Human
accacuacauucugu

SEQ ID NO: 3078183 - RNA, 16 nt, Human
accacuacauucuguu

SEQ ID NO: 3078184 - RNA, 17 nt, Human
accacuacauucuguua

SEQ ID NO: 3078185 - RNA, 22 nt, Human
accagcgugugacuacuccccc

SEQ ID NO: 3078186 - RNA, 14 nt, Human
ucaccucauggaau

SEQ ID NO: 3078187 - RNA, 12 nt, Human
ucaccucaugga

SEQ ID NO: 3078188 - RNA, 13 nt, Human
ucaccucauggaa

SEQ ID NO: 3078189 - RNA, 17 nt, Human
ucacugagacagcccgg

SEQ ID NO: 3078190 - RNA, 21 nt, Human
ucacugagacagcccgggcuc

SEQ ID NO: 3078191 - RNA, 22 nt, Human
ucacugagacagcccgggcucu

SEQ ID NO: 3078192 - RNA, 14 nt, Human
ucacugcagccuca

SEQ ID NO: 3078193 - RNA, 16 nt, Human
ucacugagacagcccg

SEQ ID NO: 3078194 - RNA, 13 nt, Human
ucacugcagccuc

SEQ ID NO: 3078195 - RNA, 15 nt, Human
ucacugcagccucaa

SEQ ID NO: 3078196 - RNA, 19 nt, Human
ucacuguugcccaggcugg

SEQ ID NO: 3078197 - RNA, 23 nt, Human
ucacuguugcccaggcuggcgug

SEQ ID NO: 3078198 - RNA, 17 nt, Human
accaguguuguggauuu

SEQ ID NO: 3078199 - RNA, 15 nt, Human
accaguguuguggau

SEQ ID NO: 3078200 - RNA, 14 nt, Human
accagucugacugu

SEQ ID NO: 3078201 - RNA, 10 nt, Human
ucacuugagu

SEQ ID NO: 3078202 - RNA, 23 nt, Human
ucacuugaacccgggaggcagag

SEQ ID NO: 3078203 - RNA, 15 nt, Human
ucagcaaaagaugcu

SEQ ID NO: 3078204 - RNA, 21 nt, Human
ucagauuugaacucuucaauc

SEQ ID NO: 3078205 - RNA, 22 nt, Human
accauaagcuacugccauccug

SEQ ID NO: 3078206 - RNA, 12 nt, Human
ucagauuugaac

SEQ ID NO: 3078207 - RNA, 17 nt, Human
accauaagcuacugcca

SEQ ID NO: 3078208 - RNA, 18 nt, Human
accauaagcuacugccau

SEQ ID NO: 3078209 - RNA, 16 nt, Human
accauaagcuacugcc

SEQ ID NO: 3078210 - RNA, 13 nt, Human
accccagccccaa

SEQ ID NO: 3078211 - RNA, 22 nt, Human
accccagccccaaaacucuccu

SEQ ID NO: 3078212 - RNA, 17 nt, Human
accccacacacgccaga

SEQ ID NO: 3078213 - RNA, 23 nt, Human
acccaggagccccgaggccuucu

SEQ ID NO: 3078214 - RNA, 19 nt, Human
acccaggagccccgaggcc

SEQ ID NO: 3078215 - RNA, 13 nt, Human
ucagcccucagaa

SEQ ID NO: 3078216 - RNA, 14 nt, Human
ucagcccucagaau

SEQ ID NO: 3078217 - RNA, 14 nt, Human
accccugcuucuga

SEQ ID NO: 3078218 - RNA, 18 nt, Human
accccaucucuacaaaaa

SEQ ID NO: 3078219 - RNA, 12 nt, Human
ucagcucaugga

SEQ ID NO: 3078220 - RNA, 12 nt, Human
ucagcuccagcu

SEQ ID NO: 3078221 - RNA, 23 nt, Human
ucagcggggacagcuccuucugu

SEQ ID NO: 3078222 - RNA, 21 nt, Human
ucagcggggacagcuccuucu

SEQ ID NO: 3078223 - RNA, 20 nt, Human
ucagcggggacagcuccuuc

SEQ ID NO: 3078224 - RNA, 19 nt, Human
ucagcggggacagcuccuu

SEQ ID NO: 3078225 - RNA, 18 nt, Human
ucagcggggacagcuccu

SEQ ID NO: 3078226 - RNA, 19 nt, Human
ucagggucccugguggcag

SEQ ID NO: 3078227 - RNA, 16 nt, Human
ucaggguuggccccug

SEQ ID NO: 3078228 - RNA, 23 nt, Human
ucaggccaggcccucugcccacu

SEQ ID NO: 3078229 - RNA, 22 nt, Human
ucagcuuguaaauagcucaggu

SEQ ID NO: 3078230 - RNA, 21 nt, Human
ucagcuuguaaauagcucagg

SEQ ID NO: 3078231 - RNA, 14 nt, Human
ucagcuccagcuca

SEQ ID NO: 3078232 - RNA, 21 nt, Human
ucaggccaggcccucugccca

SEQ ID NO: 3078233 - RNA, 22 nt, Human
ucaggccaggcccucugcccac

SEQ ID NO: 3078234 - RNA, 20 nt, Human
ucaggccaggcccucugccc

SEQ ID NO: 3078235 - RNA, 12 nt, Human
acccgggaaggg

SEQ ID NO: 3078236 - RNA, 13 nt, Human
acccgggaagggg

SEQ ID NO: 3078237 - RNA, 15 nt, Human
acccgggaggcagag

SEQ ID NO: 3078238 - RNA, 17 nt, Human
acccgggaggcagaggu

SEQ ID NO: 3078239 - RNA, 20 nt, Human
acccggccccugcugguuca

SEQ ID NO: 3078240 - RNA, 17 nt, Human
acccggccccugcuggu

SEQ ID NO: 3078241 - RNA, 22 nt, Human
acccggccccugcugguucagg

SEQ ID NO: 3078242 - RNA, 16 nt, Human
acccggccccugcugg

SEQ ID NO: 3078243 - RNA, 15 nt, Human
acccggccccugcug

SEQ ID NO: 3078244 - RNA, 14 nt, Human
acccggccccugcu

SEQ ID NO: 3078245 - RNA, 22 nt, Human
ucagguaacaggcagauacagg

SEQ ID NO: 3078246 - RNA, 21 nt, Human
ucagguaacaggcagauacag

SEQ ID NO: 3078247 - RNA, 23 nt, Human
ucagguaacaggcagauacagga

SEQ ID NO: 3078248 - RNA, 20 nt, Human
acccuuguggucccacccca

SEQ ID NO: 3078249 - RNA, 23 nt, Human
acccuuguggucccaccccacac

SEQ ID NO: 3078250 - RNA, 17 nt, Human
acccuugccgucuaccu

SEQ ID NO: 3078251 - RNA, 15 nt, Human
accgaaaacguggcu

SEQ ID NO: 3078252 - RNA, 15 nt, Human
acccugaggcccaga

SEQ ID NO: 3078253 - RNA, 16 nt, Human
acccugaggcccagag

SEQ ID NO: 3078254 - RNA, 15 nt, Human
acccugcccuguggg

SEQ ID NO: 3078255 - RNA, 14 nt, Human
acccugcccugugg

SEQ ID NO: 3078256 - RNA, 17 nt, Human
acccugcccugugggcc

SEQ ID NO: 3078257 - RNA, 22 nt, Human
acccugcccugugggcccccaa

SEQ ID NO: 3078258 - RNA, 13 nt, Human
acccugaggccca

SEQ ID NO: 3078259 - RNA, 14 nt, Human
acccugaggcccag

SEQ ID NO: 3078260 - RNA, 16 nt, Human
acccugaaagcccuga

SEQ ID NO: 3078261 - RNA, 18 nt, Human
acccugaaagcccugagc

SEQ ID NO: 3078262 - RNA, 14 nt, Human
acccgucuccagcu

SEQ ID NO: 3078263 - RNA, 16 nt, Human
acccgucuccagcugc

SEQ ID NO: 3078264 - RNA, 18 nt, Human
acccucgaggcggaucuu

SEQ ID NO: 3078265 - RNA, 19 nt, Human
acccucgaggcggaucuuu

SEQ ID NO: 3078266 - RNA, 12 nt, Human
accgcagacagg

SEQ ID NO: 3078267 - RNA, 16 nt, Human
accgcagacaggacca

SEQ ID NO: 3078268 - RNA, 20 nt, Human
accucccacaaaggagagcu

SEQ ID NO: 3078269 - RNA, 13 nt, Human
ucaucuaggauuu

SEQ ID NO: 3078270 - RNA, 14 nt, Human
ucaugcaaacuuua

SEQ ID NO: 3078271 - RNA, 15 nt, Human
ucaugaaagauucaa

SEQ ID NO: 3078272 - RNA, 16 nt, Human
ucaugaaagauucaau

SEQ ID NO: 3078273 - RNA, 17 nt, Human
ucaugaaagauucaaug

SEQ ID NO: 3078274 - RNA, 23 nt, Human
ucaugcaaacuuuauuuuguguu

SEQ ID NO: 3078275 - RNA, 16 nt, Human
ucaugugaaaucauuc

SEQ ID NO: 3078276 - RNA, 17 nt, Human
ucaugugaaaucauuca

SEQ ID NO: 3078277 - RNA, 16 nt, Human
ucagugccaaaaacaa

SEQ ID NO: 3078278 - RNA, 12 nt, Human
ucagugccacua

SEQ ID NO: 3078279 - RNA, 17 nt, Human
accgaaaacguggcugc

SEQ ID NO: 3078280 - RNA, 19 nt, Human
accgaaaacguggcugcuu

SEQ ID NO: 3078281 - RNA, 11 nt, Human
ucagugccuua

SEQ ID NO: 3078282 - RNA, 12 nt, Human
ucagugccuuau

SEQ ID NO: 3078283 - RNA, 14 nt, Human
ucagugccuuaugg

SEQ ID NO: 3078284 - RNA, 15 nt, Human
ucagugccuuaugga

SEQ ID NO: 3078285 - RNA, 9 nt, Human
ucagugccu

SEQ ID NO: 3078286 - RNA, 10 nt, Human
ucagugccuu

SEQ ID NO: 3078287 - RNA, 22 nt, Human
ucauaaaaagccugcaauuuca

SEQ ID NO: 3078288 - RNA, 17 nt, Human
ucaguuuuugugaaaag

SEQ ID NO: 3078289 - RNA, 15 nt, Human
ucaguuuuugugaaa

SEQ ID NO: 3078290 - RNA, 16 nt, Human
ucagugccuuauggaa

SEQ ID NO: 3078291 - RNA, 11 nt, Human
ucaguggcagc

SEQ ID NO: 3078292 - RNA, 12 nt, Human
ucaguggcagcu

SEQ ID NO: 3078293 - RNA, 14 nt, Human
ucauaaccuagccu

SEQ ID NO: 3078294 - RNA, 19 nt, Human
ucauaguaugguggcuggg

SEQ ID NO: 3078295 - RNA, 18 nt, Human
ucauaguaugguggcugg

SEQ ID NO: 3078296 - RNA, 15 nt, Human
ucauaguaugguggc

SEQ ID NO: 3078297 - RNA, 21 nt, Human
ucauaguaugguggcuggguu

SEQ ID NO: 3078298 - RNA, 18 nt, Human
ucauauaagauucauauu

SEQ ID NO: 3078299 - RNA, 15 nt, Human
ucauauuuucaugcu

SEQ ID NO: 3078300 - RNA, 19 nt, Human
accgagggggcugcuccca

SEQ ID NO: 3078301 - RNA, 20 nt, Human
accgagggggcugcucccac

SEQ ID NO: 3078302 - RNA, 23 nt, Human
ucauauuuacuucuuauacauuu

SEQ ID NO: 3078303 - RNA, 15 nt, Human
ucauauuuacuucuu

SEQ ID NO: 3078304 - RNA, 16 nt, Human
aauuauuauuuggccc

SEQ ID NO: 3078305 - RNA, 21 nt, Human
aauuauuuuguucauacauau

SEQ ID NO: 3078306 - RNA, 22 nt, Human
aauuauuuuguucauacauauu

SEQ ID NO: 3078307 - RNA, 16 nt, Human
aauuauuuuguucaua

SEQ ID NO: 3078308 - RNA, 18 nt, Human
aauuauuuuguucauaca

SEQ ID NO: 3078309 - RNA, 19 nt, Human
aauuauuuuguucauacau

SEQ ID NO: 3078310 - RNA, 20 nt, Human
aauuauuuuguucauacaua

SEQ ID NO: 3078311 - RNA, 18 nt, Human
aauuccaagugauugaaa

SEQ ID NO: 3078312 - RNA, 14 nt, Human
aauuccccacccug

SEQ ID NO: 3078313 - RNA, 12 nt, Human
aauuccccagau

SEQ ID NO: 3078314 - RNA, 22 nt, Human
aauuccacuuauaggaauugac

SEQ ID NO: 3078315 - RNA, 19 nt, Human
uacauuguacgaagaguau

SEQ ID NO: 3078316 - RNA, 18 nt, Human
uaccugccaggaagccag

SEQ ID NO: 3078317 - RNA, 20 nt, Human
uaccugccaggaagccagca

SEQ ID NO: 3078318 - RNA, 23 nt, Human
uaccugccaggaagccagcaggc

SEQ ID NO: 3078319 - RNA, 13 nt, Human
uaccugucccccu

SEQ ID NO: 3078320 - RNA, 14 nt, Human
uaccugucccccug

SEQ ID NO: 3078321 - RNA, 16 nt, Human
uaccugucccccugac

SEQ ID NO: 3078322 - RNA, 17 nt, Human
uaccugucccccugaca

SEQ ID NO: 3078323 - RNA, 10 nt, Human
uaccuguccc

SEQ ID NO: 3078324 - RNA, 15 nt, Human
aauuagccaagugug

SEQ ID NO: 3078325 - RNA, 11 nt, Human
aauuacaggaa

SEQ ID NO: 3078326 - RNA, 18 nt, Human
uacuguaaggcaaucaug

SEQ ID NO: 3078327 - RNA, 14 nt, Human
uacuguaagaaaau

SEQ ID NO: 3078328 - RNA, 13 nt, Human
uacuguaagaaaa

SEQ ID NO: 3078329 - RNA, 19 nt, Human
uacuguaaggcaaucaugg

SEQ ID NO: 3078330 - RNA, 18 nt, Human
uacuguaauuugugauac

SEQ ID NO: 3078331 - RNA, 20 nt, Human
uacuguaauuugugauacaa

SEQ ID NO: 3078332 - RNA, 19 nt, Human
uacuguaauuugugauaca

SEQ ID NO: 3078333 - RNA, 16 nt, Human
uacuggagaaaaugga

SEQ ID NO: 3078334 - RNA, 12 nt, Human
uacucuguguca

SEQ ID NO: 3078335 - RNA, 14 nt, Human
aauugauguguuua

SEQ ID NO: 3078336 - RNA, 13 nt, Human
aauugauguguuu

SEQ ID NO: 3078337 - RNA, 19 nt, Human
aauugaugggauuugguca

SEQ ID NO: 3078338 - RNA, 21 nt, Human
uacuguacaugaaaacacauu

SEQ ID NO: 3078339 - RNA, 22 nt, Human
uacuguacaugaaaacacauuu

SEQ ID NO: 3078340 - RNA, 18 nt, Human
uacuguacaugaaaacac

SEQ ID NO: 3078341 - RNA, 22 nt, Human
aauugacccacaagaaaugaaa

SEQ ID NO: 3078342 - RNA, 21 nt, Human
aauugacccacaagaaaugaa

SEQ ID NO: 3078343 - RNA, 22 nt, Human
uacgccaggggaaaaucagccu

SEQ ID NO: 3078344 - RNA, 16 nt, Human
uacguugugcauuugg

SEQ ID NO: 3078345 - RNA, 15 nt, Human
uacguugugcauuug

SEQ ID NO: 3078346 - RNA, 13 nt, Human
uacguacacauuu

SEQ ID NO: 3078347 - RNA, 14 nt, Human
uacguugugcauuu

SEQ ID NO: 3078348 - RNA, 12 nt, Human
uacguacacauu

SEQ ID NO: 3078349 - RNA, 18 nt, Human
uacgggaggguaaggcug

SEQ ID NO: 3078350 - RNA, 23 nt, Human
uacucuccuggaaauauuaagaa

SEQ ID NO: 3078351 - RNA, 22 nt, Human
uacucuccuggaaauauuaaga

SEQ ID NO: 3078352 - RNA, 14 nt, Human
uacuauguaucaau

SEQ ID NO: 3078353 - RNA, 13 nt, Human
uacuauguaucaa

SEQ ID NO: 3078354 - RNA, 12 nt, Human
uacuauguauca

SEQ ID NO: 3078355 - RNA, 23 nt, Human
uacuauggcccuggccuagcaua

SEQ ID NO: 3078356 - RNA, 17 nt, Human
uacuacuccuguaggaa

SEQ ID NO: 3078357 - RNA, 13 nt, Human
uacuacuccugua

SEQ ID NO: 3078358 - RNA, 16 nt, Human
aaugcuucaucccuuu

SEQ ID NO: 3078359 - RNA, 20 nt, Human
aauggaaaugggcagagcag

SEQ ID NO: 3078360 - RNA, 21 nt, Human
aauggaaaugggcagagcaga

SEQ ID NO: 3078361 - RNA, 23 nt, Human
aauggacguguuaugacuccaga

SEQ ID NO: 3078362 - RNA, 20 nt, Human
aauggacuaacuugucuuug

SEQ ID NO: 3078363 - RNA, 14 nt, Human
aauggaaccacucu

SEQ ID NO: 3078364 - RNA, 21 nt, Human
aauggacguguuaugacucca

SEQ ID NO: 3078365 - RNA, 13 nt, Human
aaugcuguguuaa

SEQ ID NO: 3078366 - RNA, 12 nt, Human
aaugcuguguua

SEQ ID NO: 3078367 - RNA, 16 nt, Human
aaugcuguauuuuaaa

SEQ ID NO: 3078368 - RNA, 11 nt, Human
aaugcccagcc

SEQ ID NO: 3078369 - RNA, 12 nt, Human
aaugcccagccc

SEQ ID NO: 3078370 - RNA, 22 nt, Human
aaugcacuuuguucuggcucuu

SEQ ID NO: 3078371 - RNA, 21 nt, Human
uacaaugcugugcccuaaagu

SEQ ID NO: 3078372 - RNA, 18 nt, Human
aaugaccuuucaauagga

SEQ ID NO: 3078373 - RNA, 16 nt, Human
aaugaccuuucaauag

SEQ ID NO: 3078374 - RNA, 17 nt, Human
aaugaccuuucaauagg

SEQ ID NO: 3078375 - RNA, 21 nt, Human
aaugcacuuuguucuggcucu

SEQ ID NO: 3078376 - RNA, 15 nt, Human
uacacuaaaagguga

SEQ ID NO: 3078377 - RNA, 14 nt, Human
uacacuaagagaga

SEQ ID NO: 3078378 - RNA, 22 nt, Human
uacacauuuuauuuuauuaugc

SEQ ID NO: 3078379 - RNA, 21 nt, Human
uacacauuuuauuuuauuaug

SEQ ID NO: 3078380 - RNA, 19 nt, Human
uacacauuuuauuuuauua

SEQ ID NO: 3078381 - RNA, 22 nt, Human
uacagacaacaaaccuguuucu

SEQ ID NO: 3078382 - RNA, 19 nt, Human
uacagacaaagcguggugg

SEQ ID NO: 3078383 - RNA, 18 nt, Human
uacagaggccaugggccu

SEQ ID NO: 3078384 - RNA, 16 nt, Human
aauggcagccuuggca

SEQ ID NO: 3078385 - RNA, 12 nt, Human
aauggcagccuu

SEQ ID NO: 3078386 - RNA, 22 nt, Human
uacauauaagugauugcugguu

SEQ ID NO: 3078387 - RNA, 23 nt, Human
uacaggucauauuaauauauuuc

SEQ ID NO: 3078388 - RNA, 16 nt, Human
uacaggugugagucac

SEQ ID NO: 3078389 - RNA, 23 nt, Human
uacauaaugcgugcauaccacuu

SEQ ID NO: 3078390 - RNA, 21 nt, Human
uacauaaugcgugcauaccac

SEQ ID NO: 3078391 - RNA, 24 nt, Human
uacauaaugcgugcauaccacuuu

SEQ ID NO: 3078392 - RNA, 19 nt, Human
aaugugaaaagaaaaauga

SEQ ID NO: 3078393 - RNA, 14 nt, Human
aaugugaaacugga

SEQ ID NO: 3078394 - RNA, 15 nt, Human
aaugugaaacuggau

SEQ ID NO: 3078395 - RNA, 17 nt, Human
aaugugaaaagaaaaau

SEQ ID NO: 3078396 - RNA, 22 nt, Human
aauguauuacaguggggaauga

SEQ ID NO: 3078397 - RNA, 20 nt, Human
aauguauguguaaguauucu

SEQ ID NO: 3078398 - RNA, 19 nt, Human
aauguauguguaaguauuc

SEQ ID NO: 3078399 - RNA, 13 nt, Human
aauguuaagcaga

SEQ ID NO: 3078400 - RNA, 21 nt, Human
aauguucucucuucuccaccu

SEQ ID NO: 3078401 - RNA, 21 nt, Human
aauuaagaaaggauaaaguug

SEQ ID NO: 3078402 - RNA, 20 nt, Human
aauuaagaaaggauaaaguu

SEQ ID NO: 3078403 - RNA, 17 nt, Human
uacauuguaaauaguau

SEQ ID NO: 3078404 - RNA, 18 nt, Human
uaccaccagucugacugu

SEQ ID NO: 3078405 - RNA, 12 nt, Human
uacauucuguua

SEQ ID NO: 3078406 - RNA, 13 nt, Human
uacauucuguuaa

SEQ ID NO: 3078407 - RNA, 17 nt, Human
aauauuguguugugaau

SEQ ID NO: 3078408 - RNA, 15 nt, Human
aauauuuauuuuaau

SEQ ID NO: 3078409 - RNA, 19 nt, Human
aauauuuauuuuaauaaug

SEQ ID NO: 3078410 - RNA, 12 nt, Human
aauauuuagugu

SEQ ID NO: 3078411 - RNA, 18 nt, Human
aauauuuauuuuaauaau

SEQ ID NO: 3078412 - RNA, 15 nt, Human
uaagagaaaugagcu

SEQ ID NO: 3078413 - RNA, 17 nt, Human
aauaugcacacauuuuu

SEQ ID NO: 3078414 - RNA, 16 nt, Human
aauaugcacacauuuu

SEQ ID NO: 3078415 - RNA, 22 nt, Human
aauaugcacacauuuuuuaaau

SEQ ID NO: 3078416 - RNA, 21 nt, Human
aauaugccccauucaacaucu

SEQ ID NO: 3078417 - RNA, 24 nt, Human
aauaugccccauucaacaucuagu

SEQ ID NO: 3078418 - RNA, 22 nt, Human
uaagcuguuacugucuucagua

SEQ ID NO: 3078419 - RNA, 18 nt, Human
uaagcacacuugacauca

SEQ ID NO: 3078420 - RNA, 21 nt, Human
uaagcaaaaugugauauguac

SEQ ID NO: 3078421 - RNA, 16 nt, Human
aaucaggguuaguauu

SEQ ID NO: 3078422 - RNA, 21 nt, Human
aaucaggguuaguauugucca

SEQ ID NO: 3078423 - RNA, 22 nt, Human
aaucaggguuaguauuguccag

SEQ ID NO: 3078424 - RNA, 20 nt, Human
uaacgauaaaagacagugaa

SEQ ID NO: 3078425 - RNA, 17 nt, Human
uaacuuccaauuuacau

SEQ ID NO: 3078426 - RNA, 14 nt, Human
uaacuucaccauau

SEQ ID NO: 3078427 - RNA, 21 nt, Human
uaacuucacauauugauuucc

SEQ ID NO: 3078428 - RNA, 13 nt, Human
uaacuucacauau

SEQ ID NO: 3078429 - RNA, 18 nt, Human
uaagaagugaaaaucuac

SEQ ID NO: 3078430 - RNA, 13 nt, Human
uaagacaaauaug

SEQ ID NO: 3078431 - RNA, 16 nt, Human
uaacuuucugaaauaa

SEQ ID NO: 3078432 - RNA, 15 nt, Human
aauauauuuuaagac

SEQ ID NO: 3078433 - RNA, 14 nt, Human
aauauauuuuaaga

SEQ ID NO: 3078434 - RNA, 13 nt, Human
aauaguuggcuag

SEQ ID NO: 3078435 - RNA, 21 nt, Human
aauaguucagguaacaggcag

SEQ ID NO: 3078436 - RNA, 22 nt, Human
aauaguauuugagaguucuaaa

SEQ ID NO: 3078437 - RNA, 20 nt, Human
aauaguauuugagaguucua

SEQ ID NO: 3078438 - RNA, 16 nt, Human
aauagucaaauugugu

SEQ ID NO: 3078439 - RNA, 23 nt, Human
aauaguauuugagaguucuaaau

SEQ ID NO: 3078440 - RNA, 16 nt, Human
aauaguggugugauuu

SEQ ID NO: 3078441 - RNA, 22 nt, Human
aauaguggugugauuuggggau

SEQ ID NO: 3078442 - RNA, 23 nt, Human
uaacauggacaugaucuucuuua

SEQ ID NO: 3078443 - RNA, 18 nt, Human
uaacauggacaugaucuu

SEQ ID NO: 3078444 - RNA, 16 nt, Human
uaacauggaaguacua

SEQ ID NO: 3078445 - RNA, 22 nt, Human
aauaucacuugucaauaaaauc

SEQ ID NO: 3078446 - RNA, 20 nt, Human
aauaucacuugucaauaaaa

SEQ ID NO: 3078447 - RNA, 21 nt, Human
uaauagagcaaaauugaugug

SEQ ID NO: 3078448 - RNA, 12 nt, Human
uaauagagcaaa

SEQ ID NO: 3078449 - RNA, 22 nt, Human
uaauagacaauuuauuauggca

SEQ ID NO: 3078450 - RNA, 18 nt, Human
uaauagacaauuuauuau

SEQ ID NO: 3078451 - RNA, 16 nt, Human
aaucuuauaauuuaaa

SEQ ID NO: 3078452 - RNA, 14 nt, Human
uaauacaccacuac

SEQ ID NO: 3078453 - RNA, 16 nt, Human
uaauacaccacuacau

SEQ ID NO: 3078454 - RNA, 16 nt, Human
uaauagacaauuuauu

SEQ ID NO: 3078455 - RNA, 14 nt, Human
uaauagacaauuua

SEQ ID NO: 3078456 - RNA, 19 nt, Human
uaauacaccacuacauucu

SEQ ID NO: 3078457 - RNA, 18 nt, Human
uaauacaccacuacauuc

SEQ ID NO: 3078458 - RNA, 17 nt, Human
uaaugaaugaaacauuu

SEQ ID NO: 3078459 - RNA, 13 nt, Human
uaaucuuucacag

SEQ ID NO: 3078460 - RNA, 16 nt, Human
aaucuuuaauuuuaca

SEQ ID NO: 3078461 - RNA, 15 nt, Human
aaucuuuaauuuuac

SEQ ID NO: 3078462 - RNA, 18 nt, Human
uaauguaauaacugugaa

SEQ ID NO: 3078463 - RNA, 13 nt, Human
uaauguacugcau

SEQ ID NO: 3078464 - RNA, 18 nt, Human
uaaugucacaggcagguc

SEQ ID NO: 3078465 - RNA, 17 nt, Human
aaugaaaccugugucuc

SEQ ID NO: 3078466 - RNA, 17 nt, Human
aaugaaagacuguacaa

SEQ ID NO: 3078467 - RNA, 16 nt, Human
aaugaaagacuguaca

SEQ ID NO: 3078468 - RNA, 19 nt, Human
aaugaaacacucaguuguu

SEQ ID NO: 3078469 - RNA, 17 nt, Human
aaugaaacauuuuguca

SEQ ID NO: 3078470 - RNA, 22 nt, Human
aaugaauggcuaagcaaaaugu

SEQ ID NO: 3078471 - RNA, 13 nt, Human
aaugaaugucagu

SEQ ID NO: 3078472 - RNA, 22 nt, Human
aaugaaugucagugugacugau

SEQ ID NO: 3078473 - RNA, 15 nt, Human
aaugaccuuucaaua

SEQ ID NO: 3078474 - RNA, 18 nt, Human
uaauaaacacucuugaaa

SEQ ID NO: 3078475 - RNA, 12 nt, Human
uaauaaacacuc

SEQ ID NO: 3078476 - RNA, 12 nt, Human
uaauaaacucau

SEQ ID NO: 3078477 - RNA, 12 nt, Human
aaucaugaauua

SEQ ID NO: 3078478 - RNA, 15 nt, Human
aaucaugaauuaguu

SEQ ID NO: 3078479 - RNA, 13 nt, Human
uaaguaaaugcua

SEQ ID NO: 3078480 - RNA, 19 nt, Human
uaaguaaaaccacagcagu

SEQ ID NO: 3078481 - RNA, 19 nt, Human
uaaguaaugauaacuggaa

SEQ ID NO: 3078482 - RNA, 16 nt, Human
uaagcuuguauuccuu

SEQ ID NO: 3078483 - RNA, 16 nt, Human
uaaguauucuaaauuu

SEQ ID NO: 3078484 - RNA, 19 nt, Human
uaaguauucuuauuuaaug

SEQ ID NO: 3078485 - RNA, 20 nt, Human
uaaguauucuuauuuaauga

SEQ ID NO: 3078486 - RNA, 14 nt, Human
uaaguucauacauu

SEQ ID NO: 3078487 - RNA, 16 nt, Human
uaaguacuauguauca

SEQ ID NO: 3078488 - RNA, 13 nt, Human
uaaguacuaugua

SEQ ID NO: 3078489 - RNA, 17 nt, Human
uaaguacuauguaucaa

SEQ ID NO: 3078490 - RNA, 19 nt, Human
aaucuuauaauuuaaaaua

SEQ ID NO: 3078491 - RNA, 19 nt, Human
aaucuacacuccagugaga

SEQ ID NO: 3078492 - RNA, 12 nt, Human
aauccgcccauc

SEQ ID NO: 3078493 - RNA, 23 nt, Human
aaucauuaggugugacugaauuu

SEQ ID NO: 3078494 - RNA, 17 nt, Human
aaucauuaggugugacu

SEQ ID NO: 3078495 - RNA, 15 nt, Human
aaucauuagguguga

SEQ ID NO: 3078496 - RNA, 23 nt, Human
aaucgcuccaccuugcagcucuc

SEQ ID NO: 3078497 - RNA, 20 nt, Human
acagauuuccauccuaguca

SEQ ID NO: 3078498 - RNA, 17 nt, Human
acagcaaggagauuuac

SEQ ID NO: 3078499 - RNA, 18 nt, Human
acagagcccacgccccca

SEQ ID NO: 3078500 - RNA, 19 nt, Human
acagagcccacgcccccac

SEQ ID NO: 3078501 - RNA, 15 nt, Human
acagagcccacgccc

SEQ ID NO: 3078502 - RNA, 14 nt, Human
acagagcccacgcc

SEQ ID NO: 3078503 - RNA, 19 nt, Human
uaugaaauuauauaaguau

SEQ ID NO: 3078504 - RNA, 21 nt, Human
uaugaaauauuauguuaaaac

SEQ ID NO: 3078505 - RNA, 18 nt, Human
acagcccgggcucugccu

SEQ ID NO: 3078506 - RNA, 19 nt, Human
acagcccgggcucugccuc

SEQ ID NO: 3078507 - RNA, 17 nt, Human
acagcccgggcucugcc

SEQ ID NO: 3078508 - RNA, 21 nt, Human
acagcaaggagauuuacaacu

SEQ ID NO: 3078509 - RNA, 16 nt, Human
acagcaaggagauuua

SEQ ID NO: 3078510 - RNA, 16 nt, Human
acagccucuuagaugc

SEQ ID NO: 3078511 - RNA, 13 nt, Human
uauggguuuggcu

SEQ ID NO: 3078512 - RNA, 17 nt, Human
uauggcuuuugugcauu

SEQ ID NO: 3078513 - RNA, 21 nt, Human
uauggcuuuugugcauuaucu

SEQ ID NO: 3078514 - RNA, 18 nt, Human
uauggcuuuugugcauua

SEQ ID NO: 3078515 - RNA, 15 nt, Human
uaugcuuauacacuu

SEQ ID NO: 3078516 - RNA, 17 nt, Human
uaugccugggcagaagg

SEQ ID NO: 3078517 - RNA, 19 nt, Human
uaugccccauucaacaucu

SEQ ID NO: 3078518 - RNA, 15 nt, Human
uaugccccauucaac

SEQ ID NO: 3078519 - RNA, 24 nt, Human
uaugcauuugaaaauuuugauguu

SEQ ID NO: 3078520 - RNA, 23 nt, Human
uaugcauuugaaaauuuugaugu

SEQ ID NO: 3078521 - RNA, 11 nt, Human
uaugcauuuga

SEQ ID NO: 3078522 - RNA, 21 nt, Human
uaugauuaaguaaugauaacu

SEQ ID NO: 3078523 - RNA, 16 nt, Human
uaugauuaaguaauga

SEQ ID NO: 3078524 - RNA, 20 nt, Human
uaugauuaaguaaugauaac

SEQ ID NO: 3078525 - RNA, 19 nt, Human
uauccaaaccaaauaaaaa

SEQ ID NO: 3078526 - RNA, 15 nt, Human
uaucuauauuuuaca

SEQ ID NO: 3078527 - RNA, 14 nt, Human
uaucucccccagcc

SEQ ID NO: 3078528 - RNA, 13 nt, Human
uaucucccccagc

SEQ ID NO: 3078529 - RNA, 23 nt, Human
uaucuauauuuuacauaaauuua

SEQ ID NO: 3078530 - RNA, 18 nt, Human
acagagaaaguacuucuc

SEQ ID NO: 3078531 - RNA, 11 nt, Human
acagagaaagu

SEQ ID NO: 3078532 - RNA, 16 nt, Human
uauauuuaguaucuuu

SEQ ID NO: 3078533 - RNA, 15 nt, Human
uauauuguuugcuaa

SEQ ID NO: 3078534 - RNA, 13 nt, Human
acagacccugccc

SEQ ID NO: 3078535 - RNA, 14 nt, Human
acagacccugcccu

SEQ ID NO: 3078536 - RNA, 15 nt, Human
acagacccugcccug

SEQ ID NO: 3078537 - RNA, 23 nt, Human
uauaaguguguguuuuucauaaa

SEQ ID NO: 3078538 - RNA, 17 nt, Human
uauaaguguguguuuuu

SEQ ID NO: 3078539 - RNA, 19 nt, Human
uauaauuuugugaagcaaa

SEQ ID NO: 3078540 - RNA, 20 nt, Human
acagaaaauggaagacagcu

SEQ ID NO: 3078541 - RNA, 13 nt, Human
acagaaauguaca

SEQ ID NO: 3078542 - RNA, 17 nt, Human
acagaaaauucuucucc

SEQ ID NO: 3078543 - RNA, 16 nt, Human
acagaaauguacagca

SEQ ID NO: 3078544 - RNA, 14 nt, Human
acagaaauguacag

SEQ ID NO: 3078545 - RNA, 17 nt, Human
acagaaauguacagcaa

SEQ ID NO: 3078546 - RNA, 17 nt, Human
uauguguaaaaugugaa

SEQ ID NO: 3078547 - RNA, 21 nt, Human
uauguuuucaggcuagaugua

SEQ ID NO: 3078548 - RNA, 16 nt, Human
uauuaaaacucauuuu

SEQ ID NO: 3078549 - RNA, 14 nt, Human
uaugugaaacaugu

SEQ ID NO: 3078550 - RNA, 22 nt, Human
acaggcauguucucugaggaca

SEQ ID NO: 3078551 - RNA, 20 nt, Human
acaggcauguucucugagga

SEQ ID NO: 3078552 - RNA, 19 nt, Human
acaggcauguucucugagg

SEQ ID NO: 3078553 - RNA, 18 nt, Human
acaggcauguucucugag

SEQ ID NO: 3078554 - RNA, 15 nt, Human
acaggcauguucucu

SEQ ID NO: 3078555 - RNA, 17 nt, Human
uaugugaaacauguuuc

SEQ ID NO: 3078556 - RNA, 12 nt, Human
uaugugaacagu

SEQ ID NO: 3078557 - RNA, 22 nt, Human
uaugugaacaguuguguuugaa

SEQ ID NO: 3078558 - RNA, 23 nt, Human
uaugugccagauuuaugcauauu

SEQ ID NO: 3078559 - RNA, 20 nt, Human
uauguggaguucaucuugaa

SEQ ID NO: 3078560 - RNA, 13 nt, Human
acagcuaacaugg

SEQ ID NO: 3078561 - RNA, 17 nt, Human
acaggaaaagcugcuga

SEQ ID NO: 3078562 - RNA, 22 nt, Human
acaggaaccacaagacugcaca

SEQ ID NO: 3078563 - RNA, 16 nt, Human
acaggaaaagcugcug

SEQ ID NO: 3078564 - RNA, 15 nt, Human
acaggaaaagcugcu

SEQ ID NO: 3078565 - RNA, 13 nt, Human
acaggaaguacug

SEQ ID NO: 3078566 - RNA, 17 nt, Human
acaggaaguagaggagg

SEQ ID NO: 3078567 - RNA, 23 nt, Human
acaggaccagggauuuccaugau

SEQ ID NO: 3078568 - RNA, 13 nt, Human
acaggcaggucca

SEQ ID NO: 3078569 - RNA, 14 nt, Human
acaggaucagucug

SEQ ID NO: 3078570 - RNA, 16 nt, Human
acaggagugagcacua

SEQ ID NO: 3078571 - RNA, 16 nt, Human
acaggcagguccaggg

SEQ ID NO: 3078572 - RNA, 14 nt, Human
acaggcagguccag

SEQ ID NO: 3078573 - RNA, 14 nt, Human
acaggcauguucuc

SEQ ID NO: 3078574 - RNA, 21 nt, Human
uauucagcucauggacuucug

SEQ ID NO: 3078575 - RNA, 15 nt, Human
uauucagcucaugga

SEQ ID NO: 3078576 - RNA, 14 nt, Human
uauucaggaagcuc

SEQ ID NO: 3078577 - RNA, 20 nt, Human
uauucaguaauaacucuacc

SEQ ID NO: 3078578 - RNA, 14 nt, Human
uauuacuucugcua

SEQ ID NO: 3078579 - RNA, 13 nt, Human
uauuacuucugcu

SEQ ID NO: 3078580 - RNA, 14 nt, Human
uauuacuguaagaa

SEQ ID NO: 3078581 - RNA, 23 nt, Human
uauucaaacagucucaggaaauc

SEQ ID NO: 3078582 - RNA, 15 nt, Human
uauucaaacagucuc

SEQ ID NO: 3078583 - RNA, 17 nt, Human
acagucaccucauggaa

SEQ ID NO: 3078584 - RNA, 18 nt, Human
acagucaccucauggaau

SEQ ID NO: 3078585 - RNA, 16 nt, Human
acagucaccucaugga

SEQ ID NO: 3078586 - RNA, 12 nt, Human
acagggcacacc

SEQ ID NO: 3078587 - RNA, 20 nt, Human
acagggaggacgcucucugg

SEQ ID NO: 3078588 - RNA, 21 nt, Human
acagggaggacgcucucuggc

SEQ ID NO: 3078589 - RNA, 22 nt, Human
acaggcugggcuucaguggcag

SEQ ID NO: 3078590 - RNA, 23 nt, Human
acaggcugggcuucaguggcagc

SEQ ID NO: 3078591 - RNA, 18 nt, Human
uaggcaaccuuuauuuuu

SEQ ID NO: 3078592 - RNA, 16 nt, Human
uaggcauuugcugaau

SEQ ID NO: 3078593 - RNA, 20 nt, Human
uaggcauuugcugaauacag

SEQ ID NO: 3078594 - RNA, 14 nt, Human
uaggcauuguggga

SEQ ID NO: 3078595 - RNA, 21 nt, Human
uagggaaggauacaaaagcau

SEQ ID NO: 3078596 - RNA, 15 nt, Human
uagggagagaagaua

SEQ ID NO: 3078597 - RNA, 14 nt, Human
uagggagagaagau

SEQ ID NO: 3078598 - RNA, 12 nt, Human
uaggagcaugag

SEQ ID NO: 3078599 - RNA, 19 nt, Human
uaggaaauauuuauuuuaa

SEQ ID NO: 3078600 - RNA, 18 nt, Human
uaggaaauauuuauuuua

SEQ ID NO: 3078601 - RNA, 19 nt, Human
uagcuaauguaauaacugu

SEQ ID NO: 3078602 - RNA, 12 nt, Human
uagcuaauguaa

SEQ ID NO: 3078603 - RNA, 18 nt, Human
acaaugacuuacuguaca

SEQ ID NO: 3078604 - RNA, 17 nt, Human
acaaugacuuacuguac

SEQ ID NO: 3078605 - RNA, 12 nt, Human
acaaugacuuac

SEQ ID NO: 3078606 - RNA, 18 nt, Human
acaagaccacguuucuaa

SEQ ID NO: 3078607 - RNA, 13 nt, Human
acaagacugcaca

SEQ ID NO: 3078608 - RNA, 14 nt, Human
acaagacugcacau

SEQ ID NO: 3078609 - RNA, 23 nt, Human
acaauacaucccuuaccugggaa

SEQ ID NO: 3078610 - RNA, 21 nt, Human
uagcauggcauauuuuucaca

SEQ ID NO: 3078611 - RNA, 22 nt, Human
uagcauggcauauuuuucacau

SEQ ID NO: 3078612 - RNA, 19 nt, Human
uagcauggcugccaauggg

SEQ ID NO: 3078613 - RNA, 15 nt, Human
uagaugcaguucuga

SEQ ID NO: 3078614 - RNA, 21 nt, Human
uagccaaggccaaaggaagca

SEQ ID NO: 3078615 - RNA, 22 nt, Human
uagcauuuugcuaaaugugaau

SEQ ID NO: 3078616 - RNA, 14 nt, Human
uagccaaggccaaa

SEQ ID NO: 3078617 - RNA, 16 nt, Human
uagcauuuugcuaaau

SEQ ID NO: 3078618 - RNA, 19 nt, Human
uagcauuuguguugaagag

SEQ ID NO: 3078619 - RNA, 11 nt, Human
uagccagagga

SEQ ID NO: 3078620 - RNA, 15 nt, Human
uagccagaggagaga

SEQ ID NO: 3078621 - RNA, 18 nt, Human
acaaauuuacagagacag

SEQ ID NO: 3078622 - RNA, 19 nt, Human
acaaauuuacagagacaga

SEQ ID NO: 3078623 - RNA, 23 nt, Human
acaacacucauugaccugaggcc

SEQ ID NO: 3078624 - RNA, 21 nt, Human
acaacacucauugaccugagg

SEQ ID NO: 3078625 - RNA, 19 nt, Human
acaagacccuugugguccc

SEQ ID NO: 3078626 - RNA, 20 nt, Human
acaagacccaaaaggcagaa

SEQ ID NO: 3078627 - RNA, 19 nt, Human
acaagaccacguuucuaaa

SEQ ID NO: 3078628 - RNA, 21 nt, Human
uagagcaaaauugauguguuu

SEQ ID NO: 3078629 - RNA, 14 nt, Human
uagagcaaaauuga

SEQ ID NO: 3078630 - RNA, 22 nt, Human
uagagcaaaauugauguguuua

SEQ ID NO: 3078631 - RNA, 19 nt, Human
uagaggagaaacuggaacu

SEQ ID NO: 3078632 - RNA, 15 nt, Human
uagauauaugcucug

SEQ ID NO: 3078633 - RNA, 22 nt, Human
uagaggagaaacuggaacucuc

SEQ ID NO: 3078634 - RNA, 19 nt, Human
uagauauaugcucugcaug

SEQ ID NO: 3078635 - RNA, 21 nt, Human
aauuguguuuauaauuuuaaa

SEQ ID NO: 3078636 - RNA, 20 nt, Human
aauuguguuuauaauuuuaa

SEQ ID NO: 3078637 - RNA, 16 nt, Human
aauuguuacaaauugu

SEQ ID NO: 3078638 - RNA, 22 nt, Human
acaaaagcaugugagacugguu

SEQ ID NO: 3078639 - RNA, 11 nt, Human
acaaaagcaug

SEQ ID NO: 3078640 - RNA, 22 nt, Human
acaaaggaugcccaaagaugca

SEQ ID NO: 3078641 - RNA, 19 nt, Human
acaauggauaggcacagga

SEQ ID NO: 3078642 - RNA, 24 nt, Human
acaaugcugugcccuaaaguguau

SEQ ID NO: 3078643 - RNA, 23 nt, Human
acaaugcugugcccuaaagugua

SEQ ID NO: 3078644 - RNA, 22 nt, Human
acaaugcugugcccuaaagugu

SEQ ID NO: 3078645 - RNA, 21 nt, Human
acaaugcugugcccuaaagug

SEQ ID NO: 3078646 - RNA, 22 nt, Human
acaaugcuguauuuuaaaagaa

SEQ ID NO: 3078647 - RNA, 18 nt, Human
acaaugcuguauuuuaaa

SEQ ID NO: 3078648 - RNA, 14 nt, Human
acacacacauacac

SEQ ID NO: 3078649 - RNA, 19 nt, Human
acaaugugaaaagaaaaau

SEQ ID NO: 3078650 - RNA, 17 nt, Human
acaaugugaaaagaaaa

SEQ ID NO: 3078651 - RNA, 22 nt, Human
acacacacgcgugcacacacca

SEQ ID NO: 3078652 - RNA, 14 nt, Human
acacacagcucugu

SEQ ID NO: 3078653 - RNA, 13 nt, Human
acacacagcucug

SEQ ID NO: 3078654 - RNA, 17 nt, Human
acacacagcucuguccu

SEQ ID NO: 3078655 - RNA, 21 nt, Human
acacacugcauguuugugauu

SEQ ID NO: 3078656 - RNA, 15 nt, Human
acacacucaaaucaa

SEQ ID NO: 3078657 - RNA, 21 nt, Human
acacacgcgugcacacaccag

SEQ ID NO: 3078658 - RNA, 20 nt, Human
acacaccagagcccaccuug

SEQ ID NO: 3078659 - RNA, 15 nt, Human
acacaccagagccca

SEQ ID NO: 3078660 - RNA, 14 nt, Human
acacaccagagccc

SEQ ID NO: 3078661 - RNA, 16 nt, Human
acacaguauuacuucu

SEQ ID NO: 3078662 - RNA, 18 nt, Human
acacaguauuacuucugc

SEQ ID NO: 3078663 - RNA, 19 nt, Human
acacaguauuacuucugcu

SEQ ID NO: 3078664 - RNA, 13 nt, Human
acacagugagucg

SEQ ID NO: 3078665 - RNA, 23 nt, Human
uaguguuggagaagaacugaaau

SEQ ID NO: 3078666 - RNA, 17 nt, Human
uaguguuggagaagaac

SEQ ID NO: 3078667 - RNA, 22 nt, Human
uagugaaacucguuaauuugua

SEQ ID NO: 3078668 - RNA, 20 nt, Human
uauaaaagccuguuuaagag

SEQ ID NO: 3078669 - RNA, 19 nt, Human
uauaaaaauaaaaaacacu

SEQ ID NO: 3078670 - RNA, 22 nt, Human
uauaaaagggacugagaaauuu

SEQ ID NO: 3078671 - RNA, 19 nt, Human
uauaaaagccuguuuaaga

SEQ ID NO: 3078672 - RNA, 20 nt, Human
uaguuccaccaucaagccac

SEQ ID NO: 3078673 - RNA, 18 nt, Human
uaguucagguaacaggca

SEQ ID NO: 3078674 - RNA, 20 nt, Human
acacauuuuauuuuauuaug

SEQ ID NO: 3078675 - RNA, 19 nt, Human
acacauuuuauuuuauuau

SEQ ID NO: 3078676 - RNA, 14 nt, Human
acacauuuuauuuu

SEQ ID NO: 3078677 - RNA, 13 nt, Human
acacauuuuauuu

SEQ ID NO: 3078678 - RNA, 21 nt, Human
acacaugagcaucaggccagg

SEQ ID NO: 3078679 - RNA, 18 nt, Human
acacaugauccugcaauu

SEQ ID NO: 3078680 - RNA, 15 nt, Human
acacaugaaguccaa

SEQ ID NO: 3078681 - RNA, 15 nt, Human
acacaucagcuugcc

SEQ ID NO: 3078682 - RNA, 23 nt, Human
acaccauaagcuacugccauccu

SEQ ID NO: 3078683 - RNA, 21 nt, Human
acaccauaagcuacugccauc

SEQ ID NO: 3078684 - RNA, 22 nt, Human
acaccauaagcuacugccaucc

SEQ ID NO: 3078685 - RNA, 20 nt, Human
acaccauaagcuacugccau

SEQ ID NO: 3078686 - RNA, 15 nt, Human
uauaaguguguguuu

SEQ ID NO: 3078687 - RNA, 20 nt, Human
acacucacauuuauucugcu

SEQ ID NO: 3078688 - RNA, 18 nt, Human
acacucaaaucaagaaac

SEQ ID NO: 3078689 - RNA, 15 nt, Human
acacucaaaagcugg

SEQ ID NO: 3078690 - RNA, 19 nt, Human
acacucaaaucaagaaacu

SEQ ID NO: 3078691 - RNA, 13 nt, Human
acacuaagagaga

SEQ ID NO: 3078692 - RNA, 19 nt, Human
acaccucugcacaagcugc

SEQ ID NO: 3078693 - RNA, 21 nt, Human
acaccucugcacaagcugcac

SEQ ID NO: 3078694 - RNA, 19 nt, Human
acacccugugauggggccc

SEQ ID NO: 3078695 - RNA, 16 nt, Human
acaccgggcacucaga

SEQ ID NO: 3078696 - RNA, 20 nt, Human
acacuaaccacgcuggaccu

SEQ ID NO: 3078697 - RNA, 12 nt, Human
aaguaaaugcua

SEQ ID NO: 3078698 - RNA, 12 nt, Human
aagggggcuggg

SEQ ID NO: 3078699 - RNA, 23 nt, Human
aagggggcugggacaugggaaag

SEQ ID NO: 3078700 - RNA, 13 nt, Human
aaggggagaguaa

SEQ ID NO: 3078701 - RNA, 16 nt, Human
aaggcugggggaagaa

SEQ ID NO: 3078702 - RNA, 14 nt, Human
aaggcugggggaag

SEQ ID NO: 3078703 - RNA, 13 nt, Human
guuucagaaaugu

SEQ ID NO: 3078704 - RNA, 11 nt, Human
guuucagaaau

SEQ ID NO: 3078705 - RNA, 19 nt, Human
aaggcugggggaagaagcu

SEQ ID NO: 3078706 - RNA, 22 nt, Human
aaggcugggggaagaagcucuc

SEQ ID NO: 3078707 - RNA, 20 nt, Human
aaggcugucaauuacaggaa

SEQ ID NO: 3078708 - RNA, 15 nt, Human
aagggcuguuauaau

SEQ ID NO: 3078709 - RNA, 17 nt, Human
aagggcuguuauaaucu

SEQ ID NO: 3078710 - RNA, 17 nt, Human
aaggggaauugaggaca

SEQ ID NO: 3078711 - RNA, 17 nt, Human
guuucaaacuuuacuau

SEQ ID NO: 3078712 - RNA, 14 nt, Human
guuuaugauuccac

SEQ ID NO: 3078713 - RNA, 21 nt, Human
guuuaagugacugauggcuaa

SEQ ID NO: 3078714 - RNA, 17 nt, Human
aaggaaacccagcucug

SEQ ID NO: 3078715 - RNA, 22 nt, Human
aaggaaacccagcucuggucca

SEQ ID NO: 3078716 - RNA, 23 nt, Human
guuguuugauucagacagcugcc

SEQ ID NO: 3078717 - RNA, 20 nt, Human
guuguuugauucagacagcu

SEQ ID NO: 3078718 - RNA, 16 nt, Human
aaggaaacccagcucu

SEQ ID NO: 3078719 - RNA, 17 nt, Human
guuuuaaaaugagaaau

SEQ ID NO: 3078720 - RNA, 15 nt, Human
guuuuaaagcuucca

SEQ ID NO: 3078721 - RNA, 19 nt, Human
guuuggacaaaauggaaua

SEQ ID NO: 3078722 - RNA, 17 nt, Human
aaguaauaugcacacau

SEQ ID NO: 3078723 - RNA, 20 nt, Human
aaguaauaugcacacauuuu

SEQ ID NO: 3078724 - RNA, 18 nt, Human
aaguaauaugcacacauu

SEQ ID NO: 3078725 - RNA, 21 nt, Human
aaguaauaugcacacauuuuu

SEQ ID NO: 3078726 - RNA, 22 nt, Human
guuuuaaggaugcuuguacaua

SEQ ID NO: 3078727 - RNA, 18 nt, Human
guuuuaaggaugcuugua

SEQ ID NO: 3078728 - RNA, 16 nt, Human
guuuucuguucuuucu

SEQ ID NO: 3078729 - RNA, 15 nt, Human
guuuucuguucuuuc

SEQ ID NO: 3078730 - RNA, 14 nt, Human
guuuucuguucuuu

SEQ ID NO: 3078731 - RNA, 12 nt, Human
guuuucuguucu

SEQ ID NO: 3078732 - RNA, 19 nt, Human
aaguauuauaccuuuuuua

SEQ ID NO: 3078733 - RNA, 16 nt, Human
aaguauuauaccuuuu

SEQ ID NO: 3078734 - RNA, 19 nt, Human
aaguauucuuauuuaauga

SEQ ID NO: 3078735 - RNA, 21 nt, Human
aaguauucuuauuuaaugaaa

SEQ ID NO: 3078736 - RNA, 23 nt, Human
aaguauucuuauuuaaugaaaga

SEQ ID NO: 3078737 - RNA, 19 nt, Human
aaguauguguaaaauguga

SEQ ID NO: 3078738 - RNA, 15 nt, Human
aaguauuauaccuuu

SEQ ID NO: 3078739 - RNA, 18 nt, Human
aaguauguuagugcaaau

SEQ ID NO: 3078740 - RNA, 19 nt, Human
aaguauguuagugcaaauu

SEQ ID NO: 3078741 - RNA, 18 nt, Human
aaguacuucuccacccug

SEQ ID NO: 3078742 - RNA, 19 nt, Human
aaguacuucuccacccugc

SEQ ID NO: 3078743 - RNA, 18 nt, Human
aaguauguguaaaaugug

SEQ ID NO: 3078744 - RNA, 13 nt, Human
aaguacuauguau

SEQ ID NO: 3078745 - RNA, 17 nt, Human
aaguacuauaauuuacc

SEQ ID NO: 3078746 - RNA, 14 nt, Human
aaguacuauaauuu

SEQ ID NO: 3078747 - RNA, 19 nt, Human
aaguaaugauaacuggaaa

SEQ ID NO: 3078748 - RNA, 13 nt, Human
uaaaaugugaagu

SEQ ID NO: 3078749 - RNA, 11 nt, Human
uaaaaugugaa

SEQ ID NO: 3078750 - RNA, 20 nt, Human
aaguuugagaucagccuggg

SEQ ID NO: 3078751 - RNA, 9 nt, Human
uaaaauggu

SEQ ID NO: 3078752 - RNA, 19 nt, Human
aaguuucugccgcagcccu

SEQ ID NO: 3078753 - RNA, 21 nt, Human
aaguuucugccgcagcccugc

SEQ ID NO: 3078754 - RNA, 19 nt, Human
aaguuauuuuuaauuuggu

SEQ ID NO: 3078755 - RNA, 21 nt, Human
aaguguguguuuuucauaaag

SEQ ID NO: 3078756 - RNA, 16 nt, Human
aaguguguguuuuuca

SEQ ID NO: 3078757 - RNA, 12 nt, Human
aaguguguguuu

SEQ ID NO: 3078758 - RNA, 13 nt, Human
aagugugguagag

SEQ ID NO: 3078759 - RNA, 23 nt, Human
aaguguauuuuuuuacuaauaga

SEQ ID NO: 3078760 - RNA, 22 nt, Human
uaaaaagccugcaauuucauau

SEQ ID NO: 3078761 - RNA, 19 nt, Human
uaaaaagccugcaauuuca

SEQ ID NO: 3078762 - RNA, 21 nt, Human
uaaaaaaaaaccugagcccca

SEQ ID NO: 3078763 - RNA, 14 nt, Human
uaaaaauauugugu

SEQ ID NO: 3078764 - RNA, 22 nt, Human
uaaaaauauuguguugugaaug

SEQ ID NO: 3078765 - RNA, 21 nt, Human
uaaaaauauuguguugugaau

SEQ ID NO: 3078766 - RNA, 23 nt, Human
uaaaaaucucaaauuucuaaauc

SEQ ID NO: 3078767 - RNA, 15 nt, Human
uaaaaaugagguacu

SEQ ID NO: 3078768 - RNA, 22 nt, Human
uaaaaaugagguacucuccugg

SEQ ID NO: 3078769 - RNA, 14 nt, Human
uaaaaccacagcag

SEQ ID NO: 3078770 - RNA, 13 nt, Human
uaaaaccacagca

SEQ ID NO: 3078771 - RNA, 15 nt, Human
uaaaaccacagcagu

SEQ ID NO: 3078772 - RNA, 15 nt, Human
uaaaacuuuuuaaaa

SEQ ID NO: 3078773 - RNA, 12 nt, Human
uaaaacuuuuua

SEQ ID NO: 3078774 - RNA, 13 nt, Human
uaaaacccaagug

SEQ ID NO: 3078775 - RNA, 19 nt, Human
uaaaaggugaccaaugaug

SEQ ID NO: 3078776 - RNA, 13 nt, Human
uaaaagaauauuu

SEQ ID NO: 3078777 - RNA, 13 nt, Human
uaaaagucuugug

SEQ ID NO: 3078778 - RNA, 20 nt, Human
uaaaauaauuuuuauauuug

SEQ ID NO: 3078779 - RNA, 22 nt, Human
uaaaauaauuuuuauauuugaa

SEQ ID NO: 3078780 - RNA, 21 nt, Human
uaaaauacacacucaaaucaa

SEQ ID NO: 3078781 - RNA, 20 nt, Human
aagugauccucccaccucag

SEQ ID NO: 3078782 - RNA, 19 nt, Human
aagugauccucccaccuca

SEQ ID NO: 3078783 - RNA, 13 nt, Human
aagugauccuccc

SEQ ID NO: 3078784 - RNA, 20 nt, Human
aagugauucuccugccucag

SEQ ID NO: 3078785 - RNA, 23 nt, Human
aagugauccucccaccucagccu

SEQ ID NO: 3078786 - RNA, 22 nt, Human
aagagggucugaggaauccaga

SEQ ID NO: 3078787 - RNA, 14 nt, Human
aagauagcagggca

SEQ ID NO: 3078788 - RNA, 15 nt, Human
aagauagcagggcau

SEQ ID NO: 3078789 - RNA, 21 nt, Human
aagagggagggagggcuccag

SEQ ID NO: 3078790 - RNA, 22 nt, Human
aagagggagggagggcuccaga

SEQ ID NO: 3078791 - RNA, 11 nt, Human
aagaggcaggg

SEQ ID NO: 3078792 - RNA, 14 nt, Human
aagaggcagggucu

SEQ ID NO: 3078793 - RNA, 15 nt, Human
guguaaaaugugaag

SEQ ID NO: 3078794 - RNA, 15 nt, Human
gugguuucagaaaug

SEQ ID NO: 3078795 - RNA, 23 nt, Human
gugcugcccugcccaccuggccu

SEQ ID NO: 3078796 - RNA, 20 nt, Human
aagcaaaugugaaucauuuu

SEQ ID NO: 3078797 - RNA, 17 nt, Human
aagcaacccaaauguuc

SEQ ID NO: 3078798 - RNA, 20 nt, Human
aagaucaaaagguuaauaaa

SEQ ID NO: 3078799 - RNA, 23 nt, Human
aagaucaaaagguuaauaaagua

SEQ ID NO: 3078800 - RNA, 19 nt, Human
gugucagguggggcagcuu

SEQ ID NO: 3078801 - RNA, 22 nt, Human
gugucuuaauuaaaagaauauu

SEQ ID NO: 3078802 - RNA, 23 nt, Human
gugugaaccaccacacccagccc

SEQ ID NO: 3078803 - RNA, 14 nt, Human
gugucaccugaaga

SEQ ID NO: 3078804 - RNA, 18 nt, Human
gugucagguggggcagcu

SEQ ID NO: 3078805 - RNA, 14 nt, Human
gugucagguggggc

SEQ ID NO: 3078806 - RNA, 22 nt, Human
gugucaccugaagacucauucu

SEQ ID NO: 3078807 - RNA, 16 nt, Human
aagcacuaaacaaaga

SEQ ID NO: 3078808 - RNA, 17 nt, Human
aagcaccuccugccucg

SEQ ID NO: 3078809 - RNA, 17 nt, Human
aagcacugacuucuaag

SEQ ID NO: 3078810 - RNA, 16 nt, Human
aagcacugacuucuaa

SEQ ID NO: 3078811 - RNA, 16 nt, Human
aagcaccuccugccuc

SEQ ID NO: 3078812 - RNA, 15 nt, Human
aagcaccuccugccu

SEQ ID NO: 3078813 - RNA, 14 nt, Human
aagcaccuccugcc

SEQ ID NO: 3078814 - RNA, 13 nt, Human
aagcaccuccugc

SEQ ID NO: 3078815 - RNA, 21 nt, Human
aagcacaugccucucucaggc

SEQ ID NO: 3078816 - RNA, 16 nt, Human
aagcacacuugacauc

SEQ ID NO: 3078817 - RNA, 12 nt, Human
guguuugaagca

SEQ ID NO: 3078818 - RNA, 17 nt, Human
gugugaauaccccaaga

SEQ ID NO: 3078819 - RNA, 15 nt, Human
aagcacaugccucuc

SEQ ID NO: 3078820 - RNA, 16 nt, Human
aagcacaugccucucu

SEQ ID NO: 3078821 - RNA, 19 nt, Human
aagcacaugccucucucag

SEQ ID NO: 3078822 - RNA, 20 nt, Human
aagcacaugccucucucagg

SEQ ID NO: 3078823 - RNA, 14 nt, Human
aagcacaugccucu

SEQ ID NO: 3078824 - RNA, 23 nt, Human
aagcaugcacaaauucugucucu

SEQ ID NO: 3078825 - RNA, 12 nt, Human
aagcaugugaga

SEQ ID NO: 3078826 - RNA, 18 nt, Human
aagcauuguaaaugugcu

SEQ ID NO: 3078827 - RNA, 20 nt, Human
aagcacugacuucuaaguaa

SEQ ID NO: 3078828 - RNA, 19 nt, Human
aagcacugacuucuaagua

SEQ ID NO: 3078829 - RNA, 18 nt, Human
aagccaaagcuaggccug

SEQ ID NO: 3078830 - RNA, 17 nt, Human
aagccaaagcuaggccu

SEQ ID NO: 3078831 - RNA, 19 nt, Human
aagcauuguaaaugugcuu

SEQ ID NO: 3078832 - RNA, 19 nt, Human
guuaauuccaauuauauga

SEQ ID NO: 3078833 - RNA, 22 nt, Human
guuauugauaaguucauacauu

SEQ ID NO: 3078834 - RNA, 21 nt, Human
guuauugauaaguucauacau

SEQ ID NO: 3078835 - RNA, 17 nt, Human
guuauuauauuuacaaa

SEQ ID NO: 3078836 - RNA, 18 nt, Human
guuauugauaaguucaua

SEQ ID NO: 3078837 - RNA, 19 nt, Human
guuauuauauuuacaaaug

SEQ ID NO: 3078838 - RNA, 19 nt, Human
guuagagguucccuuugac

SEQ ID NO: 3078839 - RNA, 23 nt, Human
guucagcuuguaaauagcucagg

SEQ ID NO: 3078840 - RNA, 22 nt, Human
guucaggguuggccccugcccg

SEQ ID NO: 3078841 - RNA, 21 nt, Human
guucaggguuggccccugccc

SEQ ID NO: 3078842 - RNA, 20 nt, Human
guucaggguuggccccugcc

SEQ ID NO: 3078843 - RNA, 18 nt, Human
guucagguaacaggcaga

SEQ ID NO: 3078844 - RNA, 17 nt, Human
guucagguaacaggcag

SEQ ID NO: 3078845 - RNA, 21 nt, Human
aagccgugauuuucauugcug

SEQ ID NO: 3078846 - RNA, 18 nt, Human
aagccuguuuaagagaca

SEQ ID NO: 3078847 - RNA, 15 nt, Human
aagccuguuuaagag

SEQ ID NO: 3078848 - RNA, 15 nt, Human
aagccuccuccagcc

SEQ ID NO: 3078849 - RNA, 16 nt, Human
aagccucccacgacug

SEQ ID NO: 3078850 - RNA, 22 nt, Human
aagcuaggccuggccagaugca

SEQ ID NO: 3078851 - RNA, 21 nt, Human
aagccuuggggcugaugcagu

SEQ ID NO: 3078852 - RNA, 19 nt, Human
aaggaaaaaauaacaauga

SEQ ID NO: 3078853 - RNA, 14 nt, Human
guugauagcacaga

SEQ ID NO: 3078854 - RNA, 19 nt, Human
guugauagcacagacccug

SEQ ID NO: 3078855 - RNA, 14 nt, Human
guucuugguuugua

SEQ ID NO: 3078856 - RNA, 18 nt, Human
guucuugguuuguaaauu

SEQ ID NO: 3078857 - RNA, 15 nt, Human
guucuugguuuguaa

SEQ ID NO: 3078858 - RNA, 13 nt, Human
guucuuaauucuu

SEQ ID NO: 3078859 - RNA, 17 nt, Human
guucucugcccuccaag

SEQ ID NO: 3078860 - RNA, 18 nt, Human
guucucugcccuccaaga

SEQ ID NO: 3078861 - RNA, 17 nt, Human
guucuuaauucuuagcu

SEQ ID NO: 3078862 - RNA, 14 nt, Human
guucuuaauucuua

SEQ ID NO: 3078863 - RNA, 19 nt, Human
guucuagcauggcugccaa

SEQ ID NO: 3078864 - RNA, 13 nt, Human
guucucuccuucu

SEQ ID NO: 3078865 - RNA, 13 nt, Human
guucucugcccuc

SEQ ID NO: 3078866 - RNA, 15 nt, Human
guucucugcccucca

SEQ ID NO: 3078867 - RNA, 15 nt, Human
guucucucuucucca

SEQ ID NO: 3078868 - RNA, 12 nt, Human
guucucugagga

SEQ ID NO: 3078869 - RNA, 21 nt, Human
aagcuuuuaugugaaacaugu

SEQ ID NO: 3078870 - RNA, 19 nt, Human
aagcuuuuaugugaaacau

SEQ ID NO: 3078871 - RNA, 19 nt, Human
guucuagcauggcauauuu

SEQ ID NO: 3078872 - RNA, 22 nt, Human
guucuagcauggcauauuuuuc

SEQ ID NO: 3078873 - RNA, 21 nt, Human
guucccuuuuuuggcugcuga

SEQ ID NO: 3078874 - RNA, 22 nt, Human
guucccuuuuuuggcugcugaa

SEQ ID NO: 3078875 - RNA, 18 nt, Human
guucccuugaugaagaag

SEQ ID NO: 3078876 - RNA, 17 nt, Human
aagcucugcuccucucc

SEQ ID NO: 3078877 - RNA, 12 nt, Human
aacuauggccug

SEQ ID NO: 3078878 - RNA, 23 nt, Human
aacuauucaggagaguagaacag

SEQ ID NO: 3078879 - RNA, 24 nt, Human
aacucauuuuuguuuucauuaucu

SEQ ID NO: 3078880 - RNA, 21 nt, Human
aacucauuuuuguuuucauua

SEQ ID NO: 3078881 - RNA, 21 nt, Human
aacuaggugcauauuuauaaa

SEQ ID NO: 3078882 - RNA, 17 nt, Human
aacuagggaagauaaua

SEQ ID NO: 3078883 - RNA, 12 nt, Human
aacguggcugcu

SEQ ID NO: 3078884 - RNA, 13 nt, Human
aacguggcugcuu

SEQ ID NO: 3078885 - RNA, 13 nt, Human
aacgucugugcca

SEQ ID NO: 3078886 - RNA, 12 nt, Human
aacgucuuaaau

SEQ ID NO: 3078887 - RNA, 14 nt, Human
aacgucuuaaauau

SEQ ID NO: 3078888 - RNA, 15 nt, Human
aacgucuuaaauauu

SEQ ID NO: 3078889 - RNA, 19 nt, Human
gucuuauauauuguagaua

SEQ ID NO: 3078890 - RNA, 14 nt, Human
gucuuaauuaaaag

SEQ ID NO: 3078891 - RNA, 16 nt, Human
gucuggaaugcagugg

SEQ ID NO: 3078892 - RNA, 15 nt, Human
gucuggaaugcagug

SEQ ID NO: 3078893 - RNA, 14 nt, Human
gucugacaggcaau

SEQ ID NO: 3078894 - RNA, 13 nt, Human
gucugacaggcaa

SEQ ID NO: 3078895 - RNA, 12 nt, Human
gucugacaggca

SEQ ID NO: 3078896 - RNA, 18 nt, Human
gucugacaggcaaugcug

SEQ ID NO: 3078897 - RNA, 15 nt, Human
gucugacaggcaaug

SEQ ID NO: 3078898 - RNA, 20 nt, Human
gucugacaggcaaugcuggc

SEQ ID NO: 3078899 - RNA, 23 nt, Human
gucucuuuaaugucacaggcagg

SEQ ID NO: 3078900 - RNA, 17 nt, Human
gucucaaaaaaagaaaa

SEQ ID NO: 3078901 - RNA, 14 nt, Human
gucucaaaaaaaca

SEQ ID NO: 3078902 - RNA, 14 nt, Human
gugaaguuuacauu

SEQ ID NO: 3078903 - RNA, 23 nt, Human
gugaauaauacaguaucucaggg

SEQ ID NO: 3078904 - RNA, 22 nt, Human
gugacagagugagacucugucu

SEQ ID NO: 3078905 - RNA, 20 nt, Human
gugacagagugagacucugu

SEQ ID NO: 3078906 - RNA, 23 nt, Human
gugacagaggcagccccauucug

SEQ ID NO: 3078907 - RNA, 14 nt, Human
gugacaugucuuuu

SEQ ID NO: 3078908 - RNA, 19 nt, Human
gugacaugucuuuucuugc

SEQ ID NO: 3078909 - RNA, 16 nt, Human
gugagacucugucuca

SEQ ID NO: 3078910 - RNA, 14 nt, Human
gugagacucugucu

SEQ ID NO: 3078911 - RNA, 22 nt, Human
gugagacccugucucaaaaaaa

SEQ ID NO: 3078912 - RNA, 14 nt, Human
gugaggcucugccc

SEQ ID NO: 3078913 - RNA, 15 nt, Human
gugaggcucugcccu

SEQ ID NO: 3078914 - RNA, 16 nt, Human
gugaggcucugcccuu

SEQ ID NO: 3078915 - RNA, 17 nt, Human
gugaggcucugcccuug

SEQ ID NO: 3078916 - RNA, 12 nt, Human
gugaggcucugc

SEQ ID NO: 3078917 - RNA, 13 nt, Human
gugaggcucugcc

SEQ ID NO: 3078918 - RNA, 18 nt, Human
gugagacucugucucaaa

SEQ ID NO: 3078919 - RNA, 19 nt, Human
aacucuccucugcugcugg

SEQ ID NO: 3078920 - RNA, 21 nt, Human
aacucuccucugcugcuggcu

SEQ ID NO: 3078921 - RNA, 21 nt, Human
gugaguacuacaguccuccca

SEQ ID NO: 3078922 - RNA, 17 nt, Human
aacucuccucugcugcu

SEQ ID NO: 3078923 - RNA, 19 nt, Human
gugagucaccaagcccagu

SEQ ID NO: 3078924 - RNA, 23 nt, Human
gugaguacuacaguccucccauc

SEQ ID NO: 3078925 - RNA, 17 nt, Human
gugagucaccaagccca

SEQ ID NO: 3078926 - RNA, 18 nt, Human
gugaggcucugcccuugg

SEQ ID NO: 3078927 - RNA, 22 nt, Human
aacucuccucugcugcuggcug

SEQ ID NO: 3078928 - RNA, 23 nt, Human
aacucuccucugcugcuggcugg

SEQ ID NO: 3078929 - RNA, 20 nt, Human
aacugauuuuuuuuuccuuc

SEQ ID NO: 3078930 - RNA, 21 nt, Human
aacugauuuuuuuuuccuuca

SEQ ID NO: 3078931 - RNA, 22 nt, Human
aacugauuuuuuuuuccuucag

SEQ ID NO: 3078932 - RNA, 23 nt, Human
aacugauuuuuuuuuccuucagu

SEQ ID NO: 3078933 - RNA, 16 nt, Human
aacugcauuggcuuug

SEQ ID NO: 3078934 - RNA, 19 nt, Human
aacugugaaguuuacauug

SEQ ID NO: 3078935 - RNA, 17 nt, Human
aacugugaaguuuacau

SEQ ID NO: 3078936 - RNA, 22 nt, Human
aacuucaccauauuaccacaga

SEQ ID NO: 3078937 - RNA, 22 nt, Human
aacuucacauauugauuuccgu

SEQ ID NO: 3078938 - RNA, 13 nt, Human
aacuucacauauu

SEQ ID NO: 3078939 - RNA, 14 nt, Human
aacuucacauauug

SEQ ID NO: 3078940 - RNA, 13 nt, Human
aacuucagacaua

SEQ ID NO: 3078941 - RNA, 18 nt, Human
aacuucagcgguuuauau

SEQ ID NO: 3078942 - RNA, 22 nt, Human
aacuuccuuggacucauuuuaa

SEQ ID NO: 3078943 - RNA, 23 nt, Human
aacuuccuuggacucauuuuaaa

SEQ ID NO: 3078944 - RNA, 23 nt, Human
gugauccucccaccucagccucc

SEQ ID NO: 3078945 - RNA, 17 nt, Human
gugauuaccagggacug

SEQ ID NO: 3078946 - RNA, 11 nt, Human
gugauuaccag

SEQ ID NO: 3078947 - RNA, 16 nt, Human
gugauuaccagggacu

SEQ ID NO: 3078948 - RNA, 19 nt, Human
gugcauuugaggucuguuc

SEQ ID NO: 3078949 - RNA, 17 nt, Human
gugcauuugaggucugu

SEQ ID NO: 3078950 - RNA, 21 nt, Human
gugcauuuggugguuucagaa

SEQ ID NO: 3078951 - RNA, 23 nt, Human
gugccaaaaacaacaacaaaaug

SEQ ID NO: 3078952 - RNA, 18 nt, Human
gugcaaugaccuuucaau

SEQ ID NO: 3078953 - RNA, 13 nt, Human
gugcacaagcucc

SEQ ID NO: 3078954 - RNA, 16 nt, Human
gugcacaagcuccaag

SEQ ID NO: 3078955 - RNA, 21 nt, Human
gugcacaagcuccaagcuccc

SEQ ID NO: 3078956 - RNA, 21 nt, Human
gugcacaugcacgugugugca

SEQ ID NO: 3078957 - RNA, 16 nt, Human
gugcucaggagcccug

SEQ ID NO: 3078958 - RNA, 18 nt, Human
gugcucaggagcccuggg

SEQ ID NO: 3078959 - RNA, 19 nt, Human
gugcucaggagcccuggga

SEQ ID NO: 3078960 - RNA, 16 nt, Human
gugcucugaucaucca

SEQ ID NO: 3078961 - RNA, 14 nt, Human
gugcucuggacagg

SEQ ID NO: 3078962 - RNA, 13 nt, Human
gugcucuggacag

SEQ ID NO: 3078963 - RNA, 12 nt, Human
gugcugcccugc

SEQ ID NO: 3078964 - RNA, 13 nt, Human
gugcugcccugcc

SEQ ID NO: 3078965 - RNA, 14 nt, Human
gugcugcccugccc

SEQ ID NO: 3078966 - RNA, 15 nt, Human
gugcugcccugccca

SEQ ID NO: 3078967 - RNA, 15 nt, Human
gugcuaucuccccca

SEQ ID NO: 3078968 - RNA, 18 nt, Human
gugcuaucucccccagcc

SEQ ID NO: 3078969 - RNA, 18 nt, Human
gugcuaguaauuggaaag

SEQ ID NO: 3078970 - RNA, 22 nt, Human
gugcuacaaaaacacagcaagg

SEQ ID NO: 3078971 - RNA, 21 nt, Human
gugcuacaaaaacacagcaag

SEQ ID NO: 3078972 - RNA, 14 nt, Human
aagaaaacaacuuc

SEQ ID NO: 3078973 - RNA, 18 nt, Human
aagaaaaaugagccuggc

SEQ ID NO: 3078974 - RNA, 17 nt, Human
aagaaaaaugagccugg

SEQ ID NO: 3078975 - RNA, 13 nt, Human
aagaaaaagaaaa

SEQ ID NO: 3078976 - RNA, 18 nt, Human
aagaaaaagaaaaagaaa

SEQ ID NO: 3078977 - RNA, 19 nt, Human
aagaaaaaauauuuucccu

SEQ ID NO: 3078978 - RNA, 19 nt, Human
gugccagauuuaugcauau

SEQ ID NO: 3078979 - RNA, 23 nt, Human
aacuuuaccuuuuuuauacauaa

SEQ ID NO: 3078980 - RNA, 22 nt, Human
aacuuuaccuuuuuuauacaua

SEQ ID NO: 3078981 - RNA, 21 nt, Human
aacuuuaccuuuuuuauacau

SEQ ID NO: 3078982 - RNA, 16 nt, Human
aagaaagaaaaucagg

SEQ ID NO: 3078983 - RNA, 14 nt, Human
aagaaagaaaauca

SEQ ID NO: 3078984 - RNA, 13 nt, Human
aagaaagaaaauc

SEQ ID NO: 3078985 - RNA, 22 nt, Human
aagaaaauaguggugugauuug

SEQ ID NO: 3078986 - RNA, 21 nt, Human
aagaaaauaguggugugauuu

SEQ ID NO: 3078987 - RNA, 16 nt, Human
aagaaaauaccaagga

SEQ ID NO: 3078988 - RNA, 15 nt, Human
aagaaaauaguggug

SEQ ID NO: 3078989 - RNA, 11 nt, Human
aagaaacauuu

SEQ ID NO: 3078990 - RNA, 23 nt, Human
aaauuaugugccagauuuaugca

SEQ ID NO: 3078991 - RNA, 15 nt, Human
aaaugugcuuuuaaa

SEQ ID NO: 3078992 - RNA, 18 nt, Human
aaaugugccuucauuuuu

SEQ ID NO: 3078993 - RNA, 17 nt, Human
aaauuguauuacaaauc

SEQ ID NO: 3078994 - RNA, 17 nt, Human
aaauuccaagugauuga

SEQ ID NO: 3078995 - RNA, 16 nt, Human
aaaucauucauuuucu

SEQ ID NO: 3078996 - RNA, 21 nt, Human
guauucuaaauuuuauaucuu

SEQ ID NO: 3078997 - RNA, 24 nt, Human
guauucuaaauuuuauaucuugua

SEQ ID NO: 3078998 - RNA, 19 nt, Human
guauucuagcuaauguaau

SEQ ID NO: 3078999 - RNA, 18 nt, Human
guauucucuccuguaccu

SEQ ID NO: 3079000 - RNA, 21 nt, Human
aaaugucucuuuaaugucaca

SEQ ID NO: 3079001 - RNA, 24 nt, Human
aaaugucuaguuguaacaccauga

SEQ ID NO: 3079002 - RNA, 10 nt, Human
gucacugcuu

SEQ ID NO: 3079003 - RNA, 17 nt, Human
gucacugagacagcccg

SEQ ID NO: 3079004 - RNA, 18 nt, Human
gucacugagacagcccgg

SEQ ID NO: 3079005 - RNA, 21 nt, Human
gucacugagacagcccgggcu

SEQ ID NO: 3079006 - RNA, 23 nt, Human
gucacugagacagcccgggcucu

SEQ ID NO: 3079007 - RNA, 22 nt, Human
gucacucuggcagcucagagag

SEQ ID NO: 3079008 - RNA, 14 nt, Human
gucacugagacagc

SEQ ID NO: 3079009 - RNA, 15 nt, Human
gucacugagacagcc

SEQ ID NO: 3079010 - RNA, 16 nt, Human
gucacugagacagccc

SEQ ID NO: 3079011 - RNA, 23 nt, Human
gucacucuggcagcucagagagg

SEQ ID NO: 3079012 - RNA, 15 nt, Human
gucaccaagcccagu

SEQ ID NO: 3079013 - RNA, 12 nt, Human
gucaccaagccc

SEQ ID NO: 3079014 - RNA, 22 nt, Human
gucaauuacaggaaguacugga

SEQ ID NO: 3079015 - RNA, 21 nt, Human
gucaauuuuguuauguauauu

SEQ ID NO: 3079016 - RNA, 13 nt, Human
gucacaggaagua

SEQ ID NO: 3079017 - RNA, 15 nt, Human
gucacaggaaguaga

SEQ ID NO: 3079018 - RNA, 20 nt, Human
gucacaggaaguagaggagg

SEQ ID NO: 3079019 - RNA, 22 nt, Human
gucaccaaaucagcugcuacua

SEQ ID NO: 3079020 - RNA, 18 nt, Human
gucacauuccugaacagg

SEQ ID NO: 3079021 - RNA, 15 nt, Human
aaauuucuaaaucuc

SEQ ID NO: 3079022 - RNA, 13 nt, Human
aaauuucuaaauc

SEQ ID NO: 3079023 - RNA, 12 nt, Human
aaauuucuaaau

SEQ ID NO: 3079024 - RNA, 22 nt, Human
gucagguggggcagcuugaggg

SEQ ID NO: 3079025 - RNA, 18 nt, Human
gucagguggggcagcuug

SEQ ID NO: 3079026 - RNA, 17 nt, Human
gucagguggggcagcuu

SEQ ID NO: 3079027 - RNA, 16 nt, Human
gucagguggggcagcu

SEQ ID NO: 3079028 - RNA, 21 nt, Human
gucacugcuuaacuucacaua

SEQ ID NO: 3079029 - RNA, 15 nt, Human
gucacugcuuaacuu

SEQ ID NO: 3079030 - RNA, 21 nt, Human
gucagaaguuucugccgcagc

SEQ ID NO: 3079031 - RNA, 14 nt, Human
gucaggaaagagaa

SEQ ID NO: 3079032 - RNA, 13 nt, Human
gucaggaaagaga

SEQ ID NO: 3079033 - RNA, 18 nt, Human
gucgcccuggacugugug

SEQ ID NO: 3079034 - RNA, 14 nt, Human
gucuaccugagggg

SEQ ID NO: 3079035 - RNA, 13 nt, Human
gucuaccugaggg

SEQ ID NO: 3079036 - RNA, 15 nt, Human
gucuaccugaggggc

SEQ ID NO: 3079037 - RNA, 16 nt, Human
gucuaccugaggggcc

SEQ ID NO: 3079038 - RNA, 22 nt, Human
gucuaugggacucaaugcacug

SEQ ID NO: 3079039 - RNA, 15 nt, Human
gucuaugggacucaa

SEQ ID NO: 3079040 - RNA, 20 nt, Human
gucuauuuacggaacucaaa

SEQ ID NO: 3079041 - RNA, 16 nt, Human
gucgaggacagggagg

SEQ ID NO: 3079042 - RNA, 12 nt, Human
gucgaggcagga

SEQ ID NO: 3079043 - RNA, 19 nt, Human
guccugcugcaguugccag

SEQ ID NO: 3079044 - RNA, 17 nt, Human
guccugcugcaguugcc

SEQ ID NO: 3079045 - RNA, 16 nt, Human
guccuggcaugggaau

SEQ ID NO: 3079046 - RNA, 14 nt, Human
guccucuuuucuga

SEQ ID NO: 3079047 - RNA, 23 nt, Human
aacauguaauuaaguacuaugua

SEQ ID NO: 3079048 - RNA, 18 nt, Human
aacaguccauugaaaggg

SEQ ID NO: 3079049 - RNA, 13 nt, Human
aacagucucagga

SEQ ID NO: 3079050 - RNA, 12 nt, Human
aacauauauaac

SEQ ID NO: 3079051 - RNA, 14 nt, Human
aacagucucaggaa

SEQ ID NO: 3079052 - RNA, 14 nt, Human
aacauaaaauacaa

SEQ ID NO: 3079053 - RNA, 21 nt, Human
aacacugggagaaaugaaaaa

SEQ ID NO: 3079054 - RNA, 21 nt, Human
aacacucacauuuauucugcu

SEQ ID NO: 3079055 - RNA, 19 nt, Human
aacacuguucucugcccuc

SEQ ID NO: 3079056 - RNA, 17 nt, Human
gucauuugagcagggcu

SEQ ID NO: 3079057 - RNA, 17 nt, Human
aacacuguucucugccc

SEQ ID NO: 3079058 - RNA, 18 nt, Human
aacacuguucucugcccu

SEQ ID NO: 3079059 - RNA, 16 nt, Human
aacacuguucucugcc

SEQ ID NO: 3079060 - RNA, 19 nt, Human
aaauuucuaaaucuccaaa

SEQ ID NO: 3079061 - RNA, 19 nt, Human
aacacaaacgggcucagca

SEQ ID NO: 3079062 - RNA, 17 nt, Human
aacacaacuauauuguu

SEQ ID NO: 3079063 - RNA, 20 nt, Human
aacacagcaagggugauggg

SEQ ID NO: 3079064 - RNA, 18 nt, Human
aacacagcaagggugaug

SEQ ID NO: 3079065 - RNA, 22 nt, Human
guccccaccgcagacaggacca

SEQ ID NO: 3079066 - RNA, 18 nt, Human
guccccaccgcagacagg

SEQ ID NO: 3079067 - RNA, 17 nt, Human
guccccaccgcagacag

SEQ ID NO: 3079068 - RNA, 15 nt, Human
gucccaccccacaca

SEQ ID NO: 3079069 - RNA, 13 nt, Human
gucccaagugcca

SEQ ID NO: 3079070 - RNA, 14 nt, Human
gucccaagugccaa

SEQ ID NO: 3079071 - RNA, 22 nt, Human
guccaugaagauguagaggaga

SEQ ID NO: 3079072 - RNA, 19 nt, Human
gucauuugagcagggcuca

SEQ ID NO: 3079073 - RNA, 12 nt, Human
gucccuaauaaa

SEQ ID NO: 3079074 - RNA, 22 nt, Human
guccccuguuuguuucugaaag

SEQ ID NO: 3079075 - RNA, 18 nt, Human
guccccuguuuguuucug

SEQ ID NO: 3079076 - RNA, 19 nt, Human
gucccugguggcagcucac

SEQ ID NO: 3079077 - RNA, 18 nt, Human
gucccugguggcagcuca

SEQ ID NO: 3079078 - RNA, 18 nt, Human
gucccuuacgugaguccu

SEQ ID NO: 3079079 - RNA, 19 nt, Human
gucccuuacgugaguccug

SEQ ID NO: 3079080 - RNA, 12 nt, Human
aaaaacaacuuu

SEQ ID NO: 3079081 - RNA, 14 nt, Human
aaaaacacaaaagu

SEQ ID NO: 3079082 - RNA, 12 nt, Human
aaaacaacuuua

SEQ ID NO: 3079083 - RNA, 14 nt, Human
aaaacaaggaugaa

SEQ ID NO: 3079084 - RNA, 12 nt, Human
aaaacacauuuu

SEQ ID NO: 3079085 - RNA, 18 nt, Human
aaaacacagcaaggguga

SEQ ID NO: 3079086 - RNA, 13 nt, Human
aaaacacagcaag

SEQ ID NO: 3079087 - RNA, 12 nt, Human
aaaacacagcaa

SEQ ID NO: 3079088 - RNA, 17 nt, Human
aaaacaaggaugaauua

SEQ ID NO: 3079089 - RNA, 12 nt, Human
aaaaagaggcua

SEQ ID NO: 3079090 - RNA, 13 nt, Human
aaaaacugauuuu

SEQ ID NO: 3079091 - RNA, 14 nt, Human
aaaaacauggccuu

SEQ ID NO: 3079092 - RNA, 15 nt, Human
aaaaacugauuuuuu

SEQ ID NO: 3079093 - RNA, 15 nt, Human
auauaaguguguguu

SEQ ID NO: 3079094 - RNA, 22 nt, Human
auauaaguauucuaaauuuuau

SEQ ID NO: 3079095 - RNA, 15 nt, Human
auauaagugauugcu

SEQ ID NO: 3079096 - RNA, 16 nt, Human
auaguaugguggcugg

SEQ ID NO: 3079097 - RNA, 16 nt, Human
auacuugaaaauuaac

SEQ ID NO: 3079098 - RNA, 15 nt, Human
auacuugaaaauuaa

SEQ ID NO: 3079099 - RNA, 15 nt, Human
auaguaugguggcug

SEQ ID NO: 3079100 - RNA, 16 nt, Human
auauaggaacuuaaau

SEQ ID NO: 3079101 - RNA, 16 nt, Human
auauccuuucuaacaa

SEQ ID NO: 3079102 - RNA, 15 nt, Human
auauccuuucuaaca

SEQ ID NO: 3079103 - RNA, 22 nt, Human
auaugccugggcagaaggaaga

SEQ ID NO: 3079104 - RNA, 16 nt, Human
auaugcuuauacacuu

SEQ ID NO: 3079105 - RNA, 14 nt, Human
auaugcuuauacac

SEQ ID NO: 3079106 - RNA, 19 nt, Human
auaugcuuauacacuuaca

SEQ ID NO: 3079107 - RNA, 23 nt, Human
auaugcuucuguuuuauaauuuu

SEQ ID NO: 3079108 - RNA, 18 nt, Human
auaucacuugucaauaaa

SEQ ID NO: 3079109 - RNA, 15 nt, Human
auaucaauuuaaaaa

SEQ ID NO: 3079110 - RNA, 16 nt, Human
auauuuauaaaaauaa

SEQ ID NO: 3079111 - RNA, 18 nt, Human
auauuuaguguucauaaa

SEQ ID NO: 3079112 - RNA, 18 nt, Human
auauuuauuuuaauaaug

SEQ ID NO: 3079113 - RNA, 14 nt, Human
auauuuauuacugu

SEQ ID NO: 3079114 - RNA, 19 nt, Human
auauuuauuacuguaagaa

SEQ ID NO: 3079115 - RNA, 14 nt, Human
auauucaggaagcu

SEQ ID NO: 3079116 - RNA, 16 nt, Human
auauucaggaagcuca

SEQ ID NO: 3079117 - RNA, 13 nt, Human
auauucaggaagc

SEQ ID NO: 3079118 - RNA, 19 nt, Human
auaaguauuuaauucaugu

SEQ ID NO: 3079119 - RNA, 22 nt, Human
auaaguguguguuuuucauaaa

SEQ ID NO: 3079120 - RNA, 19 nt, Human
auaaguguguguuuuucau

SEQ ID NO: 3079121 - RNA, 18 nt, Human
auaaugugaaacuggauu

SEQ ID NO: 3079122 - RNA, 21 nt, Human
auaaugugaaacuggauuaaa

SEQ ID NO: 3079123 - RNA, 19 nt, Human
auaaugugaaacuggauua

SEQ ID NO: 3079124 - RNA, 14 nt, Human
auaauuacuauguc

SEQ ID NO: 3079125 - RNA, 12 nt, Human
auaccugucccc

SEQ ID NO: 3079126 - RNA, 21 nt, Human
agugucuuaauuaaaagaaua

SEQ ID NO: 3079127 - RNA, 18 nt, Human
agugauuaccagggacug

SEQ ID NO: 3079128 - RNA, 15 nt, Human
agugauuaccaggga

SEQ ID NO: 3079129 - RNA, 23 nt, Human
agugugacaaggauugcuacugu

SEQ ID NO: 3079130 - RNA, 19 nt, Human
aguuguaccgcaaugugac

SEQ ID NO: 3079131 - RNA, 18 nt, Human
aguuguaccgcaauguga

SEQ ID NO: 3079132 - RNA, 15 nt, Human
aguugaauuuuacau

SEQ ID NO: 3079133 - RNA, 17 nt, Human
aguuacagacaaagcgu

SEQ ID NO: 3079134 - RNA, 18 nt, Human
aguuacagacaaagcgug

SEQ ID NO: 3079135 - RNA, 16 nt, Human
aguuguuacauuuuua

SEQ ID NO: 3079136 - RNA, 15 nt, Human
aguuguuacauuuuu

SEQ ID NO: 3079137 - RNA, 13 nt, Human
aguuguuacauuu

SEQ ID NO: 3079138 - RNA, 16 nt, Human
agucaagugaaaaagg

SEQ ID NO: 3079139 - RNA, 15 nt, Human
agucaaauuguguga

SEQ ID NO: 3079140 - RNA, 17 nt, Human
agucaaauugugugaaa

SEQ ID NO: 3079141 - RNA, 13 nt, Human
agucaaauugugu

SEQ ID NO: 3079142 - RNA, 20 nt, Human
agucaagugaaaaaggagga

SEQ ID NO: 3079143 - RNA, 23 nt, Human
agucauucagauaugauucaaau

SEQ ID NO: 3079144 - RNA, 15 nt, Human
agucauucagauaug

SEQ ID NO: 3079145 - RNA, 20 nt, Human
agucauucagauaugauuca

SEQ ID NO: 3079146 - RNA, 16 nt, Human
aguccaagcauuuaga

SEQ ID NO: 3079147 - RNA, 11 nt, Human
aguccaagcau

SEQ ID NO: 3079148 - RNA, 21 nt, Human
aguccaagcauuuagauguau

SEQ ID NO: 3079149 - RNA, 13 nt, Human
agugauccuccca

SEQ ID NO: 3079150 - RNA, 13 nt, Human
aguccugcccgcc

SEQ ID NO: 3079151 - RNA, 21 nt, Human
augccuuuguacuuuagggaa

SEQ ID NO: 3079152 - RNA, 21 nt, Human
augccuggauggggcugcacc

SEQ ID NO: 3079153 - RNA, 23 nt, Human
augccuggauggggcugcaccgg

SEQ ID NO: 3079154 - RNA, 14 nt, Human
augccugguggcag

SEQ ID NO: 3079155 - RNA, 17 nt, Human
augccugggcagaagga

SEQ ID NO: 3079156 - RNA, 17 nt, Human
augccugguggcagcug

SEQ ID NO: 3079157 - RNA, 16 nt, Human
augccugguggcagcu

SEQ ID NO: 3079158 - RNA, 15 nt, Human
augccugguggcagc

SEQ ID NO: 3079159 - RNA, 12 nt, Human
augcauuugaaa

SEQ ID NO: 3079160 - RNA, 10 nt, Human
augcauuuga

SEQ ID NO: 3079161 - RNA, 18 nt, Human
augcauuugaaaauuuug

SEQ ID NO: 3079162 - RNA, 23 nt, Human
augcaugaaguaauaugcacaca

SEQ ID NO: 3079163 - RNA, 20 nt, Human
augcaugaaguaauaugcac

SEQ ID NO: 3079164 - RNA, 22 nt, Human
augcacacauuuuuuaaaugca

SEQ ID NO: 3079165 - RNA, 19 nt, Human
augcacacauuuuuuaaau

SEQ ID NO: 3079166 - RNA, 17 nt, Human
augcacacauuuuuuaa

SEQ ID NO: 3079167 - RNA, 23 nt, Human
augcacagaguuguuacauuuuu

SEQ ID NO: 3079168 - RNA, 14 nt, Human
augcacagcuaaca

SEQ ID NO: 3079169 - RNA, 21 nt, Human
augcacagcuaacauggaagu

SEQ ID NO: 3079170 - RNA, 23 nt, Human
auggcugccaaugggagcucaug

SEQ ID NO: 3079171 - RNA, 15 nt, Human
augggaaugaauguc

SEQ ID NO: 3079172 - RNA, 22 nt, Human
augcuucuucagagacuccugc

SEQ ID NO: 3079173 - RNA, 19 nt, Human
auggaaaugggcagagcag

SEQ ID NO: 3079174 - RNA, 20 nt, Human
auggaaaugggcagagcaga

SEQ ID NO: 3079175 - RNA, 18 nt, Human
auguuucuuuguaaugaa

SEQ ID NO: 3079176 - RNA, 14 nt, Human
auguucuuaauucu

SEQ ID NO: 3079177 - RNA, 22 nt, Human
auguucugacccugcuucaaau

SEQ ID NO: 3079178 - RNA, 20 nt, Human
auguucuuaguggauguucu

SEQ ID NO: 3079179 - RNA, 15 nt, Human
auguucuuaauucuu

SEQ ID NO: 3079180 - RNA, 17 nt, Human
auguucucugaggacac

SEQ ID NO: 3079181 - RNA, 18 nt, Human
auguucucugaggacacu

SEQ ID NO: 3079182 - RNA, 18 nt, Human
auguuuuaagaggcaggg

SEQ ID NO: 3079183 - RNA, 16 nt, Human
auguuuuaagaggcag

SEQ ID NO: 3079184 - RNA, 14 nt, Human
auuaaaugcccagc

SEQ ID NO: 3079185 - RNA, 15 nt, Human
auuaaaugcccagcc

SEQ ID NO: 3079186 - RNA, 13 nt, Human
auuaaauucuugc

SEQ ID NO: 3079187 - RNA, 16 nt, Human
auuaaaugcccagccc

SEQ ID NO: 3079188 - RNA, 11 nt, Human
auuaaauuaug

SEQ ID NO: 3079189 - RNA, 14 nt, Human
auguguaaguauuc

SEQ ID NO: 3079190 - RNA, 20 nt, Human
augugggcuaguugggcuuc

SEQ ID NO: 3079191 - RNA, 15 nt, Human
auggucggaaaacau

SEQ ID NO: 3079192 - RNA, 17 nt, Human
auguaauaacugugaag

SEQ ID NO: 3079193 - RNA, 16 nt, Human
auguaaguaaacgguc

SEQ ID NO: 3079194 - RNA, 17 nt, Human
auguaagcucuacugag

SEQ ID NO: 3079195 - RNA, 20 nt, Human
auguaagggaaacugccagc

SEQ ID NO: 3079196 - RNA, 22 nt, Human
auguaagggaaacugccagcaa

SEQ ID NO: 3079197 - RNA, 21 nt, Human
auguaagggaaacugccagca

SEQ ID NO: 3079198 - RNA, 16 nt, Human
augucacaggcagguc

SEQ ID NO: 3079199 - RNA, 14 nt, Human
augucacaggcagg

SEQ ID NO: 3079200 - RNA, 15 nt, Human
augucacaggcaggu

SEQ ID NO: 3079201 - RNA, 13 nt, Human
auccuuucuaaca

SEQ ID NO: 3079202 - RNA, 13 nt, Human
aucgaugcagugc

SEQ ID NO: 3079203 - RNA, 13 nt, Human
auccuccaggugc

SEQ ID NO: 3079204 - RNA, 14 nt, Human
auccuccaggugca

SEQ ID NO: 3079205 - RNA, 19 nt, Human
auccuccaggugcacaagc

SEQ ID NO: 3079206 - RNA, 22 nt, Human
auccuccaggugcacaagcucc

SEQ ID NO: 3079207 - RNA, 11 nt, Human
auccuccucag

SEQ ID NO: 3079208 - RNA, 16 nt, Human
auccacccaccucagc

SEQ ID NO: 3079209 - RNA, 20 nt, Human
auccacccaccucagccucc

SEQ ID NO: 3079210 - RNA, 18 nt, Human
auccacccaccucagccu

SEQ ID NO: 3079211 - RNA, 18 nt, Human
auccucauacccaccccc

SEQ ID NO: 3079212 - RNA, 19 nt, Human
auccucauacccaccccca

SEQ ID NO: 3079213 - RNA, 22 nt, Human
auccucauacccacccccaccc

SEQ ID NO: 3079214 - RNA, 15 nt, Human
aucccuacuguaauu

SEQ ID NO: 3079215 - RNA, 23 nt, Human
aucagcugcuacuacuccuguag

SEQ ID NO: 3079216 - RNA, 13 nt, Human
aucagcugcuacu

SEQ ID NO: 3079217 - RNA, 20 nt, Human
aucagccugcuccagcuguu

SEQ ID NO: 3079218 - RNA, 19 nt, Human
aucauggagguuugaagau

SEQ ID NO: 3079219 - RNA, 11 nt, Human
aucagccuggg

SEQ ID NO: 3079220 - RNA, 20 nt, Human
aucagccugggcaaugugau

SEQ ID NO: 3079221 - RNA, 21 nt, Human
aucagccugggcaaugugaua

SEQ ID NO: 3079222 - RNA, 12 nt, Human
aucagcugcuac

SEQ ID NO: 3079223 - RNA, 22 nt, Human
aucuuauaauuuaaaauaugcu

SEQ ID NO: 3079224 - RNA, 19 nt, Human
aucuuccaacucaaacucu

SEQ ID NO: 3079225 - RNA, 22 nt, Human
aucucucgugauugauaagaac

SEQ ID NO: 3079226 - RNA, 17 nt, Human
aucuugaagacuuuucu

SEQ ID NO: 3079227 - RNA, 17 nt, Human
aucuucuuuauaauucu

SEQ ID NO: 3079228 - RNA, 14 nt, Human
augacucagaauau

SEQ ID NO: 3079229 - RNA, 12 nt, Human
augacuccagaa

SEQ ID NO: 3079230 - RNA, 16 nt, Human
augacuccagaauuuc

SEQ ID NO: 3079231 - RNA, 17 nt, Human
augacuccagaauuucc

SEQ ID NO: 3079232 - RNA, 12 nt, Human
augagccuggca

SEQ ID NO: 3079233 - RNA, 21 nt, Human
augaagcuuuuaugugaaaca

SEQ ID NO: 3079234 - RNA, 20 nt, Human
augaagcuuuuaugugaaac

SEQ ID NO: 3079235 - RNA, 19 nt, Human
augaagcuuuuaugugaaa

SEQ ID NO: 3079236 - RNA, 18 nt, Human
augaagcuuuuaugugaa

SEQ ID NO: 3079237 - RNA, 12 nt, Human
augacccagugg

SEQ ID NO: 3079238 - RNA, 17 nt, Human
augaaaaaauauauauc

SEQ ID NO: 3079239 - RNA, 14 nt, Human
augaaaaaauauau

SEQ ID NO: 3079240 - RNA, 22 nt, Human
augaaaaaauauauaucaaaua

SEQ ID NO: 3079241 - RNA, 20 nt, Human
augaaacacucaguuguuca

SEQ ID NO: 3079242 - RNA, 13 nt, Human
augagccuggcaa

SEQ ID NO: 3079243 - RNA, 14 nt, Human
augagccuggcaag

SEQ ID NO: 3079244 - RNA, 14 nt, Human
agcaugcacaaauu

SEQ ID NO: 3079245 - RNA, 12 nt, Human
agcaugccugga

SEQ ID NO: 3079246 - RNA, 12 nt, Human
agcaugaagaca

SEQ ID NO: 3079247 - RNA, 23 nt, Human
agccaaagcuaggccuggccaga

SEQ ID NO: 3079248 - RNA, 20 nt, Human
agccaaagcuaggccuggcc

SEQ ID NO: 3079249 - RNA, 19 nt, Human
agccaaagcuaggccuggc

SEQ ID NO: 3079250 - RNA, 18 nt, Human
agccaaagcuaggccugg

SEQ ID NO: 3079251 - RNA, 20 nt, Human
agccagaggagagaggaccc

SEQ ID NO: 3079252 - RNA, 23 nt, Human
agccaaggccaaaggaagcacau

SEQ ID NO: 3079253 - RNA, 22 nt, Human
agccaaggccaaaggaagcaca

SEQ ID NO: 3079254 - RNA, 20 nt, Human
agccaaggccaaaggaagca

SEQ ID NO: 3079255 - RNA, 18 nt, Human
agccauuugucccaagug

SEQ ID NO: 3079256 - RNA, 17 nt, Human
agccauuugucccaagu

SEQ ID NO: 3079257 - RNA, 14 nt, Human
agccauuuguccca

SEQ ID NO: 3079258 - RNA, 15 nt, Human
agccagauuuuccug

SEQ ID NO: 3079259 - RNA, 19 nt, Human
agccagauuuuccugaaaa

SEQ ID NO: 3079260 - RNA, 19 nt, Human
agcacuaaggugugcucug

SEQ ID NO: 3079261 - RNA, 21 nt, Human
agcagccacauuccugaugcu

SEQ ID NO: 3079262 - RNA, 15 nt, Human
agcagccacauuccu

SEQ ID NO: 3079263 - RNA, 21 nt, Human
agcaguugaaaagacuccaaa

SEQ ID NO: 3079264 - RNA, 23 nt, Human
agcaguugaaaagacuccaaaga

SEQ ID NO: 3079265 - RNA, 21 nt, Human
agaugggagaaucacuugaac

SEQ ID NO: 3079266 - RNA, 14 nt, Human
agauguagaggaga

SEQ ID NO: 3079267 - RNA, 19 nt, Human
agccucccaaagugcuggg

SEQ ID NO: 3079268 - RNA, 18 nt, Human
agccucccaaagugcugg

SEQ ID NO: 3079269 - RNA, 21 nt, Human
agccgggcgugguggugagug

SEQ ID NO: 3079270 - RNA, 14 nt, Human
agccgcuggggcca

SEQ ID NO: 3079271 - RNA, 22 nt, Human
agccgcuggggccaguuggucc

SEQ ID NO: 3079272 - RNA, 18 nt, Human
agccgagaucacgccacu

SEQ ID NO: 3079273 - RNA, 20 nt, Human
agccgagauugcaccacugc

SEQ ID NO: 3079274 - RNA, 19 nt, Human
agccgagauugcaccacug

SEQ ID NO: 3079275 - RNA, 21 nt, Human
agccgagaucacgccacugca

SEQ ID NO: 3079276 - RNA, 17 nt, Human
agccucccgaguagcug

SEQ ID NO: 3079277 - RNA, 22 nt, Human
agccucccgaauagcugggacu

SEQ ID NO: 3079278 - RNA, 20 nt, Human
agccucccgaauagcuggga

SEQ ID NO: 3079279 - RNA, 19 nt, Human
agccucccgaauagcuggg

SEQ ID NO: 3079280 - RNA, 18 nt, Human
agccucccgaauagcugg

SEQ ID NO: 3079281 - RNA, 17 nt, Human
agccucccaaagugcug

SEQ ID NO: 3079282 - RNA, 22 nt, Human
agccucccgaguagcugggacu

SEQ ID NO: 3079283 - RNA, 20 nt, Human
agccgagaucacgccacugc

SEQ ID NO: 3079284 - RNA, 19 nt, Human
agccgagaucacgccacug

SEQ ID NO: 3079285 - RNA, 15 nt, Human
agcccugagcuuucu

SEQ ID NO: 3079286 - RNA, 20 nt, Human
agccccaucccaaacccuuc

SEQ ID NO: 3079287 - RNA, 11 nt, Human
agccccauccu

SEQ ID NO: 3079288 - RNA, 16 nt, Human
agccccagugcccaca

SEQ ID NO: 3079289 - RNA, 19 nt, Human
agccccacccucagaugca

SEQ ID NO: 3079290 - RNA, 21 nt, Human
agauaggucagugcaaauacu

SEQ ID NO: 3079291 - RNA, 15 nt, Human
agauagccaaggcca

SEQ ID NO: 3079292 - RNA, 16 nt, Human
agauagccaaggccaa

SEQ ID NO: 3079293 - RNA, 22 nt, Human
agaggggaacagacuggaagca

SEQ ID NO: 3079294 - RNA, 16 nt, Human
agaggggaagagacuu

SEQ ID NO: 3079295 - RNA, 13 nt, Human
agaggagaggggc

SEQ ID NO: 3079296 - RNA, 23 nt, Human
agaggguggugaccucugccuga

SEQ ID NO: 3079297 - RNA, 22 nt, Human
agauacuuggggggcugaggug

SEQ ID NO: 3079298 - RNA, 13 nt, Human
agauagccaaggc

SEQ ID NO: 3079299 - RNA, 14 nt, Human
agacacaacuauuu

SEQ ID NO: 3079300 - RNA, 16 nt, Human
agacagcccgggcucu

SEQ ID NO: 3079301 - RNA, 17 nt, Human
agacagcccgggcucug

SEQ ID NO: 3079302 - RNA, 18 nt, Human
agacagcccgggcucugc

SEQ ID NO: 3079303 - RNA, 20 nt, Human
agacagcccgggcucugccu

SEQ ID NO: 3079304 - RNA, 14 nt, Human
agaccaucccugaa

SEQ ID NO: 3079305 - RNA, 17 nt, Human
agaccaucccugaaggc

SEQ ID NO: 3079306 - RNA, 18 nt, Human
agaccaucccugaaggcc

SEQ ID NO: 3079307 - RNA, 21 nt, Human
agaccaucccugaaggccccg

SEQ ID NO: 3079308 - RNA, 13 nt, Human
agaccaucccuga

SEQ ID NO: 3079309 - RNA, 18 nt, Human
agacgggggcagagaggg

SEQ ID NO: 3079310 - RNA, 19 nt, Human
agacggagucccaccuugg

SEQ ID NO: 3079311 - RNA, 15 nt, Human
agacaauuuauuaug

SEQ ID NO: 3079312 - RNA, 19 nt, Human
agacaaugacuuacuguac

SEQ ID NO: 3079313 - RNA, 21 nt, Human
agacaauuuauuauggcacau

SEQ ID NO: 3079314 - RNA, 17 nt, Human
agacaaugacuuacugu

SEQ ID NO: 3079315 - RNA, 13 nt, Human
agacaaugacuua

SEQ ID NO: 3079316 - RNA, 10 nt, Human
agagaagaga

SEQ ID NO: 3079317 - RNA, 21 nt, Human
agagaagagauugugguuuca

SEQ ID NO: 3079318 - RNA, 17 nt, Human
agacugcauuauauuua

SEQ ID NO: 3079319 - RNA, 23 nt, Human
agagaggguggugaccucugccu

SEQ ID NO: 3079320 - RNA, 13 nt, Human
agagccccacagc

SEQ ID NO: 3079321 - RNA, 15 nt, Human
agagccccacagccc

SEQ ID NO: 3079322 - RNA, 23 nt, Human
agacugaguacguugugcauuug

SEQ ID NO: 3079323 - RNA, 15 nt, Human
aggaacuacugagga

SEQ ID NO: 3079324 - RNA, 20 nt, Human
aggaccccuccaugugggcu

SEQ ID NO: 3079325 - RNA, 14 nt, Human
aggaccucagguga

SEQ ID NO: 3079326 - RNA, 20 nt, Human
aggaccucaggugagaagca

SEQ ID NO: 3079327 - RNA, 15 nt, Human
aggagagcuagcagc

SEQ ID NO: 3079328 - RNA, 14 nt, Human
aggagaggggcaca

SEQ ID NO: 3079329 - RNA, 16 nt, Human
aggagaggggcacagg

SEQ ID NO: 3079330 - RNA, 18 nt, Human
aggagaggggcacagggu

SEQ ID NO: 3079331 - RNA, 12 nt, Human
aggauucuuccu

SEQ ID NO: 3079332 - RNA, 20 nt, Human
aggauguucugggacacagu

SEQ ID NO: 3079333 - RNA, 14 nt, Human
aggauguugaaaaa

SEQ ID NO: 3079334 - RNA, 18 nt, Human
aggauguucugggacaca

SEQ ID NO: 3079335 - RNA, 17 nt, Human
aggaggggauagagaga

SEQ ID NO: 3079336 - RNA, 15 nt, Human
agcuuuucccuuuuu

SEQ ID NO: 3079337 - RNA, 13 nt, Human
aggaaaaacugau

SEQ ID NO: 3079338 - RNA, 15 nt, Human
aggaaaaacugauuu

SEQ ID NO: 3079339 - RNA, 21 nt, Human
agcuuuuaugugaaacauguu

SEQ ID NO: 3079340 - RNA, 18 nt, Human
agcuucacuguaaaauaa

SEQ ID NO: 3079341 - RNA, 19 nt, Human
agcuuccuucugugaaagu

SEQ ID NO: 3079342 - RNA, 19 nt, Human
agcuggucccacucagucc

SEQ ID NO: 3079343 - RNA, 21 nt, Human
agcuggucccacucaguccau

SEQ ID NO: 3079344 - RNA, 22 nt, Human
agcugggugucaagagggucug

SEQ ID NO: 3079345 - RNA, 17 nt, Human
agcugggugucaagagg

SEQ ID NO: 3079346 - RNA, 13 nt, Human
aggcugccagugc

SEQ ID NO: 3079347 - RNA, 23 nt, Human
aggcuagugugguguuuccuggc

SEQ ID NO: 3079348 - RNA, 12 nt, Human
agggacagaggg

SEQ ID NO: 3079349 - RNA, 13 nt, Human
agggacagagggg

SEQ ID NO: 3079350 - RNA, 20 nt, Human
agggacagaggggguggccu

SEQ ID NO: 3079351 - RNA, 21 nt, Human
agggacgcuacccgggaaggg

SEQ ID NO: 3079352 - RNA, 17 nt, Human
agggacgcuacccggga

SEQ ID NO: 3079353 - RNA, 18 nt, Human
aggcugccucucccauca

SEQ ID NO: 3079354 - RNA, 19 nt, Human
aggcugccagugccugggu

SEQ ID NO: 3079355 - RNA, 20 nt, Human
aggcugccagugccugggug

SEQ ID NO: 3079356 - RNA, 14 nt, Human
aggcugccagugcc

SEQ ID NO: 3079357 - RNA, 15 nt, Human
aggcugccagugccu

SEQ ID NO: 3079358 - RNA, 16 nt, Human
aggcugccagugccug

SEQ ID NO: 3079359 - RNA, 15 nt, Human
aggggcacagggucu

SEQ ID NO: 3079360 - RNA, 21 nt, Human
aggggauagagagagaccacu

SEQ ID NO: 3079361 - RNA, 16 nt, Human
aggggauagagagaga

SEQ ID NO: 3079362 - RNA, 19 nt, Human
agggcgggaggauguucug

SEQ ID NO: 3079363 - RNA, 14 nt, Human
agggccuggccuga

SEQ ID NO: 3079364 - RNA, 15 nt, Human
agggccuggccugag

SEQ ID NO: 3079365 - RNA, 16 nt, Human
agggccuggccugagc

SEQ ID NO: 3079366 - RNA, 17 nt, Human
agggccuggccugagcu

SEQ ID NO: 3079367 - RNA, 22 nt, Human
agggcacagaaaauggaagaca

SEQ ID NO: 3079368 - RNA, 21 nt, Human
agggcacaccgggcacucaga

SEQ ID NO: 3079369 - RNA, 20 nt, Human
agggcacaccgggcacucag

SEQ ID NO: 3079370 - RNA, 17 nt, Human
agggcacaccgggcacu

SEQ ID NO: 3079371 - RNA, 22 nt, Human
agguuaauuccaauuauaugag

SEQ ID NO: 3079372 - RNA, 15 nt, Human
agguuaauuccaauu

SEQ ID NO: 3079373 - RNA, 14 nt, Human
agguuaauguucau

SEQ ID NO: 3079374 - RNA, 17 nt, Human
agguucaaagauauuuu

SEQ ID NO: 3079375 - RNA, 15 nt, Human
agguucaaagauauu

SEQ ID NO: 3079376 - RNA, 15 nt, Human
agguuaauaaaguaa

SEQ ID NO: 3079377 - RNA, 17 nt, Human
agguucaugcaaacuuu

SEQ ID NO: 3079378 - RNA, 13 nt, Human
agguucagcuugu

SEQ ID NO: 3079379 - RNA, 15 nt, Human
agguggaaauaaacu

SEQ ID NO: 3079380 - RNA, 14 nt, Human
aggucgaggcagga

SEQ ID NO: 3079381 - RNA, 16 nt, Human
aggugcugccauccag

SEQ ID NO: 3079382 - RNA, 17 nt, Human
aggugcugccauccagg

SEQ ID NO: 3079383 - RNA, 20 nt, Human
aggucccuaauaaagcugug

SEQ ID NO: 3079384 - RNA, 16 nt, Human
aggucccuaauaaagc

SEQ ID NO: 3079385 - RNA, 19 nt, Human
aggucccuaauaaagcugu

SEQ ID NO: 3079386 - RNA, 18 nt, Human
aggucccuaauaaagcug

SEQ ID NO: 3079387 - RNA, 17 nt, Human
aggucccuaauaaagcu

SEQ ID NO: 3079388 - RNA, 17 nt, Human
agguaaggaauaccugu

SEQ ID NO: 3079389 - RNA, 19 nt, Human
aagucucuggaauuugaaa

SEQ ID NO: 3079390 - RNA, 16 nt, Human
aagucuuagauguaua

SEQ ID NO: 3079391 - RNA, 15 nt, Human
aaguacuuuuggcau

SEQ ID NO: 3079392 - RNA, 14 nt, Human
aaguacuuuuggca

SEQ ID NO: 3079393 - RNA, 11 nt, Human
aaguacuucuu

SEQ ID NO: 3079394 - RNA, 23 nt, Human
aaguccaggcuuuuuuaucaugu

SEQ ID NO: 3079395 - RNA, 16 nt, Human
aaguaucccuacugua

SEQ ID NO: 3079396 - RNA, 11 nt, Human
aaggugggagg

SEQ ID NO: 3079397 - RNA, 16 nt, Human
aagguuaauaaaguaa

SEQ ID NO: 3079398 - RNA, 15 nt, Human
aagguuaauaaagua

SEQ ID NO: 3079399 - RNA, 20 nt, Human
aagguuaauguucaucaucc

SEQ ID NO: 3079400 - RNA, 21 nt, Human
aauaauccuaaacauaugaau

SEQ ID NO: 3079401 - RNA, 19 nt, Human
aauaauguaagacaaauau

SEQ ID NO: 3079402 - RNA, 12 nt, Human
aauaauguaaga

SEQ ID NO: 3079403 - RNA, 19 nt, Human
aauaaacuauuuguaaagu

SEQ ID NO: 3079404 - RNA, 17 nt, Human
aauaaacgucuuaaaua

SEQ ID NO: 3079405 - RNA, 16 nt, Human
aauaaacgucuuaaau

SEQ ID NO: 3079406 - RNA, 22 nt, Human
aaguuguaggcauaaagucagg

SEQ ID NO: 3079407 - RNA, 22 nt, Human
aagugcugggauuacaggugug

SEQ ID NO: 3079408 - RNA, 13 nt, Human
aagaaauuaugug

SEQ ID NO: 3079409 - RNA, 22 nt, Human
aagaaauuaugugccagauuua

SEQ ID NO: 3079410 - RNA, 16 nt, Human
aagauuuaccacuugu

SEQ ID NO: 3079411 - RNA, 14 nt, Human
aagcagaggaagga

SEQ ID NO: 3079412 - RNA, 23 nt, Human
aagcagaccauuggggcucccag

SEQ ID NO: 3079413 - RNA, 22 nt, Human
aagcagaccauuggggcuccca

SEQ ID NO: 3079414 - RNA, 11 nt, Human
aagcagcucuu

SEQ ID NO: 3079415 - RNA, 13 nt, Human
aagccagauuuuc

SEQ ID NO: 3079416 - RNA, 18 nt, Human
aagccauaauuguucuua

SEQ ID NO: 3079417 - RNA, 12 nt, Human
aagcguggugga

SEQ ID NO: 3079418 - RNA, 22 nt, Human
aagcugcacccucaggcaggug

SEQ ID NO: 3079419 - RNA, 21 nt, Human
aagcugcacccucaggcaggu

SEQ ID NO: 3079420 - RNA, 20 nt, Human
aagcugcacccucaggcagg

SEQ ID NO: 3079421 - RNA, 18 nt, Human
aaggacauugcggacagc

SEQ ID NO: 3079422 - RNA, 13 nt, Human
aagcugggcaggu

SEQ ID NO: 3079423 - RNA, 11 nt, Human
aagcugggcag

SEQ ID NO: 3079424 - RNA, 17 nt, Human
aaggcaaggcugucaau

SEQ ID NO: 3079425 - RNA, 18 nt, Human
aaggcaaggcugucaauu

SEQ ID NO: 3079426 - RNA, 16 nt, Human
aaggcaaggcugucaa

SEQ ID NO: 3079427 - RNA, 13 nt, Human
aaugucaguguga

SEQ ID NO: 3079428 - RNA, 15 nt, Human
aaugucagugugacu

SEQ ID NO: 3079429 - RNA, 16 nt, Human
aaugucagugugacug

SEQ ID NO: 3079430 - RNA, 20 nt, Human
aaugucucuuuaaugucaca

SEQ ID NO: 3079431 - RNA, 17 nt, Human
aaugucagugugacuga

SEQ ID NO: 3079432 - RNA, 21 nt, Human
aaugucagugugacugaucuc

SEQ ID NO: 3079433 - RNA, 22 nt, Human
aaugucuaguuguaacaccaug

SEQ ID NO: 3079434 - RNA, 15 nt, Human
aaugggcagagcaga

SEQ ID NO: 3079435 - RNA, 13 nt, Human
aaugggcagagca

SEQ ID NO: 3079436 - RNA, 14 nt, Human
aauuaaauuuugag

SEQ ID NO: 3079437 - RNA, 18 nt, Human
aauguuugccucugccuc

SEQ ID NO: 3079438 - RNA, 19 nt, Human
aauguuugccucugccucu

SEQ ID NO: 3079439 - RNA, 18 nt, Human
aauuaaaacacaacaucu

SEQ ID NO: 3079440 - RNA, 18 nt, Human
aauuaguggcacuugcuu

SEQ ID NO: 3079441 - RNA, 14 nt, Human
aauuaguuuuauau

SEQ ID NO: 3079442 - RNA, 17 nt, Human
aauuaguuuuauaugcu

SEQ ID NO: 3079443 - RNA, 20 nt, Human
aauuaguuuuauaugcuucu

SEQ ID NO: 3079444 - RNA, 18 nt, Human
aaucucauaauuuauaca

SEQ ID NO: 3079445 - RNA, 13 nt, Human
aaucuccaaaaua

SEQ ID NO: 3079446 - RNA, 14 nt, Human
aaucuccaaaauaa

SEQ ID NO: 3079447 - RNA, 13 nt, Human
aauccauacauuu

SEQ ID NO: 3079448 - RNA, 18 nt, Human
aaugauaaguaaaugcua

SEQ ID NO: 3079449 - RNA, 17 nt, Human
aaugaagauacugaaau

SEQ ID NO: 3079450 - RNA, 20 nt, Human
aaugauaacuggaaacuuca

SEQ ID NO: 3079451 - RNA, 21 nt, Human
aaugauaaguaaaugcuaggu

SEQ ID NO: 3079452 - RNA, 21 nt, Human
aaugaugauccuaggcauuug

SEQ ID NO: 3079453 - RNA, 17 nt, Human
aaugauaacuggaaacu

SEQ ID NO: 3079454 - RNA, 12 nt, Human
aaugaagauacu

SEQ ID NO: 3079455 - RNA, 23 nt, Human
aaugaaccacaucuugcucugcu

SEQ ID NO: 3079456 - RNA, 17 nt, Human
aaugaaccacaucuugc

SEQ ID NO: 3079457 - RNA, 16 nt, Human
aaugaaccacaucuug

SEQ ID NO: 3079458 - RNA, 22 nt, Human
aaucugcuuuuuaaagaaugcu

SEQ ID NO: 3079459 - RNA, 19 nt, Human
aaugaugccaugaggaaca

SEQ ID NO: 3079460 - RNA, 14 nt, Human
aauauuauguguuu

SEQ ID NO: 3079461 - RNA, 16 nt, Human
aauauuauguuaaaac

SEQ ID NO: 3079462 - RNA, 15 nt, Human
aaucaagaaacuuaa

SEQ ID NO: 3079463 - RNA, 13 nt, Human
aaucacaauacau

SEQ ID NO: 3079464 - RNA, 16 nt, Human
aauauaggaacuuaaa

SEQ ID NO: 3079465 - RNA, 21 nt, Human
aauauaggaacuuaaauaaug

SEQ ID NO: 3079466 - RNA, 20 nt, Human
aauauaggaacuuaaauaau

SEQ ID NO: 3079467 - RNA, 18 nt, Human
aauauaggaacuuaaaua

SEQ ID NO: 3079468 - RNA, 21 nt, Human
aaauugauguguuuauuuaua

SEQ ID NO: 3079469 - RNA, 17 nt, Human
aacaaagaaauuaugug

SEQ ID NO: 3079470 - RNA, 15 nt, Human
aacaaagaaauuaug

SEQ ID NO: 3079471 - RNA, 19 nt, Human
aacaccucugcacaagcug

SEQ ID NO: 3079472 - RNA, 15 nt, Human
aacacgagcaggcua

SEQ ID NO: 3079473 - RNA, 19 nt, Human
aacacauuuuucuuaggga

SEQ ID NO: 3079474 - RNA, 13 nt, Human
aacaugauuuggg

SEQ ID NO: 3079475 - RNA, 12 nt, Human
aaccagaucauu

SEQ ID NO: 3079476 - RNA, 14 nt, Human
aaccagaucauugu

SEQ ID NO: 3079477 - RNA, 21 nt, Human
aacauguaauuaaguacuaug

SEQ ID NO: 3079478 - RNA, 14 nt, Human
aacauguaauuaag

SEQ ID NO: 3079479 - RNA, 22 nt, Human
aaccacucuaucaaguauuaua

SEQ ID NO: 3079480 - RNA, 14 nt, Human
aacccuggugacca

SEQ ID NO: 3079481 - RNA, 16 nt, Human
aacuuuggaacaagau

SEQ ID NO: 3079482 - RNA, 20 nt, Human
aacuuugaccucugcagcaa

SEQ ID NO: 3079483 - RNA, 19 nt, Human
aacuuugaccucugcagca

SEQ ID NO: 3079484 - RNA, 15 nt, Human
aacuuuuauaaacuu

SEQ ID NO: 3079485 - RNA, 12 nt, Human
aacuuuuauaaa

SEQ ID NO: 3079486 - RNA, 17 nt, Human
aacuuugaccucugcag

SEQ ID NO: 3079487 - RNA, 14 nt, Human
aacuuugaccucug

SEQ ID NO: 3079488 - RNA, 13 nt, Human
aacuuugaccucu

SEQ ID NO: 3079489 - RNA, 19 nt, Human
aacuuuuauaaacuuuacc

SEQ ID NO: 3079490 - RNA, 16 nt, Human
aacuuuuauaaacuuu

SEQ ID NO: 3079491 - RNA, 14 nt, Human
aagaaauguaaggg

SEQ ID NO: 3079492 - RNA, 13 nt, Human
aagaaauguaagg

SEQ ID NO: 3079493 - RNA, 12 nt, Human
aacucaccccag

SEQ ID NO: 3079494 - RNA, 15 nt, Human
aacucaccugccccu

SEQ ID NO: 3079495 - RNA, 16 nt, Human
aacucaccugccccuc

SEQ ID NO: 3079496 - RNA, 17 nt, Human
aacuuaaauaaugugaa

SEQ ID NO: 3079497 - RNA, 17 nt, Human
aacugauuuuuuuuucc

SEQ ID NO: 3079498 - RNA, 19 nt, Human
aacugauuuuuuuuuccuu

SEQ ID NO: 3079499 - RNA, 23 nt, Human
aacugacacaugcugaacaucac

SEQ ID NO: 3079500 - RNA, 16 nt, Human
aaagggacugagaaau

SEQ ID NO: 3079501 - RNA, 19 nt, Human
aaagucucuggaauuugaa

SEQ ID NO: 3079502 - RNA, 22 nt, Human
aaagucucuggaauuugaaaca

SEQ ID NO: 3079503 - RNA, 20 nt, Human
aaagucucuggaauuugaaa

SEQ ID NO: 3079504 - RNA, 12 nt, Human
aaauaacaauga

SEQ ID NO: 3079505 - RNA, 17 nt, Human
aaauaaacgucuuaaau

SEQ ID NO: 3079506 - RNA, 11 nt, Human
aaagugcuggg

SEQ ID NO: 3079507 - RNA, 14 nt, Human
aaagugcugggauu

SEQ ID NO: 3079508 - RNA, 14 nt, Human
aaauaguauuugag

SEQ ID NO: 3079509 - RNA, 21 nt, Human
aaauggacguguuaugacucc

SEQ ID NO: 3079510 - RNA, 22 nt, Human
aaauggacguguuaugacucca

SEQ ID NO: 3079511 - RNA, 20 nt, Human
aaauggacguguuaugacuc

SEQ ID NO: 3079512 - RNA, 16 nt, Human
aaauggaaaugggcag

SEQ ID NO: 3079513 - RNA, 18 nt, Human
aaauggaagacagcucuu

SEQ ID NO: 3079514 - RNA, 16 nt, Human
aaaucaaauaugcaaa

SEQ ID NO: 3079515 - RNA, 19 nt, Human
aaaucaaauaugcaaagca

SEQ ID NO: 3079516 - RNA, 18 nt, Human
aaaucaaauaugcaaagc

SEQ ID NO: 3079517 - RNA, 21 nt, Human
aaaauuauuuuguucauacau

SEQ ID NO: 3079518 - RNA, 15 nt, Human
aaaacacauuuuucu

SEQ ID NO: 3079519 - RNA, 13 nt, Human
aaaacacauuuuu

SEQ ID NO: 3079520 - RNA, 13 nt, Human
aaaauucagugga

SEQ ID NO: 3079521 - RNA, 13 nt, Human
aaacacucuugaa

SEQ ID NO: 3079522 - RNA, 17 nt, Human
aaacacucuugaaaaau

SEQ ID NO: 3079523 - RNA, 14 nt, Human
aaacacucuugaaa

SEQ ID NO: 3079524 - RNA, 18 nt, Human
aaacacuguucucugccc

SEQ ID NO: 3079525 - RNA, 19 nt, Human
aaacacuguucucugcccu

SEQ ID NO: 3079526 - RNA, 22 nt, Human
aaacacuguucucugcccucca

SEQ ID NO: 3079527 - RNA, 12 nt, Human
aaagaguacucu

SEQ ID NO: 3079528 - RNA, 17 nt, Human
aaagaguacucuuguuu

SEQ ID NO: 3079529 - RNA, 15 nt, Human
aaagaaauuaugugc

SEQ ID NO: 3079530 - RNA, 11 nt, Human
aaagaacaucc

SEQ ID NO: 3079531 - RNA, 11 nt, Human
aaagagguuuu

SEQ ID NO: 3079532 - RNA, 13 nt, Human
aaagaaauuaugu

SEQ ID NO: 3079533 - RNA, 20 nt, Human
aaagaaaacuuguauuaugu

SEQ ID NO: 3079534 - RNA, 12 nt, Human
aaagaaaacuug

SEQ ID NO: 3079535 - RNA, 19 nt, Human
aaacugccagcaacgcagg

SEQ ID NO: 3079536 - RNA, 17 nt, Human
aaacugacucuuaagaa

SEQ ID NO: 3079537 - RNA, 15 nt, Human
aaacugccagcaacg

SEQ ID NO: 3079538 - RNA, 14 nt, Human
aaacugccagcaac

SEQ ID NO: 3079539 - RNA, 16 nt, Human
aaacugacucuuaaga

SEQ ID NO: 3079540 - RNA, 17 nt, Human
aaagaugaaaauauuug

SEQ ID NO: 3079541 - RNA, 16 nt, Human
aaagaugaaaauauuu

SEQ ID NO: 3079542 - RNA, 13 nt, Human
aaagaugaaaaua

SEQ ID NO: 3079543 - RNA, 12 nt, Human
acuguuuugaau

SEQ ID NO: 3079544 - RNA, 23 nt, Human
acuuauuguagcauccuggaaua

SEQ ID NO: 3079545 - RNA, 20 nt, Human
acuuauuguagcauccugga

SEQ ID NO: 3079546 - RNA, 19 nt, Human
acuucacauauugauuucc

SEQ ID NO: 3079547 - RNA, 19 nt, Human
acuuguaaaggaauuuaaa

SEQ ID NO: 3079548 - RNA, 20 nt, Human
acuuguaaaggaauuuaaaa

SEQ ID NO: 3079549 - RNA, 18 nt, Human
acuuguaaaggaauuuaa

SEQ ID NO: 3079550 - RNA, 15 nt, Human
acuuggucugugaga

SEQ ID NO: 3079551 - RNA, 14 nt, Human
acuuggucugugag

SEQ ID NO: 3079552 - RNA, 13 nt, Human
acuuggucuguga

SEQ ID NO: 3079553 - RNA, 22 nt, Human
acuucugccagcauaauacuug

SEQ ID NO: 3079554 - RNA, 18 nt, Human
acuucugccauauucugu

SEQ ID NO: 3079555 - RNA, 12 nt, Human
acugucuucagu

SEQ ID NO: 3079556 - RNA, 14 nt, Human
acuggaagcacagc

SEQ ID NO: 3079557 - RNA, 12 nt, Human
acuggaacucuc

SEQ ID NO: 3079558 - RNA, 15 nt, Human
acuggaagcacagcu

SEQ ID NO: 3079559 - RNA, 14 nt, Human
acuggagaaaaugg

SEQ ID NO: 3079560 - RNA, 19 nt, Human
acuuuauacccagaaaguu

SEQ ID NO: 3079561 - RNA, 23 nt, Human
acuuuagggaaguacuuuuggca

SEQ ID NO: 3079562 - RNA, 13 nt, Human
acuuuagggaagu

SEQ ID NO: 3079563 - RNA, 23 nt, Human
acuuuccuucauucaacccaccu

SEQ ID NO: 3079564 - RNA, 20 nt, Human
acuuuguucuggcucuucca

SEQ ID NO: 3079565 - RNA, 23 nt, Human
acuuuguucuggcucuuccaggc

SEQ ID NO: 3079566 - RNA, 23 nt, Human
agaaaauauuauguguuuccaua

SEQ ID NO: 3079567 - RNA, 22 nt, Human
agaaaauggacguguuaugacu

SEQ ID NO: 3079568 - RNA, 23 nt, Human
agaaaauggacguguuaugacuc

SEQ ID NO: 3079569 - RNA, 23 nt, Human
agaaaauggaagacagcucuuau

SEQ ID NO: 3079570 - RNA, 15 nt, Human
agaaaauggacgugu

SEQ ID NO: 3079571 - RNA, 20 nt, Human
agaaaauggacguguuauga

SEQ ID NO: 3079572 - RNA, 18 nt, Human
agaaaaguugaauuuuac

SEQ ID NO: 3079573 - RNA, 21 nt, Human
agaaaaguugaauuuuacaug

SEQ ID NO: 3079574 - RNA, 22 nt, Human
acuuuuauaaacuuuaccuuuu

SEQ ID NO: 3079575 - RNA, 19 nt, Human
acuuuuauaaacuuuaccu

SEQ ID NO: 3079576 - RNA, 15 nt, Human
acuuuuauaaacuuu

SEQ ID NO: 3079577 - RNA, 18 nt, Human
agaaauaaaguuucuguu

SEQ ID NO: 3079578 - RNA, 15 nt, Human
agaaauaaaguuucu

SEQ ID NO: 3079579 - RNA, 23 nt, Human
agaaaggaggggauagagagaga

SEQ ID NO: 3079580 - RNA, 20 nt, Human
agaaaggaggggauagagag

SEQ ID NO: 3079581 - RNA, 14 nt, Human
acuagcuauggugu

SEQ ID NO: 3079582 - RNA, 21 nt, Human
acucauaaaaagccugcaauu

SEQ ID NO: 3079583 - RNA, 14 nt, Human
acucccccaggugg

SEQ ID NO: 3079584 - RNA, 12 nt, Human
acuccccuccuu

SEQ ID NO: 3079585 - RNA, 13 nt, Human
acuccccugcugg

SEQ ID NO: 3079586 - RNA, 17 nt, Human
acuccccugcugggugu

SEQ ID NO: 3079587 - RNA, 17 nt, Human
acucaaacucuuaaaac

SEQ ID NO: 3079588 - RNA, 16 nt, Human
acucaaacucuuaaaa

SEQ ID NO: 3079589 - RNA, 11 nt, Human
acuauaaugua

SEQ ID NO: 3079590 - RNA, 18 nt, Human
acucaaaagcugggcagg

SEQ ID NO: 3079591 - RNA, 16 nt, Human
acucugugucaggugg

SEQ ID NO: 3079592 - RNA, 11 nt, Human
acucuuaaaac

SEQ ID NO: 3079593 - RNA, 18 nt, Human
acucuuaaaacccaagug

SEQ ID NO: 3079594 - RNA, 16 nt, Human
acucuaucaaguauua

SEQ ID NO: 3079595 - RNA, 14 nt, Human
acucuaucaaguau

SEQ ID NO: 3079596 - RNA, 13 nt, Human
acucuacccucuu

SEQ ID NO: 3079597 - RNA, 18 nt, Human
acucuacccucuuagaaa

SEQ ID NO: 3079598 - RNA, 21 nt, Human
acucuacccucuuagaaaaac

SEQ ID NO: 3079599 - RNA, 12 nt, Human
acucccuuucaa

SEQ ID NO: 3079600 - RNA, 13 nt, Human
acucccuuucaac

SEQ ID NO: 3079601 - RNA, 15 nt, Human
acgcugugcugcccu

SEQ ID NO: 3079602 - RNA, 16 nt, Human
acgcugugcugcccug

SEQ ID NO: 3079603 - RNA, 17 nt, Human
acgcugugcugcccugc

SEQ ID NO: 3079604 - RNA, 18 nt, Human
acgcugugcugcccugcc

SEQ ID NO: 3079605 - RNA, 16 nt, Human
acgugcacgcacacug

SEQ ID NO: 3079606 - RNA, 13 nt, Human
acguggcugcuuc

SEQ ID NO: 3079607 - RNA, 14 nt, Human
acguggcugcuuca

SEQ ID NO: 3079608 - RNA, 15 nt, Human
acguggcugcuucaa

SEQ ID NO: 3079609 - RNA, 11 nt, Human
acguggcugcu

SEQ ID NO: 3079610 - RNA, 15 nt, Human
acuaagagagaauga

SEQ ID NO: 3079611 - RNA, 16 nt, Human
acuaagagagaaugag

SEQ ID NO: 3079612 - RNA, 22 nt, Human
acuaaguuuuuauggcuuuugu

SEQ ID NO: 3079613 - RNA, 15 nt, Human
acuaaguuuuuaugg

SEQ ID NO: 3079614 - RNA, 17 nt, Human
acgauuucuguuuagau

SEQ ID NO: 3079615 - RNA, 14 nt, Human
acgauuucuguuua

SEQ ID NO: 3079616 - RNA, 18 nt, Human
acgccacugcacuauagc

SEQ ID NO: 3079617 - RNA, 13 nt, Human
acgauuucuguuu

SEQ ID NO: 3079618 - RNA, 12 nt, Human
acgauuucuguu

SEQ ID NO: 3079619 - RNA, 12 nt, Human
accuuggcugca

SEQ ID NO: 3079620 - RNA, 14 nt, Human
accuuggcucaagu

SEQ ID NO: 3079621 - RNA, 12 nt, Human
accuuggcucaa

SEQ ID NO: 3079622 - RNA, 16 nt, Human
accuuucaauaggaaa

SEQ ID NO: 3079623 - RNA, 14 nt, Human
accuuggcugcagg

SEQ ID NO: 3079624 - RNA, 17 nt, Human
accuuucaauaggaaaa

SEQ ID NO: 3079625 - RNA, 21 nt, Human
accuuucaauaggaaaaacug

SEQ ID NO: 3079626 - RNA, 23 nt, Human
accuuucaauaggaaaaacugau

SEQ ID NO: 3079627 - RNA, 16 nt, Human
accucugcacaagcug

SEQ ID NO: 3079628 - RNA, 18 nt, Human
accucugcacaagcugca

SEQ ID NO: 3079629 - RNA, 21 nt, Human
accucugcacaagcugcaccc

SEQ ID NO: 3079630 - RNA, 23 nt, Human
accugccccucaacucuccucca

SEQ ID NO: 3079631 - RNA, 20 nt, Human
accugccccucaacucuccu

SEQ ID NO: 3079632 - RNA, 15 nt, Human
acagaagcagcucuu

SEQ ID NO: 3079633 - RNA, 12 nt, Human
acagaagcagcu

SEQ ID NO: 3079634 - RNA, 14 nt, Human
acagaagcagcucu

SEQ ID NO: 3079635 - RNA, 13 nt, Human
acagaagcagcuc

SEQ ID NO: 3079636 - RNA, 16 nt, Human
acagaauauguuucaa

SEQ ID NO: 3079637 - RNA, 17 nt, Human
acagaauauguuucaaa

SEQ ID NO: 3079638 - RNA, 19 nt, Human
acagaauauguuucaaacu

SEQ ID NO: 3079639 - RNA, 21 nt, Human
acagaauauguuucaaacuuu

SEQ ID NO: 3079640 - RNA, 21 nt, Human
acagaggggguggccucccaa

SEQ ID NO: 3079641 - RNA, 14 nt, Human
acagagucucacug

SEQ ID NO: 3079642 - RNA, 12 nt, Human
acagagucucac

SEQ ID NO: 3079643 - RNA, 22 nt, Human
acagaggggguggccucccaac

SEQ ID NO: 3079644 - RNA, 19 nt, Human
acagagucucacuguugcc

SEQ ID NO: 3079645 - RNA, 17 nt, Human
acagagucucacuguug

SEQ ID NO: 3079646 - RNA, 16 nt, Human
acagcaggcugccagu

SEQ ID NO: 3079647 - RNA, 18 nt, Human
acagcaggcugccagugc

SEQ ID NO: 3079648 - RNA, 20 nt, Human
acagcaggcugccagugccu

SEQ ID NO: 3079649 - RNA, 15 nt, Human
acagcaggcugccag

SEQ ID NO: 3079650 - RNA, 15 nt, Human
acagcaguugaaaag

SEQ ID NO: 3079651 - RNA, 19 nt, Human
acagccacggccaggccag

SEQ ID NO: 3079652 - RNA, 16 nt, Human
acagccagacuggcac

SEQ ID NO: 3079653 - RNA, 15 nt, Human
acagccagacuggca

SEQ ID NO: 3079654 - RNA, 13 nt, Human
acagccagacugg

SEQ ID NO: 3079655 - RNA, 15 nt, Human
acagccaugauucuu

SEQ ID NO: 3079656 - RNA, 19 nt, Human
acaggucauauuaauauau

SEQ ID NO: 3079657 - RNA, 23 nt, Human
acaggugugaaccaccacaccca

SEQ ID NO: 3079658 - RNA, 20 nt, Human
acaggugugaaccaccacac

SEQ ID NO: 3079659 - RNA, 16 nt, Human
acaggcaagcaccucc

SEQ ID NO: 3079660 - RNA, 15 nt, Human
acaggcaagcaccuc

SEQ ID NO: 3079661 - RNA, 18 nt, Human
acaggcaagcaccuccug

SEQ ID NO: 3079662 - RNA, 14 nt, Human
acagcugccuggga

SEQ ID NO: 3079663 - RNA, 13 nt, Human
acagcugccuggg

SEQ ID NO: 3079664 - RNA, 23 nt, Human
acagcugccugggaucccucauc

SEQ ID NO: 3079665 - RNA, 20 nt, Human
acagcucugcauacucauua

SEQ ID NO: 3079666 - RNA, 23 nt, Human
acagcuccuucuguccuacucug

SEQ ID NO: 3079667 - RNA, 14 nt, Human
acagcuccuucugu

SEQ ID NO: 3079668 - RNA, 13 nt, Human
acagcuccuucug

SEQ ID NO: 3079669 - RNA, 12 nt, Human
acagcuccuucu

SEQ ID NO: 3079670 - RNA, 16 nt, Human
acaacuauuuuuccaa

SEQ ID NO: 3079671 - RNA, 17 nt, Human
acaacuucaauauccaa

SEQ ID NO: 3079672 - RNA, 18 nt, Human
acaacuucccagugaauu

SEQ ID NO: 3079673 - RNA, 13 nt, Human
acaacuuuauacc

SEQ ID NO: 3079674 - RNA, 14 nt, Human
acaacuuuauaccc

SEQ ID NO: 3079675 - RNA, 20 nt, Human
acaagucagucauucagaua

SEQ ID NO: 3079676 - RNA, 13 nt, Human
aauuuugaaaaac

SEQ ID NO: 3079677 - RNA, 15 nt, Human
aauuuuauaucuugu

SEQ ID NO: 3079678 - RNA, 20 nt, Human
aauuuugaguucuacauaag

SEQ ID NO: 3079679 - RNA, 15 nt, Human
acaaaauggaauacu

SEQ ID NO: 3079680 - RNA, 19 nt, Human
acaaaauggaauacucuua

SEQ ID NO: 3079681 - RNA, 20 nt, Human
acaaaauguaggguuauaau

SEQ ID NO: 3079682 - RNA, 20 nt, Human
acaaaauggaauacucuuau

SEQ ID NO: 3079683 - RNA, 15 nt, Human
acaaacgggcucagc

SEQ ID NO: 3079684 - RNA, 21 nt, Human
acaaaccuguuucugcagcca

SEQ ID NO: 3079685 - RNA, 13 nt, Human
acaaagacugagu

SEQ ID NO: 3079686 - RNA, 13 nt, Human
acaacuauauugu

SEQ ID NO: 3079687 - RNA, 12 nt, Human
acaccagagccc

SEQ ID NO: 3079688 - RNA, 21 nt, Human
acaccacuacauucuguuaau

SEQ ID NO: 3079689 - RNA, 12 nt, Human
acacagcucugu

SEQ ID NO: 3079690 - RNA, 11 nt, Human
acacagcucug

SEQ ID NO: 3079691 - RNA, 15 nt, Human
acacuaaccacgcug

SEQ ID NO: 3079692 - RNA, 14 nt, Human
acacuaaccacgcu

SEQ ID NO: 3079693 - RNA, 15 nt, Human
acacggacacucaaa

SEQ ID NO: 3079694 - RNA, 15 nt, Human
acaauuuauuauggc

SEQ ID NO: 3079695 - RNA, 14 nt, Human
acaauuuauuaugg

SEQ ID NO: 3079696 - RNA, 16 nt, Human
acaauuuauuauggca

SEQ ID NO: 3079697 - RNA, 18 nt, Human
acacaaacgggcucagca

SEQ ID NO: 3079698 - RNA, 14 nt, Human
accacuacauucug

SEQ ID NO: 3079699 - RNA, 19 nt, Human
accacguuucuaaaggcua

SEQ ID NO: 3079700 - RNA, 15 nt, Human
accacguuucuaaag

SEQ ID NO: 3079701 - RNA, 13 nt, Human
accagcagccugg

SEQ ID NO: 3079702 - RNA, 14 nt, Human
accagcagccugga

SEQ ID NO: 3079703 - RNA, 17 nt, Human
accagcagccuggaccc

SEQ ID NO: 3079704 - RNA, 21 nt, Human
accaacgucugugccauuuug

SEQ ID NO: 3079705 - RNA, 18 nt, Human
acauuugcucauggaauu

SEQ ID NO: 3079706 - RNA, 16 nt, Human
acauuugcucauggaa

SEQ ID NO: 3079707 - RNA, 23 nt, Human
acauaaacaagaccacguuucua

SEQ ID NO: 3079708 - RNA, 22 nt, Human
acaucagcacgauuucuguuua

SEQ ID NO: 3079709 - RNA, 21 nt, Human
acaucagcacgauuucuguuu

SEQ ID NO: 3079710 - RNA, 20 nt, Human
acaucagcacgauuucuguu

SEQ ID NO: 3079711 - RNA, 19 nt, Human
acaucagcacgauuucugu

SEQ ID NO: 3079712 - RNA, 21 nt, Human
acauguuuuucuucucccuca

SEQ ID NO: 3079713 - RNA, 13 nt, Human
acauguuacaaca

SEQ ID NO: 3079714 - RNA, 18 nt, Human
acaugcaaggucauuuuu

SEQ ID NO: 3079715 - RNA, 19 nt, Human
acaugcaaggucauuuuuu

SEQ ID NO: 3079716 - RNA, 20 nt, Human
acaugcacagcuaacaugga

SEQ ID NO: 3079717 - RNA, 19 nt, Human
acauguuuuucuucucccu

SEQ ID NO: 3079718 - RNA, 15 nt, Human
accccggccaccugc

SEQ ID NO: 3079719 - RNA, 13 nt, Human
acccaagggccug

SEQ ID NO: 3079720 - RNA, 16 nt, Human
acccaagggccuggcc

SEQ ID NO: 3079721 - RNA, 16 nt, Human
acccaaguccaagcau

SEQ ID NO: 3079722 - RNA, 17 nt, Human
acccaugcugcccugug

SEQ ID NO: 3079723 - RNA, 18 nt, Human
acccaugcugcccuguga

SEQ ID NO: 3079724 - RNA, 19 nt, Human
acccaugcugcccugugag

SEQ ID NO: 3079725 - RNA, 16 nt, Human
acccaugcugcccugu

SEQ ID NO: 3079726 - RNA, 14 nt, Human
accaucaugucugg

SEQ ID NO: 3079727 - RNA, 18 nt, Human
accaucccugaaggcccc

SEQ ID NO: 3079728 - RNA, 16 nt, Human
accaucccugaaggcc

SEQ ID NO: 3079729 - RNA, 17 nt, Human
accaucaugucuggcua

SEQ ID NO: 3079730 - RNA, 16 nt, Human
accaucaugucuggcu

SEQ ID NO: 3079731 - RNA, 21 nt, Human
accaucccugaaggccccgcc

SEQ ID NO: 3079732 - RNA, 22 nt, Human
accaucccugaaggccccgccc

SEQ ID NO: 3079733 - RNA, 17 nt, Human
caaagccuccuccagcc

SEQ ID NO: 3079734 - RNA, 18 nt, Human
caaagccuccuccagccg

SEQ ID NO: 3079735 - RNA, 22 nt, Human
caaagccaaagcuaggccuggc

SEQ ID NO: 3079736 - RNA, 17 nt, Human
caaacucaccugccccu

SEQ ID NO: 3079737 - RNA, 19 nt, Human
caaagcugaugacaacuuc

SEQ ID NO: 3079738 - RNA, 12 nt, Human
caaaggaagcac

SEQ ID NO: 3079739 - RNA, 13 nt, Human
caaaggaagcaca

SEQ ID NO: 3079740 - RNA, 18 nt, Human
caaagcuaggccuggcca

SEQ ID NO: 3079741 - RNA, 19 nt, Human
caaagcuaggccuggccag

SEQ ID NO: 3079742 - RNA, 14 nt, Human
caaagcuaggccug

SEQ ID NO: 3079743 - RNA, 13 nt, Human
caaagcuaggccu

SEQ ID NO: 3079744 - RNA, 18 nt, Human
caaaggguaucaggugcu

SEQ ID NO: 3079745 - RNA, 16 nt, Human
caaaggguaucaggug

SEQ ID NO: 3079746 - RNA, 14 nt, Human
caaaggaagcacau

SEQ ID NO: 3079747 - RNA, 16 nt, Human
caaaauugauguguuu

SEQ ID NO: 3079748 - RNA, 15 nt, Human
caaaauugauguguu

SEQ ID NO: 3079749 - RNA, 16 nt, Human
caaaauuguuacaaau

SEQ ID NO: 3079750 - RNA, 22 nt, Human
caaaauugauguguuuauuuau

SEQ ID NO: 3079751 - RNA, 15 nt, Human
caaaauguaggguua

SEQ ID NO: 3079752 - RNA, 12 nt, Human
caaaauaaaacu

SEQ ID NO: 3079753 - RNA, 15 nt, Human
caaacacauacagga

SEQ ID NO: 3079754 - RNA, 16 nt, Human
caaaauuuuuucucua

SEQ ID NO: 3079755 - RNA, 21 nt, Human
caaaauuuuuucucuaggaaa

SEQ ID NO: 3079756 - RNA, 22 nt, Human
caaaauuuuuucucuaggaaau

SEQ ID NO: 3079757 - RNA, 14 nt, Human
caaacccuucagug

SEQ ID NO: 3079758 - RNA, 20 nt, Human
caaacccuucagugccaaaa

SEQ ID NO: 3079759 - RNA, 17 nt, Human
caaauuguaagcaugca

SEQ ID NO: 3079760 - RNA, 15 nt, Human
caaaugucuauaaac

SEQ ID NO: 3079761 - RNA, 14 nt, Human
caaaugucuauaaa

SEQ ID NO: 3079762 - RNA, 21 nt, Human
caaauuguaagcaugcacaaa

SEQ ID NO: 3079763 - RNA, 14 nt, Human
caaauuucuaaauc

SEQ ID NO: 3079764 - RNA, 12 nt, Human
caaauuucuaaa

SEQ ID NO: 3079765 - RNA, 11 nt, Human
caaauuucuaa

SEQ ID NO: 3079766 - RNA, 19 nt, Human
caaaggguaucaggugcug

SEQ ID NO: 3079767 - RNA, 19 nt, Human
caaagugcugggauuacag

SEQ ID NO: 3079768 - RNA, 23 nt, Human
caaagugcugggauuacaggugu

SEQ ID NO: 3079769 - RNA, 21 nt, Human
caaauacgugggcauucaaau

SEQ ID NO: 3079770 - RNA, 22 nt, Human
caaauacgugggcauucaaaug

SEQ ID NO: 3079771 - RNA, 20 nt, Human
caaauacgugggcauucaaa

SEQ ID NO: 3079772 - RNA, 21 nt, Human
caaauaugcaaagcacugacu

SEQ ID NO: 3079773 - RNA, 19 nt, Human
caaauaugcaaagcacuga

SEQ ID NO: 3079774 - RNA, 19 nt, Human
caaaaaucucaauauuuca

SEQ ID NO: 3079775 - RNA, 19 nt, Human
caaaacucuccucugcugc

SEQ ID NO: 3079776 - RNA, 17 nt, Human
caaaauaaaaaugaggu

SEQ ID NO: 3079777 - RNA, 23 nt, Human
caaaacuucagacauagaauuaa

SEQ ID NO: 3079778 - RNA, 20 nt, Human
caaaacucuccucugcugcu

SEQ ID NO: 3079779 - RNA, 21 nt, Human
caaaacucuccucugcugcug

SEQ ID NO: 3079780 - RNA, 22 nt, Human
caaaacucuccucugcugcugg

SEQ ID NO: 3079781 - RNA, 21 nt, Human
auuuugggguacccacugcuc

SEQ ID NO: 3079782 - RNA, 13 nt, Human
auuuuccugaaaa

SEQ ID NO: 3079783 - RNA, 16 nt, Human
caaaaaaugcuugcuu

SEQ ID NO: 3079784 - RNA, 23 nt, Human
auuuugggguacccacugcucug

SEQ ID NO: 3079785 - RNA, 22 nt, Human
auuuugggguacccacugcucu

SEQ ID NO: 3079786 - RNA, 20 nt, Human
caaaaacauggccuuugcuu

SEQ ID NO: 3079787 - RNA, 17 nt, Human
caaaaacacagcaaggg

SEQ ID NO: 3079788 - RNA, 15 nt, Human
caaaaacacagcaag

SEQ ID NO: 3079789 - RNA, 14 nt, Human
caaaaacacagcaa

SEQ ID NO: 3079790 - RNA, 13 nt, Human
caaaaacacagca

SEQ ID NO: 3079791 - RNA, 13 nt, Human
caaaaaggcagga

SEQ ID NO: 3079792 - RNA, 22 nt, Human
caaugugacuuaaugccacuaa

SEQ ID NO: 3079793 - RNA, 20 nt, Human
caaugcacuuuguucuggcu

SEQ ID NO: 3079794 - RNA, 21 nt, Human
caaugcacuuuguucuggcuc

SEQ ID NO: 3079795 - RNA, 17 nt, Human
caaugcacuuuguucug

SEQ ID NO: 3079796 - RNA, 15 nt, Human
caaugugauaaaacc

SEQ ID NO: 3079797 - RNA, 17 nt, Human
caaugugauaaaacccc

SEQ ID NO: 3079798 - RNA, 16 nt, Human
caauuacaggaaguac

SEQ ID NO: 3079799 - RNA, 23 nt, Human
caauucucauuugucacacacuu

SEQ ID NO: 3079800 - RNA, 17 nt, Human
caauauucgcuguguca

SEQ ID NO: 3079801 - RNA, 21 nt, Human
caaugaccuuucaauaggaaa

SEQ ID NO: 3079802 - RNA, 15 nt, Human
caaugacuuacugua

SEQ ID NO: 3079803 - RNA, 18 nt, Human
caaugacuuacuguacau

SEQ ID NO: 3079804 - RNA, 17 nt, Human
caaugacuuacuguaca

SEQ ID NO: 3079805 - RNA, 23 nt, Human
caaugaccuuucaauaggaaaaa

SEQ ID NO: 3079806 - RNA, 12 nt, Human
caauaggaaaaa

SEQ ID NO: 3079807 - RNA, 13 nt, Human
caauaggaaaaac

SEQ ID NO: 3079808 - RNA, 23 nt, Human
caauacaucccuuaccugggaaa

SEQ ID NO: 3079809 - RNA, 14 nt, Human
caauaggaaaaacu

SEQ ID NO: 3079810 - RNA, 16 nt, Human
caagagcccaggccuc

SEQ ID NO: 3079811 - RNA, 17 nt, Human
caagcaccuccugccuc

SEQ ID NO: 3079812 - RNA, 16 nt, Human
caagcaccuccugccu

SEQ ID NO: 3079813 - RNA, 15 nt, Human
caagcaccuccugcc

SEQ ID NO: 3079814 - RNA, 18 nt, Human
caagacucuuuggacacu

SEQ ID NO: 3079815 - RNA, 13 nt, Human
caagagcccaggc

SEQ ID NO: 3079816 - RNA, 14 nt, Human
caagagcccaggcc

SEQ ID NO: 3079817 - RNA, 15 nt, Human
caagagcccaggccu

SEQ ID NO: 3079818 - RNA, 23 nt, Human
caagacgcugugcugcccugccc

SEQ ID NO: 3079819 - RNA, 14 nt, Human
caagacucccauga

SEQ ID NO: 3079820 - RNA, 15 nt, Human
caagacgcugugcug

SEQ ID NO: 3079821 - RNA, 18 nt, Human
caagacucccaugaggga

SEQ ID NO: 3079822 - RNA, 18 nt, Human
caagacgcugugcugccc

SEQ ID NO: 3079823 - RNA, 15 nt, Human
caagaaaacaacuuc

SEQ ID NO: 3079824 - RNA, 17 nt, Human
caagaccuucuccuuca

SEQ ID NO: 3079825 - RNA, 18 nt, Human
caagaccuucuccuucac

SEQ ID NO: 3079826 - RNA, 16 nt, Human
caagacgcugugcugc

SEQ ID NO: 3079827 - RNA, 17 nt, Human
caagacgcugugcugcc

SEQ ID NO: 3079828 - RNA, 14 nt, Human
caagaccuucuccu

SEQ ID NO: 3079829 - RNA, 16 nt, Human
caagaccuucuccuuc

SEQ ID NO: 3079830 - RNA, 20 nt, Human
caagaacuuuccaggaaggc

SEQ ID NO: 3079831 - RNA, 22 nt, Human
caaccccuucgcuccugugucu

SEQ ID NO: 3079832 - RNA, 20 nt, Human
caacacucauugaccugagg

SEQ ID NO: 3079833 - RNA, 22 nt, Human
caacacucauugaccugaggcc

SEQ ID NO: 3079834 - RNA, 18 nt, Human
caacacucauugaccuga

SEQ ID NO: 3079835 - RNA, 22 nt, Human
caacacucacauuuauucugcu

SEQ ID NO: 3079836 - RNA, 14 nt, Human
caaccuccugggcu

SEQ ID NO: 3079837 - RNA, 15 nt, Human
caaccuccugggcua

SEQ ID NO: 3079838 - RNA, 13 nt, Human
caacgucugugcc

SEQ ID NO: 3079839 - RNA, 14 nt, Human
caacgucugugcca

SEQ ID NO: 3079840 - RNA, 19 nt, Human
caagcuggucccacucagu

SEQ ID NO: 3079841 - RNA, 17 nt, Human
caagcuggucccacuca

SEQ ID NO: 3079842 - RNA, 17 nt, Human
caaggcugauuaaacca

SEQ ID NO: 3079843 - RNA, 22 nt, Human
caagccaccaacauacucccau

SEQ ID NO: 3079844 - RNA, 21 nt, Human
caagccagauuuuccugaaaa

SEQ ID NO: 3079845 - RNA, 14 nt, Human
caagcaccuccugc

SEQ ID NO: 3079846 - RNA, 14 nt, Human
caagcaggacaugg

SEQ ID NO: 3079847 - RNA, 18 nt, Human
caagcaggacauggacaa

SEQ ID NO: 3079848 - RNA, 19 nt, Human
caagcgauucuucugcuuc

SEQ ID NO: 3079849 - RNA, 22 nt, Human
caagcgauucuucugcuucagc

SEQ ID NO: 3079850 - RNA, 20 nt, Human
caagcgauucuucugcuuca

SEQ ID NO: 3079851 - RNA, 17 nt, Human
caagugagagcugggug

SEQ ID NO: 3079852 - RNA, 15 nt, Human
caagugagagcuggg

SEQ ID NO: 3079853 - RNA, 14 nt, Human
caagugagagcugg

SEQ ID NO: 3079854 - RNA, 21 nt, Human
caaguccucuuuucugagagg

SEQ ID NO: 3079855 - RNA, 18 nt, Human
caagugagagcugggugu

SEQ ID NO: 3079856 - RNA, 14 nt, Human
caaguuaaauaaau

SEQ ID NO: 3079857 - RNA, 14 nt, Human
caaguccucuuuuc

SEQ ID NO: 3079858 - RNA, 20 nt, Human
caaggucauuuuuuuuaaga

SEQ ID NO: 3079859 - RNA, 14 nt, Human
caaggucauuuuuu

SEQ ID NO: 3079860 - RNA, 13 nt, Human
caaggucauuuuu

SEQ ID NO: 3079861 - RNA, 17 nt, Human
caaggggcccaaauucu

SEQ ID NO: 3079862 - RNA, 18 nt, Human
caaggggcccaaauucuu

SEQ ID NO: 3079863 - RNA, 12 nt, Human
caaggcugcagu

SEQ ID NO: 3079864 - RNA, 15 nt, Human
caaggcugcagugag

SEQ ID NO: 3079865 - RNA, 23 nt, Human
caaggcugucaauuacaggaagu

SEQ ID NO: 3079866 - RNA, 21 nt, Human
caaggcugucaauuacaggaa

SEQ ID NO: 3079867 - RNA, 14 nt, Human
cacauaucugucau

SEQ ID NO: 3079868 - RNA, 15 nt, Human
cacaguuuucugaga

SEQ ID NO: 3079869 - RNA, 19 nt, Human
cacaguuuucugagaaaga

SEQ ID NO: 3079870 - RNA, 17 nt, Human
cacaguuuucugagaaa

SEQ ID NO: 3079871 - RNA, 16 nt, Human
cacaguuuucugagaa

SEQ ID NO: 3079872 - RNA, 22 nt, Human
cacagcuucauuuccugugucu

SEQ ID NO: 3079873 - RNA, 21 nt, Human
cacagcuucauuuccuguguc

SEQ ID NO: 3079874 - RNA, 22 nt, Human
cacagcugggguggggaccuca

SEQ ID NO: 3079875 - RNA, 23 nt, Human
cacagcugggguggggaccucag

SEQ ID NO: 3079876 - RNA, 15 nt, Human
cacaggcagguccag

SEQ ID NO: 3079877 - RNA, 14 nt, Human
cacaggcaggucca

SEQ ID NO: 3079878 - RNA, 11 nt, Human
cacaggcaggu

SEQ ID NO: 3079879 - RNA, 13 nt, Human
cacaguccuuacc

SEQ ID NO: 3079880 - RNA, 15 nt, Human
cacaguccuuaccag

SEQ ID NO: 3079881 - RNA, 21 nt, Human
cacaguccuuaccagcagagc

SEQ ID NO: 3079882 - RNA, 22 nt, Human
cacaguccuuaccagcagagca

SEQ ID NO: 3079883 - RNA, 21 nt, Human
cacagugagucgaggacaggg

SEQ ID NO: 3079884 - RNA, 22 nt, Human
cacagugagucgaggacaggga

SEQ ID NO: 3079885 - RNA, 19 nt, Human
cacagugaucaaguuauuu

SEQ ID NO: 3079886 - RNA, 15 nt, Human
cacaguucucuccuu

SEQ ID NO: 3079887 - RNA, 14 nt, Human
cacaguucucuccu

SEQ ID NO: 3079888 - RNA, 13 nt, Human
uuuuuaaucuuua

SEQ ID NO: 3079889 - RNA, 23 nt, Human
uuuugacagaauauguuucaaac

SEQ ID NO: 3079890 - RNA, 22 nt, Human
uuuugacagaauauguuucaaa

SEQ ID NO: 3079891 - RNA, 11 nt, Human
uuuugacagaa

SEQ ID NO: 3079892 - RNA, 11 nt, Human
uuuuuaaaugc

SEQ ID NO: 3079893 - RNA, 23 nt, Human
uuuuuaagugcugcauuuaaaag

SEQ ID NO: 3079894 - RNA, 22 nt, Human
uuuuuaagugcugcauuuaaaa

SEQ ID NO: 3079895 - RNA, 19 nt, Human
uuuuuaagugcugcauuua

SEQ ID NO: 3079896 - RNA, 18 nt, Human
uuuuuaagugcugcauuu

SEQ ID NO: 3079897 - RNA, 17 nt, Human
uuuuuaagugcugcauu

SEQ ID NO: 3079898 - RNA, 16 nt, Human
uuuuuaagugcugcau

SEQ ID NO: 3079899 - RNA, 12 nt, Human
uuuuuaagaaaa

SEQ ID NO: 3079900 - RNA, 12 nt, Human
uuuuuuuuaaga

SEQ ID NO: 3079901 - RNA, 11 nt, Human
uuuuuuuacua

SEQ ID NO: 3079902 - RNA, 15 nt, Human
uuuggucaacacuaa

SEQ ID NO: 3079903 - RNA, 17 nt, Human
uuuguauaaaauaauuu

SEQ ID NO: 3079904 - RNA, 16 nt, Human
uuuguauaaaauaauu

SEQ ID NO: 3079905 - RNA, 18 nt, Human
uuuguauaaaauaauuuu

SEQ ID NO: 3079906 - RNA, 15 nt, Human
uuuguauucucuccu

SEQ ID NO: 3079907 - RNA, 23 nt, Human
uuuuaaaauccacuuuaucuuga

SEQ ID NO: 3079908 - RNA, 14 nt, Human
uuuuaaaauccacu

SEQ ID NO: 3079909 - RNA, 22 nt, Human
uuuguuaguaugaggcauuugu

SEQ ID NO: 3079910 - RNA, 15 nt, Human
uuuguugucagcuga

SEQ ID NO: 3079911 - RNA, 18 nt, Human
uuugcauaacguauaaaa

SEQ ID NO: 3079912 - RNA, 13 nt, Human
uuuggacccugag

SEQ ID NO: 3079913 - RNA, 19 nt, Human
uuuggacaaaauggaauac

SEQ ID NO: 3079914 - RNA, 12 nt, Human
uuuggaaaauaa

SEQ ID NO: 3079915 - RNA, 12 nt, Human
uuugaguucuac

SEQ ID NO: 3079916 - RNA, 21 nt, Human
uuugagugccuuacacaaugg

SEQ ID NO: 3079917 - RNA, 15 nt, Human
uuuccguuaaaauac

SEQ ID NO: 3079918 - RNA, 13 nt, Human
uuugagugccuua

SEQ ID NO: 3079919 - RNA, 17 nt, Human
uuuccguuaaaauacca

SEQ ID NO: 3079920 - RNA, 15 nt, Human
uuuccacagaagcuc

SEQ ID NO: 3079921 - RNA, 21 nt, Human
uuuucuuaaccagaucauugu

SEQ ID NO: 3079922 - RNA, 13 nt, Human
uuuucuuauuuca

SEQ ID NO: 3079923 - RNA, 20 nt, Human
uuuucuacucgaguuacaga

SEQ ID NO: 3079924 - RNA, 22 nt, Human
uuuucuacucgaguuacagaca

SEQ ID NO: 3079925 - RNA, 13 nt, Human
uuuucuacucgag

SEQ ID NO: 3079926 - RNA, 22 nt, Human
uuuucuuguguguuuauuguca

SEQ ID NO: 3079927 - RNA, 13 nt, Human
uuuucuucucccu

SEQ ID NO: 3079928 - RNA, 16 nt, Human
uuuucuuucagccaag

SEQ ID NO: 3079929 - RNA, 22 nt, Human
uuuucagaaaauauuauguguu

SEQ ID NO: 3079930 - RNA, 16 nt, Human
uuuucacauuggaaac

SEQ ID NO: 3079931 - RNA, 21 nt, Human
uuuucaaaauuguuacaaauu

SEQ ID NO: 3079932 - RNA, 16 nt, Human
uuuucacauaucuagu

SEQ ID NO: 3079933 - RNA, 23 nt, Human
uuuucagaaaauauuauguguuu

SEQ ID NO: 3079934 - RNA, 18 nt, Human
uuuucccuauuagagaag

SEQ ID NO: 3079935 - RNA, 22 nt, Human
uuuucccuauuagagaagagau

SEQ ID NO: 3079936 - RNA, 18 nt, Human
uuuuauuuuuagacagag

SEQ ID NO: 3079937 - RNA, 17 nt, Human
uuuucaaaauaaaaaug

SEQ ID NO: 3079938 - RNA, 19 nt, Human
uuuuaucgucacugcuuaa

SEQ ID NO: 3079939 - RNA, 21 nt, Human
uuuuauacauaaacaagacca

SEQ ID NO: 3079940 - RNA, 13 nt, Human
uuuuauacauaaa

SEQ ID NO: 3079941 - RNA, 13 nt, Human
uuuuauauuugaa

SEQ ID NO: 3079942 - RNA, 18 nt, Human
uuuuauauuugaaauauu

SEQ ID NO: 3079943 - RNA, 21 nt, Human
uuuuaaaguaacccuacaaaa

SEQ ID NO: 3079944 - RNA, 19 nt, Human
uuuuacguccaucucuugu

SEQ ID NO: 3079945 - RNA, 15 nt, Human
uuuuacuaauagaca

SEQ ID NO: 3079946 - RNA, 21 nt, Human
uuuuauaauuuugugaagcaa

SEQ ID NO: 3079947 - RNA, 23 nt, Human
uuuuauaauuuugugaagcaaaa

SEQ ID NO: 3079948 - RNA, 13 nt, Human
uuuuuuuugacaa

SEQ ID NO: 3079949 - RNA, 12 nt, Human
uuauaauuuuaa

SEQ ID NO: 3079950 - RNA, 12 nt, Human
uuauaauuuaaa

SEQ ID NO: 3079951 - RNA, 21 nt, Human
uuauaauuuuaaauguuuuuu

SEQ ID NO: 3079952 - RNA, 17 nt, Human
uuauaauuuuaaauguu

SEQ ID NO: 3079953 - RNA, 14 nt, Human
uuauaauuuuguga

SEQ ID NO: 3079954 - RNA, 15 nt, Human
uuauaauuuugugaa

SEQ ID NO: 3079955 - RNA, 15 nt, Human
uuauaaugaaugaaa

SEQ ID NO: 3079956 - RNA, 11 nt, Human
uuauaaucuuu

SEQ ID NO: 3079957 - RNA, 15 nt, Human
uuauaauaauguuaa

SEQ ID NO: 3079958 - RNA, 18 nt, Human
uuauaauaauguuaacau

SEQ ID NO: 3079959 - RNA, 13 nt, Human
ugugaaaagaaaa

SEQ ID NO: 3079960 - RNA, 15 nt, Human
ugugaaaagaaaaau

SEQ ID NO: 3079961 - RNA, 17 nt, Human
ugugaaaagaaaaauga

SEQ ID NO: 3079962 - RNA, 22 nt, Human
uuauaucuuguagcuuuaucaa

SEQ ID NO: 3079963 - RNA, 15 nt, Human
uuauaucuuguagcu

SEQ ID NO: 3079964 - RNA, 16 nt, Human
uuauauuaugaagcuu

SEQ ID NO: 3079965 - RNA, 14 nt, Human
uuauacaggucaua

SEQ ID NO: 3079966 - RNA, 18 nt, Human
uuauaauuuugugaagca

SEQ ID NO: 3079967 - RNA, 16 nt, Human
uuauaauuuugugaag

SEQ ID NO: 3079968 - RNA, 17 nt, Human
uuauaauuuugugaagc

SEQ ID NO: 3079969 - RNA, 22 nt, Human
uuauacaggucauauuaauaua

SEQ ID NO: 3079970 - RNA, 11 nt, Human
uuauacauaaa

SEQ ID NO: 3079971 - RNA, 19 nt, Human
uuauaucuauauuuuacau

SEQ ID NO: 3079972 - RNA, 23 nt, Human
uuauaucuauauuuuacauaaau

SEQ ID NO: 3079973 - RNA, 16 nt, Human
uuauauuuacaaaugg

SEQ ID NO: 3079974 - RNA, 12 nt, Human
uuauauuugaaa

SEQ ID NO: 3079975 - RNA, 20 nt, Human
uuauauuuauuacuguaaga

SEQ ID NO: 3079976 - RNA, 11 nt, Human
uuauccucugu

SEQ ID NO: 3079977 - RNA, 13 nt, Human
uuauauuugaaau

SEQ ID NO: 3079978 - RNA, 14 nt, Human
uuaucuugaauaau

SEQ ID NO: 3079979 - RNA, 16 nt, Human
uuaucuugaauaaugu

SEQ ID NO: 3079980 - RNA, 22 nt, Human
uuaugauuaaguaaugauaacu

SEQ ID NO: 3079981 - RNA, 11 nt, Human
uuaucucaaaa

SEQ ID NO: 3079982 - RNA, 17 nt, Human
uuauguugcauagaaua

SEQ ID NO: 3079983 - RNA, 17 nt, Human
uuauggcuuuugugcau

SEQ ID NO: 3079984 - RNA, 16 nt, Human
uuauggcuuuugugca

SEQ ID NO: 3079985 - RNA, 18 nt, Human
uuauggcuauaggugcua

SEQ ID NO: 3079986 - RNA, 14 nt, Human
uuauggcacaucag

SEQ ID NO: 3079987 - RNA, 18 nt, Human
uuauggaacacucugaga

SEQ ID NO: 3079988 - RNA, 20 nt, Human
uuauggaacacucugagacu

SEQ ID NO: 3079989 - RNA, 21 nt, Human
uuauggacaaugacccagugg

SEQ ID NO: 3079990 - RNA, 17 nt, Human
uuauggaacacucugag

SEQ ID NO: 3079991 - RNA, 19 nt, Human
uuauuaaaugcccagcccc

SEQ ID NO: 3079992 - RNA, 21 nt, Human
uuauuaaaugcccagccccuu

SEQ ID NO: 3079993 - RNA, 17 nt, Human
uuauuuuaauaauguuu

SEQ ID NO: 3079994 - RNA, 19 nt, Human
uuauuuuaauaauguuuca

SEQ ID NO: 3079995 - RNA, 18 nt, Human
uuauuuuauuaugcauga

SEQ ID NO: 3079996 - RNA, 20 nt, Human
uuauuuuaauaauguuucaa

SEQ ID NO: 3079997 - RNA, 16 nt, Human
uucaauaauaaauauu

SEQ ID NO: 3079998 - RNA, 21 nt, Human
uucaacagguuuuccugaaga

SEQ ID NO: 3079999 - RNA, 18 nt, Human
uucaaauguauuacagug

SEQ ID NO: 3080000 - RNA, 14 nt, Human
uuauuuuguucaua

SEQ ID NO: 3080001 - RNA, 16 nt, Human
uuauuuuguucauaca

SEQ ID NO: 3080002 - RNA, 18 nt, Human
uucaaaugcuguaacuuu

SEQ ID NO: 3080003 - RNA, 17 nt, Human
uucaaauccuugaagau

SEQ ID NO: 3080004 - RNA, 22 nt, Human
uuauuuuggaaaauaaauuauu

SEQ ID NO: 3080005 - RNA, 22 nt, Human
uucaauaggaaaaacugauuuu

SEQ ID NO: 3080006 - RNA, 21 nt, Human
uucaauaggaaaaacugauuu

SEQ ID NO: 3080007 - RNA, 19 nt, Human
uucaccuuuguccccaccg

SEQ ID NO: 3080008 - RNA, 20 nt, Human
uucaccuuuguccccaccgc

SEQ ID NO: 3080009 - RNA, 14 nt, Human
uucaccuuuguccc

SEQ ID NO: 3080010 - RNA, 13 nt, Human
uucacccuuuucu

SEQ ID NO: 3080011 - RNA, 17 nt, Human
uucagacagcugccugg

SEQ ID NO: 3080012 - RNA, 20 nt, Human
uucagauaaucacaauacau

SEQ ID NO: 3080013 - RNA, 17 nt, Human
uucacggaagagccuug

SEQ ID NO: 3080014 - RNA, 14 nt, Human
uucagacagcugcc

SEQ ID NO: 3080015 - RNA, 15 nt, Human
uucagacagcugccu

SEQ ID NO: 3080016 - RNA, 16 nt, Human
uucagacagcugccug

SEQ ID NO: 3080017 - RNA, 22 nt, Human
uucaccuuuguccccaccgcag

SEQ ID NO: 3080018 - RNA, 13 nt, Human
uucacggaagagc

SEQ ID NO: 3080019 - RNA, 13 nt, Human
uucaguggcagcu

SEQ ID NO: 3080020 - RNA, 14 nt, Human
uucaguggcagcug

SEQ ID NO: 3080021 - RNA, 22 nt, Human
uucagcuuguaaauagcucagg

SEQ ID NO: 3080022 - RNA, 15 nt, Human
uucagcuccagcuca

SEQ ID NO: 3080023 - RNA, 12 nt, Human
uucagcuccagc

SEQ ID NO: 3080024 - RNA, 21 nt, Human
uucagcugguugagguuucaa

SEQ ID NO: 3080025 - RNA, 16 nt, Human
uucaguggcagcugcu

SEQ ID NO: 3080026 - RNA, 15 nt, Human
uucaguggcagcugc

SEQ ID NO: 3080027 - RNA, 17 nt, Human
uucaguggcagcugcuu

SEQ ID NO: 3080028 - RNA, 12 nt, Human
uucaguguacau

SEQ ID NO: 3080029 - RNA, 13 nt, Human
uucaguguacaug

SEQ ID NO: 3080030 - RNA, 20 nt, Human
uucauaaauaaaguuuguug

SEQ ID NO: 3080031 - RNA, 23 nt, Human
uucaguuauuauauuuacaaaug

SEQ ID NO: 3080032 - RNA, 15 nt, Human
uucauccuccucaga

SEQ ID NO: 3080033 - RNA, 19 nt, Human
uucauccuccucagaucuu

SEQ ID NO: 3080034 - RNA, 15 nt, Human
uucauaaccuagccu

SEQ ID NO: 3080035 - RNA, 21 nt, Human
uuccaaaaagauuuucagaaa

SEQ ID NO: 3080036 - RNA, 13 nt, Human
uuccaaaguacac

SEQ ID NO: 3080037 - RNA, 16 nt, Human
uuccaaaguacacugu

SEQ ID NO: 3080038 - RNA, 19 nt, Human
uuccaacccucaucaccaa

SEQ ID NO: 3080039 - RNA, 18 nt, Human
uuccagauccuggaaauc

SEQ ID NO: 3080040 - RNA, 14 nt, Human
uuccauggacuuug

SEQ ID NO: 3080041 - RNA, 15 nt, Human
uuccauggacuuugu

SEQ ID NO: 3080042 - RNA, 16 nt, Human
uucucugcccuccaag

SEQ ID NO: 3080043 - RNA, 23 nt, Human
uucugacccaugcugcccuguga

SEQ ID NO: 3080044 - RNA, 22 nt, Human
uucugacccaugcugcccugug

SEQ ID NO: 3080045 - RNA, 18 nt, Human
uucugacccugcuucaaa

SEQ ID NO: 3080046 - RNA, 21 nt, Human
uucugagaaagacuauucaaa

SEQ ID NO: 3080047 - RNA, 16 nt, Human
uucugagaaagacuau

SEQ ID NO: 3080048 - RNA, 19 nt, Human
uucugcucacauaucuguc

SEQ ID NO: 3080049 - RNA, 19 nt, Human
uucugauccuaguuccacc

SEQ ID NO: 3080050 - RNA, 18 nt, Human
uucucuccuguaccucuu

SEQ ID NO: 3080051 - RNA, 14 nt, Human
uucucuccuguacc

SEQ ID NO: 3080052 - RNA, 15 nt, Human
uucucuccagccccu

SEQ ID NO: 3080053 - RNA, 13 nt, Human
uucucuccagccc

SEQ ID NO: 3080054 - RNA, 14 nt, Human
uucucuccagcccc

SEQ ID NO: 3080055 - RNA, 11 nt, Human
uucucugcccu

SEQ ID NO: 3080056 - RNA, 12 nt, Human
uucucugcccuc

SEQ ID NO: 3080057 - RNA, 20 nt, Human
uucucugaggacacuaacca

SEQ ID NO: 3080058 - RNA, 14 nt, Human
uucucugaggacac

SEQ ID NO: 3080059 - RNA, 19 nt, Human
uucucuccuguaccucuug

SEQ ID NO: 3080060 - RNA, 23 nt, Human
uucucuccucuccccaugauguu

SEQ ID NO: 3080061 - RNA, 21 nt, Human
uucuccaccucccacaaagga

SEQ ID NO: 3080062 - RNA, 12 nt, Human
uucuccaccugc

SEQ ID NO: 3080063 - RNA, 14 nt, Human
uucuccaccugcca

SEQ ID NO: 3080064 - RNA, 15 nt, Human
uucuccaccugccag

SEQ ID NO: 3080065 - RNA, 16 nt, Human
uucuccaccugccagg

SEQ ID NO: 3080066 - RNA, 18 nt, Human
uucuccaccugccaggga

SEQ ID NO: 3080067 - RNA, 20 nt, Human
uucuccaccugccagggaca

SEQ ID NO: 3080068 - RNA, 16 nt, Human
uucuccacccugcucu

SEQ ID NO: 3080069 - RNA, 14 nt, Human
uucuaugaaauauu

SEQ ID NO: 3080070 - RNA, 14 nt, Human
uucuauagcuuuuc

SEQ ID NO: 3080071 - RNA, 22 nt, Human
uucuacucgaguuacagacaaa

SEQ ID NO: 3080072 - RNA, 14 nt, Human
uucuacccaggugc

SEQ ID NO: 3080073 - RNA, 21 nt, Human
uucuacccagcgagcccuggu

SEQ ID NO: 3080074 - RNA, 20 nt, Human
uucuacccagcgagcccugg

SEQ ID NO: 3080075 - RNA, 13 nt, Human
uucuacgccaggg

SEQ ID NO: 3080076 - RNA, 22 nt, Human
uucuacauaaguaauucaagaa

SEQ ID NO: 3080077 - RNA, 19 nt, Human
uucuacccagcgagcccug

SEQ ID NO: 3080078 - RNA, 12 nt, Human
uucuacccagcg

SEQ ID NO: 3080079 - RNA, 15 nt, Human
uucuacauacuaugg

SEQ ID NO: 3080080 - RNA, 20 nt, Human
uuccugaggcugggcucccu

SEQ ID NO: 3080081 - RNA, 15 nt, Human
uuccugaggcugggc

SEQ ID NO: 3080082 - RNA, 23 nt, Human
uuccugaugcuucuucagagacu

SEQ ID NO: 3080083 - RNA, 12 nt, Human
uuccauggccuc

SEQ ID NO: 3080084 - RNA, 16 nt, Human
uuccauggccucuuca

SEQ ID NO: 3080085 - RNA, 18 nt, Human
uuccugaagaauugaaaa

SEQ ID NO: 3080086 - RNA, 18 nt, Human
uucggugagcuacaaaug

SEQ ID NO: 3080087 - RNA, 20 nt, Human
uuccuugaguugauucagcu

SEQ ID NO: 3080088 - RNA, 21 nt, Human
uuccuugaguugauucagcuc

SEQ ID NO: 3080089 - RNA, 12 nt, Human
uugaauuuuaca

SEQ ID NO: 3080090 - RNA, 14 nt, Human
uugaauuguaagga

SEQ ID NO: 3080091 - RNA, 18 nt, Human
uugaacuggguacuugug

SEQ ID NO: 3080092 - RNA, 17 nt, Human
uugaccgugaggccaga

SEQ ID NO: 3080093 - RNA, 17 nt, Human
uugacccacaagaaaug

SEQ ID NO: 3080094 - RNA, 14 nt, Human
uugacccacaagaa

SEQ ID NO: 3080095 - RNA, 15 nt, Human
uugaccucugcagca

SEQ ID NO: 3080096 - RNA, 14 nt, Human
uugaccucugcagc

SEQ ID NO: 3080097 - RNA, 21 nt, Human
uugaccucaggugauccaccc

SEQ ID NO: 3080098 - RNA, 17 nt, Human
uugacgccaucccagcc

SEQ ID NO: 3080099 - RNA, 18 nt, Human
uugacgccaucccagccc

SEQ ID NO: 3080100 - RNA, 19 nt, Human
uugacgccaucccagcccc

SEQ ID NO: 3080101 - RNA, 15 nt, Human
uugacgccaucccag

SEQ ID NO: 3080102 - RNA, 23 nt, Human
uugauauccucuuugagugaagc

SEQ ID NO: 3080103 - RNA, 23 nt, Human
uugauagcacagacccugcccug

SEQ ID NO: 3080104 - RNA, 23 nt, Human
uugaugaagaaguugauaugccu

SEQ ID NO: 3080105 - RNA, 13 nt, Human
uugaugaagaagu

SEQ ID NO: 3080106 - RNA, 14 nt, Human
uugaugaagaaguu

SEQ ID NO: 3080107 - RNA, 11 nt, Human
uugagccuggg

SEQ ID NO: 3080108 - RNA, 16 nt, Human
uugaggguugggcugg

SEQ ID NO: 3080109 - RNA, 13 nt, Human
uugaggguugggc

SEQ ID NO: 3080110 - RNA, 21 nt, Human
uugcaaaguaucccuacugua

SEQ ID NO: 3080111 - RNA, 16 nt, Human
uugaugaucuuugcag

SEQ ID NO: 3080112 - RNA, 17 nt, Human
uucuuccaaaaagauuu

SEQ ID NO: 3080113 - RNA, 21 nt, Human
uucuuauacauuugauaaagu

SEQ ID NO: 3080114 - RNA, 21 nt, Human
uucuuccacaagagcccaggc

SEQ ID NO: 3080115 - RNA, 14 nt, Human
uucuuguguguuua

SEQ ID NO: 3080116 - RNA, 13 nt, Human
uucuuccucccuc

SEQ ID NO: 3080117 - RNA, 21 nt, Human
uucuuguguguuuauugucaa

SEQ ID NO: 3080118 - RNA, 14 nt, Human
uucuuuccaaagua

SEQ ID NO: 3080119 - RNA, 12 nt, Human
uucuuucagcca

SEQ ID NO: 3080120 - RNA, 16 nt, Human
uugaacuccuggccuc

SEQ ID NO: 3080121 - RNA, 15 nt, Human
uugaacuccuggccu

SEQ ID NO: 3080122 - RNA, 22 nt, Human
uugaaaacacuguucucugccc

SEQ ID NO: 3080123 - RNA, 23 nt, Human
uugaaaacacuguucucugcccu

SEQ ID NO: 3080124 - RNA, 20 nt, Human
uugaaaaaccauuuugcugu

SEQ ID NO: 3080125 - RNA, 21 nt, Human
uucuuuccaaaguacacuguu

SEQ ID NO: 3080126 - RNA, 18 nt, Human
uucugcuuguguuaagua

SEQ ID NO: 3080127 - RNA, 19 nt, Human
uucugcuucagccucccga

SEQ ID NO: 3080128 - RNA, 16 nt, Human
uucugcuucagccucc

SEQ ID NO: 3080129 - RNA, 15 nt, Human
uucugcuucagccuc

SEQ ID NO: 3080130 - RNA, 14 nt, Human
uucugcuucagccu

SEQ ID NO: 3080131 - RNA, 17 nt, Human
uucugucuucacaacag

SEQ ID NO: 3080132 - RNA, 18 nt, Human
uucuguauuuuguuuuug

SEQ ID NO: 3080133 - RNA, 19 nt, Human
uucuguccuacucuguguc

SEQ ID NO: 3080134 - RNA, 23 nt, Human
uuguacgaagaguauuuuugaca

SEQ ID NO: 3080135 - RNA, 21 nt, Human
uuguacgaagaguauuuuuga

SEQ ID NO: 3080136 - RNA, 21 nt, Human
uuguauucagaguugaugguu

SEQ ID NO: 3080137 - RNA, 16 nt, Human
uuguauucucuccugu

SEQ ID NO: 3080138 - RNA, 15 nt, Human
uuguauucucuccug

SEQ ID NO: 3080139 - RNA, 19 nt, Human
uuguauucucuccuguacc

SEQ ID NO: 3080140 - RNA, 15 nt, Human
uugucuuaaaaagug

SEQ ID NO: 3080141 - RNA, 15 nt, Human
uugucuagugaaacu

SEQ ID NO: 3080142 - RNA, 17 nt, Human
uugugauuuuuguaauu

SEQ ID NO: 3080143 - RNA, 16 nt, Human
uugugauuuuuguaau

SEQ ID NO: 3080144 - RNA, 12 nt, Human
uugugauuuuug

SEQ ID NO: 3080145 - RNA, 20 nt, Human
uugugaaaggaaagaggcuc

SEQ ID NO: 3080146 - RNA, 17 nt, Human
uuguaaauaguauuuga

SEQ ID NO: 3080147 - RNA, 17 nt, Human
uuguaaauagcucaggu

SEQ ID NO: 3080148 - RNA, 23 nt, Human
uuguaaauuaacuuuuauaaacu

SEQ ID NO: 3080149 - RNA, 18 nt, Human
uuguaaauuaacuuuuau

SEQ ID NO: 3080150 - RNA, 16 nt, Human
uuguaaauuaacuuuu

SEQ ID NO: 3080151 - RNA, 15 nt, Human
uuguaaauuaacuuu

SEQ ID NO: 3080152 - RNA, 14 nt, Human
uuguacauaaugcg

SEQ ID NO: 3080153 - RNA, 18 nt, Human
uuguacauaaugcgugca

SEQ ID NO: 3080154 - RNA, 22 nt, Human
uuggguucaagcgauucuucug

SEQ ID NO: 3080155 - RNA, 13 nt, Human
uuggucuguguga

SEQ ID NO: 3080156 - RNA, 16 nt, Human
uuggucugugagaugc

SEQ ID NO: 3080157 - RNA, 15 nt, Human
uuggucugugagaug

SEQ ID NO: 3080158 - RNA, 13 nt, Human
uuguguugugaau

SEQ ID NO: 3080159 - RNA, 20 nt, Human
uuguguugaagagguuuuaa

SEQ ID NO: 3080160 - RNA, 21 nt, Human
uuguguuuauauauaagccaa

SEQ ID NO: 3080161 - RNA, 23 nt, Human
uuguggauuuaacagaaauguac

SEQ ID NO: 3080162 - RNA, 22 nt, Human
uuguggauuuaacagaaaugua

SEQ ID NO: 3080163 - RNA, 13 nt, Human
uuguguucaccuu

SEQ ID NO: 3080164 - RNA, 16 nt, Human
uuguggacacagcucu

SEQ ID NO: 3080165 - RNA, 17 nt, Human
uuguggacacagcucuu

SEQ ID NO: 3080166 - RNA, 21 nt, Human
uuguggauuuaacagaaaugu

SEQ ID NO: 3080167 - RNA, 20 nt, Human
uuguggauuuaacagaaaug

SEQ ID NO: 3080168 - RNA, 23 nt, Human
uugugcauuaucuagauacugua

SEQ ID NO: 3080169 - RNA, 22 nt, Human
uugugcauuaucuagauacugu

SEQ ID NO: 3080170 - RNA, 12 nt, Human
uugugcauuugg

SEQ ID NO: 3080171 - RNA, 17 nt, Human
uugugcauuaucuagau

SEQ ID NO: 3080172 - RNA, 12 nt, Human
uugugccccugc

SEQ ID NO: 3080173 - RNA, 21 nt, Human
uuguuaguaugaggcauuugu

SEQ ID NO: 3080174 - RNA, 19 nt, Human
uuguuaguaugaggcauuu

SEQ ID NO: 3080175 - RNA, 14 nt, Human
uuguuacauuuuua

SEQ ID NO: 3080176 - RNA, 18 nt, Human
uuguguuuugcaagccag

SEQ ID NO: 3080177 - RNA, 22 nt, Human
uuguuaguaugaggcauuuguu

SEQ ID NO: 3080178 - RNA, 20 nt, Human
uuguuagugugucuuagugu

SEQ ID NO: 3080179 - RNA, 14 nt, Human
uuguuuaaaaucau

SEQ ID NO: 3080180 - RNA, 20 nt, Human
uuuacauuguaaauaguauu

SEQ ID NO: 3080181 - RNA, 13 nt, Human
uuuaccacuugug

SEQ ID NO: 3080182 - RNA, 21 nt, Human
uuuaauagguuuggacaaaau

SEQ ID NO: 3080183 - RNA, 23 nt, Human
uuuauaaaaauaaaaaacacugg

SEQ ID NO: 3080184 - RNA, 21 nt, Human
uuuauaaaaauaaaaaacacu

SEQ ID NO: 3080185 - RNA, 12 nt, Human
uuuagacagagu

SEQ ID NO: 3080186 - RNA, 14 nt, Human
uuuagaaauauaau

SEQ ID NO: 3080187 - RNA, 22 nt, Human
uuuacuucuuauacauuugaua

SEQ ID NO: 3080188 - RNA, 19 nt, Human
uuuacuucuuauacauuug

SEQ ID NO: 3080189 - RNA, 15 nt, Human
uuuacuucuuauaca

SEQ ID NO: 3080190 - RNA, 19 nt, Human
uuuaacucuauaauguguu

SEQ ID NO: 3080191 - RNA, 18 nt, Human
uuuaacagaaauguacag

SEQ ID NO: 3080192 - RNA, 18 nt, Human
uuuaagaaaaaggaugca

SEQ ID NO: 3080193 - RNA, 22 nt, Human
uuuaagaaaaaggaugcacaga

SEQ ID NO: 3080194 - RNA, 19 nt, Human
uuuaagugcugcauuuaaa

SEQ ID NO: 3080195 - RNA, 13 nt, Human
uuuaauaauguuu

SEQ ID NO: 3080196 - RNA, 18 nt, Human
uuucauuuaggugaggaa

SEQ ID NO: 3080197 - RNA, 14 nt, Human
uuucauuuagguga

SEQ ID NO: 3080198 - RNA, 14 nt, Human
uuucaguguacaug

SEQ ID NO: 3080199 - RNA, 13 nt, Human
uuucaguguacau

SEQ ID NO: 3080200 - RNA, 17 nt, Human
uuucaauaggaaaaacu

SEQ ID NO: 3080201 - RNA, 12 nt, Human
uuucaauaggaa

SEQ ID NO: 3080202 - RNA, 14 nt, Human
uuucaauaggaaaa

SEQ ID NO: 3080203 - RNA, 21 nt, Human
uuucagauaaucacaauacau

SEQ ID NO: 3080204 - RNA, 16 nt, Human
uuuauggcuuuugugc

SEQ ID NO: 3080205 - RNA, 14 nt, Human
uuuauggcuuuugu

SEQ ID NO: 3080206 - RNA, 17 nt, Human
uuuauggcacuaguauu

SEQ ID NO: 3080207 - RNA, 13 nt, Human
uuuauuauggcac

SEQ ID NO: 3080208 - RNA, 13 nt, Human
uuuauuaugcaug

SEQ ID NO: 3080209 - RNA, 22 nt, Human
uuuauaauuuugugaagcaaaa

SEQ ID NO: 3080210 - RNA, 22 nt, Human
uuuauuguuuaaaaucauuucu

SEQ ID NO: 3080211 - RNA, 17 nt, Human
uggagacacaacuauuu

SEQ ID NO: 3080212 - RNA, 19 nt, Human
uggacuaacuugucuuugg

SEQ ID NO: 3080213 - RNA, 20 nt, Human
uggacuaacuugucuuugga

SEQ ID NO: 3080214 - RNA, 19 nt, Human
uggacguguuaugacucca

SEQ ID NO: 3080215 - RNA, 23 nt, Human
uggacguguuaugacuccagaau

SEQ ID NO: 3080216 - RNA, 22 nt, Human
uggacaggcauguucucugagg

SEQ ID NO: 3080217 - RNA, 18 nt, Human
uggacaggcauguucucu

SEQ ID NO: 3080218 - RNA, 17 nt, Human
uggacaggcauguucuc

SEQ ID NO: 3080219 - RNA, 19 nt, Human
uggaucaaauccagccugc

SEQ ID NO: 3080220 - RNA, 13 nt, Human
uggaugcagccuc

SEQ ID NO: 3080221 - RNA, 21 nt, Human
uggaugcagccucacaguccu

SEQ ID NO: 3080222 - RNA, 22 nt, Human
uggaugcagccucacaguccuu

SEQ ID NO: 3080223 - RNA, 21 nt, Human
uggauuguccccgacccuugc

SEQ ID NO: 3080224 - RNA, 23 nt, Human
uggaggggggaggugggauccuc

SEQ ID NO: 3080225 - RNA, 18 nt, Human
uggcagcucagagagggu

SEQ ID NO: 3080226 - RNA, 13 nt, Human
uggcacuggcaaa

SEQ ID NO: 3080227 - RNA, 21 nt, Human
uggcacuggcaaacagggccu

SEQ ID NO: 3080228 - RNA, 22 nt, Human
uggcacuggcaaacagggccuc

SEQ ID NO: 3080229 - RNA, 22 nt, Human
uggcacugcuuccagugaggcu

SEQ ID NO: 3080230 - RNA, 19 nt, Human
uggcacugcuuccagugag

SEQ ID NO: 3080231 - RNA, 22 nt, Human
uggcacuauaauguaagcucua

SEQ ID NO: 3080232 - RNA, 21 nt, Human
uggcacuauaauguaagcucu

SEQ ID NO: 3080233 - RNA, 15 nt, Human
uggauuuaacagaaa

SEQ ID NO: 3080234 - RNA, 17 nt, Human
ugcuuuggaaaacccag

SEQ ID NO: 3080235 - RNA, 15 nt, Human
ugcuuguguuaagua

SEQ ID NO: 3080236 - RNA, 12 nt, Human
ugcuuguguuaa

SEQ ID NO: 3080237 - RNA, 18 nt, Human
ugcuugugaaaggaaaga

SEQ ID NO: 3080238 - RNA, 13 nt, Human
ugcuucuucagag

SEQ ID NO: 3080239 - RNA, 22 nt, Human
ugcuucuguuuuauaauuuugu

SEQ ID NO: 3080240 - RNA, 15 nt, Human
uggaacacucugaga

SEQ ID NO: 3080241 - RNA, 17 nt, Human
uggaacacucugagacu

SEQ ID NO: 3080242 - RNA, 14 nt, Human
uggaacacucugag

SEQ ID NO: 3080243 - RNA, 18 nt, Human
ugcuuaacuucacauauu

SEQ ID NO: 3080244 - RNA, 17 nt, Human
ugcuuaacuucacauau

SEQ ID NO: 3080245 - RNA, 14 nt, Human
ugcuuaacuucaca

SEQ ID NO: 3080246 - RNA, 13 nt, Human
ugcuuaacuucac

SEQ ID NO: 3080247 - RNA, 19 nt, Human
ugcuuaacuucacauauug

SEQ ID NO: 3080248 - RNA, 22 nt, Human
ugcuuccagugaggcucugccc

SEQ ID NO: 3080249 - RNA, 23 nt, Human
ugcuuccagugaggcucugcccu

SEQ ID NO: 3080250 - RNA, 21 nt, Human
ugcuuccagugaggcucugcc

SEQ ID NO: 3080251 - RNA, 12 nt, Human
ugcuucucacug

SEQ ID NO: 3080252 - RNA, 17 nt, Human
ugcuucuguuuuauaau

SEQ ID NO: 3080253 - RNA, 17 nt, Human
uggggccaggcuggguc

SEQ ID NO: 3080254 - RNA, 16 nt, Human
ugggggccucagugcc

SEQ ID NO: 3080255 - RNA, 19 nt, Human
uggggggcugaggugggag

SEQ ID NO: 3080256 - RNA, 19 nt, Human
ugggggcugggcagaggaa

SEQ ID NO: 3080257 - RNA, 17 nt, Human
ugggcuugucuguagau

SEQ ID NO: 3080258 - RNA, 23 nt, Human
ugggcuuggggaccagagcugcc

SEQ ID NO: 3080259 - RNA, 21 nt, Human
ugggcuugucuguagauuuua

SEQ ID NO: 3080260 - RNA, 22 nt, Human
ugggcuuggggaccagagcugc

SEQ ID NO: 3080261 - RNA, 15 nt, Human
ugggcuucauccucc

SEQ ID NO: 3080262 - RNA, 21 nt, Human
ugggcuucaguggcagcugcu

SEQ ID NO: 3080263 - RNA, 22 nt, Human
ugggcuucaguggcagcugcuu

SEQ ID NO: 3080264 - RNA, 18 nt, Human
ugggaugauuggaggggg

SEQ ID NO: 3080265 - RNA, 16 nt, Human
ugggaggaucucuuga

SEQ ID NO: 3080266 - RNA, 14 nt, Human
ugggacagggagga

SEQ ID NO: 3080267 - RNA, 16 nt, Human
ugggaaugaaugucag

SEQ ID NO: 3080268 - RNA, 13 nt, Human
ugggacacccugu

SEQ ID NO: 3080269 - RNA, 14 nt, Human
ugggacacccugug

SEQ ID NO: 3080270 - RNA, 15 nt, Human
ugggacacccuguga

SEQ ID NO: 3080271 - RNA, 15 nt, Human
ugggcagagcagaga

SEQ ID NO: 3080272 - RNA, 17 nt, Human
ugggcagagcagagacc

SEQ ID NO: 3080273 - RNA, 14 nt, Human
ugggcagagcagag

SEQ ID NO: 3080274 - RNA, 13 nt, Human
ugggcagagcaga

SEQ ID NO: 3080275 - RNA, 14 nt, Human
ugggaaugaagcaa

SEQ ID NO: 3080276 - RNA, 21 nt, Human
uggcuugaguuuaaauuguaa

SEQ ID NO: 3080277 - RNA, 22 nt, Human
uggccuucggccuccauccuga

SEQ ID NO: 3080278 - RNA, 20 nt, Human
uggccuucggccuccauccu

SEQ ID NO: 3080279 - RNA, 23 nt, Human
uggccuucggccuccauccugag

SEQ ID NO: 3080280 - RNA, 11 nt, Human
uggcugcugaa

SEQ ID NO: 3080281 - RNA, 13 nt, Human
uggcugcugaagg

SEQ ID NO: 3080282 - RNA, 14 nt, Human
uggcugcugaaggc

SEQ ID NO: 3080283 - RNA, 16 nt, Human
uggcugcugaaggcuc

SEQ ID NO: 3080284 - RNA, 20 nt, Human
uggccuagcauacguacaca

SEQ ID NO: 3080285 - RNA, 21 nt, Human
uggccccucagggucccuggu

SEQ ID NO: 3080286 - RNA, 22 nt, Human
uggccccucagggucccuggug

SEQ ID NO: 3080287 - RNA, 13 nt, Human
uggccccucaggg

SEQ ID NO: 3080288 - RNA, 20 nt, Human
uggccccucagggucccugg

SEQ ID NO: 3080289 - RNA, 17 nt, Human
uggcagcugcgguccac

SEQ ID NO: 3080290 - RNA, 23 nt, Human
uggccuagcauacguacacauuu

SEQ ID NO: 3080291 - RNA, 23 nt, Human
uggccucaagugauucuccugcc

SEQ ID NO: 3080292 - RNA, 18 nt, Human
uggccucaagugauucuc

SEQ ID NO: 3080293 - RNA, 11 nt, Human
uggccucccaa

SEQ ID NO: 3080294 - RNA, 14 nt, Human
uggccucccaacuc

SEQ ID NO: 3080295 - RNA, 19 nt, Human
uggccucccaacucacccc

SEQ ID NO: 3080296 - RNA, 20 nt, Human
uggccucccaacucacccca

SEQ ID NO: 3080297 - RNA, 21 nt, Human
uggccucccaacucaccccag

SEQ ID NO: 3080298 - RNA, 22 nt, Human
uggccucccaacucaccccagc

SEQ ID NO: 3080299 - RNA, 22 nt, Human
uguaauaacugugaaguuuaca

SEQ ID NO: 3080300 - RNA, 14 nt, Human
uguaauaacuguga

SEQ ID NO: 3080301 - RNA, 14 nt, Human
uguaacaagccacc

SEQ ID NO: 3080302 - RNA, 17 nt, Human
uguaacaagccacccca

SEQ ID NO: 3080303 - RNA, 17 nt, Human
uguaaugaaaaccacau

SEQ ID NO: 3080304 - RNA, 13 nt, Human
uguaaugaaaacc

SEQ ID NO: 3080305 - RNA, 12 nt, Human
uguaaugaaaac

SEQ ID NO: 3080306 - RNA, 11 nt, Human
uguaaugaaaa

SEQ ID NO: 3080307 - RNA, 14 nt, Human
uguacagacaacaa

SEQ ID NO: 3080308 - RNA, 11 nt, Human
uguacagagcc

SEQ ID NO: 3080309 - RNA, 20 nt, Human
ugguuguacauauaagugau

SEQ ID NO: 3080310 - RNA, 16 nt, Human
ugguuuucuguucuuu

SEQ ID NO: 3080311 - RNA, 23 nt, Human
ugguuuuuaaaaaacugcugacu

SEQ ID NO: 3080312 - RNA, 21 nt, Human
ugguuuuuaaaaaacugcuga

SEQ ID NO: 3080313 - RNA, 19 nt, Human
ugguuuucuuguguguuua

SEQ ID NO: 3080314 - RNA, 12 nt, Human
uguaaaauggug

SEQ ID NO: 3080315 - RNA, 11 nt, Human
uguaaaauggu

SEQ ID NO: 3080316 - RNA, 18 nt, Human
uggugucgggcaugacac

SEQ ID NO: 3080317 - RNA, 15 nt, Human
uggugucgggcauga

SEQ ID NO: 3080318 - RNA, 16 nt, Human
uggugucaccugaaga

SEQ ID NO: 3080319 - RNA, 16 nt, Human
ugguucccuugaugaa

SEQ ID NO: 3080320 - RNA, 17 nt, Human
ugguucccuugaugaag

SEQ ID NO: 3080321 - RNA, 20 nt, Human
ugguucccuugaugaagaag

SEQ ID NO: 3080322 - RNA, 18 nt, Human
ugguugaugaucuuugca

SEQ ID NO: 3080323 - RNA, 23 nt, Human
uggguacuuguggacacagcucu

SEQ ID NO: 3080324 - RNA, 20 nt, Human
uggguacuuguggacacagc

SEQ ID NO: 3080325 - RNA, 14 nt, Human
uggguagacacaca

SEQ ID NO: 3080326 - RNA, 14 nt, Human
uggugagaggcauc

SEQ ID NO: 3080327 - RNA, 18 nt, Human
ugguggcagugggagcug

SEQ ID NO: 3080328 - RNA, 13 nt, Human
ugguggcaguggg

SEQ ID NO: 3080329 - RNA, 20 nt, Human
ugguggcagugggagcugcc

SEQ ID NO: 3080330 - RNA, 14 nt, Human
uggugcaaugaccu

SEQ ID NO: 3080331 - RNA, 19 nt, Human
uggugcaaugaccuuucaa

SEQ ID NO: 3080332 - RNA, 12 nt, Human
ugguggcagugg

SEQ ID NO: 3080333 - RNA, 13 nt, Human
ugguggcuggguu

SEQ ID NO: 3080334 - RNA, 16 nt, Human
uggugggggccucggu

SEQ ID NO: 3080335 - RNA, 18 nt, Human
uggugggggccucggugu

SEQ ID NO: 3080336 - RNA, 18 nt, Human
uggugguuucagaaaugu

SEQ ID NO: 3080337 - RNA, 17 nt, Human
uggugguuucagaaaug

SEQ ID NO: 3080338 - RNA, 19 nt, Human
uggugguuuucuguucuuu

SEQ ID NO: 3080339 - RNA, 14 nt, Human
uguagcuuuaucaa

SEQ ID NO: 3080340 - RNA, 15 nt, Human
uguagcuuuaucaaa

SEQ ID NO: 3080341 - RNA, 23 nt, Human
uguacagcaaggagauuuacaac

SEQ ID NO: 3080342 - RNA, 21 nt, Human
uguacagagcccacgccccca

SEQ ID NO: 3080343 - RNA, 12 nt, Human
uguacagagccc

SEQ ID NO: 3080344 - RNA, 22 nt, Human
uguacagcaaggagauuuacaa

SEQ ID NO: 3080345 - RNA, 13 nt, Human
uguauaaaauaau

SEQ ID NO: 3080346 - RNA, 14 nt, Human
uguauaaaauaauu

SEQ ID NO: 3080347 - RNA, 19 nt, Human
uguaguguuggagaagaac

SEQ ID NO: 3080348 - RNA, 20 nt, Human
uguaguguuggagaagaacu

SEQ ID NO: 3080349 - RNA, 21 nt, Human
uguaguguuggagaagaacug

SEQ ID NO: 3080350 - RNA, 13 nt, Human
uguaucugagcag

SEQ ID NO: 3080351 - RNA, 19 nt, Human
ugucaauuacaggaaguac

SEQ ID NO: 3080352 - RNA, 18 nt, Human
uguauuuuaaaagaauga

SEQ ID NO: 3080353 - RNA, 19 nt, Human
uguauuuuaaaagaaugau

SEQ ID NO: 3080354 - RNA, 14 nt, Human
ugucacaggcaggu

SEQ ID NO: 3080355 - RNA, 21 nt, Human
ugucaauuacaggaaguacug

SEQ ID NO: 3080356 - RNA, 21 nt, Human
ugucacaggcagguccagggu

SEQ ID NO: 3080357 - RNA, 17 nt, Human
ugucacaggcaggucca

SEQ ID NO: 3080358 - RNA, 16 nt, Human
ugucacaggcaggucc

SEQ ID NO: 3080359 - RNA, 15 nt, Human
ugucacaggcagguc

SEQ ID NO: 3080360 - RNA, 13 nt, Human
ugucacaggcagg

SEQ ID NO: 3080361 - RNA, 16 nt, Human
ugucagugugacugau

SEQ ID NO: 3080362 - RNA, 19 nt, Human
ugucagugugacugaucuc

SEQ ID NO: 3080363 - RNA, 15 nt, Human
ugucagugugacuga

SEQ ID NO: 3080364 - RNA, 14 nt, Human
ugucagugugacug

SEQ ID NO: 3080365 - RNA, 20 nt, Human
uguccugggagugagcuggu

SEQ ID NO: 3080366 - RNA, 19 nt, Human
uguccugggagugagcugg

SEQ ID NO: 3080367 - RNA, 12 nt, Human
uguccugggagu

SEQ ID NO: 3080368 - RNA, 14 nt, Human
ugucuaaugaaacc

SEQ ID NO: 3080369 - RNA, 17 nt, Human
ugucuacacuaagagag

SEQ ID NO: 3080370 - RNA, 22 nt, Human
ugucuacacuaagagagaauga

SEQ ID NO: 3080371 - RNA, 17 nt, Human
uguccccgcacugggcu

SEQ ID NO: 3080372 - RNA, 19 nt, Human
uguccccgcacugggcuug

SEQ ID NO: 3080373 - RNA, 21 nt, Human
ugucucaaaaaaagaaaaaga

SEQ ID NO: 3080374 - RNA, 15 nt, Human
ugucuaguuguuuga

SEQ ID NO: 3080375 - RNA, 23 nt, Human
ugucuaguuguuugauucagaca

SEQ ID NO: 3080376 - RNA, 16 nt, Human
ugucuaugggacucaa

SEQ ID NO: 3080377 - RNA, 15 nt, Human
ugucuaugggacuca

SEQ ID NO: 3080378 - RNA, 14 nt, Human
ugucuaugggacuc

SEQ ID NO: 3080379 - RNA, 23 nt, Human
ugucuuuggacccugaggcccag

SEQ ID NO: 3080380 - RNA, 16 nt, Human
ugucuuuucuugcaug

SEQ ID NO: 3080381 - RNA, 20 nt, Human
ugauguauucuagcuaaugu

SEQ ID NO: 3080382 - RNA, 14 nt, Human
ugauguauucuagc

SEQ ID NO: 3080383 - RNA, 21 nt, Human
ugauguauucuagcuaaugua

SEQ ID NO: 3080384 - RNA, 13 nt, Human
ugauguauucuag

SEQ ID NO: 3080385 - RNA, 21 nt, Human
ugaugguuguacauauaagug

SEQ ID NO: 3080386 - RNA, 13 nt, Human
ugauguacaugua

SEQ ID NO: 3080387 - RNA, 18 nt, Human
ugaugcuucuucagagac

SEQ ID NO: 3080388 - RNA, 19 nt, Human
ugaugcuucuucagagacu

SEQ ID NO: 3080389 - RNA, 21 nt, Human
ugaugcuucuucagagacucc

SEQ ID NO: 3080390 - RNA, 22 nt, Human
ugaugcuucuucagagacuccu

SEQ ID NO: 3080391 - RNA, 22 nt, Human
ugaugaucuuugcagacaggca

SEQ ID NO: 3080392 - RNA, 20 nt, Human
ugaugaugaaaugaggucag

SEQ ID NO: 3080393 - RNA, 23 nt, Human
ugaugaucuuugcagacaggcaa

SEQ ID NO: 3080394 - RNA, 14 nt, Human
ugaugccaugagga

SEQ ID NO: 3080395 - RNA, 20 nt, Human
ugaucuuugcagacaggcaa

SEQ ID NO: 3080396 - RNA, 19 nt, Human
ugaucuuugcagacaggca

SEQ ID NO: 3080397 - RNA, 23 nt, Human
ugaucuuugcagacaggcaagca

SEQ ID NO: 3080398 - RNA, 21 nt, Human
ugaucuuugcagacaggcaag

SEQ ID NO: 3080399 - RNA, 18 nt, Human
ugaucuuugcagacaggc

SEQ ID NO: 3080400 - RNA, 23 nt, Human
ugauauaaguguguguuuuucau

SEQ ID NO: 3080401 - RNA, 17 nt, Human
ugauauaaguguguguu

SEQ ID NO: 3080402 - RNA, 24 nt, Human
ugauaguuguaccgcaaugugacu

SEQ ID NO: 3080403 - RNA, 22 nt, Human
ugaucacggcucacugcagccu

SEQ ID NO: 3080404 - RNA, 20 nt, Human
ugauccacccaccucagccu

SEQ ID NO: 3080405 - RNA, 15 nt, Human
ugauccacccaccuc

SEQ ID NO: 3080406 - RNA, 21 nt, Human
ugauccaagcuggucccacuc

SEQ ID NO: 3080407 - RNA, 17 nt, Human
ugauccaagcugguccc

SEQ ID NO: 3080408 - RNA, 24 nt, Human
ugaucauccacugugccaugugcc

SEQ ID NO: 3080409 - RNA, 13 nt, Human
ugaucauccacug

SEQ ID NO: 3080410 - RNA, 17 nt, Human
ugaucucucgugauuga

SEQ ID NO: 3080411 - RNA, 19 nt, Human
ugaucuaggaagacuuugg

SEQ ID NO: 3080412 - RNA, 21 nt, Human
ugaucuaggaagacuuuggaa

SEQ ID NO: 3080413 - RNA, 22 nt, Human
ugauccacccaccucagccucc

SEQ ID NO: 3080414 - RNA, 21 nt, Human
ugauccacccaccucagccuc

SEQ ID NO: 3080415 - RNA, 16 nt, Human
ugaguugauucagcuc

SEQ ID NO: 3080416 - RNA, 19 nt, Human
ugaguugauucagcucugc

SEQ ID NO: 3080417 - RNA, 21 nt, Human
ugaguugauagcacagacccu

SEQ ID NO: 3080418 - RNA, 23 nt, Human
ugaguugauagcacagacccugc

SEQ ID NO: 3080419 - RNA, 16 nt, Human
ugagucgaggacaggg

SEQ ID NO: 3080420 - RNA, 15 nt, Human
ugagucgaggacagg

SEQ ID NO: 3080421 - RNA, 17 nt, Human
ugauagcacagacccug

SEQ ID NO: 3080422 - RNA, 18 nt, Human
ugauagcacagacccugc

SEQ ID NO: 3080423 - RNA, 20 nt, Human
ugauagcacagacccugccc

SEQ ID NO: 3080424 - RNA, 21 nt, Human
ugauagcacagacccugcccu

SEQ ID NO: 3080425 - RNA, 15 nt, Human
ugauagcacagaccc

SEQ ID NO: 3080426 - RNA, 16 nt, Human
ugauagcacagacccu

SEQ ID NO: 3080427 - RNA, 22 nt, Human
ugauagcacagacccugcccug

SEQ ID NO: 3080428 - RNA, 23 nt, Human
ugauagcacagacccugcccugu

SEQ ID NO: 3080429 - RNA, 15 nt, Human
ugaggugcuauguuc

SEQ ID NO: 3080430 - RNA, 16 nt, Human
ugaggugcuauguucu

SEQ ID NO: 3080431 - RNA, 19 nt, Human
ugagguuucaaaccucccu

SEQ ID NO: 3080432 - RNA, 21 nt, Human
ugaguccccuguuuguuucug

SEQ ID NO: 3080433 - RNA, 19 nt, Human
ugaguccuggcaugggaau

SEQ ID NO: 3080434 - RNA, 22 nt, Human
ugaguccuggcaugggaaugaa

SEQ ID NO: 3080435 - RNA, 14 nt, Human
ugagucgaggacag

SEQ ID NO: 3080436 - RNA, 11 nt, Human
ugaguccuggc

SEQ ID NO: 3080437 - RNA, 18 nt, Human
ugaguccuggcaugggaa

SEQ ID NO: 3080438 - RNA, 20 nt, Human
ugaguccccuguuuguuucu

SEQ ID NO: 3080439 - RNA, 11 nt, Human
ugaggcugggc

SEQ ID NO: 3080440 - RNA, 15 nt, Human
ugaggucuguucuuu

SEQ ID NO: 3080441 - RNA, 14 nt, Human
ugaggucuguucuu

SEQ ID NO: 3080442 - RNA, 20 nt, Human
ugaggucuguucuuuccaaa

SEQ ID NO: 3080443 - RNA, 17 nt, Human
ugagaaaucuaaaaaac

SEQ ID NO: 3080444 - RNA, 13 nt, Human
ugagaaaucuaaa

SEQ ID NO: 3080445 - RNA, 15 nt, Human
ugagaaagacuauuc

SEQ ID NO: 3080446 - RNA, 18 nt, Human
ugagaaagacuauucaaa

SEQ ID NO: 3080447 - RNA, 17 nt, Human
ugagaaagacuauucaa

SEQ ID NO: 3080448 - RNA, 16 nt, Human
ugagaaagacuauuca

SEQ ID NO: 3080449 - RNA, 12 nt, Human
ugagacccuguc

SEQ ID NO: 3080450 - RNA, 12 nt, Human
ugagacagcucu

SEQ ID NO: 3080451 - RNA, 14 nt, Human
ugagacagcucugc

SEQ ID NO: 3080452 - RNA, 16 nt, Human
ugagacagcucugcau

SEQ ID NO: 3080453 - RNA, 17 nt, Human
ugagaguagagucacug

SEQ ID NO: 3080454 - RNA, 19 nt, Human
ugagaggggaacagacugg

SEQ ID NO: 3080455 - RNA, 15 nt, Human
ugagaucagccuggg

SEQ ID NO: 3080456 - RNA, 23 nt, Human
ugagaggcauccaguaucuugaa

SEQ ID NO: 3080457 - RNA, 22 nt, Human
ugagaggcauccaguaucuuga

SEQ ID NO: 3080458 - RNA, 14 nt, Human
ugagacucugucuc

SEQ ID NO: 3080459 - RNA, 13 nt, Human
ugagacucugucu

SEQ ID NO: 3080460 - RNA, 12 nt, Human
ugagacucuguc

SEQ ID NO: 3080461 - RNA, 13 nt, Human
ugagcaucaggcc

SEQ ID NO: 3080462 - RNA, 20 nt, Human
ugagcagucaggaaagagaa

SEQ ID NO: 3080463 - RNA, 17 nt, Human
ugagcagucaggaaaga

SEQ ID NO: 3080464 - RNA, 15 nt, Human
ugagcagucaggaaa

SEQ ID NO: 3080465 - RNA, 14 nt, Human
ugagaugcuagaac

SEQ ID NO: 3080466 - RNA, 16 nt, Human
ugagaugcuagaacuc

SEQ ID NO: 3080467 - RNA, 20 nt, Human
ugagaugcuagaacucccuu

SEQ ID NO: 3080468 - RNA, 14 nt, Human
ugagcaucaggcca

SEQ ID NO: 3080469 - RNA, 15 nt, Human
ugagcaucaggccag

SEQ ID NO: 3080470 - RNA, 13 nt, Human
ugagccucagcau

SEQ ID NO: 3080471 - RNA, 16 nt, Human
ucuugaauaauguaag

SEQ ID NO: 3080472 - RNA, 19 nt, Human
ucuugaaggaaaaugauac

SEQ ID NO: 3080473 - RNA, 15 nt, Human
ucuugaacuccuggc

SEQ ID NO: 3080474 - RNA, 17 nt, Human
ucuugaauuguaaggaa

SEQ ID NO: 3080475 - RNA, 20 nt, Human
ugaccauucuccaccugcca

SEQ ID NO: 3080476 - RNA, 21 nt, Human
ugaccauucuccaccugccag

SEQ ID NO: 3080477 - RNA, 22 nt, Human
ugaccauucuccaccugccagg

SEQ ID NO: 3080478 - RNA, 19 nt, Human
ugaccauucuccaccugcc

SEQ ID NO: 3080479 - RNA, 21 nt, Human
ugaccucugcagcaauaaagc

SEQ ID NO: 3080480 - RNA, 18 nt, Human
ugaccucugcagcaauaa

SEQ ID NO: 3080481 - RNA, 23 nt, Human
ugaccucugcagcaauaaagcag

SEQ ID NO: 3080482 - RNA, 12 nt, Human
ugaccucugccu

SEQ ID NO: 3080483 - RNA, 15 nt, Human
ugaccuuucaauagg

SEQ ID NO: 3080484 - RNA, 16 nt, Human
ugaccuuucaauagga

SEQ ID NO: 3080485 - RNA, 14 nt, Human
ugaccuuucaauag

SEQ ID NO: 3080486 - RNA, 13 nt, Human
ugaccuuucaaua

SEQ ID NO: 3080487 - RNA, 22 nt, Human
ugaccucaggugauccacccac

SEQ ID NO: 3080488 - RNA, 16 nt, Human
ugaccucugcagcaau

SEQ ID NO: 3080489 - RNA, 13 nt, Human
ugaccucugcagc

SEQ ID NO: 3080490 - RNA, 13 nt, Human
ugacugaauuucu

SEQ ID NO: 3080491 - RNA, 12 nt, Human
ugacucuuaaga

SEQ ID NO: 3080492 - RNA, 15 nt, Human
ugacugaauuucuuu

SEQ ID NO: 3080493 - RNA, 14 nt, Human
ugacugaauuucuu

SEQ ID NO: 3080494 - RNA, 13 nt, Human
ugacgccauccca

SEQ ID NO: 3080495 - RNA, 14 nt, Human
ugacgccaucccag

SEQ ID NO: 3080496 - RNA, 15 nt, Human
ugacgccaucccagc

SEQ ID NO: 3080497 - RNA, 16 nt, Human
ugacgccaucccagcc

SEQ ID NO: 3080498 - RNA, 18 nt, Human
ugaccuuucaauaggaaa

SEQ ID NO: 3080499 - RNA, 22 nt, Human
ugaccuuucaauaggaaaaacu

SEQ ID NO: 3080500 - RNA, 17 nt, Human
ugacgccaucccagccc

SEQ ID NO: 3080501 - RNA, 18 nt, Human
ugacgccaucccagcccc

SEQ ID NO: 3080502 - RNA, 19 nt, Human
ugacgccaucccagcccca

SEQ ID NO: 3080503 - RNA, 20 nt, Human
ugacgccaucccagccccaa

SEQ ID NO: 3080504 - RNA, 17 nt, Human
ugcauuaucuagauacu

SEQ ID NO: 3080505 - RNA, 12 nt, Human
ugcauuaucuag

SEQ ID NO: 3080506 - RNA, 21 nt, Human
ugcauuauauuuauuacugua

SEQ ID NO: 3080507 - RNA, 15 nt, Human
ugcauguuugugauu

SEQ ID NO: 3080508 - RNA, 17 nt, Human
ugcaugguuuggagcug

SEQ ID NO: 3080509 - RNA, 17 nt, Human
ugcaugguuuagaaagc

SEQ ID NO: 3080510 - RNA, 19 nt, Human
ugcagauaaacaguaguga

SEQ ID NO: 3080511 - RNA, 17 nt, Human
ugcagauaaacaguagu

SEQ ID NO: 3080512 - RNA, 12 nt, Human
ugccauccaggu

SEQ ID NO: 3080513 - RNA, 15 nt, Human
ugccauccagguuca

SEQ ID NO: 3080514 - RNA, 12 nt, Human
ugccauccaagu

SEQ ID NO: 3080515 - RNA, 17 nt, Human
ugccagguuuuuggucu

SEQ ID NO: 3080516 - RNA, 12 nt, Human
ugccaggaagcc

SEQ ID NO: 3080517 - RNA, 16 nt, Human
ugccaggaagccagca

SEQ ID NO: 3080518 - RNA, 18 nt, Human
ugccaggaagccagcagg

SEQ ID NO: 3080519 - RNA, 19 nt, Human
ugccaggaagccagcaggc

SEQ ID NO: 3080520 - RNA, 20 nt, Human
ugccaugaggaacaaggcaa

SEQ ID NO: 3080521 - RNA, 19 nt, Human
ugccaugagccgcccaagg

SEQ ID NO: 3080522 - RNA, 18 nt, Human
ugccaugagccgcccaag

SEQ ID NO: 3080523 - RNA, 23 nt, Human
ugccaugaggaacaaggcaaggc

SEQ ID NO: 3080524 - RNA, 23 nt, Human
ugccaugagccgcccaaggccuu

SEQ ID NO: 3080525 - RNA, 20 nt, Human
ugccaugagccgcccaaggc

SEQ ID NO: 3080526 - RNA, 21 nt, Human
ugccaugagccgcccaaggcc

SEQ ID NO: 3080527 - RNA, 14 nt, Human
ugccaugugccagg

SEQ ID NO: 3080528 - RNA, 15 nt, Human
ugccaugugccaggu

SEQ ID NO: 3080529 - RNA, 21 nt, Human
ugcccacucccugcaaccuga

SEQ ID NO: 3080530 - RNA, 19 nt, Human
ugcccaccuggccucugca

SEQ ID NO: 3080531 - RNA, 18 nt, Human
ugcccacgcuggagugca

SEQ ID NO: 3080532 - RNA, 20 nt, Human
ugcccaccuggccucugcac

SEQ ID NO: 3080533 - RNA, 16 nt, Human
ugccauguuggccagg

SEQ ID NO: 3080534 - RNA, 12 nt, Human
ugccauguuggc

SEQ ID NO: 3080535 - RNA, 15 nt, Human
ugccauguuggccag

SEQ ID NO: 3080536 - RNA, 19 nt, Human
ugccugguggcagcugcgg

SEQ ID NO: 3080537 - RNA, 18 nt, Human
ugccugguggcagcugcg

SEQ ID NO: 3080538 - RNA, 17 nt, Human
ugccugguggcagcugc

SEQ ID NO: 3080539 - RNA, 21 nt, Human
ugccucuucucuacucuaggg

SEQ ID NO: 3080540 - RNA, 19 nt, Human
ugccuggguggaugggcca

SEQ ID NO: 3080541 - RNA, 21 nt, Human
ugccuccuuugugaggaagcc

SEQ ID NO: 3080542 - RNA, 20 nt, Human
ugccuccuuugugaggaagc

SEQ ID NO: 3080543 - RNA, 22 nt, Human
ugccuccuuugugaggaagccg

SEQ ID NO: 3080544 - RNA, 13 nt, Human
ugccucugggacu

SEQ ID NO: 3080545 - RNA, 19 nt, Human
ugcccuaaaguguauuuuu

SEQ ID NO: 3080546 - RNA, 17 nt, Human
ugcccuaaaguguauuu

SEQ ID NO: 3080547 - RNA, 22 nt, Human
ugcccugcccaccuggccucug

SEQ ID NO: 3080548 - RNA, 23 nt, Human
ugcccugcccaccuggccucugc

SEQ ID NO: 3080549 - RNA, 21 nt, Human
ugcccugcccaccuggccucu

SEQ ID NO: 3080550 - RNA, 15 nt, Human
ugccgucuaccugag

SEQ ID NO: 3080551 - RNA, 16 nt, Human
ugccgucuaccugagg

SEQ ID NO: 3080552 - RNA, 17 nt, Human
ugccgucuaccugaggg

SEQ ID NO: 3080553 - RNA, 19 nt, Human
ugccgucuaccugaggggc

SEQ ID NO: 3080554 - RNA, 16 nt, Human
ugcaauggcagccuug

SEQ ID NO: 3080555 - RNA, 15 nt, Human
ugcaauggcagccuu

SEQ ID NO: 3080556 - RNA, 14 nt, Human
ugcaauggcagccu

SEQ ID NO: 3080557 - RNA, 13 nt, Human
ugcaauggcagcc

SEQ ID NO: 3080558 - RNA, 17 nt, Human
ugcaaugaccuuucaau

SEQ ID NO: 3080559 - RNA, 19 nt, Human
ugcaaugaccuuucaauag

SEQ ID NO: 3080560 - RNA, 22 nt, Human
ugcaaugaccuuucaauaggaa

SEQ ID NO: 3080561 - RNA, 23 nt, Human
ugcaaugaccuuucaauaggaaa

SEQ ID NO: 3080562 - RNA, 13 nt, Human
ugcaaugaccuuu

SEQ ID NO: 3080563 - RNA, 16 nt, Human
ugcaaugaccuuucaa

SEQ ID NO: 3080564 - RNA, 20 nt, Human
ugcaauuucauaugcuguau

SEQ ID NO: 3080565 - RNA, 14 nt, Human
ugcaauuucauaug

SEQ ID NO: 3080566 - RNA, 15 nt, Human
ugcacaaacagaggc

SEQ ID NO: 3080567 - RNA, 16 nt, Human
ugcacaaacagaggcc

SEQ ID NO: 3080568 - RNA, 17 nt, Human
ugcacaaacagaggccg

SEQ ID NO: 3080569 - RNA, 19 nt, Human
ugcacaaacagaggccgcc

SEQ ID NO: 3080570 - RNA, 20 nt, Human
ugcacaaacagaggccgcca

SEQ ID NO: 3080571 - RNA, 19 nt, Human
ugcacagaguuguuacauu

SEQ ID NO: 3080572 - RNA, 18 nt, Human
ugcacagaguuguuacau

SEQ ID NO: 3080573 - RNA, 17 nt, Human
ugcacagaguuguuaca

SEQ ID NO: 3080574 - RNA, 21 nt, Human
ugcacugacauuguuggccaa

SEQ ID NO: 3080575 - RNA, 18 nt, Human
ugcacugacauuguuggc

SEQ ID NO: 3080576 - RNA, 16 nt, Human
ugcacugucaagauga

SEQ ID NO: 3080577 - RNA, 19 nt, Human
ugcaccggcuggccuggcc

SEQ ID NO: 3080578 - RNA, 20 nt, Human
ugcaccggcuggccuggccc

SEQ ID NO: 3080579 - RNA, 18 nt, Human
ugcaccggcuggccuggc

SEQ ID NO: 3080580 - RNA, 22 nt, Human
ugcaccuggaauauauaaccag

SEQ ID NO: 3080581 - RNA, 20 nt, Human
ugcaccuggaauauauaacc

SEQ ID NO: 3080582 - RNA, 17 nt, Human
ugcaccuggaauauaua

SEQ ID NO: 3080583 - RNA, 21 nt, Human
ugcaccggcuggccuggcccc

SEQ ID NO: 3080584 - RNA, 16 nt, Human
ugcacgcacacugucu

SEQ ID NO: 3080585 - RNA, 18 nt, Human
ugcaacuuuguauaaaag

SEQ ID NO: 3080586 - RNA, 22 nt, Human
ugcaaccugauugugucucuug

SEQ ID NO: 3080587 - RNA, 22 nt, Human
ugcaacucugaaggguaauuau

SEQ ID NO: 3080588 - RNA, 21 nt, Human
ugcaaccuccgccucuugggu

SEQ ID NO: 3080589 - RNA, 20 nt, Human
ugcaaccuccgccucuuggg

SEQ ID NO: 3080590 - RNA, 18 nt, Human
ugcaaccuccgccucuug

SEQ ID NO: 3080591 - RNA, 19 nt, Human
ugcaaccugauugugucuc

SEQ ID NO: 3080592 - RNA, 20 nt, Human
ugcaaccugauugugucucu

SEQ ID NO: 3080593 - RNA, 14 nt, Human
ugcaaccuccgccu

SEQ ID NO: 3080594 - RNA, 13 nt, Human
ugcaaccuccgcc

SEQ ID NO: 3080595 - RNA, 20 nt, Human
ugcaacaggcugggcuucag

SEQ ID NO: 3080596 - RNA, 19 nt, Human
ugcaacaggcugggcuuca

SEQ ID NO: 3080597 - RNA, 17 nt, Human
ugcaacaggcugggcuu

SEQ ID NO: 3080598 - RNA, 16 nt, Human
ugcaacaggcugggcu

SEQ ID NO: 3080599 - RNA, 15 nt, Human
ugcaacaggcugggc

SEQ ID NO: 3080600 - RNA, 14 nt, Human
ugcaacaggcuggg

SEQ ID NO: 3080601 - RNA, 13 nt, Human
ugauuuuuuucca

SEQ ID NO: 3080602 - RNA, 16 nt, Human
ugauuuuuuuuuccuu

SEQ ID NO: 3080603 - RNA, 17 nt, Human
ugauuuuuuuuuccuuc

SEQ ID NO: 3080604 - RNA, 19 nt, Human
ugauuuuuuuuuccuucag

SEQ ID NO: 3080605 - RNA, 20 nt, Human
ugauuuuuuuuuccuucagu

SEQ ID NO: 3080606 - RNA, 22 nt, Human
ugauuuuuuuuuccuucagugc

SEQ ID NO: 3080607 - RNA, 23 nt, Human
ugauuuuuuuuuccuucagugcc

SEQ ID NO: 3080608 - RNA, 13 nt, Human
ugauuuucauugc

SEQ ID NO: 3080609 - RNA, 15 nt, Human
ugauuuucauugcug

SEQ ID NO: 3080610 - RNA, 17 nt, Human
ucucaaauaacuaaaag

SEQ ID NO: 3080611 - RNA, 15 nt, Human
ucucaacuccaaacu

SEQ ID NO: 3080612 - RNA, 22 nt, Human
ucuaucaaguauuauaccuuuu

SEQ ID NO: 3080613 - RNA, 21 nt, Human
ucuaucaaguauuauaccuuu

SEQ ID NO: 3080614 - RNA, 15 nt, Human
ucuaucaaguauuau

SEQ ID NO: 3080615 - RNA, 17 nt, Human
ucuaugaaauauuaugu

SEQ ID NO: 3080616 - RNA, 13 nt, Human
ucuaugaaauauu

SEQ ID NO: 3080617 - RNA, 14 nt, Human
ucuaugaaauauua

SEQ ID NO: 3080618 - RNA, 21 nt, Human
ucuaggaagacuuuggaaaga

SEQ ID NO: 3080619 - RNA, 16 nt, Human
ucuaggacugaauuau

SEQ ID NO: 3080620 - RNA, 23 nt, Human
ucuaggacugaauuaugaaacuu

SEQ ID NO: 3080621 - RNA, 22 nt, Human
ucuagugagcagucaggaaaga

SEQ ID NO: 3080622 - RNA, 19 nt, Human
ucuagugagcagucaggaa

SEQ ID NO: 3080623 - RNA, 13 nt, Human
ucguuaauuugua

SEQ ID NO: 3080624 - RNA, 21 nt, Human
ucuaaaucuccaaaauaaaac

SEQ ID NO: 3080625 - RNA, 16 nt, Human
ucgugauugauaagaa

SEQ ID NO: 3080626 - RNA, 18 nt, Human
ucggccuccauccugagg

SEQ ID NO: 3080627 - RNA, 17 nt, Human
ucggccuccauccugag

SEQ ID NO: 3080628 - RNA, 21 nt, Human
ucguggaacaguuaccucugc

SEQ ID NO: 3080629 - RNA, 22 nt, Human
ucgugggacagucaccucaugg

SEQ ID NO: 3080630 - RNA, 14 nt, Human
uccuuaccagcaga

SEQ ID NO: 3080631 - RNA, 19 nt, Human
uccugucggagcccugucu

SEQ ID NO: 3080632 - RNA, 20 nt, Human
uccuguaccucuugagccuu

SEQ ID NO: 3080633 - RNA, 18 nt, Human
uccuggcacugcuuccag

SEQ ID NO: 3080634 - RNA, 22 nt, Human
uccuggcacugcuuccagugag

SEQ ID NO: 3080635 - RNA, 17 nt, Human
uccuggcacugcuucca

SEQ ID NO: 3080636 - RNA, 21 nt, Human
uccuggcacccggccccugcu

SEQ ID NO: 3080637 - RNA, 20 nt, Human
uccuggcacccggccccugc

SEQ ID NO: 3080638 - RNA, 20 nt, Human
uccugccuaagugcagcccc

SEQ ID NO: 3080639 - RNA, 14 nt, Human
uccugccucagccu

SEQ ID NO: 3080640 - RNA, 13 nt, Human
uccugagccagau

SEQ ID NO: 3080641 - RNA, 14 nt, Human
uccuggcacccggc

SEQ ID NO: 3080642 - RNA, 17 nt, Human
uccuggcaauagucaaa

SEQ ID NO: 3080643 - RNA, 19 nt, Human
uccuggcacccggccccug

SEQ ID NO: 3080644 - RNA, 16 nt, Human
uccuggcacccggccc

SEQ ID NO: 3080645 - RNA, 15 nt, Human
uccugccucagccuc

SEQ ID NO: 3080646 - RNA, 13 nt, Human
uccugccucagcc

SEQ ID NO: 3080647 - RNA, 16 nt, Human
uccugccucagccucc

SEQ ID NO: 3080648 - RNA, 23 nt, Human
uccuuuucacaguucucuccuuc

SEQ ID NO: 3080649 - RNA, 16 nt, Human
uccuuggacucauuuu

SEQ ID NO: 3080650 - RNA, 22 nt, Human
ucgaggcggaucuuuggacaga

SEQ ID NO: 3080651 - RNA, 17 nt, Human
ucgaggcggaucuuugg

SEQ ID NO: 3080652 - RNA, 21 nt, Human
uccuucaccuuuguccccacc

SEQ ID NO: 3080653 - RNA, 22 nt, Human
uccuucaccuuuguccccaccg

SEQ ID NO: 3080654 - RNA, 16 nt, Human
uccuuaccagcagagc

SEQ ID NO: 3080655 - RNA, 17 nt, Human
uccuuaccagcagagca

SEQ ID NO: 3080656 - RNA, 18 nt, Human
uccuuaccagcagagcac

SEQ ID NO: 3080657 - RNA, 18 nt, Human
uccuucacagaugggugc

SEQ ID NO: 3080658 - RNA, 18 nt, Human
uccuucaccuuugucccc

SEQ ID NO: 3080659 - RNA, 20 nt, Human
uccuucaccuuuguccccac

SEQ ID NO: 3080660 - RNA, 19 nt, Human
uccuucacagaugggugcu

SEQ ID NO: 3080661 - RNA, 16 nt, Human
uccuaaucuucugaac

SEQ ID NO: 3080662 - RNA, 13 nt, Human
uccgaccagacac

SEQ ID NO: 3080663 - RNA, 18 nt, Human
uccuacccacccuccuuu

SEQ ID NO: 3080664 - RNA, 18 nt, Human
uccuauauuguuuucagu

SEQ ID NO: 3080665 - RNA, 22 nt, Human
uccuaguuccaccaucaagcca

SEQ ID NO: 3080666 - RNA, 12 nt, Human
uccucugcugcu

SEQ ID NO: 3080667 - RNA, 14 nt, Human
uccucugcugcugg

SEQ ID NO: 3080668 - RNA, 15 nt, Human
uccucugcugcuggc

SEQ ID NO: 3080669 - RNA, 16 nt, Human
uccucugcugcuggcu

SEQ ID NO: 3080670 - RNA, 16 nt, Human
uccucuguacagagcc

SEQ ID NO: 3080671 - RNA, 17 nt, Human
uccucuguacagagccc

SEQ ID NO: 3080672 - RNA, 18 nt, Human
uccucuguacagagccca

SEQ ID NO: 3080673 - RNA, 15 nt, Human
uccucuguacagagc

SEQ ID NO: 3080674 - RNA, 14 nt, Human
uccucuaggagguc

SEQ ID NO: 3080675 - RNA, 19 nt, Human
uccuccuuuucacaguucu

SEQ ID NO: 3080676 - RNA, 13 nt, Human
ucccuucccaccu

SEQ ID NO: 3080677 - RNA, 16 nt, Human
ucccuugaugaagaag

SEQ ID NO: 3080678 - RNA, 15 nt, Human
ucccuugaugaagaa

SEQ ID NO: 3080679 - RNA, 18 nt, Human
ucccugcugcuccuagga

SEQ ID NO: 3080680 - RNA, 13 nt, Human
ucccugcacuugc

SEQ ID NO: 3080681 - RNA, 14 nt, Human
ucccugcacuugca

SEQ ID NO: 3080682 - RNA, 15 nt, Human
ucccuaauaaagcug

SEQ ID NO: 3080683 - RNA, 14 nt, Human
ucccuaauaaagcu

SEQ ID NO: 3080684 - RNA, 21 nt, Human
uccccuguuuguuucugaaag

SEQ ID NO: 3080685 - RNA, 18 nt, Human
uccccuguuuguuucuga

SEQ ID NO: 3080686 - RNA, 20 nt, Human
uccccuguuuguuucugaaa

SEQ ID NO: 3080687 - RNA, 17 nt, Human
uccagguuuaagcuguu

SEQ ID NO: 3080688 - RNA, 16 nt, Human
ucccuaauaaagcugu

SEQ ID NO: 3080689 - RNA, 19 nt, Human
ucccuccugggaaugaagc

SEQ ID NO: 3080690 - RNA, 11 nt, Human
ucccuccuggg

SEQ ID NO: 3080691 - RNA, 16 nt, Human
ucucugcaggucccua

SEQ ID NO: 3080692 - RNA, 15 nt, Human
ucucugcaggucccu

SEQ ID NO: 3080693 - RNA, 23 nt, Human
ucucuggccuucggccuccaucc

SEQ ID NO: 3080694 - RNA, 18 nt, Human
ucucuguaauaaacucau

SEQ ID NO: 3080695 - RNA, 22 nt, Human
ucucuguaauaaacucauuucu

SEQ ID NO: 3080696 - RNA, 14 nt, Human
ucucugcagguccc

SEQ ID NO: 3080697 - RNA, 13 nt, Human
ucucugcaggucc

SEQ ID NO: 3080698 - RNA, 17 nt, Human
ucucugaggacacuaac

SEQ ID NO: 3080699 - RNA, 15 nt, Human
ucucugauacagaaa

SEQ ID NO: 3080700 - RNA, 14 nt, Human
ucucugaggacacu

SEQ ID NO: 3080701 - RNA, 15 nt, Human
ucucuaguuugauua

SEQ ID NO: 3080702 - RNA, 21 nt, Human
ucuccuggaagugcuaauuuu

SEQ ID NO: 3080703 - RNA, 21 nt, Human
ucuccuggaaauauuaagaaa

SEQ ID NO: 3080704 - RNA, 15 nt, Human
ucuccuguaccucuu

SEQ ID NO: 3080705 - RNA, 15 nt, Human
ucuccugccucagcc

SEQ ID NO: 3080706 - RNA, 17 nt, Human
ucuccugccucagccuc

SEQ ID NO: 3080707 - RNA, 17 nt, Human
ucuccuguaccucuuga

SEQ ID NO: 3080708 - RNA, 16 nt, Human
ucuccuguaccucuug

SEQ ID NO: 3080709 - RNA, 13 nt, Human
ucuccuguaccuc

SEQ ID NO: 3080710 - RNA, 14 nt, Human
ucucgugauugaua

SEQ ID NO: 3080711 - RNA, 22 nt, Human
ucucgugauugauaagaaccuu

SEQ ID NO: 3080712 - RNA, 12 nt, Human
ucucuaacuuca

SEQ ID NO: 3080713 - RNA, 19 nt, Human
ucucuaacuucaccauauu

SEQ ID NO: 3080714 - RNA, 19 nt, Human
ucucuaggaaauauuuauu

SEQ ID NO: 3080715 - RNA, 22 nt, Human
ucugaaaauugaugggauuugg

SEQ ID NO: 3080716 - RNA, 14 nt, Human
ucugaaaauugaug

SEQ ID NO: 3080717 - RNA, 13 nt, Human
ucugaaaauguau

SEQ ID NO: 3080718 - RNA, 15 nt, Human
ucugacauaaguauu

SEQ ID NO: 3080719 - RNA, 13 nt, Human
ucugacccacugc

SEQ ID NO: 3080720 - RNA, 22 nt, Human
ucugacaggcaaugcuggcugu

SEQ ID NO: 3080721 - RNA, 21 nt, Human
ucugacaggcaaugcuggcug

SEQ ID NO: 3080722 - RNA, 12 nt, Human
ucugacaggcaa

SEQ ID NO: 3080723 - RNA, 19 nt, Human
ucugacacacagcucuguc

SEQ ID NO: 3080724 - RNA, 18 nt, Human
ucugacacacagcucugu

SEQ ID NO: 3080725 - RNA, 17 nt, Human
ucugacacacagcucug

SEQ ID NO: 3080726 - RNA, 16 nt, Human
ucugacacacagcucu

SEQ ID NO: 3080727 - RNA, 17 nt, Human
ucugaaauuuccuggga

SEQ ID NO: 3080728 - RNA, 18 nt, Human
ucugaaauuuccugggag

SEQ ID NO: 3080729 - RNA, 20 nt, Human
ucugaaauuuccugggagcu

SEQ ID NO: 3080730 - RNA, 23 nt, Human
ucugaggaauccagacccggcug

SEQ ID NO: 3080731 - RNA, 14 nt, Human
ucugacccacugcu

SEQ ID NO: 3080732 - RNA, 20 nt, Human
ucugcaagaauugaagcagg

SEQ ID NO: 3080733 - RNA, 14 nt, Human
ucugcaacucugaa

SEQ ID NO: 3080734 - RNA, 15 nt, Human
ucugcaacucugaag

SEQ ID NO: 3080735 - RNA, 14 nt, Human
ucugcaucagcugc

SEQ ID NO: 3080736 - RNA, 21 nt, Human
ucugcaucagcugcugaaaca

SEQ ID NO: 3080737 - RNA, 19 nt, Human
ucugcaucagcugcugaaa

SEQ ID NO: 3080738 - RNA, 22 nt, Human
ucuuaaccagaucauugugaaa

SEQ ID NO: 3080739 - RNA, 12 nt, Human
ucuuaagaagac

SEQ ID NO: 3080740 - RNA, 18 nt, Human
ucuuaagaagacugcauu

SEQ ID NO: 3080741 - RNA, 17 nt, Human
ucuuaaccagaucauug

SEQ ID NO: 3080742 - RNA, 16 nt, Human
ucuuaaccagaucauu

SEQ ID NO: 3080743 - RNA, 22 nt, Human
ucuuaaauauguggaguucauc

SEQ ID NO: 3080744 - RNA, 15 nt, Human
ucugucuucacaaca

SEQ ID NO: 3080745 - RNA, 13 nt, Human
ucuugaaaaaugc

SEQ ID NO: 3080746 - RNA, 12 nt, Human
ucuugaacuccu

SEQ ID NO: 3080747 - RNA, 15 nt, Human
ucuucuccaggcugu

SEQ ID NO: 3080748 - RNA, 19 nt, Human
ucuucaucugacuaugaca

SEQ ID NO: 3080749 - RNA, 23 nt, Human
ucuucagaucucuaacuucacca

SEQ ID NO: 3080750 - RNA, 18 nt, Human
ucuucagaucucuaacuu

SEQ ID NO: 3080751 - RNA, 15 nt, Human
ucuucagaucucuaa

SEQ ID NO: 3080752 - RNA, 22 nt, Human
ucugucucuggauuauauuaug

SEQ ID NO: 3080753 - RNA, 14 nt, Human
ucugucgcccaguc

SEQ ID NO: 3080754 - RNA, 19 nt, Human
ucuguccuacucuguguca

SEQ ID NO: 3080755 - RNA, 15 nt, Human
ucuguccuacucugu

SEQ ID NO: 3080756 - RNA, 21 nt, Human
ucuguccugggagugagcugg

SEQ ID NO: 3080757 - RNA, 14 nt, Human
ucuguccuacucug

SEQ ID NO: 3080758 - RNA, 17 nt, Human
ucuggcuaugcauuuga

SEQ ID NO: 3080759 - RNA, 18 nt, Human
ucuggccuucggccucca

SEQ ID NO: 3080760 - RNA, 17 nt, Human
ucuggccuucggccucc

SEQ ID NO: 3080761 - RNA, 22 nt, Human
ucuggcuaugcauuugaaaauu

SEQ ID NO: 3080762 - RNA, 19 nt, Human
ucuggcuaugcauuugaaa

SEQ ID NO: 3080763 - RNA, 10 nt, Human
ucuggccuuc

SEQ ID NO: 3080764 - RNA, 18 nt, Human
ucuggcucuuccaggcug

SEQ ID NO: 3080765 - RNA, 23 nt, Human
ucuggcucuuccaggcugggaga

SEQ ID NO: 3080766 - RNA, 23 nt, Human
ucuggugacuuuccucuuugguc

SEQ ID NO: 3080767 - RNA, 13 nt, Human
ucugggacacagu

SEQ ID NO: 3080768 - RNA, 14 nt, Human
ucugggacacaguu

SEQ ID NO: 3080769 - RNA, 13 nt, Human
ucugccugcccag

SEQ ID NO: 3080770 - RNA, 14 nt, Human
ucugccugcccagg

SEQ ID NO: 3080771 - RNA, 17 nt, Human
ucugcugacagacacag

SEQ ID NO: 3080772 - RNA, 18 nt, Human
ucugcugacagacacagg

SEQ ID NO: 3080773 - RNA, 18 nt, Human
ucugcuccucuccccagc

SEQ ID NO: 3080774 - RNA, 15 nt, Human
ucugccugcccaggc

SEQ ID NO: 3080775 - RNA, 22 nt, Human
ucugcugacagacacaggcccg

SEQ ID NO: 3080776 - RNA, 21 nt, Human
ucugcugacagacacaggccc

SEQ ID NO: 3080777 - RNA, 20 nt, Human
ucugcugacagacacaggcc

SEQ ID NO: 3080778 - RNA, 19 nt, Human
ucugcugacagacacaggc

SEQ ID NO: 3080779 - RNA, 19 nt, Human
ucuggaauaaggagaauga

SEQ ID NO: 3080780 - RNA, 15 nt, Human
ucuggaaugcagugg

SEQ ID NO: 3080781 - RNA, 14 nt, Human
ucuggacaggcaug

SEQ ID NO: 3080782 - RNA, 21 nt, Human
ucuggacaggcauguucucug

SEQ ID NO: 3080783 - RNA, 22 nt, Human
uauuuuuuucugaauuauuuuc

SEQ ID NO: 3080784 - RNA, 14 nt, Human
uauuuuuuuacuaa

SEQ ID NO: 3080785 - RNA, 17 nt, Human
uauuuuuuucuuuucuu

SEQ ID NO: 3080786 - RNA, 14 nt, Human
ucaaaaaaagaaaa

SEQ ID NO: 3080787 - RNA, 15 nt, Human
ucaaaaaaagaaaaa

SEQ ID NO: 3080788 - RNA, 22 nt, Human
uauuuucccuauuagagaagag

SEQ ID NO: 3080789 - RNA, 17 nt, Human
uauuuuauguugcauag

SEQ ID NO: 3080790 - RNA, 17 nt, Human
uauuuuauuaugcauga

SEQ ID NO: 3080791 - RNA, 14 nt, Human
uauuuuauuaugca

SEQ ID NO: 3080792 - RNA, 23 nt, Human
ucaaauauauucagccuggcuuc

SEQ ID NO: 3080793 - RNA, 22 nt, Human
ucaaauauauucagccuggcuu

SEQ ID NO: 3080794 - RNA, 21 nt, Human
ucaaauauauucagccuggcu

SEQ ID NO: 3080795 - RNA, 20 nt, Human
ucaaaucaagaaacuuaagg

SEQ ID NO: 3080796 - RNA, 14 nt, Human
ucaaauaugcaaag

SEQ ID NO: 3080797 - RNA, 20 nt, Human
ucaaauuguaagcaugcaca

SEQ ID NO: 3080798 - RNA, 17 nt, Human
ucaaauuguaagcaugc

SEQ ID NO: 3080799 - RNA, 14 nt, Human
ucaaauugugugaa

SEQ ID NO: 3080800 - RNA, 23 nt, Human
ucaaccccuucgcuccugugucu

SEQ ID NO: 3080801 - RNA, 20 nt, Human
ucaauuacaggaaguacugg

SEQ ID NO: 3080802 - RNA, 13 nt, Human
ucacaagacccaa

SEQ ID NO: 3080803 - RNA, 17 nt, Human
ucacaagacccaaaagg

SEQ ID NO: 3080804 - RNA, 22 nt, Human
ucacaguccuuaccagcagagc

SEQ ID NO: 3080805 - RNA, 23 nt, Human
ucacaguccuuaccagcagagca

SEQ ID NO: 3080806 - RNA, 19 nt, Human
ucacaguccuuaccagcag

SEQ ID NO: 3080807 - RNA, 16 nt, Human
ucacagucacauucca

SEQ ID NO: 3080808 - RNA, 18 nt, Human
ucacaggcagguccaggg

SEQ ID NO: 3080809 - RNA, 17 nt, Human
ucacaggcagguccagg

SEQ ID NO: 3080810 - RNA, 16 nt, Human
ucacaggcagguccag

SEQ ID NO: 3080811 - RNA, 20 nt, Human
ucaccaaaucagcugcuacu

SEQ ID NO: 3080812 - RNA, 19 nt, Human
ucaccaaaucagcugcuac

SEQ ID NO: 3080813 - RNA, 14 nt, Human
ucaccaaggcugau

SEQ ID NO: 3080814 - RNA, 17 nt, Human
ucacauuuauucugcuc

SEQ ID NO: 3080815 - RNA, 19 nt, Human
ucacauuuauucugcucac

SEQ ID NO: 3080816 - RNA, 18 nt, Human
ucacauuuauucugcuca

SEQ ID NO: 3080817 - RNA, 21 nt, Human
ucaauuacaggaaguacugga

SEQ ID NO: 3080818 - RNA, 23 nt, Human
ucaauuacaggaaguacuggaga

SEQ ID NO: 3080819 - RNA, 17 nt, Human
ucaaugccccugaauuu

SEQ ID NO: 3080820 - RNA, 18 nt, Human
ucaaugccccugaauuua

SEQ ID NO: 3080821 - RNA, 20 nt, Human
ucaaugccccugaauuuaaa

SEQ ID NO: 3080822 - RNA, 13 nt, Human
ucaaugcagcccc

SEQ ID NO: 3080823 - RNA, 20 nt, Human
ucaagugauucuccugccuc

SEQ ID NO: 3080824 - RNA, 18 nt, Human
ucaagugauucuccugcc

SEQ ID NO: 3080825 - RNA, 14 nt, Human
ucaauaaaauccau

SEQ ID NO: 3080826 - RNA, 21 nt, Human
ucaauaaaauccauacauuug

SEQ ID NO: 3080827 - RNA, 16 nt, Human
uauuauucccauucua

SEQ ID NO: 3080828 - RNA, 14 nt, Human
uauucuaaauuuua

SEQ ID NO: 3080829 - RNA, 15 nt, Human
uauucuaaauuuuau

SEQ ID NO: 3080830 - RNA, 19 nt, Human
uauucuaaauuuuauaucu

SEQ ID NO: 3080831 - RNA, 20 nt, Human
uauucuaaauuuuauaucuu

SEQ ID NO: 3080832 - RNA, 19 nt, Human
uauucuagcuaauguaaua

SEQ ID NO: 3080833 - RNA, 14 nt, Human
uauuguguugugaa

SEQ ID NO: 3080834 - RNA, 22 nt, Human
uauuggaaauuuguuauaauga

SEQ ID NO: 3080835 - RNA, 17 nt, Human
uauugcugauggugcaa

SEQ ID NO: 3080836 - RNA, 21 nt, Human
uauugauaugcuuauacacuu

SEQ ID NO: 3080837 - RNA, 17 nt, Human
uauucucuccuguaccu

SEQ ID NO: 3080838 - RNA, 24 nt, Human
uauuuauaaaaauaaaaaacacug

SEQ ID NO: 3080839 - RNA, 20 nt, Human
uauuguuuucaguguacaug

SEQ ID NO: 3080840 - RNA, 18 nt, Human
uauuguuuucaguguaca

SEQ ID NO: 3080841 - RNA, 22 nt, Human
uauuguuuucaguguacaugga

SEQ ID NO: 3080842 - RNA, 12 nt, Human
uauuguuuucag

SEQ ID NO: 3080843 - RNA, 12 nt, Human
uauuaauauauu

SEQ ID NO: 3080844 - RNA, 12 nt, Human
uauuaaauuaug

SEQ ID NO: 3080845 - RNA, 24 nt, Human
uauuaagaaagacuaucuaaaugu

SEQ ID NO: 3080846 - RNA, 12 nt, Human
uauguugcauag

SEQ ID NO: 3080847 - RNA, 13 nt, Human
uauguuucaaacu

SEQ ID NO: 3080848 - RNA, 15 nt, Human
uauguuucaaacuuu

SEQ ID NO: 3080849 - RNA, 16 nt, Human
uauguuucaaacuuug

SEQ ID NO: 3080850 - RNA, 20 nt, Human
uauguugcccaggcaggucu

SEQ ID NO: 3080851 - RNA, 16 nt, Human
uauguugcauagaaua

SEQ ID NO: 3080852 - RNA, 13 nt, Human
uauguugcccagg

SEQ ID NO: 3080853 - RNA, 19 nt, Human
uauguugcccaggcagguc

SEQ ID NO: 3080854 - RNA, 16 nt, Human
uauguugcccaggcag

SEQ ID NO: 3080855 - RNA, 13 nt, Human
gggaguggccaca

SEQ ID NO: 3080856 - RNA, 15 nt, Human
gggaguggccacaga

SEQ ID NO: 3080857 - RNA, 13 nt, Human
uauguacuucaug

SEQ ID NO: 3080858 - RNA, 17 nt, Human
uauguacuucaugcugu

SEQ ID NO: 3080859 - RNA, 21 nt, Human
ucauucaacccaccugcgucu

SEQ ID NO: 3080860 - RNA, 20 nt, Human
ucauuaucucaaaacugcac

SEQ ID NO: 3080861 - RNA, 19 nt, Human
ucauuaucucaaaacugca

SEQ ID NO: 3080862 - RNA, 22 nt, Human
ucauuaggugugacugaauuuc

SEQ ID NO: 3080863 - RNA, 13 nt, Human
ucauuaucucaaa

SEQ ID NO: 3080864 - RNA, 18 nt, Human
ucauugugaaauuauuca

SEQ ID NO: 3080865 - RNA, 17 nt, Human
ucauugugaaauuauuc

SEQ ID NO: 3080866 - RNA, 15 nt, Human
ucauugugaaauuau

SEQ ID NO: 3080867 - RNA, 12 nt, Human
ucauugugaaau

SEQ ID NO: 3080868 - RNA, 16 nt, Human
ucauuuccugugucuu

SEQ ID NO: 3080869 - RNA, 13 nt, Human
ucauuuccugugu

SEQ ID NO: 3080870 - RNA, 16 nt, Human
ucauuuccaagcaagu

SEQ ID NO: 3080871 - RNA, 13 nt, Human
ucauuuccaagca

SEQ ID NO: 3080872 - RNA, 17 nt, Human
ucaucugacuaugacau

SEQ ID NO: 3080873 - RNA, 18 nt, Human
ucaucugacuaugacaua

SEQ ID NO: 3080874 - RNA, 23 nt, Human
ucaucuuagguuggcaaaaaggc

SEQ ID NO: 3080875 - RNA, 21 nt, Human
ucauacccacccccacccaag

SEQ ID NO: 3080876 - RNA, 18 nt, Human
ucauaccuaucaucuuaa

SEQ ID NO: 3080877 - RNA, 21 nt, Human
ucaggugagaagcagaggaag

SEQ ID NO: 3080878 - RNA, 23 nt, Human
ucaggugccucaagagaaggcaa

SEQ ID NO: 3080879 - RNA, 14 nt, Human
ucaggugcugccau

SEQ ID NO: 3080880 - RNA, 13 nt, Human
ucaggugcugcca

SEQ ID NO: 3080881 - RNA, 19 nt, Human
ucaucaccaacgucugugc

SEQ ID NO: 3080882 - RNA, 20 nt, Human
ucaucaccaacgucugugcc

SEQ ID NO: 3080883 - RNA, 21 nt, Human
ucaucaccaacgucugugcca

SEQ ID NO: 3080884 - RNA, 16 nt, Human
uccagguucagcuugu

SEQ ID NO: 3080885 - RNA, 15 nt, Human
uccagguucagcuug

SEQ ID NO: 3080886 - RNA, 18 nt, Human
uccaggugcacaagcucc

SEQ ID NO: 3080887 - RNA, 20 nt, Human
uccaggugcacaagcuccaa

SEQ ID NO: 3080888 - RNA, 21 nt, Human
uccaggugcacaagcuccaag

SEQ ID NO: 3080889 - RNA, 22 nt, Human
uccaggugcacaagcuccaagc

SEQ ID NO: 3080890 - RNA, 23 nt, Human
uccaggggugggacacccuguga

SEQ ID NO: 3080891 - RNA, 15 nt, Human
uccaggugcacaagc

SEQ ID NO: 3080892 - RNA, 17 nt, Human
uccaggagcagccacau

SEQ ID NO: 3080893 - RNA, 18 nt, Human
uccaggagcagccacauu

SEQ ID NO: 3080894 - RNA, 22 nt, Human
uccaggagcagccacauuccug

SEQ ID NO: 3080895 - RNA, 22 nt, Human
uccaggggugggacacccugug

SEQ ID NO: 3080896 - RNA, 23 nt, Human
uccagccaaagccuccuccagcc

SEQ ID NO: 3080897 - RNA, 14 nt, Human
uccacuuggucugu

SEQ ID NO: 3080898 - RNA, 15 nt, Human
uccacuuggucugug

SEQ ID NO: 3080899 - RNA, 16 nt, Human
uccacuuggucuguga

SEQ ID NO: 3080900 - RNA, 17 nt, Human
uccagcucaccagcccc

SEQ ID NO: 3080901 - RNA, 16 nt, Human
uccagcucaccagccc

SEQ ID NO: 3080902 - RNA, 18 nt, Human
uccagcucaccagcccca

SEQ ID NO: 3080903 - RNA, 15 nt, Human
uccagcucaccagcc

SEQ ID NO: 3080904 - RNA, 17 nt, Human
uccagcuguucagcugg

SEQ ID NO: 3080905 - RNA, 16 nt, Human
uccaggagcagccaca

SEQ ID NO: 3080906 - RNA, 19 nt, Human
uccaaaauaauuuuaagaa

SEQ ID NO: 3080907 - RNA, 15 nt, Human
uccaaaauaauuuua

SEQ ID NO: 3080908 - RNA, 18 nt, Human
uccaaaauaaaacuuuuu

SEQ ID NO: 3080909 - RNA, 20 nt, Human
uccaaaauaaaacuuuuuaa

SEQ ID NO: 3080910 - RNA, 18 nt, Human
uccaauuuacauacucug

SEQ ID NO: 3080911 - RNA, 17 nt, Human
uccaauuuacauacucu

SEQ ID NO: 3080912 - RNA, 16 nt, Human
uccacaagagcccagg

SEQ ID NO: 3080913 - RNA, 17 nt, Human
uccacaagagcccaggc

SEQ ID NO: 3080914 - RNA, 18 nt, Human
uccacaagagcccaggcc

SEQ ID NO: 3080915 - RNA, 15 nt, Human
uccacaagagcccag

SEQ ID NO: 3080916 - RNA, 18 nt, Human
uccacaaguuaaauaaau

SEQ ID NO: 3080917 - RNA, 17 nt, Human
uccacaaguuaaauaaa

SEQ ID NO: 3080918 - RNA, 12 nt, Human
uccacccugcuc

SEQ ID NO: 3080919 - RNA, 19 nt, Human
uccacagaagcuccaggua

SEQ ID NO: 3080920 - RNA, 17 nt, Human
uccaccugccagggaca

SEQ ID NO: 3080921 - RNA, 15 nt, Human
uccaccugccaggga

SEQ ID NO: 3080922 - RNA, 18 nt, Human
uccaccugccagggacag

SEQ ID NO: 3080923 - RNA, 21 nt, Human
uccaccugccagggacagagg

SEQ ID NO: 3080924 - RNA, 18 nt, Human
ucaggagcccugggaggc

SEQ ID NO: 3080925 - RNA, 19 nt, Human
ucaggagcccugggaggcu

SEQ ID NO: 3080926 - RNA, 23 nt, Human
ucaggagcccugggaggcucugg

SEQ ID NO: 3080927 - RNA, 20 nt, Human
ucaggagcccugggaggcuc

SEQ ID NO: 3080928 - RNA, 13 nt, Human
ucaggcuagaugu

SEQ ID NO: 3080929 - RNA, 17 nt, Human
ucaggcuagauguaugu

SEQ ID NO: 3080930 - RNA, 15 nt, Human
ucaggugagaagcag

SEQ ID NO: 3080931 - RNA, 16 nt, Human
ucaggugagaagcaga

SEQ ID NO: 3080932 - RNA, 14 nt, Human
ucagggccuggcuc

SEQ ID NO: 3080933 - RNA, 16 nt, Human
ucagggccuggcucag

SEQ ID NO: 3080934 - RNA, 15 nt, Human
ucagcugaaccuggg

SEQ ID NO: 3080935 - RNA, 16 nt, Human
ucagcugaaccugggu

SEQ ID NO: 3080936 - RNA, 18 nt, Human
ucagcuccccucggagaa

SEQ ID NO: 3080937 - RNA, 17 nt, Human
ucagcuccccucggaga

SEQ ID NO: 3080938 - RNA, 22 nt, Human
ucagccucccgaguagcuggga

SEQ ID NO: 3080939 - RNA, 21 nt, Human
ucagccucccgaguagcuggg

SEQ ID NO: 3080940 - RNA, 18 nt, Human
ucagccugcuccagcugu

SEQ ID NO: 3080941 - RNA, 19 nt, Human
ucagccugcuccagcuguu

SEQ ID NO: 3080942 - RNA, 21 nt, Human
ucagccucccaaagugcuggg

SEQ ID NO: 3080943 - RNA, 19 nt, Human
ucagccucccaaagugcug

SEQ ID NO: 3080944 - RNA, 14 nt, Human
ucagccucccaaag

SEQ ID NO: 3080945 - RNA, 13 nt, Human
ucagccucccaaa

SEQ ID NO: 3080946 - RNA, 22 nt, Human
ucagccucccgaauagcuggga

SEQ ID NO: 3080947 - RNA, 21 nt, Human
ucagccucccgaauagcuggg

SEQ ID NO: 3080948 - RNA, 18 nt, Human
ucagccucccgaguagcu

SEQ ID NO: 3080949 - RNA, 20 nt, Human
ucagccucccgaguagcugg

SEQ ID NO: 3080950 - RNA, 15 nt, Human
ucagauaugauucaa

SEQ ID NO: 3080951 - RNA, 18 nt, Human
ucacugccaugccagcuu

SEQ ID NO: 3080952 - RNA, 20 nt, Human
ucacucuuauugcccacgcu

SEQ ID NO: 3080953 - RNA, 22 nt, Human
ucaccccggccaccugcggugc

SEQ ID NO: 3080954 - RNA, 13 nt, Human
ucaccagccccag

SEQ ID NO: 3080955 - RNA, 22 nt, Human
ucacucugucgcccagucugga

SEQ ID NO: 3080956 - RNA, 17 nt, Human
ucacucuuauugcccac

SEQ ID NO: 3080957 - RNA, 14 nt, Human
ucacugcuuaacuu

SEQ ID NO: 3080958 - RNA, 20 nt, Human
ucacugcuuaacuucacaua

SEQ ID NO: 3080959 - RNA, 22 nt, Human
ucagaguaauccaagcaaaugu

SEQ ID NO: 3080960 - RNA, 21 nt, Human
ucagaguaauccaagcaaaug

SEQ ID NO: 3080961 - RNA, 13 nt, Human
ucagacagcugcc

SEQ ID NO: 3080962 - RNA, 16 nt, Human
ucagaauucucuaguu

SEQ ID NO: 3080963 - RNA, 15 nt, Human
ucagaaauguguuau

SEQ ID NO: 3080964 - RNA, 23 nt, Human
ucagaauucucuaguuugauuaa

SEQ ID NO: 3080965 - RNA, 10 nt, Human
ucagaaaugu

SEQ ID NO: 3080966 - RNA, 20 nt, Human
ucacuuguuuuauuuaaccu

SEQ ID NO: 3080967 - RNA, 19 nt, Human
ggcucuggagcccacugua

SEQ ID NO: 3080968 - RNA, 17 nt, Human
ggcucuggagcccacug

SEQ ID NO: 3080969 - RNA, 16 nt, Human
ggcucuggagcccacu

SEQ ID NO: 3080970 - RNA, 16 nt, Human
ggcucugccucccauc

SEQ ID NO: 3080971 - RNA, 14 nt, Human
ggcucugcccuugg

SEQ ID NO: 3080972 - RNA, 15 nt, Human
ggcucugcccuuggu

SEQ ID NO: 3080973 - RNA, 13 nt, Human
ggcucugccuccc

SEQ ID NO: 3080974 - RNA, 15 nt, Human
ggcucugccucccau

SEQ ID NO: 3080975 - RNA, 12 nt, Human
ggcucugcccuu

SEQ ID NO: 3080976 - RNA, 14 nt, Human
ggcucucaggccag

SEQ ID NO: 3080977 - RNA, 17 nt, Human
ggcucucaggccagcug

SEQ ID NO: 3080978 - RNA, 18 nt, Human
ggcucucaggccagcugc

SEQ ID NO: 3080979 - RNA, 19 nt, Human
ggcucucaggccagcugcu

SEQ ID NO: 3080980 - RNA, 20 nt, Human
ggcucucaggccagcugcuu

SEQ ID NO: 3080981 - RNA, 15 nt, Human
ggcucucaggccagc

SEQ ID NO: 3080982 - RNA, 16 nt, Human
ggcucucaggccagcu

SEQ ID NO: 3080983 - RNA, 14 nt, Human
ggcuccaggcuccu

SEQ ID NO: 3080984 - RNA, 9 nt, Human
ggcuccaga

SEQ ID NO: 3080985 - RNA, 16 nt, Human
ggcuccacuuggucug

SEQ ID NO: 3080986 - RNA, 16 nt, Human
ggcucacccaguccug

SEQ ID NO: 3080987 - RNA, 13 nt, Human
ggcuaugcauuug

SEQ ID NO: 3080988 - RNA, 12 nt, Human
ggcuaugcauuu

SEQ ID NO: 3080989 - RNA, 13 nt, Human
ggcucacccaguc

SEQ ID NO: 3080990 - RNA, 10 nt, Human
ggcuccagac

SEQ ID NO: 3080991 - RNA, 14 nt, Human
ggcuccaggagcag

SEQ ID NO: 3080992 - RNA, 16 nt, Human
ggcuccaggagcagcc

SEQ ID NO: 3080993 - RNA, 17 nt, Human
ggcuccaggagcagcca

SEQ ID NO: 3080994 - RNA, 13 nt, Human
ggcuccaggagca

SEQ ID NO: 3080995 - RNA, 13 nt, Human
ggcuccaggcucc

SEQ ID NO: 3080996 - RNA, 12 nt, Human
ggcuccaggcuc

SEQ ID NO: 3080997 - RNA, 11 nt, Human
ggcgcugcccc

SEQ ID NO: 3080998 - RNA, 17 nt, Human
ggcgcugccccuggcag

SEQ ID NO: 3080999 - RNA, 15 nt, Human
ggcgcgguggcucac

SEQ ID NO: 3081000 - RNA, 23 nt, Human
ggcuauaggugcuacaaaaacac

SEQ ID NO: 3081001 - RNA, 20 nt, Human
ggcuaguaucaaaagaaaga

SEQ ID NO: 3081002 - RNA, 16 nt, Human
ggccucugcacucccc

SEQ ID NO: 3081003 - RNA, 14 nt, Human
ggccuccugugugu

SEQ ID NO: 3081004 - RNA, 20 nt, Human
ggccucgguguggagaagcg

SEQ ID NO: 3081005 - RNA, 22 nt, Human
ggccuagcauacguacacauuu

SEQ ID NO: 3081006 - RNA, 20 nt, Human
ggccuagcauacguacacau

SEQ ID NO: 3081007 - RNA, 22 nt, Human
ggccucaagugauucuccugcc

SEQ ID NO: 3081008 - RNA, 14 nt, Human
ggccucaagugauu

SEQ ID NO: 3081009 - RNA, 23 nt, Human
ggccgggaccccgagccuggcuc

SEQ ID NO: 3081010 - RNA, 22 nt, Human
ggccgggaccccgagccuggcu

SEQ ID NO: 3081011 - RNA, 14 nt, Human
ggcccagagggccu

SEQ ID NO: 3081012 - RNA, 17 nt, Human
ggcccagagggccugca

SEQ ID NO: 3081013 - RNA, 19 nt, Human
ggcccagagggccugcaag

SEQ ID NO: 3081014 - RNA, 20 nt, Human
ggcccagagggccugcaagg

SEQ ID NO: 3081015 - RNA, 19 nt, Human
ggccucugcggagcacacu

SEQ ID NO: 3081016 - RNA, 22 nt, Human
ggccucugcacuccccugcugg

SEQ ID NO: 3081017 - RNA, 18 nt, Human
ggccucugcacuccccug

SEQ ID NO: 3081018 - RNA, 19 nt, Human
ggccucugcacuccccugc

SEQ ID NO: 3081019 - RNA, 13 nt, Human
ggccuggccccuc

SEQ ID NO: 3081020 - RNA, 14 nt, Human
ggccuggccccuca

SEQ ID NO: 3081021 - RNA, 15 nt, Human
ggccuggccccucag

SEQ ID NO: 3081022 - RNA, 17 nt, Human
ggccuggccccucaggg

SEQ ID NO: 3081023 - RNA, 18 nt, Human
ggccuggccccucagggu

SEQ ID NO: 3081024 - RNA, 23 nt, Human
ggccuggccccucagggucccug

SEQ ID NO: 3081025 - RNA, 10 nt, Human
ggccuggccu

SEQ ID NO: 3081026 - RNA, 13 nt, Human
ggccuggccugag

SEQ ID NO: 3081027 - RNA, 14 nt, Human
ggccuggccugagc

SEQ ID NO: 3081028 - RNA, 15 nt, Human
ggccuggccugagcu

SEQ ID NO: 3081029 - RNA, 16 nt, Human
ggccuggccugagcug

SEQ ID NO: 3081030 - RNA, 23 nt, Human
ggccugggggcugggcagaggaa

SEQ ID NO: 3081031 - RNA, 23 nt, Human
ggcgcagcauauucaggaagcuc

SEQ ID NO: 3081032 - RNA, 24 nt, Human
ggcgcagcauauucaggaagcuca

SEQ ID NO: 3081033 - RNA, 15 nt, Human
gggacugagaaauuu

SEQ ID NO: 3081034 - RNA, 23 nt, Human
gggacucaaugcacugacauugu

SEQ ID NO: 3081035 - RNA, 21 nt, Human
gggacugaggggaggggagca

SEQ ID NO: 3081036 - RNA, 16 nt, Human
gggacucaaugcacug

SEQ ID NO: 3081037 - RNA, 19 nt, Human
gggacucaaugcacugaca

SEQ ID NO: 3081038 - RNA, 17 nt, Human
gggacucaaugcacuga

SEQ ID NO: 3081039 - RNA, 14 nt, Human
gggacacccuguga

SEQ ID NO: 3081040 - RNA, 21 nt, Human
gggaauguuugccucugccuc

SEQ ID NO: 3081041 - RNA, 19 nt, Human
gggaauguuugccucugcc

SEQ ID NO: 3081042 - RNA, 23 nt, Human
gggaggaucucuugagccuggga

SEQ ID NO: 3081043 - RNA, 21 nt, Human
gggaggauugcuugagcucag

SEQ ID NO: 3081044 - RNA, 22 nt, Human
gggaggauguucugggacacag

SEQ ID NO: 3081045 - RNA, 17 nt, Human
gggaggacgcucucugg

SEQ ID NO: 3081046 - RNA, 20 nt, Human
gggaggacgcucucuggccu

SEQ ID NO: 3081047 - RNA, 21 nt, Human
gggagugaguugauagcacag

SEQ ID NO: 3081048 - RNA, 23 nt, Human
gggaggauugcuugagcucagga

SEQ ID NO: 3081049 - RNA, 20 nt, Human
gggaggugggauccuccagg

SEQ ID NO: 3081050 - RNA, 22 nt, Human
gggagcugccuguucagcucca

SEQ ID NO: 3081051 - RNA, 21 nt, Human
gggagcugccuguucagcucc

SEQ ID NO: 3081052 - RNA, 13 nt, Human
gggagcugccugu

SEQ ID NO: 3081053 - RNA, 23 nt, Human
ggcucuggagcccacuguacuug

SEQ ID NO: 3081054 - RNA, 15 nt, Human
ggcugcuucaaggau

SEQ ID NO: 3081055 - RNA, 19 nt, Human
ggcugcuucaaggauccug

SEQ ID NO: 3081056 - RNA, 18 nt, Human
ggcuggagcuagaauuug

SEQ ID NO: 3081057 - RNA, 20 nt, Human
ggcugcuucaaggauccuga

SEQ ID NO: 3081058 - RNA, 20 nt, Human
ggcugggcucccuucccacc

SEQ ID NO: 3081059 - RNA, 21 nt, Human
ggcugggcucccuucccaccu

SEQ ID NO: 3081060 - RNA, 18 nt, Human
ggcugggcucccuuccca

SEQ ID NO: 3081061 - RNA, 18 nt, Human
ggcugggcuucaguggca

SEQ ID NO: 3081062 - RNA, 22 nt, Human
ggcugggcuucaguggcagcug

SEQ ID NO: 3081063 - RNA, 21 nt, Human
ggcugggcuucaguggcagcu

SEQ ID NO: 3081064 - RNA, 11 nt, Human
ggcugggcuuc

SEQ ID NO: 3081065 - RNA, 14 nt, Human
ggcugggggccuca

SEQ ID NO: 3081066 - RNA, 16 nt, Human
ggcugggggaagaagc

SEQ ID NO: 3081067 - RNA, 15 nt, Human
ggcuguuggcugggg

SEQ ID NO: 3081068 - RNA, 14 nt, Human
ggcuguuggcuggg

SEQ ID NO: 3081069 - RNA, 20 nt, Human
ggcuguuggcugggggccuc

SEQ ID NO: 3081070 - RNA, 16 nt, Human
ggcuguuggcuggggg

SEQ ID NO: 3081071 - RNA, 17 nt, Human
ggcuuggggaccagagc

SEQ ID NO: 3081072 - RNA, 18 nt, Human
ggcuuggggaccagagcu

SEQ ID NO: 3081073 - RNA, 21 nt, Human
ggcuucacggaagagccuugc

SEQ ID NO: 3081074 - RNA, 20 nt, Human
ggcuucacggaagagccuug

SEQ ID NO: 3081075 - RNA, 14 nt, Human
ggcuuagucacuga

SEQ ID NO: 3081076 - RNA, 18 nt, Human
ggaugaugacuauggaaa

SEQ ID NO: 3081077 - RNA, 18 nt, Human
ggaugcccaaagaugcag

SEQ ID NO: 3081078 - RNA, 15 nt, Human
ggaugccauccaagu

SEQ ID NO: 3081079 - RNA, 17 nt, Human
ggaugccugguggcagc

SEQ ID NO: 3081080 - RNA, 13 nt, Human
ggaugccuggugg

SEQ ID NO: 3081081 - RNA, 19 nt, Human
ggaugcccaaagaugcagc

SEQ ID NO: 3081082 - RNA, 23 nt, Human
ggagucccaccuuggcugcaggg

SEQ ID NO: 3081083 - RNA, 18 nt, Human
ggaugaucuaggaagacu

SEQ ID NO: 3081084 - RNA, 22 nt, Human
ggaugaucuaggaagacuuugg

SEQ ID NO: 3081085 - RNA, 16 nt, Human
ggaugaucuaggaaga

SEQ ID NO: 3081086 - RNA, 12 nt, Human
ggauuauauuau

SEQ ID NO: 3081087 - RNA, 17 nt, Human
ggauuagggagagaaga

SEQ ID NO: 3081088 - RNA, 21 nt, Human
ggaugccugguggcagcugcg

SEQ ID NO: 3081089 - RNA, 20 nt, Human
ggaugccugguggcagcugc

SEQ ID NO: 3081090 - RNA, 19 nt, Human
ggaugccugguggcagcug

SEQ ID NO: 3081091 - RNA, 18 nt, Human
ggaugccugguggcagcu

SEQ ID NO: 3081092 - RNA, 22 nt, Human
ggcagagcagagaccaucccug

SEQ ID NO: 3081093 - RNA, 21 nt, Human
ggcagagguugcagugagccg

SEQ ID NO: 3081094 - RNA, 19 nt, Human
ggcacucagaagacacuga

SEQ ID NO: 3081095 - RNA, 18 nt, Human
ggcacucagaagacacug

SEQ ID NO: 3081096 - RNA, 17 nt, Human
ggcacccggccccugcu

SEQ ID NO: 3081097 - RNA, 20 nt, Human
ggcacccggccccugcuggu

SEQ ID NO: 3081098 - RNA, 19 nt, Human
ggcacccggccccugcugg

SEQ ID NO: 3081099 - RNA, 18 nt, Human
ggcacccggccccugcug

SEQ ID NO: 3081100 - RNA, 17 nt, Human
ggcaccagcagccugga

SEQ ID NO: 3081101 - RNA, 19 nt, Human
ggcaagcaccuccugccuc

SEQ ID NO: 3081102 - RNA, 18 nt, Human
ggcaagcaccuccugccu

SEQ ID NO: 3081103 - RNA, 16 nt, Human
ggauucuuccucccuc

SEQ ID NO: 3081104 - RNA, 21 nt, Human
ggauucuuccucccucccucu

SEQ ID NO: 3081105 - RNA, 17 nt, Human
ggcaagcaccuccugcc

SEQ ID NO: 3081106 - RNA, 19 nt, Human
ggauugaaggaugcugucu

SEQ ID NO: 3081107 - RNA, 12 nt, Human
ggcccagagagg

SEQ ID NO: 3081108 - RNA, 15 nt, Human
ggccaggcccucugc

SEQ ID NO: 3081109 - RNA, 16 nt, Human
ggccaggcccucugcc

SEQ ID NO: 3081110 - RNA, 17 nt, Human
ggccaggcccucugccc

SEQ ID NO: 3081111 - RNA, 13 nt, Human
ggccaggagccuc

SEQ ID NO: 3081112 - RNA, 14 nt, Human
ggccaggcccucug

SEQ ID NO: 3081113 - RNA, 11 nt, Human
ggccaggagcc

SEQ ID NO: 3081114 - RNA, 20 nt, Human
ggccacugugaagagaacca

SEQ ID NO: 3081115 - RNA, 22 nt, Human
ggccacagaaaauucuucucca

SEQ ID NO: 3081116 - RNA, 20 nt, Human
ggcauguucucugaggacac

SEQ ID NO: 3081117 - RNA, 18 nt, Human
ggccaccgccuugcccag

SEQ ID NO: 3081118 - RNA, 20 nt, Human
ggccaccgccuugcccagcc

SEQ ID NO: 3081119 - RNA, 19 nt, Human
ggcagaguugaagacagag

SEQ ID NO: 3081120 - RNA, 21 nt, Human
ggcagaguugaagacagagcu

SEQ ID NO: 3081121 - RNA, 17 nt, Human
ggcagaguugaagacag

SEQ ID NO: 3081122 - RNA, 21 nt, Human
ggcagcugcgguccacccagg

SEQ ID NO: 3081123 - RNA, 12 nt, Human
ggcaggguccua

SEQ ID NO: 3081124 - RNA, 24 nt, Human
ggcagcugcgguccacccaggagc

SEQ ID NO: 3081125 - RNA, 23 nt, Human
ggcagcugcgguccacccaggag

SEQ ID NO: 3081126 - RNA, 17 nt, Human
ggcagguuggugggggc

SEQ ID NO: 3081127 - RNA, 18 nt, Human
ggcagggucucacucugu

SEQ ID NO: 3081128 - RNA, 17 nt, Human
ggcagggucucacucug

SEQ ID NO: 3081129 - RNA, 18 nt, Human
ggcaugugaugagaggaa

SEQ ID NO: 3081130 - RNA, 23 nt, Human
ggcaugugaugagaggaaaucac

SEQ ID NO: 3081131 - RNA, 22 nt, Human
ggcaugacacgaauauugcuga

SEQ ID NO: 3081132 - RNA, 17 nt, Human
ggaggcaggaguuucgu

SEQ ID NO: 3081133 - RNA, 17 nt, Human
ggagggagggcuccaga

SEQ ID NO: 3081134 - RNA, 13 nt, Human
ggagggagggcuc

SEQ ID NO: 3081135 - RNA, 16 nt, Human
ggagggagggcuccag

SEQ ID NO: 3081136 - RNA, 21 nt, Human
ggaggauguucugggacacag

SEQ ID NO: 3081137 - RNA, 18 nt, Human
ggaggauguucugggaca

SEQ ID NO: 3081138 - RNA, 16 nt, Human
ggaggacgcucucugg

SEQ ID NO: 3081139 - RNA, 15 nt, Human
ggaggauguucuggg

SEQ ID NO: 3081140 - RNA, 22 nt, Human
ggagucccaccuuggcugcagg

SEQ ID NO: 3081141 - RNA, 21 nt, Human
ggagucccaccuuggcugcag

SEQ ID NO: 3081142 - RNA, 19 nt, Human
ggaggggagcaugggaagu

SEQ ID NO: 3081143 - RNA, 19 nt, Human
ggagcccugggaggcucug

SEQ ID NO: 3081144 - RNA, 16 nt, Human
ggagcccugggaggcu

SEQ ID NO: 3081145 - RNA, 16 nt, Human
ggagcacacuggcuca

SEQ ID NO: 3081146 - RNA, 20 nt, Human
ggagcccugggaggcucugg

SEQ ID NO: 3081147 - RNA, 18 nt, Human
ggagcccugucuccucuc

SEQ ID NO: 3081148 - RNA, 14 nt, Human
ggagccuccugccc

SEQ ID NO: 3081149 - RNA, 15 nt, Human
ggagccuccugcccu

SEQ ID NO: 3081150 - RNA, 14 nt, Human
ggagcuagaauuug

SEQ ID NO: 3081151 - RNA, 14 nt, Human
ggacugagaaauuu

SEQ ID NO: 3081152 - RNA, 17 nt, Human
ggacugaauuaugaaac

SEQ ID NO: 3081153 - RNA, 19 nt, Human
ggacugaauuaugaaacuu

SEQ ID NO: 3081154 - RNA, 19 nt, Human
ggacgcucucuggccuucg

SEQ ID NO: 3081155 - RNA, 15 nt, Human
ggacgcucucuggcc

SEQ ID NO: 3081156 - RNA, 16 nt, Human
ggacgcucucuggccu

SEQ ID NO: 3081157 - RNA, 18 nt, Human
ggaccuugaacuggguac

SEQ ID NO: 3081158 - RNA, 18 nt, Human
ggacugagaaauuuauaa

SEQ ID NO: 3081159 - RNA, 20 nt, Human
ggacugagggggccuggaug

SEQ ID NO: 3081160 - RNA, 15 nt, Human
ggagaagagcuguuc

SEQ ID NO: 3081161 - RNA, 11 nt, Human
ggagaagaacu

SEQ ID NO: 3081162 - RNA, 14 nt, Human
ggagaagaacugaa

SEQ ID NO: 3081163 - RNA, 23 nt, Human
ggagaagagcuguucacagccag

SEQ ID NO: 3081164 - RNA, 20 nt, Human
gcuuuuaugugaaacauguu

SEQ ID NO: 3081165 - RNA, 19 nt, Human
gcuuuuaugugaaacaugu

SEQ ID NO: 3081166 - RNA, 21 nt, Human
gcuuuuaugugaaacauguuu

SEQ ID NO: 3081167 - RNA, 22 nt, Human
ggacacucaaaagcugggcagg

SEQ ID NO: 3081168 - RNA, 16 nt, Human
ggacagaggggguggc

SEQ ID NO: 3081169 - RNA, 14 nt, Human
ggacagaagcagcu

SEQ ID NO: 3081170 - RNA, 17 nt, Human
ggacagaagcagcucuu

SEQ ID NO: 3081171 - RNA, 16 nt, Human
ggacagaagcagcucu

SEQ ID NO: 3081172 - RNA, 15 nt, Human
ggacagaagcagcuc

SEQ ID NO: 3081173 - RNA, 19 nt, Human
ggaccagagcugccaccug

SEQ ID NO: 3081174 - RNA, 14 nt, Human
ggaccagagcugcc

SEQ ID NO: 3081175 - RNA, 20 nt, Human
ggacauuugcucauggaauu

SEQ ID NO: 3081176 - RNA, 16 nt, Human
ggacauuugcucaugg

SEQ ID NO: 3081177 - RNA, 17 nt, Human
ggacauuugcucaugga

SEQ ID NO: 3081178 - RNA, 16 nt, Human
ggacagcuccuucugu

SEQ ID NO: 3081179 - RNA, 15 nt, Human
ggacagcuccuucug

SEQ ID NO: 3081180 - RNA, 11 nt, Human
ggacagcuccu

SEQ ID NO: 3081181 - RNA, 20 nt, Human
ggacagaggggguggccucc

SEQ ID NO: 3081182 - RNA, 22 nt, Human
ggacagccacggccaggccaga

SEQ ID NO: 3081183 - RNA, 18 nt, Human
gccuuggggcugaugcag

SEQ ID NO: 3081184 - RNA, 15 nt, Human
gccuuacacaauggu

SEQ ID NO: 3081185 - RNA, 12 nt, Human
gcgacaaugcaa

SEQ ID NO: 3081186 - RNA, 13 nt, Human
gcgacaaugcaaa

SEQ ID NO: 3081187 - RNA, 20 nt, Human
gcgacaaugcaaaccaucau

SEQ ID NO: 3081188 - RNA, 21 nt, Human
gcgacaaugcaaaccaucauu

SEQ ID NO: 3081189 - RNA, 23 nt, Human
gcgcccaguuggguggaugccug

SEQ ID NO: 3081190 - RNA, 21 nt, Human
gcgccuuaaggauguucuagc

SEQ ID NO: 3081191 - RNA, 14 nt, Human
gcggggacagcucc

SEQ ID NO: 3081192 - RNA, 19 nt, Human
gcggagacggagucccacc

SEQ ID NO: 3081193 - RNA, 16 nt, Human
gcggagaaaggaaggg

SEQ ID NO: 3081194 - RNA, 17 nt, Human
gcgcugccccuggcagc

SEQ ID NO: 3081195 - RNA, 18 nt, Human
gcgcugccccuggcagcc

SEQ ID NO: 3081196 - RNA, 21 nt, Human
gcgcugccccuggcagccccu

SEQ ID NO: 3081197 - RNA, 14 nt, Human
gcgguccacccagg

SEQ ID NO: 3081198 - RNA, 13 nt, Human
gcgguccacccag

SEQ ID NO: 3081199 - RNA, 19 nt, Human
gcggugagaggggaacaga

SEQ ID NO: 3081200 - RNA, 17 nt, Human
gcggggacagcuccuuc

SEQ ID NO: 3081201 - RNA, 15 nt, Human
gcggggacagcuccu

SEQ ID NO: 3081202 - RNA, 16 nt, Human
gccuggauggggcugc

SEQ ID NO: 3081203 - RNA, 18 nt, Human
gccuggauggggcugcac

SEQ ID NO: 3081204 - RNA, 20 nt, Human
gccuggauggggcugcaccg

SEQ ID NO: 3081205 - RNA, 18 nt, Human
gccugaagucacacagug

SEQ ID NO: 3081206 - RNA, 17 nt, Human
gccugaagucacacagu

SEQ ID NO: 3081207 - RNA, 17 nt, Human
gccugagcgacagugag

SEQ ID NO: 3081208 - RNA, 20 nt, Human
gccugagcgacagugagacu

SEQ ID NO: 3081209 - RNA, 16 nt, Human
gccugaagucacacag

SEQ ID NO: 3081210 - RNA, 15 nt, Human
gccugaagucacaca

SEQ ID NO: 3081211 - RNA, 21 nt, Human
gcccaguuggguggaugccug

SEQ ID NO: 3081212 - RNA, 19 nt, Human
gcccaguuggguggaugcc

SEQ ID NO: 3081213 - RNA, 12 nt, Human
gccugagcuggg

SEQ ID NO: 3081214 - RNA, 15 nt, Human
gccuguaauccuagc

SEQ ID NO: 3081215 - RNA, 20 nt, Human
gccuguaauccuagcacuuu

SEQ ID NO: 3081216 - RNA, 18 nt, Human
gccugggcagaaggaaga

SEQ ID NO: 3081217 - RNA, 13 nt, Human
gccuggccccuca

SEQ ID NO: 3081218 - RNA, 14 nt, Human
gccuggccccucag

SEQ ID NO: 3081219 - RNA, 21 nt, Human
gccuggccagaugcaccagcc

SEQ ID NO: 3081220 - RNA, 16 nt, Human
gccuggccagaugcac

SEQ ID NO: 3081221 - RNA, 20 nt, Human
gccuggccagaugcaccagc

SEQ ID NO: 3081222 - RNA, 18 nt, Human
gcucauggacuucugcca

SEQ ID NO: 3081223 - RNA, 23 nt, Human
gcucagcggggacagcuccuucu

SEQ ID NO: 3081224 - RNA, 18 nt, Human
gcucagcggggacagcuc

SEQ ID NO: 3081225 - RNA, 17 nt, Human
gcucagcggggacagcu

SEQ ID NO: 3081226 - RNA, 16 nt, Human
gcucagcggggacagc

SEQ ID NO: 3081227 - RNA, 15 nt, Human
gcucaccagccccag

SEQ ID NO: 3081228 - RNA, 14 nt, Human
gcucaccagcccca

SEQ ID NO: 3081229 - RNA, 13 nt, Human
gcucaccagcccc

SEQ ID NO: 3081230 - RNA, 12 nt, Human
gcucaccagccc

SEQ ID NO: 3081231 - RNA, 16 nt, Human
gcucacauaucuguca

SEQ ID NO: 3081232 - RNA, 14 nt, Human
gcucaccucucccu

SEQ ID NO: 3081233 - RNA, 16 nt, Human
gcucaccucucccuug

SEQ ID NO: 3081234 - RNA, 17 nt, Human
gcucaccucucccuugg

SEQ ID NO: 3081235 - RNA, 18 nt, Human
gcucaccucucccuugga

SEQ ID NO: 3081236 - RNA, 16 nt, Human
gcuaucguaaaauuaa

SEQ ID NO: 3081237 - RNA, 15 nt, Human
gcuaucguaaaauua

SEQ ID NO: 3081238 - RNA, 17 nt, Human
gcuaucguaaaauuaag

SEQ ID NO: 3081239 - RNA, 13 nt, Human
gcuaucuccccca

SEQ ID NO: 3081240 - RNA, 18 nt, Human
gcucaaguccucuuuucu

SEQ ID NO: 3081241 - RNA, 14 nt, Human
gcuaucucccccag

SEQ ID NO: 3081242 - RNA, 22 nt, Human
gcucaaguccucuuuucugaga

SEQ ID NO: 3081243 - RNA, 19 nt, Human
gcucaaguccucuuuucug

SEQ ID NO: 3081244 - RNA, 19 nt, Human
gcggugcuaucucccccag

SEQ ID NO: 3081245 - RNA, 22 nt, Human
gcggugcuaucucccccagccc

SEQ ID NO: 3081246 - RNA, 13 nt, Human
gcuagauguaugu

SEQ ID NO: 3081247 - RNA, 21 nt, Human
gcuaguugggcuuccucauag

SEQ ID NO: 3081248 - RNA, 14 nt, Human
gcuagauguaugua

SEQ ID NO: 3081249 - RNA, 19 nt, Human
gcuauaggugcuacaaaaa

SEQ ID NO: 3081250 - RNA, 21 nt, Human
gcuauaggugcuacaaaaaca

SEQ ID NO: 3081251 - RNA, 24 nt, Human
gcuccaggcuccuuuagcgcccag

SEQ ID NO: 3081252 - RNA, 12 nt, Human
gcuccaggcucc

SEQ ID NO: 3081253 - RNA, 15 nt, Human
gcuccaggagcagcc

SEQ ID NO: 3081254 - RNA, 16 nt, Human
gcuccaggagcagcca

SEQ ID NO: 3081255 - RNA, 17 nt, Human
gcuccaggagcagccac

SEQ ID NO: 3081256 - RNA, 18 nt, Human
gcuccaggagcagccaca

SEQ ID NO: 3081257 - RNA, 12 nt, Human
gcuccaggagca

SEQ ID NO: 3081258 - RNA, 14 nt, Human
gcuccaggagcagc

SEQ ID NO: 3081259 - RNA, 11 nt, Human
gcuccaggagc

SEQ ID NO: 3081260 - RNA, 21 nt, Human
gcuccagcuguucagcugguu

SEQ ID NO: 3081261 - RNA, 20 nt, Human
gcuccagcuguucagcuggu

SEQ ID NO: 3081262 - RNA, 20 nt, Human
gcuccauuuuuagugaaaua

SEQ ID NO: 3081263 - RNA, 19 nt, Human
gcucccuucccaccucucu

SEQ ID NO: 3081264 - RNA, 23 nt, Human
gcuccgcuuucuacccagcgagc

SEQ ID NO: 3081265 - RNA, 22 nt, Human
gcuccgcuuucuacccagcgag

SEQ ID NO: 3081266 - RNA, 21 nt, Human
gcuccgcuuucuacccagcga

SEQ ID NO: 3081267 - RNA, 18 nt, Human
gcuccgcuuucuacccag

SEQ ID NO: 3081268 - RNA, 20 nt, Human
gcucccuucccaccucucuc

SEQ ID NO: 3081269 - RNA, 13 nt, Human
gcuccugugucuu

SEQ ID NO: 3081270 - RNA, 12 nt, Human
gcuccugugucu

SEQ ID NO: 3081271 - RNA, 19 nt, Human
gcucgagcaugccuggaug

SEQ ID NO: 3081272 - RNA, 21 nt, Human
gcucgagcaugccuggauggg

SEQ ID NO: 3081273 - RNA, 17 nt, Human
gcucgagcaugccugga

SEQ ID NO: 3081274 - RNA, 17 nt, Human
gcuccuuuagcgcccag

SEQ ID NO: 3081275 - RNA, 13 nt, Human
gcuccuucugucc

SEQ ID NO: 3081276 - RNA, 24 nt, Human
gcuccgcuuucuacccagcgagcc

SEQ ID NO: 3081277 - RNA, 21 nt, Human
gcuccuaggacccgucuccag

SEQ ID NO: 3081278 - RNA, 22 nt, Human
gcuccuaggacccgucuccagc

SEQ ID NO: 3081279 - RNA, 19 nt, Human
gcucuugaugccuggcggg

SEQ ID NO: 3081280 - RNA, 21 nt, Human
gcucucaggccagcugcuugg

SEQ ID NO: 3081281 - RNA, 20 nt, Human
gcucucaggccagcugcuug

SEQ ID NO: 3081282 - RNA, 19 nt, Human
gcugacagacacaggcccg

SEQ ID NO: 3081283 - RNA, 18 nt, Human
gcugacagacacaggccc

SEQ ID NO: 3081284 - RNA, 17 nt, Human
gcugacagacacaggcc

SEQ ID NO: 3081285 - RNA, 22 nt, Human
gcugacuguuuucucuugagag

SEQ ID NO: 3081286 - RNA, 15 nt, Human
gcugaucgcuucucc

SEQ ID NO: 3081287 - RNA, 21 nt, Human
gcugauuaaaccaaggcuaga

SEQ ID NO: 3081288 - RNA, 22 nt, Human
gcugcaaaggguaucaggugcu

SEQ ID NO: 3081289 - RNA, 12 nt, Human
gcugccaccugc

SEQ ID NO: 3081290 - RNA, 20 nt, Human
gcugccaaugggagcucaug

SEQ ID NO: 3081291 - RNA, 18 nt, Human
gcugcauuuaaaagauac

SEQ ID NO: 3081292 - RNA, 17 nt, Human
gcugcauuuaaaagaua

SEQ ID NO: 3081293 - RNA, 19 nt, Human
gcugcauuuaaaagauaca

SEQ ID NO: 3081294 - RNA, 13 nt, Human
gcugcaguugcca

SEQ ID NO: 3081295 - RNA, 14 nt, Human
gcugcaguugccag

SEQ ID NO: 3081296 - RNA, 22 nt, Human
gcugcgguccacccaggagccc

SEQ ID NO: 3081297 - RNA, 21 nt, Human
gcugcgguccacccaggagcc

SEQ ID NO: 3081298 - RNA, 19 nt, Human
gcugcgguccacccaggag

SEQ ID NO: 3081299 - RNA, 15 nt, Human
gcugcgguccaccca

SEQ ID NO: 3081300 - RNA, 14 nt, Human
gcugcgguccaccc

SEQ ID NO: 3081301 - RNA, 19 nt, Human
gcugccuguucagcuccag

SEQ ID NO: 3081302 - RNA, 18 nt, Human
gcugccuguucagcucca

SEQ ID NO: 3081303 - RNA, 22 nt, Human
gcugccuguucagcuccagcuc

SEQ ID NO: 3081304 - RNA, 20 nt, Human
gcugccuguucagcuccagc

SEQ ID NO: 3081305 - RNA, 13 nt, Human
gcugcccugccca

SEQ ID NO: 3081306 - RNA, 14 nt, Human
gcugcccugcccac

SEQ ID NO: 3081307 - RNA, 12 nt, Human
gcugcccugccc

SEQ ID NO: 3081308 - RNA, 16 nt, Human
gcugcccugcccaccu

SEQ ID NO: 3081309 - RNA, 18 nt, Human
gcugcccugcccaccugg

SEQ ID NO: 3081310 - RNA, 20 nt, Human
gcugcccugcccaccuggcc

SEQ ID NO: 3081311 - RNA, 21 nt, Human
gcugcccugcccaccuggccu

SEQ ID NO: 3081312 - RNA, 22 nt, Human
gcugcccugcccaccuggccuc

SEQ ID NO: 3081313 - RNA, 23 nt, Human
gcugcccugcccaccuggccucu

SEQ ID NO: 3081314 - RNA, 24 nt, Human
gcugcccugcccaccuggccucug

SEQ ID NO: 3081315 - RNA, 15 nt, Human
gcuggaccuugaacu

SEQ ID NO: 3081316 - RNA, 22 nt, Human
gcugcuuuugucuaugggacuc

SEQ ID NO: 3081317 - RNA, 23 nt, Human
gcuggaaaaguauguuagugcaa

SEQ ID NO: 3081318 - RNA, 21 nt, Human
gcuggaaaaguauguuagugc

SEQ ID NO: 3081319 - RNA, 15 nt, Human
gcuuuuaugugaaac

SEQ ID NO: 3081320 - RNA, 13 nt, Human
gcuuuuaugugaa

SEQ ID NO: 3081321 - RNA, 12 nt, Human
gcuuguguuaag

SEQ ID NO: 3081322 - RNA, 18 nt, Human
gcuugcccuguuaaaaga

SEQ ID NO: 3081323 - RNA, 21 nt, Human
gcuucauccuccucagaucuu

SEQ ID NO: 3081324 - RNA, 20 nt, Human
gcuucaguggcagcugcuuu

SEQ ID NO: 3081325 - RNA, 19 nt, Human
gcuucaguggcagcugcuu

SEQ ID NO: 3081326 - RNA, 20 nt, Human
gcuuauacacuuacacuuua

SEQ ID NO: 3081327 - RNA, 18 nt, Human
gcuucauuuccugugucu

SEQ ID NO: 3081328 - RNA, 22 nt, Human
gcuucucacugccaugccagcu

SEQ ID NO: 3081329 - RNA, 17 nt, Human
gcuucucacugccaugc

SEQ ID NO: 3081330 - RNA, 19 nt, Human
gcuucuguuuuauaauuuu

SEQ ID NO: 3081331 - RNA, 18 nt, Human
gcuguguuaaauaaaccu

SEQ ID NO: 3081332 - RNA, 16 nt, Human
gcuguguggcagucug

SEQ ID NO: 3081333 - RNA, 15 nt, Human
gcugugucucccuuc

SEQ ID NO: 3081334 - RNA, 15 nt, Human
gcuggugucaccuga

SEQ ID NO: 3081335 - RNA, 14 nt, Human
gcuggugucaccug

SEQ ID NO: 3081336 - RNA, 17 nt, Human
gcugucagccauuccug

SEQ ID NO: 3081337 - RNA, 23 nt, Human
gcugucccuuacgugaguccugg

SEQ ID NO: 3081338 - RNA, 22 nt, Human
gcugucccuuacgugaguccug

SEQ ID NO: 3081339 - RNA, 16 nt, Human
gcugucccuuuuccuu

SEQ ID NO: 3081340 - RNA, 15 nt, Human
gcugggggccucagu

SEQ ID NO: 3081341 - RNA, 14 nt, Human
gcugggggccucag

SEQ ID NO: 3081342 - RNA, 13 nt, Human
gcugggggccuca

SEQ ID NO: 3081343 - RNA, 18 nt, Human
gcugggggccucagugcc

SEQ ID NO: 3081344 - RNA, 19 nt, Human
gcugggcuucaguggcagc

SEQ ID NO: 3081345 - RNA, 22 nt, Human
gcugggcuucaguggcagcugc

SEQ ID NO: 3081346 - RNA, 21 nt, Human
gcugggcuucaguggcagcug

SEQ ID NO: 3081347 - RNA, 20 nt, Human
gcugggcuucaguggcagcu

SEQ ID NO: 3081348 - RNA, 19 nt, Human
gcugggaugauuggagggg

SEQ ID NO: 3081349 - RNA, 21 nt, Human
gcugggcucccuucccaccuc

SEQ ID NO: 3081350 - RNA, 13 nt, Human
gcuggccuggccc

SEQ ID NO: 3081351 - RNA, 12 nt, Human
gcuggccuggcc

SEQ ID NO: 3081352 - RNA, 14 nt, Human
gcuggccuggcccc

SEQ ID NO: 3081353 - RNA, 15 nt, Human
gcuggccuggccccu

SEQ ID NO: 3081354 - RNA, 17 nt, Human
gcaccaucucuccuccu

SEQ ID NO: 3081355 - RNA, 14 nt, Human
gcaccaucucuccu

SEQ ID NO: 3081356 - RNA, 15 nt, Human
gcaccaucucuccuc

SEQ ID NO: 3081357 - RNA, 13 nt, Human
gcaccagcagccu

SEQ ID NO: 3081358 - RNA, 20 nt, Human
gauugugucucuugguccug

SEQ ID NO: 3081359 - RNA, 12 nt, Human
gcacagcaggcu

SEQ ID NO: 3081360 - RNA, 15 nt, Human
gcacagccucuuaga

SEQ ID NO: 3081361 - RNA, 17 nt, Human
gcacagcaggcugccag

SEQ ID NO: 3081362 - RNA, 23 nt, Human
gcacagcaggcugccagugccug

SEQ ID NO: 3081363 - RNA, 18 nt, Human
gcacagcaggcugccagu

SEQ ID NO: 3081364 - RNA, 22 nt, Human
gcacagcaggcugccagugccu

SEQ ID NO: 3081365 - RNA, 21 nt, Human
gcacagcuucauuuccugugu

SEQ ID NO: 3081366 - RNA, 23 nt, Human
gcacagcuucauuuccugugucu

SEQ ID NO: 3081367 - RNA, 14 nt, Human
gcacgugugugcac

SEQ ID NO: 3081368 - RNA, 20 nt, Human
gcacuaaggugugcucugau

SEQ ID NO: 3081369 - RNA, 19 nt, Human
gcacuaaggugugcucuga

SEQ ID NO: 3081370 - RNA, 16 nt, Human
gcacccucaggcaggu

SEQ ID NO: 3081371 - RNA, 19 nt, Human
gcacccucaggcagguggg

SEQ ID NO: 3081372 - RNA, 16 nt, Human
gcacgcacacugucug

SEQ ID NO: 3081373 - RNA, 15 nt, Human
gcacgcacacugucu

SEQ ID NO: 3081374 - RNA, 19 nt, Human
gcacuguuuuauuuuaauu

SEQ ID NO: 3081375 - RNA, 19 nt, Human
gcacuguggguagacacac

SEQ ID NO: 3081376 - RNA, 12 nt, Human
gcacugggcuug

SEQ ID NO: 3081377 - RNA, 12 nt, Human
gcacugcuucca

SEQ ID NO: 3081378 - RNA, 13 nt, Human
gcacugcuuccag

SEQ ID NO: 3081379 - RNA, 14 nt, Human
gcacugcuuccagu

SEQ ID NO: 3081380 - RNA, 15 nt, Human
gcacugcuuccagug

SEQ ID NO: 3081381 - RNA, 15 nt, Human
gcacuauaauguaag

SEQ ID NO: 3081382 - RNA, 14 nt, Human
gcacuauaauguaa

SEQ ID NO: 3081383 - RNA, 20 nt, Human
gcacuauaauguaagcucua

SEQ ID NO: 3081384 - RNA, 18 nt, Human
gcagcucagagagggugg

SEQ ID NO: 3081385 - RNA, 19 nt, Human
gcagcucagagaggguggg

SEQ ID NO: 3081386 - RNA, 16 nt, Human
gcaggaagcugugaga

SEQ ID NO: 3081387 - RNA, 17 nt, Human
gcagcucaccucucccu

SEQ ID NO: 3081388 - RNA, 20 nt, Human
gcagcucaccucucccuugg

SEQ ID NO: 3081389 - RNA, 21 nt, Human
gcagcucaccucucccuugga

SEQ ID NO: 3081390 - RNA, 14 nt, Human
gcagcucagagagg

SEQ ID NO: 3081391 - RNA, 16 nt, Human
gcagcucaccucuccc

SEQ ID NO: 3081392 - RNA, 18 nt, Human
gcagcagggagggcuucu

SEQ ID NO: 3081393 - RNA, 19 nt, Human
gcagcagggagggcuucug

SEQ ID NO: 3081394 - RNA, 19 nt, Human
gcagccucacaguccuuac

SEQ ID NO: 3081395 - RNA, 15 nt, Human
gcagccucacagucc

SEQ ID NO: 3081396 - RNA, 17 nt, Human
gcagccucacaguccuu

SEQ ID NO: 3081397 - RNA, 22 nt, Human
gcagauggaaugcuguguuaaa

SEQ ID NO: 3081398 - RNA, 18 nt, Human
gcagauggagaccccuug

SEQ ID NO: 3081399 - RNA, 23 nt, Human
gcagagguugcagugagccgaga

SEQ ID NO: 3081400 - RNA, 18 nt, Human
gcagagguugcagugagc

SEQ ID NO: 3081401 - RNA, 22 nt, Human
gcagagaccaucccugaaggcc

SEQ ID NO: 3081402 - RNA, 20 nt, Human
gcagagaccaucccugaagg

SEQ ID NO: 3081403 - RNA, 21 nt, Human
gcagagaccaucccugaaggc

SEQ ID NO: 3081404 - RNA, 19 nt, Human
gcagagaccaucccugaag

SEQ ID NO: 3081405 - RNA, 22 nt, Human
gcagacucuacagaggccaugg

SEQ ID NO: 3081406 - RNA, 19 nt, Human
gcagacucuacagaggcca

SEQ ID NO: 3081407 - RNA, 18 nt, Human
gcagacucuacagaggcc

SEQ ID NO: 3081408 - RNA, 17 nt, Human
gcagacucuacagaggc

SEQ ID NO: 3081409 - RNA, 14 nt, Human
gcacuugcagacuc

SEQ ID NO: 3081410 - RNA, 22 nt, Human
gcacuucgggaggucgaggcag

SEQ ID NO: 3081411 - RNA, 20 nt, Human
gcaucuagcaugucgucaaa

SEQ ID NO: 3081412 - RNA, 18 nt, Human
gcaucaggccaggcccuc

SEQ ID NO: 3081413 - RNA, 23 nt, Human
gcaucaggccaggcccucugccc

SEQ ID NO: 3081414 - RNA, 12 nt, Human
gcaucaggccag

SEQ ID NO: 3081415 - RNA, 23 nt, Human
gcaucagcugcugaaacaacaaa

SEQ ID NO: 3081416 - RNA, 22 nt, Human
gcaucagcugcugaaacaacaa

SEQ ID NO: 3081417 - RNA, 20 nt, Human
gcaugacacgaauauugcug

SEQ ID NO: 3081418 - RNA, 21 nt, Human
gcaugacacgaauauugcuga

SEQ ID NO: 3081419 - RNA, 18 nt, Human
gcaugaaguaauaugcac

SEQ ID NO: 3081420 - RNA, 22 nt, Human
gcaugacacgaauauugcugau

SEQ ID NO: 3081421 - RNA, 22 nt, Human
gcaugaaguaauaugcacacau

SEQ ID NO: 3081422 - RNA, 21 nt, Human
gcaugaaguaauaugcacaca

SEQ ID NO: 3081423 - RNA, 20 nt, Human
gcaugaaguaauaugcacac

SEQ ID NO: 3081424 - RNA, 13 nt, Human
gcauguuacauaa

SEQ ID NO: 3081425 - RNA, 14 nt, Human
gcaugccuggaugg

SEQ ID NO: 3081426 - RNA, 24 nt, Human
gcauuaucuagauacuguaucaug

SEQ ID NO: 3081427 - RNA, 22 nt, Human
gcauuaucuagauacuguauca

SEQ ID NO: 3081428 - RNA, 19 nt, Human
gcauuaucuagauacugua

SEQ ID NO: 3081429 - RNA, 12 nt, Human
gcauuccccagg

SEQ ID NO: 3081430 - RNA, 14 nt, Human
gcauuccccaggag

SEQ ID NO: 3081431 - RNA, 15 nt, Human
gcauuccccaggagg

SEQ ID NO: 3081432 - RNA, 16 nt, Human
gcauuccccaggaggc

SEQ ID NO: 3081433 - RNA, 17 nt, Human
gcauuccccaggaggcc

SEQ ID NO: 3081434 - RNA, 18 nt, Human
gcauuccccaggaggcca

SEQ ID NO: 3081435 - RNA, 19 nt, Human
gcauuccccaggaggccag

SEQ ID NO: 3081436 - RNA, 20 nt, Human
gcauuccccaggaggccagc

SEQ ID NO: 3081437 - RNA, 21 nt, Human
gcauuccccaggaggccagcc

SEQ ID NO: 3081438 - RNA, 22 nt, Human
gcauuccccaggaggccagccu

SEQ ID NO: 3081439 - RNA, 18 nt, Human
gcauuugaggucuguucu

SEQ ID NO: 3081440 - RNA, 19 nt, Human
gcaggucccuaauaaagcu

SEQ ID NO: 3081441 - RNA, 18 nt, Human
gcaggucccuaauaaagc

SEQ ID NO: 3081442 - RNA, 17 nt, Human
gcaggucccuaauaaag

SEQ ID NO: 3081443 - RNA, 16 nt, Human
gcaggucccuaauaaa

SEQ ID NO: 3081444 - RNA, 21 nt, Human
gcaggucccuaauaaagcugu

SEQ ID NO: 3081445 - RNA, 20 nt, Human
gcaggucccuaauaaagcug

SEQ ID NO: 3081446 - RNA, 23 nt, Human
gcaggucccuaauaaagcugugu

SEQ ID NO: 3081447 - RNA, 11 nt, Human
gcagugggagc

SEQ ID NO: 3081448 - RNA, 19 nt, Human
gcaguggugcgaucugggu

SEQ ID NO: 3081449 - RNA, 18 nt, Human
gcaguggugcgaucuggg

SEQ ID NO: 3081450 - RNA, 21 nt, Human
gcaguggugguuuucuguucu

SEQ ID NO: 3081451 - RNA, 20 nt, Human
gcaguggugguuuucuguuc

SEQ ID NO: 3081452 - RNA, 21 nt, Human
gcaguggugcgaucuggguuc

SEQ ID NO: 3081453 - RNA, 20 nt, Human
gcaguggugcgaucuggguu

SEQ ID NO: 3081454 - RNA, 19 nt, Human
gcaguggugguuuucuguu

SEQ ID NO: 3081455 - RNA, 22 nt, Human
gcaguggugcgaucuggguuca

SEQ ID NO: 3081456 - RNA, 19 nt, Human
gcauacguacacauuuuau

SEQ ID NO: 3081457 - RNA, 21 nt, Human
gcaguugaaaagacuccaaag

SEQ ID NO: 3081458 - RNA, 18 nt, Human
gcauacguacacauuuua

SEQ ID NO: 3081459 - RNA, 15 nt, Human
gcaguugaaaagacu

SEQ ID NO: 3081460 - RNA, 19 nt, Human
gcaguugaaaagacuccaa

SEQ ID NO: 3081461 - RNA, 16 nt, Human
gcaguugaaaagacuc

SEQ ID NO: 3081462 - RNA, 15 nt, Human
gcaggucccuaauaa

SEQ ID NO: 3081463 - RNA, 14 nt, Human
gcaggucccuaaua

SEQ ID NO: 3081464 - RNA, 19 nt, Human
gcaggguccuagaaauucc

SEQ ID NO: 3081465 - RNA, 16 nt, Human
gcagggucucacucug

SEQ ID NO: 3081466 - RNA, 22 nt, Human
gcagggcucagcggggacagcu

SEQ ID NO: 3081467 - RNA, 18 nt, Human
gcaggcagccaggccaca

SEQ ID NO: 3081468 - RNA, 17 nt, Human
gcaggcagccaggccac

SEQ ID NO: 3081469 - RNA, 13 nt, Human
gccaggcuggguc

SEQ ID NO: 3081470 - RNA, 16 nt, Human
gccagauuucacucuc

SEQ ID NO: 3081471 - RNA, 18 nt, Human
gccagauuucacucuccu

SEQ ID NO: 3081472 - RNA, 21 nt, Human
gccagauuucacucuccuugg

SEQ ID NO: 3081473 - RNA, 23 nt, Human
gccagggacagaggggguggccu

SEQ ID NO: 3081474 - RNA, 15 nt, Human
gccaggcuggucuca

SEQ ID NO: 3081475 - RNA, 16 nt, Human
gccagggacagagggg

SEQ ID NO: 3081476 - RNA, 18 nt, Human
gccagggacagagggggu

SEQ ID NO: 3081477 - RNA, 13 nt, Human
gccagggacagag

SEQ ID NO: 3081478 - RNA, 17 nt, Human
gccagucaccccggcca

SEQ ID NO: 3081479 - RNA, 18 nt, Human
gccagucaccccggccac

SEQ ID NO: 3081480 - RNA, 20 nt, Human
gccagucaccccggccaccu

SEQ ID NO: 3081481 - RNA, 17 nt, Human
gccagguuuuuggucug

SEQ ID NO: 3081482 - RNA, 16 nt, Human
gccauuuguguuuaua

SEQ ID NO: 3081483 - RNA, 23 nt, Human
gccaugggacagggaggacgcuc

SEQ ID NO: 3081484 - RNA, 22 nt, Human
gccaugggacagggaggacgcu

SEQ ID NO: 3081485 - RNA, 18 nt, Human
gccaugaggaacaaggca

SEQ ID NO: 3081486 - RNA, 19 nt, Human
gccaugagccgcccaaggc

SEQ ID NO: 3081487 - RNA, 21 nt, Human
gccaugagccgcccaaggccu

SEQ ID NO: 3081488 - RNA, 18 nt, Human
gccaugagccgcccaagg

SEQ ID NO: 3081489 - RNA, 13 nt, Human
gccaugccagcuu

SEQ ID NO: 3081490 - RNA, 18 nt, Human
gccaugccagcuuaucuc

SEQ ID NO: 3081491 - RNA, 19 nt, Human
gccaugccagcuuaucuca

SEQ ID NO: 3081492 - RNA, 24 nt, Human
gccaugcuccuggcccacugcauc

SEQ ID NO: 3081493 - RNA, 23 nt, Human
gccauccuggcccagggcaucug

SEQ ID NO: 3081494 - RNA, 14 nt, Human
gccagugccugggu

SEQ ID NO: 3081495 - RNA, 13 nt, Human
gccagugccuggg

SEQ ID NO: 3081496 - RNA, 12 nt, Human
gccagugccugg

SEQ ID NO: 3081497 - RNA, 20 nt, Human
gcccagagggccugcaaggg

SEQ ID NO: 3081498 - RNA, 21 nt, Human
gcccagagggccugcaaggga

SEQ ID NO: 3081499 - RNA, 22 nt, Human
gcccagagggccugcaagggag

SEQ ID NO: 3081500 - RNA, 11 nt, Human
gcccagccccu

SEQ ID NO: 3081501 - RNA, 12 nt, Human
gcccagccccuu

SEQ ID NO: 3081502 - RNA, 9 nt, Human
gcccagccc

SEQ ID NO: 3081503 - RNA, 14 nt, Human
gcccagagggccug

SEQ ID NO: 3081504 - RNA, 15 nt, Human
gcccagagggccugc

SEQ ID NO: 3081505 - RNA, 18 nt, Human
gcccagagggccugcaag

SEQ ID NO: 3081506 - RNA, 19 nt, Human
gcccagagggccugcaagg

SEQ ID NO: 3081507 - RNA, 12 nt, Human
gcccagagggcc

SEQ ID NO: 3081508 - RNA, 21 nt, Human
gcccaaugcacuuuguucugg

SEQ ID NO: 3081509 - RNA, 18 nt, Human
gcccaggaaaggcuccag

SEQ ID NO: 3081510 - RNA, 19 nt, Human
gcccaggaaaggcuccagg

SEQ ID NO: 3081511 - RNA, 20 nt, Human
gcccaggaaaggcuccagga

SEQ ID NO: 3081512 - RNA, 20 nt, Human
gcccaggcuggcgugcagug

SEQ ID NO: 3081513 - RNA, 19 nt, Human
gcccaggcuggcgugcagu

SEQ ID NO: 3081514 - RNA, 22 nt, Human
gcccaggcuggcgugcaguggu

SEQ ID NO: 3081515 - RNA, 19 nt, Human
gcccaggcuuagucacuga

SEQ ID NO: 3081516 - RNA, 21 nt, Human
gcccaggcuuagucacugaga

SEQ ID NO: 3081517 - RNA, 23 nt, Human
gcccaggcuuagucacugagaca

SEQ ID NO: 3081518 - RNA, 19 nt, Human
gcccagucuggaaugcagu

SEQ ID NO: 3081519 - RNA, 15 nt, Human
gcccaguugggugga

SEQ ID NO: 3081520 - RNA, 13 nt, Human
gcccagccccuuc

SEQ ID NO: 3081521 - RNA, 14 nt, Human
gcccagccccuucu

SEQ ID NO: 3081522 - RNA, 16 nt, Human
gcccagccccuucuga

SEQ ID NO: 3081523 - RNA, 17 nt, Human
gcccagccccuucugac

SEQ ID NO: 3081524 - RNA, 20 nt, Human
gcccagccccuucugaccca

SEQ ID NO: 3081525 - RNA, 24 nt, Human
gcccagccccuucugacccaugcu

SEQ ID NO: 3081526 - RNA, 14 nt, Human
gcccagccuggaug

SEQ ID NO: 3081527 - RNA, 16 nt, Human
gcccagccuggaugcc

SEQ ID NO: 3081528 - RNA, 16 nt, Human
gccacaagacccuugu

SEQ ID NO: 3081529 - RNA, 22 nt, Human
gccacaagacccuugugguccc

SEQ ID NO: 3081530 - RNA, 20 nt, Human
gccacagagaaaguacuucu

SEQ ID NO: 3081531 - RNA, 14 nt, Human
gccacagagaaagu

SEQ ID NO: 3081532 - RNA, 13 nt, Human
gccacagagaaag

SEQ ID NO: 3081533 - RNA, 19 nt, Human
gccacaccucuaucccggc

SEQ ID NO: 3081534 - RNA, 23 nt, Human
gccacagagaaaguacuucucca

SEQ ID NO: 3081535 - RNA, 23 nt, Human
gcauuuggugguuucagaaaugu

SEQ ID NO: 3081536 - RNA, 22 nt, Human
gcauuuggugguuucagaaaug

SEQ ID NO: 3081537 - RNA, 20 nt, Human
gcauuugaggucuguucuuu

SEQ ID NO: 3081538 - RNA, 19 nt, Human
gcauuugaggucuguucuu

SEQ ID NO: 3081539 - RNA, 21 nt, Human
gccaaggcugggggaagaagc

SEQ ID NO: 3081540 - RNA, 23 nt, Human
gccaaggugggaggauugcuuga

SEQ ID NO: 3081541 - RNA, 14 nt, Human
gccaaggugggagg

SEQ ID NO: 3081542 - RNA, 15 nt, Human
gccaaggugggagga

SEQ ID NO: 3081543 - RNA, 14 nt, Human
gccaccugcggugc

SEQ ID NO: 3081544 - RNA, 20 nt, Human
gccaccugcggugcuaucuc

SEQ ID NO: 3081545 - RNA, 22 nt, Human
gccaccugcggugcuaucuccc

SEQ ID NO: 3081546 - RNA, 19 nt, Human
gccacggccaggccagagg

SEQ ID NO: 3081547 - RNA, 17 nt, Human
gccacggccaggccaga

SEQ ID NO: 3081548 - RNA, 18 nt, Human
gccacggccaggccagag

SEQ ID NO: 3081549 - RNA, 13 nt, Human
gccaccgccuugc

SEQ ID NO: 3081550 - RNA, 16 nt, Human
gccaccgccuugccca

SEQ ID NO: 3081551 - RNA, 20 nt, Human
gccaccgccuugcccagccu

SEQ ID NO: 3081552 - RNA, 17 nt, Human
gccaccugccuguuggg

SEQ ID NO: 3081553 - RNA, 20 nt, Human
gccagagacacaagccuucg

SEQ ID NO: 3081554 - RNA, 10 nt, Human
gccagaggag

SEQ ID NO: 3081555 - RNA, 17 nt, Human
gccagagacacaagccu

SEQ ID NO: 3081556 - RNA, 19 nt, Human
gccagagacacaagccuuc

SEQ ID NO: 3081557 - RNA, 16 nt, Human
gccagagacacaagcc

SEQ ID NO: 3081558 - RNA, 19 nt, Human
gccagacuggcacaguuuu

SEQ ID NO: 3081559 - RNA, 18 nt, Human
gccagacuggcacaguuu

SEQ ID NO: 3081560 - RNA, 15 nt, Human
gccagacuggcacag

SEQ ID NO: 3081561 - RNA, 18 nt, Human
gccagaugcaccagcccu

SEQ ID NO: 3081562 - RNA, 17 nt, Human
gccagaugcaccagccc

SEQ ID NO: 3081563 - RNA, 16 nt, Human
gccagaugcaccagcc

SEQ ID NO: 3081564 - RNA, 23 nt, Human
gccagagggagugacagaggcag

SEQ ID NO: 3081565 - RNA, 12 nt, Human
gccagaggagag

SEQ ID NO: 3081566 - RNA, 13 nt, Human
gccagaggagaga

SEQ ID NO: 3081567 - RNA, 15 nt, Human
gccagaggagagagg

SEQ ID NO: 3081568 - RNA, 17 nt, Human
gccagaggagagaggac

SEQ ID NO: 3081569 - RNA, 19 nt, Human
gccagaggagagaggaccc

SEQ ID NO: 3081570 - RNA, 22 nt, Human
gccagaggagagaggacccccu

SEQ ID NO: 3081571 - RNA, 22 nt, Human
gccagagggagugacagaggca

SEQ ID NO: 3081572 - RNA, 21 nt, Human
gccagagggagugacagaggc

SEQ ID NO: 3081573 - RNA, 12 nt, Human
gaggauguucug

SEQ ID NO: 3081574 - RNA, 20 nt, Human
gaggauguucugggacacag

SEQ ID NO: 3081575 - RNA, 17 nt, Human
gaggauguucugggaca

SEQ ID NO: 3081576 - RNA, 16 nt, Human
gaggauugcuugagcu

SEQ ID NO: 3081577 - RNA, 23 nt, Human
gaggaguuugggguaugggagag

SEQ ID NO: 3081578 - RNA, 13 nt, Human
gaggcagccccau

SEQ ID NO: 3081579 - RNA, 19 nt, Human
gaggcagagguugcaguga

SEQ ID NO: 3081580 - RNA, 22 nt, Human
gaggcagccccauucugccugc

SEQ ID NO: 3081581 - RNA, 21 nt, Human
gaggcagccccauucugccug

SEQ ID NO: 3081582 - RNA, 23 nt, Human
gaggcagccccauucugccugcc

SEQ ID NO: 3081583 - RNA, 13 nt, Human
gaggccagccuug

SEQ ID NO: 3081584 - RNA, 12 nt, Human
gaggccagccuu

SEQ ID NO: 3081585 - RNA, 23 nt, Human
gaggacagggaggugaccccagg

SEQ ID NO: 3081586 - RNA, 22 nt, Human
gaggacagggaggugaccccag

SEQ ID NO: 3081587 - RNA, 13 nt, Human
gaggacagggagg

SEQ ID NO: 3081588 - RNA, 15 nt, Human
gaggaauccagaccc

SEQ ID NO: 3081589 - RNA, 22 nt, Human
gaggaaggaaacccagcucugg

SEQ ID NO: 3081590 - RNA, 14 nt, Human
gaggaauccagacc

SEQ ID NO: 3081591 - RNA, 23 nt, Human
gaggcccuucucuccagccccug

SEQ ID NO: 3081592 - RNA, 24 nt, Human
gaggcccuucucuccagccccugg

SEQ ID NO: 3081593 - RNA, 22 nt, Human
gaggcccuucucuccagccccu

SEQ ID NO: 3081594 - RNA, 14 nt, Human
gaggccuucucuga

SEQ ID NO: 3081595 - RNA, 19 nt, Human
gaggcggaucuuuggacag

SEQ ID NO: 3081596 - RNA, 13 nt, Human
gaggcugggcucc

SEQ ID NO: 3081597 - RNA, 14 nt, Human
gaggcugggcuccc

SEQ ID NO: 3081598 - RNA, 15 nt, Human
gaggcugggcucccu

SEQ ID NO: 3081599 - RNA, 15 nt, Human
gagggagggagggcu

SEQ ID NO: 3081600 - RNA, 15 nt, Human
gagggagggcuccag

SEQ ID NO: 3081601 - RNA, 14 nt, Human
gagggagggagggc

SEQ ID NO: 3081602 - RNA, 14 nt, Human
gagggagugacaga

SEQ ID NO: 3081603 - RNA, 14 nt, Human
gagggagguaagga

SEQ ID NO: 3081604 - RNA, 13 nt, Human
gagggagugacag

SEQ ID NO: 3081605 - RNA, 14 nt, Human
gagggcacagaaaa

SEQ ID NO: 3081606 - RNA, 22 nt, Human
gagggcacagaaaauggaagac

SEQ ID NO: 3081607 - RNA, 23 nt, Human
gagggcacagaaaauggaagaca

SEQ ID NO: 3081608 - RNA, 22 nt, Human
gaggggccucuuaugggcuggg

SEQ ID NO: 3081609 - RNA, 12 nt, Human
gaggggccucuu

SEQ ID NO: 3081610 - RNA, 13 nt, Human
gagcaaagcugau

SEQ ID NO: 3081611 - RNA, 19 nt, Human
gagcaaaaucgaugcagug

SEQ ID NO: 3081612 - RNA, 21 nt, Human
gagcaagacgcugugcugccc

SEQ ID NO: 3081613 - RNA, 18 nt, Human
gagcaagacgcugugcug

SEQ ID NO: 3081614 - RNA, 22 nt, Human
gagcaagacgcugugcugcccu

SEQ ID NO: 3081615 - RNA, 17 nt, Human
gagcaccuuagacaguc

SEQ ID NO: 3081616 - RNA, 15 nt, Human
gagcacacuggcuca

SEQ ID NO: 3081617 - RNA, 20 nt, Human
gagaucaaccccuucgcucc

SEQ ID NO: 3081618 - RNA, 14 nt, Human
gagaucagccuggg

SEQ ID NO: 3081619 - RNA, 16 nt, Human
gagaucagccugggca

SEQ ID NO: 3081620 - RNA, 13 nt, Human
gagaucagccugg

SEQ ID NO: 3081621 - RNA, 13 nt, Human
gagauccuggacu

SEQ ID NO: 3081622 - RNA, 20 nt, Human
gagccacugcaccgggccac

SEQ ID NO: 3081623 - RNA, 21 nt, Human
gagcaggcuacugucagcucc

SEQ ID NO: 3081624 - RNA, 18 nt, Human
gagcagccacauuccuga

SEQ ID NO: 3081625 - RNA, 12 nt, Human
gagcccacgccc

SEQ ID NO: 3081626 - RNA, 15 nt, Human
gagcccacgccccca

SEQ ID NO: 3081627 - RNA, 16 nt, Human
gagcccacgcccccac

SEQ ID NO: 3081628 - RNA, 12 nt, Human
gagcccaggccu

SEQ ID NO: 3081629 - RNA, 13 nt, Human
gagcccaggccuc

SEQ ID NO: 3081630 - RNA, 14 nt, Human
gagcccaggccucc

SEQ ID NO: 3081631 - RNA, 11 nt, Human
gagcccacgcc

SEQ ID NO: 3081632 - RNA, 23 nt, Human
gagccauuugucccaagugccaa

SEQ ID NO: 3081633 - RNA, 18 nt, Human
gagccauuugucccaagu

SEQ ID NO: 3081634 - RNA, 19 nt, Human
gagccauuugucccaagug

SEQ ID NO: 3081635 - RNA, 20 nt, Human
gagccauuugucccaagugc

SEQ ID NO: 3081636 - RNA, 22 nt, Human
gagccauuugucccaagugcca

SEQ ID NO: 3081637 - RNA, 15 nt, Human
gagccauuuguccca

SEQ ID NO: 3081638 - RNA, 16 nt, Human
gagccauuugucccaa

SEQ ID NO: 3081639 - RNA, 17 nt, Human
gagccauuugucccaag

SEQ ID NO: 3081640 - RNA, 22 nt, Human
gagccacugcaccgggccacag

SEQ ID NO: 3081641 - RNA, 20 nt, Human
gagccuccugcccuuaccug

SEQ ID NO: 3081642 - RNA, 22 nt, Human
gagccuccugcccuuaccugcc

SEQ ID NO: 3081643 - RNA, 17 nt, Human
gagcccugguggcagug

SEQ ID NO: 3081644 - RNA, 19 nt, Human
gagccucagcauccuggca

SEQ ID NO: 3081645 - RNA, 16 nt, Human
gagcccugguggcagu

SEQ ID NO: 3081646 - RNA, 15 nt, Human
gagcccugguggcag

SEQ ID NO: 3081647 - RNA, 14 nt, Human
gagccuccugcccu

SEQ ID NO: 3081648 - RNA, 21 nt, Human
gagccucagcauccuggcacc

SEQ ID NO: 3081649 - RNA, 20 nt, Human
gagccucagcauccuggcac

SEQ ID NO: 3081650 - RNA, 12 nt, Human
gagcuacaaaug

SEQ ID NO: 3081651 - RNA, 13 nt, Human
gagcuacaaaugc

SEQ ID NO: 3081652 - RNA, 13 nt, Human
gagccugggaggu

SEQ ID NO: 3081653 - RNA, 21 nt, Human
gagccugggaggucaaggcug

SEQ ID NO: 3081654 - RNA, 10 nt, Human
gagccuggca

SEQ ID NO: 3081655 - RNA, 15 nt, Human
gagccuggcaagaau

SEQ ID NO: 3081656 - RNA, 14 nt, Human
gagcuacaaaugca

SEQ ID NO: 3081657 - RNA, 23 nt, Human
gagcuacacaggggaaaagagga

SEQ ID NO: 3081658 - RNA, 15 nt, Human
gagcugccaccugcc

SEQ ID NO: 3081659 - RNA, 16 nt, Human
gagcugccaccugccu

SEQ ID NO: 3081660 - RNA, 13 nt, Human
gagcugccaccug

SEQ ID NO: 3081661 - RNA, 19 nt, Human
gauucaacagguuuuccug

SEQ ID NO: 3081662 - RNA, 19 nt, Human
gauuaaccacuucagcuga

SEQ ID NO: 3081663 - RNA, 21 nt, Human
gauuaaccacuucagcugacu

SEQ ID NO: 3081664 - RNA, 18 nt, Human
gauuaaccacuucagcug

SEQ ID NO: 3081665 - RNA, 19 nt, Human
gauuaaauucuugcaaagu

SEQ ID NO: 3081666 - RNA, 12 nt, Human
gauuaaauucuu

SEQ ID NO: 3081667 - RNA, 15 nt, Human
gauguuuuccaugag

SEQ ID NO: 3081668 - RNA, 23 nt, Human
gauguuuuccaugaguccccugu

SEQ ID NO: 3081669 - RNA, 14 nt, Human
gauguuuuccauga

SEQ ID NO: 3081670 - RNA, 21 nt, Human
gauguuuuaaggaugcuugua

SEQ ID NO: 3081671 - RNA, 21 nt, Human
gauguucuuucacccuuuucu

SEQ ID NO: 3081672 - RNA, 16 nt, Human
gauguucugggacaca

SEQ ID NO: 3081673 - RNA, 14 nt, Human
gauguucugggaca

SEQ ID NO: 3081674 - RNA, 23 nt, Human
gauggugcaaugaccuuucaaua

SEQ ID NO: 3081675 - RNA, 20 nt, Human
gauggugcaaugaccuuuca

SEQ ID NO: 3081676 - RNA, 18 nt, Human
gaugggccaccgccuugc

SEQ ID NO: 3081677 - RNA, 12 nt, Human
gauucagacagc

SEQ ID NO: 3081678 - RNA, 22 nt, Human
gauucccaagcucugcuccucu

SEQ ID NO: 3081679 - RNA, 21 nt, Human
gauucccaagcucugcuccuc

SEQ ID NO: 3081680 - RNA, 23 nt, Human
gauugacgggacuguugguauug

SEQ ID NO: 3081681 - RNA, 18 nt, Human
gauugcuugagcucagga

SEQ ID NO: 3081682 - RNA, 15 nt, Human
gauuguccccgaccc

SEQ ID NO: 3081683 - RNA, 20 nt, Human
gauuguccccgacccuugcc

SEQ ID NO: 3081684 - RNA, 13 nt, Human
gauugugccccug

SEQ ID NO: 3081685 - RNA, 18 nt, Human
gaugcaguucugaagaag

SEQ ID NO: 3081686 - RNA, 14 nt, Human
gaugacuauggaaa

SEQ ID NO: 3081687 - RNA, 20 nt, Human
gaugaccuugaaugaugcca

SEQ ID NO: 3081688 - RNA, 11 nt, Human
gaugagaaagg

SEQ ID NO: 3081689 - RNA, 22 nt, Human
gaugagaaagguugaagcacca

SEQ ID NO: 3081690 - RNA, 21 nt, Human
gaugccuggcgggguggggug

SEQ ID NO: 3081691 - RNA, 22 nt, Human
gaugcuagaacucccuuucaac

SEQ ID NO: 3081692 - RNA, 22 nt, Human
gaugggcaacccccagccugcu

SEQ ID NO: 3081693 - RNA, 16 nt, Human
gaugggaaagcauugu

SEQ ID NO: 3081694 - RNA, 16 nt, Human
gaucuucaucugacua

SEQ ID NO: 3081695 - RNA, 18 nt, Human
gauccucccaccucagcc

SEQ ID NO: 3081696 - RNA, 23 nt, Human
gaucuucaucugacuaugacaua

SEQ ID NO: 3081697 - RNA, 13 nt, Human
gaucuuuaaaaua

SEQ ID NO: 3081698 - RNA, 14 nt, Human
gaucuuuaaaauac

SEQ ID NO: 3081699 - RNA, 16 nt, Human
gaucuuugcagacagg

SEQ ID NO: 3081700 - RNA, 15 nt, Human
gaugaaaaaauaaca

SEQ ID NO: 3081701 - RNA, 13 nt, Human
gauccugagccag

SEQ ID NO: 3081702 - RNA, 14 nt, Human
gauccugagccaga

SEQ ID NO: 3081703 - RNA, 15 nt, Human
gauccugagccagau

SEQ ID NO: 3081704 - RNA, 19 nt, Human
gauccugagccagauuuca

SEQ ID NO: 3081705 - RNA, 20 nt, Human
gauccucccaccucagccuc

SEQ ID NO: 3081706 - RNA, 12 nt, Human
gauccuccaggu

SEQ ID NO: 3081707 - RNA, 19 nt, Human
gauccucccaccucagccu

SEQ ID NO: 3081708 - RNA, 11 nt, Human
gauccuccagg

SEQ ID NO: 3081709 - RNA, 18 nt, Human
gauccuaggcauuugcug

SEQ ID NO: 3081710 - RNA, 18 nt, Human
gauccuaguuccaccauc

SEQ ID NO: 3081711 - RNA, 15 nt, Human
gaucacgccacugca

SEQ ID NO: 3081712 - RNA, 14 nt, Human
gaucacgccacugc

SEQ ID NO: 3081713 - RNA, 13 nt, Human
gaucacgccacug

SEQ ID NO: 3081714 - RNA, 23 nt, Human
gaucaaccccuucgcuccugugu

SEQ ID NO: 3081715 - RNA, 21 nt, Human
gaguugaaaaucuuauaauuu

SEQ ID NO: 3081716 - RNA, 13 nt, Human
gaguucugguucc

SEQ ID NO: 3081717 - RNA, 17 nt, Human
gagugugccugaagucc

SEQ ID NO: 3081718 - RNA, 23 nt, Human
gaguucaucuugaauuguaagga

SEQ ID NO: 3081719 - RNA, 20 nt, Human
gaguucaucuugaauuguaa

SEQ ID NO: 3081720 - RNA, 15 nt, Human
gagucugaaggcugg

SEQ ID NO: 3081721 - RNA, 19 nt, Human
gagugaacaaauuuacaga

SEQ ID NO: 3081722 - RNA, 22 nt, Human
gagugaacaaauuuacagagac

SEQ ID NO: 3081723 - RNA, 12 nt, Human
gagugggcccaa

SEQ ID NO: 3081724 - RNA, 19 nt, Human
gagugucuuaauuaaaaga

SEQ ID NO: 3081725 - RNA, 21 nt, Human
gauauaaguguguguuuuuca

SEQ ID NO: 3081726 - RNA, 17 nt, Human
gauauaaguguguguuu

SEQ ID NO: 3081727 - RNA, 13 nt, Human
gauagccaaggcc

SEQ ID NO: 3081728 - RNA, 16 nt, Human
gauagcacagacccug

SEQ ID NO: 3081729 - RNA, 12 nt, Human
gauagccaaggc

SEQ ID NO: 3081730 - RNA, 19 nt, Human
gauagcacagacccugccc

SEQ ID NO: 3081731 - RNA, 13 nt, Human
gauagcagggcau

SEQ ID NO: 3081732 - RNA, 22 nt, Human
gaucaaccccuucgcuccugug

SEQ ID NO: 3081733 - RNA, 21 nt, Human
gaucaaccccuucgcuccugu

SEQ ID NO: 3081734 - RNA, 23 nt, Human
gauauaugcucugcauguuacau

SEQ ID NO: 3081735 - RNA, 21 nt, Human
gauaaucagugugucuaaauu

SEQ ID NO: 3081736 - RNA, 17 nt, Human
gauacaaaagcauguga

SEQ ID NO: 3081737 - RNA, 17 nt, Human
gauagcacagacccugc

SEQ ID NO: 3081738 - RNA, 18 nt, Human
gauagcacagacccugcc

SEQ ID NO: 3081739 - RNA, 18 nt, Human
gauacaaugcugugcccu

SEQ ID NO: 3081740 - RNA, 13 nt, Human
gauacaaugcugu

SEQ ID NO: 3081741 - RNA, 14 nt, Human
gagguucccuuuga

SEQ ID NO: 3081742 - RNA, 19 nt, Human
gagguucaaagauauuuug

SEQ ID NO: 3081743 - RNA, 16 nt, Human
gaguacguugugcauu

SEQ ID NO: 3081744 - RNA, 19 nt, Human
gagguuuuaaaaaaauccc

SEQ ID NO: 3081745 - RNA, 20 nt, Human
gaguacguugugcauuuggu

SEQ ID NO: 3081746 - RNA, 15 nt, Human
gaguacuacaguccu

SEQ ID NO: 3081747 - RNA, 18 nt, Human
gaguacguugugcauuug

SEQ ID NO: 3081748 - RNA, 17 nt, Human
gaguacguugugcauuu

SEQ ID NO: 3081749 - RNA, 18 nt, Human
gaguacuacaguccuccc

SEQ ID NO: 3081750 - RNA, 19 nt, Human
gaguacuacaguccuccca

SEQ ID NO: 3081751 - RNA, 21 nt, Human
gaggugggauccuccaggugc

SEQ ID NO: 3081752 - RNA, 22 nt, Human
gaggugggauccuccaggugca

SEQ ID NO: 3081753 - RNA, 18 nt, Human
gaggugggauccuccagg

SEQ ID NO: 3081754 - RNA, 15 nt, Human
gaggggggagguggg

SEQ ID NO: 3081755 - RNA, 15 nt, Human
gaggggguggccucc

SEQ ID NO: 3081756 - RNA, 22 nt, Human
gaggggggaggugggauccucc

SEQ ID NO: 3081757 - RNA, 17 nt, Human
gagucgaggacagggag

SEQ ID NO: 3081758 - RNA, 16 nt, Human
gagucgaggacaggga

SEQ ID NO: 3081759 - RNA, 21 nt, Human
gagucucacuguugcccaggc

SEQ ID NO: 3081760 - RNA, 20 nt, Human
gagucucacuguugcccagg

SEQ ID NO: 3081761 - RNA, 19 nt, Human
gagucucacuguugcccag

SEQ ID NO: 3081762 - RNA, 23 nt, Human
gagucucacuguugcccaggcug

SEQ ID NO: 3081763 - RNA, 22 nt, Human
gagucucacuguugcccaggcu

SEQ ID NO: 3081764 - RNA, 21 nt, Human
gagucugaaggcuggguucug

SEQ ID NO: 3081765 - RNA, 18 nt, Human
gaguauuuuugacagaau

SEQ ID NO: 3081766 - RNA, 21 nt, Human
gagucccaccuuggcugcagg

SEQ ID NO: 3081767 - RNA, 14 nt, Human
gaguauuuuugaca

SEQ ID NO: 3081768 - RNA, 16 nt, Human
gaguauuuuugacaga

SEQ ID NO: 3081769 - RNA, 17 nt, Human
gaguauuuuugacagaa

SEQ ID NO: 3081770 - RNA, 14 nt, Human
gaguagcugggacu

SEQ ID NO: 3081771 - RNA, 12 nt, Human
gaguagcuggga

SEQ ID NO: 3081772 - RNA, 14 nt, Human
gaguccccuguuug

SEQ ID NO: 3081773 - RNA, 23 nt, Human
gaguccccuguuuguuucugaaa

SEQ ID NO: 3081774 - RNA, 12 nt, Human
gaguccccuguu

SEQ ID NO: 3081775 - RNA, 17 nt, Human
cugauugugucucuugg

SEQ ID NO: 3081776 - RNA, 17 nt, Human
cugauggugcaaugacc

SEQ ID NO: 3081777 - RNA, 19 nt, Human
cugauggugcaaugaccuu

SEQ ID NO: 3081778 - RNA, 20 nt, Human
cugauggugcaaugaccuuu

SEQ ID NO: 3081779 - RNA, 21 nt, Human
cugauggugcaaugaccuuuc

SEQ ID NO: 3081780 - RNA, 21 nt, Human
cugauugugucucuugguccu

SEQ ID NO: 3081781 - RNA, 16 nt, Human
cugauuuuuuuuuccu

SEQ ID NO: 3081782 - RNA, 18 nt, Human
cugauuuuuuuuuccuuc

SEQ ID NO: 3081783 - RNA, 19 nt, Human
cugauuuuuuuuuccuuca

SEQ ID NO: 3081784 - RNA, 20 nt, Human
cugauuuuuuuuuccuucag

SEQ ID NO: 3081785 - RNA, 21 nt, Human
cugauuuuuuuuuccuucagu

SEQ ID NO: 3081786 - RNA, 22 nt, Human
cugauuuuuuuuuccuucagug

SEQ ID NO: 3081787 - RNA, 23 nt, Human
cugauuuuuuuuuccuucagugc

SEQ ID NO: 3081788 - RNA, 18 nt, Human
cugcaauaaggggagagu

SEQ ID NO: 3081789 - RNA, 22 nt, Human
cugcacaagcugcacccucagg

SEQ ID NO: 3081790 - RNA, 18 nt, Human
cugcacaagcugcacccu

SEQ ID NO: 3081791 - RNA, 19 nt, Human
cugcacagcaggcugccag

SEQ ID NO: 3081792 - RNA, 18 nt, Human
cugcacagcaggcugcca

SEQ ID NO: 3081793 - RNA, 16 nt, Human
cugcacuccccugcug

SEQ ID NO: 3081794 - RNA, 17 nt, Human
cugcacuccccugcugg

SEQ ID NO: 3081795 - RNA, 18 nt, Human
cugcacuugcagacucua

SEQ ID NO: 3081796 - RNA, 13 nt, Human
cugcacccucagg

SEQ ID NO: 3081797 - RNA, 14 nt, Human
cugcacccucaggc

SEQ ID NO: 3081798 - RNA, 20 nt, Human
cugcaccggcuggccuggcc

SEQ ID NO: 3081799 - RNA, 22 nt, Human
cugcaccggcuggccuggcccc

SEQ ID NO: 3081800 - RNA, 14 nt, Human
cugcacuccccugc

SEQ ID NO: 3081801 - RNA, 15 nt, Human
cugcacuccccugcu

SEQ ID NO: 3081802 - RNA, 23 nt, Human
cugcaccggcuggccuggccccu

SEQ ID NO: 3081803 - RNA, 12 nt, Human
cugcaccgggcc

SEQ ID NO: 3081804 - RNA, 22 nt, Human
cugagugggggaucacagccuc

SEQ ID NO: 3081805 - RNA, 18 nt, Human
cugagucugaaggcuggg

SEQ ID NO: 3081806 - RNA, 19 nt, Human
cugagucugaaggcugggu

SEQ ID NO: 3081807 - RNA, 17 nt, Human
cugagucugaaggcugg

SEQ ID NO: 3081808 - RNA, 21 nt, Human
cugauaaagaugagugagcau

SEQ ID NO: 3081809 - RNA, 20 nt, Human
cugauccuaguuccaccauc

SEQ ID NO: 3081810 - RNA, 21 nt, Human
cugauccuaguuccaccauca

SEQ ID NO: 3081811 - RNA, 15 nt, Human
cugauggugcaauga

SEQ ID NO: 3081812 - RNA, 16 nt, Human
cugauggugcaaugac

SEQ ID NO: 3081813 - RNA, 14 nt, Human
cugauggugcaaug

SEQ ID NO: 3081814 - RNA, 22 nt, Human
cugauacagaaaaguugaauuu

SEQ ID NO: 3081815 - RNA, 24 nt, Human
cugaggcccuucucuccagccccu

SEQ ID NO: 3081816 - RNA, 15 nt, Human
cugaggcuccacuug

SEQ ID NO: 3081817 - RNA, 21 nt, Human
cugaggcuccacuuggucugu

SEQ ID NO: 3081818 - RNA, 15 nt, Human
cugaggcugggcucc

SEQ ID NO: 3081819 - RNA, 16 nt, Human
cugaggcugggcuccc

SEQ ID NO: 3081820 - RNA, 17 nt, Human
cugaggcugggcucccu

SEQ ID NO: 3081821 - RNA, 22 nt, Human
cugaggcugggcucccuuccca

SEQ ID NO: 3081822 - RNA, 13 nt, Human
cugaggcugggcu

SEQ ID NO: 3081823 - RNA, 11 nt, Human
cugccaggcau

SEQ ID NO: 3081824 - RNA, 13 nt, Human
cugccaggcaugg

SEQ ID NO: 3081825 - RNA, 14 nt, Human
cugcccaccuggcc

SEQ ID NO: 3081826 - RNA, 15 nt, Human
cugcccaccuggccu

SEQ ID NO: 3081827 - RNA, 13 nt, Human
cugcccaccuggc

SEQ ID NO: 3081828 - RNA, 14 nt, Human
cugccaugccagcu

SEQ ID NO: 3081829 - RNA, 17 nt, Human
cugcccaccuggccucu

SEQ ID NO: 3081830 - RNA, 18 nt, Human
cugcccaccuggccucug

SEQ ID NO: 3081831 - RNA, 19 nt, Human
cugcccaccuggccucugc

SEQ ID NO: 3081832 - RNA, 20 nt, Human
cugcccaccuggccucugca

SEQ ID NO: 3081833 - RNA, 22 nt, Human
cugcccaccuggccucugcacu

SEQ ID NO: 3081834 - RNA, 14 nt, Human
cugcccacucccug

SEQ ID NO: 3081835 - RNA, 15 nt, Human
cugcccacucccugc

SEQ ID NO: 3081836 - RNA, 16 nt, Human
cugcccacucccugca

SEQ ID NO: 3081837 - RNA, 18 nt, Human
cugcccacucccugcaac

SEQ ID NO: 3081838 - RNA, 21 nt, Human
cugcaguugccagucaccccg

SEQ ID NO: 3081839 - RNA, 22 nt, Human
cugcaguugccagucaccccgg

SEQ ID NO: 3081840 - RNA, 17 nt, Human
cugcaguugccagucac

SEQ ID NO: 3081841 - RNA, 20 nt, Human
cugcaucagcugcugaaaca

SEQ ID NO: 3081842 - RNA, 19 nt, Human
cugcaguugccagucaccc

SEQ ID NO: 3081843 - RNA, 23 nt, Human
cugcacuugcagacucuacagag

SEQ ID NO: 3081844 - RNA, 16 nt, Human
cugcaucguuucaucu

SEQ ID NO: 3081845 - RNA, 22 nt, Human
cugcaucguuucaucuuccaac

SEQ ID NO: 3081846 - RNA, 18 nt, Human
cugccaaugggagcucau

SEQ ID NO: 3081847 - RNA, 19 nt, Human
cugccaaugggagcucaug

SEQ ID NO: 3081848 - RNA, 18 nt, Human
cugcaugcgggcuuccuc

SEQ ID NO: 3081849 - RNA, 22 nt, Human
cugcaugcgggcuuccuccugg

SEQ ID NO: 3081850 - RNA, 18 nt, Human
cugccucucugcaggucc

SEQ ID NO: 3081851 - RNA, 17 nt, Human
cugccucucugcagguc

SEQ ID NO: 3081852 - RNA, 16 nt, Human
cugccucucugcaggu

SEQ ID NO: 3081853 - RNA, 15 nt, Human
cugccucucugcagg

SEQ ID NO: 3081854 - RNA, 14 nt, Human
cugccucagccucc

SEQ ID NO: 3081855 - RNA, 15 nt, Human
cugccucagccuccc

SEQ ID NO: 3081856 - RNA, 19 nt, Human
cugccucagccucccaaag

SEQ ID NO: 3081857 - RNA, 19 nt, Human
cugccgcagcccugcagag

SEQ ID NO: 3081858 - RNA, 20 nt, Human
cugccgcagcccugcagagg

SEQ ID NO: 3081859 - RNA, 21 nt, Human
cugccgcagcccugcagaggg

SEQ ID NO: 3081860 - RNA, 22 nt, Human
cugccgcagcccugcagagggc

SEQ ID NO: 3081861 - RNA, 23 nt, Human
cugccgcagcccugcagagggca

SEQ ID NO: 3081862 - RNA, 12 nt, Human
cugccgcagccc

SEQ ID NO: 3081863 - RNA, 13 nt, Human
cugccgcagcccu

SEQ ID NO: 3081864 - RNA, 14 nt, Human
cugccccugcacag

SEQ ID NO: 3081865 - RNA, 15 nt, Human
cugccccugcacagc

SEQ ID NO: 3081866 - RNA, 19 nt, Human
cugccccugcacagcaggc

SEQ ID NO: 3081867 - RNA, 21 nt, Human
cugccucugacacacagcucu

SEQ ID NO: 3081868 - RNA, 18 nt, Human
cugccucugacacacagc

SEQ ID NO: 3081869 - RNA, 15 nt, Human
cugccucugacacac

SEQ ID NO: 3081870 - RNA, 17 nt, Human
cugccucugacacacag

SEQ ID NO: 3081871 - RNA, 22 nt, Human
cugccugcccaggccccugcca

SEQ ID NO: 3081872 - RNA, 21 nt, Human
cugccugcccaggccccugcc

SEQ ID NO: 3081873 - RNA, 19 nt, Human
cugcggagcacacuggcuc

SEQ ID NO: 3081874 - RNA, 20 nt, Human
cugcggagcacacuggcuca

SEQ ID NO: 3081875 - RNA, 18 nt, Human
cugcgguccacccaggag

SEQ ID NO: 3081876 - RNA, 17 nt, Human
cugcgguccacccagga

SEQ ID NO: 3081877 - RNA, 20 nt, Human
cugcgguccacccaggagcc

SEQ ID NO: 3081878 - RNA, 19 nt, Human
cugcgguccacccaggagc

SEQ ID NO: 3081879 - RNA, 13 nt, Human
cugagccagauuu

SEQ ID NO: 3081880 - RNA, 14 nt, Human
cugagccagauuuc

SEQ ID NO: 3081881 - RNA, 16 nt, Human
cugagcaggauuuuaa

SEQ ID NO: 3081882 - RNA, 21 nt, Human
cugagacagcccgggcucugc

SEQ ID NO: 3081883 - RNA, 22 nt, Human
cugagacagcccgggcucugcc

SEQ ID NO: 3081884 - RNA, 20 nt, Human
cugagaugugaacacaucag

SEQ ID NO: 3081885 - RNA, 16 nt, Human
cugagaugugaacaca

SEQ ID NO: 3081886 - RNA, 20 nt, Human
cugagacagcccgggcucug

SEQ ID NO: 3081887 - RNA, 19 nt, Human
cugagacagcccgggcucu

SEQ ID NO: 3081888 - RNA, 20 nt, Human
cugagaaagacuauucaaac

SEQ ID NO: 3081889 - RNA, 19 nt, Human
cugagaaagacuauucaaa

SEQ ID NO: 3081890 - RNA, 21 nt, Human
cugagaugugaacacaucagc

SEQ ID NO: 3081891 - RNA, 18 nt, Human
cugacagacacaggcccg

SEQ ID NO: 3081892 - RNA, 17 nt, Human
cugacagacacaggccc

SEQ ID NO: 3081893 - RNA, 15 nt, Human
cugacagacacaggc

SEQ ID NO: 3081894 - RNA, 14 nt, Human
cugaauuucuuuug

SEQ ID NO: 3081895 - RNA, 16 nt, Human
cugaauuaugaaacuu

SEQ ID NO: 3081896 - RNA, 16 nt, Human
cugacagacacaggcc

SEQ ID NO: 3081897 - RNA, 23 nt, Human
cugacgacuugagugcucaguag

SEQ ID NO: 3081898 - RNA, 18 nt, Human
cugagaaagacuauucaa

SEQ ID NO: 3081899 - RNA, 15 nt, Human
cugagaaagacuauu

SEQ ID NO: 3081900 - RNA, 13 nt, Human
cugagaaagacua

SEQ ID NO: 3081901 - RNA, 12 nt, Human
cugagaaagacu

SEQ ID NO: 3081902 - RNA, 12 nt, Human
cugaauuauuuu

SEQ ID NO: 3081903 - RNA, 12 nt, Human
cugaauuucuuu

SEQ ID NO: 3081904 - RNA, 14 nt, Human
cugaauuaugaaac

SEQ ID NO: 3081905 - RNA, 15 nt, Human
cugaauuaugaaacu

SEQ ID NO: 3081906 - RNA, 13 nt, Human
cugaauuaugaaa

SEQ ID NO: 3081907 - RNA, 20 nt, Human
cugaaugguuuucaaaauaa

SEQ ID NO: 3081908 - RNA, 19 nt, Human
cugaaugguuuucaaaaua

SEQ ID NO: 3081909 - RNA, 18 nt, Human
cugaauggacuuugcaca

SEQ ID NO: 3081910 - RNA, 17 nt, Human
cugaagucacacaguga

SEQ ID NO: 3081911 - RNA, 19 nt, Human
cugaagucacacagugagu

SEQ ID NO: 3081912 - RNA, 18 nt, Human
cugaagucacacagugag

SEQ ID NO: 3081913 - RNA, 21 nt, Human
cugaagucacacagugagucg

SEQ ID NO: 3081914 - RNA, 16 nt, Human
cugaagucacacagug

SEQ ID NO: 3081915 - RNA, 22 nt, Human
cugaagucccagauacuugggg

SEQ ID NO: 3081916 - RNA, 17 nt, Human
cugaagucuuuguacag

SEQ ID NO: 3081917 - RNA, 20 nt, Human
cugaagucuuuguacagaca

SEQ ID NO: 3081918 - RNA, 17 nt, Human
cugaaguucagcugcau

SEQ ID NO: 3081919 - RNA, 23 nt, Human
cugaaagggacgcuacccgggaa

SEQ ID NO: 3081920 - RNA, 14 nt, Human
cucuuuucaaaaca

SEQ ID NO: 3081921 - RNA, 22 nt, Human
cucuuuggucuacacugugcug

SEQ ID NO: 3081922 - RNA, 23 nt, Human
cucuuuggucuacacugugcuga

SEQ ID NO: 3081923 - RNA, 16 nt, Human
cucuucuccaggcugu

SEQ ID NO: 3081924 - RNA, 17 nt, Human
cugaacaucacagcuua

SEQ ID NO: 3081925 - RNA, 20 nt, Human
cugaaauaaacgucuuaaau

SEQ ID NO: 3081926 - RNA, 20 nt, Human
cucuggauuauauuaugaag

SEQ ID NO: 3081927 - RNA, 19 nt, Human
cucuggauuauauuaugaa

SEQ ID NO: 3081928 - RNA, 20 nt, Human
cucugccucugacacacagc

SEQ ID NO: 3081929 - RNA, 19 nt, Human
cucugccucugacacacag

SEQ ID NO: 3081930 - RNA, 21 nt, Human
cucugccucccaucacccgcu

SEQ ID NO: 3081931 - RNA, 16 nt, Human
cucugccucugacaca

SEQ ID NO: 3081932 - RNA, 23 nt, Human
cucuggcagcucagagagggugg

SEQ ID NO: 3081933 - RNA, 20 nt, Human
cucuggcagcucagagaggg

SEQ ID NO: 3081934 - RNA, 21 nt, Human
cucuggccuucggccuccauc

SEQ ID NO: 3081935 - RNA, 22 nt, Human
cucuggccuucggccuccaucc

SEQ ID NO: 3081936 - RNA, 13 nt, Human
cucugucgcccag

SEQ ID NO: 3081937 - RNA, 17 nt, Human
cucugucgcccagucug

SEQ ID NO: 3081938 - RNA, 19 nt, Human
cucugucgcccagucugga

SEQ ID NO: 3081939 - RNA, 18 nt, Human
cucugucgcccagucugg

SEQ ID NO: 3081940 - RNA, 22 nt, Human
cucuguccugggagugagcugg

SEQ ID NO: 3081941 - RNA, 15 nt, Human
cucuguccugggagu

SEQ ID NO: 3081942 - RNA, 13 nt, Human
cucuguccuggga

SEQ ID NO: 3081943 - RNA, 14 nt, Human
cucuguccugggag

SEQ ID NO: 3081944 - RNA, 13 nt, Human
cucuucuccaggc

SEQ ID NO: 3081945 - RNA, 15 nt, Human
cucuucuccaggcug

SEQ ID NO: 3081946 - RNA, 23 nt, Human
cucugugucagguggggcagcuu

SEQ ID NO: 3081947 - RNA, 22 nt, Human
cucugugucagguggggcagcu

SEQ ID NO: 3081948 - RNA, 21 nt, Human
cucugugucagguggggcagc

SEQ ID NO: 3081949 - RNA, 20 nt, Human
cucugugucagguggggcag

SEQ ID NO: 3081950 - RNA, 19 nt, Human
cucugugucagguggggca

SEQ ID NO: 3081951 - RNA, 19 nt, Human
cucuuaagaagacugcauu

SEQ ID NO: 3081952 - RNA, 13 nt, Human
cucuuaagaagac

SEQ ID NO: 3081953 - RNA, 18 nt, Human
cucugcaggucccuaaua

SEQ ID NO: 3081954 - RNA, 21 nt, Human
cucugcaggucccuaauaaag

SEQ ID NO: 3081955 - RNA, 20 nt, Human
cucugcaggucccuaauaaa

SEQ ID NO: 3081956 - RNA, 19 nt, Human
cucugcaggucccuaauaa

SEQ ID NO: 3081957 - RNA, 14 nt, Human
cucugcacaagcug

SEQ ID NO: 3081958 - RNA, 15 nt, Human
cucugcacaagcugc

SEQ ID NO: 3081959 - RNA, 10 nt, Human
cucugcacaa

SEQ ID NO: 3081960 - RNA, 13 nt, Human
cucugcacaagcu

SEQ ID NO: 3081961 - RNA, 15 nt, Human
cucugauacagaaaa

SEQ ID NO: 3081962 - RNA, 18 nt, Human
cucugcccacucccugca

SEQ ID NO: 3081963 - RNA, 20 nt, Human
cucugcccacucccugcaac

SEQ ID NO: 3081964 - RNA, 13 nt, Human
cucugcccacucc

SEQ ID NO: 3081965 - RNA, 15 nt, Human
cucugcccacucccu

SEQ ID NO: 3081966 - RNA, 16 nt, Human
cucugcccacucccug

SEQ ID NO: 3081967 - RNA, 17 nt, Human
cucugcccacucccugc

SEQ ID NO: 3081968 - RNA, 12 nt, Human
cucugcccuugg

SEQ ID NO: 3081969 - RNA, 13 nt, Human
cucugccucccau

SEQ ID NO: 3081970 - RNA, 14 nt, Human
cucugccucccauc

SEQ ID NO: 3081971 - RNA, 16 nt, Human
cucugccucccaucac

SEQ ID NO: 3081972 - RNA, 17 nt, Human
cucugccucccaucacc

SEQ ID NO: 3081973 - RNA, 14 nt, Human
cucugaggacacua

SEQ ID NO: 3081974 - RNA, 12 nt, Human
cucugaggacac

SEQ ID NO: 3081975 - RNA, 20 nt, Human
cucugagacucgcgacaaug

SEQ ID NO: 3081976 - RNA, 23 nt, Human
cucugagacucgcgacaaugcaa

SEQ ID NO: 3081977 - RNA, 21 nt, Human
cucugagacucgcgacaaugc

SEQ ID NO: 3081978 - RNA, 23 nt, Human
cucugacagaagaaccccagggu

SEQ ID NO: 3081979 - RNA, 19 nt, Human
cucugacacacagcucugu

SEQ ID NO: 3081980 - RNA, 18 nt, Human
cucugacacacagcucug

SEQ ID NO: 3081981 - RNA, 17 nt, Human
cucugacacacagcucu

SEQ ID NO: 3081982 - RNA, 16 nt, Human
cucugacacacagcuc

SEQ ID NO: 3081983 - RNA, 15 nt, Human
cucugacacacagcu

SEQ ID NO: 3081984 - RNA, 14 nt, Human
cucugacacacagc

SEQ ID NO: 3081985 - RNA, 22 nt, Human
cucugaaggacauugcggacag

SEQ ID NO: 3081986 - RNA, 19 nt, Human
cucugaaggguaauuauau

SEQ ID NO: 3081987 - RNA, 13 nt, Human
cucacauuuauau

SEQ ID NO: 3081988 - RNA, 22 nt, Human
cucacaguccuuaccagcagag

SEQ ID NO: 3081989 - RNA, 17 nt, Human
cucacaguccuuaccag

SEQ ID NO: 3081990 - RNA, 19 nt, Human
cucacaguccuuaccagca

SEQ ID NO: 3081991 - RNA, 22 nt, Human
cucacauuuauucugcucacau

SEQ ID NO: 3081992 - RNA, 19 nt, Human
cucacauuuauucugcuca

SEQ ID NO: 3081993 - RNA, 15 nt, Human
cucacauuuauucug

SEQ ID NO: 3081994 - RNA, 18 nt, Human
cucaccagccccagugcc

SEQ ID NO: 3081995 - RNA, 17 nt, Human
cucaccagccccagugc

SEQ ID NO: 3081996 - RNA, 15 nt, Human
cucaccagccccagu

SEQ ID NO: 3081997 - RNA, 14 nt, Human
cucaccagccccag

SEQ ID NO: 3081998 - RNA, 13 nt, Human
cucaccagcccca

SEQ ID NO: 3081999 - RNA, 22 nt, Human
cucacacaugagcaucaggcca

SEQ ID NO: 3082000 - RNA, 24 nt, Human
cucacacaugagcaucaggccagg

SEQ ID NO: 3082001 - RNA, 15 nt, Human
cucacaguccuuacc

SEQ ID NO: 3082002 - RNA, 14 nt, Human
cucaaguccucuuu

SEQ ID NO: 3082003 - RNA, 21 nt, Human
cucaaguccucuuuucugaga

SEQ ID NO: 3082004 - RNA, 17 nt, Human
cucaagugauucuccug

SEQ ID NO: 3082005 - RNA, 17 nt, Human
cucaaccuccugggcua

SEQ ID NO: 3082006 - RNA, 15 nt, Human
cucaaccuccugggc

SEQ ID NO: 3082007 - RNA, 13 nt, Human
cucaaccuccugg

SEQ ID NO: 3082008 - RNA, 21 nt, Human
cucaacaccucugcacaagcu

SEQ ID NO: 3082009 - RNA, 12 nt, Human
cucaaauuugga

SEQ ID NO: 3082010 - RNA, 23 nt, Human
cucaaauacgugggcauucaaau

SEQ ID NO: 3082011 - RNA, 21 nt, Human
cucacucugucgcccagucug

SEQ ID NO: 3082012 - RNA, 13 nt, Human
cucacucugucgc

SEQ ID NO: 3082013 - RNA, 22 nt, Human
cucacucugucgcccagucugg

SEQ ID NO: 3082014 - RNA, 12 nt, Human
cucacugcagcc

SEQ ID NO: 3082015 - RNA, 13 nt, Human
cucacugcagccu

SEQ ID NO: 3082016 - RNA, 13 nt, Human
cucacuccuugaa

SEQ ID NO: 3082017 - RNA, 12 nt, Human
cucacucugucg

SEQ ID NO: 3082018 - RNA, 11 nt, Human
cucacucuguc

SEQ ID NO: 3082019 - RNA, 20 nt, Human
cucacuauguugcccaggca

SEQ ID NO: 3082020 - RNA, 19 nt, Human
cucacuauguugcccaggc

SEQ ID NO: 3082021 - RNA, 15 nt, Human
cucacccaguccugc

SEQ ID NO: 3082022 - RNA, 15 nt, Human
cucaccccagcccca

SEQ ID NO: 3082023 - RNA, 12 nt, Human
cucacccagucc

SEQ ID NO: 3082024 - RNA, 14 nt, Human
cucaccccagcccc

SEQ ID NO: 3082025 - RNA, 13 nt, Human
cucacccacacca

SEQ ID NO: 3082026 - RNA, 22 nt, Human
cucacuauguugcccaggcagg

SEQ ID NO: 3082027 - RNA, 21 nt, Human
cucacuauguugcccaggcag

SEQ ID NO: 3082028 - RNA, 23 nt, Human
cucacuauguugcccaggcaggu

SEQ ID NO: 3082029 - RNA, 14 nt, Human
cucagagagggugg

SEQ ID NO: 3082030 - RNA, 22 nt, Human
cucacuguugcccaggcuggcg

SEQ ID NO: 3082031 - RNA, 21 nt, Human
cucacuguugcccaggcuggc

SEQ ID NO: 3082032 - RNA, 19 nt, Human
cucacugccaugccagcuu

SEQ ID NO: 3082033 - RNA, 22 nt, Human
cucacugccaugccagcuuauc

SEQ ID NO: 3082034 - RNA, 20 nt, Human
cucacuguugcccaggcugg

SEQ ID NO: 3082035 - RNA, 21 nt, Human
cucagcaaaagaugcuucuca

SEQ ID NO: 3082036 - RNA, 15 nt, Human
cucagaucuucugug

SEQ ID NO: 3082037 - RNA, 17 nt, Human
cucagcauccuggcacc

SEQ ID NO: 3082038 - RNA, 16 nt, Human
cucagcauccuggcac

SEQ ID NO: 3082039 - RNA, 13 nt, Human
cuauggccugugg

SEQ ID NO: 3082040 - RNA, 15 nt, Human
cuauuagagaagaga

SEQ ID NO: 3082041 - RNA, 23 nt, Human
cuauucaaacagucucaggaaau

SEQ ID NO: 3082042 - RNA, 16 nt, Human
cuauucaaacagucuc

SEQ ID NO: 3082043 - RNA, 18 nt, Human
cuauucaaacagucucag

SEQ ID NO: 3082044 - RNA, 23 nt, Human
cuaugggacucaaugcacugaca

SEQ ID NO: 3082045 - RNA, 22 nt, Human
cuaugggacucaaugcacugac

SEQ ID NO: 3082046 - RNA, 18 nt, Human
cuaugggacucaaugcac

SEQ ID NO: 3082047 - RNA, 13 nt, Human
cuauaauuuaaau

SEQ ID NO: 3082048 - RNA, 21 nt, Human
cuauaauguaagcucuacuga

SEQ ID NO: 3082049 - RNA, 22 nt, Human
cuauaauuuaccugaagucuuu

SEQ ID NO: 3082050 - RNA, 16 nt, Human
cuauaauguaagcucu

SEQ ID NO: 3082051 - RNA, 17 nt, Human
cuauagccuaggugaca

SEQ ID NO: 3082052 - RNA, 20 nt, Human
cuauaggugcuacaaaaaca

SEQ ID NO: 3082053 - RNA, 22 nt, Human
cuauaggugcuacaaaaacaca

SEQ ID NO: 3082054 - RNA, 21 nt, Human
cuauaggugcuacaaaaacac

SEQ ID NO: 3082055 - RNA, 15 nt, Human
cuauaggugcuacaa

SEQ ID NO: 3082056 - RNA, 17 nt, Human
cuauauuuuacauaaau

SEQ ID NO: 3082057 - RNA, 22 nt, Human
cuagguaaauuacaguuccuag

SEQ ID NO: 3082058 - RNA, 23 nt, Human
cgcccaguuggguggaugccugg

SEQ ID NO: 3082059 - RNA, 15 nt, Human
cgccaugcuccuggc

SEQ ID NO: 3082060 - RNA, 20 nt, Human
cgccaucccagccccaauga

SEQ ID NO: 3082061 - RNA, 17 nt, Human
cgccaucccagccccaa

SEQ ID NO: 3082062 - RNA, 22 nt, Human
cgcccaguuggguggaugccug

SEQ ID NO: 3082063 - RNA, 18 nt, Human
cuaggugacagagugaga

SEQ ID NO: 3082064 - RNA, 14 nt, Human
cuaggugacagagu

SEQ ID NO: 3082065 - RNA, 24 nt, Human
cuaggugacagagugagacucugu

SEQ ID NO: 3082066 - RNA, 16 nt, Human
cuaguaauuggaaagg

SEQ ID NO: 3082067 - RNA, 20 nt, Human
cuagugaaacucguuaauuu

SEQ ID NO: 3082068 - RNA, 19 nt, Human
cuagugaaagaggcagcuu

SEQ ID NO: 3082069 - RNA, 18 nt, Human
cuagugaaagaggcagcu

SEQ ID NO: 3082070 - RNA, 21 nt, Human
cuagugagcagucaggaaaga

SEQ ID NO: 3082071 - RNA, 13 nt, Human
cuccacccugcuc

SEQ ID NO: 3082072 - RNA, 15 nt, Human
cuccacccugcucuc

SEQ ID NO: 3082073 - RNA, 16 nt, Human
cuccaaaauaaaacuu

SEQ ID NO: 3082074 - RNA, 15 nt, Human
cuccaaaauaaaacu

SEQ ID NO: 3082075 - RNA, 21 nt, Human
cuccaaacugacucuuaagaa

SEQ ID NO: 3082076 - RNA, 12 nt, Human
cuccaaagaaau

SEQ ID NO: 3082077 - RNA, 13 nt, Human
cuccaaagaaaug

SEQ ID NO: 3082078 - RNA, 17 nt, Human
cucauuugucacacacu

SEQ ID NO: 3082079 - RNA, 14 nt, Human
cucauuucuagcag

SEQ ID NO: 3082080 - RNA, 21 nt, Human
cucauuuccaagcaaguauua

SEQ ID NO: 3082081 - RNA, 17 nt, Human
cuccaccuugcagcucu

SEQ ID NO: 3082082 - RNA, 15 nt, Human
cuccagccccuggau

SEQ ID NO: 3082083 - RNA, 12 nt, Human
cuccaccugcca

SEQ ID NO: 3082084 - RNA, 13 nt, Human
cuccaccugccag

SEQ ID NO: 3082085 - RNA, 14 nt, Human
cuccaccugccagg

SEQ ID NO: 3082086 - RNA, 20 nt, Human
cuccagccccuggaugcagc

SEQ ID NO: 3082087 - RNA, 16 nt, Human
cuccagccccuggaug

SEQ ID NO: 3082088 - RNA, 17 nt, Human
cuccagccccuggaugc

SEQ ID NO: 3082089 - RNA, 12 nt, Human
cuccagccuggg

SEQ ID NO: 3082090 - RNA, 18 nt, Human
cuccaggagcagccacau

SEQ ID NO: 3082091 - RNA, 23 nt, Human
cuccaggagcagccacauuccug

SEQ ID NO: 3082092 - RNA, 12 nt, Human
cuccauccugag

SEQ ID NO: 3082093 - RNA, 11 nt, Human
cuccauccuga

SEQ ID NO: 3082094 - RNA, 14 nt, Human
cuccaggagcagcc

SEQ ID NO: 3082095 - RNA, 15 nt, Human
cuccaggagcagcca

SEQ ID NO: 3082096 - RNA, 16 nt, Human
cuccaggagcagccac

SEQ ID NO: 3082097 - RNA, 17 nt, Human
cuccaggagcagccaca

SEQ ID NO: 3082098 - RNA, 11 nt, Human
cuccaggagca

SEQ ID NO: 3082099 - RNA, 13 nt, Human
cuccaggagcagc

SEQ ID NO: 3082100 - RNA, 16 nt, Human
cucaggugagaagcag

SEQ ID NO: 3082101 - RNA, 14 nt, Human
cucaggugagaagc

SEQ ID NO: 3082102 - RNA, 19 nt, Human
cucaggugagaagcagagg

SEQ ID NO: 3082103 - RNA, 20 nt, Human
cucaggugagaagcagagga

SEQ ID NO: 3082104 - RNA, 15 nt, Human
cucagggucccuggu

SEQ ID NO: 3082105 - RNA, 16 nt, Human
cucagggucccuggug

SEQ ID NO: 3082106 - RNA, 17 nt, Human
cucagggucccuggugg

SEQ ID NO: 3082107 - RNA, 15 nt, Human
cucagggccuggucg

SEQ ID NO: 3082108 - RNA, 16 nt, Human
cucagggccuggcuca

SEQ ID NO: 3082109 - RNA, 14 nt, Human
cucagggccuggcu

SEQ ID NO: 3082110 - RNA, 15 nt, Human
cucagggccuggcuc

SEQ ID NO: 3082111 - RNA, 13 nt, Human
cucagggccuggc

SEQ ID NO: 3082112 - RNA, 18 nt, Human
cucaggaguuugagacca

SEQ ID NO: 3082113 - RNA, 23 nt, Human
cucaggaguuugagaccaaccug

SEQ ID NO: 3082114 - RNA, 18 nt, Human
cucagcauccuggcaccc

SEQ ID NO: 3082115 - RNA, 15 nt, Human
cucagcauccuggca

SEQ ID NO: 3082116 - RNA, 15 nt, Human
cucauccucauaccc

SEQ ID NO: 3082117 - RNA, 21 nt, Human
cucaucaccaacgucugugcc

SEQ ID NO: 3082118 - RNA, 23 nt, Human
cucauaguaugguggcuggguug

SEQ ID NO: 3082119 - RNA, 20 nt, Human
cucauaguaugguggcuggg

SEQ ID NO: 3082120 - RNA, 22 nt, Human
cucaucaccaacgucugugcca

SEQ ID NO: 3082121 - RNA, 16 nt, Human
cucauacccaccccca

SEQ ID NO: 3082122 - RNA, 18 nt, Human
cucauacccacccccacc

SEQ ID NO: 3082123 - RNA, 19 nt, Human
cucauacccacccccaccc

SEQ ID NO: 3082124 - RNA, 21 nt, Human
cucauacccacccccacccaa

SEQ ID NO: 3082125 - RNA, 19 nt, Human
cucaggugauccacccacc

SEQ ID NO: 3082126 - RNA, 18 nt, Human
cucaggugauccacccac

SEQ ID NO: 3082127 - RNA, 14 nt, Human
cucagggucccugg

SEQ ID NO: 3082128 - RNA, 20 nt, Human
cucaggugauccacccaccu

SEQ ID NO: 3082129 - RNA, 22 nt, Human
cucauacucaccucaccccacu

SEQ ID NO: 3082130 - RNA, 14 nt, Human
cucauacucaccuc

SEQ ID NO: 3082131 - RNA, 15 nt, Human
cucauacccaccccc

SEQ ID NO: 3082132 - RNA, 21 nt, Human
cucauaguaugguggcugggu

SEQ ID NO: 3082133 - RNA, 15 nt, Human
cuccuccagccgcca

SEQ ID NO: 3082134 - RNA, 13 nt, Human
cuccuccagaguc

SEQ ID NO: 3082135 - RNA, 15 nt, Human
cuccuccagagucag

SEQ ID NO: 3082136 - RNA, 20 nt, Human
cucccuuggauuguccccga

SEQ ID NO: 3082137 - RNA, 18 nt, Human
cuccucagaucuucugug

SEQ ID NO: 3082138 - RNA, 23 nt, Human
cuccccagcaagugagagcuggg

SEQ ID NO: 3082139 - RNA, 22 nt, Human
cuccccagcaagugagagcugg

SEQ ID NO: 3082140 - RNA, 13 nt, Human
cuccauccugagg

SEQ ID NO: 3082141 - RNA, 21 nt, Human
cuccccagcaagugagagcug

SEQ ID NO: 3082142 - RNA, 20 nt, Human
cucccgaguagcugggacua

SEQ ID NO: 3082143 - RNA, 19 nt, Human
cucccgaguagcugggacu

SEQ ID NO: 3082144 - RNA, 18 nt, Human
cucccgaguagcugggac

SEQ ID NO: 3082145 - RNA, 13 nt, Human
cucgagcaugccu

SEQ ID NO: 3082146 - RNA, 15 nt, Human
cucgagcaugccugg

SEQ ID NO: 3082147 - RNA, 16 nt, Human
cucgagcaugccugga

SEQ ID NO: 3082148 - RNA, 19 nt, Human
cucgagcaugccuggaugg

SEQ ID NO: 3082149 - RNA, 23 nt, Human
cuccuuggugucgggcaugacac

SEQ ID NO: 3082150 - RNA, 22 nt, Human
cucgagcaugccuggauggggc

SEQ ID NO: 3082151 - RNA, 24 nt, Human
cuccugugugugcgccuacaggag

SEQ ID NO: 3082152 - RNA, 23 nt, Human
cuccugugugugcgccuacagga

SEQ ID NO: 3082153 - RNA, 21 nt, Human
cuccugugugugcgccuacag

SEQ ID NO: 3082154 - RNA, 14 nt, Human
cuccuggaaauauu

SEQ ID NO: 3082155 - RNA, 15 nt, Human
cuccucuccccagca

SEQ ID NO: 3082156 - RNA, 13 nt, Human
cuccucuccccag

SEQ ID NO: 3082157 - RNA, 11 nt, Human
cuccugccuca

SEQ ID NO: 3082158 - RNA, 12 nt, Human
cuccugccucag

SEQ ID NO: 3082159 - RNA, 16 nt, Human
cuccugccucagccuc

SEQ ID NO: 3082160 - RNA, 17 nt, Human
cuccugccucagccucc

SEQ ID NO: 3082161 - RNA, 21 nt, Human
cuccugccucgaacuggcugc

SEQ ID NO: 3082162 - RNA, 20 nt, Human
cuccugccucgaacuggcug

SEQ ID NO: 3082163 - RNA, 18 nt, Human
cuccugccucgaacuggc

SEQ ID NO: 3082164 - RNA, 20 nt, Human
cuuuuacguccaucucuugu

SEQ ID NO: 3082165 - RNA, 18 nt, Human
cuuuguuuguugucagcu

SEQ ID NO: 3082166 - RNA, 20 nt, Human
cuuuguuuguugucagcuga

SEQ ID NO: 3082167 - RNA, 20 nt, Human
cuuuucauaaccuagccuua

SEQ ID NO: 3082168 - RNA, 22 nt, Human
cuuuucauaaccuagccuuaga

SEQ ID NO: 3082169 - RNA, 18 nt, Human
cuuuucuguccgagcuuu

SEQ ID NO: 3082170 - RNA, 18 nt, Human
cuuuucuugcaugaggcu

SEQ ID NO: 3082171 - RNA, 23 nt, Human
cuuuucuugcaugaggcuagugu

SEQ ID NO: 3082172 - RNA, 19 nt, Human
cuuuggacccugaggccca

SEQ ID NO: 3082173 - RNA, 17 nt, Human
cuuuggacccugaggcc

SEQ ID NO: 3082174 - RNA, 18 nt, Human
cuuuggacccugaggccc

SEQ ID NO: 3082175 - RNA, 15 nt, Human
cuuuggacccugagg

SEQ ID NO: 3082176 - RNA, 16 nt, Human
cuuuggacccugaggc

SEQ ID NO: 3082177 - RNA, 21 nt, Human
cuuuggacagaagcagcucuu

SEQ ID NO: 3082178 - RNA, 20 nt, Human
cuuuggacagaagcagcucu

SEQ ID NO: 3082179 - RNA, 19 nt, Human
cuuuggacagaagcagcuc

SEQ ID NO: 3082180 - RNA, 18 nt, Human
cuuuggacagaagcagcu

SEQ ID NO: 3082181 - RNA, 16 nt, Human
cuuucccaucuuccaa

SEQ ID NO: 3082182 - RNA, 18 nt, Human
cuuugugauuuuuguaau

SEQ ID NO: 3082183 - RNA, 17 nt, Human
cuuugugauuuuuguaa

SEQ ID NO: 3082184 - RNA, 14 nt, Human
cuuuguucuggcuc

SEQ ID NO: 3082185 - RNA, 15 nt, Human
cuuuguucuggcucu

SEQ ID NO: 3082186 - RNA, 13 nt, Human
cuuugggaggcca

SEQ ID NO: 3082187 - RNA, 18 nt, Human
cuuuguccccaccgcaga

SEQ ID NO: 3082188 - RNA, 22 nt, Human
cuuuguccccaccgcagacagg

SEQ ID NO: 3082189 - RNA, 14 nt, Human
cuuugugauuuuug

SEQ ID NO: 3082190 - RNA, 14 nt, Human
cuuuuuucuaaagu

SEQ ID NO: 3082191 - RNA, 20 nt, Human
cuuuuuucucugauacagaa

SEQ ID NO: 3082192 - RNA, 15 nt, Human
cuuuuuucacuacau

SEQ ID NO: 3082193 - RNA, 16 nt, Human
cuuuugagcauuuaga

SEQ ID NO: 3082194 - RNA, 21 nt, Human
cuuuugagugccuuacacaau

SEQ ID NO: 3082195 - RNA, 14 nt, Human
cuuuuuuggcugcu

SEQ ID NO: 3082196 - RNA, 15 nt, Human
cuuuuuuggcugcug

SEQ ID NO: 3082197 - RNA, 22 nt, Human
cuuuuuucucugauacagaaaa

SEQ ID NO: 3082198 - RNA, 17 nt, Human
gaaaaaggaugcacaga

SEQ ID NO: 3082199 - RNA, 23 nt, Human
gaaaaaggaugcacagaguuguu

SEQ ID NO: 3082200 - RNA, 22 nt, Human
gaaaacaauaacgauaaaagac

SEQ ID NO: 3082201 - RNA, 13 nt, Human
gaaaacacauuuu

SEQ ID NO: 3082202 - RNA, 14 nt, Human
gaaaacaaggauga

SEQ ID NO: 3082203 - RNA, 15 nt, Human
gaaaacaugcuacac

SEQ ID NO: 3082204 - RNA, 14 nt, Human
gaaaacaugcuaca

SEQ ID NO: 3082205 - RNA, 12 nt, Human
gaaaacaugcua

SEQ ID NO: 3082206 - RNA, 15 nt, Human
gaaaacguggcugcu

SEQ ID NO: 3082207 - RNA, 16 nt, Human
gaaaacguggcugcuu

SEQ ID NO: 3082208 - RNA, 18 nt, Human
gaaaacguggcugcuuca

SEQ ID NO: 3082209 - RNA, 14 nt, Human
gaaaacguggcugc

SEQ ID NO: 3082210 - RNA, 20 nt, Human
gaaaaucuuauaauuuaaaa

SEQ ID NO: 3082211 - RNA, 16 nt, Human
gaaacacuuugcauaa

SEQ ID NO: 3082212 - RNA, 18 nt, Human
gaaacagcuaaugggaca

SEQ ID NO: 3082213 - RNA, 19 nt, Human
gaaaauaacgauaaaagac

SEQ ID NO: 3082214 - RNA, 17 nt, Human
gaaaagcugcugacagu

SEQ ID NO: 3082215 - RNA, 13 nt, Human
gaaaagcugcuga

SEQ ID NO: 3082216 - RNA, 19 nt, Human
gaaaauaacaauaaaagac

SEQ ID NO: 3082217 - RNA, 19 nt, Human
gaaaaucuuauaauuuaaa

SEQ ID NO: 3082218 - RNA, 16 nt, Human
gaaaaucagccugcuc

SEQ ID NO: 3082219 - RNA, 18 nt, Human
gaaaaucagccugcucca

SEQ ID NO: 3082220 - RNA, 17 nt, Human
gaaaauauuauguguuu

SEQ ID NO: 3082221 - RNA, 14 nt, Human
gaaaaucagccugc

SEQ ID NO: 3082222 - RNA, 12 nt, Human
gaaaauaucacu

SEQ ID NO: 3082223 - RNA, 16 nt, Human
cuuggcugcagggagu

SEQ ID NO: 3082224 - RNA, 12 nt, Human
cuuggagggcau

SEQ ID NO: 3082225 - RNA, 23 nt, Human
cuuggagggcaugaagacagaua

SEQ ID NO: 3082226 - RNA, 22 nt, Human
cuuggaggaaggaaacccagcu

SEQ ID NO: 3082227 - RNA, 17 nt, Human
cuuggcugcagggaguc

SEQ ID NO: 3082228 - RNA, 14 nt, Human
cuuggcugcaggga

SEQ ID NO: 3082229 - RNA, 22 nt, Human
cuugggcuucauccuccucaga

SEQ ID NO: 3082230 - RNA, 20 nt, Human
cuuggggaccagagcugcca

SEQ ID NO: 3082231 - RNA, 21 nt, Human
cuuggggaccagagcugccac

SEQ ID NO: 3082232 - RNA, 14 nt, Human
cuugggccacugug

SEQ ID NO: 3082233 - RNA, 13 nt, Human
cuugggcuucauc

SEQ ID NO: 3082234 - RNA, 19 nt, Human
cuuguaaaggaauuuaaaa

SEQ ID NO: 3082235 - RNA, 18 nt, Human
cuuguaaaggaauuuaaa

SEQ ID NO: 3082236 - RNA, 16 nt, Human
cuuggggggcugaggu

SEQ ID NO: 3082237 - RNA, 15 nt, Human
cuuggggggcugagg

SEQ ID NO: 3082238 - RNA, 22 nt, Human
cuuggggaccagagcugccacc

SEQ ID NO: 3082239 - RNA, 14 nt, Human
cuugcucugcugac

SEQ ID NO: 3082240 - RNA, 13 nt, Human
cuugcucugcuga

SEQ ID NO: 3082241 - RNA, 15 nt, Human
cuugcccagccugga

SEQ ID NO: 3082242 - RNA, 13 nt, Human
cuugcccagccug

SEQ ID NO: 3082243 - RNA, 17 nt, Human
cuugcccagccuggaug

SEQ ID NO: 3082244 - RNA, 16 nt, Human
cuugcccagccuggau

SEQ ID NO: 3082245 - RNA, 21 nt, Human
cuucuccacccugcucuccga

SEQ ID NO: 3082246 - RNA, 16 nt, Human
cuucuccacccugcuc

SEQ ID NO: 3082247 - RNA, 18 nt, Human
cuucuccacccugcucuc

SEQ ID NO: 3082248 - RNA, 17 nt, Human
cuucuccacccugcucu

SEQ ID NO: 3082249 - RNA, 16 nt, Human
cuuggaaaugggagac

SEQ ID NO: 3082250 - RNA, 13 nt, Human
cuuggaggaagga

SEQ ID NO: 3082251 - RNA, 13 nt, Human
cuuggaagcuccg

SEQ ID NO: 3082252 - RNA, 16 nt, Human
cuugcucugcugacag

SEQ ID NO: 3082253 - RNA, 19 nt, Human
cuuguguuaaguaugugua

SEQ ID NO: 3082254 - RNA, 21 nt, Human
cuuguguguuuauugucaaag

SEQ ID NO: 3082255 - RNA, 20 nt, Human
cuuguguguuuauugucaaa

SEQ ID NO: 3082256 - RNA, 18 nt, Human
cuuuaaagggauggcaag

SEQ ID NO: 3082257 - RNA, 18 nt, Human
cuuuccaaaugcccagcu

SEQ ID NO: 3082258 - RNA, 19 nt, Human
cuuuccaaaugcccagcuu

SEQ ID NO: 3082259 - RNA, 22 nt, Human
cuuuccaaaugcccagcuuaaa

SEQ ID NO: 3082260 - RNA, 13 nt, Human
cuuuccacagaag

SEQ ID NO: 3082261 - RNA, 21 nt, Human
gaacuuguaaaggaauuuaaa

SEQ ID NO: 3082262 - RNA, 23 nt, Human
gaacuugguucccauuugcuccu

SEQ ID NO: 3082263 - RNA, 12 nt, Human
gaacuugguucc

SEQ ID NO: 3082264 - RNA, 15 nt, Human
gaacuuggcgcugcc

SEQ ID NO: 3082265 - RNA, 16 nt, Human
gaacuuggcgcugccc

SEQ ID NO: 3082266 - RNA, 13 nt, Human
gaacuuggcgcug

SEQ ID NO: 3082267 - RNA, 21 nt, Human
gaagaagcaccaaucaugaau

SEQ ID NO: 3082268 - RNA, 22 nt, Human
gaacucaucuagguaaauuaca

SEQ ID NO: 3082269 - RNA, 14 nt, Human
gaacucccuuucaa

SEQ ID NO: 3082270 - RNA, 22 nt, Human
gaacuggguacuuguggacaca

SEQ ID NO: 3082271 - RNA, 22 nt, Human
gaacuuccagauccuggaaauc

SEQ ID NO: 3082272 - RNA, 21 nt, Human
gaacuagaguuuagcuggaaa

SEQ ID NO: 3082273 - RNA, 22 nt, Human
gaacuagaguuuagcuggaaaa

SEQ ID NO: 3082274 - RNA, 21 nt, Human
gaaccacaucuugcucugcug

SEQ ID NO: 3082275 - RNA, 20 nt, Human
gaaccacaucuugcucugcu

SEQ ID NO: 3082276 - RNA, 16 nt, Human
gaacagacuggaagca

SEQ ID NO: 3082277 - RNA, 15 nt, Human
gaacagacuggaagc

SEQ ID NO: 3082278 - RNA, 17 nt, Human
gaaccaccacacccagc

SEQ ID NO: 3082279 - RNA, 16 nt, Human
gaaccaccacacccag

SEQ ID NO: 3082280 - RNA, 18 nt, Human
gaaauuguauuacaaauc

SEQ ID NO: 3082281 - RNA, 17 nt, Human
gaaauuuguuauaauga

SEQ ID NO: 3082282 - RNA, 20 nt, Human
gaaaugggcagagcagagac

SEQ ID NO: 3082283 - RNA, 14 nt, Human
gaaaugggcagagc

SEQ ID NO: 3082284 - RNA, 13 nt, Human
gaaauauuauguu

SEQ ID NO: 3082285 - RNA, 16 nt, Human
gaaauauuauguuaaa

SEQ ID NO: 3082286 - RNA, 21 nt, Human
gaaauaucugaaaauguaugu

SEQ ID NO: 3082287 - RNA, 13 nt, Human
gaaauauaauuga

SEQ ID NO: 3082288 - RNA, 20 nt, Human
gaaauaucugaaaauguaug

SEQ ID NO: 3082289 - RNA, 19 nt, Human
gaaugaaagggcccagaga

SEQ ID NO: 3082290 - RNA, 14 nt, Human
gaaugaaagggccc

SEQ ID NO: 3082291 - RNA, 16 nt, Human
gaaucucaaauaacua

SEQ ID NO: 3082292 - RNA, 14 nt, Human
gaauagcugggacu

SEQ ID NO: 3082293 - RNA, 15 nt, Human
gaauagcugggacua

SEQ ID NO: 3082294 - RNA, 14 nt, Human
gaauacuuuauaaa

SEQ ID NO: 3082295 - RNA, 20 nt, Human
gaauaauccuaaacauauga

SEQ ID NO: 3082296 - RNA, 14 nt, Human
gaauaacauguaau

SEQ ID NO: 3082297 - RNA, 17 nt, Human
gaaguuuacauuguaaa

SEQ ID NO: 3082298 - RNA, 16 nt, Human
gaaguuuacauuguaa

SEQ ID NO: 3082299 - RNA, 12 nt, Human
gaauaaaauuuu

SEQ ID NO: 3082300 - RNA, 12 nt, Human
gaaguuucugcc

SEQ ID NO: 3082301 - RNA, 18 nt, Human
gaagcuuuuaugugaaac

SEQ ID NO: 3082302 - RNA, 21 nt, Human
gaagccuuggggcugaugcag

SEQ ID NO: 3082303 - RNA, 20 nt, Human
gaagcccaggaaaggcucca

SEQ ID NO: 3082304 - RNA, 21 nt, Human
gaagcccaggaaaggcuccag

SEQ ID NO: 3082305 - RNA, 22 nt, Human
gaagcccaggaaaggcuccagg

SEQ ID NO: 3082306 - RNA, 21 nt, Human
gaagccgcuggggccaguugg

SEQ ID NO: 3082307 - RNA, 23 nt, Human
gaagccagcaggcucucaggcca

SEQ ID NO: 3082308 - RNA, 22 nt, Human
gaagccacgguguucugugaua

SEQ ID NO: 3082309 - RNA, 15 nt, Human
gaagccagcaggcuc

SEQ ID NO: 3082310 - RNA, 16 nt, Human
gaagccagcaggcucu

SEQ ID NO: 3082311 - RNA, 21 nt, Human
gaagacucauucuucuguacg

SEQ ID NO: 3082312 - RNA, 19 nt, Human
gaagacucauucuucugua

SEQ ID NO: 3082313 - RNA, 14 nt, Human
gaaggaaaaugaua

SEQ ID NO: 3082314 - RNA, 18 nt, Human
gaaggaaacccagcucug

SEQ ID NO: 3082315 - RNA, 14 nt, Human
gaaggaaacccagc

SEQ ID NO: 3082316 - RNA, 17 nt, Human
gaaggaaacccagcucu

SEQ ID NO: 3082317 - RNA, 21 nt, Human
gaaggauacaaaagcauguga

SEQ ID NO: 3082318 - RNA, 19 nt, Human
gaaggauacaaaagcaugu

SEQ ID NO: 3082319 - RNA, 12 nt, Human
gaaggauacaaa

SEQ ID NO: 3082320 - RNA, 14 nt, Human
gaaggccccgccca

SEQ ID NO: 3082321 - RNA, 15 nt, Human
gaaggccccgcccag

SEQ ID NO: 3082322 - RNA, 16 nt, Human
gaaggccccgcccagg

SEQ ID NO: 3082323 - RNA, 17 nt, Human
cuuaaccagaucauugu

SEQ ID NO: 3082324 - RNA, 21 nt, Human
cuuaagaagacugcauuauau

SEQ ID NO: 3082325 - RNA, 23 nt, Human
cuuaagaagacugcauuauauuu

SEQ ID NO: 3082326 - RNA, 16 nt, Human
cuuaaucuaaauggaa

SEQ ID NO: 3082327 - RNA, 17 nt, Human
cuuaauuaaaagaauau

SEQ ID NO: 3082328 - RNA, 16 nt, Human
cuuaauuaaaagaaua

SEQ ID NO: 3082329 - RNA, 20 nt, Human
cuuaauucuuagcucauucu

SEQ ID NO: 3082330 - RNA, 20 nt, Human
cuuaauuaaaagaauauuuu

SEQ ID NO: 3082331 - RNA, 19 nt, Human
cuuaauuaaaagaauauuu

SEQ ID NO: 3082332 - RNA, 20 nt, Human
cuuagaagucacacaguauu

SEQ ID NO: 3082333 - RNA, 17 nt, Human
cuuagaagucacacagu

SEQ ID NO: 3082334 - RNA, 20 nt, Human
cuuagaaaaaccaccaccau

SEQ ID NO: 3082335 - RNA, 13 nt, Human
cuuaccugccagg

SEQ ID NO: 3082336 - RNA, 20 nt, Human
cuuaccugccaggaagccag

SEQ ID NO: 3082337 - RNA, 23 nt, Human
cuuagguuggcaaaaaggcagga

SEQ ID NO: 3082338 - RNA, 21 nt, Human
cuuagguuggcaaaaaggcag

SEQ ID NO: 3082339 - RNA, 19 nt, Human
cuuagaauuaguggcacuu

SEQ ID NO: 3082340 - RNA, 23 nt, Human
cuguucuuucuggcuaugcauuu

SEQ ID NO: 3082341 - RNA, 16 nt, Human
cuguugcccaggcugg

SEQ ID NO: 3082342 - RNA, 15 nt, Human
cuguugcccaggcug

SEQ ID NO: 3082343 - RNA, 14 nt, Human
cuguugcccaggcu

SEQ ID NO: 3082344 - RNA, 13 nt, Human
cuguugcccaggc

SEQ ID NO: 3082345 - RNA, 12 nt, Human
cuguugcccagg

SEQ ID NO: 3082346 - RNA, 21 nt, Human
cuguucuuucuggcuaugcau

SEQ ID NO: 3082347 - RNA, 14 nt, Human
cuguucuuucuggc

SEQ ID NO: 3082348 - RNA, 13 nt, Human
cuguucuuucugg

SEQ ID NO: 3082349 - RNA, 21 nt, Human
cuguucuuuccaaaguacacu

SEQ ID NO: 3082350 - RNA, 19 nt, Human
cuguucuuuccaaaguaca

SEQ ID NO: 3082351 - RNA, 16 nt, Human
cuguucuuuccaaagu

SEQ ID NO: 3082352 - RNA, 15 nt, Human
cuguucuuuccaaag

SEQ ID NO: 3082353 - RNA, 16 nt, Human
cuguuaauaguucagg

SEQ ID NO: 3082354 - RNA, 17 nt, Human
cuguuugcuaagugagg

SEQ ID NO: 3082355 - RNA, 19 nt, Human
cuguuugcuaagugaggau

SEQ ID NO: 3082356 - RNA, 18 nt, Human
cuguuuagauaauacacc

SEQ ID NO: 3082357 - RNA, 17 nt, Human
cuguuucaaacuuuacu

SEQ ID NO: 3082358 - RNA, 15 nt, Human
cuguuucaaacuuua

SEQ ID NO: 3082359 - RNA, 17 nt, Human
cuguuuagauaauacac

SEQ ID NO: 3082360 - RNA, 14 nt, Human
cuguuuagauaaua

SEQ ID NO: 3082361 - RNA, 17 nt, Human
cuguugcccaggcuggc

SEQ ID NO: 3082362 - RNA, 16 nt, Human
cuuaaaaaguggaaaa

SEQ ID NO: 3082363 - RNA, 17 nt, Human
cuuaaaaaguggaaaaa

SEQ ID NO: 3082364 - RNA, 14 nt, Human
cuguuuuauaauuu

SEQ ID NO: 3082365 - RNA, 15 nt, Human
cuguuuuauaauuuu

SEQ ID NO: 3082366 - RNA, 21 nt, Human
cuguuuuauuuuaauucaguu

SEQ ID NO: 3082367 - RNA, 14 nt, Human
cuuccacaagagcc

SEQ ID NO: 3082368 - RNA, 15 nt, Human
cuuccacaagagccc

SEQ ID NO: 3082369 - RNA, 13 nt, Human
cuuccacaagagc

SEQ ID NO: 3082370 - RNA, 14 nt, Human
cuucagugccaaaa

SEQ ID NO: 3082371 - RNA, 20 nt, Human
cuucagccucccgaguagcu

SEQ ID NO: 3082372 - RNA, 16 nt, Human
cuucagccucccgagu

SEQ ID NO: 3082373 - RNA, 15 nt, Human
cuucagccugaaaga

SEQ ID NO: 3082374 - RNA, 14 nt, Human
cuucagccucccga

SEQ ID NO: 3082375 - RNA, 14 nt, Human
cuucaguaagccgu

SEQ ID NO: 3082376 - RNA, 15 nt, Human
cuucagcugacuuuu

SEQ ID NO: 3082377 - RNA, 19 nt, Human
cuucagcugacuuuucugu

SEQ ID NO: 3082378 - RNA, 21 nt, Human
cuucaaggauccugagccaga

SEQ ID NO: 3082379 - RNA, 22 nt, Human
cuucaaggauccugagccagau

SEQ ID NO: 3082380 - RNA, 23 nt, Human
cuucaaggauccugagccagauu

SEQ ID NO: 3082381 - RNA, 14 nt, Human
cuucacaacagauu

SEQ ID NO: 3082382 - RNA, 12 nt, Human
cuucacaacaga

SEQ ID NO: 3082383 - RNA, 23 nt, Human
cuucacauauugauuuccguuaa

SEQ ID NO: 3082384 - RNA, 14 nt, Human
cuucacauauugau

SEQ ID NO: 3082385 - RNA, 24 nt, Human
cuucagagacuccugcaggcagcc

SEQ ID NO: 3082386 - RNA, 21 nt, Human
cuuagucacugagacagcccg

SEQ ID NO: 3082387 - RNA, 20 nt, Human
cuuagucacugagacagccc

SEQ ID NO: 3082388 - RNA, 22 nt, Human
cuuagucacugagacagcccgg

SEQ ID NO: 3082389 - RNA, 15 nt, Human
cuucaaauauuuccc

SEQ ID NO: 3082390 - RNA, 17 nt, Human
cuucaaauccuugaaga

SEQ ID NO: 3082391 - RNA, 17 nt, Human
cuucaaggauccugagc

SEQ ID NO: 3082392 - RNA, 18 nt, Human
cuucaaggauccugagcc

SEQ ID NO: 3082393 - RNA, 19 nt, Human
cuucaaggauccugagcca

SEQ ID NO: 3082394 - RNA, 20 nt, Human
cuucaaggauccugagccag

SEQ ID NO: 3082395 - RNA, 16 nt, Human
cuucaaggauccugag

SEQ ID NO: 3082396 - RNA, 17 nt, Human
cuucccuacaguugaaa

SEQ ID NO: 3082397 - RNA, 17 nt, Human
cuucgcuccugugucuu

SEQ ID NO: 3082398 - RNA, 16 nt, Human
cuucgcuccugugucu

SEQ ID NO: 3082399 - RNA, 20 nt, Human
cuuccuuggacucauuuuaa

SEQ ID NO: 3082400 - RNA, 21 nt, Human
cuucucacugccaugccagcu

SEQ ID NO: 3082401 - RNA, 16 nt, Human
cuucucacugccaugc

SEQ ID NO: 3082402 - RNA, 19 nt, Human
cuucgggaggucgaggcag

SEQ ID NO: 3082403 - RNA, 19 nt, Human
cuucggccuccauccugag

SEQ ID NO: 3082404 - RNA, 20 nt, Human
cuucggccuccauccugagg

SEQ ID NO: 3082405 - RNA, 21 nt, Human
cugucuuuuuucuaaaguaaa

SEQ ID NO: 3082406 - RNA, 15 nt, Human
cugugaaaggaaaga

SEQ ID NO: 3082407 - RNA, 18 nt, Human
cugucuucaguaagccgu

SEQ ID NO: 3082408 - RNA, 18 nt, Human
cugucuucacaacagauu

SEQ ID NO: 3082409 - RNA, 18 nt, Human
cugucaauuacaggaagu

SEQ ID NO: 3082410 - RNA, 20 nt, Human
cugucauuugagcagggcuc

SEQ ID NO: 3082411 - RNA, 22 nt, Human
cugucauuugagcagggcucag

SEQ ID NO: 3082412 - RNA, 21 nt, Human
cugucauuugagcagggcuca

SEQ ID NO: 3082413 - RNA, 18 nt, Human
cugugaaaguacauuugg

SEQ ID NO: 3082414 - RNA, 16 nt, Human
cugugaaaggaaagag

SEQ ID NO: 3082415 - RNA, 22 nt, Human
cugugaaaggaaagagggaggu

SEQ ID NO: 3082416 - RNA, 15 nt, Human
cugugauggggcccu

SEQ ID NO: 3082417 - RNA, 16 nt, Human
cugugauggggcccug

SEQ ID NO: 3082418 - RNA, 21 nt, Human
cugugauggggcccugccucc

SEQ ID NO: 3082419 - RNA, 23 nt, Human
cugugauggggcccugccuccuu

SEQ ID NO: 3082420 - RNA, 22 nt, Human
cugugccauuuuguauuuuacu

SEQ ID NO: 3082421 - RNA, 15 nt, Human
cugugccaugugcca

SEQ ID NO: 3082422 - RNA, 19 nt, Human
cugugcccuaaaguguauu

SEQ ID NO: 3082423 - RNA, 14 nt, Human
cugugccaugugcc

SEQ ID NO: 3082424 - RNA, 19 nt, Human
cuguuaaaagaugaaaaua

SEQ ID NO: 3082425 - RNA, 16 nt, Human
cuguuaaaagaugaaa

SEQ ID NO: 3082426 - RNA, 15 nt, Human
cuguuaaaagaugaa

SEQ ID NO: 3082427 - RNA, 14 nt, Human
cugugugcucagga

SEQ ID NO: 3082428 - RNA, 20 nt, Human
cugugucuuuuuucacuaca

SEQ ID NO: 3082429 - RNA, 23 nt, Human
cugugucuugcaauggcagccuu

SEQ ID NO: 3082430 - RNA, 24 nt, Human
cuguggaucaaauccagccugcug

SEQ ID NO: 3082431 - RNA, 14 nt, Human
cuguggaucaaauc

SEQ ID NO: 3082432 - RNA, 22 nt, Human
cuguggguuucuaaagcugcca

SEQ ID NO: 3082433 - RNA, 21 nt, Human
cuguggguuucuaaagcugcc

SEQ ID NO: 3082434 - RNA, 15 nt, Human
cugggucgcccugga

SEQ ID NO: 3082435 - RNA, 13 nt, Human
cugggucgcccug

SEQ ID NO: 3082436 - RNA, 16 nt, Human
cugggggccucuucug

SEQ ID NO: 3082437 - RNA, 14 nt, Human
cugggggcugggca

SEQ ID NO: 3082438 - RNA, 18 nt, Human
cugggcuugucuguagau

SEQ ID NO: 3082439 - RNA, 22 nt, Human
cugggcuuggggaccagagcug

SEQ ID NO: 3082440 - RNA, 15 nt, Human
cugggcuucaguggc

SEQ ID NO: 3082441 - RNA, 23 nt, Human
cugggccccugccucucugcagg

SEQ ID NO: 3082442 - RNA, 20 nt, Human
cugggccccugccucucugc

SEQ ID NO: 3082443 - RNA, 19 nt, Human
cugggccccugccucucug

SEQ ID NO: 3082444 - RNA, 21 nt, Human
cugggauuacaagcgugagcc

SEQ ID NO: 3082445 - RNA, 19 nt, Human
cugggccucggaccccacu

SEQ ID NO: 3082446 - RNA, 17 nt, Human
cugggccucggacccca

SEQ ID NO: 3082447 - RNA, 18 nt, Human
cugguggcagugggagcu

SEQ ID NO: 3082448 - RNA, 14 nt, Human
cugguggcaguggg

SEQ ID NO: 3082449 - RNA, 20 nt, Human
cugguggcagcucaccucuc

SEQ ID NO: 3082450 - RNA, 15 nt, Human
cugguggcagcugcg

SEQ ID NO: 3082451 - RNA, 17 nt, Human
cugguggcagcucaccu

SEQ ID NO: 3082452 - RNA, 18 nt, Human
cugguggcagcucaccuc

SEQ ID NO: 3082453 - RNA, 16 nt, Human
cugguggcagcucacc

SEQ ID NO: 3082454 - RNA, 21 nt, Human
cugguuagagguucccuuuga

SEQ ID NO: 3082455 - RNA, 22 nt, Human
cugguuagagguucccuuugac

SEQ ID NO: 3082456 - RNA, 14 nt, Human
cuguacagagccca

SEQ ID NO: 3082457 - RNA, 15 nt, Human
cuguacagagcccac

SEQ ID NO: 3082458 - RNA, 18 nt, Human
cuguacagagcccacgcc

SEQ ID NO: 3082459 - RNA, 22 nt, Human
cuguacagagcccacgccccca

SEQ ID NO: 3082460 - RNA, 15 nt, Human
cuguaauuugugaua

SEQ ID NO: 3082461 - RNA, 14 nt, Human
cuguaauuugugau

SEQ ID NO: 3082462 - RNA, 18 nt, Human
cuguacgucugacaggca

SEQ ID NO: 3082463 - RNA, 16 nt, Human
cuguacgucugacagg

SEQ ID NO: 3082464 - RNA, 15 nt, Human
cuguacgucugacag

SEQ ID NO: 3082465 - RNA, 14 nt, Human
cuguacgucugaca

SEQ ID NO: 3082466 - RNA, 21 nt, Human
cuguacaugaaaacacauuuu

SEQ ID NO: 3082467 - RNA, 20 nt, Human
cuguacaugaaaacacauuu

SEQ ID NO: 3082468 - RNA, 17 nt, Human
cuguacaugaaaacaca

SEQ ID NO: 3082469 - RNA, 20 nt, Human
cuguacgucugacaggcaau

SEQ ID NO: 3082470 - RNA, 19 nt, Human
cuguacgucugacaggcaa

SEQ ID NO: 3082471 - RNA, 19 nt, Human
cuguaucccaugagccuca

SEQ ID NO: 3082472 - RNA, 20 nt, Human
cuguaucccaugagccucag

SEQ ID NO: 3082473 - RNA, 22 nt, Human
cuguaucccaugagccucagca

SEQ ID NO: 3082474 - RNA, 21 nt, Human
cuguaucccaugagccucagc

SEQ ID NO: 3082475 - RNA, 15 nt, Human
cugucaauuacagga

SEQ ID NO: 3082476 - RNA, 16 nt, Human
cugucaauuacaggaa

SEQ ID NO: 3082477 - RNA, 13 nt, Human
cugucaauuacag

SEQ ID NO: 3082478 - RNA, 20 nt, Human
cuguauuuuguuuuugucuu

SEQ ID NO: 3082479 - RNA, 20 nt, Human
cccaccgcagacaggaccag

SEQ ID NO: 3082480 - RNA, 23 nt, Human
cccaccagugccucucccugcug

SEQ ID NO: 3082481 - RNA, 15 nt, Human
cccaccagugccucu

SEQ ID NO: 3082482 - RNA, 16 nt, Human
cccaccagugccucuc

SEQ ID NO: 3082483 - RNA, 19 nt, Human
cccaccgcagacaggacca

SEQ ID NO: 3082484 - RNA, 13 nt, Human
cccaccagugccu

SEQ ID NO: 3082485 - RNA, 14 nt, Human
cccaccagugccuc

SEQ ID NO: 3082486 - RNA, 19 nt, Human
cccaccucucucacuccuu

SEQ ID NO: 3082487 - RNA, 22 nt, Human
cccaccucucucacuccuugaa

SEQ ID NO: 3082488 - RNA, 17 nt, Human
cccaccucagccucccg

SEQ ID NO: 3082489 - RNA, 20 nt, Human
cccacgcuggagugcaguga

SEQ ID NO: 3082490 - RNA, 19 nt, Human
cccacgcuggagugcagug

SEQ ID NO: 3082491 - RNA, 14 nt, Human
cccacgcuggagug

SEQ ID NO: 3082492 - RNA, 23 nt, Human
cccacuugagaauuacccuuuug

SEQ ID NO: 3082493 - RNA, 12 nt, Human
cccacuucugcc

SEQ ID NO: 3082494 - RNA, 20 nt, Human
cccacgacugcccggcaggg

SEQ ID NO: 3082495 - RNA, 21 nt, Human
cccacgacugcccggcagggu

SEQ ID NO: 3082496 - RNA, 20 nt, Human
cccaccuuggcugcagggag

SEQ ID NO: 3082497 - RNA, 16 nt, Human
cccaccuggccucugc

SEQ ID NO: 3082498 - RNA, 19 nt, Human
cccaccuggccucugcacu

SEQ ID NO: 3082499 - RNA, 21 nt, Human
cccaccuggccucugcacucc

SEQ ID NO: 3082500 - RNA, 17 nt, Human
cccaccuggccucugca

SEQ ID NO: 3082501 - RNA, 19 nt, Human
cccacagcgcuggccggga

SEQ ID NO: 3082502 - RNA, 13 nt, Human
cccacagcgcugg

SEQ ID NO: 3082503 - RNA, 20 nt, Human
cccacaagaaaugaaagcag

SEQ ID NO: 3082504 - RNA, 16 nt, Human
cccaaugcacuuuguu

SEQ ID NO: 3082505 - RNA, 20 nt, Human
cccaaugcacuuuguucugg

SEQ ID NO: 3082506 - RNA, 21 nt, Human
cccacaaaggagagcuagcag

SEQ ID NO: 3082507 - RNA, 13 nt, Human
cccacaagaaaug

SEQ ID NO: 3082508 - RNA, 15 nt, Human
cccuggacugugugc

SEQ ID NO: 3082509 - RNA, 16 nt, Human
cccugguggcagcuca

SEQ ID NO: 3082510 - RNA, 17 nt, Human
cccugguggcagcucac

SEQ ID NO: 3082511 - RNA, 15 nt, Human
cccugguggcagcuc

SEQ ID NO: 3082512 - RNA, 13 nt, Human
cccugcccaccug

SEQ ID NO: 3082513 - RNA, 14 nt, Human
cccugcccaccugg

SEQ ID NO: 3082514 - RNA, 17 nt, Human
cccugcccaccuggccu

SEQ ID NO: 3082515 - RNA, 18 nt, Human
cccugcccaccuggccuc

SEQ ID NO: 3082516 - RNA, 16 nt, Human
cccugcuggguguggc

SEQ ID NO: 3082517 - RNA, 21 nt, Human
cccugcuggguguggcgcagc

SEQ ID NO: 3082518 - RNA, 13 nt, Human
cccuccagagccc

SEQ ID NO: 3082519 - RNA, 12 nt, Human
cccucuggggcu

SEQ ID NO: 3082520 - RNA, 14 nt, Human
cccugaggcccaga

SEQ ID NO: 3082521 - RNA, 15 nt, Human
cccugaggcccagag

SEQ ID NO: 3082522 - RNA, 16 nt, Human
cccugaggcccagagg

SEQ ID NO: 3082523 - RNA, 17 nt, Human
cccugaggcccagaggg

SEQ ID NO: 3082524 - RNA, 18 nt, Human
cccugaggcccagagggc

SEQ ID NO: 3082525 - RNA, 19 nt, Human
cccugaggcccagagggcc

SEQ ID NO: 3082526 - RNA, 20 nt, Human
cccugaggcccagagggccu

SEQ ID NO: 3082527 - RNA, 23 nt, Human
cccugaggcccagagggccugca

SEQ ID NO: 3082528 - RNA, 16 nt, Human
cccucuggggcuguuc

SEQ ID NO: 3082529 - RNA, 13 nt, Human
cccugaggcccag

SEQ ID NO: 3082530 - RNA, 15 nt, Human
cccugaaagcccuga

SEQ ID NO: 3082531 - RNA, 19 nt, Human
cccugcacuugcagacucu

SEQ ID NO: 3082532 - RNA, 12 nt, Human
cccugcacuugc

SEQ ID NO: 3082533 - RNA, 13 nt, Human
cccugcacagcag

SEQ ID NO: 3082534 - RNA, 22 nt, Human
cccugcacagcaggcugccagu

SEQ ID NO: 3082535 - RNA, 14 nt, Human
cccugcacagcagg

SEQ ID NO: 3082536 - RNA, 15 nt, Human
cccugcacagcaggc

SEQ ID NO: 3082537 - RNA, 20 nt, Human
cccugcacagcaggcugcca

SEQ ID NO: 3082538 - RNA, 21 nt, Human
cccugcacagcaggcugccag

SEQ ID NO: 3082539 - RNA, 20 nt, Human
cccuacaguugaaaaacagc

SEQ ID NO: 3082540 - RNA, 16 nt, Human
cccgggcucugccucc

SEQ ID NO: 3082541 - RNA, 13 nt, Human
cccgucuccagcu

SEQ ID NO: 3082542 - RNA, 16 nt, Human
cccgucuccagcugcu

SEQ ID NO: 3082543 - RNA, 17 nt, Human
cccgucuccagcugcug

SEQ ID NO: 3082544 - RNA, 15 nt, Human
cccgugggguuccuc

SEQ ID NO: 3082545 - RNA, 21 nt, Human
cccgaguagcugggacuacag

SEQ ID NO: 3082546 - RNA, 18 nt, Human
cccgaguagcugggacua

SEQ ID NO: 3082547 - RNA, 17 nt, Human
cccgaguagcugggacu

SEQ ID NO: 3082548 - RNA, 16 nt, Human
cccgaguagcugggac

SEQ ID NO: 3082549 - RNA, 15 nt, Human
cccgaguagcuggga

SEQ ID NO: 3082550 - RNA, 14 nt, Human
cccgaguagcuggg

SEQ ID NO: 3082551 - RNA, 13 nt, Human
cccgaguagcugg

SEQ ID NO: 3082552 - RNA, 15 nt, Human
cccagagggccugca

SEQ ID NO: 3082553 - RNA, 21 nt, Human
cccgaggccuucucugaagga

SEQ ID NO: 3082554 - RNA, 14 nt, Human
cccagagggccugc

SEQ ID NO: 3082555 - RNA, 19 nt, Human
cccgcugucagccauuccu

SEQ ID NO: 3082556 - RNA, 20 nt, Human
cccgcugucagccauuccug

SEQ ID NO: 3082557 - RNA, 22 nt, Human
cccgaguagcugggacuacagg

SEQ ID NO: 3082558 - RNA, 14 nt, Human
cccgggcucugccu

SEQ ID NO: 3082559 - RNA, 15 nt, Human
cccgggcucugccuc

SEQ ID NO: 3082560 - RNA, 12 nt, Human
cccgggcucugc

SEQ ID NO: 3082561 - RNA, 21 nt, Human
ccucaucuccccaucauuggu

SEQ ID NO: 3082562 - RNA, 13 nt, Human
ccucauccucaua

SEQ ID NO: 3082563 - RNA, 20 nt, Human
ccucauccucauacccaccc

SEQ ID NO: 3082564 - RNA, 13 nt, Human
ccucaucaccaac

SEQ ID NO: 3082565 - RNA, 14 nt, Human
ccucaucaccaacg

SEQ ID NO: 3082566 - RNA, 22 nt, Human
ccucauaguaugguggcugggu

SEQ ID NO: 3082567 - RNA, 21 nt, Human
ccucauaguaugguggcuggg

SEQ ID NO: 3082568 - RNA, 13 nt, Human
ccucauacccacc

SEQ ID NO: 3082569 - RNA, 20 nt, Human
ccucauaguaugguggcugg

SEQ ID NO: 3082570 - RNA, 20 nt, Human
ccucagucuggcccuuccuu

SEQ ID NO: 3082571 - RNA, 12 nt, Human
ccucauacccac

SEQ ID NO: 3082572 - RNA, 11 nt, Human
ccucagugcca

SEQ ID NO: 3082573 - RNA, 19 nt, Human
ccucagucuggcccuuccu

SEQ ID NO: 3082574 - RNA, 13 nt, Human
ccuccagagcccc

SEQ ID NO: 3082575 - RNA, 12 nt, Human
ccuccagagccc

SEQ ID NO: 3082576 - RNA, 15 nt, Human
ccuccagagccccac

SEQ ID NO: 3082577 - RNA, 18 nt, Human
ccuccagagccccacagc

SEQ ID NO: 3082578 - RNA, 19 nt, Human
ccuccagagccccacagcc

SEQ ID NO: 3082579 - RNA, 20 nt, Human
ccuccagagccccacagccc

SEQ ID NO: 3082580 - RNA, 19 nt, Human
ccuccaggugcacaagcuc

SEQ ID NO: 3082581 - RNA, 21 nt, Human
ccuccaggugcacaagcucca

SEQ ID NO: 3082582 - RNA, 22 nt, Human
ccuccaggugcacaagcuccaa

SEQ ID NO: 3082583 - RNA, 14 nt, Human
ccuccauccugagg

SEQ ID NO: 3082584 - RNA, 15 nt, Human
ccucccaaagugcug

SEQ ID NO: 3082585 - RNA, 23 nt, Human
ccuccaugugggcuaguugggcu

SEQ ID NO: 3082586 - RNA, 16 nt, Human
ccucccaaagugcugg

SEQ ID NO: 3082587 - RNA, 18 nt, Human
ccucuaucccggcuuugg

SEQ ID NO: 3082588 - RNA, 16 nt, Human
ccucuaggaggucucu

SEQ ID NO: 3082589 - RNA, 16 nt, Human
ccucggugccuuccuc

SEQ ID NO: 3082590 - RNA, 14 nt, Human
ccucgguguggaga

SEQ ID NO: 3082591 - RNA, 10 nt, Human
ccucccuccc

SEQ ID NO: 3082592 - RNA, 14 nt, Human
ccuccucagaucuu

SEQ ID NO: 3082593 - RNA, 21 nt, Human
ccucccgaguagcugggacua

SEQ ID NO: 3082594 - RNA, 20 nt, Human
ccucccgaguagcugggacu

SEQ ID NO: 3082595 - RNA, 19 nt, Human
ccucccgaguagcugggac

SEQ ID NO: 3082596 - RNA, 14 nt, Human
ccuccugggcuaag

SEQ ID NO: 3082597 - RNA, 23 nt, Human
ccuccugccucgaacuggcugca

SEQ ID NO: 3082598 - RNA, 13 nt, Human
ccuccugccucga

SEQ ID NO: 3082599 - RNA, 17 nt, Human
ccucccgaauagcuggg

SEQ ID NO: 3082600 - RNA, 16 nt, Human
ccuaaauauauuuuaa

SEQ ID NO: 3082601 - RNA, 18 nt, Human
ccuaaauauauuuuaaga

SEQ ID NO: 3082602 - RNA, 14 nt, Human
ccuaaaguguauuu

SEQ ID NO: 3082603 - RNA, 13 nt, Human
ccuaguuccacca

SEQ ID NO: 3082604 - RNA, 21 nt, Human
ccuaguuccaccaucaagcca

SEQ ID NO: 3082605 - RNA, 23 nt, Human
ccuaguuccaccaucaagccacc

SEQ ID NO: 3082606 - RNA, 18 nt, Human
ccuauauuguuuucagug

SEQ ID NO: 3082607 - RNA, 22 nt, Human
ccuauauuguuuucaguguaca

SEQ ID NO: 3082608 - RNA, 14 nt, Human
ccgaggccuucucu

SEQ ID NO: 3082609 - RNA, 20 nt, Human
cccugguggcagcucaccuc

SEQ ID NO: 3082610 - RNA, 17 nt, Human
ccgaguagcugggacua

SEQ ID NO: 3082611 - RNA, 16 nt, Human
ccgaguagcugggacu

SEQ ID NO: 3082612 - RNA, 20 nt, Human
ccgaguagcugggacuacag

SEQ ID NO: 3082613 - RNA, 14 nt, Human
ccgcacugggcuug

SEQ ID NO: 3082614 - RNA, 15 nt, Human
ccgccuugcccagcc

SEQ ID NO: 3082615 - RNA, 16 nt, Human
ccgccuugcccagccu

SEQ ID NO: 3082616 - RNA, 17 nt, Human
ccgccuugcccagccug

SEQ ID NO: 3082617 - RNA, 22 nt, Human
ccgccuugcccagccuggaugc

SEQ ID NO: 3082618 - RNA, 23 nt, Human
ccgcuaagagggagggagggcuc

SEQ ID NO: 3082619 - RNA, 21 nt, Human
ccgcuaagagggagggagggc

SEQ ID NO: 3082620 - RNA, 20 nt, Human
ccgggcgcgguggcucacgc

SEQ ID NO: 3082621 - RNA, 18 nt, Human
ccgggaccccgagccugg

SEQ ID NO: 3082622 - RNA, 16 nt, Human
ccgggcguggugguga

SEQ ID NO: 3082623 - RNA, 22 nt, Human
ccgggcucugccucccaucacc

SEQ ID NO: 3082624 - RNA, 17 nt, Human
ccgggaccccgagccug

SEQ ID NO: 3082625 - RNA, 20 nt, Human
ccgggaagggggcugggaca

SEQ ID NO: 3082626 - RNA, 17 nt, Human
ccggcuggccuggcccc

SEQ ID NO: 3082627 - RNA, 18 nt, Human
ccggcuggccuggccccu

SEQ ID NO: 3082628 - RNA, 15 nt, Human
ccggcuggccuggcc

SEQ ID NO: 3082629 - RNA, 19 nt, Human
ccgcuuucuacccagcgag

SEQ ID NO: 3082630 - RNA, 12 nt, Human
ccgcuuucuacc

SEQ ID NO: 3082631 - RNA, 15 nt, Human
ccuguuuaagagaca

SEQ ID NO: 3082632 - RNA, 12 nt, Human
ccuguuuaagag

SEQ ID NO: 3082633 - RNA, 23 nt, Human
ccuguugggccaggagccuccug

SEQ ID NO: 3082634 - RNA, 21 nt, Human
ccuguuaaaagaugaaaauau

SEQ ID NO: 3082635 - RNA, 20 nt, Human
ccuguuaaaagaugaaaaua

SEQ ID NO: 3082636 - RNA, 14 nt, Human
ccuguuuguuucug

SEQ ID NO: 3082637 - RNA, 18 nt, Human
ccuguuuguuucugaaag

SEQ ID NO: 3082638 - RNA, 16 nt, Human
ccuguuucugcagcca

SEQ ID NO: 3082639 - RNA, 21 nt, Human
ccugugugugcgccuacagga

SEQ ID NO: 3082640 - RNA, 20 nt, Human
ccugugugugcgccuacagg

SEQ ID NO: 3082641 - RNA, 22 nt, Human
ccugugucuugcaauggcagcc

SEQ ID NO: 3082642 - RNA, 21 nt, Human
ccugugucuugcaauggcagc

SEQ ID NO: 3082643 - RNA, 19 nt, Human
ccugugucuugcaauggca

SEQ ID NO: 3082644 - RNA, 17 nt, Human
ccugugucuugcaaugg

SEQ ID NO: 3082645 - RNA, 14 nt, Human
ccuuacacaauggu

SEQ ID NO: 3082646 - RNA, 20 nt, Human
ccuuacacaaugguuuucuu

SEQ ID NO: 3082647 - RNA, 13 nt, Human
ccuuaccagcaga

SEQ ID NO: 3082648 - RNA, 20 nt, Human
ccuuaccagcagagcaccuu

SEQ ID NO: 3082649 - RNA, 15 nt, Human
ccuuacccucauguu

SEQ ID NO: 3082650 - RNA, 19 nt, Human
ccuuaccugccaggaagcc

SEQ ID NO: 3082651 - RNA, 18 nt, Human
ccuuagaagucacacagu

SEQ ID NO: 3082652 - RNA, 17 nt, Human
ccuuagaagucacacag

SEQ ID NO: 3082653 - RNA, 22 nt, Human
ccuucauuuggcauuccccacu

SEQ ID NO: 3082654 - RNA, 14 nt, Human
ccuucggccuccau

SEQ ID NO: 3082655 - RNA, 19 nt, Human
ccuucggccuccauccuga

SEQ ID NO: 3082656 - RNA, 20 nt, Human
ccuucggccuccauccugag

SEQ ID NO: 3082657 - RNA, 19 nt, Human
ccuucauuuggcauucccc

SEQ ID NO: 3082658 - RNA, 14 nt, Human
ccuucagugccaaa

SEQ ID NO: 3082659 - RNA, 11 nt, Human
ccuucagugcc

SEQ ID NO: 3082660 - RNA, 10 nt, Human
ccuucagugc

SEQ ID NO: 3082661 - RNA, 21 nt, Human
ccuucaccuuuguccccaccg

SEQ ID NO: 3082662 - RNA, 19 nt, Human
ccuucaccuuuguccccac

SEQ ID NO: 3082663 - RNA, 20 nt, Human
ccuucaccuuuguccccacc

SEQ ID NO: 3082664 - RNA, 17 nt, Human
ccuucacagaugggugc

SEQ ID NO: 3082665 - RNA, 13 nt, Human
ccuugaacuagga

SEQ ID NO: 3082666 - RNA, 20 nt, Human
ccuugaaaacuuuaugcuaa

SEQ ID NO: 3082667 - RNA, 19 nt, Human
ccuugaacuuugaccucug

SEQ ID NO: 3082668 - RNA, 13 nt, Human
ccuugacucuuuc

SEQ ID NO: 3082669 - RNA, 22 nt, Human
ccuugaccauucuccaccugcc

SEQ ID NO: 3082670 - RNA, 23 nt, Human
ccuugaccauucuccaccugcca

SEQ ID NO: 3082671 - RNA, 15 nt, Human
ccuucugugaaagua

SEQ ID NO: 3082672 - RNA, 15 nt, Human
ccuucuccuucaccu

SEQ ID NO: 3082673 - RNA, 19 nt, Human
ccuucuccuucaccuuugu

SEQ ID NO: 3082674 - RNA, 15 nt, Human
ccuucggcgccuuaa

SEQ ID NO: 3082675 - RNA, 15 nt, Human
ccuugucggccccac

SEQ ID NO: 3082676 - RNA, 21 nt, Human
ccuugucggccccaccagugc

SEQ ID NO: 3082677 - RNA, 16 nt, Human
ccuuugacgccauccc

SEQ ID NO: 3082678 - RNA, 17 nt, Human
ccuuugacgccauccca

SEQ ID NO: 3082679 - RNA, 18 nt, Human
ccuuugacgccaucccag

SEQ ID NO: 3082680 - RNA, 21 nt, Human
ccuugguuaggcauuguggga

SEQ ID NO: 3082681 - RNA, 22 nt, Human
ccuugguuaggcauugugggaa

SEQ ID NO: 3082682 - RNA, 22 nt, Human
ccuuggugucgggcaugacacg

SEQ ID NO: 3082683 - RNA, 21 nt, Human
ccuuggugucgggcaugacac

SEQ ID NO: 3082684 - RNA, 19 nt, Human
ccuuggggcugaugcaguu

SEQ ID NO: 3082685 - RNA, 14 nt, Human
ccuugaugaagaag

SEQ ID NO: 3082686 - RNA, 21 nt, Human
cgaagaguauuuuugacagaa

SEQ ID NO: 3082687 - RNA, 14 nt, Human
cgaacuggcugcaa

SEQ ID NO: 3082688 - RNA, 12 nt, Human
cgaacuggcugc

SEQ ID NO: 3082689 - RNA, 22 nt, Human
cgaaagggacuuggaagcuccg

SEQ ID NO: 3082690 - RNA, 20 nt, Human
cgaaaggaugaaagugacca

SEQ ID NO: 3082691 - RNA, 19 nt, Human
cgaaagggacuuggaagcu

SEQ ID NO: 3082692 - RNA, 12 nt, Human
cgaaagaacagu

SEQ ID NO: 3082693 - RNA, 21 nt, Human
cgaaagaacaguccauugaaa

SEQ ID NO: 3082694 - RNA, 18 nt, Human
cgaaaacguggcugcuuc

SEQ ID NO: 3082695 - RNA, 19 nt, Human
cgaaaacguggcugcuuca

SEQ ID NO: 3082696 - RNA, 15 nt, Human
cgaaaacguggcugc

SEQ ID NO: 3082697 - RNA, 20 nt, Human
cgaaaacguggcugcuucaa

SEQ ID NO: 3082698 - RNA, 20 nt, Human
ccuuugacgccaucccagcc

SEQ ID NO: 3082699 - RNA, 21 nt, Human
ccuuugacgccaucccagccc

SEQ ID NO: 3082700 - RNA, 22 nt, Human
ccuuugacgccaucccagcccc

SEQ ID NO: 3082701 - RNA, 20 nt, Human
cgagaucacgccacugcacu

SEQ ID NO: 3082702 - RNA, 18 nt, Human
cgagaucacgccacugca

SEQ ID NO: 3082703 - RNA, 20 nt, Human
cgagauugcaccacugcacu

SEQ ID NO: 3082704 - RNA, 14 nt, Human
cgagcaugccugga

SEQ ID NO: 3082705 - RNA, 13 nt, Human
cgagcaugccugg

SEQ ID NO: 3082706 - RNA, 16 nt, Human
cgagcaugccuggaug

SEQ ID NO: 3082707 - RNA, 17 nt, Human
cgagcaugccuggaugg

SEQ ID NO: 3082708 - RNA, 20 nt, Human
cgagcaggcuucuucccccc

SEQ ID NO: 3082709 - RNA, 18 nt, Human
cgagcaggcuacugucag

SEQ ID NO: 3082710 - RNA, 18 nt, Human
cgagauagccaaggccaa

SEQ ID NO: 3082711 - RNA, 17 nt, Human
cgagaucacgccacugc

SEQ ID NO: 3082712 - RNA, 14 nt, Human
cgaauagcugggac

SEQ ID NO: 3082713 - RNA, 13 nt, Human
cgaauagcuggga

SEQ ID NO: 3082714 - RNA, 17 nt, Human
cgccaugcuccuggccc

SEQ ID NO: 3082715 - RNA, 17 nt, Human
cgccagauucuuuccug

SEQ ID NO: 3082716 - RNA, 19 nt, Human
cgccagauucuuuccugag

SEQ ID NO: 3082717 - RNA, 20 nt, Human
cgccagauucuuuccugagg

SEQ ID NO: 3082718 - RNA, 21 nt, Human
cgccagauucuuuccugaggc

SEQ ID NO: 3082719 - RNA, 22 nt, Human
cgccaggggaaaaucagccugc

SEQ ID NO: 3082720 - RNA, 15 nt, Human
cgcagacaggaccag

SEQ ID NO: 3082721 - RNA, 16 nt, Human
cgcagacaggaccagg

SEQ ID NO: 3082722 - RNA, 14 nt, Human
cgcagcccugcaga

SEQ ID NO: 3082723 - RNA, 20 nt, Human
cgauuucuguuuagauaaua

SEQ ID NO: 3082724 - RNA, 18 nt, Human
cgagcaugccuggauggg

SEQ ID NO: 3082725 - RNA, 16 nt, Human
cgagccauuuguccca

SEQ ID NO: 3082726 - RNA, 19 nt, Human
cgagccauuugucccaagu

SEQ ID NO: 3082727 - RNA, 20 nt, Human
cgagccauuugucccaagug

SEQ ID NO: 3082728 - RNA, 21 nt, Human
cgagccauuugucccaagugc

SEQ ID NO: 3082729 - RNA, 16 nt, Human
cgagcccugguggcag

SEQ ID NO: 3082730 - RNA, 15 nt, Human
cgagcccugguggca

SEQ ID NO: 3082731 - RNA, 22 nt, Human
cgagccauuugucccaagugcc

SEQ ID NO: 3082732 - RNA, 23 nt, Human
cgagccauuugucccaagugcca

SEQ ID NO: 3082733 - RNA, 16 nt, Human
ccugagcuuucugcua

SEQ ID NO: 3082734 - RNA, 21 nt, Human
ccugaggcccagagggccugc

SEQ ID NO: 3082735 - RNA, 18 nt, Human
ccugaggcccagagggcc

SEQ ID NO: 3082736 - RNA, 14 nt, Human
ccugagcuuucugc

SEQ ID NO: 3082737 - RNA, 11 nt, Human
ccugagcccca

SEQ ID NO: 3082738 - RNA, 20 nt, Human
ccugagccagauuucacucu

SEQ ID NO: 3082739 - RNA, 23 nt, Human
ccugacaacacucauugaccuga

SEQ ID NO: 3082740 - RNA, 13 nt, Human
ccugccaggaagc

SEQ ID NO: 3082741 - RNA, 14 nt, Human
ccugccaggaagcc

SEQ ID NO: 3082742 - RNA, 15 nt, Human
ccugccaggaagcca

SEQ ID NO: 3082743 - RNA, 17 nt, Human
ccugccaggaagccagc

SEQ ID NO: 3082744 - RNA, 15 nt, Human
ccugccaggcauggu

SEQ ID NO: 3082745 - RNA, 23 nt, Human
ccugccaggaagccagcaggcuc

SEQ ID NO: 3082746 - RNA, 16 nt, Human
ccugccaggcauggug

SEQ ID NO: 3082747 - RNA, 11 nt, Human
ccugccaggga

SEQ ID NO: 3082748 - RNA, 18 nt, Human
ccugccaggaagccagca

SEQ ID NO: 3082749 - RNA, 19 nt, Human
ccugccaggaagccagcag

SEQ ID NO: 3082750 - RNA, 21 nt, Human
ccugccaggaagccagcaggc

SEQ ID NO: 3082751 - RNA, 22 nt, Human
ccugccaggaagccagcaggcu

SEQ ID NO: 3082752 - RNA, 12 nt, Human
ccugccagggac

SEQ ID NO: 3082753 - RNA, 13 nt, Human
ccugccagggaca

SEQ ID NO: 3082754 - RNA, 14 nt, Human
ccugccagggacag

SEQ ID NO: 3082755 - RNA, 15 nt, Human
ccugccagggacaga

SEQ ID NO: 3082756 - RNA, 16 nt, Human
ccugccagggacagag

SEQ ID NO: 3082757 - RNA, 19 nt, Human
ccugcaauuucauaugcug

SEQ ID NO: 3082758 - RNA, 14 nt, Human
ccugcaagaacaag

SEQ ID NO: 3082759 - RNA, 22 nt, Human
ccugcaaccugauugugucucu

SEQ ID NO: 3082760 - RNA, 21 nt, Human
ccugcaaccugauugugucuc

SEQ ID NO: 3082761 - RNA, 17 nt, Human
ccugauugugucucuug

SEQ ID NO: 3082762 - RNA, 19 nt, Human
ccugauugugucucuuggu

SEQ ID NO: 3082763 - RNA, 11 nt, Human
ccugaggcccu

SEQ ID NO: 3082764 - RNA, 12 nt, Human
ccugaggcccuu

SEQ ID NO: 3082765 - RNA, 19 nt, Human
ccugaugcuucuucagaga

SEQ ID NO: 3082766 - RNA, 20 nt, Human
ccugaugcuucuucagagac

SEQ ID NO: 3082767 - RNA, 21 nt, Human
ccugaugcuucuucagagacu

SEQ ID NO: 3082768 - RNA, 22 nt, Human
ccugaugcuucuucagagacuc

SEQ ID NO: 3082769 - RNA, 15 nt, Human
ccugauugugucucu

SEQ ID NO: 3082770 - RNA, 23 nt, Human
ccugccuguugggccaggagccu

SEQ ID NO: 3082771 - RNA, 22 nt, Human
ccugccccucaacucuccucca

SEQ ID NO: 3082772 - RNA, 16 nt, Human
ccugcggugcuaucuc

SEQ ID NO: 3082773 - RNA, 17 nt, Human
ccugcggugcuaucucc

SEQ ID NO: 3082774 - RNA, 14 nt, Human
ccugcuucaaauau

SEQ ID NO: 3082775 - RNA, 23 nt, Human
ccuggaaaucaggguuaguauug

SEQ ID NO: 3082776 - RNA, 22 nt, Human
ccugcucuccgaccagacaccu

SEQ ID NO: 3082777 - RNA, 22 nt, Human
ccugcggugcuaucucccccag

SEQ ID NO: 3082778 - RNA, 21 nt, Human
ccugcucuccgaccagacacc

SEQ ID NO: 3082779 - RNA, 18 nt, Human
ccuggaauauauaaccag

SEQ ID NO: 3082780 - RNA, 12 nt, Human
ccuggcagcccc

SEQ ID NO: 3082781 - RNA, 13 nt, Human
ccuggcagccccu

SEQ ID NO: 3082782 - RNA, 23 nt, Human
ccuggcacccggccccugcuggu

SEQ ID NO: 3082783 - RNA, 22 nt, Human
ccuggcacccggccccugcugg

SEQ ID NO: 3082784 - RNA, 22 nt, Human
ccuggcuccaaacccucgaggc

SEQ ID NO: 3082785 - RNA, 15 nt, Human
ccuggccagaugcac

SEQ ID NO: 3082786 - RNA, 20 nt, Human
ccuggcuccaaacccucgag

SEQ ID NO: 3082787 - RNA, 20 nt, Human
ccaggcccucugcccacucc

SEQ ID NO: 3082788 - RNA, 21 nt, Human
ccaggcccucugcccacuccc

SEQ ID NO: 3082789 - RNA, 22 nt, Human
ccaggcccucugcccacucccu

SEQ ID NO: 3082790 - RNA, 23 nt, Human
ccaggcccucugcccacucccug

SEQ ID NO: 3082791 - RNA, 17 nt, Human
ccaggcuuagucacuga

SEQ ID NO: 3082792 - RNA, 24 nt, Human
ccaggcuguaucccaugagccuca

SEQ ID NO: 3082793 - RNA, 19 nt, Human
ccaggagccccgaggccuu

SEQ ID NO: 3082794 - RNA, 16 nt, Human
ccaggagccccgaggc

SEQ ID NO: 3082795 - RNA, 20 nt, Human
ccaggagccccgaggccuuc

SEQ ID NO: 3082796 - RNA, 19 nt, Human
ccaggagccuccugcccuu

SEQ ID NO: 3082797 - RNA, 17 nt, Human
ccaggcauuccccagga

SEQ ID NO: 3082798 - RNA, 18 nt, Human
ccaggcauuccccaggag

SEQ ID NO: 3082799 - RNA, 19 nt, Human
ccaggcauuccccaggagg

SEQ ID NO: 3082800 - RNA, 21 nt, Human
ccaggcauuccccaggaggcc

SEQ ID NO: 3082801 - RNA, 22 nt, Human
ccagggacagaggggguggccu

SEQ ID NO: 3082802 - RNA, 20 nt, Human
ccaggcuuagucacugagac

SEQ ID NO: 3082803 - RNA, 14 nt, Human
ccagggacagaggg

SEQ ID NO: 3082804 - RNA, 15 nt, Human
ccagggacagagggg

SEQ ID NO: 3082805 - RNA, 21 nt, Human
ccagggacagaggggguggcc

SEQ ID NO: 3082806 - RNA, 19 nt, Human
ccaggugcacaagcuccaa

SEQ ID NO: 3082807 - RNA, 20 nt, Human
ccaggugcacaagcuccaag

SEQ ID NO: 3082808 - RNA, 18 nt, Human
ccaggugcacaagcucca

SEQ ID NO: 3082809 - RNA, 18 nt, Human
ccagucuggaaugcagug

SEQ ID NO: 3082810 - RNA, 13 nt, Human
ccagugaggcucu

SEQ ID NO: 3082811 - RNA, 20 nt, Human
ccagucuggaaugcaguggu

SEQ ID NO: 3082812 - RNA, 19 nt, Human
ccagucuggaaugcagugg

SEQ ID NO: 3082813 - RNA, 17 nt, Human
ccagguuuuuggucuga

SEQ ID NO: 3082814 - RNA, 24 nt, Human
ccaggugcacaagcuccaagcucc

SEQ ID NO: 3082815 - RNA, 15 nt, Human
ccagguucagcuugu

SEQ ID NO: 3082816 - RNA, 20 nt, Human
ccagugccgagaaggaagcc

SEQ ID NO: 3082817 - RNA, 22 nt, Human
ccagugguuccuaauccucuag

SEQ ID NO: 3082818 - RNA, 14 nt, Human
ccagugaggcucug

SEQ ID NO: 3082819 - RNA, 15 nt, Human
ccagugaggcucugc

SEQ ID NO: 3082820 - RNA, 16 nt, Human
ccagugaggcucugcc

SEQ ID NO: 3082821 - RNA, 23 nt, Human
ccagugcccacaggaucagucug

SEQ ID NO: 3082822 - RNA, 23 nt, Human
ccauauucuguuggccaguguga

SEQ ID NO: 3082823 - RNA, 21 nt, Human
ccaguuauggcuauaggugcu

SEQ ID NO: 3082824 - RNA, 14 nt, Human
ccaguuauggcuau

SEQ ID NO: 3082825 - RNA, 22 nt, Human
ccaguguuguggauuuaacaga

SEQ ID NO: 3082826 - RNA, 19 nt, Human
ccaguguuuuaggagcaug

SEQ ID NO: 3082827 - RNA, 16 nt, Human
cccaaaacucuccucu

SEQ ID NO: 3082828 - RNA, 18 nt, Human
cccaaaacucuccucugc

SEQ ID NO: 3082829 - RNA, 15 nt, Human
cccaaagugcuggga

SEQ ID NO: 3082830 - RNA, 13 nt, Human
cccaaagugcugg

SEQ ID NO: 3082831 - RNA, 14 nt, Human
ccauuuguguuuau

SEQ ID NO: 3082832 - RNA, 13 nt, Human
ccauuugucccaa

SEQ ID NO: 3082833 - RNA, 15 nt, Human
ccauuugucccaagu

SEQ ID NO: 3082834 - RNA, 17 nt, Human
ccauuugucccaagugc

SEQ ID NO: 3082835 - RNA, 19 nt, Human
ccauucuccaccugccagg

SEQ ID NO: 3082836 - RNA, 20 nt, Human
ccauucuccaccugccaggg

SEQ ID NO: 3082837 - RNA, 16 nt, Human
cccaaagugcugggau

SEQ ID NO: 3082838 - RNA, 18 nt, Human
cccaaauggaaaugggca

SEQ ID NO: 3082839 - RNA, 22 nt, Human
cccaaauggaaaugggcagagc

SEQ ID NO: 3082840 - RNA, 23 nt, Human
cccaaggccuuccccuggcacug

SEQ ID NO: 3082841 - RNA, 19 nt, Human
ccauauucuguuggccagu

SEQ ID NO: 3082842 - RNA, 22 nt, Human
ccaucugcgggggcagugcuca

SEQ ID NO: 3082843 - RNA, 20 nt, Human
ccaucugcgggggcagugcu

SEQ ID NO: 3082844 - RNA, 21 nt, Human
ccaucugcgggggcagugcuc

SEQ ID NO: 3082845 - RNA, 16 nt, Human
ccauguuggccaggcu

SEQ ID NO: 3082846 - RNA, 17 nt, Human
ccauguuggccaggcug

SEQ ID NO: 3082847 - RNA, 16 nt, Human
ccaugggacagggagg

SEQ ID NO: 3082848 - RNA, 19 nt, Human
ccaugggacagggaggacg

SEQ ID NO: 3082849 - RNA, 18 nt, Human
ccauucuccaccugccag

SEQ ID NO: 3082850 - RNA, 14 nt, Human
ccacaucuugcucu

SEQ ID NO: 3082851 - RNA, 23 nt, Human
ccacaucuugcucugcugacaga

SEQ ID NO: 3082852 - RNA, 22 nt, Human
ccacaucuugcucugcugacag

SEQ ID NO: 3082853 - RNA, 20 nt, Human
ccacaucuugcucugcugac

SEQ ID NO: 3082854 - RNA, 16 nt, Human
ccacaucuugcucugc

SEQ ID NO: 3082855 - RNA, 14 nt, Human
ccaccaacauacuc

SEQ ID NO: 3082856 - RNA, 18 nt, Human
ccaccaacauacucccau

SEQ ID NO: 3082857 - RNA, 20 nt, Human
ccaccaacauacucccaucu

SEQ ID NO: 3082858 - RNA, 16 nt, Human
ccaccacacccagccc

SEQ ID NO: 3082859 - RNA, 14 nt, Human
ccaccacacccagc

SEQ ID NO: 3082860 - RNA, 17 nt, Human
ccacccaagggccuggc

SEQ ID NO: 3082861 - RNA, 19 nt, Human
ccacccaagggccuggccu

SEQ ID NO: 3082862 - RNA, 16 nt, Human
ccacccaagggccugg

SEQ ID NO: 3082863 - RNA, 20 nt, Human
ccacccaagggccuggccug

SEQ ID NO: 3082864 - RNA, 21 nt, Human
ccacccaagggccuggccuga

SEQ ID NO: 3082865 - RNA, 22 nt, Human
ccacccaagggccuggccugag

SEQ ID NO: 3082866 - RNA, 13 nt, Human
ccacccaccucag

SEQ ID NO: 3082867 - RNA, 15 nt, Human
ccacccaccucagcc

SEQ ID NO: 3082868 - RNA, 14 nt, Human
ccacccaccucagc

SEQ ID NO: 3082869 - RNA, 16 nt, Human
ccacccaccucagccu

SEQ ID NO: 3082870 - RNA, 23 nt, Human
ccacaccauaagcuacugccauc

SEQ ID NO: 3082871 - RNA, 12 nt, Human
ccacacccagcc

SEQ ID NO: 3082872 - RNA, 14 nt, Human
ccacacccagccca

SEQ ID NO: 3082873 - RNA, 13 nt, Human
ccacacccagccc

SEQ ID NO: 3082874 - RNA, 15 nt, Human
ccaccucagccuccc

SEQ ID NO: 3082875 - RNA, 14 nt, Human
ccaccucagccucc

SEQ ID NO: 3082876 - RNA, 13 nt, Human
ccaccucagccuc

SEQ ID NO: 3082877 - RNA, 16 nt, Human
ccacccugaaagcccu

SEQ ID NO: 3082878 - RNA, 17 nt, Human
ccacccugaaagcccug

SEQ ID NO: 3082879 - RNA, 12 nt, Human
ccaccucagccu

SEQ ID NO: 3082880 - RNA, 14 nt, Human
ccacccaggagccc

SEQ ID NO: 3082881 - RNA, 12 nt, Human
ccacccaggagc

SEQ ID NO: 3082882 - RNA, 17 nt, Human
ccaccucccacaaagga

SEQ ID NO: 3082883 - RNA, 17 nt, Human
ccaccugccuguugggc

SEQ ID NO: 3082884 - RNA, 20 nt, Human
ccaccugccuguugggccag

SEQ ID NO: 3082885 - RNA, 16 nt, Human
ccaccugccagggaca

SEQ ID NO: 3082886 - RNA, 15 nt, Human
ccacggccaggccag

SEQ ID NO: 3082887 - RNA, 14 nt, Human
ccacggccaggcca

SEQ ID NO: 3082888 - RNA, 13 nt, Human
ccacggccaggcc

SEQ ID NO: 3082889 - RNA, 12 nt, Human
ccacggccaggc

SEQ ID NO: 3082890 - RNA, 17 nt, Human
ccaccuggccucugcac

SEQ ID NO: 3082891 - RNA, 14 nt, Human
ccaccuggccucug

SEQ ID NO: 3082892 - RNA, 22 nt, Human
ccaccugcggugcuaucucccc

SEQ ID NO: 3082893 - RNA, 15 nt, Human
ccaccuggccucugc

SEQ ID NO: 3082894 - RNA, 16 nt, Human
ccaccuggccucugca

SEQ ID NO: 3082895 - RNA, 18 nt, Human
ccacucaguccauagcag

SEQ ID NO: 3082896 - RNA, 12 nt, Human
ccacucccugca

SEQ ID NO: 3082897 - RNA, 13 nt, Human
ccacucccugcaa

SEQ ID NO: 3082898 - RNA, 18 nt, Human
ccacuacauucuguuaau

SEQ ID NO: 3082899 - RNA, 22 nt, Human
ccacuacggaauaguuggcuag

SEQ ID NO: 3082900 - RNA, 23 nt, Human
ccacuacggaauaguuggcuagg

SEQ ID NO: 3082901 - RNA, 16 nt, Human
ccacugcgaccacaag

SEQ ID NO: 3082902 - RNA, 20 nt, Human
ccacugcacuccagccuggg

SEQ ID NO: 3082903 - RNA, 19 nt, Human
ccacugcacuccagccugg

SEQ ID NO: 3082904 - RNA, 15 nt, Human
ccacucccugcaacc

SEQ ID NO: 3082905 - RNA, 18 nt, Human
ccacugcacuccagccug

SEQ ID NO: 3082906 - RNA, 13 nt, Human
ccacguuucuaaa

SEQ ID NO: 3082907 - RNA, 13 nt, Human
ccagauuuaugca

SEQ ID NO: 3082908 - RNA, 21 nt, Human
ccagauugcaacaggcugggc

SEQ ID NO: 3082909 - RNA, 22 nt, Human
ccagauuuaugcauauuauuuu

SEQ ID NO: 3082910 - RNA, 12 nt, Human
ccagauuucacu

SEQ ID NO: 3082911 - RNA, 18 nt, Human
ccagauugcaacaggcug

SEQ ID NO: 3082912 - RNA, 23 nt, Human
ccagauucuuuccugaggcuggg

SEQ ID NO: 3082913 - RNA, 20 nt, Human
ccagauugcaacaggcuggg

SEQ ID NO: 3082914 - RNA, 19 nt, Human
ccagauugcaacaggcugg

SEQ ID NO: 3082915 - RNA, 15 nt, Human
ccagagggccugcaa

SEQ ID NO: 3082916 - RNA, 16 nt, Human
ccagagggccugcaag

SEQ ID NO: 3082917 - RNA, 23 nt, Human
ccagaugcaccagcccuuagcag

SEQ ID NO: 3082918 - RNA, 23 nt, Human
ccagagggagugacagaggcagc

SEQ ID NO: 3082919 - RNA, 22 nt, Human
ccagagggagugacagaggcag

SEQ ID NO: 3082920 - RNA, 13 nt, Human
ccagagggccugc

SEQ ID NO: 3082921 - RNA, 19 nt, Human
ccagauucuuuccugaggc

SEQ ID NO: 3082922 - RNA, 20 nt, Human
ccagauucuuuccugaggcu

SEQ ID NO: 3082923 - RNA, 21 nt, Human
ccagauucuuuccugaggcug

SEQ ID NO: 3082924 - RNA, 22 nt, Human
ccagauucuuuccugaggcugg

SEQ ID NO: 3082925 - RNA, 18 nt, Human
ccagauucuuuccugagg

SEQ ID NO: 3082926 - RNA, 19 nt, Human
ccacuguacuugcucuuga

SEQ ID NO: 3082927 - RNA, 18 nt, Human
ccacuguacuugcucuug

SEQ ID NO: 3082928 - RNA, 17 nt, Human
ccacuguacuugcucuu

SEQ ID NO: 3082929 - RNA, 20 nt, Human
ccacuguacuugcucuugau

SEQ ID NO: 3082930 - RNA, 19 nt, Human
ccagacaccuugacagggc

SEQ ID NO: 3082931 - RNA, 17 nt, Human
ccagacaccuugacagg

SEQ ID NO: 3082932 - RNA, 13 nt, Human
ccagagagggugg

SEQ ID NO: 3082933 - RNA, 14 nt, Human
ccagagaggguggu

SEQ ID NO: 3082934 - RNA, 23 nt, Human
ccagagaggguggugaccucugc

SEQ ID NO: 3082935 - RNA, 21 nt, Human
ccagagaggguggugaccucu

SEQ ID NO: 3082936 - RNA, 22 nt, Human
ccagaggagagaggacccccug

SEQ ID NO: 3082937 - RNA, 21 nt, Human
ccagaggagagaggacccccu

SEQ ID NO: 3082938 - RNA, 21 nt, Human
ccagagggagugacagaggca

SEQ ID NO: 3082939 - RNA, 20 nt, Human
ccagagggagugacagaggc

SEQ ID NO: 3082940 - RNA, 19 nt, Human
ccagagggagugacagagg

SEQ ID NO: 3082941 - RNA, 18 nt, Human
ccagagggagugacagag

SEQ ID NO: 3082942 - RNA, 17 nt, Human
ccagagggagugacaga

SEQ ID NO: 3082943 - RNA, 16 nt, Human
ccagagggagugacag

SEQ ID NO: 3082944 - RNA, 14 nt, Human
ccagagcugccacc

SEQ ID NO: 3082945 - RNA, 15 nt, Human
ccagagcugccaccu

SEQ ID NO: 3082946 - RNA, 16 nt, Human
ccagagcugccaccug

SEQ ID NO: 3082947 - RNA, 19 nt, Human
ccagagcugccaccugccu

SEQ ID NO: 3082948 - RNA, 12 nt, Human
ccagagcugcca

SEQ ID NO: 3082949 - RNA, 13 nt, Human
ccagagcugccac

SEQ ID NO: 3082950 - RNA, 11 nt, Human
ccagagcugcc

SEQ ID NO: 3082951 - RNA, 23 nt, Human
ccagcauaauacuugcuuuggaa

SEQ ID NO: 3082952 - RNA, 15 nt, Human
ccagccaaagccucc

SEQ ID NO: 3082953 - RNA, 18 nt, Human
ccagccaaagccuccucc

SEQ ID NO: 3082954 - RNA, 19 nt, Human
ccagccaaagccuccucca

SEQ ID NO: 3082955 - RNA, 13 nt, Human
ccagccaggcccu

SEQ ID NO: 3082956 - RNA, 18 nt, Human
ccagccgccaugcuccug

SEQ ID NO: 3082957 - RNA, 14 nt, Human
ccagccgccaugcu

SEQ ID NO: 3082958 - RNA, 23 nt, Human
ccagccgagauagccaaggccaa

SEQ ID NO: 3082959 - RNA, 17 nt, Human
ccagcccuuagcaggga

SEQ ID NO: 3082960 - RNA, 16 nt, Human
ccagcccuuagcaggg

SEQ ID NO: 3082961 - RNA, 16 nt, Human
ccagccccagugccca

SEQ ID NO: 3082962 - RNA, 23 nt, Human
ccagccccaaaacucuccucugc

SEQ ID NO: 3082963 - RNA, 15 nt, Human
ccagccccagugccc

SEQ ID NO: 3082964 - RNA, 13 nt, Human
ccagccccagugc

SEQ ID NO: 3082965 - RNA, 22 nt, Human
ccagcaagugagagcugggugu

SEQ ID NO: 3082966 - RNA, 21 nt, Human
ccagcaagugagagcugggug

SEQ ID NO: 3082967 - RNA, 20 nt, Human
ccagcaagugagagcugggu

SEQ ID NO: 3082968 - RNA, 16 nt, Human
ccagcaagugagagcu

SEQ ID NO: 3082969 - RNA, 14 nt, Human
ccagauuucacucu

SEQ ID NO: 3082970 - RNA, 15 nt, Human
ccagcaagugagagc

SEQ ID NO: 3082971 - RNA, 23 nt, Human
cauggcauauuuuucacauaucu

SEQ ID NO: 3082972 - RNA, 15 nt, Human
cauggcauauuuuuc

SEQ ID NO: 3082973 - RNA, 19 nt, Human
cauggcauauuuuucacau

SEQ ID NO: 3082974 - RNA, 23 nt, Human
caugggacagggaggacgcucuc

SEQ ID NO: 3082975 - RNA, 13 nt, Human
cauggcauauuuu

SEQ ID NO: 3082976 - RNA, 18 nt, Human
caugggccuccugugugu

SEQ ID NO: 3082977 - RNA, 13 nt, Human
caugcugucccuu

SEQ ID NO: 3082978 - RNA, 15 nt, Human
caugcugucccuuac

SEQ ID NO: 3082979 - RNA, 15 nt, Human
caugcuguucaugaa

SEQ ID NO: 3082980 - RNA, 15 nt, Human
cauggacuuccacug

SEQ ID NO: 3082981 - RNA, 20 nt, Human
cauggaauuggagcucgugg

SEQ ID NO: 3082982 - RNA, 16 nt, Human
caugcuguucaugaaa

SEQ ID NO: 3082983 - RNA, 18 nt, Human
caugcuguucaugaaaga

SEQ ID NO: 3082984 - RNA, 21 nt, Human
cauuaaaaaaucaguuguaca

SEQ ID NO: 3082985 - RNA, 18 nt, Human
cauguuuuucuucucccu

SEQ ID NO: 3082986 - RNA, 20 nt, Human
cauguuuuucuucucccuca

SEQ ID NO: 3082987 - RNA, 19 nt, Human
cauguuuuucuucucccuc

SEQ ID NO: 3082988 - RNA, 14 nt, Human
cauguuugugauug

SEQ ID NO: 3082989 - RNA, 12 nt, Human
cauguuugugau

SEQ ID NO: 3082990 - RNA, 23 nt, Human
cauguuugauguaucugagcagg

SEQ ID NO: 3082991 - RNA, 12 nt, Human
caugucuggcua

SEQ ID NO: 3082992 - RNA, 21 nt, Human
caugugaugagaggaaaucac

SEQ ID NO: 3082993 - RNA, 18 nt, Human
caugugaugagaggaaau

SEQ ID NO: 3082994 - RNA, 20 nt, Human
caugugaugagaggaaauca

SEQ ID NO: 3082995 - RNA, 16 nt, Human
caugugaugagaggaa

SEQ ID NO: 3082996 - RNA, 17 nt, Human
caugugaugagaggaaa

SEQ ID NO: 3082997 - RNA, 15 nt, Human
caugugaugagagga

SEQ ID NO: 3082998 - RNA, 14 nt, Human
caugugcacaugca

SEQ ID NO: 3082999 - RNA, 22 nt, Human
caugugccagguuuuuggucug

SEQ ID NO: 3083000 - RNA, 20 nt, Human
caugugcuaguaauuggaaa

SEQ ID NO: 3083001 - RNA, 19 nt, Human
cauggucggaaaacaugcu

SEQ ID NO: 3083002 - RNA, 17 nt, Human
cauggucggaaaacaug

SEQ ID NO: 3083003 - RNA, 23 nt, Human
cauggucggaaaacaugcuacac

SEQ ID NO: 3083004 - RNA, 14 nt, Human
caugguuuggagcu

SEQ ID NO: 3083005 - RNA, 15 nt, Human
caugguuuggagcug

SEQ ID NO: 3083006 - RNA, 16 nt, Human
caugguuuggagcuga

SEQ ID NO: 3083007 - RNA, 18 nt, Human
caugguuuggagcugauc

SEQ ID NO: 3083008 - RNA, 20 nt, Human
cauuguacgaagaguauuuu

SEQ ID NO: 3083009 - RNA, 19 nt, Human
cauuguacgaagaguauuu

SEQ ID NO: 3083010 - RNA, 13 nt, Human
cauugugggaagg

SEQ ID NO: 3083011 - RNA, 15 nt, Human
cauugugggaagggg

SEQ ID NO: 3083012 - RNA, 21 nt, Human
cauuguaaaugugcuuuuaaa

SEQ ID NO: 3083013 - RNA, 15 nt, Human
cauuuaaaaaaaauc

SEQ ID NO: 3083014 - RNA, 15 nt, Human
cauugaccugaggcc

SEQ ID NO: 3083015 - RNA, 17 nt, Human
cauugaccugaggcccu

SEQ ID NO: 3083016 - RNA, 14 nt, Human
cauugaccugaggc

SEQ ID NO: 3083017 - RNA, 18 nt, Human
cauugaccugaggcccuu

SEQ ID NO: 3083018 - RNA, 19 nt, Human
cauuugaaaauuuugaugu

SEQ ID NO: 3083019 - RNA, 17 nt, Human
cauuugaaaauuuugau

SEQ ID NO: 3083020 - RNA, 23 nt, Human
cauuuuaccuuugacaaagguaa

SEQ ID NO: 3083021 - RNA, 23 nt, Human
cauuuuauuuuauuaugcaugaa

SEQ ID NO: 3083022 - RNA, 22 nt, Human
cauuuuauuuuauuaugcauga

SEQ ID NO: 3083023 - RNA, 13 nt, Human
cauuugcugaaua

SEQ ID NO: 3083024 - RNA, 22 nt, Human
cauuugaggucuguucuuucca

SEQ ID NO: 3083025 - RNA, 17 nt, Human
cauuuuuaguagagaca

SEQ ID NO: 3083026 - RNA, 21 nt, Human
cauuuuuaagugcugcauuua

SEQ ID NO: 3083027 - RNA, 19 nt, Human
cauucauuuucuggguguu

SEQ ID NO: 3083028 - RNA, 22 nt, Human
cauuccaacuaucucauuucca

SEQ ID NO: 3083029 - RNA, 21 nt, Human
cauucagauaugauucaaaug

SEQ ID NO: 3083030 - RNA, 15 nt, Human
cauuccccaggaggc

SEQ ID NO: 3083031 - RNA, 17 nt, Human
cauuccccaggaggcca

SEQ ID NO: 3083032 - RNA, 13 nt, Human
cauuccccaggag

SEQ ID NO: 3083033 - RNA, 18 nt, Human
cauuccccaggaggccag

SEQ ID NO: 3083034 - RNA, 19 nt, Human
cauuccccaggaggccagc

SEQ ID NO: 3083035 - RNA, 20 nt, Human
cauuccccaggaggccagcc

SEQ ID NO: 3083036 - RNA, 20 nt, Human
cauucaaauguauuacagug

SEQ ID NO: 3083037 - RNA, 13 nt, Human
cauucuggaauaa

SEQ ID NO: 3083038 - RNA, 17 nt, Human
cauucuguuaaucauua

SEQ ID NO: 3083039 - RNA, 20 nt, Human
cauucugccugcccaggccc

SEQ ID NO: 3083040 - RNA, 19 nt, Human
cauucugccugcccaggcc

SEQ ID NO: 3083041 - RNA, 18 nt, Human
cauucugccugcccaggc

SEQ ID NO: 3083042 - RNA, 17 nt, Human
cauucugccugcccagg

SEQ ID NO: 3083043 - RNA, 16 nt, Human
cauucugccugcccag

SEQ ID NO: 3083044 - RNA, 15 nt, Human
cauucugccugccca

SEQ ID NO: 3083045 - RNA, 13 nt, Human
cauucugccugcc

SEQ ID NO: 3083046 - RNA, 12 nt, Human
cauucugccugc

SEQ ID NO: 3083047 - RNA, 14 nt, Human
cauuccugaugcuu

SEQ ID NO: 3083048 - RNA, 16 nt, Human
cauuccugaugcuucu

SEQ ID NO: 3083049 - RNA, 19 nt, Human
cauuccugaugcuucuuca

SEQ ID NO: 3083050 - RNA, 22 nt, Human
cauuccugaugcuucuucagag

SEQ ID NO: 3083051 - RNA, 14 nt, Human
cauuccugaacagg

SEQ ID NO: 3083052 - RNA, 23 nt, Human
cauuccugaugcuucuucagaga

SEQ ID NO: 3083053 - RNA, 23 nt, Human
cauucuucuguacgucugacagg

SEQ ID NO: 3083054 - RNA, 17 nt, Human
caucugacuaugacaua

SEQ ID NO: 3083055 - RNA, 16 nt, Human
caucucuuguuuaaau

SEQ ID NO: 3083056 - RNA, 15 nt, Human
caucucuccuccuuu

SEQ ID NO: 3083057 - RNA, 16 nt, Human
caucucuacaaaaagc

SEQ ID NO: 3083058 - RNA, 17 nt, Human
caucuugcucugcugac

SEQ ID NO: 3083059 - RNA, 16 nt, Human
caucuugcucugcuga

SEQ ID NO: 3083060 - RNA, 15 nt, Human
caucuugcucugcug

SEQ ID NO: 3083061 - RNA, 16 nt, Human
caucuugaauuguaag

SEQ ID NO: 3083062 - RNA, 21 nt, Human
caucuugaauuguaaggaaug

SEQ ID NO: 3083063 - RNA, 13 nt, Human
caugagcaucagg

SEQ ID NO: 3083064 - RNA, 18 nt, Human
caugaagauguagaggag

SEQ ID NO: 3083065 - RNA, 19 nt, Human
caugaagauguagaggaga

SEQ ID NO: 3083066 - RNA, 15 nt, Human
caugagcaucaggcc

SEQ ID NO: 3083067 - RNA, 16 nt, Human
caugagcaucaggcca

SEQ ID NO: 3083068 - RNA, 17 nt, Human
caugagcaucaggccag

SEQ ID NO: 3083069 - RNA, 18 nt, Human
caugagcaucaggccagg

SEQ ID NO: 3083070 - RNA, 20 nt, Human
caugagcaucaggccaggcc

SEQ ID NO: 3083071 - RNA, 21 nt, Human
caugagcaucaggccaggccc

SEQ ID NO: 3083072 - RNA, 22 nt, Human
caugagcaucaggccaggcccu

SEQ ID NO: 3083073 - RNA, 23 nt, Human
caugagcaucaggccaggcccuc

SEQ ID NO: 3083074 - RNA, 21 nt, Human
caugagccucagcauccuggc

SEQ ID NO: 3083075 - RNA, 20 nt, Human
caugagccucagcauccugg

SEQ ID NO: 3083076 - RNA, 19 nt, Human
caugagccucagcauccug

SEQ ID NO: 3083077 - RNA, 18 nt, Human
caugagccucagcauccu

SEQ ID NO: 3083078 - RNA, 17 nt, Human
caugagccucagcaucc

SEQ ID NO: 3083079 - RNA, 15 nt, Human
caugagccucagcau

SEQ ID NO: 3083080 - RNA, 12 nt, Human
caugagccucag

SEQ ID NO: 3083081 - RNA, 16 nt, Human
caugagccgcccaagg

SEQ ID NO: 3083082 - RNA, 17 nt, Human
caugagccgcccaaggc

SEQ ID NO: 3083083 - RNA, 19 nt, Human
caugagccgcccaaggccu

SEQ ID NO: 3083084 - RNA, 21 nt, Human
caugagccgcccaaggccuuc

SEQ ID NO: 3083085 - RNA, 22 nt, Human
caugagccgcccaaggccuucc

SEQ ID NO: 3083086 - RNA, 13 nt, Human
caugaguccccug

SEQ ID NO: 3083087 - RNA, 19 nt, Human
caugagguacugagaguga

SEQ ID NO: 3083088 - RNA, 14 nt, Human
caugaguccccugu

SEQ ID NO: 3083089 - RNA, 15 nt, Human
caugaguccccuguu

SEQ ID NO: 3083090 - RNA, 23 nt, Human
caugaguccccuguuuguuucug

SEQ ID NO: 3083091 - RNA, 23 nt, Human
caugaggaacaaggcaaggcugu

SEQ ID NO: 3083092 - RNA, 16 nt, Human
caugagguacugagag

SEQ ID NO: 3083093 - RNA, 18 nt, Human
caugagggagaugccaug

SEQ ID NO: 3083094 - RNA, 16 nt, Human
caugaggaacaaggca

SEQ ID NO: 3083095 - RNA, 17 nt, Human
caugaggaacaaggcaa

SEQ ID NO: 3083096 - RNA, 20 nt, Human
caugaggaacaaggcaaggc

SEQ ID NO: 3083097 - RNA, 21 nt, Human
caugaggaacaaggcaaggcu

SEQ ID NO: 3083098 - RNA, 23 nt, Human
caugagccucagcauccuggcac

SEQ ID NO: 3083099 - RNA, 22 nt, Human
caugagccucagcauccuggca

SEQ ID NO: 3083100 - RNA, 21 nt, Human
caugaaaacacauuuuucuua

SEQ ID NO: 3083101 - RNA, 19 nt, Human
caugaaaacacauuuuucu

SEQ ID NO: 3083102 - RNA, 14 nt, Human
caugaaagauucaa

SEQ ID NO: 3083103 - RNA, 12 nt, Human
caugaagacaga

SEQ ID NO: 3083104 - RNA, 17 nt, Human
caugaaaacacauuuuu

SEQ ID NO: 3083105 - RNA, 16 nt, Human
caugaaaacacauuuu

SEQ ID NO: 3083106 - RNA, 15 nt, Human
caugaaaacacauuu

SEQ ID NO: 3083107 - RNA, 14 nt, Human
caugaaaacacauu

SEQ ID NO: 3083108 - RNA, 13 nt, Human
caugaaaacacau

SEQ ID NO: 3083109 - RNA, 21 nt, Human
cauaucuaguaugaaauuaua

SEQ ID NO: 3083110 - RNA, 17 nt, Human
cauauugauuuccguua

SEQ ID NO: 3083111 - RNA, 18 nt, Human
cauauucuguuggccagu

SEQ ID NO: 3083112 - RNA, 22 nt, Human
cauauucuguuggccaguguga

SEQ ID NO: 3083113 - RNA, 21 nt, Human
cauauugauuuccguuaaaau

SEQ ID NO: 3083114 - RNA, 13 nt, Human
cauauuguuacug

SEQ ID NO: 3083115 - RNA, 19 nt, Human
cauauuguuacugguacca

SEQ ID NO: 3083116 - RNA, 17 nt, Human
cauaucuaguaugaaau

SEQ ID NO: 3083117 - RNA, 18 nt, Human
cauaucuaguaugaaauu

SEQ ID NO: 3083118 - RNA, 15 nt, Human
cauaucuaguaugaa

SEQ ID NO: 3083119 - RNA, 23 nt, Human
cauauauauguuuuaagaggcag

SEQ ID NO: 3083120 - RNA, 15 nt, Human
cauauauaacaaugc

SEQ ID NO: 3083121 - RNA, 16 nt, Human
cauauaagugauugcu

SEQ ID NO: 3083122 - RNA, 23 nt, Human
cauauaagauucauauuuacuuc

SEQ ID NO: 3083123 - RNA, 13 nt, Human
cauauauaacaau

SEQ ID NO: 3083124 - RNA, 16 nt, Human
cauagguuuaauaauu

SEQ ID NO: 3083125 - RNA, 19 nt, Human
cagugcucacccacaccau

SEQ ID NO: 3083126 - RNA, 15 nt, Human
cauaguaugguggcu

SEQ ID NO: 3083127 - RNA, 16 nt, Human
cauaguaugguggcug

SEQ ID NO: 3083128 - RNA, 14 nt, Human
caucaacaucuugg

SEQ ID NO: 3083129 - RNA, 15 nt, Human
caucaugucuggcua

SEQ ID NO: 3083130 - RNA, 14 nt, Human
caucaugucuggcu

SEQ ID NO: 3083131 - RNA, 13 nt, Human
caucaugucuggc

SEQ ID NO: 3083132 - RNA, 16 nt, Human
caucauccuaagcuau

SEQ ID NO: 3083133 - RNA, 20 nt, Human
caucaccaacgucugugcca

SEQ ID NO: 3083134 - RNA, 12 nt, Human
caucacccgcua

SEQ ID NO: 3083135 - RNA, 13 nt, Human
caucccuccuggg

SEQ ID NO: 3083136 - RNA, 15 nt, Human
caucccucuggggcu

SEQ ID NO: 3083137 - RNA, 22 nt, Human
caucccugaaggccccgcccag

SEQ ID NO: 3083138 - RNA, 18 nt, Human
caucccuuaccugggaaa

SEQ ID NO: 3083139 - RNA, 17 nt, Human
cauccagguucagcuug

SEQ ID NO: 3083140 - RNA, 23 nt, Human
cauccacugugccaugugccagg

SEQ ID NO: 3083141 - RNA, 17 nt, Human
cauccacugugccaugu

SEQ ID NO: 3083142 - RNA, 14 nt, Human
cauccacugugcca

SEQ ID NO: 3083143 - RNA, 23 nt, Human
caggugugagucaccaagcccag

SEQ ID NO: 3083144 - RNA, 22 nt, Human
caggugugagucaccaagccca

SEQ ID NO: 3083145 - RNA, 16 nt, Human
caggugugagucacca

SEQ ID NO: 3083146 - RNA, 21 nt, Human
caggugugagucaccaagccc

SEQ ID NO: 3083147 - RNA, 20 nt, Human
caggugugagucaccaagcc

SEQ ID NO: 3083148 - RNA, 23 nt, Human
caggugugaaccaccacacccag

SEQ ID NO: 3083149 - RNA, 22 nt, Human
caggugugaaccaccacaccca

SEQ ID NO: 3083150 - RNA, 19 nt, Human
caggugugaaccaccacac

SEQ ID NO: 3083151 - RNA, 16 nt, Human
caggugugaaccacca

SEQ ID NO: 3083152 - RNA, 12 nt, Human
caggugugaacc

SEQ ID NO: 3083153 - RNA, 19 nt, Human
caggugucccugcacuugc

SEQ ID NO: 3083154 - RNA, 18 nt, Human
caggugucccugcacuug

SEQ ID NO: 3083155 - RNA, 16 nt, Human
caggugucccugcacu

SEQ ID NO: 3083156 - RNA, 15 nt, Human
caggugucccugcac

SEQ ID NO: 3083157 - RNA, 12 nt, Human
cagguucagcuu

SEQ ID NO: 3083158 - RNA, 13 nt, Human
cagguucagcuug

SEQ ID NO: 3083159 - RNA, 21 nt, Human
caguaaaugggggugcauuug

SEQ ID NO: 3083160 - RNA, 20 nt, Human
caguaaaugggggugcauuu

SEQ ID NO: 3083161 - RNA, 22 nt, Human
caguaaaugggggugcauuuga

SEQ ID NO: 3083162 - RNA, 13 nt, Human
caguaauaacucu

SEQ ID NO: 3083163 - RNA, 12 nt, Human
caguaauaacuc

SEQ ID NO: 3083164 - RNA, 18 nt, Human
cagguggggucacucugg

SEQ ID NO: 3083165 - RNA, 17 nt, Human
cagguggggcagcuuga

SEQ ID NO: 3083166 - RNA, 16 nt, Human
cagguggggcagcuug

SEQ ID NO: 3083167 - RNA, 15 nt, Human
cagguggggcagcuu

SEQ ID NO: 3083168 - RNA, 14 nt, Human
cagguggggcagcu

SEQ ID NO: 3083169 - RNA, 13 nt, Human
cagguggggcagc

SEQ ID NO: 3083170 - RNA, 19 nt, Human
cagguggggucacucuggc

SEQ ID NO: 3083171 - RNA, 20 nt, Human
cagguggggucacucuggca

SEQ ID NO: 3083172 - RNA, 21 nt, Human
cagguggggucacucuggcag

SEQ ID NO: 3083173 - RNA, 22 nt, Human
cagguggggucacucuggcagc

SEQ ID NO: 3083174 - RNA, 23 nt, Human
cagguggggucacucuggcagcu

SEQ ID NO: 3083175 - RNA, 18 nt, Human
caggugguuauggagagg

SEQ ID NO: 3083176 - RNA, 14 nt, Human
caggugucccugca

SEQ ID NO: 3083177 - RNA, 11 nt, Human
caggugucccu

SEQ ID NO: 3083178 - RNA, 20 nt, Human
caggugguuauggagagggu

SEQ ID NO: 3083179 - RNA, 18 nt, Human
caggucccuaauaaagcu

SEQ ID NO: 3083180 - RNA, 17 nt, Human
caggucccuaauaaagc

SEQ ID NO: 3083181 - RNA, 16 nt, Human
caggucccuaauaaag

SEQ ID NO: 3083182 - RNA, 15 nt, Human
caggucccuaauaaa

SEQ ID NO: 3083183 - RNA, 14 nt, Human
caggucccuaauaa

SEQ ID NO: 3083184 - RNA, 13 nt, Human
caggucccuaaua

SEQ ID NO: 3083185 - RNA, 12 nt, Human
caggucccuaau

SEQ ID NO: 3083186 - RNA, 11 nt, Human
caggucccuaa

SEQ ID NO: 3083187 - RNA, 21 nt, Human
caggucauauuaauauauuuc

SEQ ID NO: 3083188 - RNA, 20 nt, Human
caggucauauuaauauauuu

SEQ ID NO: 3083189 - RNA, 21 nt, Human
cagguaacaggcagauacagg

SEQ ID NO: 3083190 - RNA, 20 nt, Human
cagguaacaggcagauacag

SEQ ID NO: 3083191 - RNA, 22 nt, Human
caggucccuaauaaagcugugu

SEQ ID NO: 3083192 - RNA, 21 nt, Human
caggucccuaauaaagcugug

SEQ ID NO: 3083193 - RNA, 20 nt, Human
caggucccuaauaaagcugu

SEQ ID NO: 3083194 - RNA, 19 nt, Human
caggucccuaauaaagcug

SEQ ID NO: 3083195 - RNA, 23 nt, Human
caggucuugaacuccuggccuca

SEQ ID NO: 3083196 - RNA, 22 nt, Human
caggucuugaacuccuggccuc

SEQ ID NO: 3083197 - RNA, 21 nt, Human
caggucuugaacuccuggccu

SEQ ID NO: 3083198 - RNA, 20 nt, Human
caggucuugaacuccuggcc

SEQ ID NO: 3083199 - RNA, 19 nt, Human
caggucuugaacuccuggc

SEQ ID NO: 3083200 - RNA, 18 nt, Human
caggucuugaacuccugg

SEQ ID NO: 3083201 - RNA, 13 nt, Human
caggugagaagca

SEQ ID NO: 3083202 - RNA, 20 nt, Human
caggugagaagcagaggaag

SEQ ID NO: 3083203 - RNA, 21 nt, Human
caggugagaagcagaggaagg

SEQ ID NO: 3083204 - RNA, 23 nt, Human
cagggucccugguggcagcucac

SEQ ID NO: 3083205 - RNA, 18 nt, Human
caggguccuguagcccua

SEQ ID NO: 3083206 - RNA, 15 nt, Human
cagggucucacucug

SEQ ID NO: 3083207 - RNA, 23 nt, Human
cagggucucacuauguugcccag

SEQ ID NO: 3083208 - RNA, 22 nt, Human
cagggucucacuauguugccca

SEQ ID NO: 3083209 - RNA, 21 nt, Human
cagggucucacuauguugccc

SEQ ID NO: 3083210 - RNA, 16 nt, Human
cagggucucacucugu

SEQ ID NO: 3083211 - RNA, 16 nt, Human
caggguuuugccaugu

SEQ ID NO: 3083212 - RNA, 17 nt, Human
cagguaacaggcagaua

SEQ ID NO: 3083213 - RNA, 16 nt, Human
cagguaacaggcagau

SEQ ID NO: 3083214 - RNA, 15 nt, Human
cagguaacaggcaga

SEQ ID NO: 3083215 - RNA, 14 nt, Human
cagguaacaggcag

SEQ ID NO: 3083216 - RNA, 15 nt, Human
cagggucccuggugg

SEQ ID NO: 3083217 - RNA, 18 nt, Human
cagggucccugguggcag

SEQ ID NO: 3083218 - RNA, 19 nt, Human
cagggucccugguggcagc

SEQ ID NO: 3083219 - RNA, 22 nt, Human
cagggucccugguggcagcuca

SEQ ID NO: 3083220 - RNA, 14 nt, Human
cagggucccuggug

SEQ ID NO: 3083221 - RNA, 12 nt, Human
cagggucccugg

SEQ ID NO: 3083222 - RNA, 20 nt, Human
caggguauuccagagugggg

SEQ ID NO: 3083223 - RNA, 21 nt, Human
caggguauuccagagugggga

SEQ ID NO: 3083224 - RNA, 14 nt, Human
caggggugggacac

SEQ ID NO: 3083225 - RNA, 15 nt, Human
caggggugggacacc

SEQ ID NO: 3083226 - RNA, 20 nt, Human
caggggugggacacccugug

SEQ ID NO: 3083227 - RNA, 21 nt, Human
caggggugggacacccuguga

SEQ ID NO: 3083228 - RNA, 16 nt, Human
caguauuacuucugcu

SEQ ID NO: 3083229 - RNA, 18 nt, Human
caguauuacuucugcuac

SEQ ID NO: 3083230 - RNA, 22 nt, Human
cagucaggaaagagaacuucca

SEQ ID NO: 3083231 - RNA, 15 nt, Human
cagucaggaaagaga

SEQ ID NO: 3083232 - RNA, 18 nt, Human
cagucaggaaagagaacu

SEQ ID NO: 3083233 - RNA, 14 nt, Human
caguccauugaaag

SEQ ID NO: 3083234 - RNA, 13 nt, Human
caguccaugaaga

SEQ ID NO: 3083235 - RNA, 16 nt, Human
caguccauagcagaga

SEQ ID NO: 3083236 - RNA, 20 nt, Human
cagucauucagauaugauuc

SEQ ID NO: 3083237 - RNA, 17 nt, Human
cagucauucagauauga

SEQ ID NO: 3083238 - RNA, 15 nt, Human
caguaucucagggcc

SEQ ID NO: 3083239 - RNA, 12 nt, Human
caguaucuugaa

SEQ ID NO: 3083240 - RNA, 18 nt, Human
caguaucuugaagacuuu

SEQ ID NO: 3083241 - RNA, 21 nt, Human
caguaucuugaagacuuuucu

SEQ ID NO: 3083242 - RNA, 12 nt, Human
caguauggcagc

SEQ ID NO: 3083243 - RNA, 13 nt, Human
caguaucucaggg

SEQ ID NO: 3083244 - RNA, 12 nt, Human
caguagugauag

SEQ ID NO: 3083245 - RNA, 12 nt, Human
cagucccugcca

SEQ ID NO: 3083246 - RNA, 13 nt, Human
cagucccugccaa

SEQ ID NO: 3083247 - RNA, 14 nt, Human
cagucccugccaau

SEQ ID NO: 3083248 - RNA, 15 nt, Human
cagucccugccaaug

SEQ ID NO: 3083249 - RNA, 16 nt, Human
cagucccugccaaugg

SEQ ID NO: 3083250 - RNA, 12 nt, Human
caguccucccau

SEQ ID NO: 3083251 - RNA, 13 nt, Human
caguccucccauc

SEQ ID NO: 3083252 - RNA, 14 nt, Human
caguccucccaucu

SEQ ID NO: 3083253 - RNA, 15 nt, Human
caguccucccaucuc

SEQ ID NO: 3083254 - RNA, 17 nt, Human
cagucccugccaaugga

SEQ ID NO: 3083255 - RNA, 16 nt, Human
cagugaaagaaaauaa

SEQ ID NO: 3083256 - RNA, 20 nt, Human
cagugaaagaaaauaacaau

SEQ ID NO: 3083257 - RNA, 19 nt, Human
cagucuggaaugcaguggu

SEQ ID NO: 3083258 - RNA, 15 nt, Human
caguccuuaccagca

SEQ ID NO: 3083259 - RNA, 18 nt, Human
caguccuuaccagcagag

SEQ ID NO: 3083260 - RNA, 15 nt, Human
caguccugcccgcca

SEQ ID NO: 3083261 - RNA, 19 nt, Human
caguccuuaccagcagagc

SEQ ID NO: 3083262 - RNA, 20 nt, Human
caguccuuaccagcagagca

SEQ ID NO: 3083263 - RNA, 21 nt, Human
caguccuuaccagcagagcac

SEQ ID NO: 3083264 - RNA, 18 nt, Human
cagucuggaaugcagugg

SEQ ID NO: 3083265 - RNA, 16 nt, Human
caguccucccaucuca

SEQ ID NO: 3083266 - RNA, 17 nt, Human
caguccucccaucucac

SEQ ID NO: 3083267 - RNA, 14 nt, Human
caguccugcccgcc

SEQ ID NO: 3083268 - RNA, 12 nt, Human
cagugaauucuu

SEQ ID NO: 3083269 - RNA, 15 nt, Human
cagugagacagcucu

SEQ ID NO: 3083270 - RNA, 17 nt, Human
cagugaggcucugcccu

SEQ ID NO: 3083271 - RNA, 18 nt, Human
cagugaggcucugcccuu

SEQ ID NO: 3083272 - RNA, 19 nt, Human
cagugaggcucugcccuug

SEQ ID NO: 3083273 - RNA, 20 nt, Human
cagugaggcucugcccuugg

SEQ ID NO: 3083274 - RNA, 18 nt, Human
cagugagucgaggacagg

SEQ ID NO: 3083275 - RNA, 17 nt, Human
cagugagucgaggacag

SEQ ID NO: 3083276 - RNA, 21 nt, Human
cagugaggcucugcccuuggu

SEQ ID NO: 3083277 - RNA, 13 nt, Human
cagugaggcucug

SEQ ID NO: 3083278 - RNA, 14 nt, Human
cagugaggcucugc

SEQ ID NO: 3083279 - RNA, 15 nt, Human
cagugaggcucugcc

SEQ ID NO: 3083280 - RNA, 16 nt, Human
cagugaggcucugccc

SEQ ID NO: 3083281 - RNA, 12 nt, Human
cagugaggcucu

SEQ ID NO: 3083282 - RNA, 24 nt, Human
cagugagccgagauugcaccacug

SEQ ID NO: 3083283 - RNA, 23 nt, Human
cagugagucgaggacagggaggu

SEQ ID NO: 3083284 - RNA, 22 nt, Human
cagugagucgaggacagggagg

SEQ ID NO: 3083285 - RNA, 20 nt, Human
cagugagucgaggacaggga

SEQ ID NO: 3083286 - RNA, 19 nt, Human
cagugagucgaggacaggg

SEQ ID NO: 3083287 - RNA, 18 nt, Human
cagugauuaccagggacu

SEQ ID NO: 3083288 - RNA, 17 nt, Human
cagugauuaccagggac

SEQ ID NO: 3083289 - RNA, 15 nt, Human
cagugccuuauggaa

SEQ ID NO: 3083290 - RNA, 16 nt, Human
cagugccuuauggaac

SEQ ID NO: 3083291 - RNA, 17 nt, Human
cagugccuuauggaaca

SEQ ID NO: 3083292 - RNA, 18 nt, Human
cagugccuuauggaacac

SEQ ID NO: 3083293 - RNA, 19 nt, Human
cagugccuuauggaacacu

SEQ ID NO: 3083294 - RNA, 20 nt, Human
cagugccuuauggaacacuc

SEQ ID NO: 3083295 - RNA, 21 nt, Human
cagugccuuauggaacacucu

SEQ ID NO: 3083296 - RNA, 22 nt, Human
cagugccuuauggaacacucug

SEQ ID NO: 3083297 - RNA, 15 nt, Human
cagugccgagaagga

SEQ ID NO: 3083298 - RNA, 18 nt, Human
cagugccgagaaggaagc

SEQ ID NO: 3083299 - RNA, 12 nt, Human
cagugccucucc

SEQ ID NO: 3083300 - RNA, 20 nt, Human
cagugccucucccugcugcu

SEQ ID NO: 3083301 - RNA, 21 nt, Human
cagugccucucccugcugcuc

SEQ ID NO: 3083302 - RNA, 22 nt, Human
cagugccucucccugcugcucc

SEQ ID NO: 3083303 - RNA, 11 nt, Human
cagugccuuau

SEQ ID NO: 3083304 - RNA, 13 nt, Human
cagugccuuaugg

SEQ ID NO: 3083305 - RNA, 22 nt, Human
cagugccuggguggaugggcca

SEQ ID NO: 3083306 - RNA, 23 nt, Human
cagugccuuauggaacacucuga

SEQ ID NO: 3083307 - RNA, 13 nt, Human
cagugcucaccca

SEQ ID NO: 3083308 - RNA, 12 nt, Human
cagugcucaccc

SEQ ID NO: 3083309 - RNA, 17 nt, Human
cagugcucacccacacc

SEQ ID NO: 3083310 - RNA, 18 nt, Human
cagugcucacccacacca

SEQ ID NO: 3083311 - RNA, 19 nt, Human
caggggaggguagagcgga

SEQ ID NO: 3083312 - RNA, 14 nt, Human
cagggccuggcuca

SEQ ID NO: 3083313 - RNA, 15 nt, Human
cagggccuggcucag

SEQ ID NO: 3083314 - RNA, 13 nt, Human
cagggccuggcuc

SEQ ID NO: 3083315 - RNA, 21 nt, Human
cagggccucugcggagcacac

SEQ ID NO: 3083316 - RNA, 16 nt, Human
cagggccuggcucagg

SEQ ID NO: 3083317 - RNA, 19 nt, Human
cagggccuggcucaggugg

SEQ ID NO: 3083318 - RNA, 11 nt, Human
caggggacagg

SEQ ID NO: 3083319 - RNA, 16 nt, Human
caggggacaggauggu

SEQ ID NO: 3083320 - RNA, 23 nt, Human
cagggacagaggggguggccucc

SEQ ID NO: 3083321 - RNA, 18 nt, Human
cagggacaggauaagagg

SEQ ID NO: 3083322 - RNA, 14 nt, Human
cagggcacaccggg

SEQ ID NO: 3083323 - RNA, 21 nt, Human
cagggcacaccgggcacucag

SEQ ID NO: 3083324 - RNA, 19 nt, Human
cagggcacaccgggcacuc

SEQ ID NO: 3083325 - RNA, 17 nt, Human
cagggcacaccgggcac

SEQ ID NO: 3083326 - RNA, 15 nt, Human
cagggcacaccgggc

SEQ ID NO: 3083327 - RNA, 23 nt, Human
cagggcacaccgggcacucagaa

SEQ ID NO: 3083328 - RNA, 22 nt, Human
cagggcacaccgggcacucaga

SEQ ID NO: 3083329 - RNA, 12 nt, Human
cagggccucugc

SEQ ID NO: 3083330 - RNA, 13 nt, Human
cagggccucugcg

SEQ ID NO: 3083331 - RNA, 14 nt, Human
cagggccucugcgg

SEQ ID NO: 3083332 - RNA, 15 nt, Human
cagggccucugcgga

SEQ ID NO: 3083333 - RNA, 17 nt, Human
cagggccucugcggagc

SEQ ID NO: 3083334 - RNA, 14 nt, Human
cagggcaucuggga

SEQ ID NO: 3083335 - RNA, 17 nt, Human
cagggcauggcugggaa

SEQ ID NO: 3083336 - RNA, 14 nt, Human
cagggacagagggg

SEQ ID NO: 3083337 - RNA, 20 nt, Human
cagggacagaggggguggcc

SEQ ID NO: 3083338 - RNA, 13 nt, Human
cagggacagaggg

SEQ ID NO: 3083339 - RNA, 22 nt, Human
cagggaaacagcuaaugggaca

SEQ ID NO: 3083340 - RNA, 16 nt, Human
cagggaaacagcuaau

SEQ ID NO: 3083341 - RNA, 23 nt, Human
caggcugggucgcccuggacugu

SEQ ID NO: 3083342 - RNA, 21 nt, Human
caggcugggucgcccuggacu

SEQ ID NO: 3083343 - RNA, 23 nt, Human
caggcugggcuucaguggcagcu

SEQ ID NO: 3083344 - RNA, 12 nt, Human
caggcugccagu

SEQ ID NO: 3083345 - RNA, 21 nt, Human
caggcugccagugccugggug

SEQ ID NO: 3083346 - RNA, 19 nt, Human
caggcugccagugccuggg

SEQ ID NO: 3083347 - RNA, 20 nt, Human
caggcugccagugccugggu

SEQ ID NO: 3083348 - RNA, 14 nt, Human
caggcugccagugc

SEQ ID NO: 3083349 - RNA, 16 nt, Human
caggcugccagugccu

SEQ ID NO: 3083350 - RNA, 17 nt, Human
caggcugccagugccug

SEQ ID NO: 3083351 - RNA, 23 nt, Human
caggcuuuuuuaucaugugaaau

SEQ ID NO: 3083352 - RNA, 22 nt, Human
caggcuuagucacugagacagc

SEQ ID NO: 3083353 - RNA, 23 nt, Human
caggcuuagucacugagacagcc

SEQ ID NO: 3083354 - RNA, 16 nt, Human
caggcuuagucacuga

SEQ ID NO: 3083355 - RNA, 17 nt, Human
caggcuuagucacugag

SEQ ID NO: 3083356 - RNA, 20 nt, Human
caggcuuagucacugagaca

SEQ ID NO: 3083357 - RNA, 21 nt, Human
caggcuuagucacugagacag

SEQ ID NO: 3083358 - RNA, 23 nt, Human
caggcuguaucccaugagccuca

SEQ ID NO: 3083359 - RNA, 22 nt, Human
caggcuguaucccaugagccuc

SEQ ID NO: 3083360 - RNA, 21 nt, Human
caggcuguaucccaugagccu

SEQ ID NO: 3083361 - RNA, 20 nt, Human
caggcuguaucccaugagcc

SEQ ID NO: 3083362 - RNA, 14 nt, Human
caggcuguauccca

SEQ ID NO: 3083363 - RNA, 19 nt, Human
caggcuggucucaaacucu

SEQ ID NO: 3083364 - RNA, 12 nt, Human
caggcuggucuc

SEQ ID NO: 3083365 - RNA, 14 nt, Human
caggcuacugucag

SEQ ID NO: 3083366 - RNA, 13 nt, Human
caggcuagaugua

SEQ ID NO: 3083367 - RNA, 19 nt, Human
caggcuagauguauguacu

SEQ ID NO: 3083368 - RNA, 20 nt, Human
caggcuccuuuagcgcccag

SEQ ID NO: 3083369 - RNA, 19 nt, Human
caggcuccuuuagcgccca

SEQ ID NO: 3083370 - RNA, 14 nt, Human
caggcuccuuuagc

SEQ ID NO: 3083371 - RNA, 13 nt, Human
caggcucucaggc

SEQ ID NO: 3083372 - RNA, 14 nt, Human
caggcucucaggcc

SEQ ID NO: 3083373 - RNA, 15 nt, Human
caggcucucaggcca

SEQ ID NO: 3083374 - RNA, 16 nt, Human
caggcucucaggccag

SEQ ID NO: 3083375 - RNA, 20 nt, Human
caggcucgggcuccccagcc

SEQ ID NO: 3083376 - RNA, 12 nt, Human
caggcucucagg

SEQ ID NO: 3083377 - RNA, 21 nt, Human
caggcuccuuuagcgcccagu

SEQ ID NO: 3083378 - RNA, 17 nt, Human
caggcucucaggccagc

SEQ ID NO: 3083379 - RNA, 18 nt, Human
caggcucucaggccagcu

SEQ ID NO: 3083380 - RNA, 19 nt, Human
caggcucucaggccagcug

SEQ ID NO: 3083381 - RNA, 20 nt, Human
caggcucucaggccagcugc

SEQ ID NO: 3083382 - RNA, 21 nt, Human
caggcucucaggccagcugcu

SEQ ID NO: 3083383 - RNA, 23 nt, Human
caggcucucaggccagcugcuug

SEQ ID NO: 3083384 - RNA, 19 nt, Human
caggcccggcuccaggcuc

SEQ ID NO: 3083385 - RNA, 18 nt, Human
caggcccggcuccaggcu

SEQ ID NO: 3083386 - RNA, 16 nt, Human
caggcccggcuccagg

SEQ ID NO: 3083387 - RNA, 17 nt, Human
caggcccggcuccaggc

SEQ ID NO: 3083388 - RNA, 13 nt, Human
caggcccucugcc

SEQ ID NO: 3083389 - RNA, 14 nt, Human
caggcccucugccc

SEQ ID NO: 3083390 - RNA, 15 nt, Human
caggcccucugccca

SEQ ID NO: 3083391 - RNA, 21 nt, Human
caggcccggcuccaggcuccu

SEQ ID NO: 3083392 - RNA, 20 nt, Human
caggcccggcuccaggcucc

SEQ ID NO: 3083393 - RNA, 22 nt, Human
caggcccggcuccaggcuccuu

SEQ ID NO: 3083394 - RNA, 16 nt, Human
caggcccucugcccac

SEQ ID NO: 3083395 - RNA, 17 nt, Human
caggcccucugcccacu

SEQ ID NO: 3083396 - RNA, 19 nt, Human
caggcccucugcccacucc

SEQ ID NO: 3083397 - RNA, 20 nt, Human
caggcccucugcccacuccc

SEQ ID NO: 3083398 - RNA, 21 nt, Human
caggcccucugcccacucccu

SEQ ID NO: 3083399 - RNA, 22 nt, Human
caggcccucugcccacucccug

SEQ ID NO: 3083400 - RNA, 20 nt, Human
caggcccuugucggccccac

SEQ ID NO: 3083401 - RNA, 20 nt, Human
caggccaggcccucugccca

SEQ ID NO: 3083402 - RNA, 21 nt, Human
caggccaggcccucugcccac

SEQ ID NO: 3083403 - RNA, 22 nt, Human
caggccaggcccucugcccacu

SEQ ID NO: 3083404 - RNA, 20 nt, Human
caggccacaagacccuugug

SEQ ID NO: 3083405 - RNA, 17 nt, Human
caggccacaagacccuu

SEQ ID NO: 3083406 - RNA, 18 nt, Human
caggccacaagacccuug

SEQ ID NO: 3083407 - RNA, 13 nt, Human
caggccacaagac

SEQ ID NO: 3083408 - RNA, 18 nt, Human
caggccaaacucaccugc

SEQ ID NO: 3083409 - RNA, 23 nt, Human
caggccaaacucaccugccccuc

SEQ ID NO: 3083410 - RNA, 19 nt, Human
caggcccccaggugccagu

SEQ ID NO: 3083411 - RNA, 14 nt, Human
caggcccccaggug

SEQ ID NO: 3083412 - RNA, 13 nt, Human
caggccccugcca

SEQ ID NO: 3083413 - RNA, 20 nt, Human
caggcccccaggugccaguu

SEQ ID NO: 3083414 - RNA, 20 nt, Human
caggccccugccacccuggg

SEQ ID NO: 3083415 - RNA, 19 nt, Human
caggccccugccacccugg

SEQ ID NO: 3083416 - RNA, 17 nt, Human
caggccccugccacccu

SEQ ID NO: 3083417 - RNA, 15 nt, Human
caggccccugccacc

SEQ ID NO: 3083418 - RNA, 15 nt, Human
caggcccggcuccag

SEQ ID NO: 3083419 - RNA, 14 nt, Human
caggcccggcucca

SEQ ID NO: 3083420 - RNA, 13 nt, Human
caggcccggcucc

SEQ ID NO: 3083421 - RNA, 20 nt, Human
caggaugaugacuauggaaa

SEQ ID NO: 3083422 - RNA, 18 nt, Human
caggaugaugacuaugga

SEQ ID NO: 3083423 - RNA, 22 nt, Human
caggaugaugacuauggaaaga

SEQ ID NO: 3083424 - RNA, 23 nt, Human
caggauggccgggcgcgguggcu

SEQ ID NO: 3083425 - RNA, 18 nt, Human
caggauucuuccucccuc

SEQ ID NO: 3083426 - RNA, 17 nt, Human
caggauucuuccucccu

SEQ ID NO: 3083427 - RNA, 21 nt, Human
caggaugguucccuugaugaa

SEQ ID NO: 3083428 - RNA, 23 nt, Human
caggaugguucccuugaugaaga

SEQ ID NO: 3083429 - RNA, 13 nt, Human
caggaucagucug

SEQ ID NO: 3083430 - RNA, 21 nt, Human
caggauauucucacagcucca

SEQ ID NO: 3083431 - RNA, 14 nt, Human
caggaucagucuga

SEQ ID NO: 3083432 - RNA, 17 nt, Human
caggcaugguggcccac

SEQ ID NO: 3083433 - RNA, 12 nt, Human
caggcaggucuu

SEQ ID NO: 3083434 - RNA, 19 nt, Human
caggcagguccaggguuug

SEQ ID NO: 3083435 - RNA, 15 nt, Human
caggcagguccaggg

SEQ ID NO: 3083436 - RNA, 14 nt, Human
caggcagguccagg

SEQ ID NO: 3083437 - RNA, 22 nt, Human
caggcaggucuugaacuccugg

SEQ ID NO: 3083438 - RNA, 13 nt, Human
caggcaggucuug

SEQ ID NO: 3083439 - RNA, 15 nt, Human
caggcaggugggaug

SEQ ID NO: 3083440 - RNA, 23 nt, Human
caggcaggucuugaacuccuggc

SEQ ID NO: 3083441 - RNA, 13 nt, Human
caggcauucccca

SEQ ID NO: 3083442 - RNA, 15 nt, Human
caggcauuccccagg

SEQ ID NO: 3083443 - RNA, 16 nt, Human
caggcauuccccagga

SEQ ID NO: 3083444 - RNA, 17 nt, Human
caggcauuccccaggag

SEQ ID NO: 3083445 - RNA, 20 nt, Human
caggcauguucucugaggac

SEQ ID NO: 3083446 - RNA, 19 nt, Human
caggcauguucucugagga

SEQ ID NO: 3083447 - RNA, 18 nt, Human
caggcauguucucugagg

SEQ ID NO: 3083448 - RNA, 15 nt, Human
caggcauguucucug

SEQ ID NO: 3083449 - RNA, 18 nt, Human
caggcauuccccaggagg

SEQ ID NO: 3083450 - RNA, 19 nt, Human
caggcauuccccaggaggc

SEQ ID NO: 3083451 - RNA, 20 nt, Human
caggcauuccccaggaggcc

SEQ ID NO: 3083452 - RNA, 21 nt, Human
caggcauuccccaggaggcca

SEQ ID NO: 3083453 - RNA, 22 nt, Human
caggcauuccccaggaggccag

SEQ ID NO: 3083454 - RNA, 23 nt, Human
caggcauuccccaggaggccagc

SEQ ID NO: 3083455 - RNA, 24 nt, Human
caggcauuccccaggaggccagcc

SEQ ID NO: 3083456 - RNA, 20 nt, Human
caggauucuuccucccuccc

SEQ ID NO: 3083457 - RNA, 16 nt, Human
caggauuuuaaucuuu

SEQ ID NO: 3083458 - RNA, 14 nt, Human
caggcagccaggcc

SEQ ID NO: 3083459 - RNA, 15 nt, Human
caggcagccaggcca

SEQ ID NO: 3083460 - RNA, 21 nt, Human
caggcaagcaccuccugccuc

SEQ ID NO: 3083461 - RNA, 16 nt, Human
caggcaagcaccuccu

SEQ ID NO: 3083462 - RNA, 15 nt, Human
caggcaagcaccucc

SEQ ID NO: 3083463 - RNA, 14 nt, Human
caggcaagcaccuc

SEQ ID NO: 3083464 - RNA, 13 nt, Human
caggcagguccag

SEQ ID NO: 3083465 - RNA, 16 nt, Human
caggcagccaggccac

SEQ ID NO: 3083466 - RNA, 17 nt, Human
caggcagccaggccaca

SEQ ID NO: 3083467 - RNA, 19 nt, Human
caggaguuucguuuucaaa

SEQ ID NO: 3083468 - RNA, 21 nt, Human
caggaguuugagaccaaccug

SEQ ID NO: 3083469 - RNA, 22 nt, Human
caggaguuugagaccaaccugg

SEQ ID NO: 3083470 - RNA, 23 nt, Human
caggaguuugagaccaaccuggg

SEQ ID NO: 3083471 - RNA, 19 nt, Human
caggagcccugggaggcuc

SEQ ID NO: 3083472 - RNA, 18 nt, Human
caggagcccugggaggcu

SEQ ID NO: 3083473 - RNA, 16 nt, Human
caggagcccugggagg

SEQ ID NO: 3083474 - RNA, 14 nt, Human
caggagcccuggga

SEQ ID NO: 3083475 - RNA, 11 nt, Human
caggagcccug

SEQ ID NO: 3083476 - RNA, 23 nt, Human
caggagccccgaggccuucucug

SEQ ID NO: 3083477 - RNA, 22 nt, Human
caggagccccgaggccuucucu

SEQ ID NO: 3083478 - RNA, 20 nt, Human
caggagccccgaggccuucu

SEQ ID NO: 3083479 - RNA, 12 nt, Human
caggagcagcca

SEQ ID NO: 3083480 - RNA, 13 nt, Human
caggagcagccac

SEQ ID NO: 3083481 - RNA, 14 nt, Human
caggagcagccaca

SEQ ID NO: 3083482 - RNA, 19 nt, Human
caggagcagccacauuccu

SEQ ID NO: 3083483 - RNA, 18 nt, Human
caggagccccgaggccuu

SEQ ID NO: 3083484 - RNA, 16 nt, Human
caggagccccgaggcc

SEQ ID NO: 3083485 - RNA, 15 nt, Human
caggagccccgaggc

SEQ ID NO: 3083486 - RNA, 21 nt, Human
caggagcccugggaggcucug

SEQ ID NO: 3083487 - RNA, 14 nt, Human
caggagccuccugc

SEQ ID NO: 3083488 - RNA, 17 nt, Human
caggagccuccugcccu

SEQ ID NO: 3083489 - RNA, 20 nt, Human
caggagccuccugcccuuac

SEQ ID NO: 3083490 - RNA, 12 nt, Human
caggagugagca

SEQ ID NO: 3083491 - RNA, 12 nt, Human
caggagaguaga

SEQ ID NO: 3083492 - RNA, 21 nt, Human
cagauggaaugcuguguuaaa

SEQ ID NO: 3083493 - RNA, 19 nt, Human
cagauggaaugcuguguua

SEQ ID NO: 3083494 - RNA, 17 nt, Human
cagauggaaugcugugu

SEQ ID NO: 3083495 - RNA, 16 nt, Human
cagauggaaugcugug

SEQ ID NO: 3083496 - RNA, 18 nt, Human
cagaugggugcuuggagg

SEQ ID NO: 3083497 - RNA, 23 nt, Human
cagaugggugcuuggaggaagga

SEQ ID NO: 3083498 - RNA, 14 nt, Human
cagauucuuuccug

SEQ ID NO: 3083499 - RNA, 14 nt, Human
cagauuuuccugaa

SEQ ID NO: 3083500 - RNA, 15 nt, Human
cagauuuuccugaaa

SEQ ID NO: 3083501 - RNA, 18 nt, Human
cagcaaaagaugcuucuc

SEQ ID NO: 3083502 - RNA, 23 nt, Human
cagcaacgcaggcccccaggugc

SEQ ID NO: 3083503 - RNA, 11 nt, Human
cagcagagcac

SEQ ID NO: 3083504 - RNA, 13 nt, Human
cagcagagcaccu

SEQ ID NO: 3083505 - RNA, 22 nt, Human
cagcagaaaugccuuacccuca

SEQ ID NO: 3083506 - RNA, 19 nt, Human
cagcagaaaugccuuaccc

SEQ ID NO: 3083507 - RNA, 17 nt, Human
cagcagaaaugccuuac

SEQ ID NO: 3083508 - RNA, 15 nt, Human
cagcagaaaugccuu

SEQ ID NO: 3083509 - RNA, 12 nt, Human
cagcaagugaga

SEQ ID NO: 3083510 - RNA, 23 nt, Human
cagcaagggugaugggaaagcau

SEQ ID NO: 3083511 - RNA, 22 nt, Human
cagcaagggugaugggaaagca

SEQ ID NO: 3083512 - RNA, 17 nt, Human
cagcaagugagagcugg

SEQ ID NO: 3083513 - RNA, 16 nt, Human
cagcaagugagagcug

SEQ ID NO: 3083514 - RNA, 15 nt, Human
cagcaagugagagcu

SEQ ID NO: 3083515 - RNA, 14 nt, Human
cagcaagugagagc

SEQ ID NO: 3083516 - RNA, 18 nt, Human
cagcaaggagauuuacaa

SEQ ID NO: 3083517 - RNA, 17 nt, Human
cagcaaggagauuuaca

SEQ ID NO: 3083518 - RNA, 19 nt, Human
cagcaagggugaugggaaa

SEQ ID NO: 3083519 - RNA, 21 nt, Human
cagcaauaaagcagcguuucu

SEQ ID NO: 3083520 - RNA, 13 nt, Human
cagcaauaaagca

SEQ ID NO: 3083521 - RNA, 21 nt, Human
cagcaagugagagcugggugu

SEQ ID NO: 3083522 - RNA, 19 nt, Human
cagcaagugagagcugggu

SEQ ID NO: 3083523 - RNA, 22 nt, Human
cagcaauaaagcagcguuucua

SEQ ID NO: 3083524 - RNA, 15 nt, Human
cagcccacuucugcc

SEQ ID NO: 3083525 - RNA, 15 nt, Human
cagcccaccccucaa

SEQ ID NO: 3083526 - RNA, 20 nt, Human
cagccccaaaacucuccucu

SEQ ID NO: 3083527 - RNA, 21 nt, Human
cagccccaaaacucuccucug

SEQ ID NO: 3083528 - RNA, 22 nt, Human
cagccccaaaacucuccucugc

SEQ ID NO: 3083529 - RNA, 18 nt, Human
cagcccacuucugccaua

SEQ ID NO: 3083530 - RNA, 14 nt, Human
cagccacauuccug

SEQ ID NO: 3083531 - RNA, 15 nt, Human
cagccacauuccuga

SEQ ID NO: 3083532 - RNA, 17 nt, Human
cagccacauuccugaug

SEQ ID NO: 3083533 - RNA, 19 nt, Human
cagccacauuccugaugcu

SEQ ID NO: 3083534 - RNA, 22 nt, Human
cagccacggccaggccagaggg

SEQ ID NO: 3083535 - RNA, 21 nt, Human
cagccacggccaggccagagg

SEQ ID NO: 3083536 - RNA, 19 nt, Human
cagccacggccaggccaga

SEQ ID NO: 3083537 - RNA, 18 nt, Human
cagccacggccaggccag

SEQ ID NO: 3083538 - RNA, 17 nt, Human
cagccacggccaggcca

SEQ ID NO: 3083539 - RNA, 16 nt, Human
cagccacggccaggcc

SEQ ID NO: 3083540 - RNA, 15 nt, Human
cagccacggccaggc

SEQ ID NO: 3083541 - RNA, 14 nt, Human
cagccacggccagg

SEQ ID NO: 3083542 - RNA, 13 nt, Human
cagccaguaaaug

SEQ ID NO: 3083543 - RNA, 22 nt, Human
cagccaguaaaugggggugcau

SEQ ID NO: 3083544 - RNA, 23 nt, Human
cagccacggccaggccagaggga

SEQ ID NO: 3083545 - RNA, 18 nt, Human
cagccaacuauggccugu

SEQ ID NO: 3083546 - RNA, 18 nt, Human
cagccaaagccuccucca

SEQ ID NO: 3083547 - RNA, 21 nt, Human
cagccaaagccuccuccagcc

SEQ ID NO: 3083548 - RNA, 15 nt, Human
cagccaaagccuccu

SEQ ID NO: 3083549 - RNA, 16 nt, Human
cagccaaagccuccuc

SEQ ID NO: 3083550 - RNA, 20 nt, Human
cagcauccuggcacccggcc

SEQ ID NO: 3083551 - RNA, 19 nt, Human
cagcauccuggcacccggc

SEQ ID NO: 3083552 - RNA, 21 nt, Human
cagcauccuggcacccggccc

SEQ ID NO: 3083553 - RNA, 12 nt, Human
cagcagccugga

SEQ ID NO: 3083554 - RNA, 14 nt, Human
cagcagccuggacc

SEQ ID NO: 3083555 - RNA, 15 nt, Human
cagcagccuggaccc

SEQ ID NO: 3083556 - RNA, 18 nt, Human
cagcagccuggacccugu

SEQ ID NO: 3083557 - RNA, 19 nt, Human
cagcagccuggacccugug

SEQ ID NO: 3083558 - RNA, 22 nt, Human
cagcagccuggacccuguggau

SEQ ID NO: 3083559 - RNA, 14 nt, Human
cagcaggcucucag

SEQ ID NO: 3083560 - RNA, 15 nt, Human
cagcaggcucucagg

SEQ ID NO: 3083561 - RNA, 12 nt, Human
cagcaggcucuc

SEQ ID NO: 3083562 - RNA, 18 nt, Human
cagcagggagggcuucug

SEQ ID NO: 3083563 - RNA, 13 nt, Human
cagcaggcugcca

SEQ ID NO: 3083564 - RNA, 14 nt, Human
cagcaggcugccag

SEQ ID NO: 3083565 - RNA, 15 nt, Human
cagcaggcugccagu

SEQ ID NO: 3083566 - RNA, 18 nt, Human
cagcaggcugccagugcc

SEQ ID NO: 3083567 - RNA, 19 nt, Human
cagcaggcugccagugccu

SEQ ID NO: 3083568 - RNA, 20 nt, Human
cagcaggcucucaggccagc

SEQ ID NO: 3083569 - RNA, 22 nt, Human
cagcaggcucucaggccagcug

SEQ ID NO: 3083570 - RNA, 16 nt, Human
cagcaggcucucaggc

SEQ ID NO: 3083571 - RNA, 17 nt, Human
cagcaggcucucaggcc

SEQ ID NO: 3083572 - RNA, 18 nt, Human
cagcaggcucucaggcca

SEQ ID NO: 3083573 - RNA, 19 nt, Human
cagcaggcucucaggccag

SEQ ID NO: 3083574 - RNA, 20 nt, Human
cagcagggagggcuucugcc

SEQ ID NO: 3083575 - RNA, 20 nt, Human
cagcaggcugccagugccug

SEQ ID NO: 3083576 - RNA, 17 nt, Human
cagcauccuggcacccg

SEQ ID NO: 3083577 - RNA, 16 nt, Human
cagcauccuggcaccc

SEQ ID NO: 3083578 - RNA, 15 nt, Human
cagcauccuggcacc

SEQ ID NO: 3083579 - RNA, 14 nt, Human
cagcauccuggcac

SEQ ID NO: 3083580 - RNA, 14 nt, Human
cagcucaccagccc

SEQ ID NO: 3083581 - RNA, 20 nt, Human
cagcuggggccaggcugggu

SEQ ID NO: 3083582 - RNA, 19 nt, Human
cagcuggggccaggcuggg

SEQ ID NO: 3083583 - RNA, 18 nt, Human
cagcuggggccaggcugg

SEQ ID NO: 3083584 - RNA, 22 nt, Human
cagcugcuuuugucuaugggac

SEQ ID NO: 3083585 - RNA, 23 nt, Human
cagcugcuuuugucuaugggacu

SEQ ID NO: 3083586 - RNA, 22 nt, Human
cagcuggggccaggcugggucg

SEQ ID NO: 3083587 - RNA, 21 nt, Human
cagcuggggccaggcuggguc

SEQ ID NO: 3083588 - RNA, 21 nt, Human
cagcugggguggggaccucag

SEQ ID NO: 3083589 - RNA, 22 nt, Human
cagcugggguggggaccucagg

SEQ ID NO: 3083590 - RNA, 23 nt, Human
cagcugggguggggaccucaggc

SEQ ID NO: 3083591 - RNA, 18 nt, Human
cagcugguugagguuuca

SEQ ID NO: 3083592 - RNA, 18 nt, Human
cagcuguaugauucccag

SEQ ID NO: 3083593 - RNA, 13 nt, Human
cagcugcuugggc

SEQ ID NO: 3083594 - RNA, 14 nt, Human
cagcugcuugggcu

SEQ ID NO: 3083595 - RNA, 15 nt, Human
cagcugcuugggcuu

SEQ ID NO: 3083596 - RNA, 16 nt, Human
cagcugcuugggcuuc

SEQ ID NO: 3083597 - RNA, 18 nt, Human
cagcugcuugggcuucau

SEQ ID NO: 3083598 - RNA, 19 nt, Human
cagcugcuugggcuucauc

SEQ ID NO: 3083599 - RNA, 21 nt, Human
cagcugcuugggcuucauccu

SEQ ID NO: 3083600 - RNA, 22 nt, Human
cagcugcuugggcuucauccuc

SEQ ID NO: 3083601 - RNA, 17 nt, Human
cagcugcuacuacuccu

SEQ ID NO: 3083602 - RNA, 21 nt, Human
cagcugcugagauccuggacu

SEQ ID NO: 3083603 - RNA, 12 nt, Human
cagcugcugaga

SEQ ID NO: 3083604 - RNA, 19 nt, Human
cagcugcugagauccugga

SEQ ID NO: 3083605 - RNA, 21 nt, Human
cagcugcugaaacaacaaaua

SEQ ID NO: 3083606 - RNA, 20 nt, Human
cagcugcugaaacaacaaau

SEQ ID NO: 3083607 - RNA, 18 nt, Human
cagcugccugggaucccu

SEQ ID NO: 3083608 - RNA, 23 nt, Human
cagcugccugggaucccucaucc

SEQ ID NO: 3083609 - RNA, 24 nt, Human
cagcugcgguccacccaggagccc

SEQ ID NO: 3083610 - RNA, 23 nt, Human
cagcugcgguccacccaggagcc

SEQ ID NO: 3083611 - RNA, 22 nt, Human
cagcugcgguccacccaggagc

SEQ ID NO: 3083612 - RNA, 21 nt, Human
cagcugcgguccacccaggag

SEQ ID NO: 3083613 - RNA, 20 nt, Human
cagcugcgguccacccagga

SEQ ID NO: 3083614 - RNA, 19 nt, Human
cagcugcgguccacccagg

SEQ ID NO: 3083615 - RNA, 15 nt, Human
cagcugccugggauc

SEQ ID NO: 3083616 - RNA, 18 nt, Human
cagcugcgguccacccag

SEQ ID NO: 3083617 - RNA, 23 nt, Human
cagcucuucuccaggcuguaucc

SEQ ID NO: 3083618 - RNA, 19 nt, Human
cagcucuucuccaggcugu

SEQ ID NO: 3083619 - RNA, 18 nt, Human
cagcucuucuccaggcug

SEQ ID NO: 3083620 - RNA, 17 nt, Human
cagcucuucuccaggcu

SEQ ID NO: 3083621 - RNA, 16 nt, Human
cagcucuucuccaggc

SEQ ID NO: 3083622 - RNA, 15 nt, Human
cagcucuucuccagg

SEQ ID NO: 3083623 - RNA, 14 nt, Human
cagcucuucuccag

SEQ ID NO: 3083624 - RNA, 13 nt, Human
cagcucuucucca

SEQ ID NO: 3083625 - RNA, 10 nt, Human
cagcucuuau

SEQ ID NO: 3083626 - RNA, 21 nt, Human
cagcucuuauauugccauuuc

SEQ ID NO: 3083627 - RNA, 23 nt, Human
cagcucuguccugggagugagcu

SEQ ID NO: 3083628 - RNA, 18 nt, Human
cagcucuguccugggagu

SEQ ID NO: 3083629 - RNA, 17 nt, Human
cagcucuguccugggag

SEQ ID NO: 3083630 - RNA, 16 nt, Human
cagcucuguccuggga

SEQ ID NO: 3083631 - RNA, 14 nt, Human
cagcucuguccugg

SEQ ID NO: 3083632 - RNA, 22 nt, Human
cagcucugguccauagagagca

SEQ ID NO: 3083633 - RNA, 23 nt, Human
cagcucugguccauagagagcaa

SEQ ID NO: 3083634 - RNA, 13 nt, Human
cagcucuguccug

SEQ ID NO: 3083635 - RNA, 12 nt, Human
cagcucuguccu

SEQ ID NO: 3083636 - RNA, 16 nt, Human
cagcucugguccauag

SEQ ID NO: 3083637 - RNA, 17 nt, Human
cagcucugguccauaga

SEQ ID NO: 3083638 - RNA, 18 nt, Human
cagcucugguccauagag

SEQ ID NO: 3083639 - RNA, 21 nt, Human
cagcucugguccauagagagc

SEQ ID NO: 3083640 - RNA, 10 nt, Human
cagcucuggu

SEQ ID NO: 3083641 - RNA, 13 nt, Human
cagcucuggucca

SEQ ID NO: 3083642 - RNA, 23 nt, Human
cagcuccuucuguccuacucugu

SEQ ID NO: 3083643 - RNA, 21 nt, Human
cagcuccuucuguccuacucu

SEQ ID NO: 3083644 - RNA, 17 nt, Human
cagcuccuucuguccua

SEQ ID NO: 3083645 - RNA, 16 nt, Human
cagcuccuucuguccu

SEQ ID NO: 3083646 - RNA, 13 nt, Human
cagcucagagagg

SEQ ID NO: 3083647 - RNA, 17 nt, Human
cagcucagagagggugg

SEQ ID NO: 3083648 - RNA, 19 nt, Human
cagcucagagaggguggga

SEQ ID NO: 3083649 - RNA, 20 nt, Human
cagcucagagagggugggag

SEQ ID NO: 3083650 - RNA, 21 nt, Human
cagcucugcaagaauugaagc

SEQ ID NO: 3083651 - RNA, 20 nt, Human
cagcucugcauacucauuag

SEQ ID NO: 3083652 - RNA, 15 nt, Human
cagcucugcaagaau

SEQ ID NO: 3083653 - RNA, 16 nt, Human
cagcucugcaagaauu

SEQ ID NO: 3083654 - RNA, 16 nt, Human
cagcucuccccuucuc

SEQ ID NO: 3083655 - RNA, 14 nt, Human
caggaagccagcag

SEQ ID NO: 3083656 - RNA, 16 nt, Human
caggaagccagcaggc

SEQ ID NO: 3083657 - RNA, 17 nt, Human
caggaagccagcaggcu

SEQ ID NO: 3083658 - RNA, 18 nt, Human
caggaagccagcaggcuc

SEQ ID NO: 3083659 - RNA, 19 nt, Human
caggaagccagcaggcucu

SEQ ID NO: 3083660 - RNA, 21 nt, Human
caggaagccagcaggcucuca

SEQ ID NO: 3083661 - RNA, 22 nt, Human
caggaagccagcaggcucucag

SEQ ID NO: 3083662 - RNA, 16 nt, Human
caggaagcucagggcc

SEQ ID NO: 3083663 - RNA, 17 nt, Human
caggaagcucagggccu

SEQ ID NO: 3083664 - RNA, 18 nt, Human
caggaagcucagggccug

SEQ ID NO: 3083665 - RNA, 19 nt, Human
caggaagcucagggccugg

SEQ ID NO: 3083666 - RNA, 14 nt, Human
caggaagcucaggg

SEQ ID NO: 3083667 - RNA, 15 nt, Human
caggaagcucagggc

SEQ ID NO: 3083668 - RNA, 13 nt, Human
caggaagcucagg

SEQ ID NO: 3083669 - RNA, 20 nt, Human
caggaagcucagggccuggc

SEQ ID NO: 3083670 - RNA, 21 nt, Human
caggaagcucagggccuggcu

SEQ ID NO: 3083671 - RNA, 23 nt, Human
caggaagcucagggccuggcuca

SEQ ID NO: 3083672 - RNA, 14 nt, Human
caggaagcugugag

SEQ ID NO: 3083673 - RNA, 13 nt, Human
caggaagcuguga

SEQ ID NO: 3083674 - RNA, 22 nt, Human
caggaagcugugagagcaguuu

SEQ ID NO: 3083675 - RNA, 15 nt, Human
caggaaggcuaaagg

SEQ ID NO: 3083676 - RNA, 14 nt, Human
caggaaguacugga

SEQ ID NO: 3083677 - RNA, 16 nt, Human
caggaaguacuggaga

SEQ ID NO: 3083678 - RNA, 12 nt, Human
caggaaguacug

SEQ ID NO: 3083679 - RNA, 17 nt, Human
caggaaguacuggagaa

SEQ ID NO: 3083680 - RNA, 18 nt, Human
caggaaguacuggagaaa

SEQ ID NO: 3083681 - RNA, 20 nt, Human
caggaaguacuggagaaaau

SEQ ID NO: 3083682 - RNA, 15 nt, Human
caggaaguagaggag

SEQ ID NO: 3083683 - RNA, 16 nt, Human
caggaaguagaggagg

SEQ ID NO: 3083684 - RNA, 18 nt, Human
cagcuugaaacugagaug

SEQ ID NO: 3083685 - RNA, 21 nt, Human
cagcuucauuuccugugucuu

SEQ ID NO: 3083686 - RNA, 20 nt, Human
cagcuucauuuccugugucu

SEQ ID NO: 3083687 - RNA, 19 nt, Human
cagcuucauuuccuguguc

SEQ ID NO: 3083688 - RNA, 21 nt, Human
cagcuugaggguugggcuggu

SEQ ID NO: 3083689 - RNA, 20 nt, Human
cagcuugaggguugggcugg

SEQ ID NO: 3083690 - RNA, 19 nt, Human
cagcuugaggguugggcug

SEQ ID NO: 3083691 - RNA, 18 nt, Human
cagcuugaggguugggcu

SEQ ID NO: 3083692 - RNA, 18 nt, Human
cagcuugaccgugaggcc

SEQ ID NO: 3083693 - RNA, 19 nt, Human
cagcuugaccgugaggcca

SEQ ID NO: 3083694 - RNA, 20 nt, Human
cagcuugaccgugaggccag

SEQ ID NO: 3083695 - RNA, 21 nt, Human
cagcuugaccgugaggccaga

SEQ ID NO: 3083696 - RNA, 15 nt, Human
cagcuugaggguugg

SEQ ID NO: 3083697 - RNA, 14 nt, Human
cagcuugaggguug

SEQ ID NO: 3083698 - RNA, 22 nt, Human
cagcuuguaaauagcucaggug

SEQ ID NO: 3083699 - RNA, 21 nt, Human
cagcuuguaaauagcucaggu

SEQ ID NO: 3083700 - RNA, 20 nt, Human
cagcuuguaaauagcucagg

SEQ ID NO: 3083701 - RNA, 19 nt, Human
cagcuuguaaauagcucag

SEQ ID NO: 3083702 - RNA, 18 nt, Human
cagcuuguaaauagcuca

SEQ ID NO: 3083703 - RNA, 23 nt, Human
cagcuuuccucaaaacuucagac

SEQ ID NO: 3083704 - RNA, 12 nt, Human
cagcuuuguuug

SEQ ID NO: 3083705 - RNA, 21 nt, Human
cagcuuuguuuguugucagcu

SEQ ID NO: 3083706 - RNA, 22 nt, Human
cagcuuuguuuguugucagcug

SEQ ID NO: 3083707 - RNA, 23 nt, Human
cagcuuuguuuguugucagcuga

SEQ ID NO: 3083708 - RNA, 18 nt, Human
caggaaccacaagacugc

SEQ ID NO: 3083709 - RNA, 22 nt, Human
caggaagcucagggccuggcuc

SEQ ID NO: 3083710 - RNA, 15 nt, Human
cagccuggacccugu

SEQ ID NO: 3083711 - RNA, 19 nt, Human
cagccuggacccuguggau

SEQ ID NO: 3083712 - RNA, 12 nt, Human
cagccuggaugc

SEQ ID NO: 3083713 - RNA, 15 nt, Human
cagccuggaugccau

SEQ ID NO: 3083714 - RNA, 16 nt, Human
cagccuggaugccauc

SEQ ID NO: 3083715 - RNA, 11 nt, Human
cagccuggaug

SEQ ID NO: 3083716 - RNA, 17 nt, Human
cagccuggaugccaucc

SEQ ID NO: 3083717 - RNA, 21 nt, Human
cagccuggaugccauccaagu

SEQ ID NO: 3083718 - RNA, 23 nt, Human
cagccucccgaguagcugggacu

SEQ ID NO: 3083719 - RNA, 22 nt, Human
cagccucccgaguagcugggac

SEQ ID NO: 3083720 - RNA, 21 nt, Human
cagccucccgaguagcuggga

SEQ ID NO: 3083721 - RNA, 20 nt, Human
cagccucccgaguagcuggg

SEQ ID NO: 3083722 - RNA, 19 nt, Human
cagccucccgaguagcugg

SEQ ID NO: 3083723 - RNA, 23 nt, Human
cagccucccgaauagcugggacu

SEQ ID NO: 3083724 - RNA, 20 nt, Human
cagccugcuccagcuguuca

SEQ ID NO: 3083725 - RNA, 20 nt, Human
cagccuugaccauucuccac

SEQ ID NO: 3083726 - RNA, 21 nt, Human
cagccuugaccauucuccacc

SEQ ID NO: 3083727 - RNA, 17 nt, Human
cagccuugaccauucuc

SEQ ID NO: 3083728 - RNA, 22 nt, Human
cagccuugaccauucuccaccu

SEQ ID NO: 3083729 - RNA, 23 nt, Human
cagccuugaccauucuccaccug

SEQ ID NO: 3083730 - RNA, 24 nt, Human
cagccuugaccauucuccaccugc

SEQ ID NO: 3083731 - RNA, 16 nt, Human
cagccugggcaaugug

SEQ ID NO: 3083732 - RNA, 19 nt, Human
cagccugggcaaugugaua

SEQ ID NO: 3083733 - RNA, 16 nt, Human
cagcuaaugggacacu

SEQ ID NO: 3083734 - RNA, 15 nt, Human
cagcuaaugggacac

SEQ ID NO: 3083735 - RNA, 20 nt, Human
cagcuaacauggaaguacua

SEQ ID NO: 3083736 - RNA, 19 nt, Human
cagcuacuugggaggcuga

SEQ ID NO: 3083737 - RNA, 20 nt, Human
cagcgagcccugguggcagu

SEQ ID NO: 3083738 - RNA, 19 nt, Human
cagcgagcccugguggcag

SEQ ID NO: 3083739 - RNA, 17 nt, Human
cagcgagcccugguggc

SEQ ID NO: 3083740 - RNA, 16 nt, Human
cagcgagcccuggugg

SEQ ID NO: 3083741 - RNA, 13 nt, Human
cagcgagcccugg

SEQ ID NO: 3083742 - RNA, 19 nt, Human
cagcuaacauggaaguacu

SEQ ID NO: 3083743 - RNA, 18 nt, Human
cagcuaacauggaaguac

SEQ ID NO: 3083744 - RNA, 21 nt, Human
cagcgagcccugguggcagug

SEQ ID NO: 3083745 - RNA, 19 nt, Human
cagcucaccagccccagug

SEQ ID NO: 3083746 - RNA, 17 nt, Human
cagcucaccagccccag

SEQ ID NO: 3083747 - RNA, 16 nt, Human
cagcucaccagcccca

SEQ ID NO: 3083748 - RNA, 15 nt, Human
cagcucaccagcccc

SEQ ID NO: 3083749 - RNA, 13 nt, Human
cagcucaccagcc

SEQ ID NO: 3083750 - RNA, 13 nt, Human
cagcucaccucuc

SEQ ID NO: 3083751 - RNA, 15 nt, Human
cagcucaccucuccc

SEQ ID NO: 3083752 - RNA, 16 nt, Human
cagcucaccucucccu

SEQ ID NO: 3083753 - RNA, 17 nt, Human
cagcucaccucucccuu

SEQ ID NO: 3083754 - RNA, 21 nt, Human
cagcucaccagccccagugcc

SEQ ID NO: 3083755 - RNA, 20 nt, Human
cagcucaccagccccagugc

SEQ ID NO: 3083756 - RNA, 22 nt, Human
cagcucaccagccccagugccc

SEQ ID NO: 3083757 - RNA, 19 nt, Human
cagcucaccucucccuugg

SEQ ID NO: 3083758 - RNA, 20 nt, Human
cagcucaccucucccuugga

SEQ ID NO: 3083759 - RNA, 12 nt, Human
cagcucagagag

SEQ ID NO: 3083760 - RNA, 13 nt, Human
cagcccucagaau

SEQ ID NO: 3083761 - RNA, 17 nt, Human
cagcccgggcucugccu

SEQ ID NO: 3083762 - RNA, 18 nt, Human
cagcccgggcucugccuc

SEQ ID NO: 3083763 - RNA, 19 nt, Human
cagcccgggcucugccucc

SEQ ID NO: 3083764 - RNA, 20 nt, Human
cagcccgggcucugccuccc

SEQ ID NO: 3083765 - RNA, 21 nt, Human
cagcccgggcucugccuccca

SEQ ID NO: 3083766 - RNA, 22 nt, Human
cagcccgggcucugccucccau

SEQ ID NO: 3083767 - RNA, 16 nt, Human
cagccccuucugaccc

SEQ ID NO: 3083768 - RNA, 17 nt, Human
cagccccuucugaccca

SEQ ID NO: 3083769 - RNA, 19 nt, Human
cagccccuucugacccaug

SEQ ID NO: 3083770 - RNA, 21 nt, Human
cagccccuucugacccaugcu

SEQ ID NO: 3083771 - RNA, 22 nt, Human
cagccccuucugacccaugcug

SEQ ID NO: 3083772 - RNA, 23 nt, Human
cagccccuucugacccaugcugc

SEQ ID NO: 3083773 - RNA, 24 nt, Human
cagccccuucugacccaugcugcc

SEQ ID NO: 3083774 - RNA, 13 nt, Human
cagcccgggcucu

SEQ ID NO: 3083775 - RNA, 14 nt, Human
cagcccgggcucug

SEQ ID NO: 3083776 - RNA, 15 nt, Human
cagcccgggcucugc

SEQ ID NO: 3083777 - RNA, 16 nt, Human
cagcccgggcucugcc

SEQ ID NO: 3083778 - RNA, 22 nt, Human
cagccccaucccaaacccuuca

SEQ ID NO: 3083779 - RNA, 12 nt, Human
cagccccauccu

SEQ ID NO: 3083780 - RNA, 13 nt, Human
cagccccauccuc

SEQ ID NO: 3083781 - RNA, 14 nt, Human
cagccccauccucu

SEQ ID NO: 3083782 - RNA, 16 nt, Human
cagccccauccucugu

SEQ ID NO: 3083783 - RNA, 22 nt, Human
cagccccauccucuguacagag

SEQ ID NO: 3083784 - RNA, 14 nt, Human
cagccccauucugc

SEQ ID NO: 3083785 - RNA, 13 nt, Human
cagccccauucug

SEQ ID NO: 3083786 - RNA, 23 nt, Human
cagccccuggaugcagccucaca

SEQ ID NO: 3083787 - RNA, 18 nt, Human
cagccccauucugccugc

SEQ ID NO: 3083788 - RNA, 17 nt, Human
cagccccauucugccug

SEQ ID NO: 3083789 - RNA, 16 nt, Human
cagccccauucugccu

SEQ ID NO: 3083790 - RNA, 20 nt, Human
cagccccuguucuggcagag

SEQ ID NO: 3083791 - RNA, 22 nt, Human
cagccccuggaugcagccucac

SEQ ID NO: 3083792 - RNA, 21 nt, Human
cagccccuguucuggcagagu

SEQ ID NO: 3083793 - RNA, 11 nt, Human
cagccccaucc

SEQ ID NO: 3083794 - RNA, 21 nt, Human
cagccccaucccaaacccuuc

SEQ ID NO: 3083795 - RNA, 18 nt, Human
cagccccagugcccacag

SEQ ID NO: 3083796 - RNA, 17 nt, Human
cagccccagugcccaca

SEQ ID NO: 3083797 - RNA, 16 nt, Human
cagccccagugcccac

SEQ ID NO: 3083798 - RNA, 15 nt, Human
cagccccagugccca

SEQ ID NO: 3083799 - RNA, 14 nt, Human
cagccccagugccc

SEQ ID NO: 3083800 - RNA, 13 nt, Human
cagccccagugcc

SEQ ID NO: 3083801 - RNA, 18 nt, Human
cagcccugcagagggcac

SEQ ID NO: 3083802 - RNA, 20 nt, Human
cagcccugcagagggcacag

SEQ ID NO: 3083803 - RNA, 13 nt, Human
cagcccugcagag

SEQ ID NO: 3083804 - RNA, 14 nt, Human
cagcccugcagagg

SEQ ID NO: 3083805 - RNA, 15 nt, Human
cagcccugcagaggg

SEQ ID NO: 3083806 - RNA, 16 nt, Human
cagcccugcagagggc

SEQ ID NO: 3083807 - RNA, 21 nt, Human
cagccguguaaccauggaccc

SEQ ID NO: 3083808 - RNA, 23 nt, Human
cagccucccaaagugcugggauu

SEQ ID NO: 3083809 - RNA, 21 nt, Human
cagccucccaaagugcuggga

SEQ ID NO: 3083810 - RNA, 20 nt, Human
cagccucccaaagugcuggg

SEQ ID NO: 3083811 - RNA, 19 nt, Human
cagccucccaaagugcugg

SEQ ID NO: 3083812 - RNA, 22 nt, Human
cagccucccgaauagcugggac

SEQ ID NO: 3083813 - RNA, 21 nt, Human
cagccucccgaauagcuggga

SEQ ID NO: 3083814 - RNA, 20 nt, Human
cagccucccgaauagcuggg

SEQ ID NO: 3083815 - RNA, 18 nt, Human
cagccucaaccuccuggg

SEQ ID NO: 3083816 - RNA, 17 nt, Human
cagccucaaccuccugg

SEQ ID NO: 3083817 - RNA, 16 nt, Human
cagccuaguugaucag

SEQ ID NO: 3083818 - RNA, 21 nt, Human
cagccucaaccuccugggcua

SEQ ID NO: 3083819 - RNA, 20 nt, Human
cagccucaaccuccugggcu

SEQ ID NO: 3083820 - RNA, 19 nt, Human
cagccucaaccuccugggc

SEQ ID NO: 3083821 - RNA, 14 nt, Human
cagccucacagucc

SEQ ID NO: 3083822 - RNA, 15 nt, Human
cagccucacaguccu

SEQ ID NO: 3083823 - RNA, 20 nt, Human
cagccucacaguccuuacca

SEQ ID NO: 3083824 - RNA, 15 nt, Human
cagaggagagaggac

SEQ ID NO: 3083825 - RNA, 19 nt, Human
cagaggagagaggaccccc

SEQ ID NO: 3083826 - RNA, 13 nt, Human
cagaggagagagg

SEQ ID NO: 3083827 - RNA, 20 nt, Human
cagaggagagaggacccccu

SEQ ID NO: 3083828 - RNA, 11 nt, Human
cagaggcagcc

SEQ ID NO: 3083829 - RNA, 23 nt, Human
cagagcccacgcccccacuggug

SEQ ID NO: 3083830 - RNA, 15 nt, Human
cagagccccacagcc

SEQ ID NO: 3083831 - RNA, 16 nt, Human
cagagccccacagccc

SEQ ID NO: 3083832 - RNA, 22 nt, Human
cagagccccacagccccaucug

SEQ ID NO: 3083833 - RNA, 13 nt, Human
cagagccccacag

SEQ ID NO: 3083834 - RNA, 17 nt, Human
cagagcccacgccccca

SEQ ID NO: 3083835 - RNA, 19 nt, Human
cagagcccacgcccccacu

SEQ ID NO: 3083836 - RNA, 20 nt, Human
cagagcccacgcccccacug

SEQ ID NO: 3083837 - RNA, 21 nt, Human
cagagcccacgcccccacugg

SEQ ID NO: 3083838 - RNA, 20 nt, Human
cagaggaaagcaaaggagau

SEQ ID NO: 3083839 - RNA, 13 nt, Human
cagagccugcagu

SEQ ID NO: 3083840 - RNA, 13 nt, Human
cagaggaaggaga

SEQ ID NO: 3083841 - RNA, 12 nt, Human
cagagccugcag

SEQ ID NO: 3083842 - RNA, 20 nt, Human
cagagccccacccucagaug

SEQ ID NO: 3083843 - RNA, 16 nt, Human
cagagcccacgccccc

SEQ ID NO: 3083844 - RNA, 20 nt, Human
cagagcccaccuuggcucaa

SEQ ID NO: 3083845 - RNA, 19 nt, Human
cagagcccaccuuggcuca

SEQ ID NO: 3083846 - RNA, 17 nt, Human
cagagcccaccuuggcu

SEQ ID NO: 3083847 - RNA, 15 nt, Human
cagagcccaccuugg

SEQ ID NO: 3083848 - RNA, 13 nt, Human
cagagcagagacc

SEQ ID NO: 3083849 - RNA, 14 nt, Human
cagagcagagacca

SEQ ID NO: 3083850 - RNA, 15 nt, Human
cagagcagagaccau

SEQ ID NO: 3083851 - RNA, 17 nt, Human
cagagcagagaccaucc

SEQ ID NO: 3083852 - RNA, 18 nt, Human
cagagcagagaccauccc

SEQ ID NO: 3083853 - RNA, 19 nt, Human
cagagcagagaccaucccu

SEQ ID NO: 3083854 - RNA, 21 nt, Human
cagagcagagaccaucccuga

SEQ ID NO: 3083855 - RNA, 18 nt, Human
cagagcaccuuagacagu

SEQ ID NO: 3083856 - RNA, 19 nt, Human
cagagcaccuuagacaguc

SEQ ID NO: 3083857 - RNA, 21 nt, Human
cagagcaccuuagacaguccc

SEQ ID NO: 3083858 - RNA, 22 nt, Human
cagagcaccuuagacagucccu

SEQ ID NO: 3083859 - RNA, 11 nt, Human
cagagcagaga

SEQ ID NO: 3083860 - RNA, 12 nt, Human
cagagcagagac

SEQ ID NO: 3083861 - RNA, 23 nt, Human
cagagcaccuuagacagucccug

SEQ ID NO: 3083862 - RNA, 16 nt, Human
cagagacacaagccuu

SEQ ID NO: 3083863 - RNA, 17 nt, Human
cagagacacaagccuuc

SEQ ID NO: 3083864 - RNA, 14 nt, Human
cagagacacaagcc

SEQ ID NO: 3083865 - RNA, 15 nt, Human
cagagacacaagccu

SEQ ID NO: 3083866 - RNA, 14 nt, Human
cagagaccaucccu

SEQ ID NO: 3083867 - RNA, 16 nt, Human
cagagaccaucccuga

SEQ ID NO: 3083868 - RNA, 13 nt, Human
cagagaccauccc

SEQ ID NO: 3083869 - RNA, 21 nt, Human
cagagaaugaaagggcccaga

SEQ ID NO: 3083870 - RNA, 20 nt, Human
cagagaaugaaagggcccag

SEQ ID NO: 3083871 - RNA, 15 nt, Human
cagagaauucucuua

SEQ ID NO: 3083872 - RNA, 19 nt, Human
cagagaaugaaagggccca

SEQ ID NO: 3083873 - RNA, 16 nt, Human
cagagacuccugcagg

SEQ ID NO: 3083874 - RNA, 17 nt, Human
cagagacuccugcaggc

SEQ ID NO: 3083875 - RNA, 18 nt, Human
cagagacuccugcaggca

SEQ ID NO: 3083876 - RNA, 19 nt, Human
cagagacuccugcaggcag

SEQ ID NO: 3083877 - RNA, 14 nt, Human
cagagacuccugca

SEQ ID NO: 3083878 - RNA, 15 nt, Human
cagagacuccugcag

SEQ ID NO: 3083879 - RNA, 13 nt, Human
cagagacuccugc

SEQ ID NO: 3083880 - RNA, 17 nt, Human
cagagaccaucccugaa

SEQ ID NO: 3083881 - RNA, 18 nt, Human
cagagaccaucccugaag

SEQ ID NO: 3083882 - RNA, 19 nt, Human
cagagaccaucccugaagg

SEQ ID NO: 3083883 - RNA, 20 nt, Human
cagagaccaucccugaaggc

SEQ ID NO: 3083884 - RNA, 21 nt, Human
cagagaccaucccugaaggcc

SEQ ID NO: 3083885 - RNA, 14 nt, Human
cagagcaagugaga

SEQ ID NO: 3083886 - RNA, 20 nt, Human
cagagcaagugagacccugu

SEQ ID NO: 3083887 - RNA, 16 nt, Human
cagagcaccuuagaca

SEQ ID NO: 3083888 - RNA, 14 nt, Human
cagauaaucagugu

SEQ ID NO: 3083889 - RNA, 14 nt, Human
cagauaaucacaau

SEQ ID NO: 3083890 - RNA, 22 nt, Human
cagauaaagguucaugcaaacu

SEQ ID NO: 3083891 - RNA, 23 nt, Human
cagauaaauaguuuaugauucca

SEQ ID NO: 3083892 - RNA, 14 nt, Human
cagauaaacaguag

SEQ ID NO: 3083893 - RNA, 18 nt, Human
cagaguuguuacauuuuu

SEQ ID NO: 3083894 - RNA, 15 nt, Human
cagaguuguuacauu

SEQ ID NO: 3083895 - RNA, 19 nt, Human
cagaguuguuacauuuuua

SEQ ID NO: 3083896 - RNA, 15 nt, Human
cagaguugaagacag

SEQ ID NO: 3083897 - RNA, 16 nt, Human
cagaguugaagacaga

SEQ ID NO: 3083898 - RNA, 14 nt, Human
cagaguugaagaca

SEQ ID NO: 3083899 - RNA, 17 nt, Human
cagaguugaagacagag

SEQ ID NO: 3083900 - RNA, 18 nt, Human
cagaguugaagacagagc

SEQ ID NO: 3083901 - RNA, 19 nt, Human
cagaguugaagacagagcu

SEQ ID NO: 3083902 - RNA, 20 nt, Human
cagaguugaagacagagcua

SEQ ID NO: 3083903 - RNA, 14 nt, Human
cagaguuguuacau

SEQ ID NO: 3083904 - RNA, 22 nt, Human
cagaguugaagacagagcuaca

SEQ ID NO: 3083905 - RNA, 22 nt, Human
cagaugcaccagcccuuagcag

SEQ ID NO: 3083906 - RNA, 17 nt, Human
cagaugcaccagcccuu

SEQ ID NO: 3083907 - RNA, 16 nt, Human
cagaugcaccagcccu

SEQ ID NO: 3083908 - RNA, 14 nt, Human
cagaugcaccagcc

SEQ ID NO: 3083909 - RNA, 13 nt, Human
cagaugcaccagc

SEQ ID NO: 3083910 - RNA, 17 nt, Human
cagaugcacaugagcug

SEQ ID NO: 3083911 - RNA, 20 nt, Human
cagaucucuaacuucaccau

SEQ ID NO: 3083912 - RNA, 14 nt, Human
cagauccuggaaau

SEQ ID NO: 3083913 - RNA, 22 nt, Human
cagauacaggaaaagcugcuga

SEQ ID NO: 3083914 - RNA, 13 nt, Human
cagauccuggaaa

SEQ ID NO: 3083915 - RNA, 21 nt, Human
cagauacaggaaaagcugcug

SEQ ID NO: 3083916 - RNA, 20 nt, Human
cagauacaggaaaagcugcu

SEQ ID NO: 3083917 - RNA, 23 nt, Human
cagaggcgcaugaauuugugaag

SEQ ID NO: 3083918 - RNA, 13 nt, Human
cagaggcugccuc

SEQ ID NO: 3083919 - RNA, 19 nt, Human
cagagggagugacagaggc

SEQ ID NO: 3083920 - RNA, 18 nt, Human
cagagggagugacagagg

SEQ ID NO: 3083921 - RNA, 16 nt, Human
cagagggagugacaga

SEQ ID NO: 3083922 - RNA, 14 nt, Human
cagagggagugaca

SEQ ID NO: 3083923 - RNA, 23 nt, Human
cagaggcugccucucccaucacu

SEQ ID NO: 3083924 - RNA, 22 nt, Human
cagaggcagccccauucugccu

SEQ ID NO: 3083925 - RNA, 20 nt, Human
cagaggcagccccauucugc

SEQ ID NO: 3083926 - RNA, 19 nt, Human
cagaggcagccccauucug

SEQ ID NO: 3083927 - RNA, 18 nt, Human
cagaggcagccccauucu

SEQ ID NO: 3083928 - RNA, 15 nt, Human
cagaggcagccccau

SEQ ID NO: 3083929 - RNA, 14 nt, Human
cagaggcagcccca

SEQ ID NO: 3083930 - RNA, 13 nt, Human
cagaggcagcccc

SEQ ID NO: 3083931 - RNA, 12 nt, Human
cagaggcagccc

SEQ ID NO: 3083932 - RNA, 16 nt, Human
cagaggccaugggccu

SEQ ID NO: 3083933 - RNA, 19 nt, Human
cagaggccaugggccuccu

SEQ ID NO: 3083934 - RNA, 23 nt, Human
cagaggcagccccauucugccug

SEQ ID NO: 3083935 - RNA, 21 nt, Human
cagaggccaugggccuccugu

SEQ ID NO: 3083936 - RNA, 20 nt, Human
cagaggccaugggccuccug

SEQ ID NO: 3083937 - RNA, 13 nt, Human
cagagucucacug

SEQ ID NO: 3083938 - RNA, 21 nt, Human
cagagucucacuguugcccag

SEQ ID NO: 3083939 - RNA, 20 nt, Human
cagagucucacuguugccca

SEQ ID NO: 3083940 - RNA, 19 nt, Human
cagagucucacuguugccc

SEQ ID NO: 3083941 - RNA, 17 nt, Human
cagagucucacuguugc

SEQ ID NO: 3083942 - RNA, 23 nt, Human
cagagggagugacagaggcagcc

SEQ ID NO: 3083943 - RNA, 22 nt, Human
cagagggagugacagaggcagc

SEQ ID NO: 3083944 - RNA, 21 nt, Human
cagagggagugacagaggcag

SEQ ID NO: 3083945 - RNA, 20 nt, Human
cagagggagugacagaggca

SEQ ID NO: 3083946 - RNA, 15 nt, Human
cagagggccugcaag

SEQ ID NO: 3083947 - RNA, 19 nt, Human
cagagggccugcaagggag

SEQ ID NO: 3083948 - RNA, 18 nt, Human
cagagugagacucugucu

SEQ ID NO: 3083949 - RNA, 17 nt, Human
cagagugagacucuguc

SEQ ID NO: 3083950 - RNA, 16 nt, Human
cagagugagacucugu

SEQ ID NO: 3083951 - RNA, 23 nt, Human
cagagucucacuguugcccaggc

SEQ ID NO: 3083952 - RNA, 22 nt, Human
cagagucucacuguugcccagg

SEQ ID NO: 3083953 - RNA, 20 nt, Human
cagagugagacucugucuca

SEQ ID NO: 3083954 - RNA, 19 nt, Human
cagagugagacucugucuc

SEQ ID NO: 3083955 - RNA, 19 nt, Human
cagaagcaacccaaauguu

SEQ ID NO: 3083956 - RNA, 20 nt, Human
cagaagcaacccaaauguuc

SEQ ID NO: 3083957 - RNA, 13 nt, Human
cagaagcagcucu

SEQ ID NO: 3083958 - RNA, 14 nt, Human
cagaagcagcucuu

SEQ ID NO: 3083959 - RNA, 21 nt, Human
cagaagacacugaugggcaac

SEQ ID NO: 3083960 - RNA, 17 nt, Human
cagaaggaucuucaucu

SEQ ID NO: 3083961 - RNA, 19 nt, Human
cagaaggaagacuucaucc

SEQ ID NO: 3083962 - RNA, 16 nt, Human
cagaaggaagacuuca

SEQ ID NO: 3083963 - RNA, 17 nt, Human
cagaaggaagacuucau

SEQ ID NO: 3083964 - RNA, 18 nt, Human
cagaaggaagacuucauc

SEQ ID NO: 3083965 - RNA, 18 nt, Human
cagaaucucaaauaacua

SEQ ID NO: 3083966 - RNA, 17 nt, Human
cagaaucucaaauaacu

SEQ ID NO: 3083967 - RNA, 21 nt, Human
cagaaucgcuccaccuugcag

SEQ ID NO: 3083968 - RNA, 23 nt, Human
cagaaucgcuccaccuugcagcu

SEQ ID NO: 3083969 - RNA, 12 nt, Human
cacuuugcauaa

SEQ ID NO: 3083970 - RNA, 13 nt, Human
cacuuuggcccag

SEQ ID NO: 3083971 - RNA, 16 nt, Human
cacuuuggcccagggu

SEQ ID NO: 3083972 - RNA, 22 nt, Human
cacuuucuagccagaggagaga

SEQ ID NO: 3083973 - RNA, 13 nt, Human
cacuuuguucugg

SEQ ID NO: 3083974 - RNA, 14 nt, Human
cacuuuguucuggc

SEQ ID NO: 3083975 - RNA, 16 nt, Human
cacuuuguucuggcuc

SEQ ID NO: 3083976 - RNA, 23 nt, Human
cacuuuguucuggcucuuccagg

SEQ ID NO: 3083977 - RNA, 12 nt, Human
cacuuugggagg

SEQ ID NO: 3083978 - RNA, 13 nt, Human
cacuuugggaggc

SEQ ID NO: 3083979 - RNA, 16 nt, Human
cacuuugggaggccaa

SEQ ID NO: 3083980 - RNA, 14 nt, Human
cacuuuuguucuug

SEQ ID NO: 3083981 - RNA, 22 nt, Human
cacuuuuguucuugguuuguaa

SEQ ID NO: 3083982 - RNA, 19 nt, Human
cagaaaauauuauguguuu

SEQ ID NO: 3083983 - RNA, 23 nt, Human
cagaaaauggaagacagcucuua

SEQ ID NO: 3083984 - RNA, 16 nt, Human
cagaaaauggaagaca

SEQ ID NO: 3083985 - RNA, 20 nt, Human
cagaaaauggaagacagcuc

SEQ ID NO: 3083986 - RNA, 21 nt, Human
cagaaaauggaagacagcucu

SEQ ID NO: 3083987 - RNA, 22 nt, Human
cagaaaauggaagacagcucuu

SEQ ID NO: 3083988 - RNA, 17 nt, Human
cagaaaaguugaauuuu

SEQ ID NO: 3083989 - RNA, 20 nt, Human
cagaaaaguugaauuuuaca

SEQ ID NO: 3083990 - RNA, 22 nt, Human
cagaaaaguugaauuuuacaug

SEQ ID NO: 3083991 - RNA, 18 nt, Human
cagaaagcagaacaguga

SEQ ID NO: 3083992 - RNA, 19 nt, Human
cagaaagcagaacagugau

SEQ ID NO: 3083993 - RNA, 18 nt, Human
cagaacagugauuaccag

SEQ ID NO: 3083994 - RNA, 23 nt, Human
cagaacagugauuaccagggacu

SEQ ID NO: 3083995 - RNA, 14 nt, Human
cagaauuucccaaa

SEQ ID NO: 3083996 - RNA, 18 nt, Human
cagaauucucuaguuuga

SEQ ID NO: 3083997 - RNA, 15 nt, Human
cagaauucucuaguu

SEQ ID NO: 3083998 - RNA, 11 nt, Human
cagaauucuca

SEQ ID NO: 3083999 - RNA, 17 nt, Human
cagaauuucccaaagca

SEQ ID NO: 3084000 - RNA, 18 nt, Human
cagaauuucccaaagcag

SEQ ID NO: 3084001 - RNA, 19 nt, Human
cagaauuucccaaagcagu

SEQ ID NO: 3084002 - RNA, 20 nt, Human
cagaauuucccaaagcagug

SEQ ID NO: 3084003 - RNA, 24 nt, Human
cagaauuucccaaagcagugcaug

SEQ ID NO: 3084004 - RNA, 12 nt, Human
cagacaaagcgu

SEQ ID NO: 3084005 - RNA, 20 nt, Human
cagacaacaaaccuguuucu

SEQ ID NO: 3084006 - RNA, 22 nt, Human
cagacaaagcgugguggacaug

SEQ ID NO: 3084007 - RNA, 14 nt, Human
cagacacaugucca

SEQ ID NO: 3084008 - RNA, 17 nt, Human
cagacacauguccaaga

SEQ ID NO: 3084009 - RNA, 21 nt, Human
cagacacauguccaagaagcc

SEQ ID NO: 3084010 - RNA, 22 nt, Human
cagacacauguccaagaagccc

SEQ ID NO: 3084011 - RNA, 23 nt, Human
cagacacauguccaagaagccca

SEQ ID NO: 3084012 - RNA, 23 nt, Human
cagacacaggcccggcuccaggc

SEQ ID NO: 3084013 - RNA, 22 nt, Human
cagacacaggcccggcuccagg

SEQ ID NO: 3084014 - RNA, 21 nt, Human
cagacacaggcccggcuccag

SEQ ID NO: 3084015 - RNA, 18 nt, Human
cagacacaggcccggcuc

SEQ ID NO: 3084016 - RNA, 17 nt, Human
cagacacaggcccggcu

SEQ ID NO: 3084017 - RNA, 15 nt, Human
cagacacaggcccgg

SEQ ID NO: 3084018 - RNA, 14 nt, Human
cagacacaggcccg

SEQ ID NO: 3084019 - RNA, 13 nt, Human
cagacacaggccc

SEQ ID NO: 3084020 - RNA, 19 nt, Human
cagacauacuaaccagcag

SEQ ID NO: 3084021 - RNA, 17 nt, Human
cagacauagaauuaaca

SEQ ID NO: 3084022 - RNA, 19 nt, Human
cagacauagaauuaacaca

SEQ ID NO: 3084023 - RNA, 22 nt, Human
cagacaccuugacagggcacac

SEQ ID NO: 3084024 - RNA, 20 nt, Human
cagacaccuugacagggcac

SEQ ID NO: 3084025 - RNA, 19 nt, Human
cagacaccuugacagggca

SEQ ID NO: 3084026 - RNA, 20 nt, Human
cagacaguuaagagaaauga

SEQ ID NO: 3084027 - RNA, 22 nt, Human
cagaccauuggggcucccagcc

SEQ ID NO: 3084028 - RNA, 23 nt, Human
cagaccauuggggcucccagcca

SEQ ID NO: 3084029 - RNA, 20 nt, Human
cagaccauuggggcucccag

SEQ ID NO: 3084030 - RNA, 21 nt, Human
cagaccauuggggcucccagc

SEQ ID NO: 3084031 - RNA, 19 nt, Human
cagaccauuggggcuccca

SEQ ID NO: 3084032 - RNA, 14 nt, Human
cagaccacaaaacu

SEQ ID NO: 3084033 - RNA, 20 nt, Human
cagaccacaaaacuuuucua

SEQ ID NO: 3084034 - RNA, 22 nt, Human
cagacccugcccugugggcccc

SEQ ID NO: 3084035 - RNA, 15 nt, Human
cagacccugcccugu

SEQ ID NO: 3084036 - RNA, 16 nt, Human
cagacccugcccugug

SEQ ID NO: 3084037 - RNA, 17 nt, Human
cagacccugcccugugg

SEQ ID NO: 3084038 - RNA, 21 nt, Human
cagacccugcccugugggccc

SEQ ID NO: 3084039 - RNA, 14 nt, Human
cagacccggcugcg

SEQ ID NO: 3084040 - RNA, 12 nt, Human
cagacccggcug

SEQ ID NO: 3084041 - RNA, 13 nt, Human
cagacccugcccu

SEQ ID NO: 3084042 - RNA, 14 nt, Human
cagacccugcccug

SEQ ID NO: 3084043 - RNA, 12 nt, Human
cagacccugccc

SEQ ID NO: 3084044 - RNA, 16 nt, Human
cagacccggcugcgug

SEQ ID NO: 3084045 - RNA, 23 nt, Human
cagagaaaguacuucuccacccu

SEQ ID NO: 3084046 - RNA, 19 nt, Human
cagagaaaguacuucucca

SEQ ID NO: 3084047 - RNA, 16 nt, Human
cagacaacaaaccugu

SEQ ID NO: 3084048 - RNA, 18 nt, Human
caccgccuugcccagccu

SEQ ID NO: 3084049 - RNA, 23 nt, Human
caccgccuugcccagccuggaug

SEQ ID NO: 3084050 - RNA, 15 nt, Human
caccgccuugcccag

SEQ ID NO: 3084051 - RNA, 17 nt, Human
caccgccuugcccagcc

SEQ ID NO: 3084052 - RNA, 21 nt, Human
caccgcagacaggaccaggga

SEQ ID NO: 3084053 - RNA, 15 nt, Human
caccggcuggccugg

SEQ ID NO: 3084054 - RNA, 16 nt, Human
caccggcuggccuggc

SEQ ID NO: 3084055 - RNA, 14 nt, Human
caccggcuggccug

SEQ ID NO: 3084056 - RNA, 17 nt, Human
caccggcuggccuggcc

SEQ ID NO: 3084057 - RNA, 18 nt, Human
caccggcuggccuggccc

SEQ ID NO: 3084058 - RNA, 20 nt, Human
caccggcuggccuggccccu

SEQ ID NO: 3084059 - RNA, 14 nt, Human
caccgggcacucag

SEQ ID NO: 3084060 - RNA, 18 nt, Human
caccgggccacagagaaa

SEQ ID NO: 3084061 - RNA, 15 nt, Human
caccgggccacagag

SEQ ID NO: 3084062 - RNA, 22 nt, Human
caccgggcacucagaagacacu

SEQ ID NO: 3084063 - RNA, 15 nt, Human
caccgggcacucaga

SEQ ID NO: 3084064 - RNA, 11 nt, Human
caccucaugga

SEQ ID NO: 3084065 - RNA, 12 nt, Human
caccucauggaa

SEQ ID NO: 3084066 - RNA, 14 nt, Human
caccucauggaauu

SEQ ID NO: 3084067 - RNA, 11 nt, Human
caccuccugcc

SEQ ID NO: 3084068 - RNA, 13 nt, Human
caccuccugccuc

SEQ ID NO: 3084069 - RNA, 14 nt, Human
caccuccugccucg

SEQ ID NO: 3084070 - RNA, 13 nt, Human
caccucucccuug

SEQ ID NO: 3084071 - RNA, 14 nt, Human
caccucucccuugg

SEQ ID NO: 3084072 - RNA, 17 nt, Human
caccucucccuuggauu

SEQ ID NO: 3084073 - RNA, 22 nt, Human
caccucuaucccggcuuuggug

SEQ ID NO: 3084074 - RNA, 12 nt, Human
caccuggccucu

SEQ ID NO: 3084075 - RNA, 13 nt, Human
caccuggccucug

SEQ ID NO: 3084076 - RNA, 14 nt, Human
caccuggccucugc

SEQ ID NO: 3084077 - RNA, 15 nt, Human
caccuggccucugca

SEQ ID NO: 3084078 - RNA, 17 nt, Human
caccuggccucugcacu

SEQ ID NO: 3084079 - RNA, 18 nt, Human
caccuggccucugcacuc

SEQ ID NO: 3084080 - RNA, 19 nt, Human
caccuggccucugcacucc

SEQ ID NO: 3084081 - RNA, 20 nt, Human
caccuggccucugcacuccc

SEQ ID NO: 3084082 - RNA, 23 nt, Human
caccuggccucugcacuccccug

SEQ ID NO: 3084083 - RNA, 12 nt, Human
caccuggcucug

SEQ ID NO: 3084084 - RNA, 13 nt, Human
caccuggcucugu

SEQ ID NO: 3084085 - RNA, 14 nt, Human
caccuggcucugug

SEQ ID NO: 3084086 - RNA, 15 nt, Human
caccuggcucugugg

SEQ ID NO: 3084087 - RNA, 23 nt, Human
caccuggcucuguggcgagccau

SEQ ID NO: 3084088 - RNA, 23 nt, Human
caccugaagacucauucuucugu

SEQ ID NO: 3084089 - RNA, 15 nt, Human
caccugaagacucau

SEQ ID NO: 3084090 - RNA, 14 nt, Human
caccugaagacuca

SEQ ID NO: 3084091 - RNA, 15 nt, Human
caccucucucacucc

SEQ ID NO: 3084092 - RNA, 17 nt, Human
caccucucucacuccuu

SEQ ID NO: 3084093 - RNA, 18 nt, Human
caccucucucacuccuug

SEQ ID NO: 3084094 - RNA, 19 nt, Human
caccucucucacuccuuga

SEQ ID NO: 3084095 - RNA, 18 nt, Human
caccucugcacaagcugc

SEQ ID NO: 3084096 - RNA, 19 nt, Human
caccucugcacaagcugca

SEQ ID NO: 3084097 - RNA, 20 nt, Human
caccuggaauauauaaccag

SEQ ID NO: 3084098 - RNA, 23 nt, Human
caccugcggugcuaucuccccca

SEQ ID NO: 3084099 - RNA, 20 nt, Human
caccugcggugcuaucuccc

SEQ ID NO: 3084100 - RNA, 11 nt, Human
cacccugugau

SEQ ID NO: 3084101 - RNA, 12 nt, Human
cacccugugaug

SEQ ID NO: 3084102 - RNA, 15 nt, Human
cacccugugaugggg

SEQ ID NO: 3084103 - RNA, 18 nt, Human
cacccugugauggggccc

SEQ ID NO: 3084104 - RNA, 20 nt, Human
cacccugugauggggcccug

SEQ ID NO: 3084105 - RNA, 21 nt, Human
cacccugugauggggcccugc

SEQ ID NO: 3084106 - RNA, 22 nt, Human
cacccugugauggggcccugcc

SEQ ID NO: 3084107 - RNA, 23 nt, Human
cacccugugauggggcccugccu

SEQ ID NO: 3084108 - RNA, 15 nt, Human
caccgaaaacguggc

SEQ ID NO: 3084109 - RNA, 18 nt, Human
caccgaaaacguggcugc

SEQ ID NO: 3084110 - RNA, 19 nt, Human
caccgaaaacguggcugcu

SEQ ID NO: 3084111 - RNA, 21 nt, Human
caccgaaaacguggcugcuuc

SEQ ID NO: 3084112 - RNA, 22 nt, Human
caccgaaaacguggcugcuuca

SEQ ID NO: 3084113 - RNA, 14 nt, Human
caccgcagacagga

SEQ ID NO: 3084114 - RNA, 15 nt, Human
caccgcagacaggac

SEQ ID NO: 3084115 - RNA, 17 nt, Human
caccgcagacaggacca

SEQ ID NO: 3084116 - RNA, 18 nt, Human
caccgcagacaggaccag

SEQ ID NO: 3084117 - RNA, 12 nt, Human
caccgcagacag

SEQ ID NO: 3084118 - RNA, 13 nt, Human
caccgcagacagg

SEQ ID NO: 3084119 - RNA, 20 nt, Human
caccccucaacaccucugca

SEQ ID NO: 3084120 - RNA, 13 nt, Human
cacauauugauuu

SEQ ID NO: 3084121 - RNA, 21 nt, Human
cacccggccccugcugguuca

SEQ ID NO: 3084122 - RNA, 18 nt, Human
cacccggccccugcuggu

SEQ ID NO: 3084123 - RNA, 17 nt, Human
cacccggccccugcugg

SEQ ID NO: 3084124 - RNA, 16 nt, Human
cacccggccccugcug

SEQ ID NO: 3084125 - RNA, 14 nt, Human
cacccggccccugc

SEQ ID NO: 3084126 - RNA, 13 nt, Human
cacccggccccug

SEQ ID NO: 3084127 - RNA, 19 nt, Human
cacccgcuaagagggaggg

SEQ ID NO: 3084128 - RNA, 12 nt, Human
cacccggccccu

SEQ ID NO: 3084129 - RNA, 20 nt, Human
cacccucagaugcacaugag

SEQ ID NO: 3084130 - RNA, 16 nt, Human
cacgccagauucuuuc

SEQ ID NO: 3084131 - RNA, 24 nt, Human
cacugaugggcaacccccagccug

SEQ ID NO: 3084132 - RNA, 18 nt, Human
cacugaugggcaaccccc

SEQ ID NO: 3084133 - RNA, 14 nt, Human
cacugaugggcaac

SEQ ID NO: 3084134 - RNA, 23 nt, Human
cacugagacagcccgggcucugc

SEQ ID NO: 3084135 - RNA, 13 nt, Human
cacugcaaccucc

SEQ ID NO: 3084136 - RNA, 23 nt, Human
cacugcaaccuccgccucuuggg

SEQ ID NO: 3084137 - RNA, 16 nt, Human
cacugcaaccuccgcc

SEQ ID NO: 3084138 - RNA, 14 nt, Human
cacugcaaccuccg

SEQ ID NO: 3084139 - RNA, 13 nt, Human
cacugacagauuu

SEQ ID NO: 3084140 - RNA, 17 nt, Human
cacugacagauuuccau

SEQ ID NO: 3084141 - RNA, 22 nt, Human
cacugacagauuuccauccuag

SEQ ID NO: 3084142 - RNA, 23 nt, Human
cacugacauuguuggccaaagcc

SEQ ID NO: 3084143 - RNA, 19 nt, Human
cacucugucgcccagucug

SEQ ID NO: 3084144 - RNA, 16 nt, Human
cacucugucgcccagu

SEQ ID NO: 3084145 - RNA, 15 nt, Human
cacucugucgcccag

SEQ ID NO: 3084146 - RNA, 15 nt, Human
cacucuggcagcuca

SEQ ID NO: 3084147 - RNA, 16 nt, Human
cacucuggcagcucag

SEQ ID NO: 3084148 - RNA, 17 nt, Human
cacucuggcagcucaga

SEQ ID NO: 3084149 - RNA, 19 nt, Human
cacucuggcagcucagaga

SEQ ID NO: 3084150 - RNA, 20 nt, Human
cacucuggcagcucagagag

SEQ ID NO: 3084151 - RNA, 21 nt, Human
cacucuggcagcucagagagg

SEQ ID NO: 3084152 - RNA, 23 nt, Human
cacucuggcagcucagagagggu

SEQ ID NO: 3084153 - RNA, 14 nt, Human
cacugagacagccc

SEQ ID NO: 3084154 - RNA, 17 nt, Human
cacugagacagcccggg

SEQ ID NO: 3084155 - RNA, 19 nt, Human
cacugagacagcccgggcu

SEQ ID NO: 3084156 - RNA, 22 nt, Human
cacugagacagcccgggcucug

SEQ ID NO: 3084157 - RNA, 12 nt, Human
cacugagacagc

SEQ ID NO: 3084158 - RNA, 13 nt, Human
cacugagacagcc

SEQ ID NO: 3084159 - RNA, 21 nt, Human
cacugacuucuaaguaaaacc

SEQ ID NO: 3084160 - RNA, 20 nt, Human
cacugacuucuaaguaaaac

SEQ ID NO: 3084161 - RNA, 16 nt, Human
cacugacuucuaagua

SEQ ID NO: 3084162 - RNA, 15 nt, Human
cacugacuucuaagu

SEQ ID NO: 3084163 - RNA, 14 nt, Human
cacugacuucuaag

SEQ ID NO: 3084164 - RNA, 20 nt, Human
cacugccuucucaacuccaa

SEQ ID NO: 3084165 - RNA, 12 nt, Human
cacugcucuggu

SEQ ID NO: 3084166 - RNA, 18 nt, Human
cacugcacuauagccuag

SEQ ID NO: 3084167 - RNA, 19 nt, Human
cacugcaccgggccacaga

SEQ ID NO: 3084168 - RNA, 18 nt, Human
cacugcaccgggccacag

SEQ ID NO: 3084169 - RNA, 16 nt, Human
cacugcaccgggccac

SEQ ID NO: 3084170 - RNA, 15 nt, Human
cacugcaccgggcca

SEQ ID NO: 3084171 - RNA, 14 nt, Human
cacugcaccgggcc

SEQ ID NO: 3084172 - RNA, 18 nt, Human
cacugcuuccagugaggc

SEQ ID NO: 3084173 - RNA, 19 nt, Human
cacugcuuccagugaggcu

SEQ ID NO: 3084174 - RNA, 20 nt, Human
cacugcuuccagugaggcuc

SEQ ID NO: 3084175 - RNA, 21 nt, Human
cacugcuuccagugaggcucu

SEQ ID NO: 3084176 - RNA, 22 nt, Human
cacugcuuccagugaggcucug

SEQ ID NO: 3084177 - RNA, 20 nt, Human
cacugcuuuuggucugugug

SEQ ID NO: 3084178 - RNA, 13 nt, Human
cacugcuuaacuu

SEQ ID NO: 3084179 - RNA, 14 nt, Human
cacugcuuccagug

SEQ ID NO: 3084180 - RNA, 15 nt, Human
cacugcuuccaguga

SEQ ID NO: 3084181 - RNA, 16 nt, Human
cacugcuuccagugag

SEQ ID NO: 3084182 - RNA, 17 nt, Human
cacuggaacacuaauga

SEQ ID NO: 3084183 - RNA, 21 nt, Human
cacugcuuuuggucuguguga

SEQ ID NO: 3084184 - RNA, 22 nt, Human
cacuggcaaacagggccucugc

SEQ ID NO: 3084185 - RNA, 20 nt, Human
cacuggcaaacagggccucu

SEQ ID NO: 3084186 - RNA, 21 nt, Human
cacuggcaaacagggccucug

SEQ ID NO: 3084187 - RNA, 17 nt, Human
cacuggcaaacagggcc

SEQ ID NO: 3084188 - RNA, 18 nt, Human
cacuggcaaacagggccu

SEQ ID NO: 3084189 - RNA, 19 nt, Human
cacuggcaaacagggccuc

SEQ ID NO: 3084190 - RNA, 18 nt, Human
cacuguacuugcucuuga

SEQ ID NO: 3084191 - RNA, 15 nt, Human
cacuguacuugcucu

SEQ ID NO: 3084192 - RNA, 19 nt, Human
cacuguacuugcucuugau

SEQ ID NO: 3084193 - RNA, 13 nt, Human
cacuggcucaccc

SEQ ID NO: 3084194 - RNA, 14 nt, Human
cacuggcucaccca

SEQ ID NO: 3084195 - RNA, 15 nt, Human
cacuggcucacccag

SEQ ID NO: 3084196 - RNA, 17 nt, Human
cacuggcucacccaguc

SEQ ID NO: 3084197 - RNA, 18 nt, Human
cacuggcucacccagucc

SEQ ID NO: 3084198 - RNA, 14 nt, Human
cacugugccaugug

SEQ ID NO: 3084199 - RNA, 13 nt, Human
cacugugaagaga

SEQ ID NO: 3084200 - RNA, 14 nt, Human
cacugucaagauga

SEQ ID NO: 3084201 - RNA, 17 nt, Human
cacugugcugagucuga

SEQ ID NO: 3084202 - RNA, 20 nt, Human
cacugugcugagucugaagg

SEQ ID NO: 3084203 - RNA, 21 nt, Human
cacugugcugagucugaaggc

SEQ ID NO: 3084204 - RNA, 22 nt, Human
cacugugcugagucugaaggcu

SEQ ID NO: 3084205 - RNA, 19 nt, Human
cacuguggguagacacaca

SEQ ID NO: 3084206 - RNA, 16 nt, Human
cacugugccaugugcc

SEQ ID NO: 3084207 - RNA, 15 nt, Human
cacugugccaugugc

SEQ ID NO: 3084208 - RNA, 18 nt, Human
cacugugccaugugccag

SEQ ID NO: 3084209 - RNA, 13 nt, Human
cacugugcugagu

SEQ ID NO: 3084210 - RNA, 15 nt, Human
cacugugcugagucu

SEQ ID NO: 3084211 - RNA, 13 nt, Human
cacuguucucugc

SEQ ID NO: 3084212 - RNA, 14 nt, Human
cacuguucucugcc

SEQ ID NO: 3084213 - RNA, 15 nt, Human
cacuguucucugccc

SEQ ID NO: 3084214 - RNA, 16 nt, Human
cacuguucucugcccu

SEQ ID NO: 3084215 - RNA, 17 nt, Human
cacuguucucugcccuc

SEQ ID NO: 3084216 - RNA, 19 nt, Human
cacuguucucugcccucca

SEQ ID NO: 3084217 - RNA, 21 nt, Human
cacuguucucugcccuccaag

SEQ ID NO: 3084218 - RNA, 22 nt, Human
cacuguucucugcccuccaaga

SEQ ID NO: 3084219 - RNA, 22 nt, Human
cacuguggguagacacacauga

SEQ ID NO: 3084220 - RNA, 24 nt, Human
cacuguggguagacacacaugaag

SEQ ID NO: 3084221 - RNA, 24 nt, Human
cacuugcagacucuacagaggcca

SEQ ID NO: 3084222 - RNA, 22 nt, Human
cacuugcagacucuacagaggc

SEQ ID NO: 3084223 - RNA, 19 nt, Human
cacuugcagacucuacaga

SEQ ID NO: 3084224 - RNA, 18 nt, Human
cacuugcagacucuacag

SEQ ID NO: 3084225 - RNA, 14 nt, Human
cacuugcagacucu

SEQ ID NO: 3084226 - RNA, 19 nt, Human
cacuuucuagccagaggag

SEQ ID NO: 3084227 - RNA, 20 nt, Human
cacuuucuagccagaggaga

SEQ ID NO: 3084228 - RNA, 18 nt, Human
cacuuucuagccagagga

SEQ ID NO: 3084229 - RNA, 15 nt, Human
cacuuggucugugag

SEQ ID NO: 3084230 - RNA, 16 nt, Human
cacuugacaucaacug

SEQ ID NO: 3084231 - RNA, 23 nt, Human
cacuugaacccgggaggcagagg

SEQ ID NO: 3084232 - RNA, 20 nt, Human
cacuugaacccgggaggcag

SEQ ID NO: 3084233 - RNA, 21 nt, Human
cacuugaacccgggaggcaga

SEQ ID NO: 3084234 - RNA, 13 nt, Human
cacuugcagacuc

SEQ ID NO: 3084235 - RNA, 13 nt, Human
cacuugaguccag

SEQ ID NO: 3084236 - RNA, 17 nt, Human
cacuugagaauuacccu

SEQ ID NO: 3084237 - RNA, 19 nt, Human
cacuugacaucaacugcau

SEQ ID NO: 3084238 - RNA, 20 nt, Human
cacuugagaauuacccuuuu

SEQ ID NO: 3084239 - RNA, 22 nt, Human
cacuucugccauauucuguugg

SEQ ID NO: 3084240 - RNA, 21 nt, Human
cacuucgggaggucgaggcag

SEQ ID NO: 3084241 - RNA, 23 nt, Human
cacuucgggaggucgaggcagga

SEQ ID NO: 3084242 - RNA, 16 nt, Human
cacuucccuacaugga

SEQ ID NO: 3084243 - RNA, 12 nt, Human
cacuucagcuga

SEQ ID NO: 3084244 - RNA, 21 nt, Human
cacuucagcugacuuuucugu

SEQ ID NO: 3084245 - RNA, 13 nt, Human
cacuaaacaaaga

SEQ ID NO: 3084246 - RNA, 14 nt, Human
cacguuucuaaagg

SEQ ID NO: 3084247 - RNA, 12 nt, Human
cacguuucuaaa

SEQ ID NO: 3084248 - RNA, 23 nt, Human
cacguuucuaaaggcuaccuuug

SEQ ID NO: 3084249 - RNA, 16 nt, Human
cacgugguccuaaucu

SEQ ID NO: 3084250 - RNA, 19 nt, Human
cacgugguccuaaucuucu

SEQ ID NO: 3084251 - RNA, 22 nt, Human
cacguucuuacuaguuucccuu

SEQ ID NO: 3084252 - RNA, 14 nt, Human
cacguacacacaca

SEQ ID NO: 3084253 - RNA, 19 nt, Human
cacguacacacacauacac

SEQ ID NO: 3084254 - RNA, 18 nt, Human
cacguacacacacauaca

SEQ ID NO: 3084255 - RNA, 20 nt, Human
cacggcucacugcagccuca

SEQ ID NO: 3084256 - RNA, 19 nt, Human
cacggcucacugcagccuc

SEQ ID NO: 3084257 - RNA, 17 nt, Human
cacggcucacugcagcc

SEQ ID NO: 3084258 - RNA, 16 nt, Human
cacggcucacugcagc

SEQ ID NO: 3084259 - RNA, 17 nt, Human
cacgcuggaccuugaac

SEQ ID NO: 3084260 - RNA, 20 nt, Human
cacgcuggaccuugaacugg

SEQ ID NO: 3084261 - RNA, 15 nt, Human
cacggcucacugcag

SEQ ID NO: 3084262 - RNA, 23 nt, Human
cacgcgugcacacaccagagccc

SEQ ID NO: 3084263 - RNA, 21 nt, Human
cacgcgugcacacaccagagc

SEQ ID NO: 3084264 - RNA, 16 nt, Human
cacgcgugcacacacc

SEQ ID NO: 3084265 - RNA, 15 nt, Human
cacgcgugcacacac

SEQ ID NO: 3084266 - RNA, 19 nt, Human
cacgccuguaauccuagca

SEQ ID NO: 3084267 - RNA, 20 nt, Human
cacgccuguaauccuagcac

SEQ ID NO: 3084268 - RNA, 14 nt, Human
caccuuagacaguc

SEQ ID NO: 3084269 - RNA, 16 nt, Human
caccuuagacaguccc

SEQ ID NO: 3084270 - RNA, 18 nt, Human
caccuuagacagucccug

SEQ ID NO: 3084271 - RNA, 19 nt, Human
caccuuagacagucccugc

SEQ ID NO: 3084272 - RNA, 21 nt, Human
caccuuagacagucccugcca

SEQ ID NO: 3084273 - RNA, 23 nt, Human
caccuuagacagucccugccaau

SEQ ID NO: 3084274 - RNA, 16 nt, Human
cacgaauauugcugau

SEQ ID NO: 3084275 - RNA, 19 nt, Human
cacgaauauugcugauggu

SEQ ID NO: 3084276 - RNA, 22 nt, Human
cacgaauauugcugauggugca

SEQ ID NO: 3084277 - RNA, 16 nt, Human
cacgacugcccggcag

SEQ ID NO: 3084278 - RNA, 17 nt, Human
cacgacugcccggcagg

SEQ ID NO: 3084279 - RNA, 13 nt, Human
caccuugacaggg

SEQ ID NO: 3084280 - RNA, 16 nt, Human
caccuugacagggcac

SEQ ID NO: 3084281 - RNA, 15 nt, Human
caccuugacagggca

SEQ ID NO: 3084282 - RNA, 20 nt, Human
cacgccagauucuuuccuga

SEQ ID NO: 3084283 - RNA, 22 nt, Human
cacgccagauucuuuccugagg

SEQ ID NO: 3084284 - RNA, 19 nt, Human
cacgccagauucuuuccug

SEQ ID NO: 3084285 - RNA, 15 nt, Human
cacgccacugcacua

SEQ ID NO: 3084286 - RNA, 13 nt, Human
cacgccacugcac

SEQ ID NO: 3084287 - RNA, 13 nt, Human
cacgcccccacug

SEQ ID NO: 3084288 - RNA, 15 nt, Human
cacgcccccacuggu

SEQ ID NO: 3084289 - RNA, 23 nt, Human
cacgccagauucuuuccugaggc

SEQ ID NO: 3084290 - RNA, 17 nt, Human
cacgcccccacugguga

SEQ ID NO: 3084291 - RNA, 18 nt, Human
cacgcccccacuggugac

SEQ ID NO: 3084292 - RNA, 14 nt, Human
cacgauuucuguuu

SEQ ID NO: 3084293 - RNA, 12 nt, Human
cacgauuucugu

SEQ ID NO: 3084294 - RNA, 16 nt, Human
cacgauuucuguuuag

SEQ ID NO: 3084295 - RNA, 17 nt, Human
cacgcacuucgggaggu

SEQ ID NO: 3084296 - RNA, 15 nt, Human
cacgcacacugucug

SEQ ID NO: 3084297 - RNA, 22 nt, Human
cacgagcaggcuacugucagcu

SEQ ID NO: 3084298 - RNA, 17 nt, Human
cacgagcaggcuacugu

SEQ ID NO: 3084299 - RNA, 20 nt, Human
cacgagcaggcuacugucag

SEQ ID NO: 3084300 - RNA, 19 nt, Human
cacgagcaggcuacuguca

SEQ ID NO: 3084301 - RNA, 16 nt, Human
cacuaacaugauuugg

SEQ ID NO: 3084302 - RNA, 21 nt, Human
cacuaaauugacacuuaaaaa

SEQ ID NO: 3084303 - RNA, 16 nt, Human
cacuaaccacgcugga

SEQ ID NO: 3084304 - RNA, 15 nt, Human
cacuaaccacgcugg

SEQ ID NO: 3084305 - RNA, 14 nt, Human
cacuaaccacgcug

SEQ ID NO: 3084306 - RNA, 18 nt, Human
cacuaaccacgcuggacc

SEQ ID NO: 3084307 - RNA, 17 nt, Human
cacuaagagagaaugag

SEQ ID NO: 3084308 - RNA, 18 nt, Human
cacuaaggugugcucuga

SEQ ID NO: 3084309 - RNA, 17 nt, Human
cacuaaggugugcucug

SEQ ID NO: 3084310 - RNA, 14 nt, Human
cacuauaauguaag

SEQ ID NO: 3084311 - RNA, 14 nt, Human
cacuaguauuucua

SEQ ID NO: 3084312 - RNA, 19 nt, Human
cacuaguauuucuaugaaa

SEQ ID NO: 3084313 - RNA, 21 nt, Human
cacuauagccuaggugacaga

SEQ ID NO: 3084314 - RNA, 18 nt, Human
cacuauaauguaagcucu

SEQ ID NO: 3084315 - RNA, 14 nt, Human
cacuauagccuagg

SEQ ID NO: 3084316 - RNA, 19 nt, Human
cacuauguugcccaggcag

SEQ ID NO: 3084317 - RNA, 18 nt, Human
cacuauguugcccaggca

SEQ ID NO: 3084318 - RNA, 17 nt, Human
cacuauguugcccaggc

SEQ ID NO: 3084319 - RNA, 16 nt, Human
cacuauguugcccagg

SEQ ID NO: 3084320 - RNA, 15 nt, Human
cacuauguugcccag

SEQ ID NO: 3084321 - RNA, 20 nt, Human
cacucaaaagcugggcaggu

SEQ ID NO: 3084322 - RNA, 16 nt, Human
cacucaaaucaagaaa

SEQ ID NO: 3084323 - RNA, 15 nt, Human
cacucaaaagcuggg

SEQ ID NO: 3084324 - RNA, 17 nt, Human
cacucaaaagcugggca

SEQ ID NO: 3084325 - RNA, 18 nt, Human
cacucaaaagcugggcag

SEQ ID NO: 3084326 - RNA, 19 nt, Human
cacucaaaagcugggcagg

SEQ ID NO: 3084327 - RNA, 21 nt, Human
cacuauguugcccaggcaggu

SEQ ID NO: 3084328 - RNA, 20 nt, Human
cacuauguugcccaggcagg

SEQ ID NO: 3084329 - RNA, 19 nt, Human
cacucagaagacacugaug

SEQ ID NO: 3084330 - RNA, 18 nt, Human
cacucagaagacacugau

SEQ ID NO: 3084331 - RNA, 22 nt, Human
cacucagaagacacugaugggc

SEQ ID NO: 3084332 - RNA, 20 nt, Human
cacucacauuuauucugcuc

SEQ ID NO: 3084333 - RNA, 19 nt, Human
cacucacauuuauucugcu

SEQ ID NO: 3084334 - RNA, 17 nt, Human
cacucagaagacacuga

SEQ ID NO: 3084335 - RNA, 16 nt, Human
cacucagaagacacug

SEQ ID NO: 3084336 - RNA, 12 nt, Human
cacucagaagac

SEQ ID NO: 3084337 - RNA, 14 nt, Human
cacuccuucacaga

SEQ ID NO: 3084338 - RNA, 21 nt, Human
cacuccuucacagaugggugc

SEQ ID NO: 3084339 - RNA, 17 nt, Human
cacucccugcaaccuga

SEQ ID NO: 3084340 - RNA, 18 nt, Human
cacuccggcccuccagag

SEQ ID NO: 3084341 - RNA, 20 nt, Human
cacuccggcccuccagagcc

SEQ ID NO: 3084342 - RNA, 21 nt, Human
cacuccggcccuccagagccc

SEQ ID NO: 3084343 - RNA, 17 nt, Human
cacuccggcccuccaga

SEQ ID NO: 3084344 - RNA, 15 nt, Human
cacucauugaccuga

SEQ ID NO: 3084345 - RNA, 16 nt, Human
cacucaguccauagca

SEQ ID NO: 3084346 - RNA, 18 nt, Human
cacucauugaccugaggc

SEQ ID NO: 3084347 - RNA, 19 nt, Human
cacucauugaccugaggcc

SEQ ID NO: 3084348 - RNA, 20 nt, Human
cacucauugaccugaggccc

SEQ ID NO: 3084349 - RNA, 22 nt, Human
cacucauugaccugaggcccuu

SEQ ID NO: 3084350 - RNA, 13 nt, Human
cacucccugcaac

SEQ ID NO: 3084351 - RNA, 16 nt, Human
cacucccugcaaccug

SEQ ID NO: 3084352 - RNA, 12 nt, Human
cacucccugcaa

SEQ ID NO: 3084353 - RNA, 15 nt, Human
cacuccccugcuggg

SEQ ID NO: 3084354 - RNA, 12 nt, Human
cacucugagacu

SEQ ID NO: 3084355 - RNA, 23 nt, Human
cacucugagacucgcgacaaugc

SEQ ID NO: 3084356 - RNA, 12 nt, Human
cacucuccuugg

SEQ ID NO: 3084357 - RNA, 12 nt, Human
cacucuggcagc

SEQ ID NO: 3084358 - RNA, 13 nt, Human
cacucuggcagcu

SEQ ID NO: 3084359 - RNA, 14 nt, Human
cacucuggcagcuc

SEQ ID NO: 3084360 - RNA, 23 nt, Human
cugcaccggcuggccuggccccu

SEQ ID NO: 3084361 - RNA, 13 nt, Human
aaucauaaaacuu

SEQ ID NO: 3084362 - RNA, 22 nt, Human
aauaauguaagacaaauauguu

SEQ ID NO: 3084363 - RNA, 18 nt, Human
aacugcucauaugaugua

SEQ ID NO: 3084364 - RNA, 13 nt, Human
ucucaggccaaac

SEQ ID NO: 3084365 - RNA, 15 nt, Human
gucgcagcgcaggac

SEQ ID NO: 3084366 - RNA, 15 nt, Human
uagccaaggccaaag

SEQ ID NO: 3084367 - RNA, 16 nt, Human
auaaggggagaguaac

SEQ ID NO: 3084368 - RNA, 19 nt, Human
aagcuaggccuggccagau

SEQ ID NO: 3084369 - RNA, 17 nt, Human
aagaaggaugauucaac

SEQ ID NO: 3084370 - RNA, 21 nt, Human
agagacagaaagcagaacagu

SEQ ID NO: 3084371 - RNA, 14 nt, Human
cuuggucugugaga

SEQ ID NO: 3084372 - RNA, 14 nt, Human
cucuccucugcugc

SEQ ID NO: 3084373 - RNA, 20 nt, Human
cuacucuagggaaaaaccag

SEQ ID NO: 3084374 - RNA, 15 nt, Human
cuuccuucugugaaa

SEQ ID NO: 3084375 - RNA, 21 nt, Human
ccuccuccagccgccaugcuc

SEQ ID NO: 3084376 - RNA, 17 nt, Human
ccucuuagaaaaaccac

SEQ ID NO: 3084377 - RNA, 17 nt, Human
ccugcacagcaggcugc

SEQ ID NO: 3084378 - RNA, 23 nt, Human
cagccccuucugacccaugcugc

SEQ ID NO: 3084379 - RNA, 11 nt, Human
cccaaaaccaa

SEQ ID NO: 3084380 - RNA, 17 nt, Human
cccccuguggaugcugc

SEQ ID NO: 3084381 - RNA, 15 nt, Human
caacaucaacaucuu

SEQ ID NO: 3084382 - RNA, 19 nt, Human
cacagccucugaaaaccaa

SEQ ID NO: 3084383 - RNA, 22 nt, Human
gcacugacauuguuggccaaag

SEQ ID NO: 3084384 - RNA, 22 nt, Human
ugucuuuaaaaguauccagaga

SEQ ID NO: 3084385 - RNA, 15 nt, Human
gggcagcugcaggac

SEQ ID NO: 3084386 - RNA, 17 nt, Human
uguaauaacugugaagu

SEQ ID NO: 3084387 - RNA, 14 nt, Human
ccucucccugcugc

SEQ ID NO: 3084388 - RNA, 18 nt, Human
ccuucaccuuugucccca

SEQ ID NO: 3084389 - RNA, 16 nt, Human
ccucugcacaagcugc

SEQ ID NO: 3084390 - RNA, 18 nt, Human
ccccacagccccaucugc

SEQ ID NO: 3084391 - RNA, 20 nt, Human
ugaaucgagauguccauagu

SEQ ID NO: 3084392 - RNA, 17 nt, Human
uguguaaaaugugaagu

SEQ ID NO: 3084393 - RNA, 23 nt, Human
gggaccccgagccuggcuccaaa

SEQ ID NO: 3084394 - RNA, 12 nt, Human
guggagcaggcc

SEQ ID NO: 3084395 - RNA, 19 nt, Human
gucuccauguuugauguau

SEQ ID NO: 3084396 - RNA, 18 nt, Human
gaugcucugugcagacac

SEQ ID NO: 3084397 - RNA, 16 nt, Human
uuuggauuggaugaau

SEQ ID NO: 3084398 - RNA, 14 nt, Measles virus
ccacaacccgcgca

SEQ ID NO: 3084399 - RNA, 17 nt, Measles virus
gcccaccugaaauuguc

SEQ ID NO: 3084400 - RNA, 17 nt, Measles virus
ccaucaguuccucaaga

SEQ ID NO: 3084401 - RNA, 17 nt, Measles virus
ucaacccgccagagaga

SEQ ID NO: 3084402 - RNA, 20 nt, Measles virus
uagaccgcagugcccagcaa

SEQ ID NO: 3084403 - RNA, 14 nt, Measles virus
cgaucgagcaucag

SEQ ID NO: 3084404 - RNA, 16 nt, Measles virus
uccuaaaaaagggaaa

SEQ ID NO: 3084405 - RNA, 14 nt, Measles virus
gugaugucauagag

SEQ ID NO: 3084406 - RNA, 15 nt, Measles virus
cggucuccuccucuu

SEQ ID NO: 3084407 - RNA, 18 nt, Measles virus
aaauacgaaguuucuauu

SEQ ID NO: 3084408 - RNA, 19 nt, Measles virus
acccgaaccagcacccaag

SEQ ID NO: 3084409 - RNA, 14 nt, Measles virus
gggaaacugcucag

SEQ ID NO: 3084410 - RNA, 18 nt, Measles virus
uuacauccugauugcagu

SEQ ID NO: 3084411 - RNA, 12 nt, Measles virus
aguuaugacucg

SEQ ID NO: 3084412 - RNA, 19 nt, Measles virus
acaccccacuaacccuccu

SEQ ID NO: 3084413 - RNA, 15 nt, Measles virus
cggcuucccucuggc

SEQ ID NO: 3084414 - RNA, 14 nt, Measles virus
caaugccgcacuga

SEQ ID NO: 3084415 - RNA, 16 nt, Measles virus
gacuccuuagacagau

SEQ ID NO: 3084416 - RNA, 15 nt, Measles virus
uggcugcugaagaac

SEQ ID NO: 3084417 - RNA, 17 nt, Measles virus
aauauauuaaagaaaac

SEQ ID NO: 3084418 - RNA, 23 nt, Measles virus
gucggcaugggacaucaaagggu

SEQ ID NO: 3084419 - RNA, 15 nt, Measles virus
cucaaugaaaaacug

SEQ ID NO: 3084420 - RNA, 18 nt, Measles virus
gacaaaaaacucuggugc

SEQ ID NO: 3084421 - RNA, 23 nt, Measles virus
cugcuggggguuguugaggacag

SEQ ID NO: 3084422 - RNA, 17 nt, Measles virus
ggccaccaccagccauc

SEQ ID NO: 3084423 - RNA, 12 nt, Measles virus
gacuucagagau

SEQ ID NO: 3084424 - RNA, 14 nt, Measles virus
caaggccaccacca

SEQ ID NO: 3084425 - RNA, 17 nt, Measles virus
ucugaaaacagcgaugu

SEQ ID NO: 3084426 - RNA, 23 nt, Measles virus
ccaguccaugcugaacucucaag

SEQ ID NO: 3084427 - RNA, 15 nt, Measles virus
cauuauaaaaaacuu

SEQ ID NO: 3084428 - RNA, 13 nt, Measles virus
ccagguccacaca

SEQ ID NO: 3084429 - RNA, 20 nt, Measles virus
cuccucgugggacccccgag

SEQ ID NO: 3084430 - RNA, 15 nt, Measles virus
cuuucaugccagagg

SEQ ID NO: 3084431 - RNA, 13 nt, Measles virus
cccccucccccaa

SEQ ID NO: 3084432 - RNA, 15 nt, Measles virus
gaaccgggucacgga

SEQ ID NO: 3084433 - RNA, 12 nt, Measles virus
gcuuugucuggu

SEQ ID NO: 3084434 - RNA, 14 nt, Measles virus
uucaagaagaccuu

SEQ ID NO: 3084435 - RNA, 14 nt, Measles virus
cagaacccagaccc

SEQ ID NO: 3084436 - RNA, 11 nt, Measles virus
cccgccagaga

SEQ ID NO: 3084437 - RNA, 13 nt, Measles virus
aggccuaaagccu

SEQ ID NO: 3084438 - RNA, 23 nt, Measles virus
ugcagauguggcugcugaagaac

SEQ ID NO: 3084439 - RNA, 16 nt, Measles virus
gaaaggucaugccaua

SEQ ID NO: 3084440 - RNA, 22 nt, Measles virus
acuuugaaaauacgaaguuucu

SEQ ID NO: 3084441 - RNA, 18 nt, Measles virus
cauaagagccucagcacc

SEQ ID NO: 3084442 - RNA, 22 nt, Measles virus
caggaguccccaaagaucucaa

SEQ ID NO: 3084443 - RNA, 16 nt, Measles virus
cauaugacaaacuauu

SEQ ID NO: 3084444 - RNA, 18 nt, Measles virus
caaccauccacucccacg

SEQ ID NO: 3084445 - RNA, 18 nt, Measles virus
aagcuaggugucuggaaa

SEQ ID NO: 3084446 - RNA, 21 nt, Measles virus
cgcagaauacaggagacuacu

SEQ ID NO: 3084447 - RNA, 18 nt, Measles virus
agaggggagguuaaugac

SEQ ID NO: 3084448 - RNA, 15 nt, Measles virus
cagaaucaagacuca

SEQ ID NO: 3084449 - RNA, 22 nt, Measles virus
aacaaaacuuagggccaaggaa

SEQ ID NO: 3084450 - RNA, 22 nt, Measles virus
ugaaauucaucucugacaaaau

SEQ ID NO: 3084451 - RNA, 23 nt, Measles virus
agaaaucuccaggcaucaagcac

SEQ ID NO: 3084452 - RNA, 23 nt, Measles virus
gcaaaccaugccucucagcaauu

SEQ ID NO: 3084453 - RNA, 22 nt, Measles virus
cccaaaaaaaggcccccagggg

SEQ ID NO: 3084454 - RNA, 21 nt, Measles virus
ugcuccaagaaugccuccggg

SEQ ID NO: 3084455 - RNA, 19 nt, Measles virus
cgagcuccugaaacuccaa

SEQ ID NO: 3084456 - RNA, 13 nt, Measles virus
ccaaccucuucac

SEQ ID NO: 3084457 - RNA, 16 nt, Measles virus
gggaccaaaagaucaa

SEQ ID NO: 3084458 - RNA, 16 nt, Measles virus
cauaaugacagccaga

SEQ ID NO: 3084459 - RNA, 22 nt, Measles virus
gauuaugaucaauacugugcag

SEQ ID NO: 3084460 - RNA, 15 nt, Measles virus
guagggccagcacuu

SEQ ID NO: 3084461 - RNA, 22 nt, Measles virus
aagcgguuaagggaauccaaga

SEQ ID NO: 3084462 - RNA, 17 nt, Measles virus
cgcaagaaccccacaac

SEQ ID NO: 3084463 - RNA, 16 nt, Measles virus
agcaucaggucaagga

SEQ ID NO: 3084464 - RNA, 20 nt, Measles virus
cccaaguauguugcaaccca

SEQ ID NO: 3084465 - RNA, 14 nt, Measles virus
uauuaacagagaac

SEQ ID NO: 3084466 - RNA, 16 nt, Measles virus
cagccggcuagaggag

SEQ ID NO: 3084467 - RNA, 12 nt, Measles virus
gggccagcacuu

SEQ ID NO: 3084468 - RNA, 12 nt, Measles virus
ccgaccagaccc

SEQ ID NO: 3084469 - RNA, 19 nt, Measles virus
caaaccgcaaaagacauca

SEQ ID NO: 3084470 - RNA, 13 nt, Measles virus
cccaguagggcca

SEQ ID NO: 3084471 - RNA, 13 nt, Measles virus
caugucaaaaacg

SEQ ID NO: 3084472 - RNA, 17 nt, Measles virus
ugcucuccaaagggaau

SEQ ID NO: 3084473 - RNA, 20 nt, Measles virus
aaaugauuauaaacaaugug

SEQ ID NO: 3084474 - RNA, 18 nt, Measles virus
auuuaacauagaagacaa

SEQ ID NO: 3084475 - RNA, 23 nt, Measles virus
ggucaugccauauuuuguggaau

SEQ ID NO: 3084476 - RNA, 20 nt, Measles virus
agaugauauuggcuguucag

SEQ ID NO: 3084477 - RNA, 14 nt, Measles virus
cauccagcaucaag

SEQ ID NO: 3084478 - RNA, 12 nt, Measles virus
uacgaaguuucu

SEQ ID NO: 3084479 - RNA, 18 nt, Measles virus
cuccggcuucccucuggc

SEQ ID NO: 3084480 - RNA, 22 nt, Measles virus
cucaaggugaacgucucugcca

SEQ ID NO: 3084481 - RNA, 20 nt, Measles virus
uguucuacaacaacacccca

SEQ ID NO: 3084482 - RNA, 23 nt, Measles virus
cuaucacaauucccuaucagggg

SEQ ID NO: 3084483 - RNA, 18 nt, Measles virus
cuccggggguccaccaag

SEQ ID NO: 3084484 - RNA, 21 nt, Measles virus
auuaaagaaaacuuugaaaau

SEQ ID NO: 3084485 - RNA, 15 nt, Measles virus
auuguagccaugcug

SEQ ID NO: 3084486 - RNA, 19 nt, Measles virus
cagauccucuccccccggc

SEQ ID NO: 3084487 - RNA, 11 nt, Measles virus
agcccccucca

SEQ ID NO: 3084488 - RNA, 20 nt, Measles virus
ggaggcuuguagauguuuuc

SEQ ID NO: 3084489 - RNA, 19 nt, Measles virus
caacucuugaaacacagau

SEQ ID NO: 3084490 - RNA, 10 nt, Measles virus
gagaucccag

SEQ ID NO: 3084491 - RNA, 13 nt, Measles virus
ucuacaacaacac

SEQ ID NO: 3084492 - RNA, 15 nt, Measles virus
uuaucacaagggaac

SEQ ID NO: 3084493 - RNA, 22 nt, Measles virus
aagcgaugacgacgcugaaacu

SEQ ID NO: 3084494 - RNA, 20 nt, Measles virus
aguucucaagaagcccguug

SEQ ID NO: 3084495 - RNA, 18 nt, Measles virus
uuggacguagggacaaau

SEQ ID NO: 3084496 - RNA, 11 nt, Measles virus
uugcuggcugu

SEQ ID NO: 3084497 - RNA, 11 nt, Measles virus
gaaccagcacc

SEQ ID NO: 3084498 - RNA, 16 nt, Measles virus
cagcacccagccaccg

SEQ ID NO: 3084499 - RNA, 15 nt, Measles virus
gggucucagcaaacc

SEQ ID NO: 3084500 - RNA, 16 nt, Measles virus
augccucucagcaauu

SEQ ID NO: 3084501 - RNA, 12 nt, Measles virus
accagacccagc

SEQ ID NO: 3084502 - RNA, 13 nt, Measles virus
gcugcagacacaa

SEQ ID NO: 3084503 - RNA, 13 nt, Measles virus
acucacucuggga

SEQ ID NO: 3084504 - RNA, 16 nt, Measles virus
acuuagggccaaggaa

SEQ ID NO: 3084505 - RNA, 21 nt, Measles virus
gaucccugggggacccccaaa

SEQ ID NO: 3084506 - RNA, 20 nt, Measles virus
aucauaggcagagauucagg

SEQ ID NO: 3084507 - RNA, 17 nt, Measles virus
cauccacucccacgacu

SEQ ID NO: 3084508 - RNA, 17 nt, Measles virus
uugucacaacugagcau

SEQ ID NO: 3084509 - RNA, 14 nt, Measles virus
ugacaucccaggga

SEQ ID NO: 3084510 - RNA, 19 nt, Measles virus
ccgggaaucccagaaucaa

SEQ ID NO: 3084511 - RNA, 22 nt, Measles virus
cccaaguauguugcaacccaag

SEQ ID NO: 3084512 - RNA, 23 nt, Measles virus
gcuuuaccucucaucucacagag

SEQ ID NO: 3084513 - RNA, 15 nt, Measles virus
gaaauagacaucaga

SEQ ID NO: 3084514 - RNA, 17 nt, Measles virus
auaggaaggaugaaugc

SEQ ID NO: 3084515 - RNA, 14 nt, Measles virus
ugcuucaggauucg

SEQ ID NO: 3084516 - RNA, 15 nt, Measles virus
caggcauccgacucc

SEQ ID NO: 3084517 - RNA, 16 nt, Measles virus
ucuggcugucucagga

SEQ ID NO: 3084518 - RNA, 19 nt, Measles virus
cggagauauccauccaggc

SEQ ID NO: 3084519 - RNA, 17 nt, Measles virus
gcaauauauuaaagaaa

SEQ ID NO: 3084520 - RNA, 13 nt, Measles virus
ucuucaagaucau

SEQ ID NO: 3084521 - RNA, 19 nt, Measles virus
cguugccacagcugcucag

SEQ ID NO: 3084522 - RNA, 16 nt, Measles virus
aaaccaugccucucag

SEQ ID NO: 3084523 - RNA, 13 nt, Measles virus
acuugggaaggau

SEQ ID NO: 3084524 - RNA, 19 nt, Measles virus
cggaaccaucagggccagg

SEQ ID NO: 3084525 - RNA, 19 nt, Measles virus
aaccucuucacuguuccaa

SEQ ID NO: 3084526 - RNA, 16 nt, Measles virus
cuuggaggagauauca

SEQ ID NO: 3084527 - RNA, 16 nt, Measles virus
caguagaacucagagg

SEQ ID NO: 3084528 - RNA, 21 nt, Measles virus
acauacaucugacaggggaga

SEQ ID NO: 3084529 - RNA, 17 nt, Measles virus
ucuucacauuagaagca

SEQ ID NO: 3084530 - RNA, 21 nt, Measles virus
gcgagcauucgggucccugcc

SEQ ID NO: 3084531 - RNA, 16 nt, Measles virus
gcuuacagccuggagg

SEQ ID NO: 3084532 - RNA, 19 nt, Measles virus
ccgaggaacuccucaaaga

SEQ ID NO: 3084533 - RNA, 14 nt, Measles virus
gccgacagccagca

SEQ ID NO: 3084534 - RNA, 13 nt, Measles virus
caccucagagauu

SEQ ID NO: 3084535 - RNA, 22 nt, Measles virus
uaggauaguuauuaacagagaa

SEQ ID NO: 3084536 - RNA, 16 nt, Measles virus
agacuauuaugaugau

SEQ ID NO: 3084537 - RNA, 17 nt, Measles virus
accgcauccagcaucaa

SEQ ID NO: 3084538 - RNA, 22 nt, Measles virus
ccagucaguaaugauuucagca

SEQ ID NO: 3084539 - RNA, 19 nt, Measles virus
aaaugauuauaaacaaugu

SEQ ID NO: 3084540 - RNA, 20 nt, Measles virus
ccgaguguuugaaguagggg

SEQ ID NO: 3084541 - RNA, 18 nt, Measles virus
uuaaagaaaacuuugaaa

SEQ ID NO: 3084542 - RNA, 19 nt, Measles virus
aagcgagaggccagccagc

SEQ ID NO: 3084543 - RNA, 18 nt, Measles virus
augcauccgggcucucaa

SEQ ID NO: 3084544 - RNA, 17 nt, Measles virus
gcauuggugaacucaac

SEQ ID NO: 3084545 - RNA, 16 nt, Measles virus
gaaaauacgaaguuuc

SEQ ID NO: 3084546 - RNA, 16 nt, Measles virus
augucaucaaguccaa

SEQ ID NO: 3084547 - RNA, 23 nt, Measles virus
cugaaagaaaaggagaucaagga

SEQ ID NO: 3084548 - RNA, 18 nt, Measles virus
ccccaguagggccagcac

SEQ ID NO: 3084549 - RNA, 18 nt, Measles virus
gcaaccaccgcauccagc

SEQ ID NO: 3084550 - RNA, 18 nt, Measles virus
acacucaauuccccaccc

SEQ ID NO: 3084551 - RNA, 16 nt, Measles virus
agccgacaacuccagg

SEQ ID NO: 3084552 - RNA, 22 nt, Measles virus
ucagcuuccagcucgucaagcu

SEQ ID NO: 3084553 - RNA, 20 nt, Measles virus
agaugcugacucuaucaugg

SEQ ID NO: 3084554 - RNA, 14 nt, Measles virus
guuucuauucccag

SEQ ID NO: 3084555 - RNA, 16 nt, Measles virus
augacagccagaaggc

SEQ ID NO: 3084556 - RNA, 13 nt, Measles virus
caaugaagaccuu

SEQ ID NO: 3084557 - RNA, 17 nt, Measles virus
cagcagggcucaaugaa

SEQ ID NO: 3084558 - RNA, 16 nt, Measles virus
gccaccagcucccaga

SEQ ID NO: 3084559 - RNA, 14 nt, Measles virus
ggagccgauggcag

SEQ ID NO: 3084560 - RNA, 14 nt, Measles virus
agcuauccuggagu

SEQ ID NO: 3084561 - RNA, 12 nt, Measles virus
gaugucacccag

SEQ ID NO: 3084562 - RNA, 17 nt, Measles virus
uuacugaaauacaugau

SEQ ID NO: 3084563 - RNA, 16 nt, Measles virus
gacugugugcagccaa

SEQ ID NO: 3084564 - RNA, 20 nt, Measles virus
acucaacccgaaccagcacc

SEQ ID NO: 3084565 - RNA, 18 nt, Measles virus
caacugaaggcggugcac

SEQ ID NO: 3084566 - RNA, 16 nt, Measles virus
ugguaauucuaccugg

SEQ ID NO: 3084567 - RNA, 18 nt, Measles virus
gagcccuuucuguuuugg

SEQ ID NO: 3084568 - RNA, 18 nt, Measles virus
ccacagguaggcacacca

SEQ ID NO: 3084569 - RNA, 21 nt, Measles virus
cuggaaggacaccucucaagc

SEQ ID NO: 3084570 - RNA, 10 nt, Measles virus
caacaaugug

SEQ ID NO: 3084571 - RNA, 21 nt, Measles virus
cagagggagcccccaaccaaa

SEQ ID NO: 3084572 - RNA, 18 nt, Measles virus
cccauuaaaaagggcaca

SEQ ID NO: 3084573 - RNA, 20 nt, Measles virus
uacgauccucccaagggaac

SEQ ID NO: 3084574 - RNA, 15 nt, Measles virus
caggcaucaagcacu

SEQ ID NO: 3084575 - RNA, 16 nt, Measles virus
uccaguguccaucaug

SEQ ID NO: 3084576 - RNA, 19 nt, Measles virus
ucagacaagcagggcagga

SEQ ID NO: 3084577 - RNA, 20 nt, Measles virus
ccagcucccagacucggcca

SEQ ID NO: 3084578 - RNA, 13 nt, Measles virus
gauggccaaggau

SEQ ID NO: 3084579 - RNA, 19 nt, Measles virus
aaugucaggaaauacauga

SEQ ID NO: 3084580 - RNA, 15 nt, Measles virus
gagcuccugaaacuc

SEQ ID NO: 3084581 - RNA, 20 nt, Measles virus
gaacccuaauccugcccuag

SEQ ID NO: 3084582 - RNA, 23 nt, Measles virus
cagaaucugguggacauaucacu

SEQ ID NO: 3084583 - RNA, 15 nt, Measles virus
gcaugcugcagacac

SEQ ID NO: 3084584 - RNA, 18 nt, Measles virus
gcagaugucgaacucaau

SEQ ID NO: 3084585 - RNA, 14 nt, Measles virus
cagucaguaaugau

SEQ ID NO: 3084586 - RNA, 11 nt, Measles virus
gccaaccccau

SEQ ID NO: 3084587 - RNA, 23 nt, Measles virus
cagaagauaaucuccaagcuaga

SEQ ID NO: 3084588 - RNA, 19 nt, Measles virus
ucaaccugucuuacagccu

SEQ ID NO: 3084589 - RNA, 16 nt, Measles virus
ccaaaggagacaccgg

SEQ ID NO: 3084590 - RNA, 22 nt, Measles virus
agguguugguagauccacagca

SEQ ID NO: 3084591 - RNA, 17 nt, Measles virus
caggcuggugccccagg

SEQ ID NO: 3084592 - RNA, 22 nt, Measles virus
gcacccaagagcgaucccuggg

SEQ ID NO: 3084593 - RNA, 21 nt, Measles virus
ucaugauugccauuccuggac

SEQ ID NO: 3084594 - RNA, 19 nt, Measles virus
cuccaagaaugccuccggg

SEQ ID NO: 3084595 - RNA, 18 nt, Measles virus
gggaaaaaggugagcuca

SEQ ID NO: 3084596 - RNA, 18 nt, Measles virus
agaucauccacaauguca

SEQ ID NO: 3084597 - RNA, 17 nt, Measles virus
acaugcuuccagcaggc

SEQ ID NO: 3084598 - RNA, 14 nt, Measles virus
aggugucuggaaau

SEQ ID NO: 3084599 - RNA, 20 nt, Measles virus
aaccgcacaagcgaccgagg

SEQ ID NO: 3084600 - RNA, 15 nt, Measles virus
caacacggacagaug

SEQ ID NO: 3084601 - RNA, 21 nt, Measles virus
aacggugugaccauccaaguc

SEQ ID NO: 3084602 - RNA, 14 nt, Measles virus
gcggcccaagcaca

SEQ ID NO: 3084603 - RNA, 12 nt, Measles virus
ucuucaaugcaa

SEQ ID NO: 3084604 - RNA, 13 nt, Measles virus
cguacagcagggc

SEQ ID NO: 3084605 - RNA, 21 nt, Measles virus
ucuccaagucccccggucucc

SEQ ID NO: 3084606 - RNA, 14 nt, Measles virus
agugaucugacaau

SEQ ID NO: 3084607 - RNA, 14 nt, Measles virus
ggacagcugcugaa

SEQ ID NO: 3084608 - RNA, 13 nt, Measles virus
aggaccaaccccg

SEQ ID NO: 3084609 - RNA, 17 nt, Measles virus
caagcagggcaggagau

SEQ ID NO: 3084610 - RNA, 18 nt, Measles virus
gccagccgacaacuccag

SEQ ID NO: 3084611 - RNA, 18 nt, Measles virus
gccugaaagaaaaggaga

SEQ ID NO: 3084612 - RNA, 22 nt, Measles virus
auaucacucacucugggauggu

SEQ ID NO: 3084613 - RNA, 21 nt, Measles virus
caccaaccgcauccccacagc

SEQ ID NO: 3084614 - RNA, 22 nt, Measles virus
ccaagucccccggucuccuccu

SEQ ID NO: 3084615 - RNA, 12 nt, Measles virus
cagcuuccagcu

SEQ ID NO: 3084616 - RNA, 16 nt, Measles virus
aggacaccucagagau

SEQ ID NO: 3084617 - RNA, 20 nt, Measles virus
agagaucucacuugguguau

SEQ ID NO: 3084618 - RNA, 17 nt, Measles virus
ccugcggggaauguccc

SEQ ID NO: 3084619 - RNA, 12 nt, Measles virus
auuauuugcaau

SEQ ID NO: 3084620 - RNA, 22 nt, Measles virus
accaacccccgaccagacccag

SEQ ID NO: 3084621 - RNA, 22 nt, Measles virus
cucaaagggaaacugcucaggg

SEQ ID NO: 3084622 - RNA, 14 nt, Measles virus
cccaccccacacac

SEQ ID NO: 3084623 - RNA, 18 nt, Measles virus
gcacuuaaugcaaugacc

SEQ ID NO: 3084624 - RNA, 20 nt, Measles virus
auccacucccacgacuggag

SEQ ID NO: 3084625 - RNA, 13 nt, Measles virus
cucagaaucuggu

SEQ ID NO: 3084626 - RNA, 20 nt, Measles virus
ugaaaauacgaaguuucuau

SEQ ID NO: 3084627 - RNA, 17 nt, Measles virus
cggcaccgcgcccccac

SEQ ID NO: 3084628 - RNA, 18 nt, Measles virus
caaucagacaagcagggc

SEQ ID NO: 3084629 - RNA, 13 nt, Measles virus
ucuucccugcacu

SEQ ID NO: 3084630 - RNA, 13 nt, Measles virus
gcaacugagggau

SEQ ID NO: 3084631 - RNA, 16 nt, Measles virus
cgcgcaccccagcccc

SEQ ID NO: 3084632 - RNA, 15 nt, Measles virus
ucagaguugucacaa

SEQ ID NO: 3084633 - RNA, 16 nt, Measles virus
uuaaucggccagaagc

SEQ ID NO: 3084634 - RNA, 19 nt, Measles virus
cuggaaggccccucccccc

SEQ ID NO: 3084635 - RNA, 19 nt, Measles virus
caaaacuuagggccaagga

SEQ ID NO: 3084636 - RNA, 14 nt, Measles virus
aacccuaauccugc

SEQ ID NO: 3084637 - RNA, 18 nt, Measles virus
cgacuccuuagacagauc

SEQ ID NO: 3084638 - RNA, 15 nt, Measles virus
uauauuaaagaaaac

SEQ ID NO: 3084639 - RNA, 12 nt, Measles virus
uaacaggauucc

SEQ ID NO: 3084640 - RNA, 22 nt, Measles virus
agucgagguuacaaugugucau

SEQ ID NO: 3084641 - RNA, 22 nt, Measles virus
aggcguugccacagcugcucag

SEQ ID NO: 3084642 - RNA, 14 nt, Measles virus
accaucagggccag

SEQ ID NO: 3084643 - RNA, 18 nt, Measles virus
caacccgaaccagcaccc

SEQ ID NO: 3084644 - RNA, 15 nt, Measles virus
ugaggcaaucagaca

SEQ ID NO: 3084645 - RNA, 14 nt, Measles virus
caaaauugcuucag

SEQ ID NO: 3084646 - RNA, 18 nt, Measles virus
ugugcagccaaaaugccu

SEQ ID NO: 3084647 - RNA, 23 nt, Measles virus
uuuacagucaagacugagaugag

SEQ ID NO: 3084648 - RNA, 21 nt, Measles virus
ugggcaugggagucagcugca

SEQ ID NO: 3084649 - RNA, 22 nt, Measles virus
caccggcccugcaucacgcagu

SEQ ID NO: 3084650 - RNA, 13 nt, Measles virus
gccaccagcuccc

SEQ ID NO: 3084651 - RNA, 19 nt, Measles virus
cauaagagccucagcacca

SEQ ID NO: 3084652 - RNA, 13 nt, Measles virus
cagacccagcacc

SEQ ID NO: 3084653 - RNA, 24 nt, Measles virus
uuagacguacagcagggcucaaug

SEQ ID NO: 3084654 - RNA, 20 nt, Measles virus
acgaggauaaucagaagaua

SEQ ID NO: 3084655 - RNA, 22 nt, Measles virus
caugauguucuugaccaaaacg

SEQ ID NO: 3084656 - RNA, 21 nt, Measles virus
agcugucucaaagggaaacug

SEQ ID NO: 3084657 - RNA, 16 nt, Measles virus
caaaccgcaaaagaca

SEQ ID NO: 3084658 - RNA, 14 nt, Measles virus
uccgauacaaccua

SEQ ID NO: 3084659 - RNA, 20 nt, Measles virus
gcauccccacagcucccggg

SEQ ID NO: 3084660 - RNA, 21 nt, Measles virus
ugccagccgacaacuccaggg

SEQ ID NO: 3084661 - RNA, 15 nt, Measles virus
cauaaaauuaaugcc

SEQ ID NO: 3084662 - RNA, 18 nt, Measles virus
gccuucuacaaagacaac

SEQ ID NO: 3084663 - RNA, 16 nt, Measles virus
gccaucaguuccucaa

SEQ ID NO: 3084664 - RNA, 21 nt, Measles virus
gcacuugcugcucuccaaagg

SEQ ID NO: 3084665 - RNA, 15 nt, Measles virus
gcuaaguuggaggau

SEQ ID NO: 3084666 - RNA, 12 nt, Measles virus
aaugccuccggg

SEQ ID NO: 3084667 - RNA, 18 nt, Measles virus
cagccaaccaaccaucca

SEQ ID NO: 3084668 - RNA, 14 nt, Measles virus
cagccgacagcaag

SEQ ID NO: 3084669 - RNA, 13 nt, Measles virus
gucaauucucaaa

SEQ ID NO: 3084670 - RNA, 18 nt, Measles virus
ggccuaggcuccgaauug

SEQ ID NO: 3084671 - RNA, 14 nt, Measles virus
ugguggacauauca

SEQ ID NO: 3084672 - RNA, 20 nt, Measles virus
cguacagcagggcucaauga

SEQ ID NO: 3084673 - RNA, 21 nt, Measles virus
gguuggacguagggacaaauc

SEQ ID NO: 3084674 - RNA, 15 nt, Measles virus
gccucuuagccugga

SEQ ID NO: 3084675 - RNA, 20 nt, Measles virus
cauaagagccucagcaccaa

SEQ ID NO: 3084676 - RNA, 20 nt, Measles virus
ccgaaccccaguagggccag

SEQ ID NO: 3084677 - RNA, 13 nt, Measles virus
caucaauccucug

SEQ ID NO: 3084678 - RNA, 19 nt, Measles virus
caaucagacaagcagggca

SEQ ID NO: 3084679 - RNA, 20 nt, Measles virus
gccccgacacaaggccacca

SEQ ID NO: 3084680 - RNA, 19 nt, Measles virus
ccgaccagacccagcaccc

SEQ ID NO: 3084681 - RNA, 17 nt, Measles virus
gaucaauacugugcaga

SEQ ID NO: 3084682 - RNA, 17 nt, Measles virus
aacccuaauccugcccu

SEQ ID NO: 3084683 - RNA, 15 nt, Measles virus
aacauaccuaccugc

SEQ ID NO: 3084684 - RNA, 21 nt, Measles virus
ccccaggggccgacagccagc

SEQ ID NO: 3084685 - RNA, 17 nt, Measles virus
cccagacucggccauca

SEQ ID NO: 3084686 - RNA, 19 nt, Measles virus
cgggaaaggaacccccagc

SEQ ID NO: 3084687 - RNA, 19 nt, Measles virus
cugcacagucacucgggaa

SEQ ID NO: 3084688 - RNA, 22 nt, Measles virus
ucuugugauuuaaucggccaga

SEQ ID NO: 3084689 - RNA, 22 nt, Measles virus
gcaggcaguucgggucucagca

SEQ ID NO: 3084690 - RNA, 21 nt, Measles virus
cucaacucuacuggaggccag

SEQ ID NO: 3084691 - RNA, 22 nt, Measles virus
cccgaugaguccucugcuccaa

SEQ ID NO: 3084692 - RNA, 23 nt, Measles virus
cacucaacccgaaccagcaccca

SEQ ID NO: 3084693 - RNA, 13 nt, Measles virus
ccagacccagcac

SEQ ID NO: 3084694 - RNA, 22 nt, Measles virus
ucccucacgcuuacagccugga

SEQ ID NO: 3084695 - RNA, 21 nt, Measles virus
aaggcccccaggggccgacag

SEQ ID NO: 3084696 - RNA, 17 nt, Measles virus
agagcaagccuggaaac

SEQ ID NO: 3084697 - RNA, 15 nt, Measles virus
ucuggugccgucacu

SEQ ID NO: 3084698 - RNA, 11 nt, Measles virus
uccagaagacu

SEQ ID NO: 3084699 - RNA, 21 nt, Measles virus
augucaaaaacggacuggaau

SEQ ID NO: 3084700 - RNA, 16 nt, Measles virus
gccagagagaaucaaa

SEQ ID NO: 3084701 - RNA, 17 nt, Measles virus
uaacauacauugcugcc

SEQ ID NO: 3084702 - RNA, 23 nt, Measles virus
agauuuucucauuuuucagaagu

SEQ ID NO: 3084703 - RNA, 16 nt, Measles virus
acucgaucgagcauca

SEQ ID NO: 3084704 - RNA, 18 nt, Measles virus
aaguuucuauucccagcu

SEQ ID NO: 3084705 - RNA, 21 nt, Measles virus
cgcuccgaacacagaccacca

SEQ ID NO: 3084706 - RNA, 20 nt, Measles virus
ucaguaaggagucucaacau

SEQ ID NO: 3084707 - RNA, 21 nt, Measles virus
cggaugauccagugauagaua

SEQ ID NO: 3084708 - RNA, 17 nt, Measles virus
ccagaguccagaccacc

SEQ ID NO: 3084709 - RNA, 19 nt, Measles virus
aaugcccaauauaacucuc

SEQ ID NO: 3084710 - RNA, 16 nt, Measles virus
cagccgacaacuccag

SEQ ID NO: 3084711 - RNA, 19 nt, Measles virus
cucaaauugcucagauacu

SEQ ID NO: 3084712 - RNA, 20 nt, Measles virus
gacacaauccggaaugcuca

SEQ ID NO: 3084713 - RNA, 13 nt, Measles virus
ugccucucagcaa

SEQ ID NO: 3084714 - RNA, 17 nt, Measles virus
gacaccaggcggcccaa

SEQ ID NO: 3084715 - RNA, 16 nt, Measles virus
agucagauacaugugg

SEQ ID NO: 3084716 - RNA, 14 nt, Measles virus
uaaugacagccaga

SEQ ID NO: 3084717 - RNA, 10 nt, Measles virus
gaaccagagu

SEQ ID NO: 3084718 - RNA, 20 nt, Measles virus
aucgagcaucaggucaagga

SEQ ID NO: 3084719 - RNA, 12 nt, Measles virus
ccacccuggaag

SEQ ID NO: 3084720 - RNA, 18 nt, Measles virus
auggagacaugcuuccag

SEQ ID NO: 3084721 - RNA, 21 nt, Measles virus
cucuucacuguuccaaucaag

SEQ ID NO: 3084722 - RNA, 20 nt, Measles virus
aaccacugcuuuacugaaau

SEQ ID NO: 3084723 - RNA, 16 nt, Measles virus
cgcggcaccgcgcccc

SEQ ID NO: 3084724 - RNA, 21 nt, Measles virus
gcaucgcgaggaagcacaccc

SEQ ID NO: 3084725 - RNA, 20 nt, Measles virus
agaugcacuuaaugcaauga

SEQ ID NO: 3084726 - RNA, 14 nt, Measles virus
accgcauccccaca

SEQ ID NO: 3084727 - RNA, 23 nt, Measles virus
aucacaagggaaccuaauagcca

SEQ ID NO: 3084728 - RNA, 13 nt, Measles virus
cucaaagaggcca

SEQ ID NO: 3084729 - RNA, 17 nt, Measles virus
aggcauuauuugcaaua

SEQ ID NO: 3084730 - RNA, 18 nt, Measles virus
ccaagcgagaggccagcc

SEQ ID NO: 3084731 - RNA, 16 nt, Measles virus
ucaauuaagaagcaga

SEQ ID NO: 3084732 - RNA, 22 nt, Measles virus
uaucucgaauuuugaugaguca

SEQ ID NO: 3084733 - RNA, 21 nt, Measles virus
gcuggggguuguugaggacag

SEQ ID NO: 3084734 - RNA, 15 nt, Measles virus
uauaggcucucaaga

SEQ ID NO: 3084735 - RNA, 21 nt, Measles virus
acccgaaccagcacccaagag

SEQ ID NO: 3084736 - RNA, 17 nt, Measles virus
guuccagaggacagcug

SEQ ID NO: 3084737 - RNA, 17 nt, Measles virus
caucauaggcagagauu

SEQ ID NO: 3084738 - RNA, 18 nt, Measles virus
acuccggaacccuaaucc

SEQ ID NO: 3084739 - RNA, 14 nt, Measles virus
auccccacagcucc

SEQ ID NO: 3084740 - RNA, 20 nt, Measles virus
uccaagacggggggcccccc

SEQ ID NO: 3084741 - RNA, 18 nt, Measles virus
caaacaugucgcuguccc

SEQ ID NO: 3084742 - RNA, 12 nt, Measles virus
cagccugaaaga

SEQ ID NO: 3084743 - RNA, 16 nt, Measles virus
guuaucgcugacaauc

SEQ ID NO: 3084744 - RNA, 15 nt, Measles virus
cagguaggcacacca

SEQ ID NO: 3084745 - RNA, 19 nt, Measles virus
ccaagcgagaggccagcca

SEQ ID NO: 3084746 - RNA, 15 nt, Measles virus
caggaaauacaugaa

SEQ ID NO: 3084747 - RNA, 18 nt, Measles virus
aaacuuugaaaauacgaa

SEQ ID NO: 3084748 - RNA, 15 nt, Measles virus
uagacagauccucuc

SEQ ID NO: 3084749 - RNA, 21 nt, Measles virus
gaggugaacggugugaccauc

SEQ ID NO: 3084750 - RNA, 14 nt, Measles virus
cccaagcacagaac

SEQ ID NO: 3084751 - RNA, 18 nt, Measles virus
cuaaguuccacaaugaca

SEQ ID NO: 3084752 - RNA, 16 nt, Measles virus
uacagucaagacugag

SEQ ID NO: 3084753 - RNA, 16 nt, Measles virus
ugaggacaccucagag

SEQ ID NO: 3084754 - RNA, 17 nt, Measles virus
aguuucuauucccagcu

SEQ ID NO: 3084755 - RNA, 18 nt, Measles virus
ccucacgcuuacagccug

SEQ ID NO: 3084756 - RNA, 17 nt, Measles virus
agucaucggaccagaua

SEQ ID NO: 3084757 - RNA, 17 nt, Measles virus
caggugcggcccuaggc

SEQ ID NO: 3084758 - RNA, 16 nt, Measles virus
caagacggggggcccc

SEQ ID NO: 3084759 - RNA, 20 nt, Measles virus
ucaaauuguagccaugcugg

SEQ ID NO: 3084760 - RNA, 20 nt, Measles virus
cagaagagcaggcacgccau

SEQ ID NO: 3084761 - RNA, 22 nt, Measles virus
aacucaguuccaaucugguaau

SEQ ID NO: 3084762 - RNA, 15 nt, Measles virus
cgaggaacuccucaa

SEQ ID NO: 3084763 - RNA, 14 nt, Measles virus
uaaacaauguggaa

SEQ ID NO: 3084764 - RNA, 17 nt, Measles virus
cuccucgugggaccccc

SEQ ID NO: 3084765 - RNA, 15 nt, Measles virus
uccaagcuagaauca

SEQ ID NO: 3084766 - RNA, 21 nt, Measles virus
ugaagcaguaacggcugcuga

SEQ ID NO: 3084767 - RNA, 13 nt, Measles virus
uaaggagucucaa

SEQ ID NO: 3084768 - RNA, 22 nt, Measles virus
cagcuuccagcucgucaagcua

SEQ ID NO: 3084769 - RNA, 13 nt, Measles virus
cgcgcaccccagc

SEQ ID NO: 3084770 - RNA, 15 nt, Measles virus
ucaaagaggccacug

SEQ ID NO: 3084771 - RNA, 21 nt, Measles virus
cagaacaacauccgccuaccc

SEQ ID NO: 3084772 - RNA, 14 nt, Measles virus
ccugcacucgggaa

SEQ ID NO: 3084773 - RNA, 13 nt, Measles virus
ucucaaagggaaa

SEQ ID NO: 3084774 - RNA, 18 nt, Measles virus
cacauuagaagcacaggc

SEQ ID NO: 3084775 - RNA, 17 nt, Measles virus
uccggaacccuaauccu

SEQ ID NO: 3084776 - RNA, 15 nt, Measles virus
ccaucaguuccucaa

SEQ ID NO: 3084777 - RNA, 17 nt, Measles virus
ucagcugcacagucacu

SEQ ID NO: 3084778 - RNA, 15 nt, Measles virus
uaucgcugacaauca

SEQ ID NO: 3084779 - RNA, 12 nt, Measles virus
auaauaaugaag

SEQ ID NO: 3084780 - RNA, 16 nt, Measles virus
gcugacaaucaagcaa

SEQ ID NO: 3084781 - RNA, 15 nt, Measles virus
aguagcuauccugga

SEQ ID NO: 3084782 - RNA, 22 nt, Measles virus
cgaccccccucauaaugacagc

SEQ ID NO: 3084783 - RNA, 12 nt, Measles virus
cucuccccccgg

SEQ ID NO: 3084784 - RNA, 19 nt, Measles virus
gacaacacggacagaugac

SEQ ID NO: 3084785 - RNA, 17 nt, Measles virus
aaccgcauccccacagc

SEQ ID NO: 3084786 - RNA, 21 nt, Measles virus
guauuacaccguucccagaag

SEQ ID NO: 3084787 - RNA, 10 nt, Measles virus
ucaaggaaac

SEQ ID NO: 3084788 - RNA, 13 nt, Measles virus
gauaacuggaaau

SEQ ID NO: 3084789 - RNA, 16 nt, Measles virus
cuauucccagcuuugu

SEQ ID NO: 3084790 - RNA, 13 nt, Measles virus
cauuauuugcaau

SEQ ID NO: 3084791 - RNA, 17 nt, Measles virus
agucgggagcaggaggu

SEQ ID NO: 3084792 - RNA, 17 nt, Measles virus
gcggagauauccaucca

SEQ ID NO: 3084793 - RNA, 15 nt, Measles virus
uacaaagacaaccca

SEQ ID NO: 3084794 - RNA, 22 nt, Measles virus
cuacaccgcagagauccauaag

SEQ ID NO: 3084795 - RNA, 21 nt, Measles virus
ccccccaaaaaaaggccccca

SEQ ID NO: 3084796 - RNA, 15 nt, Measles virus
ccacagcugcucaga

SEQ ID NO: 3084797 - RNA, 13 nt, Measles virus
aguuaggcauuau

SEQ ID NO: 3084798 - RNA, 16 nt, Measles virus
agcagggcucaaugaa

SEQ ID NO: 3084799 - RNA, 13 nt, Measles virus
guggaaugcuuca

SEQ ID NO: 3084800 - RNA, 16 nt, Measles virus
caugaugucacccaga

SEQ ID NO: 3084801 - RNA, 17 nt, Measles virus
caaguggaaugcuucac

SEQ ID NO: 3084802 - RNA, 19 nt, Measles virus
ggucaggaucuccaauaug

SEQ ID NO: 3084803 - RNA, 21 nt, Measles virus
ggagauccacgagcuccugaa

SEQ ID NO: 3084804 - RNA, 15 nt, Measles virus
acuaacccuccucac

SEQ ID NO: 3084805 - RNA, 13 nt, Measles virus
gcgaucccugggg

SEQ ID NO: 3084806 - RNA, 14 nt, Measles virus
gacaucccagggaa

SEQ ID NO: 3084807 - RNA, 21 nt, Measles virus
cccaaccgcaggcauccgacu

SEQ ID NO: 3084808 - RNA, 17 nt, Measles virus
cuccaaacacccaccgg

SEQ ID NO: 3084809 - RNA, 18 nt, Measles virus
caaccugucuuacagccu

SEQ ID NO: 3084810 - RNA, 20 nt, Measles virus
gacugccaugccccaacaua

SEQ ID NO: 3084811 - RNA, 18 nt, Measles virus
cugaucuuacagggacau

SEQ ID NO: 3084812 - RNA, 17 nt, Measles virus
cccggugcccacaggua

SEQ ID NO: 3084813 - RNA, 13 nt, Measles virus
cuacccuccauca

SEQ ID NO: 3084814 - RNA, 18 nt, Measles virus
gagcaucaggucaaggac

SEQ ID NO: 3084815 - RNA, 15 nt, Measles virus
ccaauccagaggcaa

SEQ ID NO: 3084816 - RNA, 18 nt, Measles virus
guugaaacugcagaagga

SEQ ID NO: 3084817 - RNA, 22 nt, Measles virus
caguccacacaaguaccaggaa

SEQ ID NO: 3084818 - RNA, 18 nt, Measles virus
cagacucggccaucaccc

SEQ ID NO: 3084819 - RNA, 16 nt, Measles virus
agaggaggcaggcagu

SEQ ID NO: 3084820 - RNA, 20 nt, Measles virus
gguuuaucgagcacuagcau

SEQ ID NO: 3084821 - RNA, 15 nt, Measles virus
ugucacagggaagau

SEQ ID NO: 3084822 - RNA, 21 nt, Measles virus
gggaaaggaacccccagcaac

SEQ ID NO: 3084823 - RNA, 13 nt, Measles virus
ggccagccagcag

SEQ ID NO: 3084824 - RNA, 13 nt, Measles virus
agcugucucaaag

SEQ ID NO: 3084825 - RNA, 19 nt, Measles virus
ggcaugggagucagcugca

SEQ ID NO: 3084826 - RNA, 13 nt, Measles virus
aggaacuccucaa

SEQ ID NO: 3084827 - RNA, 16 nt, Measles virus
ugcugcagacacaauc

SEQ ID NO: 3084828 - RNA, 14 nt, Measles virus
gccggcccccccgg

SEQ ID NO: 3084829 - RNA, 16 nt, Measles virus
ucagauacauguggaa

SEQ ID NO: 3084830 - RNA, 16 nt, Measles virus
uguaccuaaaggacaa

SEQ ID NO: 3084831 - RNA, 13 nt, Measles virus
ccuaaagccugau

SEQ ID NO: 3084832 - RNA, 21 nt, Measles virus
acugcagaugucgaacucaau

SEQ ID NO: 3084833 - RNA, 22 nt, Measles virus
caaaaaagcccccuccagaaga

SEQ ID NO: 3084834 - RNA, 21 nt, Measles virus
uggcaguacuguuaacucucc

SEQ ID NO: 3084835 - RNA, 15 nt, Measles virus
caaggccaccaccag

SEQ ID NO: 3084836 - RNA, 19 nt, Measles virus
cacaaggccaccaccagcc

SEQ ID NO: 3084837 - RNA, 19 nt, Measles virus
uucuauucccagcuuuguc

SEQ ID NO: 3084838 - RNA, 13 nt, Measles virus
cggugcccacagg

SEQ ID NO: 3084839 - RNA, 21 nt, Measles virus
ccaggcaguuuugcagccauc

SEQ ID NO: 3084840 - RNA, 16 nt, Measles virus
cacgccaugucaaaaa

SEQ ID NO: 3084841 - RNA, 17 nt, Measles virus
cuugccaaguuccacca

SEQ ID NO: 3084842 - RNA, 12 nt, Measles virus
ggacaaggcacu

SEQ ID NO: 3084843 - RNA, 20 nt, Measles virus
gcccuagguaguuaggcauu

SEQ ID NO: 3084844 - RNA, 19 nt, Measles virus
ucccagacucggccaucac

SEQ ID NO: 3084845 - RNA, 12 nt, Measles virus
aggaugccaagg

SEQ ID NO: 3084846 - RNA, 22 nt, Measles virus
cagaaggaggggagauccacga

SEQ ID NO: 3084847 - RNA, 20 nt, Measles virus
cuggagccacuuucacuugc

SEQ ID NO: 3084848 - RNA, 15 nt, Measles virus
auccgacgcuguccg

SEQ ID NO: 3084849 - RNA, 23 nt, Measles virus
caaaguuaugacucguuccagcc

SEQ ID NO: 3084850 - RNA, 17 nt, Measles virus
cagaggucaauucucaa

SEQ ID NO: 3084851 - RNA, 11 nt, Measles virus
cagggcccacu

SEQ ID NO: 3084852 - RNA, 16 nt, Measles virus
cuuccagcucgucaag

SEQ ID NO: 3084853 - RNA, 17 nt, Measles virus
cuuagagagcagaggaa

SEQ ID NO: 3084854 - RNA, 20 nt, Measles virus
ugcugcagacacaauccgga

SEQ ID NO: 3084855 - RNA, 16 nt, Measles virus
uccagaccacccuggg

SEQ ID NO: 3084856 - RNA, 20 nt, Measles virus
gaggcaaucagacaagcagg

SEQ ID NO: 3084857 - RNA, 14 nt, Measles virus
gacacuaacucacg

SEQ ID NO: 3084858 - RNA, 21 nt, Measles virus
ggccgagcccaucggcucacu

SEQ ID NO: 3084859 - RNA, 15 nt, Measles virus
ccagaguccagacca

SEQ ID NO: 3084860 - RNA, 19 nt, Measles virus
cuaucaggggucagggaaa

SEQ ID NO: 3084861 - RNA, 16 nt, Measles virus
gucaacaaggaagauc

SEQ ID NO: 3084862 - RNA, 19 nt, Measles virus
cuugucuguuaaucugagu

SEQ ID NO: 3084863 - RNA, 15 nt, Measles virus
aaggucaugccauau

SEQ ID NO: 3084864 - RNA, 19 nt, Measles virus
cagcaacuggaaggccccu

SEQ ID NO: 3084865 - RNA, 15 nt, Measles virus
ggaacccccagcaac

SEQ ID NO: 3084866 - RNA, 22 nt, Measles virus
ugaacuccggaacccuaauccu

SEQ ID NO: 3084867 - RNA, 23 nt, Measles virus
cgaaggucgcuccgaacacagac

SEQ ID NO: 3084868 - RNA, 15 nt, Measles virus
ccggcgggcagccac

SEQ ID NO: 3084869 - RNA, 18 nt, Measles virus
aaaacuuagggccaagga

SEQ ID NO: 3084870 - RNA, 24 nt, Measles virus
cgacagcaaguguggacaccaggc

SEQ ID NO: 3084871 - RNA, 17 nt, Measles virus
uauguuuugcuggcugu

SEQ ID NO: 3084872 - RNA, 23 nt, Measles virus
guugaggacagcgauccccuagg

SEQ ID NO: 3084873 - RNA, 16 nt, Measles virus
ccucaagaaaucucca

SEQ ID NO: 3084874 - RNA, 15 nt, Measles virus
caaucugagagcaag

SEQ ID NO: 3084875 - RNA, 18 nt, Measles virus
cagaggucaauucucaaa

SEQ ID NO: 3084876 - RNA, 18 nt, Measles virus
cacaaggccaccaccagc

SEQ ID NO: 3084877 - RNA, 18 nt, Measles virus
gcaguaacggcugcugaa

SEQ ID NO: 3084878 - RNA, 23 nt, Measles virus
accccgcaaaaaggaaaggccac

SEQ ID NO: 3084879 - RNA, 19 nt, Measles virus
cccacuacaaucagagguc

SEQ ID NO: 3084880 - RNA, 11 nt, Measles virus
gccauggcagc

SEQ ID NO: 3084881 - RNA, 15 nt, Measles virus
ggacuugggaaggau

SEQ ID NO: 3084882 - RNA, 18 nt, Measles virus
ggucagggaucuggagaa

SEQ ID NO: 3084883 - RNA, 15 nt, Measles virus
aguuauuaacagaga

SEQ ID NO: 3084884 - RNA, 17 nt, Measles virus
agccuaaucugagcagu

SEQ ID NO: 3084885 - RNA, 18 nt, Measles virus
caggcuggugccccaggu

SEQ ID NO: 3084886 - RNA, 23 nt, Measles virus
aggccacaacccgcgcaccccag

SEQ ID NO: 3084887 - RNA, 21 nt, Measles virus
auggcaggcuggugccccagg

SEQ ID NO: 3084888 - RNA, 21 nt, Measles virus
ccucugcuccaagaaugccuc

SEQ ID NO: 3084889 - RNA, 20 nt, Measles virus
aucaugauugccauuccugg

SEQ ID NO: 3084890 - RNA, 17 nt, Measles virus
cucaguuccaaucuggu

SEQ ID NO: 3084891 - RNA, 22 nt, Measles virus
cagccccgacacaaggccacca

SEQ ID NO: 3084892 - RNA, 18 nt, Measles virus
cccaaaaaaaggccccca

SEQ ID NO: 3084893 - RNA, 18 nt, Measles virus
cgaggaagccauggcagc

SEQ ID NO: 3084894 - RNA, 13 nt, Measles virus
cgaaccagcaccc

SEQ ID NO: 3084895 - RNA, 15 nt, Measles virus
accucgguccuccca

SEQ ID NO: 3084896 - RNA, 21 nt, Measles virus
aauaaaugccuucuacaaaga

SEQ ID NO: 3084897 - RNA, 17 nt, Measles virus
gacauacaucugacagg

SEQ ID NO: 3084898 - RNA, 18 nt, Measles virus
cauaaugacagccagaag

SEQ ID NO: 3084899 - RNA, 15 nt, Measles virus
gggaaucccagaauc

SEQ ID NO: 3084900 - RNA, 14 nt, Measles virus
gccaaaaugccuug

SEQ ID NO: 3084901 - RNA, 12 nt, Measles virus
augccucucagc

SEQ ID NO: 3084902 - RNA, 18 nt, Measles virus
auaacugaugacauacau

SEQ ID NO: 3084903 - RNA, 19 nt, Measles virus
cucccccugcaugcugcag

SEQ ID NO: 3084904 - RNA, 16 nt, Measles virus
accuccaugacccuga

SEQ ID NO: 3084905 - RNA, 20 nt, Measles virus
gacaaaauuaaauuccuuaa

SEQ ID NO: 3084906 - RNA, 14 nt, Measles virus
aagcacacccaccc

SEQ ID NO: 3084907 - RNA, 20 nt, Measles virus
acuccacacucuggcugucu

SEQ ID NO: 3084908 - RNA, 14 nt, Measles virus
gccgccagccaacc

SEQ ID NO: 3084909 - RNA, 15 nt, Measles virus
ucacgcuuacagccu

SEQ ID NO: 3084910 - RNA, 22 nt, Measles virus
uacaccguucccagaagaaugc

SEQ ID NO: 3084911 - RNA, 17 nt, Measles virus
gcauccccacagcuccc

SEQ ID NO: 3084912 - RNA, 19 nt, Measles virus
agcaaguguggacaccagg

SEQ ID NO: 3084913 - RNA, 16 nt, Measles virus
aucugagagcaagccu

SEQ ID NO: 3084914 - RNA, 20 nt, Measles virus
agauguggcugcugaagaac

SEQ ID NO: 3084915 - RNA, 16 nt, Measles virus
auauuaaagaaaacuu

SEQ ID NO: 3084916 - RNA, 13 nt, Measles virus
accaguuccagag

SEQ ID NO: 3084917 - RNA, 18 nt, Measles virus
guugagcuuaaaaucaaa

SEQ ID NO: 3084918 - RNA, 19 nt, Measles virus
ucggaaccaucagggccag

SEQ ID NO: 3084919 - RNA, 19 nt, Measles virus
ggaccgagccaccugcaag

SEQ ID NO: 3084920 - RNA, 23 nt, Measles virus
caacccgaaccagcacccaagag

SEQ ID NO: 3084921 - RNA, 14 nt, Measles virus
cucguuccagccau

SEQ ID NO: 3084922 - RNA, 18 nt, Measles virus
aggcauuauuugcaauau

SEQ ID NO: 3084923 - RNA, 14 nt, Measles virus
ccguucccagaaga

SEQ ID NO: 3084924 - RNA, 19 nt, Measles virus
gaacuccucaaagaggcca

SEQ ID NO: 3084925 - RNA, 13 nt, Measles virus
cacccccaaagga

SEQ ID NO: 3084926 - RNA, 19 nt, Measles virus
aaaugacuuacaaaaugag

SEQ ID NO: 3084927 - RNA, 16 nt, Measles virus
uccagggaaugacuaa

SEQ ID NO: 3084928 - RNA, 13 nt, Measles virus
acccuggaaggac

SEQ ID NO: 3084929 - RNA, 20 nt, Measles virus
ccugggccaccagcucccag

SEQ ID NO: 3084930 - RNA, 15 nt, Measles virus
caccugcaaggaaga

SEQ ID NO: 3084931 - RNA, 14 nt, Measles virus
cagacccagcaccc

SEQ ID NO: 3084932 - RNA, 18 nt, Measles virus
gucaaaaacggacuggaa

SEQ ID NO: 3084933 - RNA, 15 nt, Measles virus
ucaggggucagggaa

SEQ ID NO: 3084934 - RNA, 19 nt, Measles virus
uaucccgccaaugaagaac

SEQ ID NO: 3084935 - RNA, 17 nt, Measles virus
gccacagcugcucagau

SEQ ID NO: 3084936 - RNA, 15 nt, Measles virus
ugacaucccagggaa

SEQ ID NO: 3084937 - RNA, 17 nt, Measles virus
caucaguaucccacagc

SEQ ID NO: 3084938 - RNA, 13 nt, Measles virus
aucucaaagaaag

SEQ ID NO: 3084939 - RNA, 15 nt, Measles virus
ccagcacccagccac

SEQ ID NO: 3084940 - RNA, 12 nt, Measles virus
gugugaaauaga

SEQ ID NO: 3084941 - RNA, 19 nt, Measles virus
gcgaauggagacaugcuuc

SEQ ID NO: 3084942 - RNA, 23 nt, Measles virus
ucgugggacccccgaggaccaac

SEQ ID NO: 3084943 - RNA, 16 nt, Measles virus
ccagcuuacgggaccc

SEQ ID NO: 3084944 - RNA, 19 nt, Measles virus
uuaugccucuuagccugga

SEQ ID NO: 3084945 - RNA, 15 nt, Measles virus
aaggaaaggccacaa

SEQ ID NO: 3084946 - RNA, 12 nt, Measles virus
cagaccccggcc

SEQ ID NO: 3084947 - RNA, 22 nt, Measles virus
ucagcauauccacccuggaagg

SEQ ID NO: 3084948 - RNA, 13 nt, Measles virus
agaggaggaucgg

SEQ ID NO: 3084949 - RNA, 17 nt, Measles virus
gaugucacccagacauc

SEQ ID NO: 3084950 - RNA, 19 nt, Measles virus
acccgcgcaccccagcccc

SEQ ID NO: 3084951 - RNA, 14 nt, Measles virus
ugcuccaagaaugc

SEQ ID NO: 3084952 - RNA, 13 nt, Measles virus
caucaggucaagg

SEQ ID NO: 3084953 - RNA, 14 nt, Measles virus
gguccacacagccg

SEQ ID NO: 3084954 - RNA, 15 nt, Measles virus
ucaagguuaguccca

SEQ ID NO: 3084955 - RNA, 16 nt, Measles virus
agguuaaugacagaga

SEQ ID NO: 3084956 - RNA, 13 nt, Measles virus
caguggaggugau

SEQ ID NO: 3084957 - RNA, 15 nt, Measles virus
aguaagaauccaggc

SEQ ID NO: 3084958 - RNA, 20 nt, Measles virus
uccagccggcuagaggagga

SEQ ID NO: 3084959 - RNA, 22 nt, Measles virus
aaucaguuccuagcugucucaa

SEQ ID NO: 3084960 - RNA, 20 nt, Measles virus
acgaucuugccaaguuccac

SEQ ID NO: 3084961 - RNA, 12 nt, Measles virus
cgaggaagccau

SEQ ID NO: 3084962 - RNA, 21 nt, Measles virus
caguacuguuaacucuccaaa

SEQ ID NO: 3084963 - RNA, 13 nt, Measles virus
ccucugucacagg

SEQ ID NO: 3084964 - RNA, 16 nt, Measles virus
gugucagcuuccagcu

SEQ ID NO: 3084965 - RNA, 21 nt, Measles virus
cauggcagcauggucagaaau

SEQ ID NO: 3084966 - RNA, 24 nt, Measles virus
ugagcuugaucggguugcuagcca

SEQ ID NO: 3084967 - RNA, 21 nt, Measles virus
ugggaaagccuaaucugagca

SEQ ID NO: 3084968 - RNA, 22 nt, Measles virus
ccaggcggcccaagcacagaac

SEQ ID NO: 3084969 - RNA, 21 nt, Measles virus
gccacucaacccgaaccagca

SEQ ID NO: 3084970 - RNA, 21 nt, Measles virus
ccacaaccgaaccgcacaagc

SEQ ID NO: 3084971 - RNA, 21 nt, Measles virus
acuaacucgaucgagcaucag

SEQ ID NO: 3084972 - RNA, 20 nt, Measles virus
acacaccuguauucuucacu

SEQ ID NO: 3084973 - RNA, 20 nt, Measles virus
cagauccucuccccccggca

SEQ ID NO: 3084974 - RNA, 18 nt, Measles virus
uucagaguguagcuucaa

SEQ ID NO: 3084975 - RNA, 18 nt, Measles virus
accccccgaaaaccagag

SEQ ID NO: 3084976 - RNA, 14 nt, Measles virus
ggcacgccauguca

SEQ ID NO: 3084977 - RNA, 18 nt, Measles virus
ggccgacagccagcaucg

SEQ ID NO: 3084978 - RNA, 18 nt, Measles virus
gcauaguuuacauccuga

SEQ ID NO: 3084979 - RNA, 19 nt, Measles virus
caauguaccuaaaggacaa

SEQ ID NO: 3084980 - RNA, 14 nt, Measles virus
guacgggggaacuu

SEQ ID NO: 3084981 - RNA, 14 nt, Measles virus
uccccacagcuccc

SEQ ID NO: 3084982 - RNA, 15 nt, Measles virus
ccaaggaacacacac

SEQ ID NO: 3084983 - RNA, 14 nt, Measles virus
gagucaacaaggaa

SEQ ID NO: 3084984 - RNA, 19 nt, Measles virus
agguguuaucgcugacaau

SEQ ID NO: 3084985 - RNA, 20 nt, Measles virus
cccaauauaacucuccucaa

SEQ ID NO: 3084986 - RNA, 14 nt, Measles virus
gacccagcacccag

SEQ ID NO: 3084987 - RNA, 23 nt, Measles virus
cgaggaacuccucaaagaggcca

SEQ ID NO: 3084988 - RNA, 13 nt, Measles virus
uaaugacagagac

SEQ ID NO: 3084989 - RNA, 16 nt, Measles virus
ugccucuuagccugga

SEQ ID NO: 3084990 - RNA, 16 nt, Measles virus
uaauccgcuccauuau

SEQ ID NO: 3084991 - RNA, 18 nt, Measles virus
ccacacagccgccagcca

SEQ ID NO: 3084992 - RNA, 21 nt, Measles virus
ccagcacuuccgagacaccca

SEQ ID NO: 3084993 - RNA, 19 nt, Measles virus
gacagguggugcaacccaa

SEQ ID NO: 3084994 - RNA, 17 nt, Measles virus
cagaagacuccacggac

SEQ ID NO: 3084995 - RNA, 17 nt, Measles virus
cacaaugucaccacaac

SEQ ID NO: 3084996 - RNA, 16 nt, Measles virus
cagaguugucacaacu

SEQ ID NO: 3084997 - RNA, 17 nt, Measles virus
agaccgaauaaaugccu

SEQ ID NO: 3084998 - RNA, 15 nt, Measles virus
augcgcuuggaggag

SEQ ID NO: 3084999 - RNA, 15 nt, Measles virus
gaccuuauguuuugc

SEQ ID NO: 3085000 - RNA, 23 nt, Measles virus
gagcacgauuugacuaaggcacu

SEQ ID NO: 3085001 - RNA, 19 nt, Measles virus
aagcuaggugucuggaaau

SEQ ID NO: 3085002 - RNA, 17 nt, Measles virus
ccucugucacagggaag

SEQ ID NO: 3085003 - RNA, 14 nt, Measles virus
cuccuuagacagau

SEQ ID NO: 3085004 - RNA, 20 nt, Measles virus
ugccauauuuuguggaauca

SEQ ID NO: 3085005 - RNA, 17 nt, Measles virus
aaggacaccucucaagc

SEQ ID NO: 3085006 - RNA, 19 nt, Measles virus
uuacaccguucccagaaga

SEQ ID NO: 3085007 - RNA, 19 nt, Measles virus
acaaugucaccacaacgag

SEQ ID NO: 3085008 - RNA, 18 nt, Measles virus
uuggccaccccugacccu

SEQ ID NO: 3085009 - RNA, 11 nt, Measles virus
gacagccagaa

SEQ ID NO: 3085010 - RNA, 18 nt, Measles virus
ccacaaccgaaccgcaca

SEQ ID NO: 3085011 - RNA, 15 nt, Measles virus
cugugugcagccaaa

SEQ ID NO: 3085012 - RNA, 22 nt, Measles virus
ugucucaaagggaaacugcuca

SEQ ID NO: 3085013 - RNA, 12 nt, Measles virus
gccagccagcag

SEQ ID NO: 3085014 - RNA, 21 nt, Measles virus
agcuguucuccgauguccaag

SEQ ID NO: 3085015 - RNA, 23 nt, Measles virus
auuggcaaguauuuuaaggacaa

SEQ ID NO: 3085016 - RNA, 14 nt, Measles virus
caaaaaacucuggu

SEQ ID NO: 3085017 - RNA, 20 nt, Measles virus
agugcguugauaacuggaaa

SEQ ID NO: 3085018 - RNA, 19 nt, Measles virus
agccgacaacuccagggaa

SEQ ID NO: 3085019 - RNA, 13 nt, Measles virus
gcugacaaucaag

SEQ ID NO: 3085020 - RNA, 12 nt, Measles virus
ugaugacauaca

SEQ ID NO: 3085021 - RNA, 15 nt, Measles virus
cggaccaagcgagag

SEQ ID NO: 3085022 - RNA, 13 nt, Measles virus
cggauucuccaac

SEQ ID NO: 3085023 - RNA, 16 nt, Measles virus
gcacaccaacccccga

SEQ ID NO: 3085024 - RNA, 19 nt, Measles virus
ggcaggcuggugccccagg

SEQ ID NO: 3085025 - RNA, 20 nt, Measles virus
agccgucggguuuguuccug

SEQ ID NO: 3085026 - RNA, 23 nt, Measles virus
guccaagacaucaaaacagccuu

SEQ ID NO: 3085027 - RNA, 23 nt, Measles virus
gucagaaauaucagacaacccag

SEQ ID NO: 3085028 - RNA, 21 nt, Measles virus
gugggacccccgaggaccaac

SEQ ID NO: 3085029 - RNA, 20 nt, Measles virus
gaguugucacaacugagcau

SEQ ID NO: 3085030 - RNA, 14 nt, Measles virus
aagacucauccagu

SEQ ID NO: 3085031 - RNA, 13 nt, Measles virus
cagugauggcagg

SEQ ID NO: 3085032 - RNA, 14 nt, Measles virus
augcauuggugaac

SEQ ID NO: 3085033 - RNA, 15 nt, Measles virus
gacagugaucugaca

SEQ ID NO: 3085034 - RNA, 19 nt, Measles virus
agucccccggucuccuccu

SEQ ID NO: 3085035 - RNA, 19 nt, Measles virus
gcuguucaggguguccaag

SEQ ID NO: 3085036 - RNA, 21 nt, Measles virus
uaguuauuaacagagaacauc

SEQ ID NO: 3085037 - RNA, 19 nt, Measles virus
cuagugugaaauagacauc

SEQ ID NO: 3085038 - RNA, 12 nt, Measles virus
aguuaggcauua

SEQ ID NO: 3085039 - RNA, 16 nt, Measles virus
cucacgcuuacagccu

SEQ ID NO: 3085040 - RNA, 19 nt, Measles virus
caaacccgccggccccccc

SEQ ID NO: 3085041 - RNA, 13 nt, Measles virus
cccgcgcacccca

SEQ ID NO: 3085042 - RNA, 22 nt, Measles virus
gcucucaaggccgagcccaucg

SEQ ID NO: 3085043 - RNA, 23 nt, Measles virus
ccucccccaacgcaagaacccca

SEQ ID NO: 3085044 - RNA, 13 nt, Measles virus
ucgacaaugcaga

SEQ ID NO: 3085045 - RNA, 20 nt, Measles virus
acaccucagagauucacuga

SEQ ID NO: 3085046 - RNA, 18 nt, Measles virus
uggcaaguauuuuaagga

SEQ ID NO: 3085047 - RNA, 14 nt, Measles virus
agccugaaagaaaa

SEQ ID NO: 3085048 - RNA, 17 nt, Measles virus
ccaggcaucaagcacug

SEQ ID NO: 3085049 - RNA, 20 nt, Measles virus
ccaggcggcccaagcacaga

SEQ ID NO: 3085050 - RNA, 17 nt, Measles virus
ugaggacaccucagaga

SEQ ID NO: 3085051 - RNA, 15 nt, Measles virus
caaguguuacacaac

SEQ ID NO: 3085052 - RNA, 17 nt, Measles virus
auccacccuggaaggac

SEQ ID NO: 3085053 - RNA, 18 nt, Measles virus
gccgucgaggaagccaug

SEQ ID NO: 3085054 - RNA, 19 nt, Measles virus
gggcucaaauugcucagau

SEQ ID NO: 3085055 - RNA, 20 nt, Measles virus
gcugaaaaucuaaucucaaa

SEQ ID NO: 3085056 - RNA, 23 nt, Measles virus
cccgggaaaggaacccccagcaa

SEQ ID NO: 3085057 - RNA, 19 nt, Measles virus
gaagacuccacggaccaag

SEQ ID NO: 3085058 - RNA, 20 nt, Measles virus
uucagaucggucaaugcagu

SEQ ID NO: 3085059 - RNA, 14 nt, Measles virus
acuaacccuccuca

SEQ ID NO: 3085060 - RNA, 11 nt, Measles virus
ucguuccagcc

SEQ ID NO: 3085061 - RNA, 22 nt, Measles virus
uagaagacaaagagucaacaag

SEQ ID NO: 3085062 - RNA, 17 nt, Measles virus
gcccccaggggccgaca

SEQ ID NO: 3085063 - RNA, 16 nt, Measles virus
gggagaaguugaguca

SEQ ID NO: 3085064 - RNA, 20 nt, Measles virus
ccccagcuuacgggacccca

SEQ ID NO: 3085065 - RNA, 13 nt, Measles virus
accggggaucugc

SEQ ID NO: 3085066 - RNA, 21 nt, Measles virus
gaggggagguuaaugacagag

SEQ ID NO: 3085067 - RNA, 13 nt, Measles virus
ccaucgacaaucu

SEQ ID NO: 3085068 - RNA, 20 nt, Measles virus
ccacugauggauaucaauga

SEQ ID NO: 3085069 - RNA, 11 nt, Measles virus
caaucaaggaa

SEQ ID NO: 3085070 - RNA, 21 nt, Measles virus
auacccgaaaacgaccccccu

SEQ ID NO: 3085071 - RNA, 15 nt, Measles virus
caugccucucagcaa

SEQ ID NO: 3085072 - RNA, 22 nt, Measles virus
aguucaaccugucuuacagccu

SEQ ID NO: 3085073 - RNA, 16 nt, Measles virus
ccgaggaccagaacaa

SEQ ID NO: 3085074 - RNA, 18 nt, Measles virus
gagaucuacgauuucgac

SEQ ID NO: 3085075 - RNA, 14 nt, Measles virus
gagccgauggcaga

SEQ ID NO: 3085076 - RNA, 13 nt, Measles virus
uugaacaugcugu

SEQ ID NO: 3085077 - RNA, 19 nt, Measles virus
caagcgagaggccagccag

SEQ ID NO: 3085078 - RNA, 15 nt, Measles virus
gucuuuugggaaccg

SEQ ID NO: 3085079 - RNA, 20 nt, Measles virus
ccauaucugcggagauaucc

SEQ ID NO: 3085080 - RNA, 23 nt, Measles virus
accgguucauuuuaucacaaggg

SEQ ID NO: 3085081 - RNA, 16 nt, Measles virus
ccagccaaccaaccau

SEQ ID NO: 3085082 - RNA, 20 nt, Measles virus
ggcagaagagcaggcacgcc

SEQ ID NO: 3085083 - RNA, 23 nt, Measles virus
caagucuccucuucgucaucaag

SEQ ID NO: 3085084 - RNA, 15 nt, Measles virus
cucagaaucuggugg

SEQ ID NO: 3085085 - RNA, 18 nt, Measles virus
gccauggcagcaugguca

SEQ ID NO: 3085086 - RNA, 15 nt, Measles virus
ucacaugaugucacc

SEQ ID NO: 3085087 - RNA, 15 nt, Measles virus
gcaagaucauccaca

SEQ ID NO: 3085088 - RNA, 17 nt, Measles virus
gaacuccggaacccuaa

SEQ ID NO: 3085089 - RNA, 17 nt, Measles virus
ugagcaagacucuccau

SEQ ID NO: 3085090 - RNA, 21 nt, Measles virus
acaccaggcggcccaagcaca

SEQ ID NO: 3085091 - RNA, 16 nt, Measles virus
uuguagccaugcugga

SEQ ID NO: 3085092 - RNA, 13 nt, Measles virus
uccuagcugucuc

SEQ ID NO: 3085093 - RNA, 14 nt, Measles virus
uccacaaugucacc

SEQ ID NO: 3085094 - RNA, 12 nt, Measles virus
agcgagaggcca

SEQ ID NO: 3085095 - RNA, 21 nt, Measles virus
cuccacggaccaagcgagagg

SEQ ID NO: 3085096 - RNA, 12 nt, Measles virus
gcucucaagagu

SEQ ID NO: 3085097 - RNA, 22 nt, Measles virus
ucaggcaauugaggcaaucaga

SEQ ID NO: 3085098 - RNA, 21 nt, Measles virus
cccauuaaaaagggcacagac

SEQ ID NO: 3085099 - RNA, 12 nt, Measles virus
cagaacccagac

SEQ ID NO: 3085100 - RNA, 14 nt, Measles virus
ggucagggaucugg

SEQ ID NO: 3085101 - RNA, 22 nt, Measles virus
gacaaaaaagcccccuccagaa

SEQ ID NO: 3085102 - RNA, 23 nt, Measles virus
ucccgggaaaggaacccccagca

SEQ ID NO: 3085103 - RNA, 12 nt, Measles virus
ccaccagcuccc

SEQ ID NO: 3085104 - RNA, 12 nt, Measles virus
ggagcaaaguga

SEQ ID NO: 3085105 - RNA, 18 nt, Measles virus
gacagauccucucccccc

SEQ ID NO: 3085106 - RNA, 23 nt, Measles virus
cggucagggaucuggagaaagcg

SEQ ID NO: 3085107 - RNA, 15 nt, Measles virus
acaaccuaaauccau

SEQ ID NO: 3085108 - RNA, 19 nt, Measles virus
caggaccgagccaccugca

SEQ ID NO: 3085109 - RNA, 15 nt, Measles virus
cuuuacugaaauaca

SEQ ID NO: 3085110 - RNA, 16 nt, Measles virus
accgcauccccacagc

SEQ ID NO: 3085111 - RNA, 20 nt, Measles virus
aagaagcagaucaacaggca

SEQ ID NO: 3085112 - RNA, 22 nt, Measles virus
acuggagccgauggcagaagag

SEQ ID NO: 3085113 - RNA, 14 nt, Measles virus
cagaccacccuggg

SEQ ID NO: 3085114 - RNA, 17 nt, Measles virus
caaucagacaagcaggg

SEQ ID NO: 3085115 - RNA, 15 nt, Measles virus
gaagaagggggagac

SEQ ID NO: 3085116 - RNA, 20 nt, Measles virus
acgagcuccugaaacuccaa

SEQ ID NO: 3085117 - RNA, 23 nt, Measles virus
gggaagaucaucgacaaugcaga

SEQ ID NO: 3085118 - RNA, 22 nt, Measles virus
ugcaaggaagaggaggcaggca

SEQ ID NO: 3085119 - RNA, 16 nt, Measles virus
aguuucuauucccagc

SEQ ID NO: 3085120 - RNA, 23 nt, Measles virus
cccagaauaaugaagaaggggga

SEQ ID NO: 3085121 - RNA, 14 nt, Measles virus
aaacucaguuccaa

SEQ ID NO: 3085122 - RNA, 13 nt, Measles virus
aggaacccccagc

SEQ ID NO: 3085123 - RNA, 19 nt, Measles virus
acacaaggccaccaccagc

SEQ ID NO: 3085124 - RNA, 17 nt, Measles virus
acugguaguucaguuga

SEQ ID NO: 3085125 - RNA, 18 nt, Measles virus
ggcauccgacuccuuaga

SEQ ID NO: 3085126 - RNA, 13 nt, Measles virus
gcugucccgacaa

SEQ ID NO: 3085127 - RNA, 22 nt, Measles virus
acagcaaguguggacaccaggc

SEQ ID NO: 3085128 - RNA, 21 nt, Measles virus
uaaagaaaacuuugaaaauac

SEQ ID NO: 3085129 - RNA, 17 nt, Measles virus
gggaggacaucaaggag

SEQ ID NO: 3085130 - RNA, 18 nt, Measles virus
gaguccucugcuccaaga

SEQ ID NO: 3085131 - RNA, 16 nt, Measles virus
ugaugucaaacucagu

SEQ ID NO: 3085132 - RNA, 16 nt, Measles virus
ccccgaaaaccagagg

SEQ ID NO: 3085133 - RNA, 13 nt, Measles virus
ccaccgacaaucc

SEQ ID NO: 3085134 - RNA, 19 nt, Measles virus
cacagauuucccacaaguc

SEQ ID NO: 3085135 - RNA, 21 nt, Measles virus
ucagaagauaaucuccaagcu

SEQ ID NO: 3085136 - RNA, 15 nt, Measles virus
accagaacaacaucc

SEQ ID NO: 3085137 - RNA, 23 nt, Measles virus
ugacccucccccugcaugcugca

SEQ ID NO: 3085138 - RNA, 14 nt, Measles virus
cuucuaggaagagu

SEQ ID NO: 3085139 - RNA, 19 nt, Measles virus
ggaacccuaauccugcccu

SEQ ID NO: 3085140 - RNA, 19 nt, Measles virus
aucagaggucaauucucaa

SEQ ID NO: 3085141 - RNA, 17 nt, Measles virus
gcgguguaccugcacag

SEQ ID NO: 3085142 - RNA, 17 nt, Measles virus
gggcucaaauugcucag

SEQ ID NO: 3085143 - RNA, 15 nt, Measles virus
cagacccagcaccca

SEQ ID NO: 3085144 - RNA, 17 nt, Measles virus
auguugcugcagggggc

SEQ ID NO: 3085145 - RNA, 18 nt, Measles virus
cauuguuauaaaaaacuu

SEQ ID NO: 3085146 - RNA, 13 nt, Measles virus
agaagacaaagag

SEQ ID NO: 3085147 - RNA, 20 nt, Measles virus
uagggaguacgacuucagag

SEQ ID NO: 3085148 - RNA, 15 nt, Measles virus
ggcauugcacuucac

SEQ ID NO: 3085149 - RNA, 19 nt, Measles virus
ccaggggccgacagccagc

SEQ ID NO: 3085150 - RNA, 17 nt, Measles virus
agggacaucaaaauccu

SEQ ID NO: 3085151 - RNA, 16 nt, Measles virus
auccucccaagggaac

SEQ ID NO: 3085152 - RNA, 23 nt, Measles virus
agugguauaccacugugcccaag

SEQ ID NO: 3085153 - RNA, 17 nt, Measles virus
accgcauccccacagcu

SEQ ID NO: 3085154 - RNA, 22 nt, Measles virus
acccagccaccgacaauccaag

SEQ ID NO: 3085155 - RNA, 21 nt, Measles virus
auagaagacaaagagucaaca

SEQ ID NO: 3085156 - RNA, 21 nt, Measles virus
ccgauccggcgggcagccacu

SEQ ID NO: 3085157 - RNA, 19 nt, Measles virus
acccucucaggaggagacg

SEQ ID NO: 3085158 - RNA, 11 nt, Measles virus
uccaaauugua

SEQ ID NO: 3085159 - RNA, 19 nt, Measles virus
uccucgugggacccccgag

SEQ ID NO: 3085160 - RNA, 13 nt, Measles virus
auguuuacagccc

SEQ ID NO: 3085161 - RNA, 16 nt, Measles virus
aguacuguuaacucuc

SEQ ID NO: 3085162 - RNA, 17 nt, Measles virus
cuccaggcaucaagcac

SEQ ID NO: 3085163 - RNA, 11 nt, Measles virus
ucagcuuccag

SEQ ID NO: 3085164 - RNA, 13 nt, Measles virus
aaaauaucagcau

SEQ ID NO: 3085165 - RNA, 13 nt, Measles virus
ccacagcugcuca

SEQ ID NO: 3085166 - RNA, 17 nt, Measles virus
agccgcucauuuucuua

SEQ ID NO: 3085167 - RNA, 22 nt, Measles virus
uccagaccacccugggccacca

SEQ ID NO: 3085168 - RNA, 15 nt, Measles virus
ggcuggugccccagg

SEQ ID NO: 3085169 - RNA, 22 nt, Measles virus
gucaauucucaaacaugucgcu

SEQ ID NO: 3085170 - RNA, 17 nt, Measles virus
uaccugcaacugaggga

SEQ ID NO: 3085171 - RNA, 15 nt, Measles virus
ucaugggucucaagg

SEQ ID NO: 3085172 - RNA, 12 nt, Measles virus
cccagcuuuguc

SEQ ID NO: 3085173 - RNA, 15 nt, Measles virus
ccaccgcauccagca

SEQ ID NO: 3085174 - RNA, 19 nt, Measles virus
agaugucgaacucaauccc

SEQ ID NO: 3085175 - RNA, 22 nt, Measles virus
uaaccacugcuuuacugaaaua

SEQ ID NO: 3085176 - RNA, 20 nt, Measles virus
aagcaguaacggcugcugaa

SEQ ID NO: 3085177 - RNA, 13 nt, Measles virus
gguguaucaaccc

SEQ ID NO: 3085178 - RNA, 22 nt, Measles virus
cgacuggagccgauggcagaag

SEQ ID NO: 3085179 - RNA, 13 nt, Measles virus
guuccucaagaau

SEQ ID NO: 3085180 - RNA, 14 nt, Measles virus
cuggggaaugcaau

SEQ ID NO: 3085181 - RNA, 19 nt, Measles virus
ucuucacugguaguucagu

SEQ ID NO: 3085182 - RNA, 20 nt, Measles virus
ccugaaacccaucauaggca

SEQ ID NO: 3085183 - RNA, 14 nt, Measles virus
cccgaaccagcacc

SEQ ID NO: 3085184 - RNA, 19 nt, Measles virus
augccuucuacaaagacaa

SEQ ID NO: 3085185 - RNA, 13 nt, Measles virus
ccugccaacccca

SEQ ID NO: 3085186 - RNA, 20 nt, Measles virus
ucagagauucacugaccuag

SEQ ID NO: 3085187 - RNA, 15 nt, Measles virus
uauucccagcuuugu

SEQ ID NO: 3085188 - RNA, 21 nt, Measles virus
cuuaucucgaauuuugaugag

SEQ ID NO: 3085189 - RNA, 22 nt, Measles virus
gaggaacuccucaaagaggcca

SEQ ID NO: 3085190 - RNA, 15 nt, Measles virus
ccaagcgagaggcca

SEQ ID NO: 3085191 - RNA, 22 nt, Measles virus
ccugaucuuacagggacaucaa

SEQ ID NO: 3085192 - RNA, 13 nt, Measles virus
ggaccgagccacc

SEQ ID NO: 3085193 - RNA, 15 nt, Measles virus
ggagccgauggcaga

SEQ ID NO: 3085194 - RNA, 14 nt, Measles virus
acaugcuuccagca

SEQ ID NO: 3085195 - RNA, 17 nt, Measles virus
aucccaaucugcguccu

SEQ ID NO: 3085196 - RNA, 21 nt, Measles virus
ucucaaagggaaacugcucag

SEQ ID NO: 3085197 - RNA, 20 nt, Measles virus
cgaggaagccauggcagcau

SEQ ID NO: 3085198 - RNA, 17 nt, Measles virus
caaggacgugcugacac

SEQ ID NO: 3085199 - RNA, 11 nt, Measles virus
aggcaggcagu

SEQ ID NO: 3085200 - RNA, 20 nt, Measles virus
aacagccuuggccaaaauac

SEQ ID NO: 3085201 - RNA, 18 nt, Measles virus
caaccucuucacuguucc

SEQ ID NO: 3085202 - RNA, 14 nt, Measles virus
agcacccucucagg

SEQ ID NO: 3085203 - RNA, 16 nt, Measles virus
ggcaggcuggugcccc

SEQ ID NO: 3085204 - RNA, 20 nt, Measles virus
agaucucaaagaaagucaca

SEQ ID NO: 3085205 - RNA, 19 nt, Measles virus
cuggccgaaguucucaaga

SEQ ID NO: 3085206 - RNA, 22 nt, Measles virus
ccauccaagucgggagcaggag

SEQ ID NO: 3085207 - RNA, 18 nt, Measles virus
agcuaggugucuggaaau

SEQ ID NO: 3085208 - RNA, 20 nt, Measles virus
uguaucaacccgccagagag

SEQ ID NO: 3085209 - RNA, 14 nt, Measles virus
ggaagagucagaua

SEQ ID NO: 3085210 - RNA, 18 nt, Measles virus
ggauaccgagauucaagg

SEQ ID NO: 3085211 - RNA, 19 nt, Measles virus
aguuccagaggacagcugc

SEQ ID NO: 3085212 - RNA, 19 nt, Measles virus
ucacaugaugucacccaga

SEQ ID NO: 3085213 - RNA, 12 nt, Measles virus
augacagccaga

SEQ ID NO: 3085214 - RNA, 15 nt, Measles virus
gacauacaucugaca

SEQ ID NO: 3085215 - RNA, 14 nt, Measles virus
uacaaaaccaacca

SEQ ID NO: 3085216 - RNA, 18 nt, Measles virus
cagaacccagaccccggc

SEQ ID NO: 3085217 - RNA, 18 nt, Measles virus
ccucucaucucacagagg

SEQ ID NO: 3085218 - RNA, 15 nt, Measles virus
ccacagcucccggga

SEQ ID NO: 3085219 - RNA, 22 nt, Measles virus
auaacaguagaacucagaggug

SEQ ID NO: 3085220 - RNA, 20 nt, Measles virus
caaaacagccuuggccaaaa

SEQ ID NO: 3085221 - RNA, 18 nt, Measles virus
auaggaaggaugaaugcu

SEQ ID NO: 3085222 - RNA, 16 nt, Measles virus
cacgucgacacagagu

SEQ ID NO: 3085223 - RNA, 13 nt, Measles virus
cugaagaacucau

SEQ ID NO: 3085224 - RNA, 15 nt, Measles virus
augcaaugacccaga

SEQ ID NO: 3085225 - RNA, 13 nt, Measles virus
agagagcagagga

SEQ ID NO: 3085226 - RNA, 17 nt, Measles virus
ugcguccuccucguggg

SEQ ID NO: 3085227 - RNA, 17 nt, Measles virus
ugagggaggacaucaag

SEQ ID NO: 3085228 - RNA, 17 nt, Measles virus
ccaaacccgccggcccc

SEQ ID NO: 3085229 - RNA, 20 nt, Measles virus
agagguguuaucgcugacaa

SEQ ID NO: 3085230 - RNA, 19 nt, Measles virus
uggagacaugcuuccagca

SEQ ID NO: 3085231 - RNA, 18 nt, Measles virus
cccuaggcguugccacag

SEQ ID NO: 3085232 - RNA, 17 nt, Measles virus
caugcuuccagcaggcg

SEQ ID NO: 3085233 - RNA, 21 nt, Measles virus
ugcccaauauaacucuccuca

SEQ ID NO: 3085234 - RNA, 19 nt, Measles virus
uacgauccucccaagggaa

SEQ ID NO: 3085235 - RNA, 20 nt, Measles virus
gccaaccaaccauccacucc

SEQ ID NO: 3085236 - RNA, 16 nt, Measles virus
gaaugcuuuauguaca

SEQ ID NO: 3085237 - RNA, 15 nt, Measles virus
cccugggggaccccc

SEQ ID NO: 3085238 - RNA, 17 nt, Measles virus
caguaacggcugcugaa

SEQ ID NO: 3085239 - RNA, 23 nt, Measles virus
gcuccgaacacagaccaccaacc

SEQ ID NO: 3085240 - RNA, 15 nt, Measles virus
gccaccaccagccau

SEQ ID NO: 3085241 - RNA, 11 nt, Measles virus
ucaucaagcaa

SEQ ID NO: 3085242 - RNA, 22 nt, Measles virus
uccagcaggcguguaaggguaa

SEQ ID NO: 3085243 - RNA, 19 nt, Measles virus
cauaaugacagccagaagg

SEQ ID NO: 3085244 - RNA, 20 nt, Measles virus
auuugcaauauauuaaagaa

SEQ ID NO: 3085245 - RNA, 20 nt, Measles virus
ccaaucugcguccuccucgu

SEQ ID NO: 3085246 - RNA, 19 nt, Measles virus
cuccaucgugcagccaucu

SEQ ID NO: 3085247 - RNA, 18 nt, Measles virus
uggccgucgaggaagcca

SEQ ID NO: 3085248 - RNA, 22 nt, Measles virus
ccaaucaguuccuagcugucuc

SEQ ID NO: 3085249 - RNA, 17 nt, Measles virus
auuaagaagcagaucaa

SEQ ID NO: 3085250 - RNA, 17 nt, Measles virus
agauccacgagcuccug

SEQ ID NO: 3085251 - RNA, 18 nt, Measles virus
aacccgcgcaccccagcc

SEQ ID NO: 3085252 - RNA, 13 nt, Measles virus
augucgcuguccc

SEQ ID NO: 3085253 - RNA, 19 nt, Measles virus
caacauguauauuaccuga

SEQ ID NO: 3085254 - RNA, 15 nt, Measles virus
cccagccaccgacaa

SEQ ID NO: 3085255 - RNA, 19 nt, Measles virus
uccuccucgugggaccccc

SEQ ID NO: 3085256 - RNA, 21 nt, Measles virus
acagccagaaggcccggacaa

SEQ ID NO: 3085257 - RNA, 16 nt, Measles virus
cgcccccaccccccga

SEQ ID NO: 3085258 - RNA, 17 nt, Measles virus
aggcacaccaacccccg

SEQ ID NO: 3085259 - RNA, 17 nt, Measles virus
cccaacgaccccacugc

SEQ ID NO: 3085260 - RNA, 20 nt, Measles virus
ucagcauauccacccuggaa

SEQ ID NO: 3085261 - RNA, 22 nt, Measles virus
gccgaaguucucaagaagcccg

SEQ ID NO: 3085262 - RNA, 19 nt, Measles virus
guugaacuccggaacccua

SEQ ID NO: 3085263 - RNA, 18 nt, Measles virus
ucagacaagcagggcagg

SEQ ID NO: 3085264 - RNA, 14 nt, Measles virus
uaaagaaaacuuug

SEQ ID NO: 3085265 - RNA, 17 nt, Measles virus
gaccaagcgagaggcca

SEQ ID NO: 3085266 - RNA, 16 nt, Measles virus
agccucagcaccaauc

SEQ ID NO: 3085267 - RNA, 15 nt, Measles virus
aguuccuagcugucu

SEQ ID NO: 3085268 - RNA, 17 nt, Measles virus
cuugaucggguugcuag

SEQ ID NO: 3085269 - RNA, 18 nt, Measles virus
ugagcuuaaaaucaaaau

SEQ ID NO: 3085270 - RNA, 18 nt, Measles virus
guuccuagcugucucaaa

SEQ ID NO: 3085271 - RNA, 18 nt, Measles virus
gugcuugcggacucagaa

SEQ ID NO: 3085272 - RNA, 18 nt, Measles virus
gccagcacuuccgagaca

SEQ ID NO: 3085273 - RNA, 16 nt, Measles virus
gguucagggcuucuga

SEQ ID NO: 3085274 - RNA, 16 nt, Measles virus
caguagggccagcacu

SEQ ID NO: 3085275 - RNA, 13 nt, Measles virus
aguaucccacagc

SEQ ID NO: 3085276 - RNA, 14 nt, Measles virus
cagagauucacuga

SEQ ID NO: 3085277 - RNA, 11 nt, Measles virus
cuucagagauc

SEQ ID NO: 3085278 - RNA, 23 nt, Measles virus
ccacucaacccgaaccagcaccc

SEQ ID NO: 3085279 - RNA, 21 nt, Measles virus
ccguuauggacucgcuaucug

SEQ ID NO: 3085280 - RNA, 14 nt, Measles virus
aguuguccuggcag

SEQ ID NO: 3085281 - RNA, 14 nt, Measles virus
cugagucugacagu

SEQ ID NO: 3085282 - RNA, 15 nt, Measles virus
caucgacaaugcaga

SEQ ID NO: 3085283 - RNA, 22 nt, Measles virus
guaguuaggcauuauuugcaau

SEQ ID NO: 3085284 - RNA, 23 nt, Measles virus
caccaggcggcccaagcacagaa

SEQ ID NO: 3085285 - RNA, 19 nt, Measles virus
agccaccgacaauccaaga

SEQ ID NO: 3085286 - RNA, 21 nt, Measles virus
ucugagcuugaucggguugcu

SEQ ID NO: 3085287 - RNA, 14 nt, Measles virus
cugucuuacagccu

SEQ ID NO: 3085288 - RNA, 19 nt, Measles virus
cugcccuagguaguuaggc

SEQ ID NO: 3085289 - RNA, 23 nt, Measles virus
uuaugacucguuccagccaucaa

SEQ ID NO: 3085290 - RNA, 16 nt, Measles virus
gguuacucuggaggag

SEQ ID NO: 3085291 - RNA, 13 nt, Measles virus
cacagcugcucag

SEQ ID NO: 3085292 - RNA, 20 nt, Measles virus
caaggccaccaccagccauc

SEQ ID NO: 3085293 - RNA, 15 nt, Measles virus
cauacaucugacagg

SEQ ID NO: 3085294 - RNA, 19 nt, Measles virus
ccccucauaaugacagcca

SEQ ID NO: 3085295 - RNA, 18 nt, Measles virus
ggaauccccucaagaaau

SEQ ID NO: 3085296 - RNA, 14 nt, Measles virus
cgacagccagcauc

SEQ ID NO: 3085297 - RNA, 20 nt, Measles virus
gaccaaaacggguuuucuga

SEQ ID NO: 3085298 - RNA, 16 nt, Measles virus
agucaauuaagaagca

SEQ ID NO: 3085299 - RNA, 16 nt, Measles virus
gaggugcuuuccuuaa

SEQ ID NO: 3085300 - RNA, 19 nt, Measles virus
uccacacagccgccagcca

SEQ ID NO: 3085301 - RNA, 18 nt, Measles virus
caacgagaccgaauaaau

SEQ ID NO: 3085302 - RNA, 16 nt, Measles virus
auuauguuuacagccc

SEQ ID NO: 3085303 - RNA, 18 nt, Measles virus
gcaaguguggacaccagg

SEQ ID NO: 3085304 - RNA, 20 nt, Measles virus
ugcggagauauccauccagg

SEQ ID NO: 3085305 - RNA, 13 nt, Measles virus
cgaauaaaugccu

SEQ ID NO: 3085306 - RNA, 17 nt, Measles virus
ugcaacccaaugugcuc

SEQ ID NO: 3085307 - RNA, 15 nt, Measles virus
acauccuaagggaag

SEQ ID NO: 3085308 - RNA, 18 nt, Measles virus
gaccacccugggccacca

SEQ ID NO: 3085309 - RNA, 16 nt, Measles virus
ccagaaggcccggaca

SEQ ID NO: 3085310 - RNA, 15 nt, Measles virus
ucugcguccuccucg

SEQ ID NO: 3085311 - RNA, 16 nt, Measles virus
gcaaccaccgcaucca

SEQ ID NO: 3085312 - RNA, 18 nt, Measles virus
agucccaaccucuucacu

SEQ ID NO: 3085313 - RNA, 18 nt, Measles virus
uacugggcaucuuagaga

SEQ ID NO: 3085314 - RNA, 22 nt, Measles virus
cgagauucaagguuagucccaa

SEQ ID NO: 3085315 - RNA, 19 nt, Measles virus
uuauuugcaauauauuaaa

SEQ ID NO: 3085316 - RNA, 15 nt, Measles virus
cauaucacucacucu

SEQ ID NO: 3085317 - RNA, 13 nt, Measles virus
auauuaaagaaaa

SEQ ID NO: 3085318 - RNA, 13 nt, Measles virus
cacuuaaugcaau

SEQ ID NO: 3085319 - RNA, 17 nt, Measles virus
aggaccagaacaacauc

SEQ ID NO: 3085320 - RNA, 23 nt, Measles virus
ugacuaucccgccaaugaagaac

SEQ ID NO: 3085321 - RNA, 13 nt, Measles virus
cauacuugccaua

SEQ ID NO: 3085322 - RNA, 18 nt, Measles virus
agugaaccgaucacauga

SEQ ID NO: 3085323 - RNA, 19 nt, Measles virus
auccagccggcuagaggag

SEQ ID NO: 3085324 - RNA, 11 nt, Measles virus
gagcucagccg

SEQ ID NO: 3085325 - RNA, 14 nt, Measles virus
aacccagaccccgg

SEQ ID NO: 3085326 - RNA, 20 nt, Measles virus
gaaaauacgaaguuucuauu

SEQ ID NO: 3085327 - RNA, 15 nt, Measles virus
gaccuuguugcuaua

SEQ ID NO: 3085328 - RNA, 18 nt, Measles virus
agcacccucucaggagga

SEQ ID NO: 3085329 - RNA, 23 nt, Measles virus
acucaauuccccacccccaaagg

SEQ ID NO: 3085330 - RNA, 17 nt, Measles virus
gaaauucaucucugaca

SEQ ID NO: 3085331 - RNA, 18 nt, Measles virus
ugcugccgaucacugccc

SEQ ID NO: 3085332 - RNA, 19 nt, Measles virus
acugagaugaggucaguga

SEQ ID NO: 3085333 - RNA, 18 nt, Measles virus
cagccaucaguuccucaa

SEQ ID NO: 3085334 - RNA, 13 nt, Measles virus
caagucuccucuu

SEQ ID NO: 3085335 - RNA, 15 nt, Measles virus
agccauggcagcaug

SEQ ID NO: 3085336 - RNA, 22 nt, Measles virus
uagggcucaaauugcucagaua

SEQ ID NO: 3085337 - RNA, 16 nt, Measles virus
caggggucagggaaag

SEQ ID NO: 3085338 - RNA, 16 nt, Measles virus
uccggguuugggggcu

SEQ ID NO: 3085339 - RNA, 17 nt, Measles virus
acaaggaagauccguga

SEQ ID NO: 3085340 - RNA, 14 nt, Measles virus
caccaccagccauc

SEQ ID NO: 3085341 - RNA, 14 nt, Measles virus
cugcaacugaggga

SEQ ID NO: 3085342 - RNA, 12 nt, Measles virus
guccucugcucc

SEQ ID NO: 3085343 - RNA, 14 nt, Measles virus
gacucguuccagcc

SEQ ID NO: 3085344 - RNA, 19 nt, Measles virus
aggcuccgaauugagggag

SEQ ID NO: 3085345 - RNA, 22 nt, Measles virus
gccuucuacaaagacaacccac

SEQ ID NO: 3085346 - RNA, 13 nt, Measles virus
caaaggagccaac

SEQ ID NO: 3085347 - RNA, 17 nt, Measles virus
cgaauuuugaugaguca

SEQ ID NO: 3085348 - RNA, 19 nt, Measles virus
gauaucaaaggagccaacg

SEQ ID NO: 3085349 - RNA, 19 nt, Measles virus
auguguauuggcugacuau

SEQ ID NO: 3085350 - RNA, 19 nt, Measles virus
ucuucucgaagggaccaaa

SEQ ID NO: 3085351 - RNA, 16 nt, Measles virus
ggguugaacaugcugu

SEQ ID NO: 3085352 - RNA, 22 nt, Measles virus
cagaccacccugggccaccagc

SEQ ID NO: 3085353 - RNA, 19 nt, Measles virus
gacaccucagagauucacu

SEQ ID NO: 3085354 - RNA, 20 nt, Measles virus
cccgauccggcgggcagcca

SEQ ID NO: 3085355 - RNA, 22 nt, Measles virus
uaucgcugacaaucaagcaaaa

SEQ ID NO: 3085356 - RNA, 17 nt, Measles virus
cuggugccgucacuucu

SEQ ID NO: 3085357 - RNA, 20 nt, Measles virus
gagugggcaccauugaagga

SEQ ID NO: 3085358 - RNA, 14 nt, Measles virus
uuauaaacaaugug

SEQ ID NO: 3085359 - RNA, 20 nt, Measles virus
cccgaccagacccagcaccc

SEQ ID NO: 3085360 - RNA, 16 nt, Measles virus
aaugaugaccaaggac

SEQ ID NO: 3085361 - RNA, 18 nt, Measles virus
auaaaugccuucuacaaa

SEQ ID NO: 3085362 - RNA, 12 nt, Measles virus
acucuggaggag

SEQ ID NO: 3085363 - RNA, 15 nt, Measles virus
cuggaggccagggca

SEQ ID NO: 3085364 - RNA, 12 nt, Measles virus
acucuccaaaca

SEQ ID NO: 3085365 - RNA, 13 nt, Measles virus
aagggagaaguug

SEQ ID NO: 3085366 - RNA, 17 nt, Measles virus
ccaagcgagaggccagc

SEQ ID NO: 3085367 - RNA, 22 nt, Measles virus
guacagcagggcucaaugaaaa

SEQ ID NO: 3085368 - RNA, 19 nt, Measles virus
aguggacacccgaaucugg

SEQ ID NO: 3085369 - RNA, 14 nt, Measles virus
uacccgaugagucc

SEQ ID NO: 3085370 - RNA, 18 nt, Measles virus
cccagcacccagccaccg

SEQ ID NO: 3085371 - RNA, 15 nt, Measles virus
caucucacagaggug

SEQ ID NO: 3085372 - RNA, 16 nt, Measles virus
agcaguaaagggucag

SEQ ID NO: 3085373 - RNA, 16 nt, Measles virus
acucucaauguuccuc

SEQ ID NO: 3085374 - RNA, 13 nt, Measles virus
ggccgagcccauc

SEQ ID NO: 3085375 - RNA, 22 nt, Measles virus
gagcccaucggcucacuggccg

SEQ ID NO: 3085376 - RNA, 15 nt, Measles virus
ucaucgacaaugcag

SEQ ID NO: 3085377 - RNA, 23 nt, Measles virus
ccuuagacagauccucucccccc

SEQ ID NO: 3085378 - RNA, 18 nt, Measles virus
ccacccugggccaccagc

SEQ ID NO: 3085379 - RNA, 13 nt, Measles virus
caugccucucagc

SEQ ID NO: 3085380 - RNA, 19 nt, Measles virus
gccauaggaggagacacac

SEQ ID NO: 3085381 - RNA, 23 nt, Measles virus
auggacucgcuaucugucaacca

SEQ ID NO: 3085382 - RNA, 16 nt, Measles virus
ugacaggggagauuuu

SEQ ID NO: 3085383 - RNA, 21 nt, Measles virus
caaccagaucuuauacccuga

SEQ ID NO: 3085384 - RNA, 20 nt, Measles virus
cggaccaguuccagaggaca

SEQ ID NO: 3085385 - RNA, 15 nt, Measles virus
ccaggcaucaagcac

SEQ ID NO: 3085386 - RNA, 17 nt, Measles virus
augagacucugaugaaa

SEQ ID NO: 3085387 - RNA, 21 nt, Measles virus
agcgagaggccagccagcagc

SEQ ID NO: 3085388 - RNA, 13 nt, Measles virus
agccucagcacca

SEQ ID NO: 3085389 - RNA, 22 nt, Measles virus
caucagggccaggugcaccugc

SEQ ID NO: 3085390 - RNA, 24 nt, Measles virus
uacaaugugucaucuauagucacu

SEQ ID NO: 3085391 - RNA, 13 nt, Measles virus
agauccacagcaa

SEQ ID NO: 3085392 - RNA, 20 nt, Measles virus
aguggagccuaccuccauga

SEQ ID NO: 3085393 - RNA, 19 nt, Measles virus
cacuuaaugcaaugaccca

SEQ ID NO: 3085394 - RNA, 19 nt, Measles virus
cugggccaccagcucccag

SEQ ID NO: 3085395 - RNA, 18 nt, Measles virus
ggcaguuuugcagccauc

SEQ ID NO: 3085396 - RNA, 22 nt, Measles virus
aucccagaauaaugaagaaggg

SEQ ID NO: 3085397 - RNA, 17 nt, Measles virus
cccacuaacccuccuca

SEQ ID NO: 3085398 - RNA, 13 nt, Measles virus
agauuuggcuguu

SEQ ID NO: 3085399 - RNA, 22 nt, Measles virus
agccugaaagaaaaggagauca

SEQ ID NO: 3085400 - RNA, 18 nt, Measles virus
gcaaccgaaccagagucc

SEQ ID NO: 3085401 - RNA, 20 nt, Measles virus
auucgcagcccucugucaca

SEQ ID NO: 3085402 - RNA, 16 nt, Measles virus
cucaaauugcucagau

SEQ ID NO: 3085403 - RNA, 17 nt, Measles virus
ggacagcugcugaagga

SEQ ID NO: 3085404 - RNA, 14 nt, Measles virus
ccagaaucaagacu

SEQ ID NO: 3085405 - RNA, 14 nt, Measles virus
aacccuccucacac

SEQ ID NO: 3085406 - RNA, 14 nt, Measles virus
ccaucaccccgcaa

SEQ ID NO: 3085407 - RNA, 20 nt, Measles virus
ccagagggagcccccaacca

SEQ ID NO: 3085408 - RNA, 17 nt, Measles virus
cuaaucugagcaguaaa

SEQ ID NO: 3085409 - RNA, 18 nt, Measles virus
uguuaucgcugacaauca

SEQ ID NO: 3085410 - RNA, 15 nt, Measles virus
cucguuccagccauc

SEQ ID NO: 3085411 - RNA, 22 nt, Measles virus
acuccuuagacagauccucucc

SEQ ID NO: 3085412 - RNA, 18 nt, Measles virus
caguucgggucucagcaa

SEQ ID NO: 3085413 - RNA, 21 nt, Measles virus
auuaagaagcagaucaacagg

SEQ ID NO: 3085414 - RNA, 15 nt, Measles virus
cccaguagggccagc

SEQ ID NO: 3085415 - RNA, 15 nt, Measles virus
ccaugccucucagca

SEQ ID NO: 3085416 - RNA, 23 nt, Measles virus
acaaguugguaugucaagaccag

SEQ ID NO: 3085417 - RNA, 11 nt, Measles virus
cggccagaagc

SEQ ID NO: 3085418 - RNA, 20 nt, Measles virus
gaaccaauuagagaugcacu

SEQ ID NO: 3085419 - RNA, 14 nt, Measles virus
ucuauucccagcuu

SEQ ID NO: 3085420 - RNA, 23 nt, Measles virus
auccaggcaguuuugcagccauc

SEQ ID NO: 3085421 - RNA, 19 nt, Measles virus
ccucauaaugacagccaga

SEQ ID NO: 3085422 - RNA, 23 nt, Measles virus
guuugaaguagggguuaucagaa

SEQ ID NO: 3085423 - RNA, 21 nt, Measles virus
cgcauccccacagcucccggg

SEQ ID NO: 3085424 - RNA, 11 nt, Measles virus
caugcuuccag

SEQ ID NO: 3085425 - RNA, 16 nt, Measles virus
acgcuuacagccugga

SEQ ID NO: 3085426 - RNA, 13 nt, Measles virus
auuaaugcccaau

SEQ ID NO: 3085427 - RNA, 19 nt, Measles virus
cccgauaguuaccaauaag

SEQ ID NO: 3085428 - RNA, 17 nt, Measles virus
aaacuuagggugcaaga

SEQ ID NO: 3085429 - RNA, 18 nt, Measles virus
guugggaaugucaucaag

SEQ ID NO: 3085430 - RNA, 18 nt, Measles virus
ccagcaggcguguaaggg

SEQ ID NO: 3085431 - RNA, 22 nt, Measles virus
caugaugucacccagacaucag

SEQ ID NO: 3085432 - RNA, 15 nt, Measles virus
ugaagugggccugag

SEQ ID NO: 3085433 - RNA, 14 nt, Measles virus
gaccccggcccgcg

SEQ ID NO: 3085434 - RNA, 15 nt, Measles virus
ugccucucagcaauu

SEQ ID NO: 3085435 - RNA, 15 nt, Measles virus
accgcauccagcauc

SEQ ID NO: 3085436 - RNA, 14 nt, Measles virus
uaaucaacacauug

SEQ ID NO: 3085437 - RNA, 15 nt, Measles virus
cugaaaaugucagga

SEQ ID NO: 3085438 - RNA, 20 nt, Measles virus
cagccaucuacaccgcagag

SEQ ID NO: 3085439 - RNA, 15 nt, Measles virus
agcaaagugauugcc

SEQ ID NO: 3085440 - RNA, 18 nt, Measles virus
cucagauaacagccggca

SEQ ID NO: 3085441 - RNA, 17 nt, Measles virus
uacaacaacaccccacu

SEQ ID NO: 3085442 - RNA, 21 nt, Measles virus
cacaacccgcgcaccccagcc

SEQ ID NO: 3085443 - RNA, 16 nt, Measles virus
ccagcacccagccacc

SEQ ID NO: 3085444 - RNA, 14 nt, Measles virus
uggaggccagggca

SEQ ID NO: 3085445 - RNA, 13 nt, Measles virus
ggccaccaccagc

SEQ ID NO: 3085446 - RNA, 15 nt, Measles virus
caguaucccacagcc

SEQ ID NO: 3085447 - RNA, 15 nt, Measles virus
caccagcucccagac

SEQ ID NO: 3085448 - RNA, 17 nt, Measles virus
aaggugucagcuuccag

SEQ ID NO: 3085449 - RNA, 17 nt, Measles virus
ucccgaccugaaaccca

SEQ ID NO: 3085450 - RNA, 15 nt, Measles virus
ugacaccacucuuca

SEQ ID NO: 3085451 - RNA, 14 nt, Measles virus
aacugaugacauac

SEQ ID NO: 3085452 - RNA, 16 nt, Measles virus
aucaguaucccacagc

SEQ ID NO: 3085453 - RNA, 18 nt, Measles virus
cgagcaucaggucaagga

SEQ ID NO: 3085454 - RNA, 21 nt, Measles virus
uccggaacccuaauccugccc

SEQ ID NO: 3085455 - RNA, 14 nt, Measles virus
ccagagagaaucaa

SEQ ID NO: 3085456 - RNA, 15 nt, Measles virus
caagcgagaggccag

SEQ ID NO: 3085457 - RNA, 18 nt, Measles virus
ugcauccgggcucucaag

SEQ ID NO: 3085458 - RNA, 19 nt, Measles virus
acccgaugaguccucugcu

SEQ ID NO: 3085459 - RNA, 22 nt, Measles virus
cccgauccggcgggcagccacu

SEQ ID NO: 3085460 - RNA, 18 nt, Measles virus
ugaaaauacgaaguuucu

SEQ ID NO: 3085461 - RNA, 16 nt, Measles virus
aaaauacgaaguuucu

SEQ ID NO: 3085462 - RNA, 22 nt, Measles virus
caaaaaggaaaggccacaaccc

SEQ ID NO: 3085463 - RNA, 13 nt, Measles virus
acacaugagcagu

SEQ ID NO: 3085464 - RNA, 15 nt, Measles virus
aaggacaccucucaa

SEQ ID NO: 3085465 - RNA, 12 nt, Measles virus
cggaccaagcga

SEQ ID NO: 3085466 - RNA, 14 nt, Measles virus
agaucucaaagaaa

SEQ ID NO: 3085467 - RNA, 14 nt, Measles virus
accagacccagcac

SEQ ID NO: 3085468 - RNA, 19 nt, Measles virus
caagacaucaaaacagccu

SEQ ID NO: 3085469 - RNA, 18 nt, Measles virus
uauauuaaagaaaacuuu

SEQ ID NO: 3085470 - RNA, 15 nt, Measles virus
cccggugcccacagg

SEQ ID NO: 3085471 - RNA, 15 nt, Measles virus
cuuaccugccaaccc

SEQ ID NO: 3085472 - RNA, 22 nt, Measles virus
auuagacuccaucgugcagcca

SEQ ID NO: 3085473 - RNA, 18 nt, Measles virus
agcaccgccuaaaaaacg

SEQ ID NO: 3085474 - RNA, 13 nt, Measles virus
accacugcuuuac

SEQ ID NO: 3085475 - RNA, 15 nt, Measles virus
acuguuaacucucca

SEQ ID NO: 3085476 - RNA, 18 nt, Measles virus
auguggaaguugggaaug

SEQ ID NO: 3085477 - RNA, 19 nt, Measles virus
gacucggccaucaccccgc

SEQ ID NO: 3085478 - RNA, 21 nt, Measles virus
gagguguuaucgcugacaauc

SEQ ID NO: 3085479 - RNA, 17 nt, Measles virus
uugccacagcugcucag

SEQ ID NO: 3085480 - RNA, 15 nt, Measles virus
gaaccgaucacauga

SEQ ID NO: 3085481 - RNA, 20 nt, Measles virus
cugaugacucuccuugauga

SEQ ID NO: 3085482 - RNA, 16 nt, Measles virus
gcacacccaccccaca

SEQ ID NO: 3085483 - RNA, 15 nt, Measles virus
ccacccugggccacc

SEQ ID NO: 3085484 - RNA, 15 nt, Measles virus
gaggccagccagcag

SEQ ID NO: 3085485 - RNA, 19 nt, Measles virus
gcccccccggugcccacag

SEQ ID NO: 3085486 - RNA, 19 nt, Measles virus
caccugcaaggaagaggag

SEQ ID NO: 3085487 - RNA, 16 nt, Measles virus
accagacccagcaccc

SEQ ID NO: 3085488 - RNA, 12 nt, Measles virus
gaaccagcaccc

SEQ ID NO: 3085489 - RNA, 18 nt, Measles virus
ggcggcccaagcacagaa

SEQ ID NO: 3085490 - RNA, 19 nt, Measles virus
ugcugcucuccaaagggaa

SEQ ID NO: 3085491 - RNA, 12 nt, Measles virus
gccgauggcaga

SEQ ID NO: 3085492 - RNA, 14 nt, Measles virus
cagaacaacauccg

SEQ ID NO: 3085493 - RNA, 14 nt, Measles virus
gaauacaggagacu

SEQ ID NO: 3085494 - RNA, 19 nt, Measles virus
uagagaugcacuuaaugca

SEQ ID NO: 3085495 - RNA, 12 nt, Measles virus
agaacucaugaa

SEQ ID NO: 3085496 - RNA, 18 nt, Measles virus
ugaaagaaaaggagauca

SEQ ID NO: 3085497 - RNA, 21 nt, Measles virus
ccccgauccggcgggcagcca

SEQ ID NO: 3085498 - RNA, 15 nt, Measles virus
cuggcugucucagga

SEQ ID NO: 3085499 - RNA, 20 nt, Measles virus
caaaauugcuucaggauucg

SEQ ID NO: 3085500 - RNA, 17 nt, Measles virus
gcucaaauugcucagau

SEQ ID NO: 3085501 - RNA, 15 nt, Measles virus
ccucucaggaggaga

SEQ ID NO: 3085502 - RNA, 13 nt, Measles virus
ggcaccauugaag

SEQ ID NO: 3085503 - RNA, 16 nt, Measles virus
auagaccuuauguuuu

SEQ ID NO: 3085504 - RNA, 15 nt, Measles virus
cacgucgacacagag

SEQ ID NO: 3085505 - RNA, 22 nt, Measles virus
ucaggauuuauuuaacauagaa

SEQ ID NO: 3085506 - RNA, 23 nt, Measles virus
auuagaagcacaggcaaaaugag

SEQ ID NO: 3085507 - RNA, 17 nt, Measles virus
gcaacuggaaggccccu

SEQ ID NO: 3085508 - RNA, 14 nt, Measles virus
acguacagcagggc

SEQ ID NO: 3085509 - RNA, 15 nt, Measles virus
ugccacagcugcuca

SEQ ID NO: 3085510 - RNA, 22 nt, Measles virus
guucaaccugucuuacagccug

SEQ ID NO: 3085511 - RNA, 19 nt, Measles virus
ugugucagaacaucaagca

SEQ ID NO: 3085512 - RNA, 20 nt, Measles virus
cccgcgcaccccagccccga

SEQ ID NO: 3085513 - RNA, 14 nt, Measles virus
aucuaaucucaaac

SEQ ID NO: 3085514 - RNA, 12 nt, Measles virus
aggcccccaggg

SEQ ID NO: 3085515 - RNA, 18 nt, Measles virus
uaaucaagacccugacaa

SEQ ID NO: 3085516 - RNA, 16 nt, Measles virus
acuggguuacaguguu

SEQ ID NO: 3085517 - RNA, 19 nt, Measles virus
ucauuauuuggccccagcu

SEQ ID NO: 3085518 - RNA, 22 nt, Measles virus
caaucugcguccuccucguggg

SEQ ID NO: 3085519 - RNA, 20 nt, Measles virus
auuauuaacuugggaguuua

SEQ ID NO: 3085520 - RNA, 16 nt, Measles virus
gacagguggugcaacc

SEQ ID NO: 3085521 - RNA, 19 nt, Measles virus
caaggcgauuggcccuggg

SEQ ID NO: 3085522 - RNA, 17 nt, Measles virus
caaaaaaaggcccccag

SEQ ID NO: 3085523 - RNA, 19 nt, Measles virus
auuugcaauauauuaaaga

SEQ ID NO: 3085524 - RNA, 15 nt, Measles virus
gacccagcacccagc

SEQ ID NO: 3085525 - RNA, 14 nt, Measles virus
uuaaagaaaacuuu

SEQ ID NO: 3085526 - RNA, 16 nt, Measles virus
gacccagcacccagcc

SEQ ID NO: 3085527 - RNA, 16 nt, Measles virus
aacuuugaaaauacga

SEQ ID NO: 3085528 - RNA, 21 nt, Measles virus
agacuccaucgugcagccauc

SEQ ID NO: 3085529 - RNA, 16 nt, Measles virus
gauaaucagaagauaa

SEQ ID NO: 3085530 - RNA, 14 nt, Measles virus
uauucccagcuuug

SEQ ID NO: 3085531 - RNA, 15 nt, Measles virus
cacagccgccagcca

SEQ ID NO: 3085532 - RNA, 22 nt, Measles virus
uggcugucucaggaguccccaa

SEQ ID NO: 3085533 - RNA, 17 nt, Measles virus
acuccggaacccuaauc

SEQ ID NO: 3085534 - RNA, 11 nt, Measles virus
uugccacagcu

SEQ ID NO: 3085535 - RNA, 21 nt, Measles virus
gucccucacgcuuacagccug

SEQ ID NO: 3085536 - RNA, 19 nt, Measles virus
uacaaccuaaauccauuau

SEQ ID NO: 3085537 - RNA, 14 nt, Measles virus
cauuggugaugaag

SEQ ID NO: 3085538 - RNA, 16 nt, Measles virus
ucaaggacgugcugac

SEQ ID NO: 3085539 - RNA, 22 nt, Measles virus
ggcaguucgggucucagcaaac

SEQ ID NO: 3085540 - RNA, 20 nt, Measles virus
ccccgaccagacccagcacc

SEQ ID NO: 3085541 - RNA, 21 nt, Measles virus
auuucagcaacugcauggugg

SEQ ID NO: 3085542 - RNA, 16 nt, Measles virus
uaguaagaauccaggc

SEQ ID NO: 3085543 - RNA, 14 nt, Measles virus
cacgcuuacagccu

SEQ ID NO: 3085544 - RNA, 15 nt, Measles virus
gcagugcccagcaau

SEQ ID NO: 3085545 - RNA, 13 nt, Measles virus
gcuauccuggagu

SEQ ID NO: 3085546 - RNA, 15 nt, Measles virus
cccagcaauacccga

SEQ ID NO: 3085547 - RNA, 20 nt, Measles virus
gaggacagcugcugaaggaa

SEQ ID NO: 3085548 - RNA, 13 nt, Measles virus
acaacccacaucc

SEQ ID NO: 3085549 - RNA, 17 nt, Measles virus
uccugaaacuccaaucc

SEQ ID NO: 3085550 - RNA, 17 nt, Measles virus
acuggagccgauggcag

SEQ ID NO: 3085551 - RNA, 17 nt, Measles virus
ucuauucccagcuuugu

SEQ ID NO: 3085552 - RNA, 17 nt, Measles virus
uuaggcauuauuugcaa

SEQ ID NO: 3085553 - RNA, 17 nt, Measles virus
cgggaacuucaggagaa

SEQ ID NO: 3085554 - RNA, 16 nt, Measles virus
ucaagacucauccagu

SEQ ID NO: 3085555 - RNA, 13 nt, Measles virus
cacagaccaccaa

SEQ ID NO: 3085556 - RNA, 13 nt, Measles virus
cauccgcggucag

SEQ ID NO: 3085557 - RNA, 17 nt, Measles virus
cacagccgccagccaac

SEQ ID NO: 3085558 - RNA, 13 nt, Measles virus
caaguaggagaca

SEQ ID NO: 3085559 - RNA, 17 nt, Measles virus
cagccccgacacaaggc

SEQ ID NO: 3085560 - RNA, 17 nt, Measles virus
ugggauggugggcaugg

SEQ ID NO: 3085561 - RNA, 16 nt, Measles virus
ugaaacacagauuucc

SEQ ID NO: 3085562 - RNA, 20 nt, Measles virus
caggcaguucgggucucagc

SEQ ID NO: 3085563 - RNA, 20 nt, Measles virus
cccuaggcguugccacagcu

SEQ ID NO: 3085564 - RNA, 16 nt, Measles virus
aaccagaguccagacc

SEQ ID NO: 3085565 - RNA, 14 nt, Measles virus
ccgagcacuggccg

SEQ ID NO: 3085566 - RNA, 16 nt, Measles virus
ugcaagaucauccaca

SEQ ID NO: 3085567 - RNA, 17 nt, Measles virus
gaccgcagugcccagca

SEQ ID NO: 3085568 - RNA, 15 nt, Measles virus
ccagacuugaagcag

SEQ ID NO: 3085569 - RNA, 18 nt, Measles virus
guuucuauucccagcuuu

SEQ ID NO: 3085570 - RNA, 21 nt, Measles virus
acuggaaaucauuugcuggag

SEQ ID NO: 3085571 - RNA, 21 nt, Measles virus
cgaggaagccauggcagcaug

SEQ ID NO: 3085572 - RNA, 17 nt, Measles virus
aggugacccaaccgcag

SEQ ID NO: 3085573 - RNA, 11 nt, Measles virus
gcgaaccugau

SEQ ID NO: 3085574 - RNA, 15 nt, Measles virus
ggauaacaggauucc

SEQ ID NO: 3085575 - RNA, 17 nt, Measles virus
aaaaaacggauucucca

SEQ ID NO: 3085576 - RNA, 15 nt, Measles virus
cuguuaacucuccaa

SEQ ID NO: 3085577 - RNA, 18 nt, Measles virus
cuagcugucucaaaggga

SEQ ID NO: 3085578 - RNA, 23 nt, Measles virus
ccaggcaguuuugcagccaucag

SEQ ID NO: 3085579 - RNA, 12 nt, Measles virus
ucugucaaccag

SEQ ID NO: 3085580 - RNA, 18 nt, Measles virus
cagcaaguguggacacca

SEQ ID NO: 3085581 - RNA, 15 nt, Measles virus
uaaagggggucccaa

SEQ ID NO: 3085582 - RNA, 18 nt, Measles virus
ucagaucggucaaugcag

SEQ ID NO: 3085583 - RNA, 22 nt, Measles virus
ucaagacugagaugaggucagu

SEQ ID NO: 3085584 - RNA, 23 nt, Measles virus
cugcguccuccucgugggacccc

SEQ ID NO: 3085585 - RNA, 16 nt, Measles virus
uaaugacagccagaag

SEQ ID NO: 3085586 - RNA, 17 nt, Measles virus
ggaaccuaauagccaau

SEQ ID NO: 3085587 - RNA, 15 nt, Measles virus
ugaacucaacucuac

SEQ ID NO: 3085588 - RNA, 22 nt, Measles virus
agcaagacucuccaugcacaac

SEQ ID NO: 3085589 - RNA, 20 nt, Measles virus
caggcauacccacuagugug

SEQ ID NO: 3085590 - RNA, 13 nt, Measles virus
agauuucccacaa

SEQ ID NO: 3085591 - RNA, 11 nt, Measles virus
gugcccacagg

SEQ ID NO: 3085592 - RNA, 22 nt, Measles virus
ggagaugauauuggcuguucag

SEQ ID NO: 3085593 - RNA, 20 nt, Measles virus
aacaaguugguaugucaaga

SEQ ID NO: 3085594 - RNA, 19 nt, Measles virus
cgaggaagccauggcagca

SEQ ID NO: 3085595 - RNA, 12 nt, Measles virus
uccaaagggaau

SEQ ID NO: 3085596 - RNA, 15 nt, Measles virus
guaccugcacagaau

SEQ ID NO: 3085597 - RNA, 23 nt, Measles virus
cagccccgauccggcgggcagcc

SEQ ID NO: 3085598 - RNA, 18 nt, Measles virus
aaccaaccacaacaaugu

SEQ ID NO: 3085599 - RNA, 23 nt, Measles virus
cccgaugaguccucugcuccaag

SEQ ID NO: 3085600 - RNA, 12 nt, Measles virus
cuucaaugcaaa

SEQ ID NO: 3085601 - RNA, 14 nt, Measles virus
aggcauuauuugca

SEQ ID NO: 3085602 - RNA, 16 nt, Measles virus
ggcagaagagcaggca

SEQ ID NO: 3085603 - RNA, 24 nt, Measles virus
guucagaguguagcuucaaguagg

SEQ ID NO: 3085604 - RNA, 20 nt, Measles virus
augccucuuagccuggacag

SEQ ID NO: 3085605 - RNA, 19 nt, Measles virus
ccaaaauacacgaggauaa

SEQ ID NO: 3085606 - RNA, 17 nt, Measles virus
aaauacgaaguuucuau

SEQ ID NO: 3085607 - RNA, 17 nt, Measles virus
cacucaauuccccaccc

SEQ ID NO: 3085608 - RNA, 13 nt, Measles virus
cugggccaccagc

SEQ ID NO: 3085609 - RNA, 22 nt, Measles virus
cccagaaucaagacucauccag

SEQ ID NO: 3085610 - RNA, 12 nt, Measles virus
cuggaggccagg

SEQ ID NO: 3085611 - RNA, 14 nt, Measles virus
ccugaggacaccuc

SEQ ID NO: 3085612 - RNA, 16 nt, Measles virus
gugaaauagacaucag

SEQ ID NO: 3085613 - RNA, 17 nt, Measles virus
caagcgaccgaggugac

SEQ ID NO: 3085614 - RNA, 19 nt, Measles virus
ccuaucaggggucagggaa

SEQ ID NO: 3085615 - RNA, 21 nt, Measles virus
cacccaagagcgaucccuggg

SEQ ID NO: 3085616 - RNA, 15 nt, Measles virus
uaggcauuauuugca

SEQ ID NO: 3085617 - RNA, 18 nt, Measles virus
ggucaauucucaaacaug

SEQ ID NO: 3085618 - RNA, 18 nt, Measles virus
uucuauucccagcuuugu

SEQ ID NO: 3085619 - RNA, 20 nt, Measles virus
acccugggccaccagcuccc

SEQ ID NO: 3085620 - RNA, 23 nt, Measles virus
cacucccacgacuggagccgaug

SEQ ID NO: 3085621 - RNA, 13 nt, Measles virus
aaucggccagaag

SEQ ID NO: 3085622 - RNA, 15 nt, Measles virus
ugucagcuuccagcu

SEQ ID NO: 3085623 - RNA, 16 nt, Measles virus
uaucaaugaagaccuu

SEQ ID NO: 3085624 - RNA, 13 nt, Measles virus
gcgagaggccagc

SEQ ID NO: 3085625 - RNA, 18 nt, Measles virus
guccagaccacccugggc

SEQ ID NO: 3085626 - RNA, 13 nt, Measles virus
gcgcuuggaggag

SEQ ID NO: 3085627 - RNA, 21 nt, Measles virus
cagaguccagaccacccuggg

SEQ ID NO: 3085628 - RNA, 14 nt, Measles virus
ugacaaucaagcaa

SEQ ID NO: 3085629 - RNA, 22 nt, Measles virus
augcacaacucggguucaagaa

SEQ ID NO: 3085630 - RNA, 16 nt, Measles virus
cacaaugacagagauc

SEQ ID NO: 3085631 - RNA, 22 nt, Measles virus
aucaguuccuagcugucucaaa

SEQ ID NO: 3085632 - RNA, 21 nt, Measles virus
cagccccgacacaaggccacc

SEQ ID NO: 3085633 - RNA, 22 nt, Measles virus
ugucaggaaauacaugaaucag

SEQ ID NO: 3085634 - RNA, 14 nt, Measles virus
agcccucugucaca

SEQ ID NO: 3085635 - RNA, 16 nt, Measles virus
gacuuacaaaaugagg

SEQ ID NO: 3085636 - RNA, 12 nt, Measles virus
gccccccccaaa

SEQ ID NO: 3085637 - RNA, 21 nt, Measles virus
agugcguugauaacuggaaau

SEQ ID NO: 3085638 - RNA, 22 nt, Measles virus
ucacugaccuagugaaauucau

SEQ ID NO: 3085639 - RNA, 23 nt, Measles virus
gaucugacaauguaccuaaagga

SEQ ID NO: 3085640 - RNA, 15 nt, Measles virus
caucaauccucugca

SEQ ID NO: 3085641 - RNA, 13 nt, Measles virus
acaugcuuccagc

SEQ ID NO: 3085642 - RNA, 15 nt, Measles virus
auccaacuuaucaaa

SEQ ID NO: 3085643 - RNA, 13 nt, Measles virus
ucaggagucccca

SEQ ID NO: 3085644 - RNA, 19 nt, Measles virus
aaaggugucagcuuccagc

SEQ ID NO: 3085645 - RNA, 19 nt, Measles virus
ccccaaaaaaaggccccca

SEQ ID NO: 3085646 - RNA, 21 nt, Measles virus
cucgaucgagcaucaggucaa

SEQ ID NO: 3085647 - RNA, 14 nt, Measles virus
ccaccaccagccau

SEQ ID NO: 3085648 - RNA, 14 nt, Measles virus
cugcagaaggaggg

SEQ ID NO: 3085649 - RNA, 18 nt, Measles virus
uauguuuugcuggcuguu

SEQ ID NO: 3085650 - RNA, 18 nt, Measles virus
caguaucccacagccucu

SEQ ID NO: 3085651 - RNA, 13 nt, Measles virus
aggaugccaagga

SEQ ID NO: 3085652 - RNA, 14 nt, Measles virus
ugauuauaaacaau

SEQ ID NO: 3085653 - RNA, 12 nt, Measles virus
auauuaaagaaa

SEQ ID NO: 3085654 - RNA, 16 nt, Measles virus
accugcaacugaggga

SEQ ID NO: 3085655 - RNA, 18 nt, Measles virus
accuacgauacuuccagg

SEQ ID NO: 3085656 - RNA, 23 nt, Measles virus
aucgcugaaaaucuaaucucaaa

SEQ ID NO: 3085657 - RNA, 19 nt, Measles virus
gcgaccgaggugacccaac

SEQ ID NO: 3085658 - RNA, 21 nt, Measles virus
gacaccacucuucaagaucau

SEQ ID NO: 3085659 - RNA, 16 nt, Measles virus
cugcucagggcccacu

SEQ ID NO: 3085660 - RNA, 23 nt, Measles virus
caugcugugguuuauuauguuua

SEQ ID NO: 3085661 - RNA, 15 nt, Measles virus
gcaaugacccagaau

SEQ ID NO: 3085662 - RNA, 23 nt, Measles virus
cagggcuucugauguugaaacug

SEQ ID NO: 3085663 - RNA, 18 nt, Measles virus
cucaacuuaccugccaac

SEQ ID NO: 3085664 - RNA, 21 nt, Measles virus
aaugcccaauauaacucuccu

SEQ ID NO: 3085665 - RNA, 16 nt, Measles virus
cugaaaaugucaggaa

SEQ ID NO: 3085666 - RNA, 20 nt, Measles virus
cagaccacccugggccacca

SEQ ID NO: 3085667 - RNA, 15 nt, Measles virus
aucaguaucccacag

SEQ ID NO: 3085668 - RNA, 15 nt, Measles virus
ucaguaucccacagc

SEQ ID NO: 3085669 - RNA, 15 nt, Measles virus
aaagaaaacuuugaa

SEQ ID NO: 3085670 - RNA, 15 nt, Measles virus
caggaccgagccacc

SEQ ID NO: 3085671 - RNA, 13 nt, Measles virus
ucaaggagaaaau

SEQ ID NO: 3085672 - RNA, 15 nt, Measles virus
cauguuucugcuggg

SEQ ID NO: 3085673 - RNA, 11 nt, Measles virus
caaaggagaca

SEQ ID NO: 3085674 - RNA, 21 nt, Measles virus
gggagauccacgagcuccuga

SEQ ID NO: 3085675 - RNA, 21 nt, Measles virus
ugcugcucuccaaagggaaug

SEQ ID NO: 3085676 - RNA, 14 nt, Measles virus
acccaccccacaca

SEQ ID NO: 3085677 - RNA, 13 nt, Measles virus
agccaugcuggag

SEQ ID NO: 3085678 - RNA, 17 nt, Measles virus
uagguaguuaggcauua

SEQ ID NO: 3085679 - RNA, 14 nt, Measles virus
cuuaucaaauugua

SEQ ID NO: 3085680 - RNA, 12 nt, Measles virus
cagcugcucaga

SEQ ID NO: 3085681 - RNA, 17 nt, Measles virus
cuaucaggggucaggga

SEQ ID NO: 3085682 - RNA, 17 nt, Measles virus
caagaaaucuccaggca

SEQ ID NO: 3085683 - RNA, 23 nt, Measles virus
agguaguuaggcauuauuugcaa

SEQ ID NO: 3085684 - RNA, 14 nt, Measles virus
caccacucuucaag

SEQ ID NO: 3085685 - RNA, 19 nt, Measles virus
ugauuauaaacaaugugga

SEQ ID NO: 3085686 - RNA, 12 nt, Measles virus
ucugacaaugua

SEQ ID NO: 3085687 - RNA, 18 nt, Measles virus
cuggagccgauggcagaa

SEQ ID NO: 3085688 - RNA, 21 nt, Measles virus
gccacaacccgcgcaccccag

SEQ ID NO: 3085689 - RNA, 17 nt, Measles virus
aucauguuuaugaucac

SEQ ID NO: 3085690 - RNA, 18 nt, Measles virus
acacagauuucccacaag

SEQ ID NO: 3085691 - RNA, 21 nt, Measles virus
agcaacuggaaggccccuccc

SEQ ID NO: 3085692 - RNA, 20 nt, Measles virus
caaaaaggaaaggccacaac

SEQ ID NO: 3085693 - RNA, 17 nt, Measles virus
gacaggaccgagccacc

SEQ ID NO: 3085694 - RNA, 15 nt, Measles virus
ugggaaggaucccaa

SEQ ID NO: 3085695 - RNA, 17 nt, Measles virus
aucaguaucccacagcc

SEQ ID NO: 3085696 - RNA, 17 nt, Measles virus
auaggaagugcaagcua

SEQ ID NO: 3085697 - RNA, 17 nt, Measles virus
ccacuaacccuccucac

SEQ ID NO: 3085698 - RNA, 15 nt, Measles virus
ccagccagcagccga

SEQ ID NO: 3085699 - RNA, 12 nt, Measles virus
uaguuaggcauu

SEQ ID NO: 3085700 - RNA, 13 nt, Measles virus
caugcuuccagca

SEQ ID NO: 3085701 - RNA, 22 nt, Measles virus
ccaaccgacaugcgauccuggg

SEQ ID NO: 3085702 - RNA, 16 nt, Measles virus
caagauccuaacauac

SEQ ID NO: 3085703 - RNA, 21 nt, Measles virus
caccaggcggcccaagcacag

SEQ ID NO: 3085704 - RNA, 23 nt, Measles virus
agacaucagaauuaagaaaaacg

SEQ ID NO: 3085705 - RNA, 18 nt, Measles virus
aagggaccaaaagaucaa

SEQ ID NO: 3085706 - RNA, 12 nt, Measles virus
auaacuggaaau

SEQ ID NO: 3085707 - RNA, 13 nt, Measles virus
aucccacagccuc

SEQ ID NO: 3085708 - RNA, 22 nt, Measles virus
caguaucccacagccucuccaa

SEQ ID NO: 3085709 - RNA, 16 nt, Measles virus
aggugauaggaaggau

SEQ ID NO: 3085710 - RNA, 19 nt, Measles virus
accaccgcauccagcauca

SEQ ID NO: 3085711 - RNA, 12 nt, Measles virus
cucguuccagcc

SEQ ID NO: 3085712 - RNA, 18 nt, Measles virus
aggacaccucucaagcau

SEQ ID NO: 3085713 - RNA, 15 nt, Measles virus
guuccagaggacagc

SEQ ID NO: 3085714 - RNA, 23 nt, Measles virus
uaaugacagccagaaggcccgga

SEQ ID NO: 3085715 - RNA, 19 nt, Measles virus
cugucucaaagggaaacug

SEQ ID NO: 3085716 - RNA, 11 nt, Measles virus
aaaggccccca

SEQ ID NO: 3085717 - RNA, 15 nt, Measles virus
ccgaaaaccagaggg

SEQ ID NO: 3085718 - RNA, 18 nt, Measles virus
cugcucagggcccacuac

SEQ ID NO: 3085719 - RNA, 21 nt, Measles virus
ugagcuccuaaaaaagggaaa

SEQ ID NO: 3085720 - RNA, 20 nt, Measles virus
gagacaugcuuccagcaggc

SEQ ID NO: 3085721 - RNA, 22 nt, Measles virus
ccaaugguuugagcccuuucug

SEQ ID NO: 3085722 - RNA, 13 nt, Measles virus
agcagaugcaaga

SEQ ID NO: 3085723 - RNA, 23 nt, Measles virus
acacaaggccaccaccagccauc

SEQ ID NO: 3085724 - RNA, 21 nt, Measles virus
agaucgcagaauacaggagac

SEQ ID NO: 3085725 - RNA, 16 nt, Measles virus
ccagggaauguacggg

SEQ ID NO: 3085726 - RNA, 15 nt, Measles virus
acccgccggcccccc

SEQ ID NO: 3085727 - RNA, 17 nt, Measles virus
cagcaucaagcccaccu

SEQ ID NO: 3085728 - RNA, 21 nt, Measles virus
agucccucacgcuuacagccu

SEQ ID NO: 3085729 - RNA, 18 nt, Measles virus
ugaugaagguacuuauca

SEQ ID NO: 3085730 - RNA, 14 nt, Measles virus
ugcugaacucucaa

SEQ ID NO: 3085731 - RNA, 14 nt, Measles virus
ucaaggccgagccc

SEQ ID NO: 3085732 - RNA, 15 nt, Measles virus
gaacagccccgacac

SEQ ID NO: 3085733 - RNA, 16 nt, Measles virus
cgagaggccagccagc

SEQ ID NO: 3085734 - RNA, 14 nt, Measles virus
cccguugccagccg

SEQ ID NO: 3085735 - RNA, 23 nt, Measles virus
gaguccucugcuccaagaaugcc

SEQ ID NO: 3085736 - RNA, 18 nt, Measles virus
gcagaucaacaggcaaaa

SEQ ID NO: 3085737 - RNA, 18 nt, Measles virus
caggaccgagccaccugc

SEQ ID NO: 3085738 - RNA, 17 nt, Measles virus
caaccgcauccccacag

SEQ ID NO: 3085739 - RNA, 13 nt, Measles virus
cccgaaccagcac

SEQ ID NO: 3085740 - RNA, 21 nt, Measles virus
ccacauccuaagggaaguagg

SEQ ID NO: 3085741 - RNA, 12 nt, Measles virus
aauacaggagac

SEQ ID NO: 3085742 - RNA, 21 nt, Measles virus
ccaugcugaacucucaagcca

SEQ ID NO: 3085743 - RNA, 21 nt, Measles virus
gacacaaggccaccaccagcc

SEQ ID NO: 3085744 - RNA, 17 nt, Measles virus
cucgacagaacccagac

SEQ ID NO: 3085745 - RNA, 19 nt, Measles virus
ccaggacaggaccgagcca

SEQ ID NO: 3085746 - RNA, 23 nt, Measles virus
aaggcacuccacacucuggcugu

SEQ ID NO: 3085747 - RNA, 19 nt, Measles virus
ccaauauaacucuccucaa

SEQ ID NO: 3085748 - RNA, 22 nt, Measles virus
gacccccgaggaccaaccccga

SEQ ID NO: 3085749 - RNA, 13 nt, Measles virus
caccucucaagca

SEQ ID NO: 3085750 - RNA, 14 nt, Measles virus
aaagaucucaaaga

SEQ ID NO: 3085751 - RNA, 14 nt, Measles virus
gaaccagcacccaa

SEQ ID NO: 3085752 - RNA, 20 nt, Measles virus
cacagacgcgagauuggccu

SEQ ID NO: 3085753 - RNA, 12 nt, Measles virus
auaccuaccugc

SEQ ID NO: 3085754 - RNA, 23 nt, Measles virus
caacucggguucaagaagaccuu

SEQ ID NO: 3085755 - RNA, 12 nt, Measles virus
cggcccccccgg

SEQ ID NO: 3085756 - RNA, 17 nt, Measles virus
aucccugggggaccccc

SEQ ID NO: 3085757 - RNA, 18 nt, Measles virus
cagauguggcugcugaag

SEQ ID NO: 3085758 - RNA, 13 nt, Measles virus
guucaagaagacc

SEQ ID NO: 3085759 - RNA, 21 nt, Measles virus
aauacgaaguuucuauuccca

SEQ ID NO: 3085760 - RNA, 22 nt, Measles virus
cuuacagggacaucaaaauccu

SEQ ID NO: 3085761 - RNA, 16 nt, Measles virus
cccgaaccagcaccca

SEQ ID NO: 3085762 - RNA, 19 nt, Measles virus
cacggaccaagcgagaggc

SEQ ID NO: 3085763 - RNA, 22 nt, Measles virus
ggacaaugggauggccaaggau

SEQ ID NO: 3085764 - RNA, 20 nt, Measles virus
cauugcacuucaccagucca

SEQ ID NO: 3085765 - RNA, 23 nt, Measles virus
gccgucgaggaagccauggcagc

SEQ ID NO: 3085766 - RNA, 15 nt, Measles virus
gaaauacaugaauca

SEQ ID NO: 3085767 - RNA, 12 nt, Measles virus
cugggggacccc

SEQ ID NO: 3085768 - RNA, 22 nt, Measles virus
ugacccucccccugcaugcugc

SEQ ID NO: 3085769 - RNA, 15 nt, Measles virus
cauaaugacagccag

SEQ ID NO: 3085770 - RNA, 18 nt, Measles virus
cugaaaaucuaaucucaa

SEQ ID NO: 3085771 - RNA, 14 nt, Measles virus
agaacaucaagcac

SEQ ID NO: 3085772 - RNA, 18 nt, Measles virus
gaaagguccuaacaacag

SEQ ID NO: 3085773 - RNA, 15 nt, Measles virus
ccgcagugcccagca

SEQ ID NO: 3085774 - RNA, 18 nt, Measles virus
ggacagcgauccccuagg

SEQ ID NO: 3085775 - RNA, 17 nt, Measles virus
cagaguccagaccaccc

SEQ ID NO: 3085776 - RNA, 19 nt, Measles virus
augcucaagcuucagguga

SEQ ID NO: 3085777 - RNA, 15 nt, Measles virus
aagcagggcaggaga

SEQ ID NO: 3085778 - RNA, 17 nt, Measles virus
agauccgugagcuccua

SEQ ID NO: 3085779 - RNA, 18 nt, Measles virus
caaccgcauccccacagc

SEQ ID NO: 3085780 - RNA, 22 nt, Measles virus
caugccaagugaucgcugaaaa

SEQ ID NO: 3085781 - RNA, 17 nt, Measles virus
acaugggacaaaaaacu

SEQ ID NO: 3085782 - RNA, 19 nt, Measles virus
cccagcuuacgggacccca

SEQ ID NO: 3085783 - RNA, 22 nt, Measles virus
guguucuacaacaacaccccac

SEQ ID NO: 3085784 - RNA, 18 nt, Measles virus
gcugcugaagaacucaug

SEQ ID NO: 3085785 - RNA, 12 nt, Measles virus
accgaaccagag

SEQ ID NO: 3085786 - RNA, 23 nt, Measles virus
cagcaauuggaucaacugaaggc

SEQ ID NO: 3085787 - RNA, 20 nt, Measles virus
cgaccagacccagcacccag

SEQ ID NO: 3085788 - RNA, 23 nt, Measles virus
cuggucaggaucuccaauauguu

SEQ ID NO: 3085789 - RNA, 13 nt, Measles virus
agcgagaggccag

SEQ ID NO: 3085790 - RNA, 19 nt, Measles virus
gcaguucgggucucagcaa

SEQ ID NO: 3085791 - RNA, 19 nt, Measles virus
gacagcaaguguggacacc

SEQ ID NO: 3085792 - RNA, 17 nt, Measles virus
caggaccgagccaccug

SEQ ID NO: 3085793 - RNA, 19 nt, Measles virus
cgaccagacccagcaccca

SEQ ID NO: 3085794 - RNA, 20 nt, Measles virus
gacuccuuagacagauccuc

SEQ ID NO: 3085795 - RNA, 21 nt, Measles virus
uuaagucgagguuacaaugug

SEQ ID NO: 3085796 - RNA, 22 nt, Measles virus
auuacaaguggaaugcuucaca

SEQ ID NO: 3085797 - RNA, 12 nt, Measles virus
gaaagucacagg

SEQ ID NO: 3085798 - RNA, 21 nt, Measles virus
ccacaacccgcgcaccccagc

SEQ ID NO: 3085799 - RNA, 13 nt, Measles virus
ccgacgcuguccg

SEQ ID NO: 3085800 - RNA, 17 nt, Measles virus
cgcugacaaucaagcaa

SEQ ID NO: 3085801 - RNA, 21 nt, Measles virus
caacccgaaccagcacccaag

SEQ ID NO: 3085802 - RNA, 16 nt, Measles virus
cugaggacaccucaga

SEQ ID NO: 3085803 - RNA, 15 nt, Measles virus
cacccagccaccgac

SEQ ID NO: 3085804 - RNA, 22 nt, Measles virus
aagacaucaguaucccacagcc

SEQ ID NO: 3085805 - RNA, 16 nt, Measles virus
auuauugcaaaaugaa

SEQ ID NO: 3085806 - RNA, 14 nt, Measles virus
ccacccuggaagga

SEQ ID NO: 3085807 - RNA, 20 nt, Measles virus
uccgauguccaagacaucaa

SEQ ID NO: 3085808 - RNA, 23 nt, Measles virus
gcacagaacagccccgacacaag

SEQ ID NO: 3085809 - RNA, 15 nt, Measles virus
ccaucgugcagccau

SEQ ID NO: 3085810 - RNA, 11 nt, Measles virus
gcacacccacc

SEQ ID NO: 3085811 - RNA, 18 nt, Measles virus
cucaaucccgaccugaaa

SEQ ID NO: 3085812 - RNA, 22 nt, Measles virus
ucaagaagcccguugccagccg

SEQ ID NO: 3085813 - RNA, 21 nt, Measles virus
caaaacggguuuucugaugaa

SEQ ID NO: 3085814 - RNA, 16 nt, Measles virus
caaagaaagucacagg

SEQ ID NO: 3085815 - RNA, 16 nt, Measles virus
cagagggagcccccaa

SEQ ID NO: 3085816 - RNA, 17 nt, Measles virus
gcgauccuggguccccc

SEQ ID NO: 3085817 - RNA, 16 nt, Measles virus
cuacuggaggccaggg

SEQ ID NO: 3085818 - RNA, 17 nt, Measles virus
acucaacucuacuggag

SEQ ID NO: 3085819 - RNA, 22 nt, Measles virus
cccaagcacagaacagccccga

SEQ ID NO: 3085820 - RNA, 23 nt, Measles virus
ggccacaacccgcgcaccccagc

SEQ ID NO: 3085821 - RNA, 18 nt, Measles virus
gcuggugccccaggucag

SEQ ID NO: 3085822 - RNA, 20 nt, Measles virus
caguaucccacagccucucc

SEQ ID NO: 3085823 - RNA, 20 nt, Measles virus
agggcucaaauugcucagau

SEQ ID NO: 3085824 - RNA, 13 nt, Measles virus
uauccauccaggc

SEQ ID NO: 3085825 - RNA, 21 nt, Measles virus
uccacucccacgacuggagcc

SEQ ID NO: 3085826 - RNA, 24 nt, Measles virus
gcuuuaccucucaucucacagagg

SEQ ID NO: 3085827 - RNA, 16 nt, Measles virus
cgauccucccaaggga

SEQ ID NO: 3085828 - RNA, 21 nt, Measles virus
gcgaugacgacgcugaaacuu

SEQ ID NO: 3085829 - RNA, 17 nt, Measles virus
ucuacuggaggccaggg

SEQ ID NO: 3085830 - RNA, 14 nt, Measles virus
ccaccggcuagagg

SEQ ID NO: 3085831 - RNA, 19 nt, Measles virus
cccgaaaacgaccccccuc

SEQ ID NO: 3085832 - RNA, 16 nt, Measles virus
ucgcucugauccucua

SEQ ID NO: 3085833 - RNA, 16 nt, Measles virus
acacacgguucaggga

SEQ ID NO: 3085834 - RNA, 23 nt, Measles virus
cuaaguuggaggaugccaaggaa

SEQ ID NO: 3085835 - RNA, 14 nt, Measles virus
caaugaagaccuua

SEQ ID NO: 3085836 - RNA, 19 nt, Measles virus
ccugaggacaccucagaga

SEQ ID NO: 3085837 - RNA, 21 nt, Measles virus
ucaaaacagccuuggccaaaa

SEQ ID NO: 3085838 - RNA, 19 nt, Measles virus
caacccgaaccagcaccca

SEQ ID NO: 3085839 - RNA, 21 nt, Measles virus
cagauagggcugccagugaac

SEQ ID NO: 3085840 - RNA, 12 nt, Measles virus
gaaucccagaau

SEQ ID NO: 3085841 - RNA, 11 nt, Measles virus
caaaaaagccc

SEQ ID NO: 3085842 - RNA, 19 nt, Measles virus
accagaucuuauacccuga

SEQ ID NO: 3085843 - RNA, 13 nt, Measles virus
auccuaagggaag

SEQ ID NO: 3085844 - RNA, 16 nt, Measles virus
cuacaccgcagagauc

SEQ ID NO: 3085845 - RNA, 20 nt, Measles virus
caguaaugauuucagcaacu

SEQ ID NO: 3085846 - RNA, 21 nt, Measles virus
caucgcgaggaagcacaccca

SEQ ID NO: 3085847 - RNA, 13 nt, Measles virus
ggagaucaaggaa

SEQ ID NO: 3085848 - RNA, 13 nt, Measles virus
guagaacucagag

SEQ ID NO: 3085849 - RNA, 22 nt, Measles virus
ucagauacuauacagaaauccu

SEQ ID NO: 3085850 - RNA, 18 nt, Measles virus
agcgagaggccagccagc

SEQ ID NO: 3085851 - RNA, 14 nt, Measles virus
ccagaguccagacc

SEQ ID NO: 3085852 - RNA, 15 nt, Measles virus
agcuuccagcucguc

SEQ ID NO: 3085853 - RNA, 14 nt, Measles virus
uaucacaagggaac

SEQ ID NO: 3085854 - RNA, 18 nt, Measles virus
cauaucacucacucuggg

SEQ ID NO: 3085855 - RNA, 16 nt, Measles virus
cagccuuggccaaaau

SEQ ID NO: 3085856 - RNA, 15 nt, Measles virus
acuccacggaccaag

SEQ ID NO: 3085857 - RNA, 16 nt, Measles virus
acgguucagggaugga

SEQ ID NO: 3085858 - RNA, 14 nt, Measles virus
cucugucacaggga

SEQ ID NO: 3085859 - RNA, 22 nt, Measles virus
augacaaguugcgaauggagac

SEQ ID NO: 3085860 - RNA, 11 nt, Measles virus
guuucuauucc

SEQ ID NO: 3085861 - RNA, 18 nt, Measles virus
gauccauaagagccucag

SEQ ID NO: 3085862 - RNA, 14 nt, Measles virus
aaauacgaaguuuc

SEQ ID NO: 3085863 - RNA, 19 nt, Measles virus
cggaagcguuaccugauga

SEQ ID NO: 3085864 - RNA, 20 nt, Measles virus
acuggaggccagggcaacca

SEQ ID NO: 3085865 - RNA, 14 nt, Measles virus
cauguuucugagcu

SEQ ID NO: 3085866 - RNA, 20 nt, Measles virus
gacugagaugaggucaguga

SEQ ID NO: 3085867 - RNA, 21 nt, Measles virus
agaaucaaauuggauuaugau

SEQ ID NO: 3085868 - RNA, 22 nt, Measles virus
gcguugccacagcugcucagau

SEQ ID NO: 3085869 - RNA, 22 nt, Measles virus
uacaaagacaacccacauccua

SEQ ID NO: 3085870 - RNA, 19 nt, Measles virus
caccaggcggcccaagcac

SEQ ID NO: 3085871 - RNA, 22 nt, Measles virus
cacuggccgaaguucucaagaa

SEQ ID NO: 3085872 - RNA, 13 nt, Measles virus
accgcuggacacc

SEQ ID NO: 3085873 - RNA, 18 nt, Measles virus
aaaggaacccccagcaac

SEQ ID NO: 3085874 - RNA, 16 nt, Measles virus
cauucgggucccugcc

SEQ ID NO: 3085875 - RNA, 13 nt, Measles virus
uggcugcugaaga

SEQ ID NO: 3085876 - RNA, 13 nt, Measles virus
cuaacccuccuca

SEQ ID NO: 3085877 - RNA, 23 nt, Measles virus
cucaaagggaaacugcucagggc

SEQ ID NO: 3085878 - RNA, 21 nt, Measles virus
gcagccaucaguuccucaaga

SEQ ID NO: 3085879 - RNA, 17 nt, Measles virus
ccaguuccagaggacag

SEQ ID NO: 3085880 - RNA, 21 nt, Measles virus
aaucgcagauagggcugccag

SEQ ID NO: 3085881 - RNA, 18 nt, Measles virus
ggagucaucggaccagau

SEQ ID NO: 3085882 - RNA, 13 nt, Measles virus
ccccacagcuccc

SEQ ID NO: 3085883 - RNA, 15 nt, Measles virus
aucacaagggaaccu

SEQ ID NO: 3085884 - RNA, 13 nt, Measles virus
cauguggaaacug

SEQ ID NO: 3085885 - RNA, 15 nt, Measles virus
uugcaauauauuaaa

SEQ ID NO: 3085886 - RNA, 17 nt, Measles virus
ccaccgcauccagcauc

SEQ ID NO: 3085887 - RNA, 18 nt, Measles virus
caaauuggauuaugauca

SEQ ID NO: 3085888 - RNA, 13 nt, Measles virus
ccucaagaaaucu

SEQ ID NO: 3085889 - RNA, 22 nt, Measles virus
caacuggaaggccccucccccc

SEQ ID NO: 3085890 - RNA, 22 nt, Measles virus
uggacacccgaaucugguacca

SEQ ID NO: 3085891 - RNA, 13 nt, Measles virus
ccagccagcagcc

SEQ ID NO: 3085892 - RNA, 21 nt, Measles virus
gccccgacacaaggccaccac

SEQ ID NO: 3085893 - RNA, 18 nt, Measles virus
aguuccagaggacagcug

SEQ ID NO: 3085894 - RNA, 20 nt, Measles virus
caaccgcauccccacagcuc

SEQ ID NO: 3085895 - RNA, 15 nt, Measles virus
aagaaccuagccuua

SEQ ID NO: 3085896 - RNA, 18 nt, Measles virus
acuaugacaucccaggga

SEQ ID NO: 3085897 - RNA, 19 nt, Measles virus
agauucaagguuaguccca

SEQ ID NO: 3085898 - RNA, 20 nt, Measles virus
cagccccgacacaaggccac

SEQ ID NO: 3085899 - RNA, 14 nt, Measles virus
agcccaccugaaau

SEQ ID NO: 3085900 - RNA, 16 nt, Measles virus
cccgacacaaggccac

SEQ ID NO: 3085901 - RNA, 22 nt, Measles virus
ggccacaacccgcgcaccccag

SEQ ID NO: 3085902 - RNA, 20 nt, Measles virus
aucuuauacccugaaguuca

SEQ ID NO: 3085903 - RNA, 23 nt, Measles virus
caaccuacgauacuuccaggguu

SEQ ID NO: 3085904 - RNA, 15 nt, Measles virus
agggaaacugcucag

SEQ ID NO: 3085905 - RNA, 15 nt, Measles virus
acgcaagaaccccac

SEQ ID NO: 3085906 - RNA, 17 nt, Measles virus
caacgaucuugccaagu

SEQ ID NO: 3085907 - RNA, 14 nt, Measles virus
gagccucagcacca

SEQ ID NO: 3085908 - RNA, 17 nt, Measles virus
gggcaccauugaaggau

SEQ ID NO: 3085909 - RNA, 13 nt, Measles virus
uagggauccccgc

SEQ ID NO: 3085910 - RNA, 16 nt, Measles virus
gccacagcugcucaga

SEQ ID NO: 3085911 - RNA, 23 nt, Measles virus
uaucaacggaugauccagugaua

SEQ ID NO: 3085912 - RNA, 14 nt, Measles virus
aaucugaaaacagc

SEQ ID NO: 3085913 - RNA, 23 nt, Measles virus
ccugaaacuccaauccagaggca

SEQ ID NO: 3085914 - RNA, 20 nt, Measles virus
acccugacaagauccuaaca

SEQ ID NO: 3085915 - RNA, 20 nt, Measles virus
uccaggcaguuuugcagcca

SEQ ID NO: 3085916 - RNA, 15 nt, Measles virus
gccaucaccccgcaa

SEQ ID NO: 3085917 - RNA, 13 nt, Measles virus
uacauugcugccg

SEQ ID NO: 3085918 - RNA, 23 nt, Measles virus
ugagaugaggucagugauuaaau

SEQ ID NO: 3085919 - RNA, 17 nt, Measles virus
ggcucaaauugcucaga

SEQ ID NO: 3085920 - RNA, 15 nt, Measles virus
cuuagggccaaggaa

SEQ ID NO: 3085921 - RNA, 15 nt, Measles virus
agauguuuuccuuaa

SEQ ID NO: 3085922 - RNA, 19 nt, Measles virus
augacucguuccagccauc

SEQ ID NO: 3085923 - RNA, 18 nt, Measles virus
ggaaacuacuaaucaggc

SEQ ID NO: 3085924 - RNA, 15 nt, Measles virus
gaaacugcucagggc

SEQ ID NO: 3085925 - RNA, 23 nt, Measles virus
caaucaguuccuagcugucucaa

SEQ ID NO: 3085926 - RNA, 12 nt, Measles virus
caguagggccag

SEQ ID NO: 3085927 - RNA, 22 nt, Measles virus
ccauuccuggacuugggaagga

SEQ ID NO: 3085928 - RNA, 19 nt, Measles virus
ucccccggucuccuccucu

SEQ ID NO: 3085929 - RNA, 16 nt, Measles virus
agagucauagauccug

SEQ ID NO: 3085930 - RNA, 20 nt, Measles virus
cgcggcaccgcgcccccacc

SEQ ID NO: 3085931 - RNA, 11 nt, Measles virus
uggcugcugaa

SEQ ID NO: 3085932 - RNA, 19 nt, Measles virus
uccaagacuacaucaauaa

SEQ ID NO: 3085933 - RNA, 15 nt, Measles virus
ucgaagggaccaaaa

SEQ ID NO: 3085934 - RNA, 14 nt, Measles virus
caggccgagcacug

SEQ ID NO: 3085935 - RNA, 21 nt, Measles virus
guaggauaguuauuaacagag

SEQ ID NO: 3085936 - RNA, 18 nt, Measles virus
cccaacgcaagaacccca

SEQ ID NO: 3085937 - RNA, 23 nt, Measles virus
ugcccaaguauguugcaacccaa

SEQ ID NO: 3085938 - RNA, 17 nt, Measles virus
cgcuggacaccccgcag

SEQ ID NO: 3085939 - RNA, 17 nt, Measles virus
ccucgugggacccccga

SEQ ID NO: 3085940 - RNA, 22 nt, Measles virus
cgacagcaaguguggacaccag

SEQ ID NO: 3085941 - RNA, 21 nt, Measles virus
cagcugcacagucacucggga

SEQ ID NO: 3085942 - RNA, 12 nt, Measles virus
acaucuuaugau

SEQ ID NO: 3085943 - RNA, 22 nt, Measles virus
cucugggauggugggcauggga

SEQ ID NO: 3085944 - RNA, 23 nt, Measles virus
cucaagaaaucuccaggcaucaa

SEQ ID NO: 3085945 - RNA, 20 nt, Measles virus
guuccuagcugucucaaagg

SEQ ID NO: 3085946 - RNA, 16 nt, Measles virus
augccucuuagccugg

SEQ ID NO: 3085947 - RNA, 15 nt, Measles virus
aaggaagauccguga

SEQ ID NO: 3085948 - RNA, 18 nt, Measles virus
aaugagcaagacucucca

SEQ ID NO: 3085949 - RNA, 23 nt, Measles virus
cacucaauuccccacccccaaag

SEQ ID NO: 3085950 - RNA, 12 nt, Measles virus
cgaccccacugc

SEQ ID NO: 3085951 - RNA, 18 nt, Measles virus
uccuccucuucucgaagg

SEQ ID NO: 3085952 - RNA, 15 nt, Measles virus
gauggcagaagagca

SEQ ID NO: 3085953 - RNA, 21 nt, Measles virus
agauuucccacaagucuccuc

SEQ ID NO: 3085954 - RNA, 13 nt, Measles virus
caggaucuccaau

SEQ ID NO: 3085955 - RNA, 22 nt, Measles virus
ccaccaaccgcauccccacagc

SEQ ID NO: 3085956 - RNA, 16 nt, Measles virus
gcgauuggcccuggga

SEQ ID NO: 3085957 - RNA, 14 nt, Measles virus
acaguagaacucag

SEQ ID NO: 3085958 - RNA, 21 nt, Measles virus
cgaacucaaucccgaccugaa

SEQ ID NO: 3085959 - RNA, 18 nt, Measles virus
cuccaucgugcagccauc

SEQ ID NO: 3085960 - RNA, 19 nt, Measles virus
caccccccgaaaaccagag

SEQ ID NO: 3085961 - RNA, 19 nt, Measles virus
cuugggaaaacucucaaug

SEQ ID NO: 3085962 - RNA, 16 nt, Measles virus
aucggcucacuggccg

SEQ ID NO: 3085963 - RNA, 14 nt, Measles virus
aauucgcagcccuc

SEQ ID NO: 3085964 - RNA, 22 nt, Measles virus
gcauggucagaaauaucagaca

SEQ ID NO: 3085965 - RNA, 17 nt, Measles virus
ugaagugggccugagga

SEQ ID NO: 3085966 - RNA, 16 nt, Measles virus
caacuccagggaauga

SEQ ID NO: 3085967 - RNA, 12 nt, Measles virus
auagacaucaga

SEQ ID NO: 3085968 - RNA, 21 nt, Measles virus
cagaaggaggggagauccacg

SEQ ID NO: 3085969 - RNA, 17 nt, Measles virus
ccaccagcucccagacu

SEQ ID NO: 3085970 - RNA, 19 nt, Measles virus
aggagacuacugagaacag

SEQ ID NO: 3085971 - RNA, 19 nt, Measles virus
agaccgcagugcccagcaa

SEQ ID NO: 3085972 - RNA, 20 nt, Measles virus
ggaucuccaauauguuuugg

SEQ ID NO: 3085973 - RNA, 12 nt, Measles virus
ccgacagccagc

SEQ ID NO: 3085974 - RNA, 12 nt, Measles virus
aagcacacccac

SEQ ID NO: 3085975 - RNA, 20 nt, Measles virus
cgaggacugccaugccccaa

SEQ ID NO: 3085976 - RNA, 20 nt, Measles virus
ccucauaaugacagccagaa

SEQ ID NO: 3085977 - RNA, 22 nt, Measles virus
gucccaaccucuucacuguucc

SEQ ID NO: 3085978 - RNA, 17 nt, Measles virus
agacggggggccccccc

SEQ ID NO: 3085979 - RNA, 19 nt, Measles virus
auucagaucggucaaugca

SEQ ID NO: 3085980 - RNA, 20 nt, Measles virus
cuccggaacccuaauccugc

SEQ ID NO: 3085981 - RNA, 16 nt, Measles virus
cccaguagggccagca

SEQ ID NO: 3085982 - RNA, 17 nt, Measles virus
aucaauccaccacaucc

SEQ ID NO: 3085983 - RNA, 20 nt, Measles virus
aaggucgcucugauccucua

SEQ ID NO: 3085984 - RNA, 14 nt, Measles virus
cacgucgacacaga

SEQ ID NO: 3085985 - RNA, 17 nt, Measles virus
acaguagaacucagagg

SEQ ID NO: 3085986 - RNA, 18 nt, Measles virus
ggccgaaguucucaagaa

SEQ ID NO: 3085987 - RNA, 18 nt, Measles virus
aguaggagacacaagaga

SEQ ID NO: 3085988 - RNA, 16 nt, Measles virus
ucauaaugacagccag

SEQ ID NO: 3085989 - RNA, 19 nt, Measles virus
augccucuuagccuggaca

SEQ ID NO: 3085990 - RNA, 18 nt, Measles virus
cgguguaccugcacagaa

SEQ ID NO: 3085991 - RNA, 13 nt, Measles virus
ucgaucgcuccga

SEQ ID NO: 3085992 - RNA, 15 nt, Measles virus
cucugauccucuaca

SEQ ID NO: 3085993 - RNA, 22 nt, Measles virus
ucacuggccgucgaggaagcca

SEQ ID NO: 3085994 - RNA, 18 nt, Measles virus
gugaaauagacaucagaa

SEQ ID NO: 3085995 - RNA, 14 nt, Measles virus
cuccgaacacagac

SEQ ID NO: 3085996 - RNA, 13 nt, Measles virus
caucgacaaugca

SEQ ID NO: 3085997 - RNA, 20 nt, Measles virus
ucauaaugacagccagaagg

SEQ ID NO: 3085998 - RNA, 20 nt, Measles virus
ccucggaaccaucagggcca

SEQ ID NO: 3085999 - RNA, 16 nt, Measles virus
cuccaauccagaggca

SEQ ID NO: 3086000 - RNA, 14 nt, Measles virus
ccccaguagggcca

SEQ ID NO: 3086001 - RNA, 12 nt, Measles virus
aauucuaccugg

SEQ ID NO: 3086002 - RNA, 14 nt, Measles virus
gaucggucaaugca

SEQ ID NO: 3086003 - RNA, 16 nt, Measles virus
agauccauaagagccu

SEQ ID NO: 3086004 - RNA, 18 nt, Measles virus
caauauauuaaagaaaac

SEQ ID NO: 3086005 - RNA, 16 nt, Measles virus
ccgaacacagaccacc

SEQ ID NO: 3086006 - RNA, 15 nt, Measles virus
uccagaggacagcug

SEQ ID NO: 3086007 - RNA, 14 nt, Measles virus
cgacaacacggaca

SEQ ID NO: 3086008 - RNA, 17 nt, Measles virus
cuccacacucuggcugu

SEQ ID NO: 3086009 - RNA, 16 nt, Measles virus
aggcguugccacagcu

SEQ ID NO: 3086010 - RNA, 17 nt, Measles virus
cgcagugcccagcaaua

SEQ ID NO: 3086011 - RNA, 12 nt, Measles virus
caucaagcaccg

SEQ ID NO: 3086012 - RNA, 14 nt, Measles virus
acagagaucuacga

SEQ ID NO: 3086013 - RNA, 16 nt, Measles virus
ucaagguuagucccaa

SEQ ID NO: 3086014 - RNA, 17 nt, Measles virus
ccccaggggccgacagc

SEQ ID NO: 3086015 - RNA, 15 nt, Measles virus
gaccacccugggcca

SEQ ID NO: 3086016 - RNA, 16 nt, Measles virus
cuaggcguugccacag

SEQ ID NO: 3086017 - RNA, 18 nt, Measles virus
aacccuaauccugcccua

SEQ ID NO: 3086018 - RNA, 14 nt, Measles virus
gggugcaagaucau

SEQ ID NO: 3086019 - RNA, 15 nt, Measles virus
ucaaacucaguucca

SEQ ID NO: 3086020 - RNA, 15 nt, Measles virus
uccuaaaaaagggaa

SEQ ID NO: 3086021 - RNA, 17 nt, Measles virus
auuugcaauauauuaaa

SEQ ID NO: 3086022 - RNA, 18 nt, Measles virus
aguuucuauucccagcuu

SEQ ID NO: 3086023 - RNA, 22 nt, Measles virus
gcguccuccucgugggaccccc

SEQ ID NO: 3086024 - RNA, 18 nt, Measles virus
guuacaguguuaucaugu

SEQ ID NO: 3086025 - RNA, 19 nt, Measles virus
augggagucagcugcacag

SEQ ID NO: 3086026 - RNA, 18 nt, Measles virus
gcccagcaauacccgaaa

SEQ ID NO: 3086027 - RNA, 23 nt, Measles virus
ccuagguaguuaggcauuauuug

SEQ ID NO: 3086028 - RNA, 17 nt, Measles virus
uauucccagcuuugucu

SEQ ID NO: 3086029 - RNA, 17 nt, Measles virus
caacuuaccugccaacc

SEQ ID NO: 3086030 - RNA, 13 nt, Measles virus
acccugacaagau

SEQ ID NO: 3086031 - RNA, 18 nt, Measles virus
gacccuacacugugucag

SEQ ID NO: 3086032 - RNA, 13 nt, Measles virus
aaacuuugaaaau

SEQ ID NO: 3086033 - RNA, 20 nt, Measles virus
ucggcaugggacaucaaagg

SEQ ID NO: 3086034 - RNA, 16 nt, Measles virus
cagagaucucacuugg

SEQ ID NO: 3086035 - RNA, 13 nt, Measles virus
ucuauucccagcu

SEQ ID NO: 3086036 - RNA, 18 nt, Measles virus
uagcugucucaaagggaa

SEQ ID NO: 3086037 - RNA, 18 nt, Measles virus
gaucccugggggaccccc

SEQ ID NO: 3086038 - RNA, 21 nt, Measles virus
gguuacucuggaggagcagau

SEQ ID NO: 3086039 - RNA, 15 nt, Measles virus
ucagaacaucaagca

SEQ ID NO: 3086040 - RNA, 15 nt, Measles virus
aggaacccccagcaa

SEQ ID NO: 3086041 - RNA, 18 nt, Measles virus
cacuggccgucgaggaag

SEQ ID NO: 3086042 - RNA, 15 nt, Measles virus
agccuaaucugagca

SEQ ID NO: 3086043 - RNA, 16 nt, Measles virus
uuuaaucggccagaag

SEQ ID NO: 3086044 - RNA, 17 nt, Measles virus
agauuacauuuucauaa

SEQ ID NO: 3086045 - RNA, 18 nt, Measles virus
agaucaacaggcaaaaua

SEQ ID NO: 3086046 - RNA, 15 nt, Measles virus
gcgagaggccagcca

SEQ ID NO: 3086047 - RNA, 18 nt, Measles virus
gggaguacgacuucagag

SEQ ID NO: 3086048 - RNA, 16 nt, Measles virus
cuccaucgugcagcca

SEQ ID NO: 3086049 - RNA, 12 nt, Measles virus
ccaauauguuuu

SEQ ID NO: 3086050 - RNA, 17 nt, Measles virus
uaacaaaaagggagaac

SEQ ID NO: 3086051 - RNA, 17 nt, Measles virus
agguccacacagccgcc

SEQ ID NO: 3086052 - RNA, 13 nt, Measles virus
caagaagaccuua

SEQ ID NO: 3086053 - RNA, 16 nt, Measles virus
cgaccagacccagcac

SEQ ID NO: 3086054 - RNA, 19 nt, Measles virus
ccccacuaacccuccucac

SEQ ID NO: 3086055 - RNA, 15 nt, Measles virus
ugcacuuaaugcaau

SEQ ID NO: 3086056 - RNA, 19 nt, Measles virus
cccuaggcguugccacagc

SEQ ID NO: 3086057 - RNA, 21 nt, Measles virus
ucccgggaaaggaacccccag

SEQ ID NO: 3086058 - RNA, 16 nt, Measles virus
gcagugcccagcaaua

SEQ ID NO: 3086059 - RNA, 17 nt, Measles virus
cacgcuuacagccugga

SEQ ID NO: 3086060 - RNA, 17 nt, Measles virus
ccgagaucccagaauaa

SEQ ID NO: 3086061 - RNA, 16 nt, Measles virus
uccccacccccaaagg

SEQ ID NO: 3086062 - RNA, 12 nt, Measles virus
auccagcaucaa

SEQ ID NO: 3086063 - RNA, 19 nt, Measles virus
agggcucaaauugcucaga

SEQ ID NO: 3086064 - RNA, 17 nt, Measles virus
caagcgagaggccagcc

SEQ ID NO: 3086065 - RNA, 17 nt, Measles virus
gagauauccauccaggc

SEQ ID NO: 3086066 - RNA, 22 nt, Measles virus
gaccaagcgagaggccagccag

SEQ ID NO: 3086067 - RNA, 12 nt, Measles virus
agacccugacaa

SEQ ID NO: 3086068 - RNA, 16 nt, Measles virus
agaaaacuuugaaaau

SEQ ID NO: 3086069 - RNA, 13 nt, Measles virus
ccagaaggcccgg

SEQ ID NO: 3086070 - RNA, 17 nt, Measles virus
cuccuaaaaaagggaaa

SEQ ID NO: 3086071 - RNA, 17 nt, Measles virus
ucuccgauguccaagac

SEQ ID NO: 3086072 - RNA, 19 nt, Measles virus
agauguuuuccuuaaugau

SEQ ID NO: 3086073 - RNA, 18 nt, Measles virus
agaguugucacaacugag

SEQ ID NO: 3086074 - RNA, 22 nt, Measles virus
guacgacuucagagaucucacu

SEQ ID NO: 3086075 - RNA, 21 nt, Measles virus
cgcagcccucugucacaggga

SEQ ID NO: 3086076 - RNA, 23 nt, Measles virus
ugcuggggguuguugaggacagc

SEQ ID NO: 3086077 - RNA, 19 nt, Measles virus
ccaggcaucaagcacuggg

SEQ ID NO: 3086078 - RNA, 17 nt, Measles virus
gacaacacggacagaug

SEQ ID NO: 3086079 - RNA, 16 nt, Measles virus
cgagcauucggguccc

SEQ ID NO: 3086080 - RNA, 16 nt, Measles virus
aaucugguggacauau

SEQ ID NO: 3086081 - RNA, 22 nt, Measles virus
aauucgcuguacuccaaaguca

SEQ ID NO: 3086082 - RNA, 17 nt, Measles virus
gguucagggcuucugau

SEQ ID NO: 3086083 - RNA, 22 nt, Measles virus
agucagauacauguggaaacug

SEQ ID NO: 3086084 - RNA, 19 nt, Measles virus
augaagguacuuaucauga

SEQ ID NO: 3086085 - RNA, 15 nt, Measles virus
ggugaacucaacucu

SEQ ID NO: 3086086 - RNA, 13 nt, Measles virus
ucucaagcaucau

SEQ ID NO: 3086087 - RNA, 15 nt, Measles virus
uccgggcucucaagg

SEQ ID NO: 3086088 - RNA, 23 nt, Measles virus
ugggcaugggagucagcugcaca

SEQ ID NO: 3086089 - RNA, 19 nt, Measles virus
uagcugucucaaagggaaa

SEQ ID NO: 3086090 - RNA, 15 nt, Measles virus
acuuagggccaagga

SEQ ID NO: 3086091 - RNA, 23 nt, Measles virus
ccccaggggccgacagccagcau

SEQ ID NO: 3086092 - RNA, 18 nt, Measles virus
cugcacagucacucggga

SEQ ID NO: 3086093 - RNA, 22 nt, Measles virus
uaccaccuacagugauggcagg

SEQ ID NO: 3086094 - RNA, 14 nt, Measles virus
uguaaucaacacau

SEQ ID NO: 3086095 - RNA, 22 nt, Measles virus
ccaaccccgaaggucgcuccga

SEQ ID NO: 3086096 - RNA, 16 nt, Measles virus
ccagcagccgacagca

SEQ ID NO: 3086097 - RNA, 13 nt, Measles virus
cucucaucucaca

SEQ ID NO: 3086098 - RNA, 16 nt, Measles virus
caccccccgaaaacca

SEQ ID NO: 3086099 - RNA, 15 nt, Measles virus
aucggucaaugcagu

SEQ ID NO: 3086100 - RNA, 16 nt, Measles virus
cucaagcuucagguga

SEQ ID NO: 3086101 - RNA, 12 nt, Measles virus
cugcacucggga

SEQ ID NO: 3086102 - RNA, 13 nt, Measles virus
uuaguacaaccua

SEQ ID NO: 3086103 - RNA, 23 nt, Measles virus
caaccgacaugcgauccuggguc

SEQ ID NO: 3086104 - RNA, 13 nt, Measles virus
cucacucugggau

SEQ ID NO: 3086105 - RNA, 14 nt, Measles virus
acagaacagccccg

SEQ ID NO: 3086106 - RNA, 14 nt, Measles virus
gccaaccccaugcc

SEQ ID NO: 3086107 - RNA, 20 nt, Measles virus
caaccugucuuacagccuga

SEQ ID NO: 3086108 - RNA, 20 nt, Measles virus
auacgaaguuucuauuccca

SEQ ID NO: 3086109 - RNA, 18 nt, Measles virus
cuacacugugucagaaca

SEQ ID NO: 3086110 - RNA, 14 nt, Measles virus
aaauucgcagcccu

SEQ ID NO: 3086111 - RNA, 17 nt, Measles virus
uguggacaccaggcggc

SEQ ID NO: 3086112 - RNA, 20 nt, Measles virus
gccuacccuccaucauuguu

SEQ ID NO: 3086113 - RNA, 19 nt, Measles virus
ccagaagacuccacggacc

SEQ ID NO: 3086114 - RNA, 19 nt, Measles virus
caguaacggcugcugaaaa

SEQ ID NO: 3086115 - RNA, 15 nt, Measles virus
aagaucauuggugau

SEQ ID NO: 3086116 - RNA, 14 nt, Measles virus
cuccaaacacccac

SEQ ID NO: 3086117 - RNA, 16 nt, Measles virus
gaagcccaguccacac

SEQ ID NO: 3086118 - RNA, 23 nt, Measles virus
uccaggcaguuuugcagccauca

SEQ ID NO: 3086119 - RNA, 17 nt, Measles virus
cccaguagggccagcac

SEQ ID NO: 3086120 - RNA, 15 nt, Measles virus
caaucaaggaagcag

SEQ ID NO: 3086121 - RNA, 16 nt, Measles virus
gauccucuccccccgg

SEQ ID NO: 3086122 - RNA, 21 nt, Measles virus
acacugugucagaacaucaag

SEQ ID NO: 3086123 - RNA, 18 nt, Measles virus
gugucaucuauagucacu

SEQ ID NO: 3086124 - RNA, 21 nt, Measles virus
cucaaagggaaacugcucagg

SEQ ID NO: 3086125 - RNA, 17 nt, Measles virus
gcaaccgaaccagaguc

SEQ ID NO: 3086126 - RNA, 19 nt, Measles virus
gguugcuagccauugcagg

SEQ ID NO: 3086127 - RNA, 15 nt, Measles virus
ccaaugccugaggga

SEQ ID NO: 3086128 - RNA, 12 nt, Measles virus
caauucucaaac

SEQ ID NO: 3086129 - RNA, 20 nt, Measles virus
gaggggagguuaaugacaga

SEQ ID NO: 3086130 - RNA, 20 nt, Measles virus
aagggaaccgggucacggag

SEQ ID NO: 3086131 - RNA, 20 nt, Measles virus
gauuauaaacaauguggaag

SEQ ID NO: 3086132 - RNA, 20 nt, Measles virus
uuggagucaucggaccagau

SEQ ID NO: 3086133 - RNA, 20 nt, Measles virus
gaccggggaucugcucccau

SEQ ID NO: 3086134 - RNA, 18 nt, Measles virus
cucuucgucaucaagcaa

SEQ ID NO: 3086135 - RNA, 20 nt, Measles virus
aggcccggacaaaaaagccc

SEQ ID NO: 3086136 - RNA, 23 nt, Measles virus
auccagugauagauaggcuuuac

SEQ ID NO: 3086137 - RNA, 17 nt, Measles virus
gcacuccacacucuggc

SEQ ID NO: 3086138 - RNA, 22 nt, Measles virus
ccaagcgagaggccagccagca

SEQ ID NO: 3086139 - RNA, 23 nt, Measles virus
caggcaguuuugcagccaucagu

SEQ ID NO: 3086140 - RNA, 19 nt, Measles virus
caaaguucuguagaccgca

SEQ ID NO: 3086141 - RNA, 21 nt, Measles virus
ccaagcgagaggccagccagc

SEQ ID NO: 3086142 - RNA, 16 nt, Measles virus
gccaaggaugagcacg

SEQ ID NO: 3086143 - RNA, 15 nt, Measles virus
cuuauguuuugcugg

SEQ ID NO: 3086144 - RNA, 22 nt, Measles virus
aaccagagggagcccccaacca

SEQ ID NO: 3086145 - RNA, 19 nt, Measles virus
cagcccucugucacaggga

SEQ ID NO: 3086146 - RNA, 15 nt, Measles virus
ccaccagcucccaga

SEQ ID NO: 3086147 - RNA, 22 nt, Measles virus
caaaacggguuuucugaugaag

SEQ ID NO: 3086148 - RNA, 13 nt, Measles virus
cgaccccccucau

SEQ ID NO: 3086149 - RNA, 13 nt, Measles virus
aacuuugaaaaua

SEQ ID NO: 3086150 - RNA, 13 nt, Measles virus
aggacagcugcug

SEQ ID NO: 3086151 - RNA, 16 nt, Measles virus
aagccauggcagcaug

SEQ ID NO: 3086152 - RNA, 18 nt, Measles virus
cacuugcugcucuccaaa

SEQ ID NO: 3086153 - RNA, 14 nt, Measles virus
caccgcauccagca

SEQ ID NO: 3086154 - RNA, 17 nt, Measles virus
cagccgccagccaacca

SEQ ID NO: 3086155 - RNA, 17 nt, Measles virus
uuaauauguugcugcag

SEQ ID NO: 3086156 - RNA, 22 nt, Measles virus
cagaugucgaacucaaucccga

SEQ ID NO: 3086157 - RNA, 17 nt, Measles virus
gccgacagccagcaucg

SEQ ID NO: 3086158 - RNA, 21 nt, Measles virus
cccaggggccgacagccagca

SEQ ID NO: 3086159 - RNA, 14 nt, Measles virus
ggaucaacugaagg

SEQ ID NO: 3086160 - RNA, 16 nt, Measles virus
acccuggaaggacacc

SEQ ID NO: 3086161 - RNA, 17 nt, Measles virus
uccacacucuggcuguc

SEQ ID NO: 3086162 - RNA, 14 nt, Measles virus
ggacguagggacaa

SEQ ID NO: 3086163 - RNA, 23 nt, Measles virus
uuaaucaagacccugacaagauc

SEQ ID NO: 3086164 - RNA, 16 nt, Measles virus
cacagguaggcacacc

SEQ ID NO: 3086165 - RNA, 22 nt, Measles virus
ccgaggugacccaaccgcaggc

SEQ ID NO: 3086166 - RNA, 22 nt, Measles virus
ugccagccgacaacuccaggga

SEQ ID NO: 3086167 - RNA, 20 nt, Measles virus
aucagaagauaaucuccaag

SEQ ID NO: 3086168 - RNA, 14 nt, Measles virus
cagaguccagacca

SEQ ID NO: 3086169 - RNA, 21 nt, Measles virus
caagcacagaacagccccgac

SEQ ID NO: 3086170 - RNA, 21 nt, Measles virus
cuuagguguaaucaacacauu

SEQ ID NO: 3086171 - RNA, 12 nt, Measles virus
cugcaugcugca

SEQ ID NO: 3086172 - RNA, 14 nt, Measles virus
caagcgagaggcca

SEQ ID NO: 3086173 - RNA, 21 nt, Measles virus
acucaacccgaaccagcaccc

SEQ ID NO: 3086174 - RNA, 17 nt, Measles virus
ucaaggacgugcugaca

SEQ ID NO: 3086175 - RNA, 19 nt, Measles virus
ccacaacccgcgcacccca

SEQ ID NO: 3086176 - RNA, 20 nt, Measles virus
aaaugccuucuacaaagaca

SEQ ID NO: 3086177 - RNA, 16 nt, Measles virus
gacaucaaaauccuau

SEQ ID NO: 3086178 - RNA, 16 nt, Measles virus
ugcucuccaaagggaa

SEQ ID NO: 3086179 - RNA, 15 nt, Measles virus
aagacccugacaaga

SEQ ID NO: 3086180 - RNA, 16 nt, Measles virus
auaucagcauauccac

SEQ ID NO: 3086181 - RNA, 21 nt, Measles virus
gcucccagacucggccaucac

SEQ ID NO: 3086182 - RNA, 17 nt, Measles virus
auaguaagaauccaggc

SEQ ID NO: 3086183 - RNA, 16 nt, Measles virus
caugacccugaguuca

SEQ ID NO: 3086184 - RNA, 18 nt, Measles virus
ucgcagcccucugucaca

SEQ ID NO: 3086185 - RNA, 14 nt, Measles virus
ggcugcugaagaac

SEQ ID NO: 3086186 - RNA, 17 nt, Measles virus
aucaguaaggagucuca

SEQ ID NO: 3086187 - RNA, 17 nt, Measles virus
aggugcaccugcgggga

SEQ ID NO: 3086188 - RNA, 17 nt, Measles virus
gcaggcuggugccccag

SEQ ID NO: 3086189 - RNA, 15 nt, Measles virus
ugcaucaauccucug

SEQ ID NO: 3086190 - RNA, 14 nt, Measles virus
agauaacagccggc

SEQ ID NO: 3086191 - RNA, 16 nt, Measles virus
aaucagccuaaaguca

SEQ ID NO: 3086192 - RNA, 23 nt, Measles virus
agguuuuccaaugccugagggac

SEQ ID NO: 3086193 - RNA, 22 nt, Measles virus
ugcccacagguaggcacaccaa

SEQ ID NO: 3086194 - RNA, 16 nt, Measles virus
ccugucuuacagccug

SEQ ID NO: 3086195 - RNA, 21 nt, Measles virus
uccauaagagccucagcacca

SEQ ID NO: 3086196 - RNA, 20 nt, Measles virus
ucugacaaaauuaaauuccu

SEQ ID NO: 3086197 - RNA, 12 nt, Measles virus
gcccccaccccc

SEQ ID NO: 3086198 - RNA, 14 nt, Measles virus
uguagccaugcugg

SEQ ID NO: 3086199 - RNA, 14 nt, Measles virus
agccgacaacucca

SEQ ID NO: 3086200 - RNA, 19 nt, Measles virus
ucaaagggaaacugcucag

SEQ ID NO: 3086201 - RNA, 15 nt, Measles virus
acagcagggcucaau

SEQ ID NO: 3086202 - RNA, 19 nt, Measles virus
acuccaucgugcagccauc

SEQ ID NO: 3086203 - RNA, 18 nt, Measles virus
aacaaguugguaugucaa

SEQ ID NO: 3086204 - RNA, 17 nt, Measles virus
ucacuguuccaaucaag

SEQ ID NO: 3086205 - RNA, 16 nt, Measles virus
cgaaccgcacaagcga

SEQ ID NO: 3086206 - RNA, 18 nt, Measles virus
caaguauuuuaaggacaa

SEQ ID NO: 3086207 - RNA, 15 nt, Measles virus
accgcgcccccaccc

SEQ ID NO: 3086208 - RNA, 15 nt, Measles virus
ggcuccgaauugagg

SEQ ID NO: 3086209 - RNA, 16 nt, Measles virus
cuagguaguuaggcau

SEQ ID NO: 3086210 - RNA, 12 nt, Measles virus
ccgagcacuggc

SEQ ID NO: 3086211 - RNA, 23 nt, Measles virus
ucaagcaaaaugggcugucccga

SEQ ID NO: 3086212 - RNA, 19 nt, Measles virus
uauuuaacauagaagacaa

SEQ ID NO: 3086213 - RNA, 14 nt, Measles virus
caccaggcggccca

SEQ ID NO: 3086214 - RNA, 15 nt, Measles virus
ccgaccagacccagc

SEQ ID NO: 3086215 - RNA, 21 nt, Measles virus
uagggaguacgacuucagaga

SEQ ID NO: 3086216 - RNA, 21 nt, Measles virus
aagauaguagcuauccuggag

SEQ ID NO: 3086217 - RNA, 13 nt, Measles virus
caugccagagggg

SEQ ID NO: 3086218 - RNA, 11 nt, Measles virus
cgacagccagc

SEQ ID NO: 3086219 - RNA, 16 nt, Measles virus
cagcuuacgggacccc

SEQ ID NO: 3086220 - RNA, 15 nt, Measles virus
acccuaauccugccc

SEQ ID NO: 3086221 - RNA, 21 nt, Measles virus
gacaccucagagauucacuga

SEQ ID NO: 3086222 - RNA, 13 nt, Measles virus
auuuaacauagaa

SEQ ID NO: 3086223 - RNA, 23 nt, Measles virus
cuuaccugccaaccccaugccag

SEQ ID NO: 3086224 - RNA, 14 nt, Measles virus
cuacuggaggccag

SEQ ID NO: 3086225 - RNA, 16 nt, Measles virus
gcaauauauuaaagaa

SEQ ID NO: 3086226 - RNA, 17 nt, Measles virus
cccacuacaaucagagg

SEQ ID NO: 3086227 - RNA, 22 nt, Measles virus
gccgucggguuuguuccugaca

SEQ ID NO: 3086228 - RNA, 19 nt, Measles virus
caauauauuaaagaaaacu

SEQ ID NO: 3086229 - RNA, 14 nt, Measles virus
ccaggucagaguca

SEQ ID NO: 3086230 - RNA, 23 nt, Measles virus
ccaaucugcguccuccucguggg

SEQ ID NO: 3086231 - RNA, 23 nt, Measles virus
agcccguugccagccgacaacuc

SEQ ID NO: 3086232 - RNA, 23 nt, Measles virus
cgaccacggcaaccgaaccagag

SEQ ID NO: 3086233 - RNA, 21 nt, Measles virus
cagcaacuggaaggccccucc

SEQ ID NO: 3086234 - RNA, 13 nt, Measles virus
gcguugccacagc

SEQ ID NO: 3086235 - RNA, 18 nt, Measles virus
gcccacuacaaucagagg

SEQ ID NO: 3086236 - RNA, 22 nt, Measles virus
ccucacgcuuacagccuggagg

SEQ ID NO: 3086237 - RNA, 19 nt, Measles virus
gagucagauacauguggaa

SEQ ID NO: 3086238 - RNA, 16 nt, Measles virus
ucacagggaagauucu

SEQ ID NO: 3086239 - RNA, 21 nt, Measles virus
gagaugauauuggcuguucag

SEQ ID NO: 3086240 - RNA, 20 nt, Measles virus
ccaccuacagugauggcagg

SEQ ID NO: 3086241 - RNA, 15 nt, Measles virus
gacaugcuuccagca

SEQ ID NO: 3086242 - RNA, 18 nt, Measles virus
agcaaguguggacaccag

SEQ ID NO: 3086243 - RNA, 23 nt, Measles virus
acagccuuggccaaaauacacga

SEQ ID NO: 3086244 - RNA, 13 nt, Measles virus
uagcuauccugga

SEQ ID NO: 3086245 - RNA, 22 nt, Measles virus
ccccgacacaaggccaccacca

SEQ ID NO: 3086246 - RNA, 19 nt, Measles virus
ggagccaacgaucuugcca

SEQ ID NO: 3086247 - RNA, 20 nt, Measles virus
ccaagcgagaggccagccag

SEQ ID NO: 3086248 - RNA, 20 nt, Measles virus
ccaggcaguuuugcagccau

SEQ ID NO: 3086249 - RNA, 16 nt, Measles virus
ugguaguucaguugag

SEQ ID NO: 3086250 - RNA, 15 nt, Measles virus
ugaguccucugcucc

SEQ ID NO: 3086251 - RNA, 13 nt, Measles virus
caacaccccacua

SEQ ID NO: 3086252 - RNA, 12 nt, Measles virus
guuaauugaagc

SEQ ID NO: 3086253 - RNA, 22 nt, Measles virus
gaucugacaauguaccuaaagg

SEQ ID NO: 3086254 - RNA, 19 nt, Measles virus
acaucaguaucccacagcc

SEQ ID NO: 3086255 - RNA, 24 nt, Measles virus
aagaaaacuuugaaaauacgaagu

SEQ ID NO: 3086256 - RNA, 16 nt, Measles virus
ggaagccauggcagca

SEQ ID NO: 3086257 - RNA, 17 nt, Measles virus
agccccgacacaaggcc

SEQ ID NO: 3086258 - RNA, 22 nt, Measles virus
ccggcccccccggugcccacag

SEQ ID NO: 3086259 - RNA, 14 nt, Measles virus
acugaaauacauga

SEQ ID NO: 3086260 - RNA, 14 nt, Measles virus
gauaacaggauucc

SEQ ID NO: 3086261 - RNA, 23 nt, Measles virus
ugaagugggccugaggacaccuc

SEQ ID NO: 3086262 - RNA, 20 nt, Measles virus
uagacuccaucgugcagcca

SEQ ID NO: 3086263 - RNA, 16 nt, Measles virus
aagcaucaugauugcc

SEQ ID NO: 3086264 - RNA, 13 nt, Measles virus
aaugacagccaga

SEQ ID NO: 3086265 - RNA, 15 nt, Measles virus
uuggccaccccugac

SEQ ID NO: 3086266 - RNA, 21 nt, Measles virus
auccgugagcuccuaaaaaag

SEQ ID NO: 3086267 - RNA, 18 nt, Measles virus
aucuuacagggacaucaa

SEQ ID NO: 3086268 - RNA, 20 nt, Measles virus
ggguuacaguguuaucaugu

SEQ ID NO: 3086269 - RNA, 16 nt, Measles virus
aaguucucaagaagcc

SEQ ID NO: 3086270 - RNA, 19 nt, Measles virus
cugguaauucuaccugguc

SEQ ID NO: 3086271 - RNA, 16 nt, Measles virus
agcguuaccugaugac

SEQ ID NO: 3086272 - RNA, 14 nt, Measles virus
uccaccacauccga

SEQ ID NO: 3086273 - RNA, 23 nt, Measles virus
caagucccccggucuccuccucu

SEQ ID NO: 3086274 - RNA, 15 nt, Measles virus
ucuauucccagcuuu

SEQ ID NO: 3086275 - RNA, 19 nt, Measles virus
ccaggcggcccaagcacag

SEQ ID NO: 3086276 - RNA, 15 nt, Measles virus
aaagucauuguguau

SEQ ID NO: 3086277 - RNA, 18 nt, Measles virus
gaccgaauaaaugccuuc

SEQ ID NO: 3086278 - RNA, 13 nt, Measles virus
ucagggccaggug

SEQ ID NO: 3086279 - RNA, 16 nt, Measles virus
cauuagaagcacaggc

SEQ ID NO: 3086280 - RNA, 18 nt, Measles virus
caaucugcguccuccucg

SEQ ID NO: 3086281 - RNA, 23 nt, Measles virus
gcccacagguaggcacaccaacc

SEQ ID NO: 3086282 - RNA, 15 nt, Measles virus
ccgcuggacaccccg

SEQ ID NO: 3086283 - RNA, 14 nt, Measles virus
uaaaucacaaaccc

SEQ ID NO: 3086284 - RNA, 11 nt, Measles virus
ccuccagaaga

SEQ ID NO: 3086285 - RNA, 21 nt, Measles virus
cgcuggacaccccgcagaggu

SEQ ID NO: 3086286 - RNA, 13 nt, Measles virus
uacaaaaugaggg

SEQ ID NO: 3086287 - RNA, 23 nt, Measles virus
ccaagcgagaggccagccagcag

SEQ ID NO: 3086288 - RNA, 14 nt, Measles virus
ggucaaugcagugg

SEQ ID NO: 3086289 - RNA, 22 nt, Measles virus
gccccgacacaaggccaccacc

SEQ ID NO: 3086290 - RNA, 13 nt, Measles virus
acaucaaaacagc

SEQ ID NO: 3086291 - RNA, 19 nt, Measles virus
cagggccaggugcaccugc

SEQ ID NO: 3086292 - RNA, 17 nt, Measles virus
cacgucgacacagaguc

SEQ ID NO: 3086293 - RNA, 20 nt, Measles virus
aaccaugccucucagcaauu

SEQ ID NO: 3086294 - RNA, 12 nt, Measles virus
gccgacagccag

SEQ ID NO: 3086295 - RNA, 15 nt, Measles virus
auagcacccucucag

SEQ ID NO: 3086296 - RNA, 17 nt, Measles virus
gguguaccugcacagaa

SEQ ID NO: 3086297 - RNA, 17 nt, Measles virus
ccgcauccccacagcuc

SEQ ID NO: 3086298 - RNA, 22 nt, Measles virus
ugcccaauauaacucuccucaa

SEQ ID NO: 3086299 - RNA, 13 nt, Measles virus
acagugauggcag

SEQ ID NO: 3086300 - RNA, 17 nt, Measles virus
gcccccaccccccgaaa

SEQ ID NO: 3086301 - RNA, 23 nt, Measles virus
ggcaccgcgcccccaccccccga

SEQ ID NO: 3086302 - RNA, 17 nt, Measles virus
accagagggagccccca

SEQ ID NO: 3086303 - RNA, 21 nt, Measles virus
cccagaccccggcccgcggca

SEQ ID NO: 3086304 - RNA, 18 nt, Measles virus
caccgacaauccaagacg

SEQ ID NO: 3086305 - RNA, 22 nt, Measles virus
agaaucccgagugggcaccauu

SEQ ID NO: 3086306 - RNA, 19 nt, Measles virus
ggaagcacacccaccccac

SEQ ID NO: 3086307 - RNA, 21 nt, Measles virus
cccggacaaaaaagcccccuc

SEQ ID NO: 3086308 - RNA, 14 nt, Measles virus
cagcuuugucuggu

SEQ ID NO: 3086309 - RNA, 16 nt, Measles virus
ccccuagggccuccaa

SEQ ID NO: 3086310 - RNA, 20 nt, Measles virus
gacaguugagcuuaaaauca

SEQ ID NO: 3086311 - RNA, 24 nt, Measles virus
guauuacaccguucccagaagaau

SEQ ID NO: 3086312 - RNA, 18 nt, Measles virus
cgaaguuucuauucccag

SEQ ID NO: 3086313 - RNA, 16 nt, Measles virus
accaguuccagaggac

SEQ ID NO: 3086314 - RNA, 21 nt, Measles virus
cuaccuccaugacccugaguu

SEQ ID NO: 3086315 - RNA, 14 nt, Measles virus
cucugcuccaagaa

SEQ ID NO: 3086316 - RNA, 18 nt, Measles virus
gacaccgggaaucccaga

SEQ ID NO: 3086317 - RNA, 18 nt, Measles virus
guccucugcuccaagaau

SEQ ID NO: 3086318 - RNA, 10 nt, Measles virus
cucuccucaa

SEQ ID NO: 3086319 - RNA, 21 nt, Measles virus
cugaaaaugucaggaaauaca

SEQ ID NO: 3086320 - RNA, 20 nt, Measles virus
gaccacccugggccaccagc

SEQ ID NO: 3086321 - RNA, 14 nt, Measles virus
acacaaggccacca

SEQ ID NO: 3086322 - RNA, 18 nt, Measles virus
gcuagccauugcaggcau

SEQ ID NO: 3086323 - RNA, 13 nt, Measles virus
gcucaagcuucag

SEQ ID NO: 3086324 - RNA, 15 nt, Measles virus
aaggacgugcugaca

SEQ ID NO: 3086325 - RNA, 20 nt, Measles virus
gcaccaaucuagauguaacu

SEQ ID NO: 3086326 - RNA, 18 nt, Measles virus
auugcuaaguuggaggau

SEQ ID NO: 3086327 - RNA, 23 nt, Measles virus
cacugcccgguggucgaggugaa

SEQ ID NO: 3086328 - RNA, 15 nt, Measles virus
gagaggccagccagc

SEQ ID NO: 3086329 - RNA, 15 nt, Measles virus
ccagcagccgacagc

SEQ ID NO: 3086330 - RNA, 14 nt, Measles virus
acagcugcucagau

SEQ ID NO: 3086331 - RNA, 19 nt, Measles virus
accugcaaggaagaggagg

SEQ ID NO: 3086332 - RNA, 14 nt, Measles virus
acgacuucagagau

SEQ ID NO: 3086333 - RNA, 23 nt, Measles virus
gaucuggagaaagcgaugacgac

SEQ ID NO: 3086334 - RNA, 15 nt, Measles virus
cucugucacagggaa

SEQ ID NO: 3086335 - RNA, 14 nt, Measles virus
ucauccacaauguc

SEQ ID NO: 3086336 - RNA, 17 nt, Measles virus
ggaagaggaggcaggca

SEQ ID NO: 3086337 - RNA, 17 nt, Measles virus
uguaaggucgcucugau

SEQ ID NO: 3086338 - RNA, 17 nt, Measles virus
cuagguaguuaggcauu

SEQ ID NO: 3086339 - RNA, 17 nt, Measles virus
aaucccgaccugaaacc

SEQ ID NO: 3086340 - RNA, 12 nt, Measles virus
cacaugagcagu

SEQ ID NO: 3086341 - RNA, 15 nt, Measles virus
cuccaauccagaggc

SEQ ID NO: 3086342 - RNA, 17 nt, Measles virus
cacagccucuccaaguc

SEQ ID NO: 3086343 - RNA, 16 nt, Measles virus
acaugcuuccagcagg

SEQ ID NO: 3086344 - RNA, 15 nt, Measles virus
cauccugauugcagu

SEQ ID NO: 3086345 - RNA, 16 nt, Measles virus
ggacagcugcugaagg

SEQ ID NO: 3086346 - RNA, 21 nt, Measles virus
aauccagccggcuagaggagg

SEQ ID NO: 3086347 - RNA, 15 nt, Measles virus
ggugccccaggucag

SEQ ID NO: 3086348 - RNA, 17 nt, Measles virus
gacuccuuagacagauc

SEQ ID NO: 3086349 - RNA, 20 nt, Measles virus
uauccaaauuguaaucagga

SEQ ID NO: 3086350 - RNA, 18 nt, Measles virus
aaccgcauccccacagcu

SEQ ID NO: 3086351 - RNA, 10 nt, Measles virus
aaaccagagg

SEQ ID NO: 3086352 - RNA, 13 nt, Measles virus
gcauccccacagc

SEQ ID NO: 3086353 - RNA, 23 nt, Measles virus
uuccuagcugucucaaagggaaa

SEQ ID NO: 3086354 - RNA, 17 nt, Measles virus
ucuggagaaagcgauga

SEQ ID NO: 3086355 - RNA, 13 nt, Measles virus
uuaugaucacagc

SEQ ID NO: 3086356 - RNA, 13 nt, Measles virus
aaggccccucccc

SEQ ID NO: 3086357 - RNA, 20 nt, Measles virus
ggaguacgacuucagagauc

SEQ ID NO: 3086358 - RNA, 22 nt, Measles virus
cagggcaaccaaucaguuccua

SEQ ID NO: 3086359 - RNA, 20 nt, Measles virus
ucagcaacugcaugguggcu

SEQ ID NO: 3086360 - RNA, 22 nt, Measles virus
caauauauuaaagaaaacuuug

SEQ ID NO: 3086361 - RNA, 14 nt, Measles virus
ucaaauuguagcca

SEQ ID NO: 3086362 - RNA, 13 nt, Measles virus
gccgacagccagc

SEQ ID NO: 3086363 - RNA, 16 nt, Measles virus
cuccggcuucccucug

SEQ ID NO: 3086364 - RNA, 22 nt, Measles virus
gcaucuuagagagcagaggaau

SEQ ID NO: 3086365 - RNA, 17 nt, Measles virus
cagccagcagccgacag

SEQ ID NO: 3086366 - RNA, 15 nt, Measles virus
uuaaagaaaacuuug

SEQ ID NO: 3086367 - RNA, 19 nt, Measles virus
cagauacuauacagaaauc

SEQ ID NO: 3086368 - RNA, 20 nt, Measles virus
accgcauccccacagcuccc

SEQ ID NO: 3086369 - RNA, 15 nt, Measles virus
gcagccaaaaugccu

SEQ ID NO: 3086370 - RNA, 17 nt, Measles virus
accgaaccagaguccag

SEQ ID NO: 3086371 - RNA, 21 nt, Measles virus
cgaauaaaugccuucuacaaa

SEQ ID NO: 3086372 - RNA, 14 nt, Measles virus
cucuggcugucuca

SEQ ID NO: 3086373 - RNA, 24 nt, Measles virus
accaguccaugcugaacucucaag

SEQ ID NO: 3086374 - RNA, 23 nt, Measles virus
ucuuacagggacaucaaaauccu

SEQ ID NO: 3086375 - RNA, 18 nt, Measles virus
gucacuaugacaucccag

SEQ ID NO: 3086376 - RNA, 17 nt, Measles virus
gagacgaugaaucugaa

SEQ ID NO: 3086377 - RNA, 16 nt, Measles virus
agagcaagccuggaaa

SEQ ID NO: 3086378 - RNA, 17 nt, Measles virus
acccacauccuaaggga

SEQ ID NO: 3086379 - RNA, 23 nt, Measles virus
acccacugauggauaucaaugaa

SEQ ID NO: 3086380 - RNA, 21 nt, Measles virus
gcagcccucugucacagggaa

SEQ ID NO: 3086381 - RNA, 18 nt, Measles virus
cccaggggccgacagcca

SEQ ID NO: 3086382 - RNA, 18 nt, Measles virus
agaucucaaagaaaguca

SEQ ID NO: 3086383 - RNA, 20 nt, Measles virus
ucacuaugacaucccaggga

SEQ ID NO: 3086384 - RNA, 14 nt, Measles virus
ucacacacgguuca

SEQ ID NO: 3086385 - RNA, 22 nt, Measles virus
gacuaucccgccaaugaagaac

SEQ ID NO: 3086386 - RNA, 23 nt, Measles virus
cacugugucagaacaucaagcac

SEQ ID NO: 3086387 - RNA, 14 nt, Measles virus
gcugaugaagauaa

SEQ ID NO: 3086388 - RNA, 18 nt, Measles virus
ucaagaaaucuccaggca

SEQ ID NO: 3086389 - RNA, 16 nt, Measles virus
agggaaacugcucagg

SEQ ID NO: 3086390 - RNA, 15 nt, Measles virus
uauaacucuccucaa

SEQ ID NO: 3086391 - RNA, 17 nt, Measles virus
uggaggaugccaaggaa

SEQ ID NO: 3086392 - RNA, 16 nt, Measles virus
accaaccauccacucc

SEQ ID NO: 3086393 - RNA, 20 nt, Measles virus
uccaugcugaacucucaagc

SEQ ID NO: 3086394 - RNA, 23 nt, Measles virus
caccccgcaaaaaggaaaggcca

SEQ ID NO: 3086395 - RNA, 22 nt, Measles virus
uucuauucccagcuuugucugg

SEQ ID NO: 3086396 - RNA, 12 nt, Measles virus
agaauaaugaag

SEQ ID NO: 3086397 - RNA, 15 nt, Measles virus
cacuaacccuccuca

SEQ ID NO: 3086398 - RNA, 18 nt, Measles virus
caacccgcgcaccccagc

SEQ ID NO: 3086399 - RNA, 19 nt, Measles virus
aagaaaacuuugaaaauac

SEQ ID NO: 3086400 - RNA, 17 nt, Measles virus
aaugccgcacugauaca

SEQ ID NO: 3086401 - RNA, 14 nt, Measles virus
ucacucgggaagau

SEQ ID NO: 3086402 - RNA, 17 nt, Measles virus
uugguagauccacagca

SEQ ID NO: 3086403 - RNA, 12 nt, Measles virus
caugccagaggg

SEQ ID NO: 3086404 - RNA, 21 nt, Measles virus
cggaccaagcgagaggccagc

SEQ ID NO: 3086405 - RNA, 24 nt, Measles virus
uauacaaaaccaaccacaacaaug

SEQ ID NO: 3086406 - RNA, 17 nt, Measles virus
aggggugguagggauag

SEQ ID NO: 3086407 - RNA, 21 nt, Measles virus
auacaggagacuacugagaac

SEQ ID NO: 3086408 - RNA, 16 nt, Measles virus
ugcagaacuucuagga

SEQ ID NO: 3086409 - RNA, 17 nt, Measles virus
cagacaacccaggacag

SEQ ID NO: 3086410 - RNA, 17 nt, Measles virus
cucaacccgaaccagca

SEQ ID NO: 3086411 - RNA, 22 nt, Measles virus
cuuaggaguuauccggcccacu

SEQ ID NO: 3086412 - RNA, 14 nt, Measles virus
ccagcacccagcca

SEQ ID NO: 3086413 - RNA, 20 nt, Measles virus
aguuucuauucccagcuuug

SEQ ID NO: 3086414 - RNA, 19 nt, Measles virus
ucagacaacccaggacagg

SEQ ID NO: 3086415 - RNA, 21 nt, Measles virus
caacauccgccuacccuccau

SEQ ID NO: 3086416 - RNA, 15 nt, Measles virus
gccuaaucugagcag

SEQ ID NO: 3086417 - RNA, 20 nt, Measles virus
auccacgagcuccugaaacu

SEQ ID NO: 3086418 - RNA, 13 nt, Measles virus
aggccgagcacug

SEQ ID NO: 3086419 - RNA, 17 nt, Measles virus
gcugacucuaucauggu

SEQ ID NO: 3086420 - RNA, 13 nt, Measles virus
acaaugggauggc

SEQ ID NO: 3086421 - RNA, 23 nt, Measles virus
ccagccaaccaaccauccacucc

SEQ ID NO: 3086422 - RNA, 21 nt, Measles virus
gacaccgggaaucccagaauc

SEQ ID NO: 3086423 - RNA, 18 nt, Measles virus
acauccugauugcagugu

SEQ ID NO: 3086424 - RNA, 18 nt, Measles virus
ggaccagauauugaggag

SEQ ID NO: 3086425 - RNA, 21 nt, Measles virus
gaucacacacgguucagggau

SEQ ID NO: 3086426 - RNA, 18 nt, Measles virus
agcaaaaugggcuguccc

SEQ ID NO: 3086427 - RNA, 17 nt, Measles virus
gcuucaaguaggagaca

SEQ ID NO: 3086428 - RNA, 17 nt, Measles virus
ccaugcugaacucucaa

SEQ ID NO: 3086429 - RNA, 16 nt, Measles virus
ccgcccccgaacccca

SEQ ID NO: 3086430 - RNA, 22 nt, Measles virus
caacccgaaccagcacccaaga

SEQ ID NO: 3086431 - RNA, 14 nt, Measles virus
aggaugccaaggaa

SEQ ID NO: 3086432 - RNA, 13 nt, Measles virus
aaccccacaaccg

SEQ ID NO: 3086433 - RNA, 22 nt, Measles virus
cuugaccaaaacggguuuucug

SEQ ID NO: 3086434 - RNA, 13 nt, Measles virus
aggacaucaagga

SEQ ID NO: 3086435 - RNA, 20 nt, Measles virus
caacucuacuggaggccagg

SEQ ID NO: 3086436 - RNA, 22 nt, Measles virus
ucagggcccacuacaaucagag

SEQ ID NO: 3086437 - RNA, 13 nt, Measles virus
aaagaucucaaag

SEQ ID NO: 3086438 - RNA, 13 nt, Measles virus
cuaauccugcccu

SEQ ID NO: 3086439 - RNA, 16 nt, Measles virus
cggcuaucgugacagg

SEQ ID NO: 3086440 - RNA, 20 nt, Measles virus
cacagucacucgggaagaug

SEQ ID NO: 3086441 - RNA, 16 nt, Measles virus
uagggugcaagaucau

SEQ ID NO: 3086442 - RNA, 21 nt, Measles virus
ucagggcccacuacaaucaga

SEQ ID NO: 3086443 - RNA, 19 nt, Measles virus
caagcaaaaugggcugucc

SEQ ID NO: 3086444 - RNA, 12 nt, Measles virus
agacccagcacc

SEQ ID NO: 3086445 - RNA, 18 nt, Measles virus
gcccccccggugcccaca

SEQ ID NO: 3086446 - RNA, 16 nt, Measles virus
aaacuuugaaaauacg

SEQ ID NO: 3086447 - RNA, 17 nt, Measles virus
aggacaggaccgagcca

SEQ ID NO: 3086448 - RNA, 11 nt, Measles virus
cagauccucuc

SEQ ID NO: 3086449 - RNA, 19 nt, Measles virus
gaugcugacucuaucaugg

SEQ ID NO: 3086450 - RNA, 17 nt, Measles virus
cuaucccgccaaugaag

SEQ ID NO: 3086451 - RNA, 22 nt, Measles virus
uccggaacccuaauccugcccu

SEQ ID NO: 3086452 - RNA, 16 nt, Measles virus
caccagaugcugauga

SEQ ID NO: 3086453 - RNA, 21 nt, Measles virus
cguugauaacuggaaaucauu

SEQ ID NO: 3086454 - RNA, 17 nt, Measles virus
ggagauauccauccagg

SEQ ID NO: 3086455 - RNA, 22 nt, Measles virus
ucaagcaaccaccgcauccagc

SEQ ID NO: 3086456 - RNA, 22 nt, Measles virus
accacccugggccaccagcucc

SEQ ID NO: 3086457 - RNA, 22 nt, Measles virus
cggcccccccggugcccacagg

SEQ ID NO: 3086458 - RNA, 20 nt, Measles virus
cucuucucgaagggaccaaa

SEQ ID NO: 3086459 - RNA, 13 nt, Measles virus
agucagugauaag

SEQ ID NO: 3086460 - RNA, 18 nt, Measles virus
gccaccaccagccauccc

SEQ ID NO: 3086461 - RNA, 19 nt, Measles virus
cacaauccggaaugcucaa

SEQ ID NO: 3086462 - RNA, 16 nt, Measles virus
gucagggaucuggaga

SEQ ID NO: 3086463 - RNA, 19 nt, Measles virus
agcuugggaaaacucucaa

SEQ ID NO: 3086464 - RNA, 16 nt, Measles virus
ccgaggaacuccucaa

SEQ ID NO: 3086465 - RNA, 22 nt, Measles virus
cgaugaaucugaaaacagcgau

SEQ ID NO: 3086466 - RNA, 16 nt, Measles virus
gcuuuauguacauguu

SEQ ID NO: 3086467 - RNA, 15 nt, Measles virus
ccagcacccaagagc

SEQ ID NO: 3086468 - RNA, 20 nt, Measles virus
ccuuaaccacugcuuuacug

SEQ ID NO: 3086469 - RNA, 22 nt, Measles virus
aagucccccggucuccuccucu

SEQ ID NO: 3086470 - RNA, 20 nt, Measles virus
uuaacucuccaaacacccac

SEQ ID NO: 3086471 - RNA, 14 nt, Measles virus
gccaccaccagcca

SEQ ID NO: 3086472 - RNA, 22 nt, Measles virus
gugauugccuccuaaguuccac

SEQ ID NO: 3086473 - RNA, 16 nt, Measles virus
gaaugucaucaagucc

SEQ ID NO: 3086474 - RNA, 15 nt, Measles virus
ccuucuacaaagaca

SEQ ID NO: 3086475 - RNA, 22 nt, Measles virus
aucccaaucugcguccuccucg

SEQ ID NO: 3086476 - RNA, 12 nt, Measles virus
gccaggugcacc

SEQ ID NO: 3086477 - RNA, 19 nt, Measles virus
gcuccgaacacagaccacc

SEQ ID NO: 3086478 - RNA, 16 nt, Measles virus
ugccaaccccaugcca

SEQ ID NO: 3086479 - RNA, 21 nt, Measles virus
ggcguugccacagcugcucag

SEQ ID NO: 3086480 - RNA, 14 nt, Measles virus
auuuugagcaacca

SEQ ID NO: 3086481 - RNA, 16 nt, Measles virus
acucagaggugcuuuc

SEQ ID NO: 3086482 - RNA, 17 nt, Measles virus
augccucuuagccugga

SEQ ID NO: 3086483 - RNA, 12 nt, Measles virus
gccauggcagca

SEQ ID NO: 3086484 - RNA, 17 nt, Measles virus
aaaaugagggcaugcca

SEQ ID NO: 3086485 - RNA, 13 nt, Measles virus
auuuuaaggacaa

SEQ ID NO: 3086486 - RNA, 13 nt, Measles virus
gaagccauggcag

SEQ ID NO: 3086487 - RNA, 23 nt, Measles virus
caccaaccgcauccccacagcuc

SEQ ID NO: 3086488 - RNA, 14 nt, Measles virus
caccugcaaggaag

SEQ ID NO: 3086489 - RNA, 16 nt, Measles virus
acucccacgacuggag

SEQ ID NO: 3086490 - RNA, 15 nt, Measles virus
ggccgucgaggaagc

SEQ ID NO: 3086491 - RNA, 22 nt, Measles virus
uccaaagggaaugggauucagu

SEQ ID NO: 3086492 - RNA, 21 nt, Measles virus
aaaggugucagcuuccagcuc

SEQ ID NO: 3086493 - RNA, 15 nt, Measles virus
cccagcacccagcca

SEQ ID NO: 3086494 - RNA, 21 nt, Measles virus
caucuuagagagcagaggaau

SEQ ID NO: 3086495 - RNA, 18 nt, Measles virus
caaagggaaacugcucag

SEQ ID NO: 3086496 - RNA, 20 nt, Measles virus
aaguugggaaugucaucaag

SEQ ID NO: 3086497 - RNA, 16 nt, Measles virus
caggguguccaagacu

SEQ ID NO: 3086498 - RNA, 21 nt, Measles virus
ggguuguugaggacagcgauc

SEQ ID NO: 3086499 - RNA, 12 nt, Measles virus
ugcgauccuggg

SEQ ID NO: 3086500 - RNA, 16 nt, Measles virus
ccucugucacagggaa

SEQ ID NO: 3086501 - RNA, 23 nt, Measles virus
uccacacucuggcugucucagga

SEQ ID NO: 3086502 - RNA, 14 nt, Measles virus
auccacccuggaag

SEQ ID NO: 3086503 - RNA, 16 nt, Measles virus
uaguagcuauccugga

SEQ ID NO: 3086504 - RNA, 16 nt, Measles virus
aucaggggucagggaa

SEQ ID NO: 3086505 - RNA, 19 nt, Measles virus
gacaaacuauuuugagcaa

SEQ ID NO: 3086506 - RNA, 19 nt, Measles virus
cugccauauucauggcagu

SEQ ID NO: 3086507 - RNA, 16 nt, Measles virus
cugcaaggaagaggag

SEQ ID NO: 3086508 - RNA, 22 nt, Measles virus
ccgagcccaucggcucacuggc

SEQ ID NO: 3086509 - RNA, 14 nt, Measles virus
ucaugccagagggg

SEQ ID NO: 3086510 - RNA, 15 nt, Measles virus
gcaagccuggaaacu

SEQ ID NO: 3086511 - RNA, 20 nt, Measles virus
aggaaccagguccacacagc

SEQ ID NO: 3086512 - RNA, 11 nt, Measles virus
agaagaaugcu

SEQ ID NO: 3086513 - RNA, 15 nt, Measles virus
cacagagguguuauc

SEQ ID NO: 3086514 - RNA, 22 nt, Measles virus
gccuccggggguccaccaaguc

SEQ ID NO: 3086515 - RNA, 13 nt, Measles virus
acugcagaaggag

SEQ ID NO: 3086516 - RNA, 18 nt, Measles virus
gccccgacacaaggccac

SEQ ID NO: 3086517 - RNA, 14 nt, Measles virus
uaacggcugcugaa

SEQ ID NO: 3086518 - RNA, 14 nt, Measles virus
cuaacccuccucac

SEQ ID NO: 3086519 - RNA, 24 nt, Measles virus
ccaaucaguuccuagcugucucaa

SEQ ID NO: 3086520 - RNA, 22 nt, Measles virus
acaacccaggacaggaccgagc

SEQ ID NO: 3086521 - RNA, 16 nt, Measles virus
cccacagccucuccaa

SEQ ID NO: 3086522 - RNA, 18 nt, Measles virus
agggucagaguugucaca

SEQ ID NO: 3086523 - RNA, 21 nt, Measles virus
ucucaaacaugucgcuguccc

SEQ ID NO: 3086524 - RNA, 19 nt, Measles virus
ggccugaggacaccucaga

SEQ ID NO: 3086525 - RNA, 21 nt, Measles virus
ccaauauaacucuccucaaua

SEQ ID NO: 3086526 - RNA, 20 nt, Measles virus
cccucaagaaaucuccaggc

SEQ ID NO: 3086527 - RNA, 23 nt, Measles virus
gagauccauaagagccucagcac

SEQ ID NO: 3086528 - RNA, 17 nt, Measles virus
gaggggacugugugcag

SEQ ID NO: 3086529 - RNA, 13 nt, Measles virus
aauacgaaguuuc

SEQ ID NO: 3086530 - RNA, 15 nt, Measles virus
cgaaaaccagaggga

SEQ ID NO: 3086531 - RNA, 18 nt, Measles virus
accugucuuacagccuga

SEQ ID NO: 3086532 - RNA, 21 nt, Measles virus
cuagauuacauuuucauaacu

SEQ ID NO: 3086533 - RNA, 18 nt, Measles virus
aaccgaucacaugauguc

SEQ ID NO: 3086534 - RNA, 20 nt, Measles virus
aggagacuacugagaacagu

SEQ ID NO: 3086535 - RNA, 15 nt, Measles virus
aggagaaagaagagu

SEQ ID NO: 3086536 - RNA, 20 nt, Measles virus
gaaacugcagaaggagggga

SEQ ID NO: 3086537 - RNA, 20 nt, Measles virus
ucaagcuucaggugaagggu

SEQ ID NO: 3086538 - RNA, 20 nt, Measles virus
uaacucuccucaauaacugc

SEQ ID NO: 3086539 - RNA, 20 nt, Measles virus
gauggcagaagagcaggcac

SEQ ID NO: 3086540 - RNA, 20 nt, Measles virus
guggcugcugaagaacucau

SEQ ID NO: 3086541 - RNA, 12 nt, Measles virus
uagccaugcugg

SEQ ID NO: 3086542 - RNA, 16 nt, Measles virus
gugaacucaacucuac

SEQ ID NO: 3086543 - RNA, 22 nt, Measles virus
gaagcagaucaacaggcaaaau

SEQ ID NO: 3086544 - RNA, 20 nt, Measles virus
ccugucauuauuuggcccca

SEQ ID NO: 3086545 - RNA, 18 nt, Measles virus
ccucccccugcaugcugc

SEQ ID NO: 3086546 - RNA, 20 nt, Measles virus
cccacucucauauuccauau

SEQ ID NO: 3086547 - RNA, 20 nt, Measles virus
ccauuauaaaaaacuuagga

SEQ ID NO: 3086548 - RNA, 19 nt, Measles virus
caauccagaggcaacaacu

SEQ ID NO: 3086549 - RNA, 20 nt, Measles virus
caauauauuaaagaaaacuu

SEQ ID NO: 3086550 - RNA, 20 nt, Measles virus
auagaagacaaagagucaac

SEQ ID NO: 3086551 - RNA, 23 nt, Measles virus
aggcggcccaagcacagaacagc

SEQ ID NO: 3086552 - RNA, 13 nt, Measles virus
aauacaugauguu

SEQ ID NO: 3086553 - RNA, 16 nt, Measles virus
caaacucaguuccaau

SEQ ID NO: 3086554 - RNA, 22 nt, Measles virus
cauuguuauaaaaaacuuagga

SEQ ID NO: 3086555 - RNA, 22 nt, Measles virus
ccaaccucuucacuguuccaau

SEQ ID NO: 3086556 - RNA, 20 nt, Measles virus
cuaaguuccacaaugacaga

SEQ ID NO: 3086557 - RNA, 14 nt, Measles virus
acuuaucaugaguu

SEQ ID NO: 3086558 - RNA, 17 nt, Measles virus
gauguaacuaacucgau

SEQ ID NO: 3086559 - RNA, 14 nt, Measles virus
ccgguguuccauau

SEQ ID NO: 3086560 - RNA, 12 nt, Measles virus
agcugcucagau

SEQ ID NO: 3086561 - RNA, 18 nt, Measles virus
agggucgaucgcuccgau

SEQ ID NO: 3086562 - RNA, 20 nt, Measles virus
agggcucaaauugcucagau

SEQ ID NO: 3086563 - RNA, 13 nt, Measles virus
gccuuggccaaaa

SEQ ID NO: 3086564 - RNA, 22 nt, Measles virus
cuuccaggguugaacaugcugu

SEQ ID NO: 3086565 - RNA, 19 nt, Human
auuagcauuugucaacaaa

SEQ ID NO: 3086566 - RNA, 22 nt, Human
aacuucuccccugguagaaaga

SEQ ID NO: 3086567 - RNA, 16 nt, Human
ucacagccacuuggga

SEQ ID NO: 3086568 - RNA, 17 nt, Human
ucaagcaagauuucaga

SEQ ID NO: 3086569 - RNA, 19 nt, Human
ugauauguugguagauucu

SEQ ID NO: 3086570 - RNA, 22 nt, Human
uuuaugggucagaguuccgacu

SEQ ID NO: 3086571 - RNA, 19 nt, Human
uugcacaaaccaauuaaac

SEQ ID NO: 3086572 - RNA, 19 nt, Human
auuuacccuucuuuucuga

SEQ ID NO: 3086573 - RNA, 21 nt, Human
agcaaaaccaaauauuccaga

SEQ ID NO: 3086574 - RNA, 17 nt, Human
aauagaaauggggaacu

SEQ ID NO: 3086575 - RNA, 17 nt, Human
acuauugcuugcacaaa

SEQ ID NO: 3086576 - RNA, 11 nt, Human
cccuucuuuuu

SEQ ID NO: 3086577 - RNA, 20 nt, Human
cuaagcacgggccauaugaa

SEQ ID NO: 3086578 - RNA, 23 nt, Human
cuaagcacgggccauaugaauaa

SEQ ID NO: 3086579 - RNA, 12 nt, Human
gugggcuaagca

SEQ ID NO: 3086580 - RNA, 15 nt, Human
uaagccaugggagac

SEQ ID NO: 3086581 - RNA, 19 nt, Human
ugacucuuggcacagcaug

SEQ ID NO: 3086582 - RNA, 14 nt, Human
ugacucuuggcaca

SEQ ID NO: 3086583 - RNA, 20 nt, Human
acugauguaugaggaauuuc

SEQ ID NO: 3086584 - RNA, 18 nt, Human
agaagaugaaugagcaaa

SEQ ID NO: 3086585 - RNA, 22 nt, Human
cuaagaaagcccuuaggaagaa

SEQ ID NO: 3086586 - RNA, 21 nt, Human
gaagggcuuggacucaagcaa

SEQ ID NO: 3086587 - RNA, 14 nt, Human
uccagagacuggga

SEQ ID NO: 3086588 - RNA, 17 nt, Human
ucagaaucucucuucuu

SEQ ID NO: 3086589 - RNA, 16 nt, Human
agcauuugucaacaaa

SEQ ID NO: 3086590 - RNA, 20 nt, Human
uuuacccuucuuuucugacu

SEQ ID NO: 3086591 - RNA, 17 nt, Human
caaauauuccagagacu

SEQ ID NO: 3086592 - RNA, 13 nt, Human
caaauauuccaga

SEQ ID NO: 3086593 - RNA, 15 nt, Human
uagaaagaagaugaa

SEQ ID NO: 3086594 - RNA, 13 nt, Human
uccccuucacucc

SEQ ID NO: 3086595 - RNA, 14 nt, Human
cuauuuuucagaau

SEQ ID NO: 3086596 - RNA, 12 nt, Human
caagauuucaga

SEQ ID NO: 3086597 - RNA, 14 nt, Human
auugcuugcacaaa

SEQ ID NO: 3086598 - RNA, 15 nt, Human
cuuaggaagaauuuu

SEQ ID NO: 3086599 - RNA, 14 nt, Human
aacuuggaaauagu

SEQ ID NO: 3086600 - RNA, 15 nt, Human
aagcaagauuucaga

SEQ ID NO: 3086601 - RNA, 16 nt, Human
aagcaagauuucagau

SEQ ID NO: 3086602 - RNA, 16 nt, Human
aaccaaauauuccaga

SEQ ID NO: 3086603 - RNA, 19 nt, Human
uaaacccaguaguggugac

SEQ ID NO: 3086604 - RNA, 14 nt, Human
uccacagugacucc

SEQ ID NO: 3086605 - RNA, 19 nt, Human
agaccuaacgagaaauaga

SEQ ID NO: 3086606 - RNA, 15 nt, Human
agaaagaagaugaau

SEQ ID NO: 3086607 - RNA, 21 nt, Human
agaacucaugacggaagaguu

SEQ ID NO: 3086608 - RNA, 15 nt, Human
auuugucaacaaagu

SEQ ID NO: 3086609 - RNA, 13 nt, Human
auuugucaacaaa

SEQ ID NO: 3086610 - RNA, 18 nt, Human
aucaguagccagcaucug

SEQ ID NO: 3086611 - RNA, 19 nt, Human
auguaugaggaauuucugu

SEQ ID NO: 3086612 - RNA, 18 nt, Human
acuauuuuucagaaucuc

SEQ ID NO: 3086613 - RNA, 14 nt, Human
acuauuuuucagaa

SEQ ID NO: 3086614 - RNA, 19 nt, Human
aaagcccuuaggaagaauu

SEQ ID NO: 3086615 - RNA, 19 nt, Human
cuggcaguggaacuaagaa

SEQ ID NO: 3086616 - RNA, 21 nt, Human
gagccagcagccuggcucucc

SEQ ID NO: 3086617 - RNA, 16 nt, Human
gugagcuccuaagcca

SEQ ID NO: 3086618 - RNA, 12 nt, Human
uaugaauaacau

SEQ ID NO: 3086619 - RNA, 15 nt, Human
uauugcuugcacaaa

SEQ ID NO: 3086620 - RNA, 22 nt, Human
uauugcagcgauuaauaacagg

SEQ ID NO: 3086621 - RNA, 18 nt, Human
uauguugguagauucuaa

SEQ ID NO: 3086622 - RNA, 19 nt, Human
uuauugcagcgauuaauaa

SEQ ID NO: 3086623 - RNA, 19 nt, Human
uugcagcgauuaauaacag

SEQ ID NO: 3086624 - RNA, 18 nt, Human
uugcagcgauuaauaaca

SEQ ID NO: 3086625 - RNA, 17 nt, Human
cgacugccaucuuggac

SEQ ID NO: 3086626 - RNA, 23 nt, Human
ccgcaggauuugggcucuuggaa

SEQ ID NO: 3086627 - RNA, 15 nt, Human
auuucagauuuguga

SEQ ID NO: 3086628 - RNA, 19 nt, Human
aagaaagcccuuaggaaga

SEQ ID NO: 3086629 - RNA, 14 nt, Human
guucuucaucuaag

SEQ ID NO: 3086630 - RNA, 14 nt, Human
aauccuggggaaca

SEQ ID NO: 3086631 - RNA, 21 nt, Human
aauccuggggaacauagaacu

SEQ ID NO: 3086632 - RNA, 18 nt, Human
uaacauggugugcuucuu

SEQ ID NO: 3086633 - RNA, 12 nt, Human
aauauuccagag

SEQ ID NO: 3086634 - RNA, 12 nt, Human
acccuucuuuuc

SEQ ID NO: 3086635 - RNA, 22 nt, Human
agaaagcccuuaggaagaauuu

SEQ ID NO: 3086636 - RNA, 20 nt, Human
agaaagcccuuaggaagaau

SEQ ID NO: 3086637 - RNA, 14 nt, Human
agcaagauuucaga

SEQ ID NO: 3086638 - RNA, 19 nt, Human
ugaccugccaggcacacug

SEQ ID NO: 3086639 - RNA, 16 nt, Human
ugaccugccaggcaca

SEQ ID NO: 3086640 - RNA, 19 nt, Human
ugacuauuuuucagaaucu

SEQ ID NO: 3086641 - RNA, 15 nt, Human
agucuuuuccaugaa

SEQ ID NO: 3086642 - RNA, 13 nt, Human
agucuuuuccaug

SEQ ID NO: 3086643 - RNA, 22 nt, Human
aggccaacccaaaauaagcagg

SEQ ID NO: 3086644 - RNA, 20 nt, Human
agggacucaucauuuccauu

SEQ ID NO: 3086645 - RNA, 15 nt, Human
aucucucuucuuuuc

SEQ ID NO: 3086646 - RNA, 22 nt, Human
cauuuacccuucuuuucugacu

SEQ ID NO: 3086647 - RNA, 21 nt, Human
ucagggagugggcuaagcacg

SEQ ID NO: 3086648 - RNA, 21 nt, Human
uauugcuugcacaaaccaauu

SEQ ID NO: 3086649 - RNA, 23 nt, Human
agcagccuggcucucccagccag

SEQ ID NO: 3086650 - RNA, 19 nt, Human
agcaggcgugaccugccag

SEQ ID NO: 3086651 - RNA, 23 nt, Human
caucaccuccccccccccgccac

SEQ ID NO: 3086652 - RNA, 15 nt, Molluscum contagiosum virus
aggcacgaggcagcc

SEQ ID NO: 3086653 - RNA, 14 nt, Molluscum contagiosum virus
guguccacgacacu

SEQ ID NO: 3086654 - RNA, 18 nt, Molluscum contagiosum virus
guugcgagccagccaggc

SEQ ID NO: 3086655 - RNA, 16 nt, Molluscum contagiosum virus
cgcccuggagcgcagu

SEQ ID NO: 3086656 - RNA, 17 nt, Molluscum contagiosum virus
acgugcacguggcgcac

SEQ ID NO: 3086657 - RNA, 24 nt, Molluscum contagiosum virus
ccuacgaggugcugcgccacgugc

SEQ ID NO: 3086658 - RNA, 22 nt, Molluscum contagiosum virus
gcaucccugcgcaccugcacga

SEQ ID NO: 3086659 - RNA, 14 nt, Molluscum contagiosum virus
ggcgcgcgcgcugc

SEQ ID NO: 3086660 - RNA, 14 nt, Molluscum contagiosum virus
gccccgacgccagc

SEQ ID NO: 3086661 - RNA, 12 nt, Molluscum contagiosum virus
cauccgcgcgcu

SEQ ID NO: 3086662 - RNA, 15 nt, Molluscum contagiosum virus
gcgcgcgccggaacu

SEQ ID NO: 3086663 - RNA, 16 nt, Molluscum contagiosum virus
aggcugcugccgcgcg

SEQ ID NO: 3086664 - RNA, 19 nt, Molluscum contagiosum virus
ccguccaguaagcgacagg

SEQ ID NO: 3086665 - RNA, 16 nt, Molluscum contagiosum virus
cuuccugcuggcgcgc

SEQ ID NO: 3086666 - RNA, 18 nt, Molluscum contagiosum virus
gcagugccaagguucugg

SEQ ID NO: 3086667 - RNA, 23 nt, Molluscum contagiosum virus
agauuggaggaggaagcaggucu

SEQ ID NO: 3086668 - RNA, 16 nt, Molluscum contagiosum virus
ggcagcagcgugcaua

SEQ ID NO: 3086669 - RNA, 11 nt, Molluscum contagiosum virus
ucccagcaccg

SEQ ID NO: 3086670 - RNA, 20 nt, Molluscum contagiosum virus
ucagcggcggccccugccuu

SEQ ID NO: 3086671 - RNA, 12 nt, Molluscum contagiosum virus
ugcguggacagc

SEQ ID NO: 3086672 - RNA, 13 nt, Molluscum contagiosum virus
acgacgagcacua

SEQ ID NO: 3086673 - RNA, 17 nt, Molluscum contagiosum virus
cguccacgcaggacugg

SEQ ID NO: 3086674 - RNA, 19 nt, Molluscum contagiosum virus
cgugaccauggacacgcug

SEQ ID NO: 3086675 - RNA, 21 nt, Molluscum contagiosum virus
ucucuccccuucagaggacuu

SEQ ID NO: 3086676 - RNA, 15 nt, Molluscum contagiosum virus
gacuagccugugccc

SEQ ID NO: 3086677 - RNA, 13 nt, Molluscum contagiosum virus
cgcgcagacgcgg

SEQ ID NO: 3086678 - RNA, 18 nt, Molluscum contagiosum virus
guacggugccguccccgc

SEQ ID NO: 3086679 - RNA, 14 nt, Molluscum contagiosum virus
cuucgaccucugcu

SEQ ID NO: 3086680 - RNA, 23 nt, Molluscum contagiosum virus
ucgacuuacggacgcccuccucg

SEQ ID NO: 3086681 - RNA, 17 nt, Molluscum contagiosum virus
gcgcaacgcgggccagg

SEQ ID NO: 3086682 - RNA, 20 nt, Molluscum contagiosum virus
uucgaccucugcuucacgcu

SEQ ID NO: 3086683 - RNA, 20 nt, Molluscum contagiosum virus
cccuuccgaguucuggccgc

SEQ ID NO: 3086684 - RNA, 18 nt, Molluscum contagiosum virus
gcccaccagcagccaggc

SEQ ID NO: 3086685 - RNA, 15 nt, Molluscum contagiosum virus
gacgggaacgagguc

SEQ ID NO: 3086686 - RNA, 15 nt, Molluscum contagiosum virus
ucauacuccugcugg

SEQ ID NO: 3086687 - RNA, 17 nt, Molluscum contagiosum virus
aggaucacggcucugcg

SEQ ID NO: 3086688 - RNA, 21 nt, Molluscum contagiosum virus
cacguggugguuggcgugcuc

SEQ ID NO: 3086689 - RNA, 17 nt, Molluscum contagiosum virus
ggccgcuccagagccgc

SEQ ID NO: 3086690 - RNA, 12 nt, Molluscum contagiosum virus
caccgaggagcc

SEQ ID NO: 3086691 - RNA, 20 nt, Molluscum contagiosum virus
gaggacgccggcaagccgag

SEQ ID NO: 3086692 - RNA, 17 nt, Molluscum contagiosum virus
gcggggccggcuuugcg

SEQ ID NO: 3086693 - RNA, 17 nt, Molluscum contagiosum virus
cuuuccggccuguaaau

SEQ ID NO: 3086694 - RNA, 19 nt, Molluscum contagiosum virus
ggugcgccugcacuacugc

SEQ ID NO: 3086695 - RNA, 18 nt, Molluscum contagiosum virus
agcguccggcaugcgcgc

SEQ ID NO: 3086696 - RNA, 17 nt, Molluscum contagiosum virus
acugcagcgagcucgcg

SEQ ID NO: 3086697 - RNA, 13 nt, Molluscum contagiosum virus
gcgccgcugcugg

SEQ ID NO: 3086698 - RNA, 14 nt, Molluscum contagiosum virus
gcaugguggugaga

SEQ ID NO: 3086699 - RNA, 14 nt, Molluscum contagiosum virus
gcgcaccagcugca

SEQ ID NO: 3086700 - RNA, 16 nt, Molluscum contagiosum virus
gccuucugcaagcugc

SEQ ID NO: 3086701 - RNA, 12 nt, Molluscum contagiosum virus
cgugcaggucga

SEQ ID NO: 3086702 - RNA, 17 nt, Molluscum contagiosum virus
uaccugcgacagcugcu

SEQ ID NO: 3086703 - RNA, 20 nt, Molluscum contagiosum virus
gcgcugcuggugcucgccug

SEQ ID NO: 3086704 - RNA, 19 nt, Molluscum contagiosum virus
ccgugcaccucccugugaa

SEQ ID NO: 3086705 - RNA, 23 nt, Molluscum contagiosum virus
ggcgugcgcagcagcucggggcu

SEQ ID NO: 3086706 - RNA, 17 nt, Molluscum contagiosum virus
gcuccuucucagggcuu

SEQ ID NO: 3086707 - RNA, 17 nt, Molluscum contagiosum virus
ccugccagcagagcugc

SEQ ID NO: 3086708 - RNA, 21 nt, Molluscum contagiosum virus
ggugcagccgcugcugcugca

SEQ ID NO: 3086709 - RNA, 14 nt, Molluscum contagiosum virus
gcugagcgggguac

SEQ ID NO: 3086710 - RNA, 20 nt, Molluscum contagiosum virus
ccucgagcgccgugcaguug

SEQ ID NO: 3086711 - RNA, 19 nt, Molluscum contagiosum virus
gcacugccacgcggagcuc

SEQ ID NO: 3086712 - RNA, 15 nt, Molluscum contagiosum virus
cgagagcuacagcau

SEQ ID NO: 3086713 - RNA, 21 nt, Molluscum contagiosum virus
gcaaucgcgugcuugcugcgc

SEQ ID NO: 3086714 - RNA, 22 nt, Molluscum contagiosum virus
accggcagcgcgauugcuggag

SEQ ID NO: 3086715 - RNA, 18 nt, Molluscum contagiosum virus
gacgcgugcauggcacgc

SEQ ID NO: 3086716 - RNA, 22 nt, Molluscum contagiosum virus
gacgggccccuguuggccccgc

SEQ ID NO: 3086717 - RNA, 21 nt, Molluscum contagiosum virus
ggccagcacaagccguccgcc

SEQ ID NO: 3086718 - RNA, 16 nt, Molluscum contagiosum virus
uggcgcccggcgccga

SEQ ID NO: 3086719 - RNA, 18 nt, Molluscum contagiosum virus
ccaccagcagccaggcua

SEQ ID NO: 3086720 - RNA, 12 nt, Molluscum contagiosum virus
caggcacuccag

SEQ ID NO: 3086721 - RNA, 15 nt, Molluscum contagiosum virus
acauaguaccaugac

SEQ ID NO: 3086722 - RNA, 23 nt, Molluscum contagiosum virus
ggcagcggcaaaggcccgcgagc

SEQ ID NO: 3086723 - RNA, 15 nt, Molluscum contagiosum virus
ggcuuugacaugcac

SEQ ID NO: 3086724 - RNA, 18 nt, Molluscum contagiosum virus
uagcgcgcgugugcaugg

SEQ ID NO: 3086725 - RNA, 14 nt, Molluscum contagiosum virus
uacgaaaguacuuu

SEQ ID NO: 3086726 - RNA, 10 nt, Molluscum contagiosum virus
gcacaccccg

SEQ ID NO: 3086727 - RNA, 14 nt, Molluscum contagiosum virus
ccccacugugccag

SEQ ID NO: 3086728 - RNA, 16 nt, Molluscum contagiosum virus
uacgagagcgcaugcc

SEQ ID NO: 3086729 - RNA, 18 nt, Molluscum contagiosum virus
cuagcaccgcaugggccc

SEQ ID NO: 3086730 - RNA, 18 nt, Molluscum contagiosum virus
cauagcgccacgagcagu

SEQ ID NO: 3086731 - RNA, 14 nt, Molluscum contagiosum virus
caaaagcacagcag

SEQ ID NO: 3086732 - RNA, 22 nt, Molluscum contagiosum virus
cgcuguuuggaauugugcugcu

SEQ ID NO: 3086733 - RNA, 13 nt, Molluscum contagiosum virus
cggccuccagcag

SEQ ID NO: 3086734 - RNA, 18 nt, Molluscum contagiosum virus
gcgcacacccacacgugc

SEQ ID NO: 3086735 - RNA, 18 nt, Molluscum contagiosum virus
aaagcuaugcgcagcugc

SEQ ID NO: 3086736 - RNA, 16 nt, Molluscum contagiosum virus
cgcuagccgccgcugc

SEQ ID NO: 3086737 - RNA, 18 nt, Molluscum contagiosum virus
cucguggaucgcgcgcac

SEQ ID NO: 3086738 - RNA, 22 nt, Molluscum contagiosum virus
gugcauugcgucuuacugcugc

SEQ ID NO: 3086739 - RNA, 20 nt, Molluscum contagiosum virus
ucgccuucuugcuggcgcuc

SEQ ID NO: 3086740 - RNA, 21 nt, Molluscum contagiosum virus
acccgcggcucucgcggcccu

SEQ ID NO: 3086741 - RNA, 16 nt, Molluscum contagiosum virus
ccagcggcgccgcagc

SEQ ID NO: 3086742 - RNA, 22 nt, Molluscum contagiosum virus
ucuacgccagcgacgcgacgcc

SEQ ID NO: 3086743 - RNA, 12 nt, Molluscum contagiosum virus
guucuccaggaa

SEQ ID NO: 3086744 - RNA, 18 nt, Molluscum contagiosum virus
uccucgacaaugagcacu

SEQ ID NO: 3086745 - RNA, 22 nt, Molluscum contagiosum virus
cucaaggacuaccagcucuucg

SEQ ID NO: 3086746 - RNA, 17 nt, Molluscum contagiosum virus
cgaugugacaacaugug

SEQ ID NO: 3086747 - RNA, 12 nt, Molluscum contagiosum virus
cggagcuggccg

SEQ ID NO: 3086748 - RNA, 16 nt, Molluscum contagiosum virus
cagcacgggcggaagc

SEQ ID NO: 3086749 - RNA, 16 nt, Molluscum contagiosum virus
cgcgcaugacagccau

SEQ ID NO: 3086750 - RNA, 23 nt, Molluscum contagiosum virus
cgggaauaccggagacaccagcu

SEQ ID NO: 3086751 - RNA, 23 nt, Molluscum contagiosum virus
gcauccugaugacggcagacggc

SEQ ID NO: 3086752 - RNA, 20 nt, Molluscum contagiosum virus
gcugcacgccgccagcgacg

SEQ ID NO: 3086753 - RNA, 14 nt, Molluscum contagiosum virus
cacgaguuucuuca

SEQ ID NO: 3086754 - RNA, 16 nt, Molluscum contagiosum virus
gccgacggcacgggca

SEQ ID NO: 3086755 - RNA, 16 nt, Molluscum contagiosum virus
gccgcgugcgccgccg

SEQ ID NO: 3086756 - RNA, 17 nt, Molluscum contagiosum virus
ucgagggcgaggccaag

SEQ ID NO: 3086757 - RNA, 16 nt, Molluscum contagiosum virus
ccccgaaaggcacccg

SEQ ID NO: 3086758 - RNA, 14 nt, Molluscum contagiosum virus
ucgggccggcgcgc

SEQ ID NO: 3086759 - RNA, 23 nt, Molluscum contagiosum virus
ccugcugaagaaggagcccuugc

SEQ ID NO: 3086760 - RNA, 20 nt, Molluscum contagiosum virus
ccucgugcucggcgugaucu

SEQ ID NO: 3086761 - RNA, 19 nt, Molluscum contagiosum virus
aagcuggaggcugccccuc

SEQ ID NO: 3086762 - RNA, 20 nt, Molluscum contagiosum virus
ucuggcguacucgugucaca

SEQ ID NO: 3086763 - RNA, 18 nt, Molluscum contagiosum virus
cgcaaccgcgugcgugca

SEQ ID NO: 3086764 - RNA, 20 nt, Molluscum contagiosum virus
ccacgagcguguccaggugc

SEQ ID NO: 3086765 - RNA, 22 nt, Molluscum contagiosum virus
gacacgagggccuuggcggcgc

SEQ ID NO: 3086766 - RNA, 18 nt, Molluscum contagiosum virus
gagaagagggucgugcag

SEQ ID NO: 3086767 - RNA, 13 nt, Molluscum contagiosum virus
cggcgcaacgcca

SEQ ID NO: 3086768 - RNA, 17 nt, Molluscum contagiosum virus
cggcagcucugcagcgc

SEQ ID NO: 3086769 - RNA, 21 nt, Molluscum contagiosum virus
cgcuagcagggcggcgccugc

SEQ ID NO: 3086770 - RNA, 21 nt, Molluscum contagiosum virus
caucgagcugcagagcgugcu

SEQ ID NO: 3086771 - RNA, 15 nt, Molluscum contagiosum virus
gcaccgcaugggccc

SEQ ID NO: 3086772 - RNA, 16 nt, Molluscum contagiosum virus
cguggaggaaacaccc

SEQ ID NO: 3086773 - RNA, 19 nt, Molluscum contagiosum virus
cucgcggaagaauuccuuc

SEQ ID NO: 3086774 - RNA, 13 nt, Molluscum contagiosum virus
gcgcccaccagca

SEQ ID NO: 3086775 - RNA, 20 nt, Molluscum contagiosum virus
cacgguguccacgaugaacg

SEQ ID NO: 3086776 - RNA, 19 nt, Molluscum contagiosum virus
cguccgugcgcagggcaau

SEQ ID NO: 3086777 - RNA, 18 nt, Molluscum contagiosum virus
ucuuuccccuccuagccc

SEQ ID NO: 3086778 - RNA, 20 nt, Molluscum contagiosum virus
cugugucgcgcgagcaaaga

SEQ ID NO: 3086779 - RNA, 19 nt, Molluscum contagiosum virus
ccucuuggcaaaggcaggg

SEQ ID NO: 3086780 - RNA, 16 nt, Molluscum contagiosum virus
gcaauggcgcgcagcu

SEQ ID NO: 3086781 - RNA, 24 nt, Molluscum contagiosum virus
gacaacucauagcgccacgagcag

SEQ ID NO: 3086782 - RNA, 21 nt, Molluscum contagiosum virus
caagcgagaucccuccgagac

SEQ ID NO: 3086783 - RNA, 20 nt, Molluscum contagiosum virus
guucccggugcugcugccaa

SEQ ID NO: 3086784 - RNA, 20 nt, Molluscum contagiosum virus
guggcgcgcgagcugcugcg

SEQ ID NO: 3086785 - RNA, 12 nt, Molluscum contagiosum virus
cucauccaccug

SEQ ID NO: 3086786 - RNA, 12 nt, Molluscum contagiosum virus
acugcagcagcu

SEQ ID NO: 3086787 - RNA, 15 nt, Molluscum contagiosum virus
ccugcaccugcugga

SEQ ID NO: 3086788 - RNA, 20 nt, Molluscum contagiosum virus
gcguccguaagucgaagagg

SEQ ID NO: 3086789 - RNA, 14 nt, Molluscum contagiosum virus
gcacgugcugcugc

SEQ ID NO: 3086790 - RNA, 23 nt, Molluscum contagiosum virus
cuggaguuuaaugacgcgcacgc

SEQ ID NO: 3086791 - RNA, 18 nt, Molluscum contagiosum virus
gucuuaugcauccugaug

SEQ ID NO: 3086792 - RNA, 16 nt, Molluscum contagiosum virus
cuaccugaagcuggac

SEQ ID NO: 3086793 - RNA, 20 nt, Molluscum contagiosum virus
ccuuuguucuuagcagcgcc

SEQ ID NO: 3086794 - RNA, 17 nt, Molluscum contagiosum virus
ccugugccucuugugag

SEQ ID NO: 3086795 - RNA, 23 nt, Molluscum contagiosum virus
gcgcgcccaccagcagccaggcu

SEQ ID NO: 3086796 - RNA, 16 nt, Molluscum contagiosum virus
cgacaacgacagagcc

SEQ ID NO: 3086797 - RNA, 17 nt, Molluscum contagiosum virus
ucaagcaggcaugcaag

SEQ ID NO: 3086798 - RNA, 22 nt, Molluscum contagiosum virus
gcagcgcgacuagccugugccc

SEQ ID NO: 3086799 - RNA, 21 nt, Molluscum contagiosum virus
gcaaccucacucacaugugcu

SEQ ID NO: 3086800 - RNA, 17 nt, Molluscum contagiosum virus
cgacgcgugcauggcac

SEQ ID NO: 3086801 - RNA, 14 nt, Molluscum contagiosum virus
uggcuucuccaccu

SEQ ID NO: 3086802 - RNA, 22 nt, Molluscum contagiosum virus
gccguagugcucaucgugcccg

SEQ ID NO: 3086803 - RNA, 20 nt, Molluscum contagiosum virus
gcggaugugcuagcugcgug

SEQ ID NO: 3086804 - RNA, 14 nt, Molluscum contagiosum virus
cgcgagcaugccgc

SEQ ID NO: 3086805 - RNA, 21 nt, Molluscum contagiosum virus
gcgcccuuugcggcacgggcu

SEQ ID NO: 3086806 - RNA, 22 nt, Molluscum contagiosum virus
guccgcacgaggagccccgcgg

SEQ ID NO: 3086807 - RNA, 13 nt, Molluscum contagiosum virus
guacacgcugacg

SEQ ID NO: 3086808 - RNA, 14 nt, Molluscum contagiosum virus
cacgcgcaaggccg

SEQ ID NO: 3086809 - RNA, 18 nt, Molluscum contagiosum virus
ccgagcgcgcgcgcugcu

SEQ ID NO: 3086810 - RNA, 19 nt, Molluscum contagiosum virus
ccggcaucgcgcugcuggu

SEQ ID NO: 3086811 - RNA, 17 nt, Molluscum contagiosum virus
ggcgcggucgcccgccg

SEQ ID NO: 3086812 - RNA, 16 nt, Molluscum contagiosum virus
agucuuccuggggcug

SEQ ID NO: 3086813 - RNA, 16 nt, Molluscum contagiosum virus
gcaccuggucgagcac

SEQ ID NO: 3086814 - RNA, 24 nt, Molluscum contagiosum virus
cgucgggaaguguugccgccggcc

SEQ ID NO: 3086815 - RNA, 14 nt, Molluscum contagiosum virus
cacgcaaacaaaac

SEQ ID NO: 3086816 - RNA, 16 nt, Molluscum contagiosum virus
guacucgcguccgcgc

SEQ ID NO: 3086817 - RNA, 22 nt, Molluscum contagiosum virus
gaguuugcaaguucgcugcugg

SEQ ID NO: 3086818 - RNA, 21 nt, Molluscum contagiosum virus
cugucaucaccccgcugggcc

SEQ ID NO: 3086819 - RNA, 23 nt, Molluscum contagiosum virus
gcgccgcggcgguugcccgccug

SEQ ID NO: 3086820 - RNA, 17 nt, Molluscum contagiosum virus
cgucgaagaccaccagc

SEQ ID NO: 3086821 - RNA, 15 nt, Molluscum contagiosum virus
gggagaagaugcugc

SEQ ID NO: 3086822 - RNA, 22 nt, Molluscum contagiosum virus
gcccugcucaugcgcaagcagc

SEQ ID NO: 3086823 - RNA, 17 nt, Molluscum contagiosum virus
gcgcaauacugcgggcu

SEQ ID NO: 3086824 - RNA, 16 nt, Molluscum contagiosum virus
guccgucacggacagc

SEQ ID NO: 3086825 - RNA, 23 nt, Molluscum contagiosum virus
cccgcggcguucccgcucaaccu

SEQ ID NO: 3086826 - RNA, 12 nt, Molluscum contagiosum virus
ccugcgcgugcg

SEQ ID NO: 3086827 - RNA, 12 nt, Molluscum contagiosum virus
cagcuccuccac

SEQ ID NO: 3086828 - RNA, 16 nt, Molluscum contagiosum virus
aggcacaccccuguaa

SEQ ID NO: 3086829 - RNA, 16 nt, Molluscum contagiosum virus
cgcgccgcgggccgcc

SEQ ID NO: 3086830 - RNA, 14 nt, Molluscum contagiosum virus
cgcacgggccugcg

SEQ ID NO: 3086831 - RNA, 20 nt, Molluscum contagiosum virus
ccucuccaucaucgagcugc

SEQ ID NO: 3086832 - RNA, 16 nt, Molluscum contagiosum virus
ugccuggcagugccgg

SEQ ID NO: 3086833 - RNA, 20 nt, Molluscum contagiosum virus
gcuacguuccgcgcggggac

SEQ ID NO: 3086834 - RNA, 14 nt, Molluscum contagiosum virus
cggacgugcacgca

SEQ ID NO: 3086835 - RNA, 14 nt, Molluscum contagiosum virus
gccgcacgugcugc

SEQ ID NO: 3086836 - RNA, 15 nt, Molluscum contagiosum virus
ccgagucacgcccca

SEQ ID NO: 3086837 - RNA, 15 nt, Molluscum contagiosum virus
gccaacgccagcugu

SEQ ID NO: 3086838 - RNA, 23 nt, Molluscum contagiosum virus
cgagugcucccgaggcgcgcucu

SEQ ID NO: 3086839 - RNA, 13 nt, Molluscum contagiosum virus
cggccugcccugc

SEQ ID NO: 3086840 - RNA, 19 nt, Molluscum contagiosum virus
cgaagacgucguagcgcuc

SEQ ID NO: 3086841 - RNA, 22 nt, Molluscum contagiosum virus
aggccuggccuucuaccacagg

SEQ ID NO: 3086842 - RNA, 13 nt, Molluscum contagiosum virus
gcagcuucugcuc

SEQ ID NO: 3086843 - RNA, 14 nt, Molluscum contagiosum virus
gccugucucgcaag

SEQ ID NO: 3086844 - RNA, 22 nt, Molluscum contagiosum virus
cgcccggcaccgcggcgggugc

SEQ ID NO: 3086845 - RNA, 19 nt, Molluscum contagiosum virus
cgacaaggaaaggcaccca

SEQ ID NO: 3086846 - RNA, 14 nt, Molluscum contagiosum virus
ugcaugcccagcau

SEQ ID NO: 3086847 - RNA, 13 nt, Molluscum contagiosum virus
ucgcgcgugcgca

SEQ ID NO: 3086848 - RNA, 13 nt, Molluscum contagiosum virus
cacgcgcgggcau

SEQ ID NO: 3086849 - RNA, 14 nt, Molluscum contagiosum virus
gcaagcccagcagc

SEQ ID NO: 3086850 - RNA, 20 nt, Molluscum contagiosum virus
guguacgacgugcugcugca

SEQ ID NO: 3086851 - RNA, 22 nt, Molluscum contagiosum virus
cgcgacgcaaaagaggccugcu

SEQ ID NO: 3086852 - RNA, 20 nt, Molluscum contagiosum virus
cccugcuugcccgcgccgca

SEQ ID NO: 3086853 - RNA, 16 nt, Molluscum contagiosum virus
ucgcagcagugccagc

SEQ ID NO: 3086854 - RNA, 19 nt, Molluscum contagiosum virus
ccgcgcucacugcagcagc

SEQ ID NO: 3086855 - RNA, 16 nt, Molluscum contagiosum virus
ugggcccgccuccggg

SEQ ID NO: 3086856 - RNA, 17 nt, Molluscum contagiosum virus
cuggacggugcuggugc

SEQ ID NO: 3086857 - RNA, 23 nt, Molluscum contagiosum virus
cagacgcgcguccgcaggcguca

SEQ ID NO: 3086858 - RNA, 16 nt, Molluscum contagiosum virus
aaugaaccggcaagcu

SEQ ID NO: 3086859 - RNA, 18 nt, Molluscum contagiosum virus
gcgcgagcagcugcugcg

SEQ ID NO: 3086860 - RNA, 21 nt, Molluscum contagiosum virus
guagcgcgucucugcgcagag

SEQ ID NO: 3086861 - RNA, 11 nt, Molluscum contagiosum virus
gcuagcucugc

SEQ ID NO: 3086862 - RNA, 20 nt, Molluscum contagiosum virus
aaaggcaccccgaaggaaag

SEQ ID NO: 3086863 - RNA, 14 nt, Molluscum contagiosum virus
ggcccaggccaugg

SEQ ID NO: 3086864 - RNA, 16 nt, Molluscum contagiosum virus
cucgcggugcagcugc

SEQ ID NO: 3086865 - RNA, 21 nt, Molluscum contagiosum virus
ccuucguguucgcggacggcg

SEQ ID NO: 3086866 - RNA, 20 nt, Molluscum contagiosum virus
cggaggcacgggcucgaucu

SEQ ID NO: 3086867 - RNA, 13 nt, Molluscum contagiosum virus
cgucuuacugcug

SEQ ID NO: 3086868 - RNA, 16 nt, Molluscum contagiosum virus
cgccaugcuggcgggc

SEQ ID NO: 3086869 - RNA, 22 nt, Molluscum contagiosum virus
cuaaagucgcgcgugcgcagca

SEQ ID NO: 3086870 - RNA, 22 nt, Molluscum contagiosum virus
ccagcuuggugcgcucgagcuc

SEQ ID NO: 3086871 - RNA, 16 nt, Molluscum contagiosum virus
agcgcucgcccagcuc

SEQ ID NO: 3086872 - RNA, 14 nt, Molluscum contagiosum virus
gcgcucaggaccag

SEQ ID NO: 3086873 - RNA, 17 nt, Molluscum contagiosum virus
gcacauccgcuaccugg

SEQ ID NO: 3086874 - RNA, 21 nt, Molluscum contagiosum virus
gacaagcuagacuggagcacg

SEQ ID NO: 3086875 - RNA, 16 nt, Molluscum contagiosum virus
ucuuaugcauccugau

SEQ ID NO: 3086876 - RNA, 17 nt, Molluscum contagiosum virus
gcucauggacaugcucg

SEQ ID NO: 3086877 - RNA, 11 nt, Molluscum contagiosum virus
ugaacaagcug

SEQ ID NO: 3086878 - RNA, 13 nt, Molluscum contagiosum virus
cugguucaugcug

SEQ ID NO: 3086879 - RNA, 21 nt, Molluscum contagiosum virus
agucacgaccgacccaucgga

SEQ ID NO: 3086880 - RNA, 17 nt, Molluscum contagiosum virus
cgcgcuauucucguggc

SEQ ID NO: 3086881 - RNA, 20 nt, Molluscum contagiosum virus
cauugcgucuuacugcugca

SEQ ID NO: 3086882 - RNA, 18 nt, Molluscum contagiosum virus
acgcacagggcugcgugg

SEQ ID NO: 3086883 - RNA, 22 nt, Molluscum contagiosum virus
ccuaccggcagcaugcucacgu

SEQ ID NO: 3086884 - RNA, 14 nt, Molluscum contagiosum virus
gcaucugcgagcgc

SEQ ID NO: 3086885 - RNA, 23 nt, Molluscum contagiosum virus
cgacgccagcgcgcccaccagca

SEQ ID NO: 3086886 - RNA, 19 nt, Molluscum contagiosum virus
auuucguugagaccgccgc

SEQ ID NO: 3086887 - RNA, 12 nt, Molluscum contagiosum virus
gccgaugccuau

SEQ ID NO: 3086888 - RNA, 12 nt, Molluscum contagiosum virus
aagcggugcagc

SEQ ID NO: 3086889 - RNA, 19 nt, Molluscum contagiosum virus
gccuggucacagacacgcu

SEQ ID NO: 3086890 - RNA, 18 nt, Molluscum contagiosum virus
cgcgaaacuggacugagc

SEQ ID NO: 3086891 - RNA, 17 nt, Molluscum contagiosum virus
cugaauaaucucgagca

SEQ ID NO: 3086892 - RNA, 21 nt, Molluscum contagiosum virus
gccccgcgcgcccgcugcgcg

SEQ ID NO: 3086893 - RNA, 18 nt, Molluscum contagiosum virus
gcacuauggacgcuugcu

SEQ ID NO: 3086894 - RNA, 17 nt, Molluscum contagiosum virus
cgcacagccccugcugc

SEQ ID NO: 3086895 - RNA, 22 nt, Molluscum contagiosum virus
gcgguggucuccgcgggcagcc

SEQ ID NO: 3086896 - RNA, 12 nt, Molluscum contagiosum virus
ugcucauccucc

SEQ ID NO: 3086897 - RNA, 18 nt, Molluscum contagiosum virus
gucuccccuugggcucug

SEQ ID NO: 3086898 - RNA, 15 nt, Molluscum contagiosum virus
ccacggcgagcugcc

SEQ ID NO: 3086899 - RNA, 16 nt, Molluscum contagiosum virus
cgcgugucgcggagca

SEQ ID NO: 3086900 - RNA, 14 nt, Molluscum contagiosum virus
guuccacuccugug

SEQ ID NO: 3086901 - RNA, 23 nt, Molluscum contagiosum virus
cuguccaaggugaacgaccucaa

SEQ ID NO: 3086902 - RNA, 14 nt, Molluscum contagiosum virus
gagcggagcuggcc

SEQ ID NO: 3086903 - RNA, 18 nt, Molluscum contagiosum virus
cggccaaccgccugcucu

SEQ ID NO: 3086904 - RNA, 23 nt, Molluscum contagiosum virus
gccugccagcgccagccugcugg

SEQ ID NO: 3086905 - RNA, 19 nt, Molluscum contagiosum virus
gaccgacccaucggagaag

SEQ ID NO: 3086906 - RNA, 19 nt, Molluscum contagiosum virus
gacgccauuuucgugcgcg

SEQ ID NO: 3086907 - RNA, 21 nt, Molluscum contagiosum virus
ccggggcgcgcgcugcgcacg

SEQ ID NO: 3086908 - RNA, 20 nt, Molluscum contagiosum virus
ggaagcaacgacaaggaaag

SEQ ID NO: 3086909 - RNA, 15 nt, Molluscum contagiosum virus
cccgcacgcaccgcg

SEQ ID NO: 3086910 - RNA, 21 nt, Molluscum contagiosum virus
gcaagcgccgccaugcugcgc

SEQ ID NO: 3086911 - RNA, 16 nt, Molluscum contagiosum virus
cugcccccgccaugcc

SEQ ID NO: 3086912 - RNA, 19 nt, Molluscum contagiosum virus
cgccggugcgugcccagca

SEQ ID NO: 3086913 - RNA, 15 nt, Molluscum contagiosum virus
cagagccugcugcuc

SEQ ID NO: 3086914 - RNA, 17 nt, Molluscum contagiosum virus
gggaccgcccuugugga

SEQ ID NO: 3086915 - RNA, 17 nt, Molluscum contagiosum virus
caaacugugcuccugag

SEQ ID NO: 3086916 - RNA, 13 nt, Molluscum contagiosum virus
agcgucaguguug

SEQ ID NO: 3086917 - RNA, 15 nt, Molluscum contagiosum virus
uacuuccugcagcug

SEQ ID NO: 3086918 - RNA, 24 nt, Molluscum contagiosum virus
ggcacagucugggagguguccggg

SEQ ID NO: 3086919 - RNA, 18 nt, Molluscum contagiosum virus
cgagcgcugccgcuucgu

SEQ ID NO: 3086920 - RNA, 18 nt, Molluscum contagiosum virus
gcggagaugacgggcacg

SEQ ID NO: 3086921 - RNA, 22 nt, Molluscum contagiosum virus
gcgcacgaagcggcggacagca

SEQ ID NO: 3086922 - RNA, 23 nt, Molluscum contagiosum virus
aaugacgcgcacgccagccugga

SEQ ID NO: 3086923 - RNA, 19 nt, Molluscum contagiosum virus
ccuagacacgagcgcggca

SEQ ID NO: 3086924 - RNA, 18 nt, Molluscum contagiosum virus
cggauagccccucgagca

SEQ ID NO: 3086925 - RNA, 20 nt, Molluscum contagiosum virus
gcgcgagacgcugcugcaca

SEQ ID NO: 3086926 - RNA, 22 nt, Molluscum contagiosum virus
cggcgcccgcgugcacccuccg

SEQ ID NO: 3086927 - RNA, 22 nt, Molluscum contagiosum virus
cuuuuccgcgaaguccugggcg

SEQ ID NO: 3086928 - RNA, 22 nt, Molluscum contagiosum virus
gagcagcugcugcgcuucgccg

SEQ ID NO: 3086929 - RNA, 24 nt, Molluscum contagiosum virus
acuccuuccggagacaccagcucc

SEQ ID NO: 3086930 - RNA, 12 nt, Molluscum contagiosum virus
cuaggcgcggcg

SEQ ID NO: 3086931 - RNA, 19 nt, Molluscum contagiosum virus
gaugccguuuucuccgugc

SEQ ID NO: 3086932 - RNA, 19 nt, Molluscum contagiosum virus
gacaugucguaccuggugg

SEQ ID NO: 3086933 - RNA, 21 nt, Molluscum contagiosum virus
gagacugcuacgucgcggcgc

SEQ ID NO: 3086934 - RNA, 17 nt, Molluscum contagiosum virus
cuguuugccacggccgc

SEQ ID NO: 3086935 - RNA, 18 nt, Molluscum contagiosum virus
cgacuuuguccugagccu

SEQ ID NO: 3086936 - RNA, 14 nt, Molluscum contagiosum virus
cagagaaaggcacc

SEQ ID NO: 3086937 - RNA, 18 nt, Molluscum contagiosum virus
gcaggcucuaagcgcacg

SEQ ID NO: 3086938 - RNA, 21 nt, Molluscum contagiosum virus
cacacuugcgcguucgcaaag

SEQ ID NO: 3086939 - RNA, 22 nt, Molluscum contagiosum virus
ucgcccaucaucgccagcauca

SEQ ID NO: 3086940 - RNA, 20 nt, Molluscum contagiosum virus
gcgcgacuuggggcucgccg

SEQ ID NO: 3086941 - RNA, 13 nt, Molluscum contagiosum virus
cgcgcgcugcgcg

SEQ ID NO: 3086942 - RNA, 18 nt, Molluscum contagiosum virus
cggaugucacgcagaagu

SEQ ID NO: 3086943 - RNA, 12 nt, Molluscum contagiosum virus
cagagcacgaga

SEQ ID NO: 3086944 - RNA, 22 nt, Molluscum contagiosum virus
gccuacgcgcgcguaacagcgc

SEQ ID NO: 3086945 - RNA, 17 nt, Molluscum contagiosum virus
cuuguucucggagaaca

SEQ ID NO: 3086946 - RNA, 14 nt, Molluscum contagiosum virus
ccgcacguggaguc

SEQ ID NO: 3086947 - RNA, 14 nt, Molluscum contagiosum virus
uggcggugagcgcc

SEQ ID NO: 3086948 - RNA, 20 nt, Molluscum contagiosum virus
gacgcgugcaagcccagcag

SEQ ID NO: 3086949 - RNA, 22 nt, Molluscum contagiosum virus
acgagcaggcgcagcgcggccu

SEQ ID NO: 3086950 - RNA, 18 nt, Molluscum contagiosum virus
gcgcacucgggugcccgg

SEQ ID NO: 3086951 - RNA, 23 nt, Molluscum contagiosum virus
guguaguuaaaugacggagccgc

SEQ ID NO: 3086952 - RNA, 13 nt, Molluscum contagiosum virus
gccuggcggcagc

SEQ ID NO: 3086953 - RNA, 17 nt, Molluscum contagiosum virus
cgugcacuagcacgggc

SEQ ID NO: 3086954 - RNA, 15 nt, Molluscum contagiosum virus
ggcgcgcagcucgcc

SEQ ID NO: 3086955 - RNA, 16 nt, Molluscum contagiosum virus
gucgacguggagccug

SEQ ID NO: 3086956 - RNA, 15 nt, Molluscum contagiosum virus
cagcgcgcagaagcc

SEQ ID NO: 3086957 - RNA, 13 nt, Molluscum contagiosum virus
cgagcaggcgcag

SEQ ID NO: 3086958 - RNA, 17 nt, Molluscum contagiosum virus
cuccgacgugcugcgca

SEQ ID NO: 3086959 - RNA, 14 nt, Molluscum contagiosum virus
uccgcgggcgcgcg

SEQ ID NO: 3086960 - RNA, 20 nt, Molluscum contagiosum virus
gucucgaacucgugcgccgc

SEQ ID NO: 3086961 - RNA, 18 nt, Molluscum contagiosum virus
aagaggccggcacaagcc

SEQ ID NO: 3086962 - RNA, 23 nt, Molluscum contagiosum virus
aguccccgguucaaauccugguu

SEQ ID NO: 3086963 - RNA, 20 nt, Molluscum contagiosum virus
auaaucggucagacuuucug

SEQ ID NO: 3086964 - RNA, 18 nt, Molluscum contagiosum virus
ccgugccgccggcgccgc

SEQ ID NO: 3086965 - RNA, 19 nt, Molluscum contagiosum virus
ucuuccagcacugcgccaa

SEQ ID NO: 3086966 - RNA, 20 nt, Molluscum contagiosum virus
caugcucaagcaccugcgcu

SEQ ID NO: 3086967 - RNA, 15 nt, Molluscum contagiosum virus
ggcggcaagcccgga

SEQ ID NO: 3086968 - RNA, 22 nt, Molluscum contagiosum virus
ggccgugcucacggacucgccg

SEQ ID NO: 3086969 - RNA, 14 nt, Molluscum contagiosum virus
cgagugcuggagca

SEQ ID NO: 3086970 - RNA, 13 nt, Molluscum contagiosum virus
gugccucugccag

SEQ ID NO: 3086971 - RNA, 13 nt, Molluscum contagiosum virus
cgagccagccagg

SEQ ID NO: 3086972 - RNA, 19 nt, Molluscum contagiosum virus
aucgucgcggccguggcac

SEQ ID NO: 3086973 - RNA, 17 nt, Molluscum contagiosum virus
acaaggaaaggcaccca

SEQ ID NO: 3086974 - RNA, 19 nt, Molluscum contagiosum virus
ccucgagcacgccuccaag

SEQ ID NO: 3086975 - RNA, 20 nt, Molluscum contagiosum virus
ggagguacugccgccaggaa

SEQ ID NO: 3086976 - RNA, 18 nt, Molluscum contagiosum virus
gacgaaggcaagcucccg

SEQ ID NO: 3086977 - RNA, 19 nt, Molluscum contagiosum virus
cugcucgcacccgcgccgc

SEQ ID NO: 3086978 - RNA, 23 nt, Molluscum contagiosum virus
gucaagaugcugguucugcgcug

SEQ ID NO: 3086979 - RNA, 13 nt, Molluscum contagiosum virus
gcgcauccucucc

SEQ ID NO: 3086980 - RNA, 14 nt, Molluscum contagiosum virus
agcccaaggagcug

SEQ ID NO: 3086981 - RNA, 17 nt, Molluscum contagiosum virus
gccugccagcagagcug

SEQ ID NO: 3086982 - RNA, 16 nt, Molluscum contagiosum virus
gacagagugccuggcg

SEQ ID NO: 3086983 - RNA, 21 nt, Molluscum contagiosum virus
cgagcucgcgcgccagcacgc

SEQ ID NO: 3086984 - RNA, 12 nt, Molluscum contagiosum virus
uguccugagccu

SEQ ID NO: 3086985 - RNA, 16 nt, Molluscum contagiosum virus
gcaguucgagcugcug

SEQ ID NO: 3086986 - RNA, 13 nt, Molluscum contagiosum virus
gaaacaugugucu

SEQ ID NO: 3086987 - RNA, 14 nt, Molluscum contagiosum virus
cgaguacugcugcg

SEQ ID NO: 3086988 - RNA, 19 nt, Molluscum contagiosum virus
cucauuguucggaggcugc

SEQ ID NO: 3086989 - RNA, 11 nt, Molluscum contagiosum virus
guggcugugcg

SEQ ID NO: 3086990 - RNA, 22 nt, Molluscum contagiosum virus
gcgcaagaugacgacgggagag

SEQ ID NO: 3086991 - RNA, 22 nt, Molluscum contagiosum virus
ccccgagggcgcgaccggcgug

SEQ ID NO: 3086992 - RNA, 19 nt, Molluscum contagiosum virus
cugcaggaccugcuggugg

SEQ ID NO: 3086993 - RNA, 18 nt, Molluscum contagiosum virus
cgccggcgcggcgagccg

SEQ ID NO: 3086994 - RNA, 14 nt, Molluscum contagiosum virus
ccagcacugcgcca

SEQ ID NO: 3086995 - RNA, 23 nt, Molluscum contagiosum virus
gcacgucgaagaccaccagcacc

SEQ ID NO: 3086996 - RNA, 17 nt, Molluscum contagiosum virus
ucgagaagaccuguucu

SEQ ID NO: 3086997 - RNA, 16 nt, Molluscum contagiosum virus
uaccggagacaccagc

SEQ ID NO: 3086998 - RNA, 11 nt, Molluscum contagiosum virus
gacggcaggcc

SEQ ID NO: 3086999 - RNA, 20 nt, Molluscum contagiosum virus
gagaccgucaaccugcugcc

SEQ ID NO: 3087000 - RNA, 14 nt, Molluscum contagiosum virus
gcaccagcgcgcag

SEQ ID NO: 3087001 - RNA, 17 nt, Molluscum contagiosum virus
gacgaagcgcucgcucg

SEQ ID NO: 3087002 - RNA, 17 nt, Molluscum contagiosum virus
ggcacgcgagcgcgagu

SEQ ID NO: 3087003 - RNA, 18 nt, Molluscum contagiosum virus
cggcaguguccugguucu

SEQ ID NO: 3087004 - RNA, 12 nt, Molluscum contagiosum virus
ggcagaagcuca

SEQ ID NO: 3087005 - RNA, 16 nt, Molluscum contagiosum virus
accgcaagcucauggu

SEQ ID NO: 3087006 - RNA, 19 nt, Molluscum contagiosum virus
aucgacauggucgcauccg

SEQ ID NO: 3087007 - RNA, 13 nt, Molluscum contagiosum virus
gcgcggcagcagc

SEQ ID NO: 3087008 - RNA, 18 nt, Molluscum contagiosum virus
cucugggcgucgcacagu

SEQ ID NO: 3087009 - RNA, 15 nt, Molluscum contagiosum virus
gcucugcagcgccgc

SEQ ID NO: 3087010 - RNA, 20 nt, Molluscum contagiosum virus
cucggaggggcuccgggccc

SEQ ID NO: 3087011 - RNA, 15 nt, Molluscum contagiosum virus
cuucucgaacuccag

SEQ ID NO: 3087012 - RNA, 15 nt, Molluscum contagiosum virus
ucaagaaggcgcugg

SEQ ID NO: 3087013 - RNA, 17 nt, Molluscum contagiosum virus
gacccagaagcgagagc

SEQ ID NO: 3087014 - RNA, 15 nt, Molluscum contagiosum virus
gucucgaugugacaa

SEQ ID NO: 3087015 - RNA, 19 nt, Molluscum contagiosum virus
auggcaggugcgcaacugc

SEQ ID NO: 3087016 - RNA, 14 nt, Molluscum contagiosum virus
gacggcuaaagaga

SEQ ID NO: 3087017 - RNA, 22 nt, Molluscum contagiosum virus
uaugcgaagcgucgagccccug

SEQ ID NO: 3087018 - RNA, 19 nt, Molluscum contagiosum virus
acgagccgcugcuccugcu

SEQ ID NO: 3087019 - RNA, 18 nt, Molluscum contagiosum virus
ucgugcugggccugccgc

SEQ ID NO: 3087020 - RNA, 18 nt, Molluscum contagiosum virus
cgccugccgcgagcacug

SEQ ID NO: 3087021 - RNA, 21 nt, Molluscum contagiosum virus
cacguggagucacgaccgacc

SEQ ID NO: 3087022 - RNA, 16 nt, Molluscum contagiosum virus
ccuuggugcucauccu

SEQ ID NO: 3087023 - RNA, 17 nt, Molluscum contagiosum virus
gggagccagccucucuc

SEQ ID NO: 3087024 - RNA, 16 nt, Molluscum contagiosum virus
acgaaaucgcaaagca

SEQ ID NO: 3087025 - RNA, 13 nt, Molluscum contagiosum virus
cgcggaacuggac

SEQ ID NO: 3087026 - RNA, 23 nt, Molluscum contagiosum virus
agcccgggcccgugcccgagccc

SEQ ID NO: 3087027 - RNA, 15 nt, Molluscum contagiosum virus
guccgagcuguucaa

SEQ ID NO: 3087028 - RNA, 16 nt, Molluscum contagiosum virus
gcgaccagcugguccu

SEQ ID NO: 3087029 - RNA, 13 nt, Molluscum contagiosum virus
acagcagccgcag

SEQ ID NO: 3087030 - RNA, 14 nt, Molluscum contagiosum virus
cccugcgggcgcuc

SEQ ID NO: 3087031 - RNA, 14 nt, Molluscum contagiosum virus
cuggccucugccug

SEQ ID NO: 3087032 - RNA, 12 nt, Molluscum contagiosum virus
gagcggcacggg

SEQ ID NO: 3087033 - RNA, 18 nt, Molluscum contagiosum virus
cgcgacguccuagagcag

SEQ ID NO: 3087034 - RNA, 22 nt, Molluscum contagiosum virus
gcucgucaaugcgcacgugcuc

SEQ ID NO: 3087035 - RNA, 14 nt, Molluscum contagiosum virus
gcgcgcgcgcgcag

SEQ ID NO: 3087036 - RNA, 20 nt, Molluscum contagiosum virus
ucuucgacaacaugcucgug

SEQ ID NO: 3087037 - RNA, 15 nt, Molluscum contagiosum virus
accuguuaaauggac

SEQ ID NO: 3087038 - RNA, 23 nt, Molluscum contagiosum virus
gcacaacuugggcccgccuccgg

SEQ ID NO: 3087039 - RNA, 16 nt, Molluscum contagiosum virus
gcgcuuguccucuugg

SEQ ID NO: 3087040 - RNA, 21 nt, Molluscum contagiosum virus
uguuucgcaugcacagccgcu

SEQ ID NO: 3087041 - RNA, 15 nt, Molluscum contagiosum virus
ccagccacgaagagu

SEQ ID NO: 3087042 - RNA, 21 nt, Molluscum contagiosum virus
cgcaucagagaagugcuccgc

SEQ ID NO: 3087043 - RNA, 19 nt, Molluscum contagiosum virus
gccguguacgucuuuccca

SEQ ID NO: 3087044 - RNA, 17 nt, Molluscum contagiosum virus
ucgcucagccccagcag

SEQ ID NO: 3087045 - RNA, 23 nt, Molluscum contagiosum virus
uguccgcggacgcgggccugucc

SEQ ID NO: 3087046 - RNA, 14 nt, Molluscum contagiosum virus
cagccgcugcugcu

SEQ ID NO: 3087047 - RNA, 17 nt, Molluscum contagiosum virus
cgugcguuccgggcccg

SEQ ID NO: 3087048 - RNA, 16 nt, Molluscum contagiosum virus
caagucaccgcuccgc

SEQ ID NO: 3087049 - RNA, 15 nt, Molluscum contagiosum virus
ccgggccugcggcgg

SEQ ID NO: 3087050 - RNA, 23 nt, Molluscum contagiosum virus
accauccagccgucgccgcgccc

SEQ ID NO: 3087051 - RNA, 17 nt, Molluscum contagiosum virus
gagggaugcacacacuc

SEQ ID NO: 3087052 - RNA, 16 nt, Molluscum contagiosum virus
gacggcaguguccugg

SEQ ID NO: 3087053 - RNA, 17 nt, Molluscum contagiosum virus
ccaucggagaagugcuc

SEQ ID NO: 3087054 - RNA, 12 nt, Molluscum contagiosum virus
gcgccgcuuccu

SEQ ID NO: 3087055 - RNA, 15 nt, Molluscum contagiosum virus
gccgcgcugcuggcc

SEQ ID NO: 3087056 - RNA, 14 nt, Molluscum contagiosum virus
ggccuccggagaag

SEQ ID NO: 3087057 - RNA, 13 nt, Molluscum contagiosum virus
aacuuuuccugcg

SEQ ID NO: 3087058 - RNA, 22 nt, Molluscum contagiosum virus
cacuuccugcuagaaugcgugu

SEQ ID NO: 3087059 - RNA, 14 nt, Molluscum contagiosum virus
ggcagugcuugagc

SEQ ID NO: 3087060 - RNA, 13 nt, Molluscum contagiosum virus
acugccuggucac

SEQ ID NO: 3087061 - RNA, 17 nt, Molluscum contagiosum virus
ucccccgccaggaacga

SEQ ID NO: 3087062 - RNA, 21 nt, Molluscum contagiosum virus
gagcgagugcgcgugcgccug

SEQ ID NO: 3087063 - RNA, 16 nt, Molluscum contagiosum virus
cuaccuggugcugggg

SEQ ID NO: 3087064 - RNA, 16 nt, Molluscum contagiosum virus
guccagcggcugcccg

SEQ ID NO: 3087065 - RNA, 11 nt, Molluscum contagiosum virus
aacaaggccaa

SEQ ID NO: 3087066 - RNA, 18 nt, Molluscum contagiosum virus
gugcgguacaugcugucc

SEQ ID NO: 3087067 - RNA, 15 nt, Molluscum contagiosum virus
cgacgccagcgcgcc

SEQ ID NO: 3087068 - RNA, 19 nt, Molluscum contagiosum virus
gcucauggcgcgcaaccag

SEQ ID NO: 3087069 - RNA, 20 nt, Molluscum contagiosum virus
cggcgcggaucugcgcacac

SEQ ID NO: 3087070 - RNA, 22 nt, Molluscum contagiosum virus
ugccgcucggaggcuugccccg

SEQ ID NO: 3087071 - RNA, 15 nt, Molluscum contagiosum virus
gagcuugcgcacgcc

SEQ ID NO: 3087072 - RNA, 15 nt, Molluscum contagiosum virus
cucccgggcucuguc

SEQ ID NO: 3087073 - RNA, 15 nt, Molluscum contagiosum virus
gucgcgacggagaug

SEQ ID NO: 3087074 - RNA, 15 nt, Molluscum contagiosum virus
gcaucuucugccagg

SEQ ID NO: 3087075 - RNA, 16 nt, Molluscum contagiosum virus
cccaugcucgagccug

SEQ ID NO: 3087076 - RNA, 18 nt, Molluscum contagiosum virus
accccgaaggaaaggccc

SEQ ID NO: 3087077 - RNA, 13 nt, Molluscum contagiosum virus
cgugccagcucau

SEQ ID NO: 3087078 - RNA, 13 nt, Molluscum contagiosum virus
accugcugccgag

SEQ ID NO: 3087079 - RNA, 16 nt, Molluscum contagiosum virus
ggcaccugcaggaaag

SEQ ID NO: 3087080 - RNA, 21 nt, Molluscum contagiosum virus
ucaacgcgcgugcguacgugc

SEQ ID NO: 3087081 - RNA, 22 nt, Molluscum contagiosum virus
gcacggugaucaugagcgugga

SEQ ID NO: 3087082 - RNA, 19 nt, Molluscum contagiosum virus
gcacgucuucgccgugugc

SEQ ID NO: 3087083 - RNA, 19 nt, Molluscum contagiosum virus
gcgcgacaugcugcccgcg

SEQ ID NO: 3087084 - RNA, 20 nt, Molluscum contagiosum virus
gcuucggaacgcucuucgca

SEQ ID NO: 3087085 - RNA, 17 nt, Molluscum contagiosum virus
ccgcaucggcgccgccc

SEQ ID NO: 3087086 - RNA, 22 nt, Molluscum contagiosum virus
agcuccagcauagaacacagcu

SEQ ID NO: 3087087 - RNA, 17 nt, Molluscum contagiosum virus
gacugucgacagagaag

SEQ ID NO: 3087088 - RNA, 19 nt, Molluscum contagiosum virus
cgcucucgggcaugcacuu

SEQ ID NO: 3087089 - RNA, 14 nt, Molluscum contagiosum virus
gcgugcgccgugcg

SEQ ID NO: 3087090 - RNA, 22 nt, Molluscum contagiosum virus
gcguacucgugucacaauggca

SEQ ID NO: 3087091 - RNA, 19 nt, Molluscum contagiosum virus
gccgcagaacacgggggcu

SEQ ID NO: 3087092 - RNA, 12 nt, Molluscum contagiosum virus
gcagcugcugcg

SEQ ID NO: 3087093 - RNA, 16 nt, Molluscum contagiosum virus
gaacguuggcccgcaa

SEQ ID NO: 3087094 - RNA, 15 nt, Molluscum contagiosum virus
cuccaagaagaggcc

SEQ ID NO: 3087095 - RNA, 13 nt, Molluscum contagiosum virus
ggcgcgcgagcac

SEQ ID NO: 3087096 - RNA, 17 nt, Molluscum contagiosum virus
gcgggccuguaccugcg

SEQ ID NO: 3087097 - RNA, 15 nt, Molluscum contagiosum virus
auggaugcuggaugg

SEQ ID NO: 3087098 - RNA, 18 nt, Molluscum contagiosum virus
ccgcaaacacugucucug

SEQ ID NO: 3087099 - RNA, 22 nt, Molluscum contagiosum virus
gccgcaugcaccuacgcgccga

SEQ ID NO: 3087100 - RNA, 13 nt, Molluscum contagiosum virus
ucccgacagcaga

SEQ ID NO: 3087101 - RNA, 12 nt, Molluscum contagiosum virus
gcgcgcuucuca

SEQ ID NO: 3087102 - RNA, 18 nt, Molluscum contagiosum virus
cugccgcuugaaggacgc

SEQ ID NO: 3087103 - RNA, 15 nt, Molluscum contagiosum virus
cagcggaugcagaac

SEQ ID NO: 3087104 - RNA, 14 nt, Molluscum contagiosum virus
aggcugcucccucu

SEQ ID NO: 3087105 - RNA, 17 nt, Molluscum contagiosum virus
augagguacuccacgcc

SEQ ID NO: 3087106 - RNA, 17 nt, Molluscum contagiosum virus
augcugugcggcacgcc

SEQ ID NO: 3087107 - RNA, 18 nt, Molluscum contagiosum virus
aucuugguggugaccgag

SEQ ID NO: 3087108 - RNA, 14 nt, Molluscum contagiosum virus
cagcggcgccgcag

SEQ ID NO: 3087109 - RNA, 15 nt, Molluscum contagiosum virus
ucacgcccucucgag

SEQ ID NO: 3087110 - RNA, 22 nt, Molluscum contagiosum virus
ccgugacagagugccuggcgcg

SEQ ID NO: 3087111 - RNA, 16 nt, Molluscum contagiosum virus
cgggcacccagcccug

SEQ ID NO: 3087112 - RNA, 15 nt, Molluscum contagiosum virus
cgggaagcacagucc

SEQ ID NO: 3087113 - RNA, 15 nt, Molluscum contagiosum virus
acacucgcggcaagu

SEQ ID NO: 3087114 - RNA, 20 nt, Molluscum contagiosum virus
agccgccuggccgaacugcu

SEQ ID NO: 3087115 - RNA, 14 nt, Molluscum contagiosum virus
ugcgcgucugugcg

SEQ ID NO: 3087116 - RNA, 20 nt, Molluscum contagiosum virus
cacaacuugggcccgccucc

SEQ ID NO: 3087117 - RNA, 18 nt, Molluscum contagiosum virus
agucaaugacacgagccc

SEQ ID NO: 3087118 - RNA, 20 nt, Molluscum contagiosum virus
agccagucucgcgcuuccag

SEQ ID NO: 3087119 - RNA, 20 nt, Molluscum contagiosum virus
gcugcuagagaaccugugcg

SEQ ID NO: 3087120 - RNA, 19 nt, Molluscum contagiosum virus
gugcccaugcucgagccug

SEQ ID NO: 3087121 - RNA, 15 nt, Molluscum contagiosum virus
cggaggcggagcugc

SEQ ID NO: 3087122 - RNA, 20 nt, Molluscum contagiosum virus
gggcgcgaccuuagcgaggu

SEQ ID NO: 3087123 - RNA, 21 nt, Molluscum contagiosum virus
cugcccuuuagcguggcgcgc

SEQ ID NO: 3087124 - RNA, 17 nt, Molluscum contagiosum virus
caauggcgcgcgagcac

SEQ ID NO: 3087125 - RNA, 23 nt, Molluscum contagiosum virus
cucuccgucagggaugccagugc

SEQ ID NO: 3087126 - RNA, 16 nt, Molluscum contagiosum virus
gacguacgagcaggcg

SEQ ID NO: 3087127 - RNA, 15 nt, Molluscum contagiosum virus
gcgccgggccgcggu

SEQ ID NO: 3087128 - RNA, 16 nt, Molluscum contagiosum virus
ugugcccaguuauucu

SEQ ID NO: 3087129 - RNA, 13 nt, Molluscum contagiosum virus
cucaccgcgcaca

SEQ ID NO: 3087130 - RNA, 16 nt, Molluscum contagiosum virus
gcacgagcugcugcgc

SEQ ID NO: 3087131 - RNA, 18 nt, Molluscum contagiosum virus
acagcauccccaacaucc

SEQ ID NO: 3087132 - RNA, 13 nt, Molluscum contagiosum virus
uggcggagguggc

SEQ ID NO: 3087133 - RNA, 19 nt, Molluscum contagiosum virus
gcuccgcggaggccaagca

SEQ ID NO: 3087134 - RNA, 20 nt, Molluscum contagiosum virus
ccagcgcgcccucgcgcgcg

SEQ ID NO: 3087135 - RNA, 15 nt, Molluscum contagiosum virus
uagcaacuugcucua

SEQ ID NO: 3087136 - RNA, 13 nt, Molluscum contagiosum virus
cacaugcagcugc

SEQ ID NO: 3087137 - RNA, 18 nt, Molluscum contagiosum virus
cccgcuaugaacagcgcg

SEQ ID NO: 3087138 - RNA, 22 nt, Molluscum contagiosum virus
ugaggaggccaacgccagcugu

SEQ ID NO: 3087139 - RNA, 19 nt, Molluscum contagiosum virus
agcauuccuuguccuggca

SEQ ID NO: 3087140 - RNA, 22 nt, Molluscum contagiosum virus
gaagcgcucgcucgcgcgcagc

SEQ ID NO: 3087141 - RNA, 22 nt, Molluscum contagiosum virus
agcaccgcgccccacugugcca

SEQ ID NO: 3087142 - RNA, 22 nt, Molluscum contagiosum virus
gcacgcucuacggcgugcugug

SEQ ID NO: 3087143 - RNA, 18 nt, Molluscum contagiosum virus
acaugccuuucuuccaga

SEQ ID NO: 3087144 - RNA, 16 nt, Molluscum contagiosum virus
ccggagacaccagcuc

SEQ ID NO: 3087145 - RNA, 16 nt, Molluscum contagiosum virus
ccuacagcgcgcugca

SEQ ID NO: 3087146 - RNA, 13 nt, Molluscum contagiosum virus
gccagagucgccg

SEQ ID NO: 3087147 - RNA, 20 nt, Molluscum contagiosum virus
gcccgacuuuucgcgccgcg

SEQ ID NO: 3087148 - RNA, 17 nt, Molluscum contagiosum virus
accgguuccgugcgcuc

SEQ ID NO: 3087149 - RNA, 23 nt, Molluscum contagiosum virus
guccgcggacgcgggccuguccg

SEQ ID NO: 3087150 - RNA, 18 nt, Molluscum contagiosum virus
cuggccaucgagcuuccc

SEQ ID NO: 3087151 - RNA, 18 nt, Molluscum contagiosum virus
ccuccgguacguacagug

SEQ ID NO: 3087152 - RNA, 17 nt, Molluscum contagiosum virus
gccagccugcuggcacc

SEQ ID NO: 3087153 - RNA, 23 nt, Molluscum contagiosum virus
acauccugccacaccagcuggcu

SEQ ID NO: 3087154 - RNA, 16 nt, Molluscum contagiosum virus
aggaaaggcaccccga

SEQ ID NO: 3087155 - RNA, 15 nt, Molluscum contagiosum virus
gucaguacaugcccg

SEQ ID NO: 3087156 - RNA, 17 nt, Molluscum contagiosum virus
cuagcgagcgcccgugc

SEQ ID NO: 3087157 - RNA, 23 nt, Molluscum contagiosum virus
aaaaggccggguuuuuucccaug

SEQ ID NO: 3087158 - RNA, 16 nt, Molluscum contagiosum virus
gaacacggacacuugg

SEQ ID NO: 3087159 - RNA, 22 nt, Molluscum contagiosum virus
cggugucgguaccugcaggcuc

SEQ ID NO: 3087160 - RNA, 13 nt, Molluscum contagiosum virus
cggcuaaagagag

SEQ ID NO: 3087161 - RNA, 19 nt, Molluscum contagiosum virus
gcaagucaccgcuccgcag

SEQ ID NO: 3087162 - RNA, 18 nt, Molluscum contagiosum virus
ggcgacaacgacagagcc

SEQ ID NO: 3087163 - RNA, 16 nt, Molluscum contagiosum virus
acucaacaagcugcug

SEQ ID NO: 3087164 - RNA, 20 nt, Molluscum contagiosum virus
ccggcgcaucagagaagugc

SEQ ID NO: 3087165 - RNA, 21 nt, Molluscum contagiosum virus
cgccgcgggcgcagagccugc

SEQ ID NO: 3087166 - RNA, 14 nt, Molluscum contagiosum virus
cacgcccgcgcugc

SEQ ID NO: 3087167 - RNA, 14 nt, Molluscum contagiosum virus
gagggagccucgcu

SEQ ID NO: 3087168 - RNA, 19 nt, Molluscum contagiosum virus
auaccaugcucucgcugcu

SEQ ID NO: 3087169 - RNA, 18 nt, Molluscum contagiosum virus
agggaugcgcacacuugc

SEQ ID NO: 3087170 - RNA, 18 nt, Molluscum contagiosum virus
cguccucaagcgcccucg

SEQ ID NO: 3087171 - RNA, 18 nt, Molluscum contagiosum virus
gaagcuugcucagcagcu

SEQ ID NO: 3087172 - RNA, 21 nt, Molluscum contagiosum virus
gaucugcucgcagucgucgcc

SEQ ID NO: 3087173 - RNA, 13 nt, Molluscum contagiosum virus
auccgcuaccugg

SEQ ID NO: 3087174 - RNA, 18 nt, Molluscum contagiosum virus
ugcaguuucuccucgaag

SEQ ID NO: 3087175 - RNA, 14 nt, Molluscum contagiosum virus
gacacgagggccuu

SEQ ID NO: 3087176 - RNA, 14 nt, Molluscum contagiosum virus
agccgccgcugccg

SEQ ID NO: 3087177 - RNA, 13 nt, Molluscum contagiosum virus
cccgggcccgagc

SEQ ID NO: 3087178 - RNA, 21 nt, Molluscum contagiosum virus
gccucugccugcaaggagguc

SEQ ID NO: 3087179 - RNA, 22 nt, Molluscum contagiosum virus
gucaagaacaauuacuccagcg

SEQ ID NO: 3087180 - RNA, 14 nt, Molluscum contagiosum virus
cgccgaagagccgc

SEQ ID NO: 3087181 - RNA, 13 nt, Molluscum contagiosum virus
cgcaggcucgucg

SEQ ID NO: 3087182 - RNA, 20 nt, Molluscum contagiosum virus
cagcuccagcauggcgccac

SEQ ID NO: 3087183 - RNA, 15 nt, Molluscum contagiosum virus
cuccuccggggcgca

SEQ ID NO: 3087184 - RNA, 14 nt, Molluscum contagiosum virus
acaagggcagcuca

SEQ ID NO: 3087185 - RNA, 17 nt, Molluscum contagiosum virus
gcuccauggagcgccuu

SEQ ID NO: 3087186 - RNA, 16 nt, Molluscum contagiosum virus
acugucgcgcagcugc

SEQ ID NO: 3087187 - RNA, 13 nt, Molluscum contagiosum virus
uggcccccgccuu

SEQ ID NO: 3087188 - RNA, 17 nt, Molluscum contagiosum virus
cguggcgcgcgagcugc

SEQ ID NO: 3087189 - RNA, 19 nt, Molluscum contagiosum virus
cggagcugugccgcagcaa

SEQ ID NO: 3087190 - RNA, 15 nt, Molluscum contagiosum virus
gcuccagggcucaag

SEQ ID NO: 3087191 - RNA, 18 nt, Molluscum contagiosum virus
cgcacacgaucucgggug

SEQ ID NO: 3087192 - RNA, 24 nt, Molluscum contagiosum virus
cugcgugcgauugccccugggcuu

SEQ ID NO: 3087193 - RNA, 20 nt, Molluscum contagiosum virus
gcccgagcgcguccaugagc

SEQ ID NO: 3087194 - RNA, 18 nt, Molluscum contagiosum virus
gccccacugugccagcag

SEQ ID NO: 3087195 - RNA, 23 nt, Molluscum contagiosum virus
cgcgaguugcgucucccgcggcc

SEQ ID NO: 3087196 - RNA, 16 nt, Molluscum contagiosum virus
cugcacugcagcgagc

SEQ ID NO: 3087197 - RNA, 15 nt, Molluscum contagiosum virus
gccgacaugcgcacg

SEQ ID NO: 3087198 - RNA, 13 nt, Molluscum contagiosum virus
ggacuucucuguc

SEQ ID NO: 3087199 - RNA, 14 nt, Molluscum contagiosum virus
cgcuuguccucuug

SEQ ID NO: 3087200 - RNA, 17 nt, Molluscum contagiosum virus
ccaagaagaggccagca

SEQ ID NO: 3087201 - RNA, 12 nt, Molluscum contagiosum virus
gcggccgccauc

SEQ ID NO: 3087202 - RNA, 19 nt, Molluscum contagiosum virus
cacuugccgggcgacggcg

SEQ ID NO: 3087203 - RNA, 19 nt, Molluscum contagiosum virus
cagccgcugcgccgccagc

SEQ ID NO: 3087204 - RNA, 19 nt, Molluscum contagiosum virus
ugcgagucucuguaacaag

SEQ ID NO: 3087205 - RNA, 23 nt, Molluscum contagiosum virus
cgaagguuuugugccgagcggca

SEQ ID NO: 3087206 - RNA, 15 nt, Molluscum contagiosum virus
cgcggcggcagcuac

SEQ ID NO: 3087207 - RNA, 17 nt, Molluscum contagiosum virus
aaggcacccgcaggaaa

SEQ ID NO: 3087208 - RNA, 22 nt, Molluscum contagiosum virus
ugaacaaauacaguggcugugc

SEQ ID NO: 3087209 - RNA, 11 nt, Molluscum contagiosum virus
cacgcggccau

SEQ ID NO: 3087210 - RNA, 13 nt, Molluscum contagiosum virus
ccgucgcccggca

SEQ ID NO: 3087211 - RNA, 14 nt, Molluscum contagiosum virus
caaacgugcaugca

SEQ ID NO: 3087212 - RNA, 13 nt, Molluscum contagiosum virus
auuucacaagugg

SEQ ID NO: 3087213 - RNA, 10 nt, Molluscum contagiosum virus
caagcugccc

SEQ ID NO: 3087214 - RNA, 17 nt, Molluscum contagiosum virus
aguuccagcagcgccag

SEQ ID NO: 3087215 - RNA, 15 nt, Molluscum contagiosum virus
cgagacucuggaagc

SEQ ID NO: 3087216 - RNA, 23 nt, Molluscum contagiosum virus
gaugcgguccgacucggugcuca

SEQ ID NO: 3087217 - RNA, 18 nt, Molluscum contagiosum virus
gagaaccgccgucaacau

SEQ ID NO: 3087218 - RNA, 17 nt, Molluscum contagiosum virus
gacuacgcgcugcuaga

SEQ ID NO: 3087219 - RNA, 13 nt, Molluscum contagiosum virus
cgaagcaaaagcg

SEQ ID NO: 3087220 - RNA, 20 nt, Molluscum contagiosum virus
gaggccggccgugcagagca

SEQ ID NO: 3087221 - RNA, 23 nt, Molluscum contagiosum virus
acagcaugaacucgcugcugcuc

SEQ ID NO: 3087222 - RNA, 21 nt, Molluscum contagiosum virus
cacgcgggacgcgugccuggc

SEQ ID NO: 3087223 - RNA, 16 nt, Molluscum contagiosum virus
cucgcgcgcagcacac

SEQ ID NO: 3087224 - RNA, 15 nt, Molluscum contagiosum virus
gcgcgcugcgccgcu

SEQ ID NO: 3087225 - RNA, 14 nt, Molluscum contagiosum virus
gcgcuggaugcugc

SEQ ID NO: 3087226 - RNA, 17 nt, Molluscum contagiosum virus
gccccgacgccagcgcg

SEQ ID NO: 3087227 - RNA, 18 nt, Molluscum contagiosum virus
gcccucaggggcucuccu

SEQ ID NO: 3087228 - RNA, 21 nt, Molluscum contagiosum virus
ggaugcuggugucgagcucgc

SEQ ID NO: 3087229 - RNA, 21 nt, Molluscum contagiosum virus
cggaauuugcggcgcgggcaa

SEQ ID NO: 3087230 - RNA, 17 nt, Molluscum contagiosum virus
uggaggaggaagcaggu

SEQ ID NO: 3087231 - RNA, 22 nt, Molluscum contagiosum virus
ccgcgcaccgcguugccgcccg

SEQ ID NO: 3087232 - RNA, 21 nt, Molluscum contagiosum virus
gacgugaucguuccuggccaa

SEQ ID NO: 3087233 - RNA, 21 nt, Molluscum contagiosum virus
ccugcacuucggacaccucac

SEQ ID NO: 3087234 - RNA, 23 nt, Molluscum contagiosum virus
cggcaccacgugcgcuggcccac

SEQ ID NO: 3087235 - RNA, 23 nt, Molluscum contagiosum virus
gacacgaggucacucgcuacugc

SEQ ID NO: 3087236 - RNA, 16 nt, Molluscum contagiosum virus
gagaucccuccgagac

SEQ ID NO: 3087237 - RNA, 14 nt, Molluscum contagiosum virus
agcaucccugccac

SEQ ID NO: 3087238 - RNA, 23 nt, Molluscum contagiosum virus
guccaucggugggcucgcgcuuu

SEQ ID NO: 3087239 - RNA, 15 nt, Molluscum contagiosum virus
gcccuccucgaccug

SEQ ID NO: 3087240 - RNA, 20 nt, Molluscum contagiosum virus
cgcggaugccacgcagcugg

SEQ ID NO: 3087241 - RNA, 23 nt, Molluscum contagiosum virus
cgccaguuccacuccugugagca

SEQ ID NO: 3087242 - RNA, 16 nt, Molluscum contagiosum virus
acuggaagaacaggcc

SEQ ID NO: 3087243 - RNA, 13 nt, Molluscum contagiosum virus
uacgagcagcugc

SEQ ID NO: 3087244 - RNA, 11 nt, Molluscum contagiosum virus
acugccgccgc

SEQ ID NO: 3087245 - RNA, 18 nt, Molluscum contagiosum virus
cucgagacccacaauggu

SEQ ID NO: 3087246 - RNA, 16 nt, Molluscum contagiosum virus
ucucgagacgcugccu

SEQ ID NO: 3087247 - RNA, 21 nt, Molluscum contagiosum virus
gccaaagucuuccuggggcug

SEQ ID NO: 3087248 - RNA, 19 nt, Molluscum contagiosum virus
gcgggcacgugcugcugcg

SEQ ID NO: 3087249 - RNA, 15 nt, Molluscum contagiosum virus
gacgcgaugacacgc

SEQ ID NO: 3087250 - RNA, 22 nt, Molluscum contagiosum virus
cgcgcaagugugcgcaucccuc

SEQ ID NO: 3087251 - RNA, 16 nt, Molluscum contagiosum virus
ugcuggacgcgcacgc

SEQ ID NO: 3087252 - RNA, 18 nt, Molluscum contagiosum virus
acggccuucgcgcugccc

SEQ ID NO: 3087253 - RNA, 16 nt, Molluscum contagiosum virus
gccgugacgcugcggc

SEQ ID NO: 3087254 - RNA, 17 nt, Molluscum contagiosum virus
cuccugagaagcaaugc

SEQ ID NO: 3087255 - RNA, 22 nt, Molluscum contagiosum virus
aggcacccaccaggaacaggga

SEQ ID NO: 3087256 - RNA, 23 nt, Molluscum contagiosum virus
aguacuucuacgggaagcugcac

SEQ ID NO: 3087257 - RNA, 13 nt, Molluscum contagiosum virus
cgacaugcugccc

SEQ ID NO: 3087258 - RNA, 22 nt, Molluscum contagiosum virus
ggcgcgguccgcguuggcagcg

SEQ ID NO: 3087259 - RNA, 15 nt, Molluscum contagiosum virus
gcgcgaccgcaccga

SEQ ID NO: 3087260 - RNA, 16 nt, Molluscum contagiosum virus
ccgcgcgcgcagcgcg

SEQ ID NO: 3087261 - RNA, 17 nt, Molluscum contagiosum virus
cucaacuguugccugga

SEQ ID NO: 3087262 - RNA, 18 nt, Molluscum contagiosum virus
gcacaucucucagggcag

SEQ ID NO: 3087263 - RNA, 18 nt, Molluscum contagiosum virus
cgagcgcgcgccugcugg

SEQ ID NO: 3087264 - RNA, 23 nt, Molluscum contagiosum virus
gccucgcggacgagaaugacuua

SEQ ID NO: 3087265 - RNA, 13 nt, Molluscum contagiosum virus
cgcggggcaagcg

SEQ ID NO: 3087266 - RNA, 22 nt, Molluscum contagiosum virus
auggacgugcugcuggcccugc

SEQ ID NO: 3087267 - RNA, 22 nt, Molluscum contagiosum virus
ggucuugccgaagccgcaggcc

SEQ ID NO: 3087268 - RNA, 21 nt, Molluscum contagiosum virus
cugcucgacgggcgcagccac

SEQ ID NO: 3087269 - RNA, 18 nt, Molluscum contagiosum virus
acagcgggcgcugcucgc

SEQ ID NO: 3087270 - RNA, 16 nt, Molluscum contagiosum virus
caaggccguccccgga

SEQ ID NO: 3087271 - RNA, 11 nt, Molluscum contagiosum virus
ggcacccuggc

SEQ ID NO: 3087272 - RNA, 22 nt, Molluscum contagiosum virus
cagacaugucguaccugguggc

SEQ ID NO: 3087273 - RNA, 22 nt, Molluscum contagiosum virus
ccgugguacacguagaggaagu

SEQ ID NO: 3087274 - RNA, 16 nt, Molluscum contagiosum virus
cacgcguacgaagagc

SEQ ID NO: 3087275 - RNA, 14 nt, Molluscum contagiosum virus
gcacgcgggcgccg

SEQ ID NO: 3087276 - RNA, 17 nt, Molluscum contagiosum virus
gccuuggcgcccgugcc

SEQ ID NO: 3087277 - RNA, 15 nt, Molluscum contagiosum virus
ggagcaacgcgaccu

SEQ ID NO: 3087278 - RNA, 21 nt, Molluscum contagiosum virus
gggcggcgucgcgcgcgaccu

SEQ ID NO: 3087279 - RNA, 16 nt, Molluscum contagiosum virus
cggcgcgaagcaggcg

SEQ ID NO: 3087280 - RNA, 16 nt, Molluscum contagiosum virus
acaaggaaaggcaccu

SEQ ID NO: 3087281 - RNA, 20 nt, Molluscum contagiosum virus
cggagagcuccggcugcucc

SEQ ID NO: 3087282 - RNA, 21 nt, Molluscum contagiosum virus
aguccagcgcgcucgaggcgc

SEQ ID NO: 3087283 - RNA, 15 nt, Molluscum contagiosum virus
aacauggugcuggcc

SEQ ID NO: 3087284 - RNA, 16 nt, Molluscum contagiosum virus
guggcuugcgggacag

SEQ ID NO: 3087285 - RNA, 21 nt, Molluscum contagiosum virus
uggagucacgaccgacccauc

SEQ ID NO: 3087286 - RNA, 20 nt, Molluscum contagiosum virus
cgcacacgaaucgcucgcgg

SEQ ID NO: 3087287 - RNA, 23 nt, Molluscum contagiosum virus
gcgggccaggcacuggcccugcu

SEQ ID NO: 3087288 - RNA, 20 nt, Molluscum contagiosum virus
cuagccgugaacgaggcugc

SEQ ID NO: 3087289 - RNA, 23 nt, Molluscum contagiosum virus
cuuccuggaguaccggcucaaga

SEQ ID NO: 3087290 - RNA, 15 nt, Molluscum contagiosum virus
cucuccgaagaagaa

SEQ ID NO: 3087291 - RNA, 14 nt, Molluscum contagiosum virus
gcgacaugcugccc

SEQ ID NO: 3087292 - RNA, 15 nt, Molluscum contagiosum virus
cugcuggcagacaca

SEQ ID NO: 3087293 - RNA, 16 nt, Molluscum contagiosum virus
aagcgcccgugaugca

SEQ ID NO: 3087294 - RNA, 22 nt, Molluscum contagiosum virus
gcuaccugcgcaagcucagccu

SEQ ID NO: 3087295 - RNA, 14 nt, Molluscum contagiosum virus
ugcgugcccagcag

SEQ ID NO: 3087296 - RNA, 15 nt, Molluscum contagiosum virus
gaccacgcuggcacg

SEQ ID NO: 3087297 - RNA, 15 nt, Molluscum contagiosum virus
gcaccugcacgagcc

SEQ ID NO: 3087298 - RNA, 18 nt, Molluscum contagiosum virus
ggcgucgugcaccuggag

SEQ ID NO: 3087299 - RNA, 22 nt, Molluscum contagiosum virus
gcgcugaaggcauaccugugcc

SEQ ID NO: 3087300 - RNA, 14 nt, Molluscum contagiosum virus
ccaccggcagcgca

SEQ ID NO: 3087301 - RNA, 13 nt, Molluscum contagiosum virus
guguuggccaggc

SEQ ID NO: 3087302 - RNA, 14 nt, Molluscum contagiosum virus
agacuugugcccau

SEQ ID NO: 3087303 - RNA, 13 nt, Molluscum contagiosum virus
ccguccuugcucu

SEQ ID NO: 3087304 - RNA, 14 nt, Molluscum contagiosum virus
cuggcggggcuggc

SEQ ID NO: 3087305 - RNA, 17 nt, Molluscum contagiosum virus
ggcaguagcagcgccgg

SEQ ID NO: 3087306 - RNA, 20 nt, Molluscum contagiosum virus
cacucguggcaacaacauga

SEQ ID NO: 3087307 - RNA, 23 nt, Molluscum contagiosum virus
aggccucagccgagcgccgccag

SEQ ID NO: 3087308 - RNA, 19 nt, Molluscum contagiosum virus
gagcccgggcccgagcccg

SEQ ID NO: 3087309 - RNA, 19 nt, Molluscum contagiosum virus
ccaccgucuccccccuguc

SEQ ID NO: 3087310 - RNA, 22 nt, Molluscum contagiosum virus
ugagcaggucggccagcagcuc

SEQ ID NO: 3087311 - RNA, 14 nt, Molluscum contagiosum virus
gacuagccugugcc

SEQ ID NO: 3087312 - RNA, 24 nt, Molluscum contagiosum virus
ugccagcgccagccugcuggcacc

SEQ ID NO: 3087313 - RNA, 20 nt, Molluscum contagiosum virus
cagguagcgcgccgcaaagc

SEQ ID NO: 3087314 - RNA, 17 nt, Molluscum contagiosum virus
cgauacccuuggcagca

SEQ ID NO: 3087315 - RNA, 18 nt, Molluscum contagiosum virus
gacggugcugcgcacgga

SEQ ID NO: 3087316 - RNA, 15 nt, Molluscum contagiosum virus
ccucgcuccgcagca

SEQ ID NO: 3087317 - RNA, 16 nt, Molluscum contagiosum virus
ccagcgcgcagaagcc

SEQ ID NO: 3087318 - RNA, 15 nt, Molluscum contagiosum virus
agccaaccccgagcc

SEQ ID NO: 3087319 - RNA, 16 nt, Molluscum contagiosum virus
gcggcuaagcucugcg

SEQ ID NO: 3087320 - RNA, 20 nt, Molluscum contagiosum virus
ccucgacaaugagcacuugc

SEQ ID NO: 3087321 - RNA, 17 nt, Molluscum contagiosum virus
cuagugccgagcucgcc

SEQ ID NO: 3087322 - RNA, 20 nt, Molluscum contagiosum virus
ccagcaugugcgagcgcagc

SEQ ID NO: 3087323 - RNA, 16 nt, Molluscum contagiosum virus
ggcgcgcgccagcagc

SEQ ID NO: 3087324 - RNA, 23 nt, Molluscum contagiosum virus
ugcucaccgccgagauggagcuc

SEQ ID NO: 3087325 - RNA, 22 nt, Molluscum contagiosum virus
cgccugcucucgcgcgccagca

SEQ ID NO: 3087326 - RNA, 19 nt, Molluscum contagiosum virus
cagcuacgaucgcgcucag

SEQ ID NO: 3087327 - RNA, 13 nt, Molluscum contagiosum virus
cgcgggcccgugc

SEQ ID NO: 3087328 - RNA, 19 nt, Molluscum contagiosum virus
ggagcgcuucuagcucgcg

SEQ ID NO: 3087329 - RNA, 20 nt, Molluscum contagiosum virus
cugcucgacgggcgcagcca

SEQ ID NO: 3087330 - RNA, 21 nt, Molluscum contagiosum virus
gacuagaugcguccuaugcau

SEQ ID NO: 3087331 - RNA, 14 nt, Molluscum contagiosum virus
cgacgcgcgcggca

SEQ ID NO: 3087332 - RNA, 12 nt, Molluscum contagiosum virus
ggcaggcgcugc

SEQ ID NO: 3087333 - RNA, 22 nt, Molluscum contagiosum virus
cgaggccugcguggacagcauc

SEQ ID NO: 3087334 - RNA, 15 nt, Molluscum contagiosum virus
cgucaaccugcugcc

SEQ ID NO: 3087335 - RNA, 14 nt, Molluscum contagiosum virus
gugcugugccuagg

SEQ ID NO: 3087336 - RNA, 18 nt, Molluscum contagiosum virus
cacgcuguugcugcugcc

SEQ ID NO: 3087337 - RNA, 18 nt, Molluscum contagiosum virus
acacgcuguugcugcugc

SEQ ID NO: 3087338 - RNA, 14 nt, Molluscum contagiosum virus
cucguccggcgcuc

SEQ ID NO: 3087339 - RNA, 15 nt, Molluscum contagiosum virus
agugcggccagcacc

SEQ ID NO: 3087340 - RNA, 18 nt, Molluscum contagiosum virus
gcggcgcuacuggccgcg

SEQ ID NO: 3087341 - RNA, 18 nt, Molluscum contagiosum virus
cgagugugugcaucccuc

SEQ ID NO: 3087342 - RNA, 13 nt, Molluscum contagiosum virus
aagcgcgucugca

SEQ ID NO: 3087343 - RNA, 13 nt, Molluscum contagiosum virus
agcagagccggga

SEQ ID NO: 3087344 - RNA, 21 nt, Molluscum contagiosum virus
caaccauggcgcgcucuuuug

SEQ ID NO: 3087345 - RNA, 15 nt, Molluscum contagiosum virus
gggcggaagcuccug

SEQ ID NO: 3087346 - RNA, 13 nt, Molluscum contagiosum virus
cuccaggaacgcg

SEQ ID NO: 3087347 - RNA, 16 nt, Molluscum contagiosum virus
gccgcaaacacugucu

SEQ ID NO: 3087348 - RNA, 19 nt, Molluscum contagiosum virus
gcccgugcuggagggcacg

SEQ ID NO: 3087349 - RNA, 13 nt, Molluscum contagiosum virus
ucuaguucccaug

SEQ ID NO: 3087350 - RNA, 13 nt, Molluscum contagiosum virus
cuuccgcggcgug

SEQ ID NO: 3087351 - RNA, 21 nt, Molluscum contagiosum virus
gggucgugcaggucgaggagg

SEQ ID NO: 3087352 - RNA, 13 nt, Molluscum contagiosum virus
ucucugcgccgcg

SEQ ID NO: 3087353 - RNA, 12 nt, Molluscum contagiosum virus
cagcagccucgu

SEQ ID NO: 3087354 - RNA, 20 nt, Molluscum contagiosum virus
ugucggcacaucucucaggg

SEQ ID NO: 3087355 - RNA, 15 nt, Molluscum contagiosum virus
gucucugcgcagagc

SEQ ID NO: 3087356 - RNA, 19 nt, Molluscum contagiosum virus
cgagcgccgcucgcacggc

SEQ ID NO: 3087357 - RNA, 13 nt, Molluscum contagiosum virus
ugcugcgagagca

SEQ ID NO: 3087358 - RNA, 12 nt, Molluscum contagiosum virus
gcagugcuugcu

SEQ ID NO: 3087359 - RNA, 18 nt, Molluscum contagiosum virus
uggcacggccggcgccgc

SEQ ID NO: 3087360 - RNA, 19 nt, Molluscum contagiosum virus
guacuccuugaagggcaca

SEQ ID NO: 3087361 - RNA, 22 nt, Molluscum contagiosum virus
ccgcggcacugggugcccgagc

SEQ ID NO: 3087362 - RNA, 18 nt, Molluscum contagiosum virus
aucaacaucuacaaggag

SEQ ID NO: 3087363 - RNA, 21 nt, Molluscum contagiosum virus
cccgaguacuacuacacuguc

SEQ ID NO: 3087364 - RNA, 22 nt, Molluscum contagiosum virus
cauggccuguaguagcagcuuc

SEQ ID NO: 3087365 - RNA, 21 nt, Molluscum contagiosum virus
ggcaacgcugccgcuggcgcu

SEQ ID NO: 3087366 - RNA, 20 nt, Molluscum contagiosum virus
cguaaagcuggccgaggucu

SEQ ID NO: 3087367 - RNA, 16 nt, Molluscum contagiosum virus
ggcaaagccugcugcg

SEQ ID NO: 3087368 - RNA, 15 nt, Molluscum contagiosum virus
aucgcgcugcuggug

SEQ ID NO: 3087369 - RNA, 13 nt, Molluscum contagiosum virus
uccugcgcuccga

SEQ ID NO: 3087370 - RNA, 18 nt, Molluscum contagiosum virus
caguucgagcugcugcgc

SEQ ID NO: 3087371 - RNA, 20 nt, Molluscum contagiosum virus
caaccccgcgcugcgcggcg

SEQ ID NO: 3087372 - RNA, 21 nt, Molluscum contagiosum virus
ccuucgacguugacgagcgcg

SEQ ID NO: 3087373 - RNA, 23 nt, Molluscum contagiosum virus
cgagacugagugcugagccacaa

SEQ ID NO: 3087374 - RNA, 14 nt, Molluscum contagiosum virus
cagacuucuccaag

SEQ ID NO: 3087375 - RNA, 15 nt, Molluscum contagiosum virus
ggaaggggugauggc

SEQ ID NO: 3087376 - RNA, 14 nt, Molluscum contagiosum virus
ccugcuggcgugcg

SEQ ID NO: 3087377 - RNA, 20 nt, Molluscum contagiosum virus
cuccgcggacgcgcccugga

SEQ ID NO: 3087378 - RNA, 23 nt, Molluscum contagiosum virus
ggcgagucucccguggcgcgccg

SEQ ID NO: 3087379 - RNA, 19 nt, Molluscum contagiosum virus
accgcugcuucguaaagcu

SEQ ID NO: 3087380 - RNA, 15 nt, Molluscum contagiosum virus
cggugcccgccaaga

SEQ ID NO: 3087381 - RNA, 20 nt, Molluscum contagiosum virus
ggcgcucgcagcacaugcag

SEQ ID NO: 3087382 - RNA, 23 nt, Molluscum contagiosum virus
ccaaggucgagcugacucggaca

SEQ ID NO: 3087383 - RNA, 21 nt, Molluscum contagiosum virus
cgaagaguggcucacagccgu

SEQ ID NO: 3087384 - RNA, 14 nt, Molluscum contagiosum virus
gacuaccugcugcu

SEQ ID NO: 3087385 - RNA, 21 nt, Molluscum contagiosum virus
gcgucuuccugcugccgggag

SEQ ID NO: 3087386 - RNA, 22 nt, Molluscum contagiosum virus
acucgcgcgcgccgggccgcgg

SEQ ID NO: 3087387 - RNA, 16 nt, Molluscum contagiosum virus
gcacgcugcgcacggg

SEQ ID NO: 3087388 - RNA, 20 nt, Molluscum contagiosum virus
agcacuucucgccgcaccac

SEQ ID NO: 3087389 - RNA, 19 nt, Molluscum contagiosum virus
gcugcugcggcugcuggag

SEQ ID NO: 3087390 - RNA, 23 nt, Molluscum contagiosum virus
ccaggaacgaggaaaggcacacc

SEQ ID NO: 3087391 - RNA, 15 nt, Molluscum contagiosum virus
caggagaacuacaaa

SEQ ID NO: 3087392 - RNA, 20 nt, Molluscum contagiosum virus
cugcugguggugcuggagcg

SEQ ID NO: 3087393 - RNA, 19 nt, Molluscum contagiosum virus
caugcgcaagcgcuaugcu

SEQ ID NO: 3087394 - RNA, 16 nt, Molluscum contagiosum virus
cacgggggcugccggc

SEQ ID NO: 3087395 - RNA, 14 nt, Molluscum contagiosum virus
gccgcgcaccugga

SEQ ID NO: 3087396 - RNA, 18 nt, Molluscum contagiosum virus
cgcugcucgugcugcucu

SEQ ID NO: 3087397 - RNA, 14 nt, Molluscum contagiosum virus
cugggaaagggcug

SEQ ID NO: 3087398 - RNA, 17 nt, Molluscum contagiosum virus
gcaucggcggcagcgcc

SEQ ID NO: 3087399 - RNA, 17 nt, Molluscum contagiosum virus
gcuggugcucgccugca

SEQ ID NO: 3087400 - RNA, 16 nt, Molluscum contagiosum virus
caccccuguaacaagg

SEQ ID NO: 3087401 - RNA, 23 nt, Molluscum contagiosum virus
auguucuucgcagaggacagcuc

SEQ ID NO: 3087402 - RNA, 20 nt, Molluscum contagiosum virus
caguaacgguaccuggcuug

SEQ ID NO: 3087403 - RNA, 13 nt, Molluscum contagiosum virus
caccagcagccag

SEQ ID NO: 3087404 - RNA, 21 nt, Molluscum contagiosum virus
ccgcguggcaagggcuccuuc

SEQ ID NO: 3087405 - RNA, 17 nt, Molluscum contagiosum virus
gcgcucuggagccuccc

SEQ ID NO: 3087406 - RNA, 15 nt, Molluscum contagiosum virus
ggaaaaggcacaccc

SEQ ID NO: 3087407 - RNA, 17 nt, Molluscum contagiosum virus
cuggcgcguccguucac

SEQ ID NO: 3087408 - RNA, 21 nt, Molluscum contagiosum virus
uccgagaaugggagggggaca

SEQ ID NO: 3087409 - RNA, 16 nt, Molluscum contagiosum virus
gcuggagggcacgcug

SEQ ID NO: 3087410 - RNA, 14 nt, Molluscum contagiosum virus
ugugccuaggagga

SEQ ID NO: 3087411 - RNA, 13 nt, Molluscum contagiosum virus
aguuccacuccug

SEQ ID NO: 3087412 - RNA, 16 nt, Molluscum contagiosum virus
cucgacgggcgcagcc

SEQ ID NO: 3087413 - RNA, 15 nt, Molluscum contagiosum virus
aagcacaguccagcc

SEQ ID NO: 3087414 - RNA, 19 nt, Molluscum contagiosum virus
gccugcguggacagcaucc

SEQ ID NO: 3087415 - RNA, 14 nt, Molluscum contagiosum virus
caccagcaccagca

SEQ ID NO: 3087416 - RNA, 20 nt, Molluscum contagiosum virus
agcguggcgcgcgagcugcu

SEQ ID NO: 3087417 - RNA, 14 nt, Molluscum contagiosum virus
caacauccaaacca

SEQ ID NO: 3087418 - RNA, 19 nt, Molluscum contagiosum virus
acggucguccuggagccua

SEQ ID NO: 3087419 - RNA, 17 nt, Molluscum contagiosum virus
gcuggaccccgagcugc

SEQ ID NO: 3087420 - RNA, 18 nt, Molluscum contagiosum virus
ggaaaacuguaggggagg

SEQ ID NO: 3087421 - RNA, 16 nt, Molluscum contagiosum virus
gcugcugguucugcuc

SEQ ID NO: 3087422 - RNA, 13 nt, Molluscum contagiosum virus
gccgggggaacac

SEQ ID NO: 3087423 - RNA, 23 nt, Molluscum contagiosum virus
gugcgcaucccugcgcaccugca

SEQ ID NO: 3087424 - RNA, 15 nt, Molluscum contagiosum virus
gccaggccgcgccgg

SEQ ID NO: 3087425 - RNA, 17 nt, Molluscum contagiosum virus
gaccgacccaucggaga

SEQ ID NO: 3087426 - RNA, 17 nt, Molluscum contagiosum virus
cgacagcauccuggagu

SEQ ID NO: 3087427 - RNA, 19 nt, Molluscum contagiosum virus
cccgcgcacgagcugcugc

SEQ ID NO: 3087428 - RNA, 19 nt, Molluscum contagiosum virus
acgcgugcugcgcggcgcc

SEQ ID NO: 3087429 - RNA, 17 nt, Molluscum contagiosum virus
gcgugcucacgcugccc

SEQ ID NO: 3087430 - RNA, 14 nt, Molluscum contagiosum virus
gcuccgcagcagga

SEQ ID NO: 3087431 - RNA, 20 nt, Molluscum contagiosum virus
ccgcggcgugcagggcgugc

SEQ ID NO: 3087432 - RNA, 21 nt, Molluscum contagiosum virus
ggcgccaccggcagugcuugc

SEQ ID NO: 3087433 - RNA, 18 nt, Molluscum contagiosum virus
ggcgguguaugcucgucg

SEQ ID NO: 3087434 - RNA, 20 nt, Molluscum contagiosum virus
ccgagcaauugcugggcaca

SEQ ID NO: 3087435 - RNA, 14 nt, Molluscum contagiosum virus
cucugcgcagagcg

SEQ ID NO: 3087436 - RNA, 14 nt, Molluscum contagiosum virus
cucgcccagcucga

SEQ ID NO: 3087437 - RNA, 22 nt, Molluscum contagiosum virus
cucgugucacaauggcacuagc

SEQ ID NO: 3087438 - RNA, 18 nt, Molluscum contagiosum virus
cucaacgcgauggcgcag

SEQ ID NO: 3087439 - RNA, 15 nt, Molluscum contagiosum virus
gacugcugcccccgc

SEQ ID NO: 3087440 - RNA, 17 nt, Molluscum contagiosum virus
guccugcgcgguggcuu

SEQ ID NO: 3087441 - RNA, 17 nt, Molluscum contagiosum virus
aucugcgcuccacgccc

SEQ ID NO: 3087442 - RNA, 19 nt, Molluscum contagiosum virus
agggcgaccggagagggga

SEQ ID NO: 3087443 - RNA, 16 nt, Molluscum contagiosum virus
aguaccgcgcgcacgc

SEQ ID NO: 3087444 - RNA, 22 nt, Molluscum contagiosum virus
agcagcaccgcacgccagcagc

SEQ ID NO: 3087445 - RNA, 20 nt, Molluscum contagiosum virus
caacguaguacugcagcagc

SEQ ID NO: 3087446 - RNA, 15 nt, Molluscum contagiosum virus
gcaagagccgccggg

SEQ ID NO: 3087447 - RNA, 18 nt, Molluscum contagiosum virus
ccggcguguggcucuucu

SEQ ID NO: 3087448 - RNA, 17 nt, Molluscum contagiosum virus
cgcgacaugccucgcgg

SEQ ID NO: 3087449 - RNA, 23 nt, Molluscum contagiosum virus
cugggccaucgaaacucugcacg

SEQ ID NO: 3087450 - RNA, 15 nt, Molluscum contagiosum virus
ucacggcgcucgccu

SEQ ID NO: 3087451 - RNA, 18 nt, Molluscum contagiosum virus
aaacgcuggcgagcaaga

SEQ ID NO: 3087452 - RNA, 22 nt, Molluscum contagiosum virus
cggggccuguucggcaugcagc

SEQ ID NO: 3087453 - RNA, 14 nt, Molluscum contagiosum virus
cgcacgugcugcgc

SEQ ID NO: 3087454 - RNA, 22 nt, Molluscum contagiosum virus
gcaccggcaacagcgcgacgcc

SEQ ID NO: 3087455 - RNA, 12 nt, Molluscum contagiosum virus
cccguugcugcg

SEQ ID NO: 3087456 - RNA, 23 nt, Molluscum contagiosum virus
ucgcuguccuuccgacccggcuc

SEQ ID NO: 3087457 - RNA, 14 nt, Molluscum contagiosum virus
gaagcagcagacca

SEQ ID NO: 3087458 - RNA, 18 nt, Molluscum contagiosum virus
gagaagugaaaauaaaga

SEQ ID NO: 3087459 - RNA, 17 nt, Molluscum contagiosum virus
ggcagcucaagcugcuc

SEQ ID NO: 3087460 - RNA, 18 nt, Molluscum contagiosum virus
cgaaggccgguccugacu

SEQ ID NO: 3087461 - RNA, 15 nt, Molluscum contagiosum virus
cgggggcgcuucccc

SEQ ID NO: 3087462 - RNA, 14 nt, Molluscum contagiosum virus
gcgccggcucugcc

SEQ ID NO: 3087463 - RNA, 16 nt, Molluscum contagiosum virus
agcgcgcgacugucuu

SEQ ID NO: 3087464 - RNA, 22 nt, Molluscum contagiosum virus
cgccgcgggccgccgggccugc

SEQ ID NO: 3087465 - RNA, 19 nt, Molluscum contagiosum virus
auccucaccuuccugggcg

SEQ ID NO: 3087466 - RNA, 12 nt, Molluscum contagiosum virus
gccugcgagcag

SEQ ID NO: 3087467 - RNA, 14 nt, Molluscum contagiosum virus
ccgacggcacgggc

SEQ ID NO: 3087468 - RNA, 14 nt, Molluscum contagiosum virus
cgcgcggcagcagc

SEQ ID NO: 3087469 - RNA, 12 nt, Molluscum contagiosum virus
ugcgcgagcagc

SEQ ID NO: 3087470 - RNA, 15 nt, Molluscum contagiosum virus
caccagcagccaggc

SEQ ID NO: 3087471 - RNA, 17 nt, Molluscum contagiosum virus
cuuccccguccuugcuc

SEQ ID NO: 3087472 - RNA, 13 nt, Molluscum contagiosum virus
cgcacggagcaca

SEQ ID NO: 3087473 - RNA, 15 nt, Molluscum contagiosum virus
cggccgcggaccacg

SEQ ID NO: 3087474 - RNA, 16 nt, Molluscum contagiosum virus
ccuucugcaagcugcc

SEQ ID NO: 3087475 - RNA, 14 nt, Molluscum contagiosum virus
cagcagccgcagcc

SEQ ID NO: 3087476 - RNA, 15 nt, Molluscum contagiosum virus
ugcucgcacccgcgc

SEQ ID NO: 3087477 - RNA, 18 nt, Molluscum contagiosum virus
ccgagcccgggcccgugc

SEQ ID NO: 3087478 - RNA, 22 nt, Molluscum contagiosum virus
cgcaguaccaguaccugcugcc

SEQ ID NO: 3087479 - RNA, 14 nt, Molluscum contagiosum virus
ccagcugcaaacau

SEQ ID NO: 3087480 - RNA, 13 nt, Molluscum contagiosum virus
ccuggugcugcgc

SEQ ID NO: 3087481 - RNA, 19 nt, Molluscum contagiosum virus
uggaucgcgcgcaccugca

SEQ ID NO: 3087482 - RNA, 23 nt, Molluscum contagiosum virus
cuggcaccgggcgccgcggcugc

SEQ ID NO: 3087483 - RNA, 11 nt, Molluscum contagiosum virus
gugccacugcc

SEQ ID NO: 3087484 - RNA, 19 nt, Molluscum contagiosum virus
ccuggccgaacugcucugc

SEQ ID NO: 3087485 - RNA, 16 nt, Molluscum contagiosum virus
uuggcgagcgcugccg

SEQ ID NO: 3087486 - RNA, 21 nt, Molluscum contagiosum virus
gcacagccccugcugcucgcg

SEQ ID NO: 3087487 - RNA, 23 nt, Molluscum contagiosum virus
cugcugcgcuccaugcugccgga

SEQ ID NO: 3087488 - RNA, 20 nt, Molluscum contagiosum virus
cacucgcgaacuacgagcgc

SEQ ID NO: 3087489 - RNA, 18 nt, Molluscum contagiosum virus
uggcgagcuagugcacac

SEQ ID NO: 3087490 - RNA, 22 nt, Molluscum contagiosum virus
guacuacuuccgcaacgagguc

SEQ ID NO: 3087491 - RNA, 16 nt, Molluscum contagiosum virus
gccagcuuggugcgcu

SEQ ID NO: 3087492 - RNA, 16 nt, Molluscum contagiosum virus
cggaagcuccugcugg

SEQ ID NO: 3087493 - RNA, 23 nt, Molluscum contagiosum virus
ucugcgagcgccugcgagcagcc

SEQ ID NO: 3087494 - RNA, 15 nt, Molluscum contagiosum virus
ucuugguugccaggc

SEQ ID NO: 3087495 - RNA, 20 nt, Molluscum contagiosum virus
gucuucuuguugugcuuuga

SEQ ID NO: 3087496 - RNA, 19 nt, Molluscum contagiosum virus
gcgcgcccggcgcccgcag

SEQ ID NO: 3087497 - RNA, 20 nt, Molluscum contagiosum virus
cgagcagcggggacucuccc

SEQ ID NO: 3087498 - RNA, 13 nt, Molluscum contagiosum virus
ccaggugcugggc

SEQ ID NO: 3087499 - RNA, 12 nt, Molluscum contagiosum virus
cgcuugccccuc

SEQ ID NO: 3087500 - RNA, 23 nt, Molluscum contagiosum virus
gaaucgcucgcggugcagcugcc

SEQ ID NO: 3087501 - RNA, 22 nt, Molluscum contagiosum virus
cagcgcuugcgcgccaacuccu

SEQ ID NO: 3087502 - RNA, 19 nt, Molluscum contagiosum virus
gggcacauggacggcgccu

SEQ ID NO: 3087503 - RNA, 18 nt, Molluscum contagiosum virus
ccgagcggcaagccgugc

SEQ ID NO: 3087504 - RNA, 17 nt, Molluscum contagiosum virus
gcucggagucggagaaa

SEQ ID NO: 3087505 - RNA, 19 nt, Molluscum contagiosum virus
gaggugggaaugcccgcaa

SEQ ID NO: 3087506 - RNA, 19 nt, Molluscum contagiosum virus
gacagucagcggcgugcug

SEQ ID NO: 3087507 - RNA, 20 nt, Molluscum contagiosum virus
ccuccaagaagaggccagca

SEQ ID NO: 3087508 - RNA, 21 nt, Molluscum contagiosum virus
ccuggggaaccgcugcuucgu

SEQ ID NO: 3087509 - RNA, 22 nt, Molluscum contagiosum virus
caagugcgucgacguggagccu

SEQ ID NO: 3087510 - RNA, 17 nt, Molluscum contagiosum virus
ccggcgcccgcagcgcg

SEQ ID NO: 3087511 - RNA, 21 nt, Molluscum contagiosum virus
gaccuuggcgcgccgcugccc

SEQ ID NO: 3087512 - RNA, 12 nt, Molluscum contagiosum virus
ccagccgcagcc

SEQ ID NO: 3087513 - RNA, 14 nt, Molluscum contagiosum virus
cgggccgccgcccg

SEQ ID NO: 3087514 - RNA, 23 nt, Molluscum contagiosum virus
ucgagcaccucaacuguugccug

SEQ ID NO: 3087515 - RNA, 21 nt, Molluscum contagiosum virus
ccuccuugauuucgcgcagca

SEQ ID NO: 3087516 - RNA, 14 nt, Molluscum contagiosum virus
aguuagaaaugcuu

SEQ ID NO: 3087517 - RNA, 13 nt, Molluscum contagiosum virus
cugcggugucaac

SEQ ID NO: 3087518 - RNA, 17 nt, Molluscum contagiosum virus
gguuccugcgcuccgac

SEQ ID NO: 3087519 - RNA, 20 nt, Molluscum contagiosum virus
cacgagcugacgcagacgca

SEQ ID NO: 3087520 - RNA, 15 nt, Molluscum contagiosum virus
cuagcgcugcucuac

SEQ ID NO: 3087521 - RNA, 13 nt, Molluscum contagiosum virus
gcaagcgcccgcg

SEQ ID NO: 3087522 - RNA, 16 nt, Molluscum contagiosum virus
guagcagcgccggcag

SEQ ID NO: 3087523 - RNA, 21 nt, Molluscum contagiosum virus
cuuccccguccuugcucuggc

SEQ ID NO: 3087524 - RNA, 17 nt, Molluscum contagiosum virus
gcaagaagcgaaacacg

SEQ ID NO: 3087525 - RNA, 19 nt, Molluscum contagiosum virus
gagcgggcaaugggcacgc

SEQ ID NO: 3087526 - RNA, 13 nt, Molluscum contagiosum virus
aguccagcuucuc

SEQ ID NO: 3087527 - RNA, 13 nt, Molluscum contagiosum virus
aagcccagcagcg

SEQ ID NO: 3087528 - RNA, 16 nt, Molluscum contagiosum virus
aucgagaugcgccgca

SEQ ID NO: 3087529 - RNA, 15 nt, Molluscum contagiosum virus
acggcacgcugagca

SEQ ID NO: 3087530 - RNA, 23 nt, Molluscum contagiosum virus
gcgcgugacacaccgcguggaca

SEQ ID NO: 3087531 - RNA, 12 nt, Molluscum contagiosum virus
cgaccccaagaa

SEQ ID NO: 3087532 - RNA, 15 nt, Molluscum contagiosum virus
agacgugcugcgcgc

SEQ ID NO: 3087533 - RNA, 19 nt, Molluscum contagiosum virus
cgcgagaugcgcggacaga

SEQ ID NO: 3087534 - RNA, 17 nt, Molluscum contagiosum virus
gcucgcgcgcacgcgca

SEQ ID NO: 3087535 - RNA, 22 nt, Molluscum contagiosum virus
ccaacgacuagcgugcgcagca

SEQ ID NO: 3087536 - RNA, 15 nt, Molluscum contagiosum virus
cauggaccgcgucaa

SEQ ID NO: 3087537 - RNA, 15 nt, Molluscum contagiosum virus
gcucgacgggcgcag

SEQ ID NO: 3087538 - RNA, 15 nt, Molluscum contagiosum virus
cgggaaacugcugcc

SEQ ID NO: 3087539 - RNA, 23 nt, Molluscum contagiosum virus
cucgaggucgugcaggccgugcu

SEQ ID NO: 3087540 - RNA, 13 nt, Molluscum contagiosum virus
cgcggucgggccc

SEQ ID NO: 3087541 - RNA, 17 nt, Molluscum contagiosum virus
cacggcacccgccagcu

SEQ ID NO: 3087542 - RNA, 22 nt, Molluscum contagiosum virus
aggaaaggccccccgcaacaag

SEQ ID NO: 3087543 - RNA, 20 nt, Molluscum contagiosum virus
ucuugaaaugauugguucuu

SEQ ID NO: 3087544 - RNA, 21 nt, Molluscum contagiosum virus
cggcggagaugacgggcacgc

SEQ ID NO: 3087545 - RNA, 21 nt, Molluscum contagiosum virus
caagaagaggccagcacaagc

SEQ ID NO: 3087546 - RNA, 22 nt, Molluscum contagiosum virus
caaccaguacuucaucuucaag

SEQ ID NO: 3087547 - RNA, 20 nt, Molluscum contagiosum virus
gcggcacaugcagcugcagg

SEQ ID NO: 3087548 - RNA, 13 nt, Molluscum contagiosum virus
gcggccacucucc

SEQ ID NO: 3087549 - RNA, 21 nt, Molluscum contagiosum virus
cccggcggcccgcggcgcgcc

SEQ ID NO: 3087550 - RNA, 20 nt, Molluscum contagiosum virus
gcaaauuccguccccucucc

SEQ ID NO: 3087551 - RNA, 18 nt, Molluscum contagiosum virus
ugcagcugccgcagagcc

SEQ ID NO: 3087552 - RNA, 14 nt, Molluscum contagiosum virus
uacucaacaagcug

SEQ ID NO: 3087553 - RNA, 15 nt, Molluscum contagiosum virus
ggaacaaagaggcaa

SEQ ID NO: 3087554 - RNA, 15 nt, Molluscum contagiosum virus
cgugaccauggacac

SEQ ID NO: 3087555 - RNA, 18 nt, Molluscum contagiosum virus
gucgacgagugcgccgcg

SEQ ID NO: 3087556 - RNA, 18 nt, Molluscum contagiosum virus
cucuaggagcuccgugcu

SEQ ID NO: 3087557 - RNA, 23 nt, Molluscum contagiosum virus
uggccguagucuggccgggcucg

SEQ ID NO: 3087558 - RNA, 17 nt, Molluscum contagiosum virus
gacgagccccgcgccgg

SEQ ID NO: 3087559 - RNA, 16 nt, Molluscum contagiosum virus
gacaaggaaaggcacc

SEQ ID NO: 3087560 - RNA, 17 nt, Molluscum contagiosum virus
ccgccucgagcacgccu

SEQ ID NO: 3087561 - RNA, 23 nt, Molluscum contagiosum virus
uggcggccugcccugcucaugcg

SEQ ID NO: 3087562 - RNA, 14 nt, Molluscum contagiosum virus
cggcgccgacagcg

SEQ ID NO: 3087563 - RNA, 16 nt, Molluscum contagiosum virus
guggauuucggcgcgc

SEQ ID NO: 3087564 - RNA, 20 nt, Molluscum contagiosum virus
cacuugcgcgcgugccugug

SEQ ID NO: 3087565 - RNA, 23 nt, Molluscum contagiosum virus
gcccggcguuggcuuucugugcg

SEQ ID NO: 3087566 - RNA, 18 nt, Molluscum contagiosum virus
cgaagaccaccagcacca

SEQ ID NO: 3087567 - RNA, 17 nt, Molluscum contagiosum virus
gcagcuucuuggagccc

SEQ ID NO: 3087568 - RNA, 22 nt, Molluscum contagiosum virus
gugccugcgcaacgcgggccag

SEQ ID NO: 3087569 - RNA, 15 nt, Molluscum contagiosum virus
gccgaggcgcugccg

SEQ ID NO: 3087570 - RNA, 15 nt, Molluscum contagiosum virus
acgcgauggcgcagc

SEQ ID NO: 3087571 - RNA, 18 nt, Molluscum contagiosum virus
ccgugcaguugagagcag

SEQ ID NO: 3087572 - RNA, 21 nt, Molluscum contagiosum virus
ggccaugaucauggcgccgcu

SEQ ID NO: 3087573 - RNA, 17 nt, Molluscum contagiosum virus
cagaagacggaguccuc

SEQ ID NO: 3087574 - RNA, 12 nt, Molluscum contagiosum virus
caagagccaugu

SEQ ID NO: 3087575 - RNA, 13 nt, Molluscum contagiosum virus
cauucgcuggugc

SEQ ID NO: 3087576 - RNA, 14 nt, Molluscum contagiosum virus
cgcagugcucgcac

SEQ ID NO: 3087577 - RNA, 15 nt, Molluscum contagiosum virus
caugcgcagugccuu

SEQ ID NO: 3087578 - RNA, 24 nt, Molluscum contagiosum virus
gccgggcuugcucccucgcgcgca

SEQ ID NO: 3087579 - RNA, 17 nt, Molluscum contagiosum virus
cgugcugcgccgccugc

SEQ ID NO: 3087580 - RNA, 20 nt, Molluscum contagiosum virus
cagagcgccagcgccuccgc

SEQ ID NO: 3087581 - RNA, 23 nt, Molluscum contagiosum virus
uacgagccgcugcuccugcucug

SEQ ID NO: 3087582 - RNA, 17 nt, Molluscum contagiosum virus
augcagugcaccagcac

SEQ ID NO: 3087583 - RNA, 23 nt, Molluscum contagiosum virus
ccucugcgcggcccgcgggcugc

SEQ ID NO: 3087584 - RNA, 22 nt, Molluscum contagiosum virus
uccugguaguugcagcccacca

SEQ ID NO: 3087585 - RNA, 18 nt, Molluscum contagiosum virus
caccuggcgagcgcucug

SEQ ID NO: 3087586 - RNA, 18 nt, Molluscum contagiosum virus
ggagucacgaccgaccca

SEQ ID NO: 3087587 - RNA, 14 nt, Molluscum contagiosum virus
auuuuuugccccgc

SEQ ID NO: 3087588 - RNA, 15 nt, Molluscum contagiosum virus
augcucaagcacugc

SEQ ID NO: 3087589 - RNA, 18 nt, Molluscum contagiosum virus
gccgcgcgccgcugcucg

SEQ ID NO: 3087590 - RNA, 12 nt, Molluscum contagiosum virus
ccgcgcuucugc

SEQ ID NO: 3087591 - RNA, 22 nt, Molluscum contagiosum virus
ccgucagggaugccagugcagu

SEQ ID NO: 3087592 - RNA, 21 nt, Molluscum contagiosum virus
cagagaaaucccaagagccau

SEQ ID NO: 3087593 - RNA, 17 nt, Molluscum contagiosum virus
ucaagcacggcuuccgg

SEQ ID NO: 3087594 - RNA, 17 nt, Molluscum contagiosum virus
ggcaccccgcaggaaag

SEQ ID NO: 3087595 - RNA, 20 nt, Molluscum contagiosum virus
acuugcgcguucgcaaagac

SEQ ID NO: 3087596 - RNA, 15 nt, Molluscum contagiosum virus
ggcgcacgcggcucu

SEQ ID NO: 3087597 - RNA, 13 nt, Molluscum contagiosum virus
ugcuuccuccucc

SEQ ID NO: 3087598 - RNA, 18 nt, Molluscum contagiosum virus
gcugcaauaacaacgacc

SEQ ID NO: 3087599 - RNA, 21 nt, Molluscum contagiosum virus
cgcgcgcccgcugcgcgcucu

SEQ ID NO: 3087600 - RNA, 13 nt, Molluscum contagiosum virus
ugcgcgugugcag

SEQ ID NO: 3087601 - RNA, 14 nt, Molluscum contagiosum virus
cgucaccaccgcuu

SEQ ID NO: 3087602 - RNA, 12 nt, Molluscum contagiosum virus
gcgggccaggca

SEQ ID NO: 3087603 - RNA, 19 nt, Molluscum contagiosum virus
ggcaacugccugcgcuagu

SEQ ID NO: 3087604 - RNA, 22 nt, Molluscum contagiosum virus
gaucuccacgucgaucagcucc

SEQ ID NO: 3087605 - RNA, 21 nt, Molluscum contagiosum virus
cgcagucgccuuccugcgccc

SEQ ID NO: 3087606 - RNA, 20 nt, Molluscum contagiosum virus
uuccgagcucgcaaacacaa

SEQ ID NO: 3087607 - RNA, 19 nt, Molluscum contagiosum virus
cacgcuggucacgcgcuuc

SEQ ID NO: 3087608 - RNA, 20 nt, Molluscum contagiosum virus
cagcaggugcacgugcugca

SEQ ID NO: 3087609 - RNA, 13 nt, Molluscum contagiosum virus
cucgccggcgaga

SEQ ID NO: 3087610 - RNA, 15 nt, Molluscum contagiosum virus
cgaccagcugguccu

SEQ ID NO: 3087611 - RNA, 23 nt, Molluscum contagiosum virus
ugcuuugcgcgcguaugcgaaca

SEQ ID NO: 3087612 - RNA, 16 nt, Molluscum contagiosum virus
ccacggguaccgugcg

SEQ ID NO: 3087613 - RNA, 21 nt, Molluscum contagiosum virus
gacuccaaggaggucccuagc

SEQ ID NO: 3087614 - RNA, 16 nt, Molluscum contagiosum virus
gacgucaaccgggcuc

SEQ ID NO: 3087615 - RNA, 11 nt, Molluscum contagiosum virus
aacgacagacc

SEQ ID NO: 3087616 - RNA, 15 nt, Molluscum contagiosum virus
guuggucuccuccuu

SEQ ID NO: 3087617 - RNA, 13 nt, Molluscum contagiosum virus
cggugcugcugcc

SEQ ID NO: 3087618 - RNA, 13 nt, Molluscum contagiosum virus
cgugggcagcuuc

SEQ ID NO: 3087619 - RNA, 13 nt, Molluscum contagiosum virus
ucccgcgcuccga

SEQ ID NO: 3087620 - RNA, 13 nt, Molluscum contagiosum virus
gcagcgccggcag

SEQ ID NO: 3087621 - RNA, 17 nt, Molluscum contagiosum virus
gcuugcagacaaggaga

SEQ ID NO: 3087622 - RNA, 22 nt, Molluscum contagiosum virus
cuguccgcggaugcaggcacug

SEQ ID NO: 3087623 - RNA, 14 nt, Molluscum contagiosum virus
gccuagccugcagu

SEQ ID NO: 3087624 - RNA, 19 nt, Molluscum contagiosum virus
ggcgaguccccgagcagcg

SEQ ID NO: 3087625 - RNA, 20 nt, Molluscum contagiosum virus
cggaguccucgacaaugagc

SEQ ID NO: 3087626 - RNA, 17 nt, Molluscum contagiosum virus
gggcucgugcuggagca

SEQ ID NO: 3087627 - RNA, 17 nt, Molluscum contagiosum virus
uguccacaaaaccaaaa

SEQ ID NO: 3087628 - RNA, 21 nt, Molluscum contagiosum virus
gaacgagagacacgcacacuc

SEQ ID NO: 3087629 - RNA, 17 nt, Molluscum contagiosum virus
uuaacuaagcuaaaaga

SEQ ID NO: 3087630 - RNA, 16 nt, Molluscum contagiosum virus
gccuggcaugcuugag

SEQ ID NO: 3087631 - RNA, 17 nt, Molluscum contagiosum virus
gcccgagcgcgcgugcg

SEQ ID NO: 3087632 - RNA, 13 nt, Molluscum contagiosum virus
ggccugcacggcu

SEQ ID NO: 3087633 - RNA, 20 nt, Molluscum contagiosum virus
ccugcgauacccuuggcagc

SEQ ID NO: 3087634 - RNA, 16 nt, Molluscum contagiosum virus
caggcgcgccauggcg

SEQ ID NO: 3087635 - RNA, 14 nt, Molluscum contagiosum virus
gcgcgcgccuugca

SEQ ID NO: 3087636 - RNA, 16 nt, Molluscum contagiosum virus
ucggaggcggagcugc

SEQ ID NO: 3087637 - RNA, 21 nt, Molluscum contagiosum virus
acucgcugcugcucuuccagg

SEQ ID NO: 3087638 - RNA, 14 nt, Molluscum contagiosum virus
gcaugcgcgccgcg

SEQ ID NO: 3087639 - RNA, 23 nt, Molluscum contagiosum virus
aaccucugagcgagcgcaguugu

SEQ ID NO: 3087640 - RNA, 16 nt, Molluscum contagiosum virus
cuggcggggcuggcag

SEQ ID NO: 3087641 - RNA, 22 nt, Molluscum contagiosum virus
gcuccggcugcuccucgagcgc

SEQ ID NO: 3087642 - RNA, 16 nt, Molluscum contagiosum virus
cgcgcgcuaggggugc

SEQ ID NO: 3087643 - RNA, 17 nt, Molluscum contagiosum virus
cgccagcuguagcagga

SEQ ID NO: 3087644 - RNA, 15 nt, Molluscum contagiosum virus
cacgcgagcaauggc

SEQ ID NO: 3087645 - RNA, 19 nt, Molluscum contagiosum virus
cugacccucgcggcucugg

SEQ ID NO: 3087646 - RNA, 22 nt, Molluscum contagiosum virus
gucccgcuaaagaucgugcgcu

SEQ ID NO: 3087647 - RNA, 18 nt, Molluscum contagiosum virus
aggauuuaaauggcgcgc

SEQ ID NO: 3087648 - RNA, 20 nt, Molluscum contagiosum virus
cuuugugcgaccugcugcga

SEQ ID NO: 3087649 - RNA, 15 nt, Molluscum contagiosum virus
acgugcuccgugugc

SEQ ID NO: 3087650 - RNA, 14 nt, Molluscum contagiosum virus
agccccugcugcuc

SEQ ID NO: 3087651 - RNA, 16 nt, Molluscum contagiosum virus
gugcuggugcugguca

SEQ ID NO: 3087652 - RNA, 16 nt, Molluscum contagiosum virus
cgcucggcacugcugg

SEQ ID NO: 3087653 - RNA, 12 nt, Molluscum contagiosum virus
aacgagggaugc

SEQ ID NO: 3087654 - RNA, 13 nt, Molluscum contagiosum virus
ccgcgcugcuggc

SEQ ID NO: 3087655 - RNA, 21 nt, Molluscum contagiosum virus
gcccgacuuuucgcgccgcgg

SEQ ID NO: 3087656 - RNA, 18 nt, Molluscum contagiosum virus
acuaagcuaaaagagcug

SEQ ID NO: 3087657 - RNA, 18 nt, Molluscum contagiosum virus
gcaacgcgggccaggcac

SEQ ID NO: 3087658 - RNA, 16 nt, Molluscum contagiosum virus
gacgccgauguccugc

SEQ ID NO: 3087659 - RNA, 15 nt, Molluscum contagiosum virus
gguccaccagcugcc

SEQ ID NO: 3087660 - RNA, 12 nt, Molluscum contagiosum virus
uaacaucugcua

SEQ ID NO: 3087661 - RNA, 20 nt, Molluscum contagiosum virus
accuuucuuccgacgggccc

SEQ ID NO: 3087662 - RNA, 22 nt, Molluscum contagiosum virus
cauggacgugcugcuggcccug

SEQ ID NO: 3087663 - RNA, 21 nt, Molluscum contagiosum virus
acucgucgagcacgaagacgu

SEQ ID NO: 3087664 - RNA, 18 nt, Molluscum contagiosum virus
gcccgcgugcacccuccg

SEQ ID NO: 3087665 - RNA, 21 nt, Molluscum contagiosum virus
ccaugucgcgcaucaccgagc

SEQ ID NO: 3087666 - RNA, 13 nt, Molluscum contagiosum virus
cgggcucgagcuc

SEQ ID NO: 3087667 - RNA, 16 nt, Molluscum contagiosum virus
ugggagcuuuccuugc

SEQ ID NO: 3087668 - RNA, 22 nt, Molluscum contagiosum virus
cugcacgggcacgccgugggca

SEQ ID NO: 3087669 - RNA, 12 nt, Molluscum contagiosum virus
cgccccuucccg

SEQ ID NO: 3087670 - RNA, 14 nt, Molluscum contagiosum virus
uuccguccccucuc

SEQ ID NO: 3087671 - RNA, 15 nt, Molluscum contagiosum virus
gcucguugcgcagcc

SEQ ID NO: 3087672 - RNA, 21 nt, Molluscum contagiosum virus
cgggcgcagagccugcugcuc

SEQ ID NO: 3087673 - RNA, 12 nt, Molluscum contagiosum virus
accagcagccag

SEQ ID NO: 3087674 - RNA, 17 nt, Molluscum contagiosum virus
ccuacgcuaccugaagc

SEQ ID NO: 3087675 - RNA, 22 nt, Molluscum contagiosum virus
acgagccgcugcuccugcucug

SEQ ID NO: 3087676 - RNA, 18 nt, Molluscum contagiosum virus
cgccggggcgcgcgcugc

SEQ ID NO: 3087677 - RNA, 17 nt, Molluscum contagiosum virus
gcaccgcguggcgcgcg

SEQ ID NO: 3087678 - RNA, 16 nt, Molluscum contagiosum virus
uuccugaacaagcugc

SEQ ID NO: 3087679 - RNA, 21 nt, Molluscum contagiosum virus
cgaggccaaccuccugcaccu

SEQ ID NO: 3087680 - RNA, 19 nt, Molluscum contagiosum virus
gaggaaagcgcacacuugc

SEQ ID NO: 3087681 - RNA, 16 nt, Molluscum contagiosum virus
gcagcaggaugcuggu

SEQ ID NO: 3087682 - RNA, 20 nt, Molluscum contagiosum virus
gcacgauggggcgcucgggc

SEQ ID NO: 3087683 - RNA, 18 nt, Molluscum contagiosum virus
aggccaacgccagcugua

SEQ ID NO: 3087684 - RNA, 16 nt, Molluscum contagiosum virus
ugccagcgccucugcg

SEQ ID NO: 3087685 - RNA, 23 nt, Molluscum contagiosum virus
accagugccgacgugugccgcuc

SEQ ID NO: 3087686 - RNA, 16 nt, Molluscum contagiosum virus
cuaccacgagcacugc

SEQ ID NO: 3087687 - RNA, 13 nt, Molluscum contagiosum virus
gccgccgggccug

SEQ ID NO: 3087688 - RNA, 17 nt, Molluscum contagiosum virus
gcugcuggcccugcuag

SEQ ID NO: 3087689 - RNA, 19 nt, Molluscum contagiosum virus
ggaaacacucgauggcgag

SEQ ID NO: 3087690 - RNA, 13 nt, Molluscum contagiosum virus
cuagcgugugccg

SEQ ID NO: 3087691 - RNA, 20 nt, Molluscum contagiosum virus
agguggcaugcgcccucacg

SEQ ID NO: 3087692 - RNA, 14 nt, Molluscum contagiosum virus
accucgcugcugag

SEQ ID NO: 3087693 - RNA, 21 nt, Molluscum contagiosum virus
cacugacgguacucaugcugc

SEQ ID NO: 3087694 - RNA, 15 nt, Molluscum contagiosum virus
caagaacaaccagac

SEQ ID NO: 3087695 - RNA, 15 nt, Molluscum contagiosum virus
gugcguacccuggca

SEQ ID NO: 3087696 - RNA, 12 nt, Molluscum contagiosum virus
gacucggugcuc

SEQ ID NO: 3087697 - RNA, 15 nt, Molluscum contagiosum virus
cccucgcgcgcagcu

SEQ ID NO: 3087698 - RNA, 16 nt, Molluscum contagiosum virus
cccuggcugcugcgcg

SEQ ID NO: 3087699 - RNA, 20 nt, Molluscum contagiosum virus
gcugcgcgacaugcugcccg

SEQ ID NO: 3087700 - RNA, 13 nt, Molluscum contagiosum virus
cuggaugcugcuc

SEQ ID NO: 3087701 - RNA, 19 nt, Molluscum contagiosum virus
guguccgcgggcgcgcgcc

SEQ ID NO: 3087702 - RNA, 20 nt, Molluscum contagiosum virus
gacaggcgcgcaagugcgug

SEQ ID NO: 3087703 - RNA, 18 nt, Molluscum contagiosum virus
ugcacgccgccagcgacg

SEQ ID NO: 3087704 - RNA, 16 nt, Molluscum contagiosum virus
cccgcgucgcgcgccg

SEQ ID NO: 3087705 - RNA, 22 nt, Molluscum contagiosum virus
gagcucgacugcguugucuccu

SEQ ID NO: 3087706 - RNA, 22 nt, Molluscum contagiosum virus
cgcuugcuuccaggcgccgcac

SEQ ID NO: 3087707 - RNA, 17 nt, Molluscum contagiosum virus
gccuugagcgcgccgcg

SEQ ID NO: 3087708 - RNA, 17 nt, Molluscum contagiosum virus
aaaucccaagagccaug

SEQ ID NO: 3087709 - RNA, 16 nt, Molluscum contagiosum virus
gaacgaggcugcugcc

SEQ ID NO: 3087710 - RNA, 15 nt, Molluscum contagiosum virus
ccgcgcugcuccgug

SEQ ID NO: 3087711 - RNA, 23 nt, Molluscum contagiosum virus
cgaacgacgguaaacucuugcac

SEQ ID NO: 3087712 - RNA, 19 nt, Molluscum contagiosum virus
cgaaguuggucaacaacac

SEQ ID NO: 3087713 - RNA, 20 nt, Molluscum contagiosum virus
cugguggugcuggagcggca

SEQ ID NO: 3087714 - RNA, 10 nt, Molluscum contagiosum virus
gcauugagcu

SEQ ID NO: 3087715 - RNA, 17 nt, Molluscum contagiosum virus
gcauggcggcggccacg

SEQ ID NO: 3087716 - RNA, 14 nt, Molluscum contagiosum virus
cgcugagcgcagca

SEQ ID NO: 3087717 - RNA, 20 nt, Molluscum contagiosum virus
gcgggcccgccuuuguggac

SEQ ID NO: 3087718 - RNA, 19 nt, Molluscum contagiosum virus
cccgagcacguuccaaaag

SEQ ID NO: 3087719 - RNA, 16 nt, Molluscum contagiosum virus
gcagccucaaccugaa

SEQ ID NO: 3087720 - RNA, 18 nt, Molluscum contagiosum virus
cccuggcagccgagccgg

SEQ ID NO: 3087721 - RNA, 21 nt, Molluscum contagiosum virus
gacucgcgucugcaaggccug

SEQ ID NO: 3087722 - RNA, 22 nt, Molluscum contagiosum virus
ggccaucgagcuucccgagguc

SEQ ID NO: 3087723 - RNA, 15 nt, Molluscum contagiosum virus
uggcacccuggcugc

SEQ ID NO: 3087724 - RNA, 22 nt, Molluscum contagiosum virus
cucgaugccaacagacuugucc

SEQ ID NO: 3087725 - RNA, 15 nt, Molluscum contagiosum virus
uggacagcaucccca

SEQ ID NO: 3087726 - RNA, 17 nt, Molluscum contagiosum virus
agcacugcgcgcgcggc

SEQ ID NO: 3087727 - RNA, 17 nt, Molluscum contagiosum virus
ccggaggaaggacagug

SEQ ID NO: 3087728 - RNA, 22 nt, Molluscum contagiosum virus
ccaagaacaagcucgaggcgcu

SEQ ID NO: 3087729 - RNA, 16 nt, Molluscum contagiosum virus
ucgagacccacaaugg

SEQ ID NO: 3087730 - RNA, 17 nt, Molluscum contagiosum virus
ccgcgcccgcgcgcuuu

SEQ ID NO: 3087731 - RNA, 13 nt, Molluscum contagiosum virus
cgugggcagccgc

SEQ ID NO: 3087732 - RNA, 14 nt, Molluscum contagiosum virus
cggagcagauucgg

SEQ ID NO: 3087733 - RNA, 18 nt, Molluscum contagiosum virus
uuacggacgcccuccucg

SEQ ID NO: 3087734 - RNA, 15 nt, Molluscum contagiosum virus
cuaugcccagccuga

SEQ ID NO: 3087735 - RNA, 16 nt, Molluscum contagiosum virus
gcacugcuggcgcgcg

SEQ ID NO: 3087736 - RNA, 16 nt, Molluscum contagiosum virus
cuugcgcgcgcccucg

SEQ ID NO: 3087737 - RNA, 14 nt, Molluscum contagiosum virus
cgcgcugcuucccg

SEQ ID NO: 3087738 - RNA, 20 nt, Molluscum contagiosum virus
cacaagcaguaccugcuaac

SEQ ID NO: 3087739 - RNA, 18 nt, Molluscum contagiosum virus
ugcagcugcgcgagccgc

SEQ ID NO: 3087740 - RNA, 18 nt, Molluscum contagiosum virus
gaaacuggacugagccgc

SEQ ID NO: 3087741 - RNA, 18 nt, Molluscum contagiosum virus
guccgguguccacgacac

SEQ ID NO: 3087742 - RNA, 13 nt, Molluscum contagiosum virus
caccaccagcacg

SEQ ID NO: 3087743 - RNA, 20 nt, Molluscum contagiosum virus
cgcugcuagagaaccugugc

SEQ ID NO: 3087744 - RNA, 19 nt, Molluscum contagiosum virus
cucagcgccgcgugcaugc

SEQ ID NO: 3087745 - RNA, 14 nt, Molluscum contagiosum virus
uaggacaugacugc

SEQ ID NO: 3087746 - RNA, 19 nt, Molluscum contagiosum virus
gauucccaucgacgagguc

SEQ ID NO: 3087747 - RNA, 15 nt, Molluscum contagiosum virus
ggcgcgcgcgcgccg

SEQ ID NO: 3087748 - RNA, 15 nt, Molluscum contagiosum virus
ggccggcgcgccgcg

SEQ ID NO: 3087749 - RNA, 19 nt, Molluscum contagiosum virus
acuccgaggcagguuccgg

SEQ ID NO: 3087750 - RNA, 21 nt, Molluscum contagiosum virus
gaaacgcacagccccugcugc

SEQ ID NO: 3087751 - RNA, 16 nt, Molluscum contagiosum virus
cguguacguaauccau

SEQ ID NO: 3087752 - RNA, 16 nt, Molluscum contagiosum virus
gcgcuagccccagcac

SEQ ID NO: 3087753 - RNA, 18 nt, Molluscum contagiosum virus
gugccgacgugugccgcu

SEQ ID NO: 3087754 - RNA, 13 nt, Molluscum contagiosum virus
accgcgugcgugc

SEQ ID NO: 3087755 - RNA, 17 nt, Molluscum contagiosum virus
uugacgcccggugccug

SEQ ID NO: 3087756 - RNA, 20 nt, Molluscum contagiosum virus
uuuucccgaggcguccagcg

SEQ ID NO: 3087757 - RNA, 15 nt, Molluscum contagiosum virus
ccuguaacaaggaaa

SEQ ID NO: 3087758 - RNA, 19 nt, Molluscum contagiosum virus
cucaacuguugccuggagg

SEQ ID NO: 3087759 - RNA, 14 nt, Molluscum contagiosum virus
cccgcccagcgugg

SEQ ID NO: 3087760 - RNA, 22 nt, Molluscum contagiosum virus
cguguccgacgccgccaaugcu

SEQ ID NO: 3087761 - RNA, 22 nt, Molluscum contagiosum virus
ugcucgcgccugaaccugggcg

SEQ ID NO: 3087762 - RNA, 21 nt, Molluscum contagiosum virus
ccugcaucgcgccgcccgggc

SEQ ID NO: 3087763 - RNA, 14 nt, Molluscum contagiosum virus
cgcacaaccacagc

SEQ ID NO: 3087764 - RNA, 20 nt, Molluscum contagiosum virus
acaaggagggagagcugccc

SEQ ID NO: 3087765 - RNA, 15 nt, Molluscum contagiosum virus
ccggccgugcagagc

SEQ ID NO: 3087766 - RNA, 20 nt, Molluscum contagiosum virus
gagcugggauaacaggcgug

SEQ ID NO: 3087767 - RNA, 19 nt, Molluscum contagiosum virus
gacccgcgaacgagggaug

SEQ ID NO: 3087768 - RNA, 18 nt, Molluscum contagiosum virus
gggagcauguccgacucc

SEQ ID NO: 3087769 - RNA, 18 nt, Molluscum contagiosum virus
gcgccagaacauugccac

SEQ ID NO: 3087770 - RNA, 17 nt, Molluscum contagiosum virus
cccggaaagcagcaaac

SEQ ID NO: 3087771 - RNA, 17 nt, Molluscum contagiosum virus
gcccgacucgcagcuca

SEQ ID NO: 3087772 - RNA, 23 nt, Molluscum contagiosum virus
acgaggccuacgugcugcgcacg

SEQ ID NO: 3087773 - RNA, 19 nt, Molluscum contagiosum virus
agcucgacacugugcuggc

SEQ ID NO: 3087774 - RNA, 12 nt, Molluscum contagiosum virus
gucaggcaaaag

SEQ ID NO: 3087775 - RNA, 22 nt, Molluscum contagiosum virus
gcccggaagcuugcucagcagc

SEQ ID NO: 3087776 - RNA, 18 nt, Molluscum contagiosum virus
ggcaugcaaggcggacgc

SEQ ID NO: 3087777 - RNA, 13 nt, Molluscum contagiosum virus
cagccgcgcggca

SEQ ID NO: 3087778 - RNA, 22 nt, Molluscum contagiosum virus
ugcugguucugcgcugccagcu

SEQ ID NO: 3087779 - RNA, 20 nt, Molluscum contagiosum virus
aggucggccagcagcuccug

SEQ ID NO: 3087780 - RNA, 19 nt, Molluscum contagiosum virus
acacguugcagcagcacag

SEQ ID NO: 3087781 - RNA, 17 nt, Molluscum contagiosum virus
caccagcgugcccuucu

SEQ ID NO: 3087782 - RNA, 14 nt, Molluscum contagiosum virus
cggcauccugauga

SEQ ID NO: 3087783 - RNA, 15 nt, Molluscum contagiosum virus
cgcgccgcgcgcuua

SEQ ID NO: 3087784 - RNA, 15 nt, Molluscum contagiosum virus
cuccugccgucgccc

SEQ ID NO: 3087785 - RNA, 22 nt, Molluscum contagiosum virus
agugccacguacuugcugguug

SEQ ID NO: 3087786 - RNA, 18 nt, Molluscum contagiosum virus
agcacggccgccaccgcg

SEQ ID NO: 3087787 - RNA, 20 nt, Molluscum contagiosum virus
acaugcgugcuagcccgcac

SEQ ID NO: 3087788 - RNA, 16 nt, Molluscum contagiosum virus
ucgacagagaaguccc

SEQ ID NO: 3087789 - RNA, 16 nt, Molluscum contagiosum virus
uggcgcgcuccaugua

SEQ ID NO: 3087790 - RNA, 22 nt, Molluscum contagiosum virus
cggcagcacgggcggaagcucc

SEQ ID NO: 3087791 - RNA, 23 nt, Molluscum contagiosum virus
gcacggcaagacgacacgagggc

SEQ ID NO: 3087792 - RNA, 14 nt, Molluscum contagiosum virus
aaagagcugcugcg

SEQ ID NO: 3087793 - RNA, 19 nt, Molluscum contagiosum virus
agagcccggacacguagcc

SEQ ID NO: 3087794 - RNA, 14 nt, Molluscum contagiosum virus
ggccgugcccgccg

SEQ ID NO: 3087795 - RNA, 16 nt, Molluscum contagiosum virus
gguaugcgaggccugc

SEQ ID NO: 3087796 - RNA, 22 nt, Molluscum contagiosum virus
gcuucucuucaugaaauacuuc

SEQ ID NO: 3087797 - RNA, 12 nt, Molluscum contagiosum virus
gcaggcucuggc

SEQ ID NO: 3087798 - RNA, 18 nt, Molluscum contagiosum virus
cugcaucuuuuuuaugca

SEQ ID NO: 3087799 - RNA, 17 nt, Molluscum contagiosum virus
ccgggcucuuccggccc

SEQ ID NO: 3087800 - RNA, 16 nt, Molluscum contagiosum virus
ccucgcgcgcagcuuu

SEQ ID NO: 3087801 - RNA, 17 nt, Molluscum contagiosum virus
ugcccgccaagagcugg

SEQ ID NO: 3087802 - RNA, 21 nt, Molluscum contagiosum virus
ccgcgcggcuuggcgcccuuc

SEQ ID NO: 3087803 - RNA, 14 nt, Molluscum contagiosum virus
ucuugcgugccuuc

SEQ ID NO: 3087804 - RNA, 18 nt, Molluscum contagiosum virus
ggguggcuugcugcagua

SEQ ID NO: 3087805 - RNA, 22 nt, Molluscum contagiosum virus
gcgauggaaggcgaccagcugg

SEQ ID NO: 3087806 - RNA, 20 nt, Molluscum contagiosum virus
ggcucgcgcacuacucgucu

SEQ ID NO: 3087807 - RNA, 16 nt, Molluscum contagiosum virus
ugaucaccgaggagcc

SEQ ID NO: 3087808 - RNA, 15 nt, Molluscum contagiosum virus
cugcagcagcuggcc

SEQ ID NO: 3087809 - RNA, 12 nt, Molluscum contagiosum virus
ugcuaacaacau

SEQ ID NO: 3087810 - RNA, 20 nt, Molluscum contagiosum virus
uggugugccagcggcgccgc

SEQ ID NO: 3087811 - RNA, 23 nt, Molluscum contagiosum virus
gaccugggcgucgugcaccugga

SEQ ID NO: 3087812 - RNA, 22 nt, Molluscum contagiosum virus
ccauguccuuucagacagcgga

SEQ ID NO: 3087813 - RNA, 15 nt, Molluscum contagiosum virus
ccagccgcugcgccg

SEQ ID NO: 3087814 - RNA, 22 nt, Molluscum contagiosum virus
ucuugacgcccauuaaauggcc

SEQ ID NO: 3087815 - RNA, 21 nt, Molluscum contagiosum virus
gcgucgugcuccacgcgcagc

SEQ ID NO: 3087816 - RNA, 11 nt, Molluscum contagiosum virus
ucagcaaggag

SEQ ID NO: 3087817 - RNA, 18 nt, Molluscum contagiosum virus
ugggcgugcggcgcaccu

SEQ ID NO: 3087818 - RNA, 20 nt, Molluscum contagiosum virus
ggcgcugucgcgcaggcucu

SEQ ID NO: 3087819 - RNA, 20 nt, Molluscum contagiosum virus
gcgggaccgcccuuguggac

SEQ ID NO: 3087820 - RNA, 16 nt, Molluscum contagiosum virus
gcuccgagacugcuac

SEQ ID NO: 3087821 - RNA, 13 nt, Molluscum contagiosum virus
gcacgccagcagc

SEQ ID NO: 3087822 - RNA, 20 nt, Molluscum contagiosum virus
acgcucgcgcgcaugcucgc

SEQ ID NO: 3087823 - RNA, 14 nt, Molluscum contagiosum virus
ggcguggccaggcc

SEQ ID NO: 3087824 - RNA, 20 nt, Molluscum contagiosum virus
guauccaagaggccgucaca

SEQ ID NO: 3087825 - RNA, 14 nt, Molluscum contagiosum virus
cguggcgcugggcg

SEQ ID NO: 3087826 - RNA, 14 nt, Molluscum contagiosum virus
ggcgcgacugcacg

SEQ ID NO: 3087827 - RNA, 12 nt, Molluscum contagiosum virus
gcucaggccagc

SEQ ID NO: 3087828 - RNA, 19 nt, Molluscum contagiosum virus
gcagcggcaaaggcccgcg

SEQ ID NO: 3087829 - RNA, 19 nt, Molluscum contagiosum virus
gggaagcacguagcucgcg

SEQ ID NO: 3087830 - RNA, 15 nt, Molluscum contagiosum virus
cggugcucgccccuc

SEQ ID NO: 3087831 - RNA, 15 nt, Molluscum contagiosum virus
ccucuuuugcgucgc

SEQ ID NO: 3087832 - RNA, 22 nt, Molluscum contagiosum virus
gugccgcugcgcuggaugcugc

SEQ ID NO: 3087833 - RNA, 22 nt, Molluscum contagiosum virus
cccuaagggcccgcuggcggcg

SEQ ID NO: 3087834 - RNA, 14 nt, Molluscum contagiosum virus
ggccgugcagagca

SEQ ID NO: 3087835 - RNA, 16 nt, Molluscum contagiosum virus
uuggcuaugaggaggc

SEQ ID NO: 3087836 - RNA, 14 nt, Molluscum contagiosum virus
cggcagcagccucg

SEQ ID NO: 3087837 - RNA, 14 nt, Molluscum contagiosum virus
cagcaccaucacgu

SEQ ID NO: 3087838 - RNA, 19 nt, Molluscum contagiosum virus
cggguguugaccaaagguc

SEQ ID NO: 3087839 - RNA, 12 nt, Molluscum contagiosum virus
cucggcgcacac

SEQ ID NO: 3087840 - RNA, 14 nt, Molluscum contagiosum virus
gccgccggcgccgc

SEQ ID NO: 3087841 - RNA, 14 nt, Molluscum contagiosum virus
gcccgcggcgcgcc

SEQ ID NO: 3087842 - RNA, 14 nt, Molluscum contagiosum virus
cugcgcgccgcgcc

SEQ ID NO: 3087843 - RNA, 14 nt, Molluscum contagiosum virus
gccggcgcggcgag

SEQ ID NO: 3087844 - RNA, 19 nt, Molluscum contagiosum virus
gacggucguccuggagccu

SEQ ID NO: 3087845 - RNA, 14 nt, Molluscum contagiosum virus
guagcuagcucugc

SEQ ID NO: 3087846 - RNA, 14 nt, Molluscum contagiosum virus
gcgcggcagccgca

SEQ ID NO: 3087847 - RNA, 19 nt, Molluscum contagiosum virus
ucggggcccucggcgcgcc

SEQ ID NO: 3087848 - RNA, 15 nt, Molluscum contagiosum virus
cugccgugcgggcgc

SEQ ID NO: 3087849 - RNA, 14 nt, Molluscum contagiosum virus
caggccaggugcag

SEQ ID NO: 3087850 - RNA, 20 nt, Molluscum contagiosum virus
cgcgcaagucaccgcuccgc

SEQ ID NO: 3087851 - RNA, 19 nt, Molluscum contagiosum virus
agucacgaccgacccaucg

SEQ ID NO: 3087852 - RNA, 15 nt, Molluscum contagiosum virus
gggcgcacgcuuguc

SEQ ID NO: 3087853 - RNA, 14 nt, Molluscum contagiosum virus
cucgcgcgccagca

SEQ ID NO: 3087854 - RNA, 20 nt, Molluscum contagiosum virus
agucuuccuggggcuggaca

SEQ ID NO: 3087855 - RNA, 20 nt, Molluscum contagiosum virus
cuccacgcccgagggcgggc

SEQ ID NO: 3087856 - RNA, 16 nt, Molluscum contagiosum virus
cagccgcugcgccgcc

SEQ ID NO: 3087857 - RNA, 18 nt, Molluscum contagiosum virus
cugccuagguccacauuu

SEQ ID NO: 3087858 - RNA, 15 nt, Molluscum contagiosum virus
cucgcuggcuccgcu

SEQ ID NO: 3087859 - RNA, 19 nt, Molluscum contagiosum virus
guacucaacgcgauggcgc

SEQ ID NO: 3087860 - RNA, 16 nt, Molluscum contagiosum virus
ggcgcccuuccuggag

SEQ ID NO: 3087861 - RNA, 21 nt, Molluscum contagiosum virus
ggugcucguggaaaagcaggg

SEQ ID NO: 3087862 - RNA, 14 nt, Molluscum contagiosum virus
ggcgcucgccccuu

SEQ ID NO: 3087863 - RNA, 20 nt, Molluscum contagiosum virus
cucccgccgcgugcccgucu

SEQ ID NO: 3087864 - RNA, 20 nt, Molluscum contagiosum virus
uccacgcugcguucgagcug

SEQ ID NO: 3087865 - RNA, 14 nt, Molluscum contagiosum virus
cgcgccgcgcuggc

SEQ ID NO: 3087866 - RNA, 21 nt, Molluscum contagiosum virus
agaagagggucgugcaggucg

SEQ ID NO: 3087867 - RNA, 18 nt, Molluscum contagiosum virus
ccagcagguagcuggcag

SEQ ID NO: 3087868 - RNA, 17 nt, Molluscum contagiosum virus
gaacagcuucacgauga

SEQ ID NO: 3087869 - RNA, 18 nt, Molluscum contagiosum virus
cgcucggcgcgcgccgcg

SEQ ID NO: 3087870 - RNA, 21 nt, Molluscum contagiosum virus
gacggaggucuacaacgagcu

SEQ ID NO: 3087871 - RNA, 16 nt, Molluscum contagiosum virus
uaacaaggaaaaggca

SEQ ID NO: 3087872 - RNA, 21 nt, Molluscum contagiosum virus
caggcacgacgccgacaccgg

SEQ ID NO: 3087873 - RNA, 23 nt, Molluscum contagiosum virus
gacacgcugcgcgugcugggccc

SEQ ID NO: 3087874 - RNA, 15 nt, Molluscum contagiosum virus
cggaggcugcucccu

SEQ ID NO: 3087875 - RNA, 20 nt, Molluscum contagiosum virus
gcggccaaccgccugcucuc

SEQ ID NO: 3087876 - RNA, 17 nt, Molluscum contagiosum virus
gcuugccgcuugagcag

SEQ ID NO: 3087877 - RNA, 15 nt, Molluscum contagiosum virus
acgagcagugccgcc

SEQ ID NO: 3087878 - RNA, 22 nt, Molluscum contagiosum virus
aggccggcaagcucaagcccgg

SEQ ID NO: 3087879 - RNA, 19 nt, Molluscum contagiosum virus
cagccugacggcagcaagc

SEQ ID NO: 3087880 - RNA, 22 nt, Molluscum contagiosum virus
cgccgcaccucaccgcgcacau

SEQ ID NO: 3087881 - RNA, 14 nt, Molluscum contagiosum virus
cuggcuccgcugga

SEQ ID NO: 3087882 - RNA, 20 nt, Molluscum contagiosum virus
gccccgcgcguugcugcccg

SEQ ID NO: 3087883 - RNA, 15 nt, Molluscum contagiosum virus
accagcagccaggcu

SEQ ID NO: 3087884 - RNA, 22 nt, Molluscum contagiosum virus
gccagcgauugcccgcgcgcgg

SEQ ID NO: 3087885 - RNA, 19 nt, Molluscum contagiosum virus
gccgcgugcuggcggggcu

SEQ ID NO: 3087886 - RNA, 20 nt, Molluscum contagiosum virus
cagcgcuagccccagcacca

SEQ ID NO: 3087887 - RNA, 22 nt, Molluscum contagiosum virus
ccugcguggacagcaucccugc

SEQ ID NO: 3087888 - RNA, 15 nt, Molluscum contagiosum virus
gacaccagcuccgcc

SEQ ID NO: 3087889 - RNA, 19 nt, Molluscum contagiosum virus
accagcucuucguggccaa

SEQ ID NO: 3087890 - RNA, 23 nt, Molluscum contagiosum virus
gcuggagcagacguacgagcagg

SEQ ID NO: 3087891 - RNA, 15 nt, Molluscum contagiosum virus
cucauccucccugcg

SEQ ID NO: 3087892 - RNA, 16 nt, Molluscum contagiosum virus
ucaaccgcaaggaaaa

SEQ ID NO: 3087893 - RNA, 13 nt, Molluscum contagiosum virus
ugcgcacgcugac

SEQ ID NO: 3087894 - RNA, 22 nt, Molluscum contagiosum virus
ugcgcacggaccucaaggaggc

SEQ ID NO: 3087895 - RNA, 21 nt, Molluscum contagiosum virus
gcguauucgcgucuugaaaug

SEQ ID NO: 3087896 - RNA, 17 nt, Molluscum contagiosum virus
gaagcagugcucgggag

SEQ ID NO: 3087897 - RNA, 19 nt, Molluscum contagiosum virus
gcucggcguggugcuggcc

SEQ ID NO: 3087898 - RNA, 16 nt, Molluscum contagiosum virus
gcacuccgcgcaccgc

SEQ ID NO: 3087899 - RNA, 12 nt, Molluscum contagiosum virus
accuacaugagu

SEQ ID NO: 3087900 - RNA, 16 nt, Molluscum contagiosum virus
gacgcggccgcggagg

SEQ ID NO: 3087901 - RNA, 16 nt, Molluscum contagiosum virus
cuaaaagagcugcugc

SEQ ID NO: 3087902 - RNA, 21 nt, Molluscum contagiosum virus
gcagcgugcgcaccagcugca

SEQ ID NO: 3087903 - RNA, 22 nt, Molluscum contagiosum virus
cgcccguaaagaagcggugcag

SEQ ID NO: 3087904 - RNA, 20 nt, Molluscum contagiosum virus
acucgcuggccucugccugc

SEQ ID NO: 3087905 - RNA, 13 nt, Molluscum contagiosum virus
cgcgcacugcucg

SEQ ID NO: 3087906 - RNA, 14 nt, Molluscum contagiosum virus
cagugccagcagcc

SEQ ID NO: 3087907 - RNA, 13 nt, Molluscum contagiosum virus
gccgcgugcuggc

SEQ ID NO: 3087908 - RNA, 16 nt, Molluscum contagiosum virus
aucugcgcgugcuguc

SEQ ID NO: 3087909 - RNA, 13 nt, Molluscum contagiosum virus
ugcgcggggcagg

SEQ ID NO: 3087910 - RNA, 14 nt, Molluscum contagiosum virus
gcgcgccugcuggc

SEQ ID NO: 3087911 - RNA, 15 nt, Molluscum contagiosum virus
gcgagcucaaggaca

SEQ ID NO: 3087912 - RNA, 12 nt, Molluscum contagiosum virus
uggccucugcca

SEQ ID NO: 3087913 - RNA, 15 nt, Molluscum contagiosum virus
gcacgagggcacagg

SEQ ID NO: 3087914 - RNA, 21 nt, Molluscum contagiosum virus
cgagcucuccgaagagcagaa

SEQ ID NO: 3087915 - RNA, 19 nt, Molluscum contagiosum virus
gaacccgcauugggccuug

SEQ ID NO: 3087916 - RNA, 21 nt, Molluscum contagiosum virus
ugcuggcggggcuggcagaag

SEQ ID NO: 3087917 - RNA, 20 nt, Molluscum contagiosum virus
cugccguuuuacacagggcu

SEQ ID NO: 3087918 - RNA, 12 nt, Molluscum contagiosum virus
gccuacgugcug

SEQ ID NO: 3087919 - RNA, 19 nt, Molluscum contagiosum virus
ugugcgacucgucgagcac

SEQ ID NO: 3087920 - RNA, 17 nt, Molluscum contagiosum virus
gcagguuccggugucag

SEQ ID NO: 3087921 - RNA, 17 nt, Molluscum contagiosum virus
gcgagauucuggcgcgc

SEQ ID NO: 3087922 - RNA, 15 nt, Molluscum contagiosum virus
ccggccccgcgaacg

SEQ ID NO: 3087923 - RNA, 20 nt, Molluscum contagiosum virus
cgugaggaggcggcacugcu

SEQ ID NO: 3087924 - RNA, 21 nt, Molluscum contagiosum virus
cgcagcagugccagcagccgc

SEQ ID NO: 3087925 - RNA, 23 nt, Molluscum contagiosum virus
ccugcaaacgcgaaacuggacug

SEQ ID NO: 3087926 - RNA, 23 nt, Molluscum contagiosum virus
ucuuacggagcuacaaaacugaa

SEQ ID NO: 3087927 - RNA, 14 nt, Molluscum contagiosum virus
gacgcuagcugugc

SEQ ID NO: 3087928 - RNA, 17 nt, Molluscum contagiosum virus
cggguccgucuuugcgg

SEQ ID NO: 3087929 - RNA, 16 nt, Molluscum contagiosum virus
gcacgcgcgagcaugc

SEQ ID NO: 3087930 - RNA, 14 nt, Molluscum contagiosum virus
caccaccagcacgc

SEQ ID NO: 3087931 - RNA, 23 nt, Molluscum contagiosum virus
auucucguggcguugcugcugcg

SEQ ID NO: 3087932 - RNA, 20 nt, Molluscum contagiosum virus
gcuccagcauggcgccacac

SEQ ID NO: 3087933 - RNA, 16 nt, Molluscum contagiosum virus
aagcgcucgcggcucg

SEQ ID NO: 3087934 - RNA, 15 nt, Molluscum contagiosum virus
gcaccagcgcgcaga

SEQ ID NO: 3087935 - RNA, 14 nt, Molluscum contagiosum virus
aguaccgcgcgcac

SEQ ID NO: 3087936 - RNA, 14 nt, Molluscum contagiosum virus
ccugcgcuagugaa

SEQ ID NO: 3087937 - RNA, 14 nt, Molluscum contagiosum virus
uacaucgacaagca

SEQ ID NO: 3087938 - RNA, 16 nt, Molluscum contagiosum virus
cggcgggaagggguga

SEQ ID NO: 3087939 - RNA, 18 nt, Molluscum contagiosum virus
uccaggcgccgcaccuca

SEQ ID NO: 3087940 - RNA, 18 nt, Molluscum contagiosum virus
uggcaugcgugcuucacg

SEQ ID NO: 3087941 - RNA, 21 nt, Molluscum contagiosum virus
gccgagcgugaccagugcgug

SEQ ID NO: 3087942 - RNA, 14 nt, Molluscum contagiosum virus
guuuccgcgccucc

SEQ ID NO: 3087943 - RNA, 20 nt, Molluscum contagiosum virus
gccacgaagaacgcggcgug

SEQ ID NO: 3087944 - RNA, 12 nt, Molluscum contagiosum virus
cgcaagcagcuc

SEQ ID NO: 3087945 - RNA, 16 nt, Molluscum contagiosum virus
cagcgcgccaccacca

SEQ ID NO: 3087946 - RNA, 16 nt, Molluscum contagiosum virus
ggcugcugccgcgcgu

SEQ ID NO: 3087947 - RNA, 16 nt, Molluscum contagiosum virus
cucaacaagcugcugg

SEQ ID NO: 3087948 - RNA, 14 nt, Molluscum contagiosum virus
cauggcgccgcugc

SEQ ID NO: 3087949 - RNA, 21 nt, Molluscum contagiosum virus
ucuacgccgcgcaccuggagu

SEQ ID NO: 3087950 - RNA, 12 nt, Molluscum contagiosum virus
ucggccagcagc

SEQ ID NO: 3087951 - RNA, 21 nt, Molluscum contagiosum virus
gcgugugcgcgagcugaggca

SEQ ID NO: 3087952 - RNA, 15 nt, Molluscum contagiosum virus
guacugcugcaggca

SEQ ID NO: 3087953 - RNA, 22 nt, Molluscum contagiosum virus
gcaacguugcgcguucagcgca

SEQ ID NO: 3087954 - RNA, 19 nt, Molluscum contagiosum virus
gccugcccgugugcgggca

SEQ ID NO: 3087955 - RNA, 15 nt, Molluscum contagiosum virus
cucggcacugcuggc

SEQ ID NO: 3087956 - RNA, 15 nt, Molluscum contagiosum virus
gguucgcgcccugcg

SEQ ID NO: 3087957 - RNA, 18 nt, Molluscum contagiosum virus
ccguguaccgccgcggcc

SEQ ID NO: 3087958 - RNA, 18 nt, Molluscum contagiosum virus
gcgcgcccaccagcagcc

SEQ ID NO: 3087959 - RNA, 20 nt, Molluscum contagiosum virus
cuucguaaagcuggccgagg

SEQ ID NO: 3087960 - RNA, 19 nt, Molluscum contagiosum virus
cguggucgagggcgaggcc

SEQ ID NO: 3087961 - RNA, 19 nt, Molluscum contagiosum virus
ucaagauccaagcgcaaca

SEQ ID NO: 3087962 - RNA, 19 nt, Molluscum contagiosum virus
cguggccuaccugcaggag

SEQ ID NO: 3087963 - RNA, 14 nt, Molluscum contagiosum virus
ucggcguggccagg

SEQ ID NO: 3087964 - RNA, 22 nt, Molluscum contagiosum virus
agcccgcugcgcauggccacgc

SEQ ID NO: 3087965 - RNA, 22 nt, Molluscum contagiosum virus
uccccgguucaaauccugguuc

SEQ ID NO: 3087966 - RNA, 22 nt, Molluscum contagiosum virus
gcagaaacagccgugcuccgag

SEQ ID NO: 3087967 - RNA, 23 nt, Molluscum contagiosum virus
guaacaaggaaaaggcacacccc

SEQ ID NO: 3087968 - RNA, 20 nt, Molluscum contagiosum virus
aaacgcgaaacuggacugag

SEQ ID NO: 3087969 - RNA, 16 nt, Molluscum contagiosum virus
auacgccuagccugca

SEQ ID NO: 3087970 - RNA, 18 nt, Molluscum contagiosum virus
ugcgcuugcucacgcugc

SEQ ID NO: 3087971 - RNA, 15 nt, Molluscum contagiosum virus
cuguucggcaugcag

SEQ ID NO: 3087972 - RNA, 14 nt, Molluscum contagiosum virus
ccuugaagggcaca

SEQ ID NO: 3087973 - RNA, 15 nt, Molluscum contagiosum virus
gcgccggcucugccu

SEQ ID NO: 3087974 - RNA, 21 nt, Molluscum contagiosum virus
agcggccuguucuuccagugg

SEQ ID NO: 3087975 - RNA, 15 nt, Molluscum contagiosum virus
gcucggcacugcugg

SEQ ID NO: 3087976 - RNA, 19 nt, Molluscum contagiosum virus
agaagugugccugcugcgc

SEQ ID NO: 3087977 - RNA, 23 nt, Molluscum contagiosum virus
aaguacuuuccucuucggcgucc

SEQ ID NO: 3087978 - RNA, 13 nt, Molluscum contagiosum virus
aguucuuggugga

SEQ ID NO: 3087979 - RNA, 12 nt, Molluscum contagiosum virus
uugcacauuaaa

SEQ ID NO: 3087980 - RNA, 19 nt, Molluscum contagiosum virus
caaccacucuuucacgcug

SEQ ID NO: 3087981 - RNA, 21 nt, Molluscum contagiosum virus
ccgcagaacacgggggcugcc

SEQ ID NO: 3087982 - RNA, 22 nt, Molluscum contagiosum virus
ugcaccugcuggaacgcuuggc

SEQ ID NO: 3087983 - RNA, 12 nt, Molluscum contagiosum virus
gcucgcgccgcc

SEQ ID NO: 3087984 - RNA, 23 nt, Molluscum contagiosum virus
gaaacgcacagccccugcugcuc

SEQ ID NO: 3087985 - RNA, 22 nt, Molluscum contagiosum virus
cuucggcgcaacgcuggccgcc

SEQ ID NO: 3087986 - RNA, 20 nt, Molluscum contagiosum virus
cgagcugcgugugccggugc

SEQ ID NO: 3087987 - RNA, 21 nt, Molluscum contagiosum virus
ucgccggcaucgcgcugcugg

SEQ ID NO: 3087988 - RNA, 18 nt, Molluscum contagiosum virus
gccuucugcaagcugccc

SEQ ID NO: 3087989 - RNA, 19 nt, Molluscum contagiosum virus
gcuaccugaagcuggacgu

SEQ ID NO: 3087990 - RNA, 18 nt, Molluscum contagiosum virus
ggcaccccgaaaggcacc

SEQ ID NO: 3087991 - RNA, 20 nt, Molluscum contagiosum virus
cgaaguuggucaacaacacg

SEQ ID NO: 3087992 - RNA, 16 nt, Molluscum contagiosum virus
cgggcacgugcugcug

SEQ ID NO: 3087993 - RNA, 14 nt, Molluscum contagiosum virus
cauccucuaccgcc

SEQ ID NO: 3087994 - RNA, 16 nt, Molluscum contagiosum virus
gcacacgagugcccgc

SEQ ID NO: 3087995 - RNA, 18 nt, Molluscum contagiosum virus
cucguacucguugccgug

SEQ ID NO: 3087996 - RNA, 13 nt, Molluscum contagiosum virus
gacaaggagggag

SEQ ID NO: 3087997 - RNA, 15 nt, Molluscum contagiosum virus
gcgcgacuuggggcu

SEQ ID NO: 3087998 - RNA, 21 nt, Molluscum contagiosum virus
aggucuuccauugcauggaca

SEQ ID NO: 3087999 - RNA, 19 nt, Molluscum contagiosum virus
cggagcaggacgacgacac

SEQ ID NO: 3088000 - RNA, 22 nt, Molluscum contagiosum virus
uugcugucccaagacucugccg

SEQ ID NO: 3088001 - RNA, 20 nt, Molluscum contagiosum virus
gcagccgcagcccacgugcc

SEQ ID NO: 3088002 - RNA, 22 nt, Molluscum contagiosum virus
cgcaaaaaacgaaaagccagac

SEQ ID NO: 3088003 - RNA, 22 nt, Molluscum contagiosum virus
gcacgugugcaggaacugcccg

SEQ ID NO: 3088004 - RNA, 18 nt, Molluscum contagiosum virus
gcgcggacagccuagaaa

SEQ ID NO: 3088005 - RNA, 12 nt, Molluscum contagiosum virus
cccgcaggaaag

SEQ ID NO: 3088006 - RNA, 14 nt, Molluscum contagiosum virus
gcgguggugcuggg

SEQ ID NO: 3088007 - RNA, 13 nt, Molluscum contagiosum virus
ccgcgcgcacgcg

SEQ ID NO: 3088008 - RNA, 12 nt, Molluscum contagiosum virus
cggggccgcacg

SEQ ID NO: 3088009 - RNA, 18 nt, Molluscum contagiosum virus
cacaccugugcccugucc

SEQ ID NO: 3088010 - RNA, 20 nt, Molluscum contagiosum virus
ccggcgcggcgagccgcgcg

SEQ ID NO: 3088011 - RNA, 21 nt, Molluscum contagiosum virus
ggcgacgacagcgacgagauc

SEQ ID NO: 3088012 - RNA, 17 nt, Molluscum contagiosum virus
ugcucgucgccgggccc

SEQ ID NO: 3088013 - RNA, 21 nt, Molluscum contagiosum virus
gagcaccgaacaaaugcagag

SEQ ID NO: 3088014 - RNA, 12 nt, Molluscum contagiosum virus
gacguagagcag

SEQ ID NO: 3088015 - RNA, 20 nt, Molluscum contagiosum virus
uccgggcagauagcaaccuc

SEQ ID NO: 3088016 - RNA, 22 nt, Molluscum contagiosum virus
acuguaggggagggcggcaagc

SEQ ID NO: 3088017 - RNA, 14 nt, Molluscum contagiosum virus
gcucaagcugcuca

SEQ ID NO: 3088018 - RNA, 21 nt, Molluscum contagiosum virus
caccgcaugggcccuggcggc

SEQ ID NO: 3088019 - RNA, 20 nt, Molluscum contagiosum virus
cgcagcgggcuacucgagca

SEQ ID NO: 3088020 - RNA, 15 nt, Molluscum contagiosum virus
cgcgcgagcugcugc

SEQ ID NO: 3088021 - RNA, 12 nt, Molluscum contagiosum virus
gcccccgugcug

SEQ ID NO: 3088022 - RNA, 23 nt, Molluscum contagiosum virus
cacgcgacgacgcacgcuugccu

SEQ ID NO: 3088023 - RNA, 19 nt, Molluscum contagiosum virus
gcgccgucucgcggaagaa

SEQ ID NO: 3088024 - RNA, 18 nt, Molluscum contagiosum virus
accccgagguucuccaga

SEQ ID NO: 3088025 - RNA, 12 nt, Molluscum contagiosum virus
aacaagcugcug

SEQ ID NO: 3088026 - RNA, 18 nt, Molluscum contagiosum virus
acuacaaggugcuguccu

SEQ ID NO: 3088027 - RNA, 20 nt, Molluscum contagiosum virus
gccugcaagaggcgcugucg

SEQ ID NO: 3088028 - RNA, 16 nt, Molluscum contagiosum virus
gcaacgucgcacuggc

SEQ ID NO: 3088029 - RNA, 14 nt, Molluscum contagiosum virus
acgggaacgagguc

SEQ ID NO: 3088030 - RNA, 21 nt, Molluscum contagiosum virus
gggcgcgguagcucgugccug

SEQ ID NO: 3088031 - RNA, 22 nt, Molluscum contagiosum virus
cacuugcgcgcgugccuguggc

SEQ ID NO: 3088032 - RNA, 14 nt, Molluscum contagiosum virus
gcggcgcgcagcuc

SEQ ID NO: 3088033 - RNA, 18 nt, Molluscum contagiosum virus
cgaggcguccagcggcug

SEQ ID NO: 3088034 - RNA, 15 nt, Molluscum contagiosum virus
caacgacaaggaaag

SEQ ID NO: 3088035 - RNA, 15 nt, Molluscum contagiosum virus
acagcuugcugcugu

SEQ ID NO: 3088036 - RNA, 14 nt, Molluscum contagiosum virus
acaacgugcugcuc

SEQ ID NO: 3088037 - RNA, 13 nt, Molluscum contagiosum virus
cggcgcacgcaca

SEQ ID NO: 3088038 - RNA, 21 nt, Molluscum contagiosum virus
aacgcgacgauggccacgcag

SEQ ID NO: 3088039 - RNA, 17 nt, Molluscum contagiosum virus
agcacugccugccgccu

SEQ ID NO: 3088040 - RNA, 19 nt, Molluscum contagiosum virus
cuggaggcaaucuguccag

SEQ ID NO: 3088041 - RNA, 23 nt, Molluscum contagiosum virus
ugccccaugcccgaccacgugcc

SEQ ID NO: 3088042 - RNA, 18 nt, Molluscum contagiosum virus
cgccaguacgcaugcgcg

SEQ ID NO: 3088043 - RNA, 19 nt, Molluscum contagiosum virus
ugguccaccagcugccgcu

SEQ ID NO: 3088044 - RNA, 22 nt, Molluscum contagiosum virus
gcggcuagcaccgcaugggccc

SEQ ID NO: 3088045 - RNA, 23 nt, Molluscum contagiosum virus
accgcguccgcuaccgcagccac

SEQ ID NO: 3088046 - RNA, 14 nt, Molluscum contagiosum virus
cagcaagcagcgcg

SEQ ID NO: 3088047 - RNA, 12 nt, Molluscum contagiosum virus
cgcaacgagguc

SEQ ID NO: 3088048 - RNA, 21 nt, Molluscum contagiosum virus
caagugcacaccagacaaagu

SEQ ID NO: 3088049 - RNA, 22 nt, Molluscum contagiosum virus
cgcugcagcuaggauccugcuc

SEQ ID NO: 3088050 - RNA, 15 nt, Molluscum contagiosum virus
ccgcuaccagcucgc

SEQ ID NO: 3088051 - RNA, 12 nt, Molluscum contagiosum virus
gcacauugcugc

SEQ ID NO: 3088052 - RNA, 22 nt, Molluscum contagiosum virus
agggccugcgggcggcacacac

SEQ ID NO: 3088053 - RNA, 19 nt, Molluscum contagiosum virus
gcgcucgcucgcgcgcagc

SEQ ID NO: 3088054 - RNA, 13 nt, Molluscum contagiosum virus
ucaacaagcugcu

SEQ ID NO: 3088055 - RNA, 18 nt, Molluscum contagiosum virus
gaugccuuucaggggucu

SEQ ID NO: 3088056 - RNA, 15 nt, Molluscum contagiosum virus
gacgcgcggcggcgc

SEQ ID NO: 3088057 - RNA, 15 nt, Molluscum contagiosum virus
gaaguccucucuccc

SEQ ID NO: 3088058 - RNA, 16 nt, Molluscum contagiosum virus
cgugccucugccagcc

SEQ ID NO: 3088059 - RNA, 13 nt, Molluscum contagiosum virus
gagccucuggaag

SEQ ID NO: 3088060 - RNA, 17 nt, Molluscum contagiosum virus
gcgcuucugccugcucc

SEQ ID NO: 3088061 - RNA, 15 nt, Molluscum contagiosum virus
gcaagggcuccuucu

SEQ ID NO: 3088062 - RNA, 22 nt, Molluscum contagiosum virus
gaaguccucucuccccuucaga

SEQ ID NO: 3088063 - RNA, 22 nt, Molluscum contagiosum virus
cagcauccuggaguuuaaugac

SEQ ID NO: 3088064 - RNA, 19 nt, Molluscum contagiosum virus
cuccgacgugcugcgcaac

SEQ ID NO: 3088065 - RNA, 15 nt, Molluscum contagiosum virus
caguaccgugucaaa

SEQ ID NO: 3088066 - RNA, 19 nt, Molluscum contagiosum virus
cgggguacaggcgcggcag

SEQ ID NO: 3088067 - RNA, 15 nt, Molluscum contagiosum virus
cggagcgcacgaagc

SEQ ID NO: 3088068 - RNA, 21 nt, Molluscum contagiosum virus
accuggucguugucgggaaug

SEQ ID NO: 3088069 - RNA, 19 nt, Molluscum contagiosum virus
cugcuuccgcaccuggucg

SEQ ID NO: 3088070 - RNA, 14 nt, Molluscum contagiosum virus
uguaacaaggaaaa

SEQ ID NO: 3088071 - RNA, 14 nt, Molluscum contagiosum virus
cccgcgauuuacuu

SEQ ID NO: 3088072 - RNA, 15 nt, Molluscum contagiosum virus
guggccaaggucucg

SEQ ID NO: 3088073 - RNA, 22 nt, Molluscum contagiosum virus
ucaacgcgauggcgcagcuccu

SEQ ID NO: 3088074 - RNA, 17 nt, Molluscum contagiosum virus
ggccucguccuggaggg

SEQ ID NO: 3088075 - RNA, 16 nt, Molluscum contagiosum virus
cugccauggcagcucg

SEQ ID NO: 3088076 - RNA, 18 nt, Molluscum contagiosum virus
cgccuguaccugcucggg

SEQ ID NO: 3088077 - RNA, 15 nt, Molluscum contagiosum virus
gcgccagccugcugg

SEQ ID NO: 3088078 - RNA, 16 nt, Molluscum contagiosum virus
uggcauccggcacgca

SEQ ID NO: 3088079 - RNA, 13 nt, Molluscum contagiosum virus
cacugccugccgc

SEQ ID NO: 3088080 - RNA, 19 nt, Molluscum contagiosum virus
ggcacccgcaacaaggaaa

SEQ ID NO: 3088081 - RNA, 13 nt, Molluscum contagiosum virus
caaggcgcacgag

SEQ ID NO: 3088082 - RNA, 22 nt, Molluscum contagiosum virus
gccgggccugcggcggcgcacg

SEQ ID NO: 3088083 - RNA, 14 nt, Molluscum contagiosum virus
gcuggccucugcca

SEQ ID NO: 3088084 - RNA, 15 nt, Molluscum contagiosum virus
gccagcuugagcaca

SEQ ID NO: 3088085 - RNA, 22 nt, Molluscum contagiosum virus
gcucggcccgcggacgcgcagc

SEQ ID NO: 3088086 - RNA, 17 nt, Molluscum contagiosum virus
gcacugcucgcgcacgc

SEQ ID NO: 3088087 - RNA, 15 nt, Molluscum contagiosum virus
cggggcaggcagugc

SEQ ID NO: 3088088 - RNA, 17 nt, Molluscum contagiosum virus
cgugcggcggcgcgugc

SEQ ID NO: 3088089 - RNA, 18 nt, Molluscum contagiosum virus
ccuggcggcgcuggagac

SEQ ID NO: 3088090 - RNA, 16 nt, Molluscum contagiosum virus
cguccggcgcucgccu

SEQ ID NO: 3088091 - RNA, 14 nt, Molluscum contagiosum virus
gcgucuccgcgagu

SEQ ID NO: 3088092 - RNA, 17 nt, Molluscum contagiosum virus
cagcucggggcugucag

SEQ ID NO: 3088093 - RNA, 22 nt, Molluscum contagiosum virus
cccaagagccauguuuccugcg

SEQ ID NO: 3088094 - RNA, 21 nt, Molluscum contagiosum virus
cuggcagugccgggcgccggc

SEQ ID NO: 3088095 - RNA, 17 nt, Molluscum contagiosum virus
ggcccgcgcgugaagga

SEQ ID NO: 3088096 - RNA, 14 nt, Molluscum contagiosum virus
aucggcacugcuca

SEQ ID NO: 3088097 - RNA, 19 nt, Molluscum contagiosum virus
gugacucggccgcggggcg

SEQ ID NO: 3088098 - RNA, 23 nt, Molluscum contagiosum virus
gaagggcgcggacgccuucuucc

SEQ ID NO: 3088099 - RNA, 18 nt, Molluscum contagiosum virus
ggcgcuagugcagaugag

SEQ ID NO: 3088100 - RNA, 18 nt, Molluscum contagiosum virus
ccgcgagcacuggcuggc

SEQ ID NO: 3088101 - RNA, 21 nt, Molluscum contagiosum virus
cgcgcgcaagucgcgcgcugc

SEQ ID NO: 3088102 - RNA, 15 nt, Molluscum contagiosum virus
uacaucggacuggcg

SEQ ID NO: 3088103 - RNA, 21 nt, Molluscum contagiosum virus
cccaucggagaagugcuccgc

SEQ ID NO: 3088104 - RNA, 21 nt, Molluscum contagiosum virus
cgccgaaacacggccuccagc

SEQ ID NO: 3088105 - RNA, 21 nt, Molluscum contagiosum virus
gcgugccgcggcacugggugc

SEQ ID NO: 3088106 - RNA, 20 nt, Molluscum contagiosum virus
guccgcuccuucucagggcu

SEQ ID NO: 3088107 - RNA, 18 nt, Molluscum contagiosum virus
agcaagucugcgcaggac

SEQ ID NO: 3088108 - RNA, 21 nt, Molluscum contagiosum virus
ucaagacauuucuccuccggg

SEQ ID NO: 3088109 - RNA, 19 nt, Molluscum contagiosum virus
gcgcaagccgcguaccacc

SEQ ID NO: 3088110 - RNA, 14 nt, Molluscum contagiosum virus
guccugaacagcau

SEQ ID NO: 3088111 - RNA, 19 nt, Molluscum contagiosum virus
caggcucgucguggacgcu

SEQ ID NO: 3088112 - RNA, 20 nt, Molluscum contagiosum virus
augaaccacuucgucaagca

SEQ ID NO: 3088113 - RNA, 22 nt, Molluscum contagiosum virus
gcggugcggcgcacgcugcugu

SEQ ID NO: 3088114 - RNA, 18 nt, Molluscum contagiosum virus
cacauuccucggcgcaca

SEQ ID NO: 3088115 - RNA, 13 nt, Molluscum contagiosum virus
acgcgggccaggc

SEQ ID NO: 3088116 - RNA, 24 nt, Molluscum contagiosum virus
acaaccacucuuucacgcugcacg

SEQ ID NO: 3088117 - RNA, 18 nt, Molluscum contagiosum virus
augcgucccagcagcugc

SEQ ID NO: 3088118 - RNA, 20 nt, Molluscum contagiosum virus
aucgcucgcggugcagcugc

SEQ ID NO: 3088119 - RNA, 13 nt, Molluscum contagiosum virus
ucgcgggcgccgc

SEQ ID NO: 3088120 - RNA, 20 nt, Molluscum contagiosum virus
augacuaugcgucuuccugc

SEQ ID NO: 3088121 - RNA, 16 nt, Molluscum contagiosum virus
gccgaugccuaugccg

SEQ ID NO: 3088122 - RNA, 19 nt, Molluscum contagiosum virus
cgccgccucgcgcgcacug

SEQ ID NO: 3088123 - RNA, 14 nt, Molluscum contagiosum virus
cuuagccacugugc

SEQ ID NO: 3088124 - RNA, 15 nt, Molluscum contagiosum virus
gauccacgcgugcug

SEQ ID NO: 3088125 - RNA, 18 nt, Molluscum contagiosum virus
ugcgcgggaugcuggacg

SEQ ID NO: 3088126 - RNA, 17 nt, Molluscum contagiosum virus
ugcagagcgugcugguc

SEQ ID NO: 3088127 - RNA, 21 nt, Molluscum contagiosum virus
gcucuguugcguuggcgccag

SEQ ID NO: 3088128 - RNA, 20 nt, Molluscum contagiosum virus
uccgcgacguccuagagcag

SEQ ID NO: 3088129 - RNA, 16 nt, Molluscum contagiosum virus
ggcacccuggcugcug

SEQ ID NO: 3088130 - RNA, 14 nt, Molluscum contagiosum virus
ccgcgugcucugcu

SEQ ID NO: 3088131 - RNA, 20 nt, Molluscum contagiosum virus
cgagcaguccgccucgagca

SEQ ID NO: 3088132 - RNA, 21 nt, Molluscum contagiosum virus
gcugucaacagugcgugccag

SEQ ID NO: 3088133 - RNA, 12 nt, Molluscum contagiosum virus
ccaucuccuugu

SEQ ID NO: 3088134 - RNA, 18 nt, Molluscum contagiosum virus
uuuugcacagugugccga

SEQ ID NO: 3088135 - RNA, 20 nt, Molluscum contagiosum virus
cuuacugcagcagcuccagc

SEQ ID NO: 3088136 - RNA, 13 nt, Molluscum contagiosum virus
ccgcugcuggaac

SEQ ID NO: 3088137 - RNA, 14 nt, Molluscum contagiosum virus
gucgcgcgccacaa

SEQ ID NO: 3088138 - RNA, 21 nt, Molluscum contagiosum virus
ccgccucgagcacgccuccaa

SEQ ID NO: 3088139 - RNA, 14 nt, Molluscum contagiosum virus
gcggcgggguccuc

SEQ ID NO: 3088140 - RNA, 15 nt, Molluscum contagiosum virus
gccacuguugcuucc

SEQ ID NO: 3088141 - RNA, 23 nt, Molluscum contagiosum virus
cgccaacuucgucucgagcuucc

SEQ ID NO: 3088142 - RNA, 22 nt, Molluscum contagiosum virus
ucgcgggcgcgcgcggagagga

SEQ ID NO: 3088143 - RNA, 16 nt, Molluscum contagiosum virus
gcguugugcggggcuc

SEQ ID NO: 3088144 - RNA, 17 nt, Molluscum contagiosum virus
acgccuuccugcuggcg

SEQ ID NO: 3088145 - RNA, 13 nt, Molluscum contagiosum virus
gcgcggugagccg

SEQ ID NO: 3088146 - RNA, 12 nt, Molluscum contagiosum virus
acaccuccugcu

SEQ ID NO: 3088147 - RNA, 22 nt, Molluscum contagiosum virus
cggagcgccuucugcaagcugc

SEQ ID NO: 3088148 - RNA, 15 nt, Molluscum contagiosum virus
caaugaggagaggaa

SEQ ID NO: 3088149 - RNA, 13 nt, Molluscum contagiosum virus
gcuggacggugcu

SEQ ID NO: 3088150 - RNA, 14 nt, Molluscum contagiosum virus
caguugagagcagc

SEQ ID NO: 3088151 - RNA, 14 nt, Molluscum contagiosum virus
cccgcaagccacac

SEQ ID NO: 3088152 - RNA, 22 nt, Molluscum contagiosum virus
cgucuuaacucagcgggcagac

SEQ ID NO: 3088153 - RNA, 19 nt, Molluscum contagiosum virus
gccgucgacgcugacggcc

SEQ ID NO: 3088154 - RNA, 13 nt, Molluscum contagiosum virus
gcugcgcgccgcg

SEQ ID NO: 3088155 - RNA, 15 nt, Molluscum contagiosum virus
cgcacgagcugcugc

SEQ ID NO: 3088156 - RNA, 16 nt, Molluscum contagiosum virus
gaggaaaggcacaccc

SEQ ID NO: 3088157 - RNA, 13 nt, Molluscum contagiosum virus
gauccgggcgcug

SEQ ID NO: 3088158 - RNA, 21 nt, Molluscum contagiosum virus
cggcagcuggagcugccgcug

SEQ ID NO: 3088159 - RNA, 14 nt, Molluscum contagiosum virus
aagucgaagagggu

SEQ ID NO: 3088160 - RNA, 20 nt, Molluscum contagiosum virus
gcagcuggcgggcgugccca

SEQ ID NO: 3088161 - RNA, 15 nt, Molluscum contagiosum virus
gacgcgaacugcccg

SEQ ID NO: 3088162 - RNA, 19 nt, Molluscum contagiosum virus
cccgcuggcggcgcacgcg

SEQ ID NO: 3088163 - RNA, 14 nt, Molluscum contagiosum virus
acugcagcagcccc

SEQ ID NO: 3088164 - RNA, 14 nt, Molluscum contagiosum virus
cugcaggcagaagc

SEQ ID NO: 3088165 - RNA, 18 nt, Molluscum contagiosum virus
guccccgcgcucacugca

SEQ ID NO: 3088166 - RNA, 14 nt, Molluscum contagiosum virus
gucuuccagcacug

SEQ ID NO: 3088167 - RNA, 14 nt, Molluscum contagiosum virus
gggcacaagcuuuc

SEQ ID NO: 3088168 - RNA, 17 nt, Molluscum contagiosum virus
guucguccgcucgugcc

SEQ ID NO: 3088169 - RNA, 14 nt, Molluscum contagiosum virus
uggcacgcgagcaa

SEQ ID NO: 3088170 - RNA, 22 nt, Molluscum contagiosum virus
ccgaauggugcgguacaugcug

SEQ ID NO: 3088171 - RNA, 18 nt, Molluscum contagiosum virus
gacgcuuucguccgccgc

SEQ ID NO: 3088172 - RNA, 20 nt, Molluscum contagiosum virus
gucggagcaggacgacgaca

SEQ ID NO: 3088173 - RNA, 13 nt, Molluscum contagiosum virus
gccgaugcagugc

SEQ ID NO: 3088174 - RNA, 14 nt, Molluscum contagiosum virus
ggcgcggcgagccg

SEQ ID NO: 3088175 - RNA, 17 nt, Molluscum contagiosum virus
cggagagccgccuuugc

SEQ ID NO: 3088176 - RNA, 20 nt, Molluscum contagiosum virus
gcgccacgugcgcaucccug

SEQ ID NO: 3088177 - RNA, 21 nt, Molluscum contagiosum virus
uggugcugcgcgacaugcugc

SEQ ID NO: 3088178 - RNA, 18 nt, Molluscum contagiosum virus
gccacuggaagaacaggc

SEQ ID NO: 3088179 - RNA, 19 nt, Molluscum contagiosum virus
gcgcuagccgccgcugccg

SEQ ID NO: 3088180 - RNA, 17 nt, Molluscum contagiosum virus
cacgccaagcgcuugcu

SEQ ID NO: 3088181 - RNA, 13 nt, Molluscum contagiosum virus
acgaggugcugcg

SEQ ID NO: 3088182 - RNA, 13 nt, Molluscum contagiosum virus
gcgcuugcucacg

SEQ ID NO: 3088183 - RNA, 23 nt, Molluscum contagiosum virus
cgguggucuccgcgggcagccgc

SEQ ID NO: 3088184 - RNA, 12 nt, Molluscum contagiosum virus
cagguugcucgc

SEQ ID NO: 3088185 - RNA, 20 nt, Molluscum contagiosum virus
cgccguuggccaccuggaaa

SEQ ID NO: 3088186 - RNA, 15 nt, Molluscum contagiosum virus
acggcgagcgccgcu

SEQ ID NO: 3088187 - RNA, 16 nt, Molluscum contagiosum virus
guuccagcuccggcuu

SEQ ID NO: 3088188 - RNA, 16 nt, Molluscum contagiosum virus
cauggaccgcgucaag

SEQ ID NO: 3088189 - RNA, 15 nt, Molluscum contagiosum virus
cugacggcagcaagc

SEQ ID NO: 3088190 - RNA, 21 nt, Molluscum contagiosum virus
cucccgcggccgccacuguug

SEQ ID NO: 3088191 - RNA, 17 nt, Molluscum contagiosum virus
gaccugggcgucgugca

SEQ ID NO: 3088192 - RNA, 22 nt, Molluscum contagiosum virus
gcggaccgucagccucugugcg

SEQ ID NO: 3088193 - RNA, 22 nt, Molluscum contagiosum virus
gcagcauuuuggugggcacgca

SEQ ID NO: 3088194 - RNA, 13 nt, Molluscum contagiosum virus
uuguccugagccu

SEQ ID NO: 3088195 - RNA, 16 nt, Molluscum contagiosum virus
uggucaagauccaagc

SEQ ID NO: 3088196 - RNA, 12 nt, Molluscum contagiosum virus
ugcguuuccagg

SEQ ID NO: 3088197 - RNA, 18 nt, Molluscum contagiosum virus
ggcgugcagggcgugcuu

SEQ ID NO: 3088198 - RNA, 13 nt, Molluscum contagiosum virus
ucggcguacgugc

SEQ ID NO: 3088199 - RNA, 18 nt, Molluscum contagiosum virus
cucugcgcagguagcggc

SEQ ID NO: 3088200 - RNA, 15 nt, Molluscum contagiosum virus
gcacaagggcagcuc

SEQ ID NO: 3088201 - RNA, 14 nt, Molluscum contagiosum virus
cagcggcaggcggc

SEQ ID NO: 3088202 - RNA, 21 nt, Molluscum contagiosum virus
ccagcggauaugcgccugugc

SEQ ID NO: 3088203 - RNA, 12 nt, Molluscum contagiosum virus
cgcugagcgcag

SEQ ID NO: 3088204 - RNA, 20 nt, Molluscum contagiosum virus
cgcccaccagcagccaggcu

SEQ ID NO: 3088205 - RNA, 13 nt, Molluscum contagiosum virus
gucaccgcuccgc

SEQ ID NO: 3088206 - RNA, 17 nt, Molluscum contagiosum virus
cguugcagcagcacagg

SEQ ID NO: 3088207 - RNA, 13 nt, Molluscum contagiosum virus
gucugcaagcgug

SEQ ID NO: 3088208 - RNA, 18 nt, Molluscum contagiosum virus
ggagacgucguggauggc

SEQ ID NO: 3088209 - RNA, 22 nt, Molluscum contagiosum virus
ugccuggagggcagugccaagg

SEQ ID NO: 3088210 - RNA, 15 nt, Molluscum contagiosum virus
agaggacagcuccuu

SEQ ID NO: 3088211 - RNA, 21 nt, Molluscum contagiosum virus
cgcggccaugcuccugaucug

SEQ ID NO: 3088212 - RNA, 12 nt, Molluscum contagiosum virus
agacuuccuugc

SEQ ID NO: 3088213 - RNA, 17 nt, Molluscum contagiosum virus
guguucggggccgcgag

SEQ ID NO: 3088214 - RNA, 14 nt, Molluscum contagiosum virus
ggcagcaacugcac

SEQ ID NO: 3088215 - RNA, 16 nt, Molluscum contagiosum virus
ggagcuuuccuugcgc

SEQ ID NO: 3088216 - RNA, 17 nt, Molluscum contagiosum virus
cggaagacaaggcugcg

SEQ ID NO: 3088217 - RNA, 17 nt, Molluscum contagiosum virus
guuuucacgcaaggaag

SEQ ID NO: 3088218 - RNA, 18 nt, Molluscum contagiosum virus
uggaggcaaucuguccag

SEQ ID NO: 3088219 - RNA, 16 nt, Molluscum contagiosum virus
gcccgagggcgggcac

SEQ ID NO: 3088220 - RNA, 21 nt, Molluscum contagiosum virus
gugcuggacacucgcggcaag

SEQ ID NO: 3088221 - RNA, 18 nt, Molluscum contagiosum virus
cgagaccacgcgcgcugc

SEQ ID NO: 3088222 - RNA, 14 nt, Molluscum contagiosum virus
cuaccgcgcgcgca

SEQ ID NO: 3088223 - RNA, 20 nt, Molluscum contagiosum virus
gcugucccaagacucugccg

SEQ ID NO: 3088224 - RNA, 21 nt, Molluscum contagiosum virus
uccgcgacuaccugcugcuga

SEQ ID NO: 3088225 - RNA, 14 nt, Molluscum contagiosum virus
uccuggcaauccug

SEQ ID NO: 3088226 - RNA, 22 nt, Molluscum contagiosum virus
gugaccauggacacgcugcgcg

SEQ ID NO: 3088227 - RNA, 23 nt, Molluscum contagiosum virus
caugaacucgcugcugcucuucc

SEQ ID NO: 3088228 - RNA, 20 nt, Molluscum contagiosum virus
cugguuugcgcucucagagc

SEQ ID NO: 3088229 - RNA, 13 nt, Molluscum contagiosum virus
uccgcaacguggc

SEQ ID NO: 3088230 - RNA, 17 nt, Molluscum contagiosum virus
cuuccggaggcagcgcu

SEQ ID NO: 3088231 - RNA, 17 nt, Molluscum contagiosum virus
ugccgacgugugccgcu

SEQ ID NO: 3088232 - RNA, 16 nt, Molluscum contagiosum virus
agcgccagccugcugg

SEQ ID NO: 3088233 - RNA, 21 nt, Molluscum contagiosum virus
cgauuaucguggacgagcaga

SEQ ID NO: 3088234 - RNA, 14 nt, Molluscum contagiosum virus
aucaugagccaguc

SEQ ID NO: 3088235 - RNA, 18 nt, Molluscum contagiosum virus
cgauacaaaacaugcugu

SEQ ID NO: 3088236 - RNA, 16 nt, Molluscum contagiosum virus
gcagcaagcagccgca

SEQ ID NO: 3088237 - RNA, 14 nt, Molluscum contagiosum virus
cgcggcgcgccgcc

SEQ ID NO: 3088238 - RNA, 16 nt, Molluscum contagiosum virus
ucgcgagcguuucugc

SEQ ID NO: 3088239 - RNA, 20 nt, Molluscum contagiosum virus
agcagcgugcauagugggcu

SEQ ID NO: 3088240 - RNA, 20 nt, Molluscum contagiosum virus
agguacccgcaaccccgcgc

SEQ ID NO: 3088241 - RNA, 16 nt, Molluscum contagiosum virus
acuuuuccugcgucgc

SEQ ID NO: 3088242 - RNA, 20 nt, Molluscum contagiosum virus
ggcguccgcacgaggagccc

SEQ ID NO: 3088243 - RNA, 15 nt, Molluscum contagiosum virus
gaccgcgcacgcagc

SEQ ID NO: 3088244 - RNA, 16 nt, Molluscum contagiosum virus
aguaccggccaaggca

SEQ ID NO: 3088245 - RNA, 21 nt, Molluscum contagiosum virus
cgccaauaucacgccgguggc

SEQ ID NO: 3088246 - RNA, 15 nt, Molluscum contagiosum virus
acacccgugcccgcu

SEQ ID NO: 3088247 - RNA, 21 nt, Molluscum contagiosum virus
auucucggacagugccuccgc

SEQ ID NO: 3088248 - RNA, 20 nt, Molluscum contagiosum virus
acagcaugaacucgcugcug

SEQ ID NO: 3088249 - RNA, 23 nt, Molluscum contagiosum virus
gugcucuuggcguucgcagugcc

SEQ ID NO: 3088250 - RNA, 14 nt, Molluscum contagiosum virus
guggcggcucugcc

SEQ ID NO: 3088251 - RNA, 14 nt, Molluscum contagiosum virus
guccggcgcucgcc

SEQ ID NO: 3088252 - RNA, 19 nt, Molluscum contagiosum virus
acagcaggagcacgccugg

SEQ ID NO: 3088253 - RNA, 14 nt, Molluscum contagiosum virus
cagugccgcucgcu

SEQ ID NO: 3088254 - RNA, 18 nt, Molluscum contagiosum virus
ggcgaacaccccgagcug

SEQ ID NO: 3088255 - RNA, 12 nt, Molluscum contagiosum virus
auguuguuugaa

SEQ ID NO: 3088256 - RNA, 19 nt, Molluscum contagiosum virus
ccgcggcacaugcagcugc

SEQ ID NO: 3088257 - RNA, 15 nt, Molluscum contagiosum virus
cgucccagcagcugc

SEQ ID NO: 3088258 - RNA, 15 nt, Molluscum contagiosum virus
ucaaccugcugccuc

SEQ ID NO: 3088259 - RNA, 17 nt, Molluscum contagiosum virus
caagugcacgcggcgcg

SEQ ID NO: 3088260 - RNA, 21 nt, Molluscum contagiosum virus
ccuccguguccgacgccgcca

SEQ ID NO: 3088261 - RNA, 21 nt, Molluscum contagiosum virus
gcgcagcuucucugcgaucgc

SEQ ID NO: 3088262 - RNA, 15 nt, Molluscum contagiosum virus
ggcaugcgcgcagug

SEQ ID NO: 3088263 - RNA, 19 nt, Molluscum contagiosum virus
caaggagaugggcacggca

SEQ ID NO: 3088264 - RNA, 13 nt, Molluscum contagiosum virus
gcgacagcugcug

SEQ ID NO: 3088265 - RNA, 22 nt, Molluscum contagiosum virus
guguggcuugcgggacagagcu

SEQ ID NO: 3088266 - RNA, 13 nt, Molluscum contagiosum virus
cgccucgcauucu

SEQ ID NO: 3088267 - RNA, 14 nt, Molluscum contagiosum virus
uggagcgcgcggac

SEQ ID NO: 3088268 - RNA, 15 nt, Molluscum contagiosum virus
ccacgagcagugccg

SEQ ID NO: 3088269 - RNA, 16 nt, Molluscum contagiosum virus
ugccugcugcgcuucu

SEQ ID NO: 3088270 - RNA, 15 nt, Molluscum contagiosum virus
gcaugcgcgcgcagc

SEQ ID NO: 3088271 - RNA, 12 nt, Molluscum contagiosum virus
cuggcaccugcg

SEQ ID NO: 3088272 - RNA, 15 nt, Molluscum contagiosum virus
gggccgcgguggccg

SEQ ID NO: 3088273 - RNA, 17 nt, Molluscum contagiosum virus
gacagccugcaccgagu

SEQ ID NO: 3088274 - RNA, 20 nt, Molluscum contagiosum virus
ucaacgugggcaccugcauc

SEQ ID NO: 3088275 - RNA, 22 nt, Molluscum contagiosum virus
ggggcugucgcuggaggauucu

SEQ ID NO: 3088276 - RNA, 19 nt, Molluscum contagiosum virus
agucguacacgcagagcca

SEQ ID NO: 3088277 - RNA, 13 nt, Molluscum contagiosum virus
aguaccagcucgc

SEQ ID NO: 3088278 - RNA, 14 nt, Molluscum contagiosum virus
gccgcaagcacacg

SEQ ID NO: 3088279 - RNA, 13 nt, Molluscum contagiosum virus
caacgugcugcuc

SEQ ID NO: 3088280 - RNA, 18 nt, Molluscum contagiosum virus
agcgcgcccaccagcagc

SEQ ID NO: 3088281 - RNA, 17 nt, Molluscum contagiosum virus
uuccacgucuccaacaa

SEQ ID NO: 3088282 - RNA, 18 nt, Molluscum contagiosum virus
aggcgcugucgcgcaggc

SEQ ID NO: 3088283 - RNA, 16 nt, Molluscum contagiosum virus
caaguucgcugcuggc

SEQ ID NO: 3088284 - RNA, 12 nt, Molluscum contagiosum virus
cgcgggccaggc

SEQ ID NO: 3088285 - RNA, 16 nt, Molluscum contagiosum virus
aaggcauaccugugcc

SEQ ID NO: 3088286 - RNA, 23 nt, Molluscum contagiosum virus
cagcaaacugugcuccugaggaa

SEQ ID NO: 3088287 - RNA, 23 nt, Molluscum contagiosum virus
cucugcacgggcacgccgugggc

SEQ ID NO: 3088288 - RNA, 13 nt, Molluscum contagiosum virus
cggcgggugccgc

SEQ ID NO: 3088289 - RNA, 19 nt, Molluscum contagiosum virus
uggccgcgauucugcucuu

SEQ ID NO: 3088290 - RNA, 14 nt, Molluscum contagiosum virus
ggcgcagcaggaug

SEQ ID NO: 3088291 - RNA, 19 nt, Molluscum contagiosum virus
cgcugcgccgcuuccuggc

SEQ ID NO: 3088292 - RNA, 22 nt, Molluscum contagiosum virus
gcccgcggcacaugcagcugca

SEQ ID NO: 3088293 - RNA, 17 nt, Molluscum contagiosum virus
cgcuucgggcucagcaa

SEQ ID NO: 3088294 - RNA, 15 nt, Molluscum contagiosum virus
gcgcgcacggcagcg

SEQ ID NO: 3088295 - RNA, 23 nt, Molluscum contagiosum virus
uccacgcaggacuggcaccugcg

SEQ ID NO: 3088296 - RNA, 18 nt, Molluscum contagiosum virus
cacgcuggucacgcgcuu

SEQ ID NO: 3088297 - RNA, 16 nt, Molluscum contagiosum virus
cguugccgcgcgcugc

SEQ ID NO: 3088298 - RNA, 13 nt, Molluscum contagiosum virus
ccgaggaggugcu

SEQ ID NO: 3088299 - RNA, 21 nt, Molluscum contagiosum virus
caugccaacgcaccggcaggg

SEQ ID NO: 3088300 - RNA, 19 nt, Molluscum contagiosum virus
ugcaacaggagcauuccuu

SEQ ID NO: 3088301 - RNA, 19 nt, Molluscum contagiosum virus
uucccggcugccgcugccu

SEQ ID NO: 3088302 - RNA, 15 nt, Molluscum contagiosum virus
cgccagccuggcggc

SEQ ID NO: 3088303 - RNA, 21 nt, Molluscum contagiosum virus
caugcgcgccgcgcugcuggc

SEQ ID NO: 3088304 - RNA, 14 nt, Molluscum contagiosum virus
gugcgugcccagca

SEQ ID NO: 3088305 - RNA, 18 nt, Molluscum contagiosum virus
gagccgggggaacacgcu

SEQ ID NO: 3088306 - RNA, 17 nt, Molluscum contagiosum virus
gagacuaccggcaguag

SEQ ID NO: 3088307 - RNA, 20 nt, Molluscum contagiosum virus
ggaaaggcacccaccaggaa

SEQ ID NO: 3088308 - RNA, 12 nt, Molluscum contagiosum virus
gcgaacugcccg

SEQ ID NO: 3088309 - RNA, 14 nt, Molluscum contagiosum virus
ccugcucgggcugc

SEQ ID NO: 3088310 - RNA, 15 nt, Molluscum contagiosum virus
cuacaaaacugaaaa

SEQ ID NO: 3088311 - RNA, 20 nt, Molluscum contagiosum virus
uacuucaucuucaagccgca

SEQ ID NO: 3088312 - RNA, 19 nt, Molluscum contagiosum virus
ggcggcgcacgcggcucug

SEQ ID NO: 3088313 - RNA, 13 nt, Molluscum contagiosum virus
gcgcggacagccu

SEQ ID NO: 3088314 - RNA, 23 nt, Molluscum contagiosum virus
accgccgcggccgcgagacgcag

SEQ ID NO: 3088315 - RNA, 18 nt, Molluscum contagiosum virus
cgugcugcgcgcccaggc

SEQ ID NO: 3088316 - RNA, 13 nt, Molluscum contagiosum virus
cugcacgagcugc

SEQ ID NO: 3088317 - RNA, 16 nt, Molluscum contagiosum virus
guccggcccgaagccg

SEQ ID NO: 3088318 - RNA, 21 nt, Molluscum contagiosum virus
ugcgggagccaugaaagaaaa

SEQ ID NO: 3088319 - RNA, 15 nt, Molluscum contagiosum virus
agcacagcaggagca

SEQ ID NO: 3088320 - RNA, 21 nt, Molluscum contagiosum virus
gcgggacgcgugccuggcuug

SEQ ID NO: 3088321 - RNA, 16 nt, Molluscum contagiosum virus
gacaucuacagccgcc

SEQ ID NO: 3088322 - RNA, 17 nt, Molluscum contagiosum virus
cuggacuuccugcugcg

SEQ ID NO: 3088323 - RNA, 16 nt, Molluscum contagiosum virus
cgaguacgcucuccau

SEQ ID NO: 3088324 - RNA, 17 nt, Molluscum contagiosum virus
cguggcgccgcugcugg

SEQ ID NO: 3088325 - RNA, 22 nt, Molluscum contagiosum virus
ucaccgggauggucucgcugcu

SEQ ID NO: 3088326 - RNA, 21 nt, Molluscum contagiosum virus
ggcguguuccggcagcgccgc

SEQ ID NO: 3088327 - RNA, 15 nt, Molluscum contagiosum virus
ggcacccuggcugcu

SEQ ID NO: 3088328 - RNA, 15 nt, Molluscum contagiosum virus
ggcucguacugcugc

SEQ ID NO: 3088329 - RNA, 20 nt, Molluscum contagiosum virus
gacuguguucccggcugccg

SEQ ID NO: 3088330 - RNA, 21 nt, Molluscum contagiosum virus
cucguacugcugcaggcaaag

SEQ ID NO: 3088331 - RNA, 17 nt, Molluscum contagiosum virus
cagcgcgcucgaggcgc

SEQ ID NO: 3088332 - RNA, 16 nt, Molluscum contagiosum virus
cagugccgcucgcugu

SEQ ID NO: 3088333 - RNA, 14 nt, Molluscum contagiosum virus
gcacguuccaaaag

SEQ ID NO: 3088334 - RNA, 22 nt, Molluscum contagiosum virus
cuaggacuagcauuccuucaca

SEQ ID NO: 3088335 - RNA, 17 nt, Molluscum contagiosum virus
gucgccgcgggcuggga

SEQ ID NO: 3088336 - RNA, 14 nt, Molluscum contagiosum virus
cucgcguccgcauc

SEQ ID NO: 3088337 - RNA, 21 nt, Molluscum contagiosum virus
gcucaccgcgcagaagccaac

SEQ ID NO: 3088338 - RNA, 18 nt, Molluscum contagiosum virus
ggaguccucgacaaugag

SEQ ID NO: 3088339 - RNA, 16 nt, Molluscum contagiosum virus
gcuccuagcgcgcgug

SEQ ID NO: 3088340 - RNA, 16 nt, Molluscum contagiosum virus
gggccgcgagcgcggg

SEQ ID NO: 3088341 - RNA, 15 nt, Molluscum contagiosum virus
cgcugcucuggagca

SEQ ID NO: 3088342 - RNA, 22 nt, Molluscum contagiosum virus
ccugucaucaccccgcugggcc

SEQ ID NO: 3088343 - RNA, 16 nt, Molluscum contagiosum virus
uccaggugcugggcga

SEQ ID NO: 3088344 - RNA, 14 nt, Molluscum contagiosum virus
gcgcaucagagaag

SEQ ID NO: 3088345 - RNA, 15 nt, Molluscum contagiosum virus
uccgcguacagcgcg

SEQ ID NO: 3088346 - RNA, 15 nt, Molluscum contagiosum virus
ucuucauggacgucg

SEQ ID NO: 3088347 - RNA, 17 nt, Molluscum contagiosum virus
ugcgcgcccaggcgcgc

SEQ ID NO: 3088348 - RNA, 12 nt, Molluscum contagiosum virus
ucgcgcgccgcg

SEQ ID NO: 3088349 - RNA, 13 nt, Molluscum contagiosum virus
gugcucagcacgc

SEQ ID NO: 3088350 - RNA, 13 nt, Molluscum contagiosum virus
cucugcccucaga

SEQ ID NO: 3088351 - RNA, 16 nt, Molluscum contagiosum virus
agugacagacuaggca

SEQ ID NO: 3088352 - RNA, 16 nt, Molluscum contagiosum virus
uccgaccgugcccugg

SEQ ID NO: 3088353 - RNA, 14 nt, Molluscum contagiosum virus
cguggccagcuuca

SEQ ID NO: 3088354 - RNA, 19 nt, Molluscum contagiosum virus
auccucgccgaacggcaga

SEQ ID NO: 3088355 - RNA, 13 nt, Molluscum contagiosum virus
aaugcgcaaggcc

SEQ ID NO: 3088356 - RNA, 18 nt, Molluscum contagiosum virus
gcgggcacggcuaccacg

SEQ ID NO: 3088357 - RNA, 17 nt, Molluscum contagiosum virus
cgagcgcgcgugcucgc

SEQ ID NO: 3088358 - RNA, 18 nt, Molluscum contagiosum virus
gagaaagaagugugccug

SEQ ID NO: 3088359 - RNA, 14 nt, Molluscum contagiosum virus
aucucugcccucag

SEQ ID NO: 3088360 - RNA, 15 nt, Molluscum contagiosum virus
gaucggacucagcau

SEQ ID NO: 3088361 - RNA, 20 nt, Molluscum contagiosum virus
gccugccgcgcaugcuggag

SEQ ID NO: 3088362 - RNA, 13 nt, Molluscum contagiosum virus
cacgccgcccgag

SEQ ID NO: 3088363 - RNA, 16 nt, Molluscum contagiosum virus
cggcguggugcuggcc

SEQ ID NO: 3088364 - RNA, 17 nt, Molluscum contagiosum virus
gcaguguuucgacgccg

SEQ ID NO: 3088365 - RNA, 17 nt, Molluscum contagiosum virus
ucgauggacgccagcuu

SEQ ID NO: 3088366 - RNA, 23 nt, Molluscum contagiosum virus
acaugugcgugcaccucaagaag

SEQ ID NO: 3088367 - RNA, 17 nt, Molluscum contagiosum virus
ccgcgguggccgcgccg

SEQ ID NO: 3088368 - RNA, 19 nt, Molluscum contagiosum virus
ugaggggcaguguuccugg

SEQ ID NO: 3088369 - RNA, 16 nt, Molluscum contagiosum virus
ucacggcgcucgccuc

SEQ ID NO: 3088370 - RNA, 21 nt, Molluscum contagiosum virus
gccaccgcgcgguccgccagu

SEQ ID NO: 3088371 - RNA, 13 nt, Molluscum contagiosum virus
cccgcgggccgcc

SEQ ID NO: 3088372 - RNA, 18 nt, Molluscum contagiosum virus
ucgguagccaggcgccgg

SEQ ID NO: 3088373 - RNA, 15 nt, Molluscum contagiosum virus
cagugcgugccaggc

SEQ ID NO: 3088374 - RNA, 19 nt, Molluscum contagiosum virus
ccagcuaagccggagcagc

SEQ ID NO: 3088375 - RNA, 18 nt, Molluscum contagiosum virus
acgugcagcggcgccacg

SEQ ID NO: 3088376 - RNA, 18 nt, Molluscum contagiosum virus
caguccgcggcgcgccgg

SEQ ID NO: 3088377 - RNA, 14 nt, Molluscum contagiosum virus
caguguugugaagu

SEQ ID NO: 3088378 - RNA, 12 nt, Molluscum contagiosum virus
cgacaaggaaag

SEQ ID NO: 3088379 - RNA, 16 nt, Molluscum contagiosum virus
ucugucccgcaagcca

SEQ ID NO: 3088380 - RNA, 20 nt, Molluscum contagiosum virus
ccagugcuuugucgcaaccc

SEQ ID NO: 3088381 - RNA, 21 nt, Molluscum contagiosum virus
gucucccaggaagacgugcug

SEQ ID NO: 3088382 - RNA, 22 nt, Molluscum contagiosum virus
cugcacgcgcacuugccuggcg

SEQ ID NO: 3088383 - RNA, 20 nt, Molluscum contagiosum virus
cgauggcguggcggauguca

SEQ ID NO: 3088384 - RNA, 24 nt, Molluscum contagiosum virus
ucgcguaccaagccgugacgcugc

SEQ ID NO: 3088385 - RNA, 17 nt, Molluscum contagiosum virus
uacggacggcgcacgca

SEQ ID NO: 3088386 - RNA, 23 nt, Molluscum contagiosum virus
gugcgccucggacuucgacgcgc

SEQ ID NO: 3088387 - RNA, 15 nt, Molluscum contagiosum virus
cgggcgcggcaccag

SEQ ID NO: 3088388 - RNA, 14 nt, Molluscum contagiosum virus
cggccguggcgugc

SEQ ID NO: 3088389 - RNA, 18 nt, Molluscum contagiosum virus
accacgagcguguccagg

SEQ ID NO: 3088390 - RNA, 14 nt, Molluscum contagiosum virus
cagcccccucuugg

SEQ ID NO: 3088391 - RNA, 16 nt, Molluscum contagiosum virus
cggugcgugcccagca

SEQ ID NO: 3088392 - RNA, 20 nt, Molluscum contagiosum virus
ugacaggcgcgcaagugcgu

SEQ ID NO: 3088393 - RNA, 22 nt, Molluscum contagiosum virus
gucacugcuagugcuggccgcc

SEQ ID NO: 3088394 - RNA, 18 nt, Molluscum contagiosum virus
cccgcggccgccacuguu

SEQ ID NO: 3088395 - RNA, 21 nt, Molluscum contagiosum virus
cgcugcgcgcucuggagccuc

SEQ ID NO: 3088396 - RNA, 19 nt, Molluscum contagiosum virus
guccgacuccaaggagguc

SEQ ID NO: 3088397 - RNA, 19 nt, Molluscum contagiosum virus
cguaaagagcguccagccg

SEQ ID NO: 3088398 - RNA, 19 nt, Molluscum contagiosum virus
cgcucgugccgccugcgcg

SEQ ID NO: 3088399 - RNA, 17 nt, Molluscum contagiosum virus
gagcugcugcccgccuu

SEQ ID NO: 3088400 - RNA, 17 nt, Molluscum contagiosum virus
gcgucgcgcgccgugcc

SEQ ID NO: 3088401 - RNA, 16 nt, Molluscum contagiosum virus
gccgcugccugugccc

SEQ ID NO: 3088402 - RNA, 18 nt, Molluscum contagiosum virus
ccgcggacgcgggccugu

SEQ ID NO: 3088403 - RNA, 16 nt, Molluscum contagiosum virus
cgagcgcgugucuacc

SEQ ID NO: 3088404 - RNA, 23 nt, Molluscum contagiosum virus
acaaugaggagaggaaccaggau

SEQ ID NO: 3088405 - RNA, 17 nt, Molluscum contagiosum virus
gcgauggcgccugcuuc

SEQ ID NO: 3088406 - RNA, 13 nt, Molluscum contagiosum virus
aaagucaucugcc

SEQ ID NO: 3088407 - RNA, 18 nt, Molluscum contagiosum virus
gcaaagacggacccgcga

SEQ ID NO: 3088408 - RNA, 15 nt, Molluscum contagiosum virus
acgcgcagugcggcc

SEQ ID NO: 3088409 - RNA, 23 nt, Molluscum contagiosum virus
cuggucaagaaggcgcuggugga

SEQ ID NO: 3088410 - RNA, 15 nt, Molluscum contagiosum virus
cgcgcgcagcacacc

SEQ ID NO: 3088411 - RNA, 16 nt, Molluscum contagiosum virus
gccgcacgcugcugcg

SEQ ID NO: 3088412 - RNA, 20 nt, Molluscum contagiosum virus
ccgaggcguccagcggcugc

SEQ ID NO: 3088413 - RNA, 16 nt, Molluscum contagiosum virus
agacuggagcacggac

SEQ ID NO: 3088414 - RNA, 16 nt, Molluscum contagiosum virus
gcaucgcgcugcuggu

SEQ ID NO: 3088415 - RNA, 16 nt, Molluscum contagiosum virus
gcugguggugcuggag

SEQ ID NO: 3088416 - RNA, 20 nt, Molluscum contagiosum virus
gcugagcuagugccgagcuc

SEQ ID NO: 3088417 - RNA, 20 nt, Molluscum contagiosum virus
gacaccgcgacccagaagcg

SEQ ID NO: 3088418 - RNA, 21 nt, Molluscum contagiosum virus
cacucuuucacgcugcacgag

SEQ ID NO: 3088419 - RNA, 22 nt, Molluscum contagiosum virus
gaacgacaccgcgacccagaag

SEQ ID NO: 3088420 - RNA, 15 nt, Molluscum contagiosum virus
gcugguggugcugga

SEQ ID NO: 3088421 - RNA, 14 nt, Molluscum contagiosum virus
ccacugugccagca

SEQ ID NO: 3088422 - RNA, 21 nt, Molluscum contagiosum virus
cgagagcggagaaaaggaagc

SEQ ID NO: 3088423 - RNA, 22 nt, Molluscum contagiosum virus
uccuucgaagaggucucucaaa

SEQ ID NO: 3088424 - RNA, 13 nt, Molluscum contagiosum virus
gaaacuggacuga

SEQ ID NO: 3088425 - RNA, 12 nt, Molluscum contagiosum virus
accucaccgcgc

SEQ ID NO: 3088426 - RNA, 21 nt, Molluscum contagiosum virus
aggaaaggcacccaccaggaa

SEQ ID NO: 3088427 - RNA, 12 nt, Molluscum contagiosum virus
gacgaggagcug

SEQ ID NO: 3088428 - RNA, 13 nt, Molluscum contagiosum virus
ggcgcgcccagcg

SEQ ID NO: 3088429 - RNA, 15 nt, Molluscum contagiosum virus
ugcaguugagagcag

SEQ ID NO: 3088430 - RNA, 17 nt, Molluscum contagiosum virus
aucaccccgcugggccg

SEQ ID NO: 3088431 - RNA, 22 nt, Molluscum contagiosum virus
caacauccugccacaccagcug

SEQ ID NO: 3088432 - RNA, 18 nt, Molluscum contagiosum virus
cagacccgaaagcugccc

SEQ ID NO: 3088433 - RNA, 17 nt, Molluscum contagiosum virus
cuuggcguucgcagugc

SEQ ID NO: 3088434 - RNA, 14 nt, Molluscum contagiosum virus
ggucgugcgagacu

SEQ ID NO: 3088435 - RNA, 23 nt, Molluscum contagiosum virus
ccuggaacgcgagacgggcacgc

SEQ ID NO: 3088436 - RNA, 17 nt, Molluscum contagiosum virus
gccguccgccucgagca

SEQ ID NO: 3088437 - RNA, 13 nt, Molluscum contagiosum virus
acgagcugcugua

SEQ ID NO: 3088438 - RNA, 22 nt, Molluscum contagiosum virus
cggcguggccaggccgcgccgg

SEQ ID NO: 3088439 - RNA, 16 nt, Molluscum contagiosum virus
gcgucgcgcaggcgcc

SEQ ID NO: 3088440 - RNA, 13 nt, Molluscum contagiosum virus
cucgcugcugcuc

SEQ ID NO: 3088441 - RNA, 23 nt, Molluscum contagiosum virus
caggccgggcgcgguagcucgug

SEQ ID NO: 3088442 - RNA, 18 nt, Molluscum contagiosum virus
gcguguugaacucgagca

SEQ ID NO: 3088443 - RNA, 19 nt, Molluscum contagiosum virus
cgccggcauccggccgagg

SEQ ID NO: 3088444 - RNA, 21 nt, Molluscum contagiosum virus
ucaaggacaucuacagccgcc

SEQ ID NO: 3088445 - RNA, 17 nt, Molluscum contagiosum virus
guacuucuacgagcagc

SEQ ID NO: 3088446 - RNA, 15 nt, Molluscum contagiosum virus
cuccagaaucgcuuu

SEQ ID NO: 3088447 - RNA, 13 nt, Molluscum contagiosum virus
cgcgcgccagcua

SEQ ID NO: 3088448 - RNA, 21 nt, Molluscum contagiosum virus
gcaccccgaaggaaaggcccc

SEQ ID NO: 3088449 - RNA, 21 nt, Molluscum contagiosum virus
uggacuuuggcgugaccaugg

SEQ ID NO: 3088450 - RNA, 13 nt, Molluscum contagiosum virus
gcacgugcugcug

SEQ ID NO: 3088451 - RNA, 17 nt, Molluscum contagiosum virus
cuuucguggucaucaag

SEQ ID NO: 3088452 - RNA, 13 nt, Molluscum contagiosum virus
cguuggcuuucug

SEQ ID NO: 3088453 - RNA, 12 nt, Molluscum contagiosum virus
gaaguugccgca

SEQ ID NO: 3088454 - RNA, 21 nt, Molluscum contagiosum virus
aacucgcgugccuuguucuga

SEQ ID NO: 3088455 - RNA, 21 nt, Molluscum contagiosum virus
gcucuaccuggugcuggggcu

SEQ ID NO: 3088456 - RNA, 20 nt, Molluscum contagiosum virus
aacacgcuguugcugcugcc

SEQ ID NO: 3088457 - RNA, 17 nt, Molluscum contagiosum virus
gcgcaccgcgggcugga

SEQ ID NO: 3088458 - RNA, 21 nt, Molluscum contagiosum virus
ccgagcgugggcgagcgcacg

SEQ ID NO: 3088459 - RNA, 16 nt, Molluscum contagiosum virus
ugcgagccagccaggc

SEQ ID NO: 3088460 - RNA, 21 nt, Molluscum contagiosum virus
aauaccggagacaccagcucc

SEQ ID NO: 3088461 - RNA, 21 nt, Molluscum contagiosum virus
uggcgccugcgcgcggcagug

SEQ ID NO: 3088462 - RNA, 14 nt, Molluscum contagiosum virus
cgaccugcacgacc

SEQ ID NO: 3088463 - RNA, 14 nt, Molluscum contagiosum virus
cugcggugucaacu

SEQ ID NO: 3088464 - RNA, 18 nt, Molluscum contagiosum virus
aacgcggugagugcgcgc

SEQ ID NO: 3088465 - RNA, 14 nt, Molluscum contagiosum virus
cgcgcgccgcgggc

SEQ ID NO: 3088466 - RNA, 22 nt, Molluscum contagiosum virus
ccaugaacaacauggugcuggc

SEQ ID NO: 3088467 - RNA, 22 nt, Molluscum contagiosum virus
gcugcgcgcggggagcucugcg

SEQ ID NO: 3088468 - RNA, 18 nt, Molluscum contagiosum virus
cugcuggcagacacagac

SEQ ID NO: 3088469 - RNA, 12 nt, Molluscum contagiosum virus
ccgugcaccucc

SEQ ID NO: 3088470 - RNA, 14 nt, Molluscum contagiosum virus
gccggcggcgcaag

SEQ ID NO: 3088471 - RNA, 17 nt, Molluscum contagiosum virus
caacgcugccgcuggcg

SEQ ID NO: 3088472 - RNA, 18 nt, Molluscum contagiosum virus
agccagcucgcagccucc

SEQ ID NO: 3088473 - RNA, 14 nt, Molluscum contagiosum virus
cgcgcugccagcgg

SEQ ID NO: 3088474 - RNA, 13 nt, Molluscum contagiosum virus
cagugcggccagc

SEQ ID NO: 3088475 - RNA, 18 nt, Molluscum contagiosum virus
gcacgcuguccaggcgcu

SEQ ID NO: 3088476 - RNA, 22 nt, Molluscum contagiosum virus
gcccgagcaggacgugcacgug

SEQ ID NO: 3088477 - RNA, 17 nt, Molluscum contagiosum virus
aaaacacaaaaauaagu

SEQ ID NO: 3088478 - RNA, 14 nt, Molluscum contagiosum virus
gguaccugcaggcu

SEQ ID NO: 3088479 - RNA, 21 nt, Molluscum contagiosum virus
gagauggaggcccaggccaug

SEQ ID NO: 3088480 - RNA, 16 nt, Molluscum contagiosum virus
gugcuggcggggcugg

SEQ ID NO: 3088481 - RNA, 22 nt, Molluscum contagiosum virus
cucgaggucgugcaggccgugc

SEQ ID NO: 3088482 - RNA, 19 nt, Molluscum contagiosum virus
gaucguuccuggccaagga

SEQ ID NO: 3088483 - RNA, 23 nt, Molluscum contagiosum virus
cgaagagcacgaugcccagcagc

SEQ ID NO: 3088484 - RNA, 19 nt, Molluscum contagiosum virus
gaaaggcacccaccaggaa

SEQ ID NO: 3088485 - RNA, 22 nt, Molluscum contagiosum virus
uguacgggcgugcgcagcagcu

SEQ ID NO: 3088486 - RNA, 21 nt, Molluscum contagiosum virus
ccugcaggaaaggcacccgca

SEQ ID NO: 3088487 - RNA, 14 nt, Molluscum contagiosum virus
acgcgcugcuagag

SEQ ID NO: 3088488 - RNA, 22 nt, Molluscum contagiosum virus
cguggcuaugagcggcacggga

SEQ ID NO: 3088489 - RNA, 20 nt, Molluscum contagiosum virus
ccgccugccgcgagcacugg

SEQ ID NO: 3088490 - RNA, 16 nt, Molluscum contagiosum virus
cgcgcgccagcagcgc

SEQ ID NO: 3088491 - RNA, 14 nt, Molluscum contagiosum virus
gagcccgccgggca

SEQ ID NO: 3088492 - RNA, 20 nt, Molluscum contagiosum virus
ccagcucggguuccagcucc

SEQ ID NO: 3088493 - RNA, 15 nt, Molluscum contagiosum virus
accgaucccggccgc

SEQ ID NO: 3088494 - RNA, 17 nt, Molluscum contagiosum virus
gccuccgagcgcgcgug

SEQ ID NO: 3088495 - RNA, 22 nt, Molluscum contagiosum virus
gucaccaccgcuucgugucugu

SEQ ID NO: 3088496 - RNA, 16 nt, Molluscum contagiosum virus
acgcccucgccugcga

SEQ ID NO: 3088497 - RNA, 13 nt, Molluscum contagiosum virus
ugucgagacaggc

SEQ ID NO: 3088498 - RNA, 15 nt, Molluscum contagiosum virus
gcgcccgacgagcuu

SEQ ID NO: 3088499 - RNA, 22 nt, Molluscum contagiosum virus
aacgcaaggugugcgcgcugca

SEQ ID NO: 3088500 - RNA, 15 nt, Molluscum contagiosum virus
gccccgggcccgcau

SEQ ID NO: 3088501 - RNA, 16 nt, Molluscum contagiosum virus
ugaccgcuucgagugc

SEQ ID NO: 3088502 - RNA, 13 nt, Molluscum contagiosum virus
gcgcggcggcagc

SEQ ID NO: 3088503 - RNA, 17 nt, Molluscum contagiosum virus
cugcgcuucgccgcgcg

SEQ ID NO: 3088504 - RNA, 14 nt, Molluscum contagiosum virus
ccgcccccaggugg

SEQ ID NO: 3088505 - RNA, 19 nt, Molluscum contagiosum virus
auugggugguggccacagc

SEQ ID NO: 3088506 - RNA, 20 nt, Molluscum contagiosum virus
gcucgguuggcggcgccgcg

SEQ ID NO: 3088507 - RNA, 22 nt, Molluscum contagiosum virus
cacaaagagcacggacagcacc

SEQ ID NO: 3088508 - RNA, 14 nt, Molluscum contagiosum virus
cggacggcuuuguc

SEQ ID NO: 3088509 - RNA, 15 nt, Molluscum contagiosum virus
cagcaccgcgccgcg

SEQ ID NO: 3088510 - RNA, 20 nt, Molluscum contagiosum virus
ccgcgugcacccuccgcaca

SEQ ID NO: 3088511 - RNA, 18 nt, Molluscum contagiosum virus
uaccgacguuuucuuugc

SEQ ID NO: 3088512 - RNA, 19 nt, Molluscum contagiosum virus
caaggcaugcgcgcagugc

SEQ ID NO: 3088513 - RNA, 15 nt, Molluscum contagiosum virus
ggccgccgggccugc

SEQ ID NO: 3088514 - RNA, 21 nt, Molluscum contagiosum virus
cagacgcagcgcgagcugugc

SEQ ID NO: 3088515 - RNA, 13 nt, Molluscum contagiosum virus
uaugucuccccuu

SEQ ID NO: 3088516 - RNA, 16 nt, Molluscum contagiosum virus
ccugagaaggagcgga

SEQ ID NO: 3088517 - RNA, 15 nt, Molluscum contagiosum virus
uccagugaaaugacg

SEQ ID NO: 3088518 - RNA, 14 nt, Molluscum contagiosum virus
acucgcugccagag

SEQ ID NO: 3088519 - RNA, 12 nt, Molluscum contagiosum virus
gcugccccccuc

SEQ ID NO: 3088520 - RNA, 15 nt, Molluscum contagiosum virus
acggcggugcccgcc

SEQ ID NO: 3088521 - RNA, 22 nt, Molluscum contagiosum virus
ccggcagcgacuacgcgcugcu

SEQ ID NO: 3088522 - RNA, 16 nt, Molluscum contagiosum virus
guucgcgcgugcugga

SEQ ID NO: 3088523 - RNA, 22 nt, Molluscum contagiosum virus
cgcggcgggcgaaagcgccgcg

SEQ ID NO: 3088524 - RNA, 13 nt, Molluscum contagiosum virus
gcugcuggagcua

SEQ ID NO: 3088525 - RNA, 17 nt, Molluscum contagiosum virus
aggaagcaggucuuggg

SEQ ID NO: 3088526 - RNA, 16 nt, Molluscum contagiosum virus
uccgcacgaggagccc

SEQ ID NO: 3088527 - RNA, 14 nt, Molluscum contagiosum virus
cuuccggcagcgcg

SEQ ID NO: 3088528 - RNA, 20 nt, Molluscum contagiosum virus
gcaugcucgcgcucucgguc

SEQ ID NO: 3088529 - RNA, 22 nt, Molluscum contagiosum virus
guuccacgaccgcaagugcacg

SEQ ID NO: 3088530 - RNA, 22 nt, Molluscum contagiosum virus
gcagcauucccggcgcgcgcgg

SEQ ID NO: 3088531 - RNA, 14 nt, Molluscum contagiosum virus
caugcccggccucg

SEQ ID NO: 3088532 - RNA, 23 nt, Molluscum contagiosum virus
gcacggacaugagcuugcgcacg

SEQ ID NO: 3088533 - RNA, 16 nt, Molluscum contagiosum virus
gcgcuccacgcccgag

SEQ ID NO: 3088534 - RNA, 14 nt, Molluscum contagiosum virus
gccagaagugaaau

SEQ ID NO: 3088535 - RNA, 22 nt, Molluscum contagiosum virus
accuacgcuaccugaagcugga

SEQ ID NO: 3088536 - RNA, 14 nt, Molluscum contagiosum virus
cuucccgaggacgc

SEQ ID NO: 3088537 - RNA, 20 nt, Molluscum contagiosum virus
ccgcggaugcaggcacugcc

SEQ ID NO: 3088538 - RNA, 17 nt, Molluscum contagiosum virus
cgcguaaaagacuggcu

SEQ ID NO: 3088539 - RNA, 14 nt, Molluscum contagiosum virus
ccaccagcaccagc

SEQ ID NO: 3088540 - RNA, 19 nt, Molluscum contagiosum virus
guccuacacgccgcuggag

SEQ ID NO: 3088541 - RNA, 19 nt, Molluscum contagiosum virus
ugcucccucgcgcgcagcu

SEQ ID NO: 3088542 - RNA, 11 nt, Molluscum contagiosum virus
agugccgccgc

SEQ ID NO: 3088543 - RNA, 22 nt, Molluscum contagiosum virus
aacuugcucuacuggcggcgcc

SEQ ID NO: 3088544 - RNA, 17 nt, Molluscum contagiosum virus
cucggcguccgcagcgg

SEQ ID NO: 3088545 - RNA, 15 nt, Molluscum contagiosum virus
cugaagaaggagccc

SEQ ID NO: 3088546 - RNA, 21 nt, Molluscum contagiosum virus
caggcgucgcgcacagaaagc

SEQ ID NO: 3088547 - RNA, 18 nt, Molluscum contagiosum virus
agcgcgugcgcaggagca

SEQ ID NO: 3088548 - RNA, 18 nt, Molluscum contagiosum virus
ggccgcggcgcggcggaa

SEQ ID NO: 3088549 - RNA, 17 nt, Molluscum contagiosum virus
gacucgagccccagaag

SEQ ID NO: 3088550 - RNA, 15 nt, Molluscum contagiosum virus
gacgagagggcgcgc

SEQ ID NO: 3088551 - RNA, 16 nt, Molluscum contagiosum virus
cgcgugcugggccccu

SEQ ID NO: 3088552 - RNA, 21 nt, Molluscum contagiosum virus
gcauuccgagccgccggucuc

SEQ ID NO: 3088553 - RNA, 16 nt, Molluscum contagiosum virus
accugguucaugcugg

SEQ ID NO: 3088554 - RNA, 16 nt, Molluscum contagiosum virus
caaggaucucugcccu

SEQ ID NO: 3088555 - RNA, 15 nt, Molluscum contagiosum virus
cuuccuuugcucuac

SEQ ID NO: 3088556 - RNA, 14 nt, Molluscum contagiosum virus
ucauucgcuggugc

SEQ ID NO: 3088557 - RNA, 14 nt, Molluscum contagiosum virus
cucgguggugcgcc

SEQ ID NO: 3088558 - RNA, 22 nt, Molluscum contagiosum virus
gcccgccuacggggcugcuccg

SEQ ID NO: 3088559 - RNA, 22 nt, Molluscum contagiosum virus
acggcgcgcgcgcuagccgccg

SEQ ID NO: 3088560 - RNA, 22 nt, Molluscum contagiosum virus
gcaggaaaggcaccccgcagga

SEQ ID NO: 3088561 - RNA, 23 nt, Molluscum contagiosum virus
cgcucgaggaccucgcgcgccgc

SEQ ID NO: 3088562 - RNA, 13 nt, Molluscum contagiosum virus
ccgcggagggagg

SEQ ID NO: 3088563 - RNA, 15 nt, Molluscum contagiosum virus
caacacgcuguugcu

SEQ ID NO: 3088564 - RNA, 16 nt, Molluscum contagiosum virus
cugcugcgcagcaucc

SEQ ID NO: 3088565 - RNA, 20 nt, Molluscum contagiosum virus
cgaugguggcgcugcugccc

SEQ ID NO: 3088566 - RNA, 19 nt, Molluscum contagiosum virus
ugccccgcgcguugcugcc

SEQ ID NO: 3088567 - RNA, 18 nt, Molluscum contagiosum virus
gccuucuccucgcucugc

SEQ ID NO: 3088568 - RNA, 16 nt, Molluscum contagiosum virus
acggacgcccuccucg

SEQ ID NO: 3088569 - RNA, 17 nt, Molluscum contagiosum virus
agcauuagcgccaaggc

SEQ ID NO: 3088570 - RNA, 19 nt, Molluscum contagiosum virus
gggcucugccaccaugcgc

SEQ ID NO: 3088571 - RNA, 16 nt, Molluscum contagiosum virus
caacgagcagcccgug

SEQ ID NO: 3088572 - RNA, 11 nt, Molluscum contagiosum virus
gaucucugccc

SEQ ID NO: 3088573 - RNA, 23 nt, Molluscum contagiosum virus
ccucgagcaggucaucgggcugc

SEQ ID NO: 3088574 - RNA, 15 nt, Molluscum contagiosum virus
acccgugcgcgcgcu

SEQ ID NO: 3088575 - RNA, 14 nt, Molluscum contagiosum virus
accagcucgcgccg

SEQ ID NO: 3088576 - RNA, 22 nt, Molluscum contagiosum virus
agcgcccgugcuugcgcacgga

SEQ ID NO: 3088577 - RNA, 18 nt, Molluscum contagiosum virus
cgaugguggcgcugcugc

SEQ ID NO: 3088578 - RNA, 19 nt, Molluscum contagiosum virus
gccaggaaaacggaaacag

SEQ ID NO: 3088579 - RNA, 15 nt, Molluscum contagiosum virus
cgaguucgagggcaa

SEQ ID NO: 3088580 - RNA, 17 nt, Molluscum contagiosum virus
uguccacgacacuggcg

SEQ ID NO: 3088581 - RNA, 19 nt, Molluscum contagiosum virus
cacggacucgagccccaga

SEQ ID NO: 3088582 - RNA, 13 nt, Molluscum contagiosum virus
aacagcagcuggc

SEQ ID NO: 3088583 - RNA, 22 nt, Molluscum contagiosum virus
ggcacaccccuguaacaaggaa

SEQ ID NO: 3088584 - RNA, 21 nt, Molluscum contagiosum virus
cagauguucucgccaguggcc

SEQ ID NO: 3088585 - RNA, 22 nt, Molluscum contagiosum virus
gcguugccggcgaaccgacugc

SEQ ID NO: 3088586 - RNA, 23 nt, Molluscum contagiosum virus
ugugccgccgcacuauggacgcu

SEQ ID NO: 3088587 - RNA, 12 nt, Molluscum contagiosum virus
gcucaccgccga

SEQ ID NO: 3088588 - RNA, 13 nt, Molluscum contagiosum virus
aaguccaccuucu

SEQ ID NO: 3088589 - RNA, 14 nt, Molluscum contagiosum virus
gaccagcugguccu

SEQ ID NO: 3088590 - RNA, 14 nt, Molluscum contagiosum virus
cgcgugccgggcuu

SEQ ID NO: 3088591 - RNA, 17 nt, Molluscum contagiosum virus
gcacaguucacggcgcu

SEQ ID NO: 3088592 - RNA, 13 nt, Molluscum contagiosum virus
caccacaacugaa

SEQ ID NO: 3088593 - RNA, 17 nt, Molluscum contagiosum virus
cguggacaacagcacga

SEQ ID NO: 3088594 - RNA, 23 nt, Molluscum contagiosum virus
ucgaugacagcaucgggcugucg

SEQ ID NO: 3088595 - RNA, 16 nt, Molluscum contagiosum virus
ccagcagcuccuggua

SEQ ID NO: 3088596 - RNA, 19 nt, Molluscum contagiosum virus
uacugcagcagcuccucca

SEQ ID NO: 3088597 - RNA, 14 nt, Molluscum contagiosum virus
cgcagucccagcac

SEQ ID NO: 3088598 - RNA, 13 nt, Molluscum contagiosum virus
cacgacccucuuc

SEQ ID NO: 3088599 - RNA, 22 nt, Molluscum contagiosum virus
uuuccugucaucaccccgcugg

SEQ ID NO: 3088600 - RNA, 15 nt, Molluscum contagiosum virus
cggcacccgccagcu

SEQ ID NO: 3088601 - RNA, 16 nt, Molluscum contagiosum virus
cgagcacguuccaaaa

SEQ ID NO: 3088602 - RNA, 19 nt, Molluscum contagiosum virus
gcgugaccauggacacgcu

SEQ ID NO: 3088603 - RNA, 20 nt, Molluscum contagiosum virus
cgcgugccgggcuugcuccc

SEQ ID NO: 3088604 - RNA, 14 nt, Molluscum contagiosum virus
gaggagcucgacuc

SEQ ID NO: 3088605 - RNA, 15 nt, Molluscum contagiosum virus
uggaccugcgccagc

SEQ ID NO: 3088606 - RNA, 20 nt, Molluscum contagiosum virus
ggcgccaaguccgagcaagc

SEQ ID NO: 3088607 - RNA, 12 nt, Molluscum contagiosum virus
cgcgcugcuggu

SEQ ID NO: 3088608 - RNA, 20 nt, Molluscum contagiosum virus
uccacauuacgcucguggaa

SEQ ID NO: 3088609 - RNA, 16 nt, Molluscum contagiosum virus
gcuucacgugcuugcc

SEQ ID NO: 3088610 - RNA, 19 nt, Molluscum contagiosum virus
cgcgugcaagcccagcagc

SEQ ID NO: 3088611 - RNA, 20 nt, Molluscum contagiosum virus
ccagcuucaucaagcacggc

SEQ ID NO: 3088612 - RNA, 18 nt, Molluscum contagiosum virus
cgcacgcgcgcuuagcac

SEQ ID NO: 3088613 - RNA, 14 nt, Molluscum contagiosum virus
ggcaccugcaggaa

SEQ ID NO: 3088614 - RNA, 12 nt, Molluscum contagiosum virus
gagccgccgggg

SEQ ID NO: 3088615 - RNA, 13 nt, Molluscum contagiosum virus
ggcaagggcuccu

SEQ ID NO: 3088616 - RNA, 15 nt, Molluscum contagiosum virus
ccaggcacuggcccu

SEQ ID NO: 3088617 - RNA, 14 nt, Molluscum contagiosum virus
ucccugcauacacu

SEQ ID NO: 3088618 - RNA, 21 nt, Molluscum contagiosum virus
cgcgacgccguccgcgcagcc

SEQ ID NO: 3088619 - RNA, 14 nt, Molluscum contagiosum virus
gccgccagccacga

SEQ ID NO: 3088620 - RNA, 20 nt, Molluscum contagiosum virus
gcggccgagucacgccccag

SEQ ID NO: 3088621 - RNA, 18 nt, Molluscum contagiosum virus
aggcacccgcaacaagga

SEQ ID NO: 3088622 - RNA, 17 nt, Molluscum contagiosum virus
cacauugcgaggcaccg

SEQ ID NO: 3088623 - RNA, 18 nt, Molluscum contagiosum virus
ccuugaugccgugguaca

SEQ ID NO: 3088624 - RNA, 14 nt, Molluscum contagiosum virus
cacgucggcccgag

SEQ ID NO: 3088625 - RNA, 19 nt, Molluscum contagiosum virus
acuucccgacgucuucccc

SEQ ID NO: 3088626 - RNA, 18 nt, Molluscum contagiosum virus
ggcguguuccggcagcgc

SEQ ID NO: 3088627 - RNA, 16 nt, Molluscum contagiosum virus
accaccagcaccagca

SEQ ID NO: 3088628 - RNA, 14 nt, Molluscum contagiosum virus
accucuacacgcac

SEQ ID NO: 3088629 - RNA, 16 nt, Molluscum contagiosum virus
uucccgggcacuguaa

SEQ ID NO: 3088630 - RNA, 15 nt, Molluscum contagiosum virus
cuacaucgacaagca

SEQ ID NO: 3088631 - RNA, 21 nt, Molluscum contagiosum virus
gcgcuuccucuacaccagcug

SEQ ID NO: 3088632 - RNA, 15 nt, Molluscum contagiosum virus
ucuucaccugcauug

SEQ ID NO: 3088633 - RNA, 14 nt, Molluscum contagiosum virus
gccaugaggacagc

SEQ ID NO: 3088634 - RNA, 17 nt, Molluscum contagiosum virus
ccgagagcaugcugucu

SEQ ID NO: 3088635 - RNA, 22 nt, Molluscum contagiosum virus
ucaagcacggcuuccggcacca

SEQ ID NO: 3088636 - RNA, 15 nt, Molluscum contagiosum virus
cucacaucugucccu

SEQ ID NO: 3088637 - RNA, 23 nt, Molluscum contagiosum virus
ggcucaccgcgcagaagccaaca

SEQ ID NO: 3088638 - RNA, 18 nt, Molluscum contagiosum virus
ugcgcauuggcagcgcuu

SEQ ID NO: 3088639 - RNA, 15 nt, Molluscum contagiosum virus
aacauugccacgcaa

SEQ ID NO: 3088640 - RNA, 18 nt, Molluscum contagiosum virus
ccgcuggacgccucggga

SEQ ID NO: 3088641 - RNA, 17 nt, Molluscum contagiosum virus
cggcaguccgagcuguu

SEQ ID NO: 3088642 - RNA, 18 nt, Molluscum contagiosum virus
guuuacgcucggcugccg

SEQ ID NO: 3088643 - RNA, 17 nt, Molluscum contagiosum virus
ccguccucgcucgugcu

SEQ ID NO: 3088644 - RNA, 16 nt, Molluscum contagiosum virus
cgugcgcgagacuugu

SEQ ID NO: 3088645 - RNA, 16 nt, Molluscum contagiosum virus
ggcgcgcgcugcgcac

SEQ ID NO: 3088646 - RNA, 17 nt, Molluscum contagiosum virus
guaugcccacugggaac

SEQ ID NO: 3088647 - RNA, 19 nt, Molluscum contagiosum virus
uagcggacgaagcugugca

SEQ ID NO: 3088648 - RNA, 21 nt, Molluscum contagiosum virus
cccaggaagacgugcugcgcg

SEQ ID NO: 3088649 - RNA, 18 nt, Molluscum contagiosum virus
cccgacuuuucgcgccgc

SEQ ID NO: 3088650 - RNA, 21 nt, Molluscum contagiosum virus
uagacagugcggcgcggcugc

SEQ ID NO: 3088651 - RNA, 18 nt, Molluscum contagiosum virus
cagcggggacucucccgu

SEQ ID NO: 3088652 - RNA, 20 nt, Molluscum contagiosum virus
agaacccguauuuccagcgu

SEQ ID NO: 3088653 - RNA, 19 nt, Molluscum contagiosum virus
cgcggcuaccacgggcccg

SEQ ID NO: 3088654 - RNA, 22 nt, Molluscum contagiosum virus
cuugagcacacgguagagcugc

SEQ ID NO: 3088655 - RNA, 20 nt, Molluscum contagiosum virus
cgcucggaggggcuccgggc

SEQ ID NO: 3088656 - RNA, 21 nt, Molluscum contagiosum virus
cggcgccgacagcgcgcgcac

SEQ ID NO: 3088657 - RNA, 15 nt, Molluscum contagiosum virus
aucaccccgcagcuc

SEQ ID NO: 3088658 - RNA, 17 nt, Molluscum contagiosum virus
accccaagaagaacguc

SEQ ID NO: 3088659 - RNA, 20 nt, Molluscum contagiosum virus
ccgagcccgcggcgcgcagc

SEQ ID NO: 3088660 - RNA, 18 nt, Molluscum contagiosum virus
gguucagguagcgcgccg

SEQ ID NO: 3088661 - RNA, 18 nt, Molluscum contagiosum virus
ugcgccagcgccuguccg

SEQ ID NO: 3088662 - RNA, 19 nt, Molluscum contagiosum virus
ggcacaucucucagggcag

SEQ ID NO: 3088663 - RNA, 16 nt, Molluscum contagiosum virus
cuggcgcgcgcgcugc

SEQ ID NO: 3088664 - RNA, 16 nt, Molluscum contagiosum virus
ugcgcuucggcuccca

SEQ ID NO: 3088665 - RNA, 21 nt, Molluscum contagiosum virus
cucagcgcuucgacuuccagc

SEQ ID NO: 3088666 - RNA, 23 nt, Molluscum contagiosum virus
gccgucgcccggcaggcucccgc

SEQ ID NO: 3088667 - RNA, 14 nt, Molluscum contagiosum virus
cuaggccucagccg

SEQ ID NO: 3088668 - RNA, 22 nt, Molluscum contagiosum virus
gauucggaggcggagcugcccg

SEQ ID NO: 3088669 - RNA, 15 nt, Molluscum contagiosum virus
ccugucaagacgggc

SEQ ID NO: 3088670 - RNA, 19 nt, Molluscum contagiosum virus
gccgaguaccgcgcgcacg

SEQ ID NO: 3088671 - RNA, 14 nt, Molluscum contagiosum virus
ccugucgugcaaug

SEQ ID NO: 3088672 - RNA, 13 nt, Molluscum contagiosum virus
cagagccugcugc

SEQ ID NO: 3088673 - RNA, 15 nt, Molluscum contagiosum virus
gcagcucaagacgcu

SEQ ID NO: 3088674 - RNA, 15 nt, Molluscum contagiosum virus
gccucugccucgugc

SEQ ID NO: 3088675 - RNA, 16 nt, Molluscum contagiosum virus
gucucccgcggccgcc

SEQ ID NO: 3088676 - RNA, 14 nt, Molluscum contagiosum virus
cguggaggagccgc

SEQ ID NO: 3088677 - RNA, 14 nt, Molluscum contagiosum virus
cugacgcgcagugc

SEQ ID NO: 3088678 - RNA, 17 nt, Molluscum contagiosum virus
ggcaagaggggagccag

SEQ ID NO: 3088679 - RNA, 13 nt, Molluscum contagiosum virus
gcuggaggauucu

SEQ ID NO: 3088680 - RNA, 21 nt, Molluscum contagiosum virus
gugccgcugcgcggagcucgc

SEQ ID NO: 3088681 - RNA, 15 nt, Molluscum contagiosum virus
cagccgcacggcgcc

SEQ ID NO: 3088682 - RNA, 21 nt, Molluscum contagiosum virus
ggacgcgugcaagcccagcag

SEQ ID NO: 3088683 - RNA, 13 nt, Molluscum contagiosum virus
gaaaacuuguggc

SEQ ID NO: 3088684 - RNA, 14 nt, Molluscum contagiosum virus
caauacugcgggcu

SEQ ID NO: 3088685 - RNA, 18 nt, Molluscum contagiosum virus
acugccugccgccucgga

SEQ ID NO: 3088686 - RNA, 17 nt, Molluscum contagiosum virus
cgcugcccgcgcacaac

SEQ ID NO: 3088687 - RNA, 22 nt, Molluscum contagiosum virus
gguccgcuccuucucagggcuu

SEQ ID NO: 3088688 - RNA, 19 nt, Molluscum contagiosum virus
ccgcgcccgccagcauggc

SEQ ID NO: 3088689 - RNA, 23 nt, Molluscum contagiosum virus
gcacgugccccgcgcgugcaguu

SEQ ID NO: 3088690 - RNA, 15 nt, Molluscum contagiosum virus
acgccguguaccgcc

SEQ ID NO: 3088691 - RNA, 15 nt, Molluscum contagiosum virus
ccugcugccucccaa

SEQ ID NO: 3088692 - RNA, 21 nt, Molluscum contagiosum virus
gcuuggccggaacgccgugcg

SEQ ID NO: 3088693 - RNA, 13 nt, Molluscum contagiosum virus
ugcacgugcagcg

SEQ ID NO: 3088694 - RNA, 21 nt, Molluscum contagiosum virus
gcacccuucugaggggcagug

SEQ ID NO: 3088695 - RNA, 18 nt, Molluscum contagiosum virus
gcucgcggugcagcugcc

SEQ ID NO: 3088696 - RNA, 12 nt, Molluscum contagiosum virus
cucccgcccagc

SEQ ID NO: 3088697 - RNA, 19 nt, Molluscum contagiosum virus
ucucguggcguugcugcug

SEQ ID NO: 3088698 - RNA, 20 nt, Molluscum contagiosum virus
cucugacccgcgccuacucc

SEQ ID NO: 3088699 - RNA, 13 nt, Molluscum contagiosum virus
cugcgcgcacugc

SEQ ID NO: 3088700 - RNA, 14 nt, Molluscum contagiosum virus
cgggagaguggccg

SEQ ID NO: 3088701 - RNA, 23 nt, Molluscum contagiosum virus
guacgacgugcugcugcagaacu

SEQ ID NO: 3088702 - RNA, 17 nt, Molluscum contagiosum virus
gcgccgcgcgcgccggg

SEQ ID NO: 3088703 - RNA, 15 nt, Molluscum contagiosum virus
ccucgcgcgcacugc

SEQ ID NO: 3088704 - RNA, 13 nt, Molluscum contagiosum virus
cugugccgcagca

SEQ ID NO: 3088705 - RNA, 13 nt, Molluscum contagiosum virus
gccguaguccggc

SEQ ID NO: 3088706 - RNA, 14 nt, Molluscum contagiosum virus
agugugccugcugc

SEQ ID NO: 3088707 - RNA, 19 nt, Molluscum contagiosum virus
cacgccaagcgcuugcucu

SEQ ID NO: 3088708 - RNA, 19 nt, Molluscum contagiosum virus
gcauguccuuggcggugcg

SEQ ID NO: 3088709 - RNA, 23 nt, Molluscum contagiosum virus
gcuggacuuccugcugcgcagca

SEQ ID NO: 3088710 - RNA, 15 nt, Molluscum contagiosum virus
cgcgagcugcugcgc

SEQ ID NO: 3088711 - RNA, 22 nt, Molluscum contagiosum virus
cgcgaacgaggagggcagccuc

SEQ ID NO: 3088712 - RNA, 17 nt, Molluscum contagiosum virus
cccaccagcagccaggc

SEQ ID NO: 3088713 - RNA, 20 nt, Molluscum contagiosum virus
gcucgcgcaaguccagcgcg

SEQ ID NO: 3088714 - RNA, 23 nt, Molluscum contagiosum virus
ugcgcggcccgcgggcugcaaga

SEQ ID NO: 3088715 - RNA, 21 nt, Molluscum contagiosum virus
aaaagcaaguaccagccgcug

SEQ ID NO: 3088716 - RNA, 21 nt, Molluscum contagiosum virus
aaggcaccccgaaggaaaggc

SEQ ID NO: 3088717 - RNA, 18 nt, Molluscum contagiosum virus
gucgcgagugugcgcgcc

SEQ ID NO: 3088718 - RNA, 13 nt, Molluscum contagiosum virus
cccagcuucagca

SEQ ID NO: 3088719 - RNA, 13 nt, Molluscum contagiosum virus
cacccgcaggaaa

SEQ ID NO: 3088720 - RNA, 22 nt, Molluscum contagiosum virus
cagcguagcggacgaagcugug

SEQ ID NO: 3088721 - RNA, 19 nt, Molluscum contagiosum virus
ccgccgcgcaaaagcacag

SEQ ID NO: 3088722 - RNA, 17 nt, Molluscum contagiosum virus
agcaaugcgcaaggccg

SEQ ID NO: 3088723 - RNA, 19 nt, Molluscum contagiosum virus
gcacuugccgggcgacggc

SEQ ID NO: 3088724 - RNA, 15 nt, Molluscum contagiosum virus
gaccccgagcugcgg

SEQ ID NO: 3088725 - RNA, 15 nt, Molluscum contagiosum virus
gccgcguagccgccg

SEQ ID NO: 3088726 - RNA, 20 nt, Molluscum contagiosum virus
ccugcucgggcugcgcggcg

SEQ ID NO: 3088727 - RNA, 18 nt, Molluscum contagiosum virus
ccgcggccgagucacgcc

SEQ ID NO: 3088728 - RNA, 21 nt, Molluscum contagiosum virus
ccgagcaacucgcgagagaca

SEQ ID NO: 3088729 - RNA, 20 nt, Molluscum contagiosum virus
cuuccccgcacaagggcagc

SEQ ID NO: 3088730 - RNA, 15 nt, Molluscum contagiosum virus
gucucgcgcuuccag

SEQ ID NO: 3088731 - RNA, 17 nt, Molluscum contagiosum virus
caagaggacgagcugcu

SEQ ID NO: 3088732 - RNA, 13 nt, Molluscum contagiosum virus
ggaacgcgccgcg

SEQ ID NO: 3088733 - RNA, 16 nt, Molluscum contagiosum virus
gcguucacggacucga

SEQ ID NO: 3088734 - RNA, 16 nt, Molluscum contagiosum virus
ggaggcgcuagugcag

SEQ ID NO: 3088735 - RNA, 21 nt, Molluscum contagiosum virus
agcgccuguaccccgaacggc

SEQ ID NO: 3088736 - RNA, 15 nt, Molluscum contagiosum virus
gcgugcaugcccagc

SEQ ID NO: 3088737 - RNA, 15 nt, Molluscum contagiosum virus
cucgugcccgcacac

SEQ ID NO: 3088738 - RNA, 17 nt, Molluscum contagiosum virus
agcgccgcucgcacggc

SEQ ID NO: 3088739 - RNA, 15 nt, Molluscum contagiosum virus
cacugcguacacaug

SEQ ID NO: 3088740 - RNA, 16 nt, Molluscum contagiosum virus
gugcgccugcagccug

SEQ ID NO: 3088741 - RNA, 19 nt, Molluscum contagiosum virus
cgaagaccaccagcaccag

SEQ ID NO: 3088742 - RNA, 13 nt, Molluscum contagiosum virus
agaguugcgcgag

SEQ ID NO: 3088743 - RNA, 19 nt, Molluscum contagiosum virus
acuugcgcguucgcaaaga

SEQ ID NO: 3088744 - RNA, 15 nt, Molluscum contagiosum virus
cccgcaaccccgcgc

SEQ ID NO: 3088745 - RNA, 20 nt, Molluscum contagiosum virus
caccuuggcgcugcacaguu

SEQ ID NO: 3088746 - RNA, 21 nt, Molluscum contagiosum virus
cugucgccgcgggcugggaaa

SEQ ID NO: 3088747 - RNA, 19 nt, Molluscum contagiosum virus
cucuggagcggccacucuc

SEQ ID NO: 3088748 - RNA, 17 nt, Molluscum contagiosum virus
cagcgggcgcugcucgc

SEQ ID NO: 3088749 - RNA, 17 nt, Molluscum contagiosum virus
cuccaggaacgcgccgc

SEQ ID NO: 3088750 - RNA, 14 nt, Molluscum contagiosum virus
gcgagcgcucugca

SEQ ID NO: 3088751 - RNA, 16 nt, Molluscum contagiosum virus
uuccugcugcgcagca

SEQ ID NO: 3088752 - RNA, 17 nt, Molluscum contagiosum virus
cacguggaaucacggcc

SEQ ID NO: 3088753 - RNA, 24 nt, Molluscum contagiosum virus
ugaccgcuucgagugcucccgagg

SEQ ID NO: 3088754 - RNA, 17 nt, Molluscum contagiosum virus
cggccgccggcgccugu

SEQ ID NO: 3088755 - RNA, 22 nt, Molluscum contagiosum virus
cagcaugaacucgcugcugcuc

SEQ ID NO: 3088756 - RNA, 17 nt, Molluscum contagiosum virus
ggagguuggaagcacgc

SEQ ID NO: 3088757 - RNA, 23 nt, Molluscum contagiosum virus
auauggcgcgccgaguacugcug

SEQ ID NO: 3088758 - RNA, 19 nt, Molluscum contagiosum virus
ugcucuacgcaacacggcg

SEQ ID NO: 3088759 - RNA, 21 nt, Molluscum contagiosum virus
agucuuccuggggcuggacag

SEQ ID NO: 3088760 - RNA, 18 nt, Molluscum contagiosum virus
ggcagcuggagcugccgc

SEQ ID NO: 3088761 - RNA, 15 nt, Molluscum contagiosum virus
cacguggaccugauu

SEQ ID NO: 3088762 - RNA, 14 nt, Molluscum contagiosum virus
ucucggcggccgga

SEQ ID NO: 3088763 - RNA, 18 nt, Molluscum contagiosum virus
cggcacuguguccccuga

SEQ ID NO: 3088764 - RNA, 18 nt, Molluscum contagiosum virus
gacgcgcgagugugcgug

SEQ ID NO: 3088765 - RNA, 12 nt, Molluscum contagiosum virus
cggacagugccu

SEQ ID NO: 3088766 - RNA, 12 nt, Molluscum contagiosum virus
ggugaggagcuc

SEQ ID NO: 3088767 - RNA, 18 nt, Molluscum contagiosum virus
gcaaguucgcugcuggca

SEQ ID NO: 3088768 - RNA, 23 nt, Molluscum contagiosum virus
cuugcagacaaggagaugggcac

SEQ ID NO: 3088769 - RNA, 16 nt, Molluscum contagiosum virus
cagcagcgcgaagcuc

SEQ ID NO: 3088770 - RNA, 21 nt, Molluscum contagiosum virus
gcgcgccucucgaggccggca

SEQ ID NO: 3088771 - RNA, 16 nt, Molluscum contagiosum virus
acggucuuccaggucu

SEQ ID NO: 3088772 - RNA, 18 nt, Molluscum contagiosum virus
uucaguguuuuaauuuuc

SEQ ID NO: 3088773 - RNA, 22 nt, Molluscum contagiosum virus
caccccgaaaggcacccgcagg

SEQ ID NO: 3088774 - RNA, 21 nt, Molluscum contagiosum virus
cggcgcguccucggccagagc

SEQ ID NO: 3088775 - RNA, 13 nt, Molluscum contagiosum virus
cauggccacgccc

SEQ ID NO: 3088776 - RNA, 15 nt, Molluscum contagiosum virus
aaggacuaccagcuc

SEQ ID NO: 3088777 - RNA, 16 nt, Molluscum contagiosum virus
uggccuguaguagcag

SEQ ID NO: 3088778 - RNA, 19 nt, Molluscum contagiosum virus
gcaggccccgcaccagugc

SEQ ID NO: 3088779 - RNA, 15 nt, Molluscum contagiosum virus
gccggacagcucagc

SEQ ID NO: 3088780 - RNA, 18 nt, Molluscum contagiosum virus
cccgcgcagcgccacgcc

SEQ ID NO: 3088781 - RNA, 21 nt, Molluscum contagiosum virus
agguuggggcggcggggcugc

SEQ ID NO: 3088782 - RNA, 16 nt, Molluscum contagiosum virus
cggcacccgccagcuu

SEQ ID NO: 3088783 - RNA, 16 nt, Molluscum contagiosum virus
cgugcguuccgggccc

SEQ ID NO: 3088784 - RNA, 21 nt, Molluscum contagiosum virus
cucugcgcgagcagcugcugc

SEQ ID NO: 3088785 - RNA, 20 nt, Molluscum contagiosum virus
cacgggcucgaucugcgccu

SEQ ID NO: 3088786 - RNA, 18 nt, Molluscum contagiosum virus
gagcucacgccggaccag

SEQ ID NO: 3088787 - RNA, 15 nt, Molluscum contagiosum virus
aggagggcagccuca

SEQ ID NO: 3088788 - RNA, 15 nt, Molluscum contagiosum virus
aacagcgcaagcuga

SEQ ID NO: 3088789 - RNA, 14 nt, Molluscum contagiosum virus
ccaccagcagccag

SEQ ID NO: 3088790 - RNA, 16 nt, Molluscum contagiosum virus
ccggcaucgcgcugcu

SEQ ID NO: 3088791 - RNA, 11 nt, Molluscum contagiosum virus
aagcacugccu

SEQ ID NO: 3088792 - RNA, 20 nt, Molluscum contagiosum virus
cuacugcgcgcacugcucgc

SEQ ID NO: 3088793 - RNA, 16 nt, Molluscum contagiosum virus
cugcugcucgaagccu

SEQ ID NO: 3088794 - RNA, 21 nt, Molluscum contagiosum virus
ggucaacggcacagucuggga

SEQ ID NO: 3088795 - RNA, 21 nt, Molluscum contagiosum virus
cgcgcgcuauucaaagcugug

SEQ ID NO: 3088796 - RNA, 17 nt, Molluscum contagiosum virus
ccugcgacagcugcugc

SEQ ID NO: 3088797 - RNA, 21 nt, Molluscum contagiosum virus
ggcgggaagaaacucaggaag

SEQ ID NO: 3088798 - RNA, 17 nt, Molluscum contagiosum virus
ccuggcguccgcacgca

SEQ ID NO: 3088799 - RNA, 19 nt, Molluscum contagiosum virus
ccagaaaacaggcacuucg

SEQ ID NO: 3088800 - RNA, 14 nt, Molluscum contagiosum virus
ccaggugcugggcg

SEQ ID NO: 3088801 - RNA, 18 nt, Molluscum contagiosum virus
gcuggcccugcuagugcg

SEQ ID NO: 3088802 - RNA, 16 nt, Molluscum contagiosum virus
ucgcggcgcuacuggc

SEQ ID NO: 3088803 - RNA, 19 nt, Molluscum contagiosum virus
gcgcgccgugccuggcagu

SEQ ID NO: 3088804 - RNA, 14 nt, Molluscum contagiosum virus
gcgcgcaggcucgc

SEQ ID NO: 3088805 - RNA, 17 nt, Molluscum contagiosum virus
cuggcacuugcgcagcc

SEQ ID NO: 3088806 - RNA, 23 nt, Molluscum contagiosum virus
agacauauguucuucgacaacau

SEQ ID NO: 3088807 - RNA, 23 nt, Molluscum contagiosum virus
cgcgcguugccugagaagcugua

SEQ ID NO: 3088808 - RNA, 18 nt, Molluscum contagiosum virus
cccucgugguugcgcagc

SEQ ID NO: 3088809 - RNA, 15 nt, Molluscum contagiosum virus
cgcuccuucucaggg

SEQ ID NO: 3088810 - RNA, 19 nt, Molluscum contagiosum virus
aaacauguagcgcgcgccg

SEQ ID NO: 3088811 - RNA, 20 nt, Molluscum contagiosum virus
gcaugugcgcaccgcgggcu

SEQ ID NO: 3088812 - RNA, 23 nt, Molluscum contagiosum virus
guacgcaugcgcgguccuguccg

SEQ ID NO: 3088813 - RNA, 24 nt, Molluscum contagiosum virus
gcgccuaccgcgcgggaggcgucc

SEQ ID NO: 3088814 - RNA, 19 nt, Molluscum contagiosum virus
gaaacuggacugagccgca

SEQ ID NO: 3088815 - RNA, 12 nt, Molluscum contagiosum virus
ccgguccugacu

SEQ ID NO: 3088816 - RNA, 12 nt, Molluscum contagiosum virus
gcgcugcugccc

SEQ ID NO: 3088817 - RNA, 12 nt, Molluscum contagiosum virus
ggccaggccgcg

SEQ ID NO: 3088818 - RNA, 21 nt, Molluscum contagiosum virus
cugcugcagaacugccugguc

SEQ ID NO: 3088819 - RNA, 11 nt, Molluscum contagiosum virus
gaccugcuggu

SEQ ID NO: 3088820 - RNA, 21 nt, Molluscum contagiosum virus
ggcgcgcgucgagggcgccgg

SEQ ID NO: 3088821 - RNA, 18 nt, Molluscum contagiosum virus
accgcaugggcccuggcg

SEQ ID NO: 3088822 - RNA, 13 nt, Molluscum contagiosum virus
cugccauggcagc

SEQ ID NO: 3088823 - RNA, 16 nt, Molluscum contagiosum virus
cacaucggcacugcuc

SEQ ID NO: 3088824 - RNA, 23 nt, Molluscum contagiosum virus
gcaggcgucgcgcacagaaagcc

SEQ ID NO: 3088825 - RNA, 13 nt, Molluscum contagiosum virus
gcgcugcugguuc

SEQ ID NO: 3088826 - RNA, 20 nt, Molluscum contagiosum virus
cagagguaaucccgagcuuc

SEQ ID NO: 3088827 - RNA, 20 nt, Molluscum contagiosum virus
gucaggccggucgcggaaga

SEQ ID NO: 3088828 - RNA, 20 nt, Molluscum contagiosum virus
cagcucggaggcgcagacgu

SEQ ID NO: 3088829 - RNA, 21 nt, Molluscum contagiosum virus
cgccagcuaagccggagcagc

SEQ ID NO: 3088830 - RNA, 13 nt, Molluscum contagiosum virus
cugcguugucucc

SEQ ID NO: 3088831 - RNA, 17 nt, Molluscum contagiosum virus
aggcguaugcgccaagc

SEQ ID NO: 3088832 - RNA, 15 nt, Molluscum contagiosum virus
agcgacgagcagcug

SEQ ID NO: 3088833 - RNA, 14 nt, Molluscum contagiosum virus
cuccugaggaagca

SEQ ID NO: 3088834 - RNA, 13 nt, Molluscum contagiosum virus
ccccgcugggccg

SEQ ID NO: 3088835 - RNA, 15 nt, Molluscum contagiosum virus
cgcggcaacagcacg

SEQ ID NO: 3088836 - RNA, 18 nt, Molluscum contagiosum virus
ggagcgcacgaagcggcg

SEQ ID NO: 3088837 - RNA, 22 nt, Molluscum contagiosum virus
ggcaaguuccuggugugccagc

SEQ ID NO: 3088838 - RNA, 14 nt, Molluscum contagiosum virus
cugccucgugccuu

SEQ ID NO: 3088839 - RNA, 14 nt, Molluscum contagiosum virus
ucggcuucugcugc

SEQ ID NO: 3088840 - RNA, 18 nt, Molluscum contagiosum virus
accaccagguacuccuug

SEQ ID NO: 3088841 - RNA, 14 nt, Molluscum contagiosum virus
gacuggcaccugcg

SEQ ID NO: 3088842 - RNA, 20 nt, Molluscum contagiosum virus
cccggacagagccccguuca

SEQ ID NO: 3088843 - RNA, 19 nt, Molluscum contagiosum virus
augccgcgugcucugcucc

SEQ ID NO: 3088844 - RNA, 16 nt, Molluscum contagiosum virus
cccgcggcgcgccgca

SEQ ID NO: 3088845 - RNA, 18 nt, Molluscum contagiosum virus
gcccgguuuuccggggac

SEQ ID NO: 3088846 - RNA, 15 nt, Molluscum contagiosum virus
cacgcucucgcuggc

SEQ ID NO: 3088847 - RNA, 18 nt, Molluscum contagiosum virus
gcacgccagguguuccug

SEQ ID NO: 3088848 - RNA, 15 nt, Molluscum contagiosum virus
cugguucugcucgca

SEQ ID NO: 3088849 - RNA, 21 nt, Molluscum contagiosum virus
gcggaugccacgcagcuggcg

SEQ ID NO: 3088850 - RNA, 12 nt, Molluscum contagiosum virus
caugggcccugg

SEQ ID NO: 3088851 - RNA, 20 nt, Molluscum contagiosum virus
gacgagaccacgguccuggg

SEQ ID NO: 3088852 - RNA, 23 nt, Molluscum contagiosum virus
cgcguccacaaagacggggccgc

SEQ ID NO: 3088853 - RNA, 15 nt, Molluscum contagiosum virus
gaucgcgcucuuccc

SEQ ID NO: 3088854 - RNA, 15 nt, Molluscum contagiosum virus
cuagacaaggggcca

SEQ ID NO: 3088855 - RNA, 17 nt, Molluscum contagiosum virus
ccggccucgccuccggg

SEQ ID NO: 3088856 - RNA, 19 nt, Molluscum contagiosum virus
ucagcggcggccccugccu

SEQ ID NO: 3088857 - RNA, 17 nt, Molluscum contagiosum virus
gcgggcaagcagggccu

SEQ ID NO: 3088858 - RNA, 13 nt, Molluscum contagiosum virus
gaugcuggggcuc

SEQ ID NO: 3088859 - RNA, 16 nt, Molluscum contagiosum virus
cgugcgcgggcacgcc

SEQ ID NO: 3088860 - RNA, 16 nt, Molluscum contagiosum virus
gugaaguccucucucc

SEQ ID NO: 3088861 - RNA, 17 nt, Molluscum contagiosum virus
ggcggcccgcggcgcgc

SEQ ID NO: 3088862 - RNA, 21 nt, Molluscum contagiosum virus
gccggguguugaccaaagguc

SEQ ID NO: 3088863 - RNA, 19 nt, Molluscum contagiosum virus
caugaggcggcgcaggugc

SEQ ID NO: 3088864 - RNA, 20 nt, Molluscum contagiosum virus
ccauggagcgcccgcugcuc

SEQ ID NO: 3088865 - RNA, 21 nt, Molluscum contagiosum virus
cuacguguccgcauccgccuu

SEQ ID NO: 3088866 - RNA, 15 nt, Molluscum contagiosum virus
gcggccguggcacug

SEQ ID NO: 3088867 - RNA, 13 nt, Molluscum contagiosum virus
uugcgagccagcc

SEQ ID NO: 3088868 - RNA, 22 nt, Molluscum contagiosum virus
cgagcacggccgccaccgcgcg

SEQ ID NO: 3088869 - RNA, 22 nt, Molluscum contagiosum virus
aagcguuuucgucauggagcag

SEQ ID NO: 3088870 - RNA, 16 nt, Molluscum contagiosum virus
uggacgcacagggcug

SEQ ID NO: 3088871 - RNA, 20 nt, Molluscum contagiosum virus
ggcgcgccgaguacugcugc

SEQ ID NO: 3088872 - RNA, 19 nt, Molluscum contagiosum virus
aagauacuuccgguguccc

SEQ ID NO: 3088873 - RNA, 22 nt, Molluscum contagiosum virus
ccuucgcuugucgugcuuccug

SEQ ID NO: 3088874 - RNA, 16 nt, Molluscum contagiosum virus
gcggggcccucgagca

SEQ ID NO: 3088875 - RNA, 16 nt, Molluscum contagiosum virus
gacgugcugcugcaga

SEQ ID NO: 3088876 - RNA, 14 nt, Molluscum contagiosum virus
ccgcgcgugcaguu

SEQ ID NO: 3088877 - RNA, 17 nt, Molluscum contagiosum virus
ggucgcccuccgccgua

SEQ ID NO: 3088878 - RNA, 15 nt, Molluscum contagiosum virus
ggacagcucagcagg

SEQ ID NO: 3088879 - RNA, 15 nt, Molluscum contagiosum virus
gccgugacgcugcgg

SEQ ID NO: 3088880 - RNA, 19 nt, Molluscum contagiosum virus
gcugccaauaccaggccac

SEQ ID NO: 3088881 - RNA, 15 nt, Molluscum contagiosum virus
caaaggcaggggccg

SEQ ID NO: 3088882 - RNA, 16 nt, Molluscum contagiosum virus
gcacgaugcccagcag

SEQ ID NO: 3088883 - RNA, 12 nt, Molluscum contagiosum virus
cuccgcgcggcg

SEQ ID NO: 3088884 - RNA, 15 nt, Molluscum contagiosum virus
ucacaugugcugccg

SEQ ID NO: 3088885 - RNA, 24 nt, Molluscum contagiosum virus
ugcuucggcggcugugcccgcggc

SEQ ID NO: 3088886 - RNA, 13 nt, Molluscum contagiosum virus
cuucugccugccc

SEQ ID NO: 3088887 - RNA, 24 nt, Molluscum contagiosum virus
ugugaugauuugauggcugcucau

SEQ ID NO: 3088888 - RNA, 13 nt, Molluscum contagiosum virus
uugccgaggaggu

SEQ ID NO: 3088889 - RNA, 18 nt, Molluscum contagiosum virus
cccgcggcgugcccgucu

SEQ ID NO: 3088890 - RNA, 14 nt, Molluscum contagiosum virus
gcgagcacgccugc

SEQ ID NO: 3088891 - RNA, 19 nt, Molluscum contagiosum virus
ggcucugugcggacaugcc

SEQ ID NO: 3088892 - RNA, 13 nt, Molluscum contagiosum virus
gcggcaggcgcug

SEQ ID NO: 3088893 - RNA, 20 nt, Molluscum contagiosum virus
gaccucccgcccagcguggc

SEQ ID NO: 3088894 - RNA, 22 nt, Molluscum contagiosum virus
auggcucccgcacgcaccgcga

SEQ ID NO: 3088895 - RNA, 20 nt, Molluscum contagiosum virus
guucugcaucuucugccagg

SEQ ID NO: 3088896 - RNA, 15 nt, Molluscum contagiosum virus
gcucacggcugugga

SEQ ID NO: 3088897 - RNA, 16 nt, Molluscum contagiosum virus
ccugucgugcaauggc

SEQ ID NO: 3088898 - RNA, 20 nt, Molluscum contagiosum virus
cuucgcagaggacagcuccu

SEQ ID NO: 3088899 - RNA, 13 nt, Molluscum contagiosum virus
guccagcccgcgg

SEQ ID NO: 3088900 - RNA, 16 nt, Molluscum contagiosum virus
ucgcuggccucugccu

SEQ ID NO: 3088901 - RNA, 20 nt, Molluscum contagiosum virus
auggagcgcccgcugcucua

SEQ ID NO: 3088902 - RNA, 13 nt, Molluscum contagiosum virus
agacgagggaugc

SEQ ID NO: 3088903 - RNA, 13 nt, Molluscum contagiosum virus
cgcgcggacagcc

SEQ ID NO: 3088904 - RNA, 13 nt, Molluscum contagiosum virus
caucuccuugucu

SEQ ID NO: 3088905 - RNA, 17 nt, Molluscum contagiosum virus
gagcacaacgaacaugu

SEQ ID NO: 3088906 - RNA, 17 nt, Molluscum contagiosum virus
gccagccaucgugcgcg

SEQ ID NO: 3088907 - RNA, 14 nt, Molluscum contagiosum virus
uuccacgcuugcac

SEQ ID NO: 3088908 - RNA, 12 nt, Molluscum contagiosum virus
uguugaccaaag

SEQ ID NO: 3088909 - RNA, 16 nt, Molluscum contagiosum virus
gacggaggucugcuuu

SEQ ID NO: 3088910 - RNA, 19 nt, Molluscum contagiosum virus
gcuacgcgagcacugcgcg

SEQ ID NO: 3088911 - RNA, 16 nt, Molluscum contagiosum virus
ucgggcuagcaagcac

SEQ ID NO: 3088912 - RNA, 16 nt, Molluscum contagiosum virus
gcacaacaagaagacg

SEQ ID NO: 3088913 - RNA, 21 nt, Molluscum contagiosum virus
gcugcgccaggaaaggcagga

SEQ ID NO: 3088914 - RNA, 22 nt, Molluscum contagiosum virus
caucugccucguggaacaaaga

SEQ ID NO: 3088915 - RNA, 22 nt, Molluscum contagiosum virus
augagaauaaaauagcagagca

SEQ ID NO: 3088916 - RNA, 12 nt, Molluscum contagiosum virus
ugugagcaagcu

SEQ ID NO: 3088917 - RNA, 16 nt, Molluscum contagiosum virus
uggaagccgccagcca

SEQ ID NO: 3088918 - RNA, 16 nt, Molluscum contagiosum virus
gcgcagacgcggugga

SEQ ID NO: 3088919 - RNA, 13 nt, Molluscum contagiosum virus
aggcggccguguc

SEQ ID NO: 3088920 - RNA, 23 nt, Molluscum contagiosum virus
acgcgccagugcgugcacugucu

SEQ ID NO: 3088921 - RNA, 22 nt, Molluscum contagiosum virus
gccucggacggaggucugcuuu

SEQ ID NO: 3088922 - RNA, 19 nt, Molluscum contagiosum virus
auugcgucuuacugcugca

SEQ ID NO: 3088923 - RNA, 16 nt, Molluscum contagiosum virus
cacgcccgcgucccga

SEQ ID NO: 3088924 - RNA, 12 nt, Molluscum contagiosum virus
ucggggcuguca

SEQ ID NO: 3088925 - RNA, 13 nt, Molluscum contagiosum virus
ccagcggcugccc

SEQ ID NO: 3088926 - RNA, 14 nt, Molluscum contagiosum virus
cgugcuagcccgca

SEQ ID NO: 3088927 - RNA, 16 nt, Molluscum contagiosum virus
cgagggcgaguccccg

SEQ ID NO: 3088928 - RNA, 18 nt, Molluscum contagiosum virus
aggccggagacguaccca

SEQ ID NO: 3088929 - RNA, 18 nt, Molluscum contagiosum virus
gugccgggcuugcucccu

SEQ ID NO: 3088930 - RNA, 19 nt, Molluscum contagiosum virus
gccgcgcccgcggcgcacg

SEQ ID NO: 3088931 - RNA, 21 nt, Molluscum contagiosum virus
gugcucugugcgcgcagacgu

SEQ ID NO: 3088932 - RNA, 17 nt, Molluscum contagiosum virus
accgcguggacaacagc

SEQ ID NO: 3088933 - RNA, 17 nt, Molluscum contagiosum virus
cucgcgcucuacgccag

SEQ ID NO: 3088934 - RNA, 14 nt, Molluscum contagiosum virus
guggcgcaccugcu

SEQ ID NO: 3088935 - RNA, 13 nt, Molluscum contagiosum virus
ggcgugacagguc

SEQ ID NO: 3088936 - RNA, 20 nt, Molluscum contagiosum virus
ggccuguucggcaugcagcg

SEQ ID NO: 3088937 - RNA, 21 nt, Molluscum contagiosum virus
caaguacaacccaaacauguc

SEQ ID NO: 3088938 - RNA, 23 nt, Molluscum contagiosum virus
caccgggauggucucgcugcugg

SEQ ID NO: 3088939 - RNA, 20 nt, Molluscum contagiosum virus
caucaagcacggcuuccggc

SEQ ID NO: 3088940 - RNA, 19 nt, Molluscum contagiosum virus
gaggaacuagugcugcugg

SEQ ID NO: 3088941 - RNA, 17 nt, Molluscum contagiosum virus
ccgcgauucugcucuuu

SEQ ID NO: 3088942 - RNA, 12 nt, Molluscum contagiosum virus
gcaccugcagga

SEQ ID NO: 3088943 - RNA, 13 nt, Molluscum contagiosum virus
gcucgaggcgacg

SEQ ID NO: 3088944 - RNA, 22 nt, Molluscum contagiosum virus
ccgagcaacucgcgagagacac

SEQ ID NO: 3088945 - RNA, 17 nt, Molluscum contagiosum virus
gcucggaggcuugcccc

SEQ ID NO: 3088946 - RNA, 14 nt, Molluscum contagiosum virus
aucucugcgccgcg

SEQ ID NO: 3088947 - RNA, 14 nt, Molluscum contagiosum virus
accaccgcuggggc

SEQ ID NO: 3088948 - RNA, 16 nt, Molluscum contagiosum virus
cgcagcgcgagcugug

SEQ ID NO: 3088949 - RNA, 13 nt, Molluscum contagiosum virus
cgcuugaaggacg

SEQ ID NO: 3088950 - RNA, 20 nt, Molluscum contagiosum virus
cuucccgcugagcgcagcac

SEQ ID NO: 3088951 - RNA, 21 nt, Molluscum contagiosum virus
ugccaccaugcgcacagcacu

SEQ ID NO: 3088952 - RNA, 18 nt, Molluscum contagiosum virus
cuagccuccuugucuucc

SEQ ID NO: 3088953 - RNA, 20 nt, Molluscum contagiosum virus
acgccgaccauuuccugcga

SEQ ID NO: 3088954 - RNA, 22 nt, Molluscum contagiosum virus
uugcugggcacaagcuuucuca

SEQ ID NO: 3088955 - RNA, 12 nt, Molluscum contagiosum virus
gaagaggucucu

SEQ ID NO: 3088956 - RNA, 21 nt, Molluscum contagiosum virus
cgggcauguccuuggcggugc

SEQ ID NO: 3088957 - RNA, 18 nt, Molluscum contagiosum virus
cacggcacccgccagcuu

SEQ ID NO: 3088958 - RNA, 12 nt, Molluscum contagiosum virus
cgaccugcugcg

SEQ ID NO: 3088959 - RNA, 16 nt, Molluscum contagiosum virus
cguggacgaggccaac

SEQ ID NO: 3088960 - RNA, 15 nt, Molluscum contagiosum virus
cugcauccuggggaa

SEQ ID NO: 3088961 - RNA, 23 nt, Molluscum contagiosum virus
aggaguagcgugcgccugcagcc

SEQ ID NO: 3088962 - RNA, 15 nt, Molluscum contagiosum virus
augcccgcaaugcaa

SEQ ID NO: 3088963 - RNA, 17 nt, Molluscum contagiosum virus
cuggccgaggucuucca

SEQ ID NO: 3088964 - RNA, 16 nt, Molluscum contagiosum virus
uuggacgagcugcuuc

SEQ ID NO: 3088965 - RNA, 15 nt, Molluscum contagiosum virus
ggcggaaguggugcc

SEQ ID NO: 3088966 - RNA, 21 nt, Molluscum contagiosum virus
agagcacugcgcgucugugcg

SEQ ID NO: 3088967 - RNA, 21 nt, Molluscum contagiosum virus
gcugcccccgccaugccaacg

SEQ ID NO: 3088968 - RNA, 22 nt, Molluscum contagiosum virus
gagcaaugcgagcaaggcgcgc

SEQ ID NO: 3088969 - RNA, 13 nt, Molluscum contagiosum virus
cgguccuguccgc

SEQ ID NO: 3088970 - RNA, 14 nt, Molluscum contagiosum virus
aaguaccagccgcu

SEQ ID NO: 3088971 - RNA, 19 nt, Molluscum contagiosum virus
cgcaacacggcggugcccg

SEQ ID NO: 3088972 - RNA, 16 nt, Molluscum contagiosum virus
cucgcgcaucugccgc

SEQ ID NO: 3088973 - RNA, 13 nt, Molluscum contagiosum virus
gccccugcugcuc

SEQ ID NO: 3088974 - RNA, 14 nt, Molluscum contagiosum virus
cucgcgagcgccac

SEQ ID NO: 3088975 - RNA, 18 nt, Molluscum contagiosum virus
gugccuggcagugccggg

SEQ ID NO: 3088976 - RNA, 15 nt, Molluscum contagiosum virus
accagcucgcgcagu

SEQ ID NO: 3088977 - RNA, 14 nt, Molluscum contagiosum virus
cauggcgccacacc

SEQ ID NO: 3088978 - RNA, 23 nt, Molluscum contagiosum virus
gagcacgacuacggcgagcccau

SEQ ID NO: 3088979 - RNA, 16 nt, Molluscum contagiosum virus
cagaucgcgagaggag

SEQ ID NO: 3088980 - RNA, 11 nt, Molluscum contagiosum virus
guugccaggca

SEQ ID NO: 3088981 - RNA, 14 nt, Molluscum contagiosum virus
cggaagcuccugcu

SEQ ID NO: 3088982 - RNA, 22 nt, Molluscum contagiosum virus
ccucgcaagcugagcgcgcugc

SEQ ID NO: 3088983 - RNA, 22 nt, Molluscum contagiosum virus
ccucgucgaucauguccacagc

SEQ ID NO: 3088984 - RNA, 21 nt, Molluscum contagiosum virus
cugcacgugcagcggcgccac

SEQ ID NO: 3088985 - RNA, 19 nt, Molluscum contagiosum virus
caggaaaggcaccccgcag

SEQ ID NO: 3088986 - RNA, 18 nt, Molluscum contagiosum virus
cgauacccuuggcagcaa

SEQ ID NO: 3088987 - RNA, 16 nt, Molluscum contagiosum virus
gcucgcacggcgacuc

SEQ ID NO: 3088988 - RNA, 16 nt, Molluscum contagiosum virus
cgaacaccuccugcuu

SEQ ID NO: 3088989 - RNA, 14 nt, Molluscum contagiosum virus
acgagcaguccgcc

SEQ ID NO: 3088990 - RNA, 16 nt, Molluscum contagiosum virus
gcaccgagcaagcugg

SEQ ID NO: 3088991 - RNA, 20 nt, Molluscum contagiosum virus
cuguaaauggaccacaagca

SEQ ID NO: 3088992 - RNA, 17 nt, Molluscum contagiosum virus
cagcggcaaaggcccgc

SEQ ID NO: 3088993 - RNA, 23 nt, Molluscum contagiosum virus
gcgugucgguaugcgaggccugc

SEQ ID NO: 3088994 - RNA, 22 nt, Molluscum contagiosum virus
ggguaguugcgagccagccagg

SEQ ID NO: 3088995 - RNA, 23 nt, Molluscum contagiosum virus
cgaggccaaccuccugcaccugc

SEQ ID NO: 3088996 - RNA, 22 nt, Molluscum contagiosum virus
cccugauguuccgcgugagagc

SEQ ID NO: 3088997 - RNA, 19 nt, Molluscum contagiosum virus
uucguggagcccgugcugg

SEQ ID NO: 3088998 - RNA, 15 nt, Molluscum contagiosum virus
ugcaagcccagcagc

SEQ ID NO: 3088999 - RNA, 19 nt, Molluscum contagiosum virus
ucaacgcgcgcgugcuguc

SEQ ID NO: 3089000 - RNA, 22 nt, Molluscum contagiosum virus
cacaagggcagcucaagcugcu

SEQ ID NO: 3089001 - RNA, 17 nt, Molluscum contagiosum virus
uacuucgucaagcagcg

SEQ ID NO: 3089002 - RNA, 15 nt, Molluscum contagiosum virus
cgcaacacugcagaa

SEQ ID NO: 3089003 - RNA, 13 nt, Molluscum contagiosum virus
aagacaacacucg

SEQ ID NO: 3089004 - RNA, 19 nt, Molluscum contagiosum virus
augcccgcaaugcaagccc

SEQ ID NO: 3089005 - RNA, 16 nt, Molluscum contagiosum virus
gagcgcguccaugagc

SEQ ID NO: 3089006 - RNA, 18 nt, Molluscum contagiosum virus
agccgcguagcuagcucu

SEQ ID NO: 3089007 - RNA, 15 nt, Molluscum contagiosum virus
gaggaacuagugcug

SEQ ID NO: 3089008 - RNA, 17 nt, Molluscum contagiosum virus
cgccgauguccugcgga

SEQ ID NO: 3089009 - RNA, 20 nt, Molluscum contagiosum virus
ccugucaucaccccgcuggg

SEQ ID NO: 3089010 - RNA, 13 nt, Molluscum contagiosum virus
cccgaacugcugg

SEQ ID NO: 3089011 - RNA, 23 nt, Molluscum contagiosum virus
cugggcgguugccugcacaagca

SEQ ID NO: 3089012 - RNA, 23 nt, Molluscum contagiosum virus
ucaccaucaacaucuacaaggag

SEQ ID NO: 3089013 - RNA, 17 nt, Molluscum contagiosum virus
cucggacggaggucugc

SEQ ID NO: 3089014 - RNA, 23 nt, Molluscum contagiosum virus
gacgccccaaaagugaagaucaa

SEQ ID NO: 3089015 - RNA, 18 nt, Molluscum contagiosum virus
cggagaacaugcucgcca

SEQ ID NO: 3089016 - RNA, 16 nt, Molluscum contagiosum virus
cggacaagacaacacu

SEQ ID NO: 3089017 - RNA, 12 nt, Molluscum contagiosum virus
cgagcugccaug

SEQ ID NO: 3089018 - RNA, 16 nt, Molluscum contagiosum virus
ucgcgcgugcgcagca

SEQ ID NO: 3089019 - RNA, 14 nt, Molluscum contagiosum virus
agugcugcugggcg

SEQ ID NO: 3089020 - RNA, 22 nt, Molluscum contagiosum virus
gcgcccaccagcagccaggcua

SEQ ID NO: 3089021 - RNA, 22 nt, Molluscum contagiosum virus
gcuuuuugccgcucacagcuuc

SEQ ID NO: 3089022 - RNA, 19 nt, Molluscum contagiosum virus
acgaacauguccaaggagc

SEQ ID NO: 3089023 - RNA, 18 nt, Molluscum contagiosum virus
agcgcgccucucgaggcc

SEQ ID NO: 3089024 - RNA, 13 nt, Molluscum contagiosum virus
cggcugcugccug

SEQ ID NO: 3089025 - RNA, 21 nt, Molluscum contagiosum virus
gccuggccgaacugcucugcg

SEQ ID NO: 3089026 - RNA, 16 nt, Molluscum contagiosum virus
cguacgagcaggcgca

SEQ ID NO: 3089027 - RNA, 14 nt, Molluscum contagiosum virus
caagcggugcagcu

SEQ ID NO: 3089028 - RNA, 11 nt, Molluscum contagiosum virus
caacuuccaca

SEQ ID NO: 3089029 - RNA, 13 nt, Molluscum contagiosum virus
ugcguuccgggcc

SEQ ID NO: 3089030 - RNA, 17 nt, Molluscum contagiosum virus
acgcuguugcugcugcc

SEQ ID NO: 3089031 - RNA, 15 nt, Molluscum contagiosum virus
gcuccggcugcuccu

SEQ ID NO: 3089032 - RNA, 21 nt, Molluscum contagiosum virus
gugcuggucaacagcuacacc

SEQ ID NO: 3089033 - RNA, 21 nt, Molluscum contagiosum virus
ucguuccacgauggaacggcg

SEQ ID NO: 3089034 - RNA, 17 nt, Molluscum contagiosum virus
ccgagcaauugcugggc

SEQ ID NO: 3089035 - RNA, 14 nt, Molluscum contagiosum virus
cguccccucuccgg

SEQ ID NO: 3089036 - RNA, 17 nt, Molluscum contagiosum virus
cgugcugcccguggugg

SEQ ID NO: 3089037 - RNA, 22 nt, Molluscum contagiosum virus
gcgcacgcgggacgcgugccug

SEQ ID NO: 3089038 - RNA, 11 nt, Molluscum contagiosum virus
gaagcuuucag

SEQ ID NO: 3089039 - RNA, 15 nt, Molluscum contagiosum virus
ccgcgcccucgcucg

SEQ ID NO: 3089040 - RNA, 23 nt, Molluscum contagiosum virus
cuccuacacauuccucggcgcac

SEQ ID NO: 3089041 - RNA, 19 nt, Molluscum contagiosum virus
gacacaaggaucucugccc

SEQ ID NO: 3089042 - RNA, 23 nt, Molluscum contagiosum virus
ugccgcgccuugagcgcgccgcg

SEQ ID NO: 3089043 - RNA, 23 nt, Molluscum contagiosum virus
ccgcuggaccccgagcugcggcg

SEQ ID NO: 3089044 - RNA, 14 nt, Molluscum contagiosum virus
cugugcgagccagu

SEQ ID NO: 3089045 - RNA, 23 nt, Molluscum contagiosum virus
cgagcaggucaucgggcugcagc

SEQ ID NO: 3089046 - RNA, 21 nt, Molluscum contagiosum virus
acaaacacgcgcgcgcgaagg

SEQ ID NO: 3089047 - RNA, 13 nt, Molluscum contagiosum virus
cagccaugugucu

SEQ ID NO: 3089048 - RNA, 15 nt, Molluscum contagiosum virus
cggucucggcagcag

SEQ ID NO: 3089049 - RNA, 23 nt, Molluscum contagiosum virus
cucgagcuuccucaaggcgcacg

SEQ ID NO: 3089050 - RNA, 15 nt, Molluscum contagiosum virus
gccgcgugcucugcu

SEQ ID NO: 3089051 - RNA, 22 nt, Molluscum contagiosum virus
ggcgugcgccgugcgucucucu

SEQ ID NO: 3089052 - RNA, 12 nt, Molluscum contagiosum virus
ccgccugcaugu

SEQ ID NO: 3089053 - RNA, 14 nt, Molluscum contagiosum virus
gcuaccugaagcug

SEQ ID NO: 3089054 - RNA, 17 nt, Molluscum contagiosum virus
cacgggcgggacagaca

SEQ ID NO: 3089055 - RNA, 17 nt, Molluscum contagiosum virus
gaggaacuagugcugcu

SEQ ID NO: 3089056 - RNA, 16 nt, Molluscum contagiosum virus
ugcguggacagcaucc

SEQ ID NO: 3089057 - RNA, 19 nt, Molluscum contagiosum virus
cacgaacgacagcgccgcc

SEQ ID NO: 3089058 - RNA, 23 nt, Molluscum contagiosum virus
aggaacgaggaaaggcacacccc

SEQ ID NO: 3089059 - RNA, 19 nt, Molluscum contagiosum virus
agaucaaccgcaaggaaaa

SEQ ID NO: 3089060 - RNA, 19 nt, Molluscum contagiosum virus
gcgcugcgccgcuuccugg

SEQ ID NO: 3089061 - RNA, 12 nt, Molluscum contagiosum virus
uccuuguccugg

SEQ ID NO: 3089062 - RNA, 18 nt, Molluscum contagiosum virus
uucaugugcgagaacugg

SEQ ID NO: 3089063 - RNA, 14 nt, Molluscum contagiosum virus
cuacuacacugucg

SEQ ID NO: 3089064 - RNA, 17 nt, Molluscum contagiosum virus
aacagagaaaggcaccc

SEQ ID NO: 3089065 - RNA, 21 nt, Molluscum contagiosum virus
ugccgcucgcaagaguucaaa

SEQ ID NO: 3089066 - RNA, 21 nt, Molluscum contagiosum virus
cccgaggucaagggugugggc

SEQ ID NO: 3089067 - RNA, 22 nt, Molluscum contagiosum virus
aaagacgagcugugcgagccag

SEQ ID NO: 3089068 - RNA, 21 nt, Molluscum contagiosum virus
gcccgcgcugcgcaagcgcua

SEQ ID NO: 3089069 - RNA, 14 nt, Molluscum contagiosum virus
gcgagccagccagg

SEQ ID NO: 3089070 - RNA, 22 nt, Molluscum contagiosum virus
gaucuuugcuguggaaaacugu

SEQ ID NO: 3089071 - RNA, 23 nt, Molluscum contagiosum virus
agggcagaacaguaacugcugca

SEQ ID NO: 3089072 - RNA, 14 nt, Molluscum contagiosum virus
gacgagcugcuucg

SEQ ID NO: 3089073 - RNA, 22 nt, Molluscum contagiosum virus
gagcacguuccaaaagacagag

SEQ ID NO: 3089074 - RNA, 13 nt, Molluscum contagiosum virus
acgagcugcugcc

SEQ ID NO: 3089075 - RNA, 13 nt, Molluscum contagiosum virus
cucgccgcacgcg

SEQ ID NO: 3089076 - RNA, 20 nt, Molluscum contagiosum virus
caccugcaggaaaggcaccc

SEQ ID NO: 3089077 - RNA, 12 nt, Molluscum contagiosum virus
cacgacucucaa

SEQ ID NO: 3089078 - RNA, 14 nt, Molluscum contagiosum virus
ucaccaccaccucc

SEQ ID NO: 3089079 - RNA, 18 nt, Molluscum contagiosum virus
ccccgguucccggugcug

SEQ ID NO: 3089080 - RNA, 15 nt, Molluscum contagiosum virus
cgcggagaccaccgc

SEQ ID NO: 3089081 - RNA, 20 nt, Molluscum contagiosum virus
caagcaccgccugcugcagc

SEQ ID NO: 3089082 - RNA, 18 nt, Molluscum contagiosum virus
ggcuuuauuuccggcucc

SEQ ID NO: 3089083 - RNA, 14 nt, Molluscum contagiosum virus
cacuuccgcgcgcu

SEQ ID NO: 3089084 - RNA, 20 nt, Molluscum contagiosum virus
uucucgcagcguuccaggaa

SEQ ID NO: 3089085 - RNA, 15 nt, Molluscum contagiosum virus
cugucgugcaauggc

SEQ ID NO: 3089086 - RNA, 18 nt, Molluscum contagiosum virus
accucgagaagaccuguu

SEQ ID NO: 3089087 - RNA, 17 nt, Molluscum contagiosum virus
gugcgucucccaggaag

SEQ ID NO: 3089088 - RNA, 19 nt, Molluscum contagiosum virus
gaagcaagacccagcaagg

SEQ ID NO: 3089089 - RNA, 19 nt, Molluscum contagiosum virus
cuccggucgcccuccgccg

SEQ ID NO: 3089090 - RNA, 18 nt, Molluscum contagiosum virus
ugaggaggcggcacugcu

SEQ ID NO: 3089091 - RNA, 17 nt, Molluscum contagiosum virus
guuccacuacaagcagc

SEQ ID NO: 3089092 - RNA, 24 nt, Molluscum contagiosum virus
gcagcaccgcacgccagcagcaga

SEQ ID NO: 3089093 - RNA, 23 nt, Molluscum contagiosum virus
acauggacgugcugcuggcccug

SEQ ID NO: 3089094 - RNA, 17 nt, Molluscum contagiosum virus
cgcccgugcuugcgcac

SEQ ID NO: 3089095 - RNA, 19 nt, Molluscum contagiosum virus
gcaccgccugcugcagcuc

SEQ ID NO: 3089096 - RNA, 23 nt, Molluscum contagiosum virus
ucaugagccagucucgcgcuucc

SEQ ID NO: 3089097 - RNA, 17 nt, Molluscum contagiosum virus
cagcgagcucaaggaca

SEQ ID NO: 3089098 - RNA, 22 nt, Molluscum contagiosum virus
cccaccagcagccaggcuaggc

SEQ ID NO: 3089099 - RNA, 19 nt, Molluscum contagiosum virus
cgcggcccgcgggcugcaa

SEQ ID NO: 3089100 - RNA, 12 nt, Molluscum contagiosum virus
cgugacggugcu

SEQ ID NO: 3089101 - RNA, 16 nt, Molluscum contagiosum virus
cgcauuggcagcgcuu

SEQ ID NO: 3089102 - RNA, 14 nt, Molluscum contagiosum virus
gaggucuagccgug

SEQ ID NO: 3089103 - RNA, 18 nt, Molluscum contagiosum virus
agaaggagcccuugccac

SEQ ID NO: 3089104 - RNA, 19 nt, Molluscum contagiosum virus
gaacgcgccgcggaugucc

SEQ ID NO: 3089105 - RNA, 23 nt, Molluscum contagiosum virus
ccuagagcuggcaccgggcgccg

SEQ ID NO: 3089106 - RNA, 15 nt, Molluscum contagiosum virus
gccuguaccugcucg

SEQ ID NO: 3089107 - RNA, 22 nt, Molluscum contagiosum virus
cccucgagcaaugcgagcaagg

SEQ ID NO: 3089108 - RNA, 17 nt, Molluscum contagiosum virus
cugcugcggcugcugga

SEQ ID NO: 3089109 - RNA, 22 nt, Molluscum contagiosum virus
gcuugcuucggcggcugugccc

SEQ ID NO: 3089110 - RNA, 21 nt, Molluscum contagiosum virus
cucgcugcugcucuuccagga

SEQ ID NO: 3089111 - RNA, 20 nt, Molluscum contagiosum virus
ggccacgcacucgcuggccu

SEQ ID NO: 3089112 - RNA, 14 nt, Molluscum contagiosum virus
acgccgcuggagca

SEQ ID NO: 3089113 - RNA, 21 nt, Molluscum contagiosum virus
cucguguguccgcacgcacac

SEQ ID NO: 3089114 - RNA, 20 nt, Molluscum contagiosum virus
acgucuuccccaagaccugc

SEQ ID NO: 3089115 - RNA, 22 nt, Molluscum contagiosum virus
cgcgaaagaggaaagcgcacac

SEQ ID NO: 3089116 - RNA, 12 nt, Molluscum contagiosum virus
gcuaugcuuugc

SEQ ID NO: 3089117 - RNA, 18 nt, Molluscum contagiosum virus
ccaacacguuuucuuuca

SEQ ID NO: 3089118 - RNA, 16 nt, Molluscum contagiosum virus
cuuaacucagcgggca

SEQ ID NO: 3089119 - RNA, 16 nt, Molluscum contagiosum virus
ugcuacgcgagcacug

SEQ ID NO: 3089120 - RNA, 20 nt, Molluscum contagiosum virus
cgcgaccuacuccuggccaa

SEQ ID NO: 3089121 - RNA, 19 nt, Molluscum contagiosum virus
gcagaccaagaagcccgag

SEQ ID NO: 3089122 - RNA, 23 nt, Molluscum contagiosum virus
caagcacgcaacgucgcacuggc

SEQ ID NO: 3089123 - RNA, 20 nt, Molluscum contagiosum virus
acuaccgcaaccagcugcug

SEQ ID NO: 3089124 - RNA, 16 nt, Molluscum contagiosum virus
cacaaagcccuccuga

SEQ ID NO: 3089125 - RNA, 11 nt, Molluscum contagiosum virus
ugcgcgccgcg

SEQ ID NO: 3089126 - RNA, 19 nt, Molluscum contagiosum virus
agucacacuacgcuggcuc

SEQ ID NO: 3089127 - RNA, 17 nt, Molluscum contagiosum virus
gcgcuuguagccgcgac

SEQ ID NO: 3089128 - RNA, 14 nt, Molluscum contagiosum virus
guuacggagaccug

SEQ ID NO: 3089129 - RNA, 23 nt, Molluscum contagiosum virus
ugcgcaccgcgggcuggacugug

SEQ ID NO: 3089130 - RNA, 16 nt, Molluscum contagiosum virus
cucaagcacugccuca

SEQ ID NO: 3089131 - RNA, 21 nt, Molluscum contagiosum virus
cacgcucauacuccugcuggc

SEQ ID NO: 3089132 - RNA, 14 nt, Molluscum contagiosum virus
ucacugcagcagcc

SEQ ID NO: 3089133 - RNA, 22 nt, Molluscum contagiosum virus
aggcgcggucgcccgccgagcu

SEQ ID NO: 3089134 - RNA, 16 nt, Molluscum contagiosum virus
acuugcgcgccuguca

SEQ ID NO: 3089135 - RNA, 22 nt, Molluscum contagiosum virus
acaacuccggcgucgaaacacu

SEQ ID NO: 3089136 - RNA, 11 nt, Molluscum contagiosum virus
uugcacgugcg

SEQ ID NO: 3089137 - RNA, 18 nt, Molluscum contagiosum virus
uggaggcgcuagugcaga

SEQ ID NO: 3089138 - RNA, 20 nt, Molluscum contagiosum virus
ggccugcugaagaaggagcc

SEQ ID NO: 3089139 - RNA, 21 nt, Molluscum contagiosum virus
ccgcgcuggcgcgcgcgcugc

SEQ ID NO: 3089140 - RNA, 20 nt, Molluscum contagiosum virus
cgccagcgacgagcagcugc

SEQ ID NO: 3089141 - RNA, 23 nt, Molluscum contagiosum virus
ucgcgaucugcgugacccucuuc

SEQ ID NO: 3089142 - RNA, 17 nt, Molluscum contagiosum virus
agccuuuuggcggcgca

SEQ ID NO: 3089143 - RNA, 14 nt, Molluscum contagiosum virus
cggccgugcagagc

SEQ ID NO: 3089144 - RNA, 14 nt, Molluscum contagiosum virus
cgagcgccagccug

SEQ ID NO: 3089145 - RNA, 15 nt, Molluscum contagiosum virus
gccagcuccgcgcgg

SEQ ID NO: 3089146 - RNA, 12 nt, Molluscum contagiosum virus
accgggcucucg

SEQ ID NO: 3089147 - RNA, 22 nt, Molluscum contagiosum virus
ucgccagcaucaagggcaaggg

SEQ ID NO: 3089148 - RNA, 22 nt, Molluscum contagiosum virus
uguucccggcugccgcugccug

SEQ ID NO: 3089149 - RNA, 17 nt, Molluscum contagiosum virus
cggcgcgugcugagcua

SEQ ID NO: 3089150 - RNA, 21 nt, Molluscum contagiosum virus
gacccgccggugcuugggcuc

SEQ ID NO: 3089151 - RNA, 20 nt, Molluscum contagiosum virus
gacgcugcaagacggaagac

SEQ ID NO: 3089152 - RNA, 13 nt, Molluscum contagiosum virus
cucgggcugcgcg

SEQ ID NO: 3089153 - RNA, 17 nt, Molluscum contagiosum virus
gcgcuguauucggcgua

SEQ ID NO: 3089154 - RNA, 15 nt, Molluscum contagiosum virus
ggcgcguugcucccg

SEQ ID NO: 3089155 - RNA, 16 nt, Molluscum contagiosum virus
ugaaaauaaagaggcu

SEQ ID NO: 3089156 - RNA, 21 nt, Molluscum contagiosum virus
cgcguccgcaucggcgccgcc

SEQ ID NO: 3089157 - RNA, 17 nt, Molluscum contagiosum virus
cuggcgcgguccagccg

SEQ ID NO: 3089158 - RNA, 14 nt, Molluscum contagiosum virus
gaggacuaccuggc

SEQ ID NO: 3089159 - RNA, 12 nt, Molluscum contagiosum virus
uccggcagcugg

SEQ ID NO: 3089160 - RNA, 12 nt, Molluscum contagiosum virus
acagagcccgcg

SEQ ID NO: 3089161 - RNA, 16 nt, Molluscum contagiosum virus
gcacgcgcgggcgcag

SEQ ID NO: 3089162 - RNA, 15 nt, Molluscum contagiosum virus
agcugugcaagagcu

SEQ ID NO: 3089163 - RNA, 13 nt, Molluscum contagiosum virus
cugagcgcgcugc

SEQ ID NO: 3089164 - RNA, 14 nt, Molluscum contagiosum virus
cggccgcguugcag

SEQ ID NO: 3089165 - RNA, 20 nt, Molluscum contagiosum virus
uccgcacuuuaaaaggccgg

SEQ ID NO: 3089166 - RNA, 14 nt, Molluscum contagiosum virus
ucggcguuggccac

SEQ ID NO: 3089167 - RNA, 23 nt, Molluscum contagiosum virus
gugggugaggagcucgacucgag

SEQ ID NO: 3089168 - RNA, 20 nt, Molluscum contagiosum virus
gcgcucuacgagacucugga

SEQ ID NO: 3089169 - RNA, 13 nt, Molluscum contagiosum virus
cacccgcgccgcg

SEQ ID NO: 3089170 - RNA, 20 nt, Molluscum contagiosum virus
ggagcguccacgacgagccu

SEQ ID NO: 3089171 - RNA, 17 nt, Molluscum contagiosum virus
ccgcaggaaaggcaccc

SEQ ID NO: 3089172 - RNA, 22 nt, Molluscum contagiosum virus
ugcgcuuagaccuuuacgucgc

SEQ ID NO: 3089173 - RNA, 23 nt, Molluscum contagiosum virus
aguucucgggcucgggcaggucg

SEQ ID NO: 3089174 - RNA, 14 nt, Molluscum contagiosum virus
cgcggaugcgaccg

SEQ ID NO: 3089175 - RNA, 18 nt, Molluscum contagiosum virus
caugcucucgcugcugcc

SEQ ID NO: 3089176 - RNA, 21 nt, Molluscum contagiosum virus
acuacauggacgugcugcugg

SEQ ID NO: 3089177 - RNA, 17 nt, Molluscum contagiosum virus
cuggcgcgugcgagcag

SEQ ID NO: 3089178 - RNA, 17 nt, Molluscum contagiosum virus
cuucgucaagcagcgcg

SEQ ID NO: 3089179 - RNA, 16 nt, Molluscum contagiosum virus
cugcaccgagugcugg

SEQ ID NO: 3089180 - RNA, 13 nt, Molluscum contagiosum virus
cuccugagaagca

SEQ ID NO: 3089181 - RNA, 10 nt, Molluscum contagiosum virus
gccugcacug

SEQ ID NO: 3089182 - RNA, 14 nt, Molluscum contagiosum virus
acacgucuugcaga

SEQ ID NO: 3089183 - RNA, 18 nt, Molluscum contagiosum virus
cucuuccccgcgggccgc

SEQ ID NO: 3089184 - RNA, 15 nt, Molluscum contagiosum virus
ccaguaccugcugcc

SEQ ID NO: 3089185 - RNA, 16 nt, Molluscum contagiosum virus
cugcauacacuuccug

SEQ ID NO: 3089186 - RNA, 21 nt, Molluscum contagiosum virus
ggcacggcacccgccagcuuu

SEQ ID NO: 3089187 - RNA, 23 nt, Molluscum contagiosum virus
ccauggcgagcuagugcacaccg

SEQ ID NO: 3089188 - RNA, 18 nt, Molluscum contagiosum virus
cuggcgagcgcucugcau

SEQ ID NO: 3089189 - RNA, 16 nt, Molluscum contagiosum virus
ggcgcgcagcucgccg

SEQ ID NO: 3089190 - RNA, 13 nt, Molluscum contagiosum virus
gacagcuugcugc

SEQ ID NO: 3089191 - RNA, 15 nt, Molluscum contagiosum virus
ugcgcagcauccucg

SEQ ID NO: 3089192 - RNA, 20 nt, Molluscum contagiosum virus
cgaggccugcguggacagca

SEQ ID NO: 3089193 - RNA, 23 nt, Molluscum contagiosum virus
ggcccuuuucuaggccucagccg

SEQ ID NO: 3089194 - RNA, 20 nt, Molluscum contagiosum virus
uggaacggcgacuuguagug

SEQ ID NO: 3089195 - RNA, 24 nt, Molluscum contagiosum virus
ccgcaguaccaguaccugcugccg

SEQ ID NO: 3089196 - RNA, 16 nt, Molluscum contagiosum virus
gacgcucaacgugggc

SEQ ID NO: 3089197 - RNA, 13 nt, Molluscum contagiosum virus
cgcgcgugcaguu

SEQ ID NO: 3089198 - RNA, 20 nt, Molluscum contagiosum virus
gacuaccuggcggcgcugga

SEQ ID NO: 3089199 - RNA, 18 nt, Molluscum contagiosum virus
gcagcugccgcagagccg

SEQ ID NO: 3089200 - RNA, 17 nt, Molluscum contagiosum virus
cccaggcgcgcgcucag

SEQ ID NO: 3089201 - RNA, 16 nt, Molluscum contagiosum virus
cacacacuugcucucu

SEQ ID NO: 3089202 - RNA, 21 nt, Molluscum contagiosum virus
ccgcgcccaagaagaagcagc

SEQ ID NO: 3089203 - RNA, 21 nt, Molluscum contagiosum virus
agcggugcagcuacugcgugc

SEQ ID NO: 3089204 - RNA, 19 nt, Molluscum contagiosum virus
gccgggcgucuccgcgcgg

SEQ ID NO: 3089205 - RNA, 23 nt, Molluscum contagiosum virus
agggcguccguaagucgaagagg

SEQ ID NO: 3089206 - RNA, 13 nt, Molluscum contagiosum virus
gagcugcagagcg

SEQ ID NO: 3089207 - RNA, 15 nt, Molluscum contagiosum virus
cugcuggcggggaaa

SEQ ID NO: 3089208 - RNA, 14 nt, Molluscum contagiosum virus
auacacuuccugcu

SEQ ID NO: 3089209 - RNA, 21 nt, Molluscum contagiosum virus
ggcgccgacaacgugcugcuc

SEQ ID NO: 3089210 - RNA, 18 nt, Molluscum contagiosum virus
cuaccuggugcuggggcu

SEQ ID NO: 3089211 - RNA, 19 nt, Molluscum contagiosum virus
gauucacuuucgucgccuc

SEQ ID NO: 3089212 - RNA, 14 nt, Molluscum contagiosum virus
ggcaugggcaagga

SEQ ID NO: 3089213 - RNA, 13 nt, Molluscum contagiosum virus
gagccagccaggc

SEQ ID NO: 3089214 - RNA, 13 nt, Molluscum contagiosum virus
cgcaggccaggug

SEQ ID NO: 3089215 - RNA, 19 nt, Molluscum contagiosum virus
cggagagcuccggcugcuc

SEQ ID NO: 3089216 - RNA, 15 nt, Molluscum contagiosum virus
cgcacaagggcagcu

SEQ ID NO: 3089217 - RNA, 18 nt, Molluscum contagiosum virus
ugcggaugugcuagcugc

SEQ ID NO: 3089218 - RNA, 20 nt, Molluscum contagiosum virus
gacuccaucugcgcgacgcc

SEQ ID NO: 3089219 - RNA, 14 nt, Molluscum contagiosum virus
cugcuggagcuagc

SEQ ID NO: 3089220 - RNA, 18 nt, Molluscum contagiosum virus
ugcaggucgaggagggcg

SEQ ID NO: 3089221 - RNA, 20 nt, Molluscum contagiosum virus
ccggcccgacacacuccugu

SEQ ID NO: 3089222 - RNA, 20 nt, Molluscum contagiosum virus
uccgcucgugccacugccgc

SEQ ID NO: 3089223 - RNA, 16 nt, Molluscum contagiosum virus
cucuucggggacggcg

SEQ ID NO: 3089224 - RNA, 12 nt, Molluscum contagiosum virus
gaccagcucuug

SEQ ID NO: 3089225 - RNA, 22 nt, Molluscum contagiosum virus
cccuuucgcggauucccauucc

SEQ ID NO: 3089226 - RNA, 14 nt, Molluscum contagiosum virus
ccagcuccgccggg

SEQ ID NO: 3089227 - RNA, 15 nt, Molluscum contagiosum virus
guucuggacgugucc

SEQ ID NO: 3089228 - RNA, 16 nt, Molluscum contagiosum virus
ucuacgagacucugga

SEQ ID NO: 3089229 - RNA, 13 nt, Molluscum contagiosum virus
auagugggcuugc

SEQ ID NO: 3089230 - RNA, 20 nt, Molluscum contagiosum virus
cgacuagcgugcgcagcauu

SEQ ID NO: 3089231 - RNA, 17 nt, Molluscum contagiosum virus
gaagcccgucggggcag

SEQ ID NO: 3089232 - RNA, 18 nt, Molluscum contagiosum virus
cgugacggugcugcgcac

SEQ ID NO: 3089233 - RNA, 22 nt, Molluscum contagiosum virus
ugaggcagugcuugagcaucuc

SEQ ID NO: 3089234 - RNA, 18 nt, Molluscum contagiosum virus
gcucgcacccgcgccgcg

SEQ ID NO: 3089235 - RNA, 22 nt, Molluscum contagiosum virus
ugcucaaggacuaccagcucuu

SEQ ID NO: 3089236 - RNA, 17 nt, Molluscum contagiosum virus
cucacucacaugugcug

SEQ ID NO: 3089237 - RNA, 18 nt, Molluscum contagiosum virus
cgcggcacaugcagcugc

SEQ ID NO: 3089238 - RNA, 15 nt, Molluscum contagiosum virus
cacuucggacaccuc

SEQ ID NO: 3089239 - RNA, 16 nt, Molluscum contagiosum virus
acagccccugcugcuc

SEQ ID NO: 3089240 - RNA, 17 nt, Molluscum contagiosum virus
cgcugcgccgcuuccug

SEQ ID NO: 3089241 - RNA, 23 nt, Molluscum contagiosum virus
guugccaguagcgaaugcagugc

SEQ ID NO: 3089242 - RNA, 20 nt, Molluscum contagiosum virus
gcaccucaacuguugccugg

SEQ ID NO: 3089243 - RNA, 17 nt, Molluscum contagiosum virus
ucucgggugugugccug

SEQ ID NO: 3089244 - RNA, 15 nt, Molluscum contagiosum virus
ugcccggacagagcc

SEQ ID NO: 3089245 - RNA, 18 nt, Molluscum contagiosum virus
aguguugucguccuuggc

SEQ ID NO: 3089246 - RNA, 19 nt, Molluscum contagiosum virus
ucuucguggcgcugggcgc

SEQ ID NO: 3089247 - RNA, 21 nt, Molluscum contagiosum virus
cugcugcccgcgcagcgccac

SEQ ID NO: 3089248 - RNA, 23 nt, Molluscum contagiosum virus
cgcagcacaaacucgcagaacug

SEQ ID NO: 3089249 - RNA, 11 nt, Molluscum contagiosum virus
aagcagcucgg

SEQ ID NO: 3089250 - RNA, 13 nt, Molluscum contagiosum virus
ggaaggagcuggg

SEQ ID NO: 3089251 - RNA, 17 nt, Molluscum contagiosum virus
gggcccugugccucuug

SEQ ID NO: 3089252 - RNA, 17 nt, Molluscum contagiosum virus
acucaacaagcugcugg

SEQ ID NO: 3089253 - RNA, 15 nt, Molluscum contagiosum virus
cccgaacugcugggc

SEQ ID NO: 3089254 - RNA, 13 nt, Molluscum contagiosum virus
ggauggccacggg

SEQ ID NO: 3089255 - RNA, 20 nt, Molluscum contagiosum virus
ugcaggccccuacacgcaac

SEQ ID NO: 3089256 - RNA, 21 nt, Molluscum contagiosum virus
gauccuccggaugaacagcuu

SEQ ID NO: 3089257 - RNA, 20 nt, Molluscum contagiosum virus
agcuccgcgcaugccagacc

SEQ ID NO: 3089258 - RNA, 14 nt, Molluscum contagiosum virus
gcucgagcuccgag

SEQ ID NO: 3089259 - RNA, 15 nt, Molluscum contagiosum virus
ucucagggugguuug

SEQ ID NO: 3089260 - RNA, 20 nt, Molluscum contagiosum virus
acaagauggcgcagcacuuc

SEQ ID NO: 3089261 - RNA, 12 nt, Molluscum contagiosum virus
acccugauaugc

SEQ ID NO: 3089262 - RNA, 16 nt, Molluscum contagiosum virus
caccgcaugggcccug

SEQ ID NO: 3089263 - RNA, 17 nt, Molluscum contagiosum virus
gagccuuuuggcggcgc

SEQ ID NO: 3089264 - RNA, 15 nt, Molluscum contagiosum virus
ccugggcaggccgcc

SEQ ID NO: 3089265 - RNA, 19 nt, Molluscum contagiosum virus
cauagcccaugcgcagugc

SEQ ID NO: 3089266 - RNA, 23 nt, Molluscum contagiosum virus
cuugaaggacgcguucuccagga

SEQ ID NO: 3089267 - RNA, 18 nt, Molluscum contagiosum virus
gccaugccaacgcaccgg

SEQ ID NO: 3089268 - RNA, 18 nt, Molluscum contagiosum virus
ggugagugcgcgcacgaa

SEQ ID NO: 3089269 - RNA, 19 nt, Molluscum contagiosum virus
cucgaagccuucgcagaga

SEQ ID NO: 3089270 - RNA, 16 nt, Molluscum contagiosum virus
uccaggaucacgaugu

SEQ ID NO: 3089271 - RNA, 19 nt, Molluscum contagiosum virus
accgcgcgcacgcggcgcu

SEQ ID NO: 3089272 - RNA, 23 nt, Molluscum contagiosum virus
ggcuccgaaccccucgugcuggg

SEQ ID NO: 3089273 - RNA, 15 nt, Molluscum contagiosum virus
acuacgcgcugcuag

SEQ ID NO: 3089274 - RNA, 14 nt, Molluscum contagiosum virus
acugcuacgucgcg

SEQ ID NO: 3089275 - RNA, 22 nt, Molluscum contagiosum virus
gagacuugugcccauguccuuu

SEQ ID NO: 3089276 - RNA, 16 nt, Molluscum contagiosum virus
cgaucgcgcucaggac

SEQ ID NO: 3089277 - RNA, 16 nt, Molluscum contagiosum virus
cucagcgggcagacag

SEQ ID NO: 3089278 - RNA, 21 nt, Molluscum contagiosum virus
cgagacuucuccgaccgugcc

SEQ ID NO: 3089279 - RNA, 14 nt, Molluscum contagiosum virus
guucugaauaaucu

SEQ ID NO: 3089280 - RNA, 19 nt, Molluscum contagiosum virus
ucguucgcgggcccgccuu

SEQ ID NO: 3089281 - RNA, 19 nt, Molluscum contagiosum virus
ccucgcgagggcucguccu

SEQ ID NO: 3089282 - RNA, 19 nt, Molluscum contagiosum virus
cuccacgcugcguucgagc

SEQ ID NO: 3089283 - RNA, 15 nt, Molluscum contagiosum virus
cauacuccugcuggc

SEQ ID NO: 3089284 - RNA, 22 nt, Molluscum contagiosum virus
acacagaaguugccgcaggaac

SEQ ID NO: 3089285 - RNA, 14 nt, Molluscum contagiosum virus
gcuccgcggaggcc

SEQ ID NO: 3089286 - RNA, 16 nt, Molluscum contagiosum virus
gaggagugaagggugu

SEQ ID NO: 3089287 - RNA, 13 nt, Molluscum contagiosum virus
ccccgccagcacc

SEQ ID NO: 3089288 - RNA, 18 nt, Molluscum contagiosum virus
gccacucuccuucagugu

SEQ ID NO: 3089289 - RNA, 12 nt, Molluscum contagiosum virus
agaagaggccag

SEQ ID NO: 3089290 - RNA, 17 nt, Molluscum contagiosum virus
ucuucguggcgcugggc

SEQ ID NO: 3089291 - RNA, 14 nt, Molluscum contagiosum virus
ggggagggcggcaa

SEQ ID NO: 3089292 - RNA, 18 nt, Molluscum contagiosum virus
cacccgcaacaaggaaag

SEQ ID NO: 3089293 - RNA, 23 nt, Molluscum contagiosum virus
caaggugcuguccuucugguucc

SEQ ID NO: 3089294 - RNA, 19 nt, Molluscum contagiosum virus
ggcaguggcgugacagguc

SEQ ID NO: 3089295 - RNA, 20 nt, Molluscum contagiosum virus
ggcuccuacaucgacaagca

SEQ ID NO: 3089296 - RNA, 19 nt, Molluscum contagiosum virus
gccggccccgcgaacgaga

SEQ ID NO: 3089297 - RNA, 22 nt, Molluscum contagiosum virus
cgcagcaaagggcggccgcagc

SEQ ID NO: 3089298 - RNA, 16 nt, Molluscum contagiosum virus
ccaaccuccugcaccu

SEQ ID NO: 3089299 - RNA, 14 nt, Molluscum contagiosum virus
cucggacuuggccc

SEQ ID NO: 3089300 - RNA, 16 nt, Molluscum contagiosum virus
ucagcgggcagacagg

SEQ ID NO: 3089301 - RNA, 14 nt, Molluscum contagiosum virus
gcauuaaacaacac

SEQ ID NO: 3089302 - RNA, 21 nt, Molluscum contagiosum virus
gaaagauauacaccaggcgcg

SEQ ID NO: 3089303 - RNA, 19 nt, Molluscum contagiosum virus
cgacggucacgcaagcuuu

SEQ ID NO: 3089304 - RNA, 17 nt, Molluscum contagiosum virus
ucgcgcgcgcucugccg

SEQ ID NO: 3089305 - RNA, 23 nt, Molluscum contagiosum virus
uguaaugugcuggucaagaacau

SEQ ID NO: 3089306 - RNA, 13 nt, Molluscum contagiosum virus
cucacagccgugg

SEQ ID NO: 3089307 - RNA, 21 nt, Molluscum contagiosum virus
agcgccggcgaccagcucuug

SEQ ID NO: 3089308 - RNA, 15 nt, Molluscum contagiosum virus
gcaaccgcgcccgcg

SEQ ID NO: 3089309 - RNA, 21 nt, Molluscum contagiosum virus
gcccgugcccgaguuugcccg

SEQ ID NO: 3089310 - RNA, 18 nt, Molluscum contagiosum virus
gacaugcacacgcaccgc

SEQ ID NO: 3089311 - RNA, 18 nt, Molluscum contagiosum virus
ggcguccggcgcucgccc

SEQ ID NO: 3089312 - RNA, 21 nt, Molluscum contagiosum virus
cgggaauaccggagacaccag

SEQ ID NO: 3089313 - RNA, 15 nt, Molluscum contagiosum virus
aaacugugcuccuga

SEQ ID NO: 3089314 - RNA, 15 nt, Molluscum contagiosum virus
ucaaauauugugcau

SEQ ID NO: 3089315 - RNA, 17 nt, Molluscum contagiosum virus
cucccucgcgcgcaugu

SEQ ID NO: 3089316 - RNA, 14 nt, Molluscum contagiosum virus
gccgccggugcgug

SEQ ID NO: 3089317 - RNA, 21 nt, Molluscum contagiosum virus
ccgaguacuacuacacugucg

SEQ ID NO: 3089318 - RNA, 18 nt, Molluscum contagiosum virus
ugcgcaggagcagucucu

SEQ ID NO: 3089319 - RNA, 17 nt, Molluscum contagiosum virus
ugccgcgagcacuggcu

SEQ ID NO: 3089320 - RNA, 17 nt, Molluscum contagiosum virus
uccaagaagaggccagc

SEQ ID NO: 3089321 - RNA, 13 nt, Molluscum contagiosum virus
ugugcuacugcac

SEQ ID NO: 3089322 - RNA, 15 nt, Molluscum contagiosum virus
cagacuuucugcagu

SEQ ID NO: 3089323 - RNA, 21 nt, Molluscum contagiosum virus
gagggcgaguccccgagcagc

SEQ ID NO: 3089324 - RNA, 15 nt, Molluscum contagiosum virus
guaguacggcacgga

SEQ ID NO: 3089325 - RNA, 18 nt, Molluscum contagiosum virus
agcggcuuuucgccggag

SEQ ID NO: 3089326 - RNA, 16 nt, Molluscum contagiosum virus
cgagcaggcgcagcgc

SEQ ID NO: 3089327 - RNA, 23 nt, Molluscum contagiosum virus
acuucacggcguucaccuuggcg

SEQ ID NO: 3089328 - RNA, 14 nt, Molluscum contagiosum virus
ggugaaaauccagg

SEQ ID NO: 3089329 - RNA, 21 nt, Molluscum contagiosum virus
uaccugcgacagcugcugcuc

SEQ ID NO: 3089330 - RNA, 20 nt, Molluscum contagiosum virus
cuuccgcggcgugcagggcg

SEQ ID NO: 3089331 - RNA, 14 nt, Molluscum contagiosum virus
gcacgagcugcugc

SEQ ID NO: 3089332 - RNA, 14 nt, Molluscum contagiosum virus
gaaaggcacccgca

SEQ ID NO: 3089333 - RNA, 22 nt, Molluscum contagiosum virus
acgccgcguucuucguggcgcu

SEQ ID NO: 3089334 - RNA, 21 nt, Molluscum contagiosum virus
agagacgcugccggcaacgcu

SEQ ID NO: 3089335 - RNA, 18 nt, Molluscum contagiosum virus
acguccccgaacugcugg

SEQ ID NO: 3089336 - RNA, 20 nt, Molluscum contagiosum virus
ccucgugggauaggcacaca

SEQ ID NO: 3089337 - RNA, 16 nt, Molluscum contagiosum virus
cgcacagucuugcgca

SEQ ID NO: 3089338 - RNA, 15 nt, Molluscum contagiosum virus
agacaccagcuccgc

SEQ ID NO: 3089339 - RNA, 21 nt, Molluscum contagiosum virus
ggccguucgcgcgccaguacg

SEQ ID NO: 3089340 - RNA, 21 nt, Molluscum contagiosum virus
ucagagaaaucccaagagcca

SEQ ID NO: 3089341 - RNA, 11 nt, Molluscum contagiosum virus
gaaaacugcau

SEQ ID NO: 3089342 - RNA, 21 nt, Molluscum contagiosum virus
gccgagcgggcaaugggcacg

SEQ ID NO: 3089343 - RNA, 12 nt, Molluscum contagiosum virus
uugcgaggcacc

SEQ ID NO: 3089344 - RNA, 23 nt, Molluscum contagiosum virus
aagcgccggcgaccagcucuugg

SEQ ID NO: 3089345 - RNA, 17 nt, Molluscum contagiosum virus
gcgcuguaccggcucag

SEQ ID NO: 3089346 - RNA, 12 nt, Molluscum contagiosum virus
cgucgucaagga

SEQ ID NO: 3089347 - RNA, 15 nt, Molluscum contagiosum virus
gagagcgugagcagg

SEQ ID NO: 3089348 - RNA, 14 nt, Molluscum contagiosum virus
gcgcacggcuaggc

SEQ ID NO: 3089349 - RNA, 20 nt, Molluscum contagiosum virus
gcugcgucacaagcaccgcc

SEQ ID NO: 3089350 - RNA, 14 nt, Molluscum contagiosum virus
cccucgucgcgcuu

SEQ ID NO: 3089351 - RNA, 17 nt, Molluscum contagiosum virus
cuucaccugcauugagc

SEQ ID NO: 3089352 - RNA, 13 nt, Molluscum contagiosum virus
agagaaaggcacc

SEQ ID NO: 3089353 - RNA, 19 nt, Molluscum contagiosum virus
ggagucacgaccgacccau

SEQ ID NO: 3089354 - RNA, 23 nt, Molluscum contagiosum virus
cgaagccuucgcagagaccguca

SEQ ID NO: 3089355 - RNA, 20 nt, Molluscum contagiosum virus
augcggcguacgcgcaggga

SEQ ID NO: 3089356 - RNA, 20 nt, Molluscum contagiosum virus
ggcacgggaaggcucucaac

SEQ ID NO: 3089357 - RNA, 22 nt, Molluscum contagiosum virus
guccacgaacgacagcgccgcc

SEQ ID NO: 3089358 - RNA, 13 nt, Molluscum contagiosum virus
ccaccagcagcca

SEQ ID NO: 3089359 - RNA, 21 nt, Molluscum contagiosum virus
gacuacaccuggcgagcgcuc

SEQ ID NO: 3089360 - RNA, 14 nt, Molluscum contagiosum virus
ggccuugggcacuu

SEQ ID NO: 3089361 - RNA, 14 nt, Molluscum contagiosum virus
cucgucgcugcgga

SEQ ID NO: 3089362 - RNA, 22 nt, Molluscum contagiosum virus
cgcacugccacgcggagcucgc

SEQ ID NO: 3089363 - RNA, 14 nt, Molluscum contagiosum virus
caggccgcggcagc

SEQ ID NO: 3089364 - RNA, 13 nt, Molluscum contagiosum virus
cgcgccgggccgc

SEQ ID NO: 3089365 - RNA, 13 nt, Molluscum contagiosum virus
gcguccgcgcagc

SEQ ID NO: 3089366 - RNA, 16 nt, Molluscum contagiosum virus
ggcgccuguuuccgcu

SEQ ID NO: 3089367 - RNA, 18 nt, Molluscum contagiosum virus
gcgggacgcgugccuggc

SEQ ID NO: 3089368 - RNA, 13 nt, Molluscum contagiosum virus
ugcaggaaaggca

SEQ ID NO: 3089369 - RNA, 22 nt, Molluscum contagiosum virus
uggccaaggucucgagcuccag

SEQ ID NO: 3089370 - RNA, 22 nt, Molluscum contagiosum virus
gcaaaagcgcucgcggcucggc

SEQ ID NO: 3089371 - RNA, 20 nt, Molluscum contagiosum virus
ggcguaugcgccaagccugc

SEQ ID NO: 3089372 - RNA, 22 nt, Molluscum contagiosum virus
acuucacggcguucaccuuggc

SEQ ID NO: 3089373 - RNA, 17 nt, Molluscum contagiosum virus
cucucggccauggaggc

SEQ ID NO: 3089374 - RNA, 17 nt, Molluscum contagiosum virus
ccgggaaaaucaggucc

SEQ ID NO: 3089375 - RNA, 13 nt, Molluscum contagiosum virus
cgugcagcggcgc

SEQ ID NO: 3089376 - RNA, 17 nt, Molluscum contagiosum virus
agcaccgcaugggcccu

SEQ ID NO: 3089377 - RNA, 13 nt, Molluscum contagiosum virus
ccgcgcugcuccg

SEQ ID NO: 3089378 - RNA, 23 nt, Molluscum contagiosum virus
accccgagcuggugauccuggau

SEQ ID NO: 3089379 - RNA, 23 nt, Molluscum contagiosum virus
ggcaaagaguugcgcgagaacuc

SEQ ID NO: 3089380 - RNA, 14 nt, Molluscum contagiosum virus
gacgcccggugccu

SEQ ID NO: 3089381 - RNA, 18 nt, Molluscum contagiosum virus
cucgagcgcgcgccugcu

SEQ ID NO: 3089382 - RNA, 21 nt, Molluscum contagiosum virus
uugcucggggcugucgcugga

SEQ ID NO: 3089383 - RNA, 16 nt, Molluscum contagiosum virus
cccguccuugcucugg

SEQ ID NO: 3089384 - RNA, 15 nt, Molluscum contagiosum virus
ggccugcugaagaag

SEQ ID NO: 3089385 - RNA, 19 nt, Molluscum contagiosum virus
aucucgccggcuguaaaug

SEQ ID NO: 3089386 - RNA, 16 nt, Molluscum contagiosum virus
ccgcggcgcgcagcuc

SEQ ID NO: 3089387 - RNA, 17 nt, Molluscum contagiosum virus
gaacgauuuuacgcaca

SEQ ID NO: 3089388 - RNA, 21 nt, Molluscum contagiosum virus
cguuucugccggaguaaauga

SEQ ID NO: 3089389 - RNA, 13 nt, Molluscum contagiosum virus
ggccacgcucgcg

SEQ ID NO: 3089390 - RNA, 13 nt, Molluscum contagiosum virus
guugccaggcaca

SEQ ID NO: 3089391 - RNA, 23 nt, Molluscum contagiosum virus
gcacgcgaugagcgucucggugc

SEQ ID NO: 3089392 - RNA, 17 nt, Molluscum contagiosum virus
cccgcggcgugcccguc

SEQ ID NO: 3089393 - RNA, 18 nt, Molluscum contagiosum virus
ggcgcuugggcacugcua

SEQ ID NO: 3089394 - RNA, 22 nt, Molluscum contagiosum virus
acugggcuucaaguuccuggag

SEQ ID NO: 3089395 - RNA, 15 nt, Molluscum contagiosum virus
gcuggugugcacuga

SEQ ID NO: 3089396 - RNA, 20 nt, Molluscum contagiosum virus
ucuuccccgcgggccgccgc

SEQ ID NO: 3089397 - RNA, 21 nt, Molluscum contagiosum virus
gcgagaccaucccggugauga

SEQ ID NO: 3089398 - RNA, 21 nt, Molluscum contagiosum virus
cccgcgcaagagccgccgggg

SEQ ID NO: 3089399 - RNA, 17 nt, Molluscum contagiosum virus
uaccgggucgcggggcc

SEQ ID NO: 3089400 - RNA, 23 nt, Molluscum contagiosum virus
ggagcgacauagcgcaccagcug

SEQ ID NO: 3089401 - RNA, 17 nt, Molluscum contagiosum virus
gcuaccugguggagcac

SEQ ID NO: 3089402 - RNA, 21 nt, Molluscum contagiosum virus
cugguacgcgcgcgcgcucac

SEQ ID NO: 3089403 - RNA, 23 nt, Molluscum contagiosum virus
cgcacacuugcgcguccgcaaag

SEQ ID NO: 3089404 - RNA, 17 nt, Molluscum contagiosum virus
caccucugcgcggcccg

SEQ ID NO: 3089405 - RNA, 20 nt, Molluscum contagiosum virus
ccucgggaaaacgcgcggca

SEQ ID NO: 3089406 - RNA, 23 nt, Molluscum contagiosum virus
cgagcacgccuccaagaagaggc

SEQ ID NO: 3089407 - RNA, 17 nt, Molluscum contagiosum virus
gacuagccugugcccug

SEQ ID NO: 3089408 - RNA, 18 nt, Molluscum contagiosum virus
gcauccucgccgaacggc

SEQ ID NO: 3089409 - RNA, 22 nt, Molluscum contagiosum virus
ccucgacgaggccuacagcgcg

SEQ ID NO: 3089410 - RNA, 16 nt, Molluscum contagiosum virus
cucugcacgggcacgc

SEQ ID NO: 3089411 - RNA, 18 nt, Molluscum contagiosum virus
gagcgggguacaggcgcg

SEQ ID NO: 3089412 - RNA, 20 nt, Molluscum contagiosum virus
uggcgccguuggccaccugg

SEQ ID NO: 3089413 - RNA, 20 nt, Molluscum contagiosum virus
cacgcaaaugcgcgcgaacg

SEQ ID NO: 3089414 - RNA, 19 nt, Molluscum contagiosum virus
cugcgcagggacgcgcuuu

SEQ ID NO: 3089415 - RNA, 17 nt, Molluscum contagiosum virus
cgccacugccacggcug

SEQ ID NO: 3089416 - RNA, 21 nt, Molluscum contagiosum virus
uguucgcgcuucugccccguc

SEQ ID NO: 3089417 - RNA, 21 nt, Molluscum contagiosum virus
ccgcgcguacgcugcucgaga

SEQ ID NO: 3089418 - RNA, 21 nt, Molluscum contagiosum virus
guuugcgggcgcaggcccgcc

SEQ ID NO: 3089419 - RNA, 18 nt, Molluscum contagiosum virus
cgugggcucggacuuggc

SEQ ID NO: 3089420 - RNA, 16 nt, Molluscum contagiosum virus
cgugggcgccgcggcg

SEQ ID NO: 3089421 - RNA, 17 nt, Molluscum contagiosum virus
gcgggcgcaggcccgcc

SEQ ID NO: 3089422 - RNA, 13 nt, Molluscum contagiosum virus
ccaagaacaauac

SEQ ID NO: 3089423 - RNA, 13 nt, Molluscum contagiosum virus
gccugcgcgagca

SEQ ID NO: 3089424 - RNA, 19 nt, Molluscum contagiosum virus
gcugucgcgcagcagcuac

SEQ ID NO: 3089425 - RNA, 22 nt, Molluscum contagiosum virus
gaaugacuuagccacugugcug

SEQ ID NO: 3089426 - RNA, 22 nt, Molluscum contagiosum virus
gcgcugcacaguucacggcgcu

SEQ ID NO: 3089427 - RNA, 14 nt, Molluscum contagiosum virus
ucggagcgcagcug

SEQ ID NO: 3089428 - RNA, 16 nt, Molluscum contagiosum virus
acgccgaagagccgcg

SEQ ID NO: 3089429 - RNA, 15 nt, Molluscum contagiosum virus
gccugcucuccgcgg

SEQ ID NO: 3089430 - RNA, 13 nt, Molluscum contagiosum virus
gcuggcggggaaa

SEQ ID NO: 3089431 - RNA, 16 nt, Molluscum contagiosum virus
ccucaggggcucuccu

SEQ ID NO: 3089432 - RNA, 23 nt, Molluscum contagiosum virus
ccgcgccgaaacacggccuccag

SEQ ID NO: 3089433 - RNA, 17 nt, Molluscum contagiosum virus
gacgcaaaagaggccug

SEQ ID NO: 3089434 - RNA, 14 nt, Molluscum contagiosum virus
gccacgcggagcuc

SEQ ID NO: 3089435 - RNA, 14 nt, Molluscum contagiosum virus
uggucaacagcuac

SEQ ID NO: 3089436 - RNA, 21 nt, Molluscum contagiosum virus
aucucgcccagcaccuggaac

SEQ ID NO: 3089437 - RNA, 18 nt, Molluscum contagiosum virus
cugcucuccgcgggaaga

SEQ ID NO: 3089438 - RNA, 11 nt, Molluscum contagiosum virus
acaacuuuucc

SEQ ID NO: 3089439 - RNA, 23 nt, Molluscum contagiosum virus
agcgucgcgcgccgugccuggca

SEQ ID NO: 3089440 - RNA, 14 nt, Molluscum contagiosum virus
uagcaaggcgccgc

SEQ ID NO: 3089441 - RNA, 19 nt, Molluscum contagiosum virus
cgcugaguuacguggccgc

SEQ ID NO: 3089442 - RNA, 18 nt, Molluscum contagiosum virus
agagggucgugcaggucg

SEQ ID NO: 3089443 - RNA, 13 nt, Molluscum contagiosum virus
cugcugcugcaaa

SEQ ID NO: 3089444 - RNA, 17 nt, Molluscum contagiosum virus
ggcguccggcgcucgcc

SEQ ID NO: 3089445 - RNA, 18 nt, Molluscum contagiosum virus
agcccgcgcgcgagcugg

SEQ ID NO: 3089446 - RNA, 16 nt, Molluscum contagiosum virus
ccucucuccccuucag

SEQ ID NO: 3089447 - RNA, 23 nt, Molluscum contagiosum virus
cggaaagauauacaccaggcgcg

SEQ ID NO: 3089448 - RNA, 18 nt, Molluscum contagiosum virus
uacagcaugcgugcaaca

SEQ ID NO: 3089449 - RNA, 14 nt, Molluscum contagiosum virus
caacgaguacgagc

SEQ ID NO: 3089450 - RNA, 17 nt, Molluscum contagiosum virus
guggugcucguggaaaa

SEQ ID NO: 3089451 - RNA, 16 nt, Molluscum contagiosum virus
gaacaagaagcgcuuc

SEQ ID NO: 3089452 - RNA, 19 nt, Molluscum contagiosum virus
cacuggaagaacaggccgc

SEQ ID NO: 3089453 - RNA, 12 nt, Molluscum contagiosum virus
cgcugcuggcag

SEQ ID NO: 3089454 - RNA, 18 nt, Molluscum contagiosum virus
uugcagcccaccagcagg

SEQ ID NO: 3089455 - RNA, 15 nt, Molluscum contagiosum virus
cugguuccucuccuc

SEQ ID NO: 3089456 - RNA, 22 nt, Molluscum contagiosum virus
aucaacgcgcgcgugcuguccu

SEQ ID NO: 3089457 - RNA, 19 nt, Molluscum contagiosum virus
ccccguucacuugcgcgcg

SEQ ID NO: 3089458 - RNA, 13 nt, Molluscum contagiosum virus
ccagacgcagagc

SEQ ID NO: 3089459 - RNA, 12 nt, Molluscum contagiosum virus
gagacaccagcu

SEQ ID NO: 3089460 - RNA, 19 nt, Molluscum contagiosum virus
cccagaaaacgcacugucg

SEQ ID NO: 3089461 - RNA, 24 nt, Molluscum contagiosum virus
agccucaucgugagccuggucgag

SEQ ID NO: 3089462 - RNA, 15 nt, Molluscum contagiosum virus
ccaucgaaacucugc

SEQ ID NO: 3089463 - RNA, 20 nt, Molluscum contagiosum virus
gcugcuccccgccagcacca

SEQ ID NO: 3089464 - RNA, 15 nt, Molluscum contagiosum virus
gccccgcgccagcag

SEQ ID NO: 3089465 - RNA, 22 nt, Molluscum contagiosum virus
ugcccauguccuuucagacagc

SEQ ID NO: 3089466 - RNA, 18 nt, Molluscum contagiosum virus
aagcgcgaguacaagcuc

SEQ ID NO: 3089467 - RNA, 19 nt, Molluscum contagiosum virus
cguuccaaaagacagaggc

SEQ ID NO: 3089468 - RNA, 15 nt, Molluscum contagiosum virus
ucgcgcgccugccgc

SEQ ID NO: 3089469 - RNA, 20 nt, Molluscum contagiosum virus
auccuguucgcgcugcucgc

SEQ ID NO: 3089470 - RNA, 20 nt, Molluscum contagiosum virus
cucucggagaaguggccggc

SEQ ID NO: 3089471 - RNA, 14 nt, Molluscum contagiosum virus
cgcgcgcugcucug

SEQ ID NO: 3089472 - RNA, 18 nt, Molluscum contagiosum virus
cgcuggacuuccugcugc

SEQ ID NO: 3089473 - RNA, 21 nt, Molluscum contagiosum virus
ugcccaugcucgagccugcca

SEQ ID NO: 3089474 - RNA, 17 nt, Molluscum contagiosum virus
ggccugcggcaggaagc

SEQ ID NO: 3089475 - RNA, 17 nt, Molluscum contagiosum virus
uguucaccauccagccg

SEQ ID NO: 3089476 - RNA, 13 nt, Molluscum contagiosum virus
ucgaccugcacga

SEQ ID NO: 3089477 - RNA, 19 nt, Molluscum contagiosum virus
cacucgauggacgccagcu

SEQ ID NO: 3089478 - RNA, 17 nt, Molluscum contagiosum virus
guagcgguugaccagcu

SEQ ID NO: 3089479 - RNA, 18 nt, Molluscum contagiosum virus
cgccgcgcgagugccagc

SEQ ID NO: 3089480 - RNA, 23 nt, Molluscum contagiosum virus
agcaacgcgaccuacgaggugcu

SEQ ID NO: 3089481 - RNA, 14 nt, Molluscum contagiosum virus
gccaaaaggcucag

SEQ ID NO: 3089482 - RNA, 13 nt, Molluscum contagiosum virus
acuugcugcggag

SEQ ID NO: 3089483 - RNA, 21 nt, Molluscum contagiosum virus
ccgccccuaaauaugaaccac

SEQ ID NO: 3089484 - RNA, 13 nt, Molluscum contagiosum virus
acgugcugcugca

SEQ ID NO: 3089485 - RNA, 16 nt, Molluscum contagiosum virus
ccgucggggcagggaa

SEQ ID NO: 3089486 - RNA, 19 nt, Molluscum contagiosum virus
cuacuucgaggccggcaag

SEQ ID NO: 3089487 - RNA, 19 nt, Molluscum contagiosum virus
cgaggugcgcgcaacacug

SEQ ID NO: 3089488 - RNA, 19 nt, Molluscum contagiosum virus
guggcgccgaugcagugcg

SEQ ID NO: 3089489 - RNA, 22 nt, Molluscum contagiosum virus
uuuucuggcgcguaaggcggcg

SEQ ID NO: 3089490 - RNA, 18 nt, Molluscum contagiosum virus
ugcaaauugaaaaaacau

SEQ ID NO: 3089491 - RNA, 17 nt, Molluscum contagiosum virus
ccaggaacaucugcaac

SEQ ID NO: 3089492 - RNA, 18 nt, Molluscum contagiosum virus
uggagcaccuggaacgcg

SEQ ID NO: 3089493 - RNA, 18 nt, Molluscum contagiosum virus
gagcugugccgcagcaac

SEQ ID NO: 3089494 - RNA, 14 nt, Molluscum contagiosum virus
gaagcggugcagcg

SEQ ID NO: 3089495 - RNA, 16 nt, Molluscum contagiosum virus
ggcccgagcagaagga

SEQ ID NO: 3089496 - RNA, 18 nt, Molluscum contagiosum virus
ucaggaacaaggccaaag

SEQ ID NO: 3089497 - RNA, 23 nt, Molluscum contagiosum virus
acgcgggccaggcacuggcccug

SEQ ID NO: 3089498 - RNA, 19 nt, Molluscum contagiosum virus
gcacggcuaccacgagcac

SEQ ID NO: 3089499 - RNA, 15 nt, Molluscum contagiosum virus
ccgggcgcugcaccg

SEQ ID NO: 3089500 - RNA, 22 nt, Molluscum contagiosum virus
gcauccugaugacggcagacgg

SEQ ID NO: 3089501 - RNA, 17 nt, Molluscum contagiosum virus
augcacuuucaacucuc

SEQ ID NO: 3089502 - RNA, 21 nt, Molluscum contagiosum virus
ggcacccgccgcggugccggg

SEQ ID NO: 3089503 - RNA, 15 nt, Molluscum contagiosum virus
agacgcuagcugugc

SEQ ID NO: 3089504 - RNA, 20 nt, Molluscum contagiosum virus
aacucuccgacgugcugcgc

SEQ ID NO: 3089505 - RNA, 13 nt, Molluscum contagiosum virus
uugccugagaagc

SEQ ID NO: 3089506 - RNA, 14 nt, Molluscum contagiosum virus
aagacuugccgucu

SEQ ID NO: 3089507 - RNA, 16 nt, Molluscum contagiosum virus
gagggaugcacacacu

SEQ ID NO: 3089508 - RNA, 20 nt, Molluscum contagiosum virus
gcgcccacggcggcacccgc

SEQ ID NO: 3089509 - RNA, 20 nt, Molluscum contagiosum virus
gccaagguuugcgggcgcag

SEQ ID NO: 3089510 - RNA, 19 nt, Molluscum contagiosum virus
ugcagcugcgcgagccgcu

SEQ ID NO: 3089511 - RNA, 18 nt, Molluscum contagiosum virus
guacgucuuucccagaag

SEQ ID NO: 3089512 - RNA, 17 nt, Molluscum contagiosum virus
cucgcagacgcagcgcg

SEQ ID NO: 3089513 - RNA, 20 nt, Molluscum contagiosum virus
gcuggcguugccgagcgagc

SEQ ID NO: 3089514 - RNA, 17 nt, Molluscum contagiosum virus
ccaggcacacgcagugc

SEQ ID NO: 3089515 - RNA, 20 nt, Molluscum contagiosum virus
cggaagucggcguggccagg

SEQ ID NO: 3089516 - RNA, 11 nt, Molluscum contagiosum virus
cgucucgagcu

SEQ ID NO: 3089517 - RNA, 18 nt, Molluscum contagiosum virus
cguggaucgcgcgcaccu

SEQ ID NO: 3089518 - RNA, 15 nt, Molluscum contagiosum virus
gcgaacgagggacac

SEQ ID NO: 3089519 - RNA, 14 nt, Molluscum contagiosum virus
guugcgguggugca

SEQ ID NO: 3089520 - RNA, 22 nt, Molluscum contagiosum virus
gccauggaggcgcuagugcaga

SEQ ID NO: 3089521 - RNA, 15 nt, Molluscum contagiosum virus
ugcacguggcgcaca

SEQ ID NO: 3089522 - RNA, 18 nt, Molluscum contagiosum virus
gcgggccaugucugugcg

SEQ ID NO: 3089523 - RNA, 12 nt, Molluscum contagiosum virus
uugcgcagagcu

SEQ ID NO: 3089524 - RNA, 19 nt, Molluscum contagiosum virus
accuacaugaguuucuggu

SEQ ID NO: 3089525 - RNA, 19 nt, Molluscum contagiosum virus
aggcucgucguggacgcuc

SEQ ID NO: 3089526 - RNA, 16 nt, Molluscum contagiosum virus
guccgcacgcacacga

SEQ ID NO: 3089527 - RNA, 19 nt, Molluscum contagiosum virus
gguggcgcgcgagcugcug

SEQ ID NO: 3089528 - RNA, 13 nt, Molluscum contagiosum virus
cgcgcgcagcaca

SEQ ID NO: 3089529 - RNA, 22 nt, Molluscum contagiosum virus
cagccacggccgcgcugguggc

SEQ ID NO: 3089530 - RNA, 13 nt, Molluscum contagiosum virus
gugcucaggccag

SEQ ID NO: 3089531 - RNA, 24 nt, Molluscum contagiosum virus
cuucacggcguucaccuuggcgcu

SEQ ID NO: 3089532 - RNA, 16 nt, Molluscum contagiosum virus
gugcuggagcagggcu

SEQ ID NO: 3089533 - RNA, 13 nt, Molluscum contagiosum virus
cuuguugugggcu

SEQ ID NO: 3089534 - RNA, 19 nt, Molluscum contagiosum virus
ggcucguacugcugcaggc

SEQ ID NO: 3089535 - RNA, 20 nt, Molluscum contagiosum virus
ucuccaucaucgagcugcag

SEQ ID NO: 3089536 - RNA, 17 nt, Molluscum contagiosum virus
gcagugcggccagcacc

SEQ ID NO: 3089537 - RNA, 18 nt, Molluscum contagiosum virus
ccgcugcuccugcucugu

SEQ ID NO: 3089538 - RNA, 20 nt, Molluscum contagiosum virus
cucgggcuagcaagcacgcc

SEQ ID NO: 3089539 - RNA, 17 nt, Molluscum contagiosum virus
ccagagccuucucggug

SEQ ID NO: 3089540 - RNA, 17 nt, Molluscum contagiosum virus
agcgcggggguguugcu

SEQ ID NO: 3089541 - RNA, 15 nt, Molluscum contagiosum virus
acugcgcgcacugcu

SEQ ID NO: 3089542 - RNA, 15 nt, Molluscum contagiosum virus
gacgcuagcugugcg

SEQ ID NO: 3089543 - RNA, 20 nt, Molluscum contagiosum virus
caggucaucgggcugcagcc

SEQ ID NO: 3089544 - RNA, 14 nt, Molluscum contagiosum virus
gcacuacugcucca

SEQ ID NO: 3089545 - RNA, 17 nt, Molluscum contagiosum virus
gaagucgcuagaggaga

SEQ ID NO: 3089546 - RNA, 13 nt, Molluscum contagiosum virus
cgcugcgcgccgc

SEQ ID NO: 3089547 - RNA, 16 nt, Molluscum contagiosum virus
cuucugcugcacacac

SEQ ID NO: 3089548 - RNA, 17 nt, Molluscum contagiosum virus
ccggugcgugcccagca

SEQ ID NO: 3089549 - RNA, 14 nt, Molluscum contagiosum virus
gcagucacgacugu

SEQ ID NO: 3089550 - RNA, 12 nt, Molluscum contagiosum virus
agcgcuaccuga

SEQ ID NO: 3089551 - RNA, 12 nt, Molluscum contagiosum virus
uccuggccaagg

SEQ ID NO: 3089552 - RNA, 17 nt, Molluscum contagiosum virus
gcugcugcccggcagcg

SEQ ID NO: 3089553 - RNA, 22 nt, Molluscum contagiosum virus
gcucguugcgcagccgguacuc

SEQ ID NO: 3089554 - RNA, 13 nt, Molluscum contagiosum virus
cugccgcagagcc

SEQ ID NO: 3089555 - RNA, 19 nt, Molluscum contagiosum virus
agggcgugcuugccuggaa

SEQ ID NO: 3089556 - RNA, 22 nt, Molluscum contagiosum virus
cccggcgaacaccccgagcugg

SEQ ID NO: 3089557 - RNA, 14 nt, Molluscum contagiosum virus
agcgaguugagcag

SEQ ID NO: 3089558 - RNA, 15 nt, Molluscum contagiosum virus
cuacauggacgugcu

SEQ ID NO: 3089559 - RNA, 21 nt, Molluscum contagiosum virus
gcucacgcugcccgcgccgcc

SEQ ID NO: 3089560 - RNA, 23 nt, Molluscum contagiosum virus
cuuagcuuccgucugcugcucga

SEQ ID NO: 3089561 - RNA, 16 nt, Molluscum contagiosum virus
caccgcuccgcagccg

SEQ ID NO: 3089562 - RNA, 13 nt, Molluscum contagiosum virus
gagccauguuucc

SEQ ID NO: 3089563 - RNA, 17 nt, Molluscum contagiosum virus
gaacacgggggcugccg

SEQ ID NO: 3089564 - RNA, 14 nt, Molluscum contagiosum virus
cacguccaggccgc

SEQ ID NO: 3089565 - RNA, 16 nt, Molluscum contagiosum virus
gaucgcgguggcaggc

SEQ ID NO: 3089566 - RNA, 20 nt, Molluscum contagiosum virus
gagcuucgucuucaccugca

SEQ ID NO: 3089567 - RNA, 17 nt, Molluscum contagiosum virus
gccggcacccgugcgcg

SEQ ID NO: 3089568 - RNA, 18 nt, Molluscum contagiosum virus
acggcgcucgccucuggg

SEQ ID NO: 3089569 - RNA, 22 nt, Molluscum contagiosum virus
ucucgcagacgcagcgcgagcu

SEQ ID NO: 3089570 - RNA, 17 nt, Molluscum contagiosum virus
ccaugcuccugaucugc

SEQ ID NO: 3089571 - RNA, 15 nt, Molluscum contagiosum virus
cgcgcgccgucggcc

SEQ ID NO: 3089572 - RNA, 22 nt, Molluscum contagiosum virus
gcggcacacacuugcacgcgca

SEQ ID NO: 3089573 - RNA, 21 nt, Molluscum contagiosum virus
gcgcgcgacuuuguccugagc

SEQ ID NO: 3089574 - RNA, 20 nt, Molluscum contagiosum virus
gccuccgaacaaugaggaga

SEQ ID NO: 3089575 - RNA, 22 nt, Molluscum contagiosum virus
caucucgcacacugcagcacgu

SEQ ID NO: 3089576 - RNA, 20 nt, Molluscum contagiosum virus
uuagcuuccgucugcugcuc

SEQ ID NO: 3089577 - RNA, 22 nt, Molluscum contagiosum virus
gccguguccuacacgccgcugg

SEQ ID NO: 3089578 - RNA, 22 nt, Molluscum contagiosum virus
ugcacaugcccgugcaccuccc

SEQ ID NO: 3089579 - RNA, 23 nt, Molluscum contagiosum virus
guagcgagcaggcgcaggccgcg

SEQ ID NO: 3089580 - RNA, 12 nt, Molluscum contagiosum virus
gugcgugcugcg

SEQ ID NO: 3089581 - RNA, 22 nt, Molluscum contagiosum virus
agcugggcucggaguccgcgcc

SEQ ID NO: 3089582 - RNA, 23 nt, Molluscum contagiosum virus
uacuuguugugcacgcuguccag

SEQ ID NO: 3089583 - RNA, 17 nt, Molluscum contagiosum virus
cggcuuggacagcaagc

SEQ ID NO: 3089584 - RNA, 12 nt, Molluscum contagiosum virus
gaggcggcacug

SEQ ID NO: 3089585 - RNA, 23 nt, Molluscum contagiosum virus
acgaguucugcaucuucugccag

SEQ ID NO: 3089586 - RNA, 21 nt, Molluscum contagiosum virus
ugacgcgcacgccagccugga

SEQ ID NO: 3089587 - RNA, 22 nt, Molluscum contagiosum virus
gacgcgggcguguccgcgggcg

SEQ ID NO: 3089588 - RNA, 21 nt, Molluscum contagiosum virus
ggaacggcucaccgcgcagaa

SEQ ID NO: 3089589 - RNA, 20 nt, Molluscum contagiosum virus
cagcagucaguuccgcggcg

SEQ ID NO: 3089590 - RNA, 13 nt, Molluscum contagiosum virus
cacgcacgcgcuc

SEQ ID NO: 3089591 - RNA, 14 nt, Molluscum contagiosum virus
agcagcgcuagccc

SEQ ID NO: 3089592 - RNA, 17 nt, Molluscum contagiosum virus
ugcgcguucgcaaagac

SEQ ID NO: 3089593 - RNA, 13 nt, Molluscum contagiosum virus
gcuugcagacaag

SEQ ID NO: 3089594 - RNA, 15 nt, Molluscum contagiosum virus
cggggcgcgcgcugc

SEQ ID NO: 3089595 - RNA, 16 nt, Molluscum contagiosum virus
gccggcucugccuccg

SEQ ID NO: 3089596 - RNA, 20 nt, Molluscum contagiosum virus
cgaggcguccagcggcugcc

SEQ ID NO: 3089597 - RNA, 21 nt, Molluscum contagiosum virus
aacuccggcgucgaaacacug

SEQ ID NO: 3089598 - RNA, 15 nt, Molluscum contagiosum virus
gcucgguagccaggc

SEQ ID NO: 3089599 - RNA, 15 nt, Molluscum contagiosum virus
agaucgacugcgccu

SEQ ID NO: 3089600 - RNA, 11 nt, Molluscum contagiosum virus
ugccagcagca

SEQ ID NO: 3089601 - RNA, 14 nt, Molluscum contagiosum virus
cuagcccagcacgc

SEQ ID NO: 3089602 - RNA, 18 nt, Molluscum contagiosum virus
gcaacaaggaaaggcacc

SEQ ID NO: 3089603 - RNA, 21 nt, Molluscum contagiosum virus
gagcaggcgcagcgcggccug

SEQ ID NO: 3089604 - RNA, 13 nt, Molluscum contagiosum virus
gagacucuggaag

SEQ ID NO: 3089605 - RNA, 21 nt, Molluscum contagiosum virus
cugcucgcgugcgugcugcgc

SEQ ID NO: 3089606 - RNA, 16 nt, Molluscum contagiosum virus
agcacguccucgguca

SEQ ID NO: 3089607 - RNA, 14 nt, Molluscum contagiosum virus
cuugucgagacagg

SEQ ID NO: 3089608 - RNA, 14 nt, Molluscum contagiosum virus
ggcggcacccgccg

SEQ ID NO: 3089609 - RNA, 19 nt, Molluscum contagiosum virus
cgggcacgccgcagcgcug

SEQ ID NO: 3089610 - RNA, 23 nt, Molluscum contagiosum virus
acccuuggcagcaacugcacagg

SEQ ID NO: 3089611 - RNA, 22 nt, Molluscum contagiosum virus
cgaggccuacgugcugcgcacg

SEQ ID NO: 3089612 - RNA, 13 nt, Molluscum contagiosum virus
gcagcgcgcgcag

SEQ ID NO: 3089613 - RNA, 15 nt, Molluscum contagiosum virus
gcacaugcagcugca

SEQ ID NO: 3089614 - RNA, 16 nt, Molluscum contagiosum virus
gucggccagcagcucc

SEQ ID NO: 3089615 - RNA, 18 nt, Molluscum contagiosum virus
accauggcgcgcucuuuu

SEQ ID NO: 3089616 - RNA, 21 nt, Molluscum contagiosum virus
gggauugaccucgcgacggga

SEQ ID NO: 3089617 - RNA, 16 nt, Molluscum contagiosum virus
gcaaacgcugacggcg

SEQ ID NO: 3089618 - RNA, 20 nt, Molluscum contagiosum virus
uggagaacggcgugcgagug

SEQ ID NO: 3089619 - RNA, 16 nt, Molluscum contagiosum virus
agcuguccgagccgga

SEQ ID NO: 3089620 - RNA, 15 nt, Molluscum contagiosum virus
gcccgugcgccugcc

SEQ ID NO: 3089621 - RNA, 12 nt, Molluscum contagiosum virus
acuccuguccuc

SEQ ID NO: 3089622 - RNA, 16 nt, Molluscum contagiosum virus
ggaagcugcacgugca

SEQ ID NO: 3089623 - RNA, 22 nt, Molluscum contagiosum virus
gcgggcccgugcucaggccagc

SEQ ID NO: 3089624 - RNA, 15 nt, Molluscum contagiosum virus
gcuuuaguccaugcc

SEQ ID NO: 3089625 - RNA, 18 nt, Molluscum contagiosum virus
cgugcacucgagaagagg

SEQ ID NO: 3089626 - RNA, 20 nt, Molluscum contagiosum virus
gccgcgugcgcgcgguacuc

SEQ ID NO: 3089627 - RNA, 23 nt, Molluscum contagiosum virus
acaucuacuuccugccuguggga

SEQ ID NO: 3089628 - RNA, 18 nt, Molluscum contagiosum virus
ccugcaccgagugcuggc

SEQ ID NO: 3089629 - RNA, 15 nt, Molluscum contagiosum virus
cccacugugccagca

SEQ ID NO: 3089630 - RNA, 20 nt, Molluscum contagiosum virus
cgauugcguguuggcuucug

SEQ ID NO: 3089631 - RNA, 19 nt, Molluscum contagiosum virus
acgugaccucgcugcugag

SEQ ID NO: 3089632 - RNA, 22 nt, Molluscum contagiosum virus
cugcagaaacagccgugcuccg

SEQ ID NO: 3089633 - RNA, 15 nt, Molluscum contagiosum virus
gcagcgcuggagcug

SEQ ID NO: 3089634 - RNA, 21 nt, Molluscum contagiosum virus
ggaggcgcuaccucgcgggag

SEQ ID NO: 3089635 - RNA, 15 nt, Molluscum contagiosum virus
caguccgagcuguuc

SEQ ID NO: 3089636 - RNA, 14 nt, Molluscum contagiosum virus
acagcagccgcagc

SEQ ID NO: 3089637 - RNA, 14 nt, Molluscum contagiosum virus
gcccacuuccguga

SEQ ID NO: 3089638 - RNA, 17 nt, Molluscum contagiosum virus
ggcccaggccauggagc

SEQ ID NO: 3089639 - RNA, 14 nt, Molluscum contagiosum virus
acgccagccuggag

SEQ ID NO: 3089640 - RNA, 18 nt, Molluscum contagiosum virus
cguggcguugcugcugcg

SEQ ID NO: 3089641 - RNA, 19 nt, Molluscum contagiosum virus
ggcguguuccggcagcgcc

SEQ ID NO: 3089642 - RNA, 19 nt, Molluscum contagiosum virus
uccacgucgaucagcuccg

SEQ ID NO: 3089643 - RNA, 21 nt, Molluscum contagiosum virus
ccucgugcugggccugccgca

SEQ ID NO: 3089644 - RNA, 21 nt, Molluscum contagiosum virus
cagaggauucuugcacgggca

SEQ ID NO: 3089645 - RNA, 19 nt, Molluscum contagiosum virus
uugagugguacuaccucuu

SEQ ID NO: 3089646 - RNA, 21 nt, Molluscum contagiosum virus
cgagacggaaauguuguuuga

SEQ ID NO: 3089647 - RNA, 14 nt, Molluscum contagiosum virus
cggcacgagcaguc

SEQ ID NO: 3089648 - RNA, 19 nt, Molluscum contagiosum virus
gcguugcucccgucgagca

SEQ ID NO: 3089649 - RNA, 22 nt, Molluscum contagiosum virus
cgcacggugugcuacugcacug

SEQ ID NO: 3089650 - RNA, 14 nt, Molluscum contagiosum virus
gcgccugcacacgc

SEQ ID NO: 3089651 - RNA, 23 nt, Molluscum contagiosum virus
cgacgggcucugugcggacaugc

SEQ ID NO: 3089652 - RNA, 18 nt, Molluscum contagiosum virus
uagacugucgacagagaa

SEQ ID NO: 3089653 - RNA, 18 nt, Molluscum contagiosum virus
ccuucgccaaugacggcg

SEQ ID NO: 3089654 - RNA, 19 nt, Molluscum contagiosum virus
ucuccgcucucgagcucac

SEQ ID NO: 3089655 - RNA, 23 nt, Molluscum contagiosum virus
cugcggacgcgggccgcgcgcac

SEQ ID NO: 3089656 - RNA, 16 nt, Molluscum contagiosum virus
ugucgccgcgggcugg

SEQ ID NO: 3089657 - RNA, 18 nt, Molluscum contagiosum virus
cggaugccacgcagcugg

SEQ ID NO: 3089658 - RNA, 14 nt, Molluscum contagiosum virus
ugguugcuugcaug

SEQ ID NO: 3089659 - RNA, 21 nt, Molluscum contagiosum virus
gcugggaaagggcugcuugcg

SEQ ID NO: 3089660 - RNA, 12 nt, Molluscum contagiosum virus
accuaggcacuc

SEQ ID NO: 3089661 - RNA, 20 nt, Molluscum contagiosum virus
uccuguagcaaggggucugc

SEQ ID NO: 3089662 - RNA, 15 nt, Molluscum contagiosum virus
accuacuccuggcca

SEQ ID NO: 3089663 - RNA, 17 nt, Molluscum contagiosum virus
ccgacccggcucgcuca

SEQ ID NO: 3089664 - RNA, 17 nt, Molluscum contagiosum virus
cugauaguaccacugug

SEQ ID NO: 3089665 - RNA, 12 nt, Molluscum contagiosum virus
acucaggaagcg

SEQ ID NO: 3089666 - RNA, 22 nt, Molluscum contagiosum virus
cgggcacgcucauacuccugcu

SEQ ID NO: 3089667 - RNA, 23 nt, Molluscum contagiosum virus
ggcgacgcguacguguccaugca

SEQ ID NO: 3089668 - RNA, 13 nt, Molluscum contagiosum virus
cccgcaccagugc

SEQ ID NO: 3089669 - RNA, 22 nt, Molluscum contagiosum virus
uuuccuggcucgcgagugugca

SEQ ID NO: 3089670 - RNA, 14 nt, Molluscum contagiosum virus
accagcagccaggc

SEQ ID NO: 3089671 - RNA, 17 nt, Molluscum contagiosum virus
ccucgcguagcagcgcc

SEQ ID NO: 3089672 - RNA, 14 nt, Molluscum contagiosum virus
agcagcccgcaggc

SEQ ID NO: 3089673 - RNA, 17 nt, Molluscum contagiosum virus
ucgccuucuugcuggcg

SEQ ID NO: 3089674 - RNA, 23 nt, Molluscum contagiosum virus
gcgugccagcguacggcccgaag

SEQ ID NO: 3089675 - RNA, 20 nt, Molluscum contagiosum virus
caacuccgagcgcgcgcgcu

SEQ ID NO: 3089676 - RNA, 15 nt, Molluscum contagiosum virus
aagaccauggggcua

SEQ ID NO: 3089677 - RNA, 14 nt, Molluscum contagiosum virus
ccuagcuccagcgu

SEQ ID NO: 3089678 - RNA, 17 nt, Molluscum contagiosum virus
cgcggaugcaggcacug

SEQ ID NO: 3089679 - RNA, 13 nt, Molluscum contagiosum virus
ugcaaggagguca

SEQ ID NO: 3089680 - RNA, 23 nt, Molluscum contagiosum virus
uucugcuugcggcacacaugcua

SEQ ID NO: 3089681 - RNA, 24 nt, Molluscum contagiosum virus
cgucuuaacucagcgggcagacag

SEQ ID NO: 3089682 - RNA, 22 nt, Molluscum contagiosum virus
gaucccuucgcguccacgggua

SEQ ID NO: 3089683 - RNA, 18 nt, Molluscum contagiosum virus
ucaccuuggcgcugcaca

SEQ ID NO: 3089684 - RNA, 16 nt, Molluscum contagiosum virus
ugcguuuccagggcag

SEQ ID NO: 3089685 - RNA, 20 nt, Molluscum contagiosum virus
agucacugcuagugcuggcc

SEQ ID NO: 3089686 - RNA, 17 nt, Molluscum contagiosum virus
gcacacgagugcccgcg

SEQ ID NO: 3089687 - RNA, 15 nt, Molluscum contagiosum virus
gcucgugcuggagca

SEQ ID NO: 3089688 - RNA, 15 nt, Molluscum contagiosum virus
agcgcgugcccgcag

SEQ ID NO: 3089689 - RNA, 11 nt, Molluscum contagiosum virus
gcgacacuugc

SEQ ID NO: 3089690 - RNA, 12 nt, Molluscum contagiosum virus
cccguguacaac

SEQ ID NO: 3089691 - RNA, 15 nt, Molluscum contagiosum virus
caugaacucgcugcu

SEQ ID NO: 3089692 - RNA, 18 nt, Molluscum contagiosum virus
acucggacacguugcagc

SEQ ID NO: 3089693 - RNA, 12 nt, Molluscum contagiosum virus
cuccgcacgugg

SEQ ID NO: 3089694 - RNA, 11 nt, Molluscum contagiosum virus
cacgcgccgcg

SEQ ID NO: 3089695 - RNA, 18 nt, Molluscum contagiosum virus
cggcgcgugagcgccuac

SEQ ID NO: 3089696 - RNA, 23 nt, Molluscum contagiosum virus
cggcccccuuacgcuacagcagc

SEQ ID NO: 3089697 - RNA, 21 nt, Molluscum contagiosum virus
gccuucgcguuccggcggcug

SEQ ID NO: 3089698 - RNA, 20 nt, Molluscum contagiosum virus
cggcgcaacgagcagcccgu

SEQ ID NO: 3089699 - RNA, 22 nt, Molluscum contagiosum virus
aggacuagcauuccuucacaca

SEQ ID NO: 3089700 - RNA, 19 nt, Molluscum contagiosum virus
cgacgugcugcugcagaac

SEQ ID NO: 3089701 - RNA, 18 nt, Molluscum contagiosum virus
cgcaguacccgagcugug

SEQ ID NO: 3089702 - RNA, 19 nt, Molluscum contagiosum virus
cgagcgcccucagucacgu

SEQ ID NO: 3089703 - RNA, 20 nt, Molluscum contagiosum virus
ccgagcgugaccagugcgug

SEQ ID NO: 3089704 - RNA, 15 nt, Molluscum contagiosum virus
cuuagccacugugcu

SEQ ID NO: 3089705 - RNA, 19 nt, Molluscum contagiosum virus
ucaacuacaaggugcuguc

SEQ ID NO: 3089706 - RNA, 17 nt, Molluscum contagiosum virus
cgcugcgcgcucuggag

SEQ ID NO: 3089707 - RNA, 20 nt, Molluscum contagiosum virus
uaccacgagcacugccugcc

SEQ ID NO: 3089708 - RNA, 12 nt, Molluscum contagiosum virus
gggcgcugcucg

SEQ ID NO: 3089709 - RNA, 12 nt, Molluscum contagiosum virus
cgccuuuccccg

SEQ ID NO: 3089710 - RNA, 23 nt, Molluscum contagiosum virus
agcggcgccacgagcgccgcgac

SEQ ID NO: 3089711 - RNA, 17 nt, Molluscum contagiosum virus
cagcaacugcacaggga

SEQ ID NO: 3089712 - RNA, 15 nt, Molluscum contagiosum virus
gcuaugcgcagcugc

SEQ ID NO: 3089713 - RNA, 23 nt, Molluscum contagiosum virus
ugcucuacuggcggcgcccguga

SEQ ID NO: 3089714 - RNA, 20 nt, Molluscum contagiosum virus
cgaggacuuccgcgcgcucu

SEQ ID NO: 3089715 - RNA, 14 nt, Molluscum contagiosum virus
cggggaggagcucu

SEQ ID NO: 3089716 - RNA, 23 nt, Molluscum contagiosum virus
cacgccuuggcaauggcgcgcag

SEQ ID NO: 3089717 - RNA, 14 nt, Molluscum contagiosum virus
acacauuccucggc

SEQ ID NO: 3089718 - RNA, 19 nt, Molluscum contagiosum virus
cagagaaaggcacccacca

SEQ ID NO: 3089719 - RNA, 21 nt, Molluscum contagiosum virus
aacaaggaaaggcacccgcag

SEQ ID NO: 3089720 - RNA, 19 nt, Molluscum contagiosum virus
caacuacaaggugcugucc

SEQ ID NO: 3089721 - RNA, 14 nt, Molluscum contagiosum virus
cguaagccaccgcg

SEQ ID NO: 3089722 - RNA, 17 nt, Molluscum contagiosum virus
gccgccgacgccuuccu

SEQ ID NO: 3089723 - RNA, 19 nt, Molluscum contagiosum virus
gcuucuggcaaacgcacug

SEQ ID NO: 3089724 - RNA, 13 nt, Molluscum contagiosum virus
gagagacaacaaa

SEQ ID NO: 3089725 - RNA, 18 nt, Molluscum contagiosum virus
cagugcucgcacacgugc

SEQ ID NO: 3089726 - RNA, 17 nt, Molluscum contagiosum virus
ucgagcuucggacgagc

SEQ ID NO: 3089727 - RNA, 20 nt, Molluscum contagiosum virus
ggaggccgucuucgccggca

SEQ ID NO: 3089728 - RNA, 16 nt, Molluscum contagiosum virus
gcaggaugcuggggcu

SEQ ID NO: 3089729 - RNA, 16 nt, Molluscum contagiosum virus
ugugcgagaacuggcg

SEQ ID NO: 3089730 - RNA, 20 nt, Molluscum contagiosum virus
ugcccggccucgccuccggg

SEQ ID NO: 3089731 - RNA, 16 nt, Molluscum contagiosum virus
gcagugcggaugugcu

SEQ ID NO: 3089732 - RNA, 14 nt, Molluscum contagiosum virus
ccggcguuggcuuu

SEQ ID NO: 3089733 - RNA, 19 nt, Molluscum contagiosum virus
cgggcccgcguggcaaggg

SEQ ID NO: 3089734 - RNA, 19 nt, Molluscum contagiosum virus
cgcacgguagcuagcucug

SEQ ID NO: 3089735 - RNA, 17 nt, Molluscum contagiosum virus
gccgggaauaccggaga

SEQ ID NO: 3089736 - RNA, 15 nt, Molluscum contagiosum virus
gacgccgagcccgag

SEQ ID NO: 3089737 - RNA, 18 nt, Molluscum contagiosum virus
ccaguggccagcgcgcgg

SEQ ID NO: 3089738 - RNA, 13 nt, Molluscum contagiosum virus
gcgcugaaggcau

SEQ ID NO: 3089739 - RNA, 16 nt, Molluscum contagiosum virus
ugacgguacucaugcu

SEQ ID NO: 3089740 - RNA, 18 nt, Molluscum contagiosum virus
gacguggacguggauacc

SEQ ID NO: 3089741 - RNA, 17 nt, Molluscum contagiosum virus
acgaggugcgcgcaaca

SEQ ID NO: 3089742 - RNA, 22 nt, Molluscum contagiosum virus
gagcggaccccggugggggcaa

SEQ ID NO: 3089743 - RNA, 18 nt, Molluscum contagiosum virus
cauguacauagcccccua

SEQ ID NO: 3089744 - RNA, 13 nt, Molluscum contagiosum virus
acgacaaggaaag

SEQ ID NO: 3089745 - RNA, 17 nt, Molluscum contagiosum virus
uccgacccgugcugcuu

SEQ ID NO: 3089746 - RNA, 23 nt, Molluscum contagiosum virus
gaacgccggcgcggggcucgucc

SEQ ID NO: 3089747 - RNA, 22 nt, Molluscum contagiosum virus
ccgagucguacacgcagagcca

SEQ ID NO: 3089748 - RNA, 18 nt, Molluscum contagiosum virus
uagcagcgccugcacgca

SEQ ID NO: 3089749 - RNA, 14 nt, Molluscum contagiosum virus
cucccguggcgcgc

SEQ ID NO: 3089750 - RNA, 13 nt, Molluscum contagiosum virus
cacauugcgaggc

SEQ ID NO: 3089751 - RNA, 22 nt, Molluscum contagiosum virus
cacgcugcguuuccagggcagu

SEQ ID NO: 3089752 - RNA, 13 nt, Molluscum contagiosum virus
agcgguugaccag

SEQ ID NO: 3089753 - RNA, 20 nt, Molluscum contagiosum virus
cgcguccucagguugcucgc

SEQ ID NO: 3089754 - RNA, 18 nt, Molluscum contagiosum virus
gcguucgcgcgugcugga

SEQ ID NO: 3089755 - RNA, 15 nt, Molluscum contagiosum virus
acgaccacgugcagg

SEQ ID NO: 3089756 - RNA, 14 nt, Molluscum contagiosum virus
cacccgcaacaagg

SEQ ID NO: 3089757 - RNA, 18 nt, Molluscum contagiosum virus
ccggagacaccagcuccg

SEQ ID NO: 3089758 - RNA, 17 nt, Molluscum contagiosum virus
gugcgccucgcaggcga

SEQ ID NO: 3089759 - RNA, 14 nt, Molluscum contagiosum virus
gucaucggagagcc

SEQ ID NO: 3089760 - RNA, 18 nt, Molluscum contagiosum virus
cucgagagggagcagccu

SEQ ID NO: 3089761 - RNA, 15 nt, Molluscum contagiosum virus
acgcgcccuggagcg

SEQ ID NO: 3089762 - RNA, 18 nt, Molluscum contagiosum virus
ugccuggagggcagugcc

SEQ ID NO: 3089763 - RNA, 15 nt, Molluscum contagiosum virus
cucgagcgcgcugga

SEQ ID NO: 3089764 - RNA, 12 nt, Molluscum contagiosum virus
ccgagcggggac

SEQ ID NO: 3089765 - RNA, 15 nt, Molluscum contagiosum virus
cuucuaccacagguu

SEQ ID NO: 3089766 - RNA, 16 nt, Molluscum contagiosum virus
cgaggccggcacgagc

SEQ ID NO: 3089767 - RNA, 14 nt, Molluscum contagiosum virus
guccaucggugggc

SEQ ID NO: 3089768 - RNA, 17 nt, Molluscum contagiosum virus
cagcacaggccccagca

SEQ ID NO: 3089769 - RNA, 14 nt, Molluscum contagiosum virus
gauaaaagcacagu

SEQ ID NO: 3089770 - RNA, 20 nt, Molluscum contagiosum virus
acagagaaaggcacccacca

SEQ ID NO: 3089771 - RNA, 18 nt, Molluscum contagiosum virus
gcaccggcgcucacugcg

SEQ ID NO: 3089772 - RNA, 22 nt, Molluscum contagiosum virus
gccagccucaucgugagccugg

SEQ ID NO: 3089773 - RNA, 19 nt, Molluscum contagiosum virus
acaugcuguccaccuccuc

SEQ ID NO: 3089774 - RNA, 23 nt, Molluscum contagiosum virus
gcauggacauccucaccuuccug

SEQ ID NO: 3089775 - RNA, 17 nt, Molluscum contagiosum virus
auaaaugaaccugggca

SEQ ID NO: 3089776 - RNA, 15 nt, Molluscum contagiosum virus
ccacgugccagaguc

SEQ ID NO: 3089777 - RNA, 23 nt, Molluscum contagiosum virus
ccggugcugcggcgcgugccgcu

SEQ ID NO: 3089778 - RNA, 21 nt, Molluscum contagiosum virus
aauacggugcagccgcugcug

SEQ ID NO: 3089779 - RNA, 19 nt, Molluscum contagiosum virus
gacggcaccguaccgcgcc

SEQ ID NO: 3089780 - RNA, 13 nt, Molluscum contagiosum virus
gcagcgugucaag

SEQ ID NO: 3089781 - RNA, 13 nt, Molluscum contagiosum virus
cagcucaagcugc

SEQ ID NO: 3089782 - RNA, 16 nt, Molluscum contagiosum virus
ccaugaggacagcuug

SEQ ID NO: 3089783 - RNA, 17 nt, Molluscum contagiosum virus
ucagggcuucuggcaaa

SEQ ID NO: 3089784 - RNA, 18 nt, Molluscum contagiosum virus
ggucgcgcgcgcucugcc

SEQ ID NO: 3089785 - RNA, 14 nt, Molluscum contagiosum virus
aucuucgugcugaa

SEQ ID NO: 3089786 - RNA, 16 nt, Molluscum contagiosum virus
gcgcacgugcgcgccg

SEQ ID NO: 3089787 - RNA, 16 nt, Molluscum contagiosum virus
ggcgccgcggcugccu

SEQ ID NO: 3089788 - RNA, 17 nt, Molluscum contagiosum virus
gccuucuucgugcugug

SEQ ID NO: 3089789 - RNA, 18 nt, Molluscum contagiosum virus
ccugucggcacaucucuc

SEQ ID NO: 3089790 - RNA, 16 nt, Molluscum contagiosum virus
gcuucgucuucaccug

SEQ ID NO: 3089791 - RNA, 21 nt, Molluscum contagiosum virus
gcagagcuccccgcgcgcagc

SEQ ID NO: 3089792 - RNA, 23 nt, Molluscum contagiosum virus
gcucgagccugccagcgccagcc

SEQ ID NO: 3089793 - RNA, 16 nt, Molluscum contagiosum virus
aaugcgucccagcagc

SEQ ID NO: 3089794 - RNA, 20 nt, Molluscum contagiosum virus
agcacggcuuccggcaccac

SEQ ID NO: 3089795 - RNA, 14 nt, Molluscum contagiosum virus
cacgagcacugccu

SEQ ID NO: 3089796 - RNA, 23 nt, Molluscum contagiosum virus
gcagcagcucggggcugucagag

SEQ ID NO: 3089797 - RNA, 21 nt, Molluscum contagiosum virus
cugcucucggcagcgucgcgg

SEQ ID NO: 3089798 - RNA, 18 nt, Molluscum contagiosum virus
gcuuuuguuacucucaga

SEQ ID NO: 3089799 - RNA, 21 nt, Molluscum contagiosum virus
uugucgagacaggccggggcc

SEQ ID NO: 3089800 - RNA, 17 nt, Molluscum contagiosum virus
caugcgcaagcagcucg

SEQ ID NO: 3089801 - RNA, 20 nt, Molluscum contagiosum virus
acuugucaggccggccgugg

SEQ ID NO: 3089802 - RNA, 21 nt, Molluscum contagiosum virus
ucacgacuguguucccggcug

SEQ ID NO: 3089803 - RNA, 16 nt, Molluscum contagiosum virus
gcuccgacgcgguggu

SEQ ID NO: 3089804 - RNA, 18 nt, Molluscum contagiosum virus
ggccauggagcgcccgcu

SEQ ID NO: 3089805 - RNA, 15 nt, Molluscum contagiosum virus
cagaaacucuccgac

SEQ ID NO: 3089806 - RNA, 19 nt, Molluscum contagiosum virus
acagacauggcccgcgcgg

SEQ ID NO: 3089807 - RNA, 16 nt, Molluscum contagiosum virus
ugcucuaccuggugcu

SEQ ID NO: 3089808 - RNA, 19 nt, Molluscum contagiosum virus
uccgcgagcuaaucagcgc

SEQ ID NO: 3089809 - RNA, 21 nt, Molluscum contagiosum virus
agcacggcuugccgcucggca

SEQ ID NO: 3089810 - RNA, 16 nt, Molluscum contagiosum virus
cacuccagcgcgcccu

SEQ ID NO: 3089811 - RNA, 15 nt, Molluscum contagiosum virus
cccgugucgggcugc

SEQ ID NO: 3089812 - RNA, 17 nt, Molluscum contagiosum virus
aagcacggaaacacucg

SEQ ID NO: 3089813 - RNA, 23 nt, Molluscum contagiosum virus
gcaccucccugugaacgcaccgc

SEQ ID NO: 3089814 - RNA, 15 nt, Molluscum contagiosum virus
cucucgagcacuucc

SEQ ID NO: 3089815 - RNA, 18 nt, Molluscum contagiosum virus
cuccugaggaagcaagac

SEQ ID NO: 3089816 - RNA, 17 nt, Molluscum contagiosum virus
gaacaccacacgcgcgg

SEQ ID NO: 3089817 - RNA, 13 nt, Molluscum contagiosum virus
gacgugcugcugg

SEQ ID NO: 3089818 - RNA, 12 nt, Molluscum contagiosum virus
aaaugcgcugcu

SEQ ID NO: 3089819 - RNA, 14 nt, Molluscum contagiosum virus
gucuccuccugaug

SEQ ID NO: 3089820 - RNA, 20 nt, Molluscum contagiosum virus
acuacugcuccauggagcgc

SEQ ID NO: 3089821 - RNA, 11 nt, Molluscum contagiosum virus
aacagcuucac

SEQ ID NO: 3089822 - RNA, 18 nt, Molluscum contagiosum virus
cuccaggaacgcgccgcg

SEQ ID NO: 3089823 - RNA, 11 nt, Molluscum contagiosum virus
ggucccuagcc

SEQ ID NO: 3089824 - RNA, 21 nt, Molluscum contagiosum virus
gcagccccguaggcgggccug

SEQ ID NO: 3089825 - RNA, 17 nt, Molluscum contagiosum virus
cgggcccgugcccgagc

SEQ ID NO: 3089826 - RNA, 14 nt, Molluscum contagiosum virus
uccucucuccccuu

SEQ ID NO: 3089827 - RNA, 17 nt, Molluscum contagiosum virus
ucaacggcacagucugg

SEQ ID NO: 3089828 - RNA, 18 nt, Molluscum contagiosum virus
gcacugcgcgucugugcg

SEQ ID NO: 3089829 - RNA, 14 nt, Molluscum contagiosum virus
gcacgccagccugg

SEQ ID NO: 3089830 - RNA, 22 nt, Molluscum contagiosum virus
accgagcaagcuggaggcugcc

SEQ ID NO: 3089831 - RNA, 17 nt, Molluscum contagiosum virus
ugccuuucaggggucug

SEQ ID NO: 3089832 - RNA, 16 nt, Molluscum contagiosum virus
ggcacgcagcucuucc

SEQ ID NO: 3089833 - RNA, 18 nt, Molluscum contagiosum virus
cuuacgcuacagcagccg

SEQ ID NO: 3089834 - RNA, 13 nt, Molluscum contagiosum virus
caugcggagcugg

SEQ ID NO: 3089835 - RNA, 21 nt, Molluscum contagiosum virus
gugccuggcguccgcacgcac

SEQ ID NO: 3089836 - RNA, 14 nt, Molluscum contagiosum virus
augaggcugcucuc

SEQ ID NO: 3089837 - RNA, 17 nt, Molluscum contagiosum virus
gauuccgucccccgcgg

SEQ ID NO: 3089838 - RNA, 19 nt, Molluscum contagiosum virus
gcccucgcgcgcgcgcggc

SEQ ID NO: 3089839 - RNA, 21 nt, Molluscum contagiosum virus
cagcagguucgugcgcaugaa

SEQ ID NO: 3089840 - RNA, 22 nt, Molluscum contagiosum virus
ugcgcaugguggcgauccuguc

SEQ ID NO: 3089841 - RNA, 21 nt, Molluscum contagiosum virus
ucuugguggacagccuuugug

SEQ ID NO: 3089842 - RNA, 18 nt, Molluscum contagiosum virus
ggcguccggugcucgccc

SEQ ID NO: 3089843 - RNA, 18 nt, Molluscum contagiosum virus
ggcguccggcgcucgccu

SEQ ID NO: 3089844 - RNA, 18 nt, Molluscum contagiosum virus
gcgcggcagcagccucgu

SEQ ID NO: 3089845 - RNA, 13 nt, Molluscum contagiosum virus
ccggcugcuccuc

SEQ ID NO: 3089846 - RNA, 15 nt, Molluscum contagiosum virus
cuggacugugcuucc

SEQ ID NO: 3089847 - RNA, 13 nt, Molluscum contagiosum virus
gccugugcccugg

SEQ ID NO: 3089848 - RNA, 21 nt, Molluscum contagiosum virus
aaagcacagcaggagcacgcc

SEQ ID NO: 3089849 - RNA, 16 nt, Molluscum contagiosum virus
ggcgccauugcucgcg

SEQ ID NO: 3089850 - RNA, 17 nt, Molluscum contagiosum virus
cgcgacuaccugcugcu

SEQ ID NO: 3089851 - RNA, 20 nt, Molluscum contagiosum virus
gagcugcugcccgccuucga

SEQ ID NO: 3089852 - RNA, 17 nt, Molluscum contagiosum virus
ggcgagcuagugcacac

SEQ ID NO: 3089853 - RNA, 12 nt, Molluscum contagiosum virus
cacaccagcugg

SEQ ID NO: 3089854 - RNA, 12 nt, Molluscum contagiosum virus
gcgccucucgag

SEQ ID NO: 3089855 - RNA, 13 nt, Molluscum contagiosum virus
ggcgcgggcgcgc

SEQ ID NO: 3089856 - RNA, 14 nt, Molluscum contagiosum virus
guggcgcugggcgc

SEQ ID NO: 3089857 - RNA, 15 nt, Molluscum contagiosum virus
uccucccugcgggcg

SEQ ID NO: 3089858 - RNA, 20 nt, Molluscum contagiosum virus
gcgcgagauucuggcgcgcg

SEQ ID NO: 3089859 - RNA, 16 nt, Molluscum contagiosum virus
ccggcagcgacuacgc

SEQ ID NO: 3089860 - RNA, 14 nt, Molluscum contagiosum virus
ggcggcgcuggaga

SEQ ID NO: 3089861 - RNA, 21 nt, Molluscum contagiosum virus
augccuuuccgagcucgcaaa

SEQ ID NO: 3089862 - RNA, 14 nt, Molluscum contagiosum virus
ggcgcccgcggaca

SEQ ID NO: 3089863 - RNA, 15 nt, Molluscum contagiosum virus
cgcuggccucugcca

SEQ ID NO: 3089864 - RNA, 20 nt, Molluscum contagiosum virus
cgaucgcgucacguccucaa

SEQ ID NO: 3089865 - RNA, 23 nt, Molluscum contagiosum virus
gaggacgccggcaagccgagcca

SEQ ID NO: 3089866 - RNA, 14 nt, Molluscum contagiosum virus
cgcgagugugcaug

SEQ ID NO: 3089867 - RNA, 16 nt, Molluscum contagiosum virus
acccguggccgagccg

SEQ ID NO: 3089868 - RNA, 17 nt, Molluscum contagiosum virus
gccggcacgagcagucc

SEQ ID NO: 3089869 - RNA, 13 nt, Molluscum contagiosum virus
cucacggcugugg

SEQ ID NO: 3089870 - RNA, 13 nt, Molluscum contagiosum virus
gcucuccaugcgc

SEQ ID NO: 3089871 - RNA, 15 nt, Molluscum contagiosum virus
acgcacgcgcgggca

SEQ ID NO: 3089872 - RNA, 16 nt, Molluscum contagiosum virus
aucccaagagccaugu

SEQ ID NO: 3089873 - RNA, 14 nt, Molluscum contagiosum virus
gauggcgcagcucc

SEQ ID NO: 3089874 - RNA, 20 nt, Molluscum contagiosum virus
gccgaccauuuccugcgagu

SEQ ID NO: 3089875 - RNA, 19 nt, Molluscum contagiosum virus
gagaugcgguccgacucgg

SEQ ID NO: 3089876 - RNA, 17 nt, Molluscum contagiosum virus
gccacggcugcaagcac

SEQ ID NO: 3089877 - RNA, 18 nt, Molluscum contagiosum virus
gcacgauguacuccacca

SEQ ID NO: 3089878 - RNA, 17 nt, Molluscum contagiosum virus
gacggccguuuuuggga

SEQ ID NO: 3089879 - RNA, 17 nt, Molluscum contagiosum virus
gagaggaaaggcgcacc

SEQ ID NO: 3089880 - RNA, 18 nt, Molluscum contagiosum virus
uuuccuugccuucucgaa

SEQ ID NO: 3089881 - RNA, 16 nt, Molluscum contagiosum virus
gcguggcgcaccugcu

SEQ ID NO: 3089882 - RNA, 20 nt, Molluscum contagiosum virus
cuggcccugcuugacgcgag

SEQ ID NO: 3089883 - RNA, 20 nt, Molluscum contagiosum virus
ggccgcgcucgucggcggca

SEQ ID NO: 3089884 - RNA, 21 nt, Molluscum contagiosum virus
cucagcaggcuguguuccagc

SEQ ID NO: 3089885 - RNA, 19 nt, Molluscum contagiosum virus
caccgaggagccgcgcuuc

SEQ ID NO: 3089886 - RNA, 15 nt, Molluscum contagiosum virus
cacguugcagcagca

SEQ ID NO: 3089887 - RNA, 17 nt, Molluscum contagiosum virus
gccgugugaucaagagc

SEQ ID NO: 3089888 - RNA, 15 nt, Molluscum contagiosum virus
agacaggccggggcc

SEQ ID NO: 3089889 - RNA, 18 nt, Molluscum contagiosum virus
agcaagacccagcaaggc

SEQ ID NO: 3089890 - RNA, 14 nt, Molluscum contagiosum virus
uccaagaagaggcc

SEQ ID NO: 3089891 - RNA, 22 nt, Molluscum contagiosum virus
ccugcgacagcugcugcucgca

SEQ ID NO: 3089892 - RNA, 16 nt, Molluscum contagiosum virus
cccagcagcugcuccg

SEQ ID NO: 3089893 - RNA, 17 nt, Molluscum contagiosum virus
caacguaguacugcagc

SEQ ID NO: 3089894 - RNA, 13 nt, Molluscum contagiosum virus
guggcgcugcugc

SEQ ID NO: 3089895 - RNA, 15 nt, Molluscum contagiosum virus
cgcgaccuccgcucu

SEQ ID NO: 3089896 - RNA, 21 nt, Molluscum contagiosum virus
gcgccggaaagaagggcucgc

SEQ ID NO: 3089897 - RNA, 17 nt, Molluscum contagiosum virus
agccgcaaccucuuccg

SEQ ID NO: 3089898 - RNA, 15 nt, Molluscum contagiosum virus
cuuggcagcaacugc

SEQ ID NO: 3089899 - RNA, 23 nt, Molluscum contagiosum virus
acgcgaaguuccugcauuucaug

SEQ ID NO: 3089900 - RNA, 19 nt, Molluscum contagiosum virus
gacggcugguguuaccggg

SEQ ID NO: 3089901 - RNA, 16 nt, Molluscum contagiosum virus
gcucguggacagccug

SEQ ID NO: 3089902 - RNA, 21 nt, Molluscum contagiosum virus
cuguccgcgggcgcgggccug

SEQ ID NO: 3089903 - RNA, 21 nt, Molluscum contagiosum virus
gucgcgcaucaccgagcgaga

SEQ ID NO: 3089904 - RNA, 22 nt, Molluscum contagiosum virus
ggcaagaccaucaucgcgcugc

SEQ ID NO: 3089905 - RNA, 17 nt, Molluscum contagiosum virus
agcccgcggcgcacggu

SEQ ID NO: 3089906 - RNA, 15 nt, Molluscum contagiosum virus
agaccaccagcacca

SEQ ID NO: 3089907 - RNA, 15 nt, Molluscum contagiosum virus
gcgagugcggccacc

SEQ ID NO: 3089908 - RNA, 15 nt, Molluscum contagiosum virus
ugccugucucgcaag

SEQ ID NO: 3089909 - RNA, 14 nt, Molluscum contagiosum virus
gcaaugggcacgcu

SEQ ID NO: 3089910 - RNA, 15 nt, Molluscum contagiosum virus
acgccuuccugcugg

SEQ ID NO: 3089911 - RNA, 17 nt, Molluscum contagiosum virus
gcgcuugggcacugcua

SEQ ID NO: 3089912 - RNA, 20 nt, Molluscum contagiosum virus
guggaggcgacuggcgacac

SEQ ID NO: 3089913 - RNA, 16 nt, Molluscum contagiosum virus
aacacgcaaucgcgcg

SEQ ID NO: 3089914 - RNA, 18 nt, Molluscum contagiosum virus
auguccggcgcuggagaa

SEQ ID NO: 3089915 - RNA, 13 nt, Molluscum contagiosum virus
caaccgggcucuc

SEQ ID NO: 3089916 - RNA, 13 nt, Molluscum contagiosum virus
agcucagcaggcu

SEQ ID NO: 3089917 - RNA, 20 nt, Molluscum contagiosum virus
guagggugccgaggcgcugc

SEQ ID NO: 3089918 - RNA, 20 nt, Molluscum contagiosum virus
ugccgcggacgccggcgccc

SEQ ID NO: 3089919 - RNA, 20 nt, Molluscum contagiosum virus
cuuagcuuccgucugcugcu

SEQ ID NO: 3089920 - RNA, 15 nt, Molluscum contagiosum virus
gugcccgccaagagc

SEQ ID NO: 3089921 - RNA, 21 nt, Molluscum contagiosum virus
agccuucuucgugcugugccu

SEQ ID NO: 3089922 - RNA, 18 nt, Molluscum contagiosum virus
gaacccgcauugggccuu

SEQ ID NO: 3089923 - RNA, 17 nt, Molluscum contagiosum virus
cuacacauuccucggcg

SEQ ID NO: 3089924 - RNA, 19 nt, Molluscum contagiosum virus
gcggacgcgggccuguccg

SEQ ID NO: 3089925 - RNA, 21 nt, Molluscum contagiosum virus
aauggccuugcgagcgcugcc

SEQ ID NO: 3089926 - RNA, 22 nt, Molluscum contagiosum virus
uucgccggcaucgcgcugcugg

SEQ ID NO: 3089927 - RNA, 12 nt, Molluscum contagiosum virus
auggcugcucuc

SEQ ID NO: 3089928 - RNA, 12 nt, Molluscum contagiosum virus
cgcgcgagcgga

SEQ ID NO: 3089929 - RNA, 16 nt, Molluscum contagiosum virus
gccgcaggccaggugc

SEQ ID NO: 3089930 - RNA, 13 nt, Molluscum contagiosum virus
gccgagguggcac

SEQ ID NO: 3089931 - RNA, 13 nt, Molluscum contagiosum virus
aggcgcaggccgc

SEQ ID NO: 3089932 - RNA, 12 nt, Molluscum contagiosum virus
gcaacugccugc

SEQ ID NO: 3089933 - RNA, 12 nt, Molluscum contagiosum virus
cggagcugugcc

SEQ ID NO: 3089934 - RNA, 20 nt, Molluscum contagiosum virus
gaacagagaaaggcacccac

SEQ ID NO: 3089935 - RNA, 22 nt, Molluscum contagiosum virus
gacuaugcgucuuccugcugcc

SEQ ID NO: 3089936 - RNA, 15 nt, Molluscum contagiosum virus
guucugcgcugccag

SEQ ID NO: 3089937 - RNA, 14 nt, Molluscum contagiosum virus
gaagagucgcgccu

SEQ ID NO: 3089938 - RNA, 17 nt, Molluscum contagiosum virus
cagcguggagcaccugg

SEQ ID NO: 3089939 - RNA, 20 nt, Molluscum contagiosum virus
gcugcgcauggccacgcccg

SEQ ID NO: 3089940 - RNA, 13 nt, Molluscum contagiosum virus
uggcaaacaggca

SEQ ID NO: 3089941 - RNA, 20 nt, Molluscum contagiosum virus
gcccggacacguagcccagg

SEQ ID NO: 3089942 - RNA, 18 nt, Molluscum contagiosum virus
cgggcguggggagcugga

SEQ ID NO: 3089943 - RNA, 19 nt, Molluscum contagiosum virus
ggcgacaacgacagagccc

SEQ ID NO: 3089944 - RNA, 17 nt, Molluscum contagiosum virus
ggccagcagcuccuggu

SEQ ID NO: 3089945 - RNA, 17 nt, Molluscum contagiosum virus
augguggcgcugcugcc

SEQ ID NO: 3089946 - RNA, 16 nt, Molluscum contagiosum virus
agcaugcgugcaacag

SEQ ID NO: 3089947 - RNA, 16 nt, Molluscum contagiosum virus
cugcgcucgccugcuu

SEQ ID NO: 3089948 - RNA, 22 nt, Molluscum contagiosum virus
cgagaucacggcgugcgcgaga

SEQ ID NO: 3089949 - RNA, 20 nt, Molluscum contagiosum virus
gcgcugcgcgcgcucgcgca

SEQ ID NO: 3089950 - RNA, 23 nt, Molluscum contagiosum virus
ccgacgggccccuguuggccccg

SEQ ID NO: 3089951 - RNA, 15 nt, Molluscum contagiosum virus
cuucgggccgcugcc

SEQ ID NO: 3089952 - RNA, 16 nt, Molluscum contagiosum virus
cuccucgagcgccgcc

SEQ ID NO: 3089953 - RNA, 16 nt, Molluscum contagiosum virus
uccuugcgcuuguccu

SEQ ID NO: 3089954 - RNA, 17 nt, Molluscum contagiosum virus
ggcgacgagggcgccaa

SEQ ID NO: 3089955 - RNA, 20 nt, Molluscum contagiosum virus
uaccggagacaccagcuccg

SEQ ID NO: 3089956 - RNA, 18 nt, Molluscum contagiosum virus
ggacgccagcuugagcac

SEQ ID NO: 3089957 - RNA, 13 nt, Molluscum contagiosum virus
gucgacagagaag

SEQ ID NO: 3089958 - RNA, 18 nt, Molluscum contagiosum virus
cggucaacggcacagucu

SEQ ID NO: 3089959 - RNA, 14 nt, Molluscum contagiosum virus
caggaccugcuggu

SEQ ID NO: 3089960 - RNA, 22 nt, Molluscum contagiosum virus
gcaugaaaggcaccugcggcuc

SEQ ID NO: 3089961 - RNA, 17 nt, Molluscum contagiosum virus
cagacgugcacaaagcc

SEQ ID NO: 3089962 - RNA, 16 nt, Molluscum contagiosum virus
agcuccgccgggaaua

SEQ ID NO: 3089963 - RNA, 15 nt, Molluscum contagiosum virus
caagaagcggcccug

SEQ ID NO: 3089964 - RNA, 23 nt, Molluscum contagiosum virus
caaggaaaggcacccgcaggaaa

SEQ ID NO: 3089965 - RNA, 23 nt, Molluscum contagiosum virus
cgccgguggcgcgcgagcugcug

SEQ ID NO: 3089966 - RNA, 18 nt, Molluscum contagiosum virus
uucgcagaggacagcucc

SEQ ID NO: 3089967 - RNA, 21 nt, Molluscum contagiosum virus
ccucgaagcgagagguugggg

SEQ ID NO: 3089968 - RNA, 23 nt, Molluscum contagiosum virus
ugccugcgcaacgcgggccaggc

SEQ ID NO: 3089969 - RNA, 22 nt, Molluscum contagiosum virus
ugcuccccgaaauggcccccgc

SEQ ID NO: 3089970 - RNA, 12 nt, Molluscum contagiosum virus
acuggacugagc

SEQ ID NO: 3089971 - RNA, 19 nt, Molluscum contagiosum virus
cgaccucuuuccgcgcuuu

SEQ ID NO: 3089972 - RNA, 22 nt, Molluscum contagiosum virus
uccgggcacguccgccucggaa

SEQ ID NO: 3089973 - RNA, 14 nt, Molluscum contagiosum virus
cucgcgcgcacgcg

SEQ ID NO: 3089974 - RNA, 18 nt, Molluscum contagiosum virus
cuaccacgagcacugccu

SEQ ID NO: 3089975 - RNA, 16 nt, Molluscum contagiosum virus
acgcugcgcgugcugg

SEQ ID NO: 3089976 - RNA, 21 nt, Molluscum contagiosum virus
uccacaaagcccuccugagaa

SEQ ID NO: 3089977 - RNA, 18 nt, Molluscum contagiosum virus
gccacgcagaucaggagc

SEQ ID NO: 3089978 - RNA, 19 nt, Molluscum contagiosum virus
accagcuggacggugcugg

SEQ ID NO: 3089979 - RNA, 16 nt, Molluscum contagiosum virus
ggcucgugcuggagca

SEQ ID NO: 3089980 - RNA, 15 nt, Molluscum contagiosum virus
uagcgguguugcugu

SEQ ID NO: 3089981 - RNA, 21 nt, Molluscum contagiosum virus
agcucugauuacauccugccc

SEQ ID NO: 3089982 - RNA, 16 nt, Molluscum contagiosum virus
gcucgcgcgccagcac

SEQ ID NO: 3089983 - RNA, 21 nt, Molluscum contagiosum virus
ugaccuucaccaucaacaucu

SEQ ID NO: 3089984 - RNA, 18 nt, Molluscum contagiosum virus
cugcugggcguggcgcac

SEQ ID NO: 3089985 - RNA, 23 nt, Molluscum contagiosum virus
ggagcgagugcgcgugcgccugc

SEQ ID NO: 3089986 - RNA, 17 nt, Molluscum contagiosum virus
caugcggcaggcgcugc

SEQ ID NO: 3089987 - RNA, 19 nt, Molluscum contagiosum virus
agauggucacgcgcaaggc

SEQ ID NO: 3089988 - RNA, 18 nt, Molluscum contagiosum virus
cgggcacgugcugcugcg

SEQ ID NO: 3089989 - RNA, 13 nt, Molluscum contagiosum virus
gccggcugcccug

SEQ ID NO: 3089990 - RNA, 18 nt, Molluscum contagiosum virus
gcagguugaagcucucgc

SEQ ID NO: 3089991 - RNA, 19 nt, Molluscum contagiosum virus
cagccgagcgccgccagcu

SEQ ID NO: 3089992 - RNA, 12 nt, Molluscum contagiosum virus
ggcauggagggc

SEQ ID NO: 3089993 - RNA, 16 nt, Molluscum contagiosum virus
gccgcggcgcccacgg

SEQ ID NO: 3089994 - RNA, 19 nt, Molluscum contagiosum virus
gcacgaccacgugcaggau

SEQ ID NO: 3089995 - RNA, 22 nt, Molluscum contagiosum virus
cggcgcucgccuuuccccggcg

SEQ ID NO: 3089996 - RNA, 14 nt, Molluscum contagiosum virus
cguagagcagcgcu

SEQ ID NO: 3089997 - RNA, 16 nt, Molluscum contagiosum virus
ggcgcaacgcuggccg

SEQ ID NO: 3089998 - RNA, 18 nt, Molluscum contagiosum virus
aauggggcaaacgcugac

SEQ ID NO: 3089999 - RNA, 15 nt, Molluscum contagiosum virus
agccagccaggcgcc

SEQ ID NO: 3090000 - RNA, 22 nt, Molluscum contagiosum virus
ugguguacgaaaguacuuuugc

SEQ ID NO: 3090001 - RNA, 16 nt, Molluscum contagiosum virus
ggccugcguggacagc

SEQ ID NO: 3090002 - RNA, 13 nt, Molluscum contagiosum virus
acgucuuucucga

SEQ ID NO: 3090003 - RNA, 12 nt, Molluscum contagiosum virus
ccgaccaccagg

SEQ ID NO: 3090004 - RNA, 18 nt, Molluscum contagiosum virus
ccgugucgggcugcaucu

SEQ ID NO: 3090005 - RNA, 15 nt, Molluscum contagiosum virus
uggccagccucaucg

SEQ ID NO: 3090006 - RNA, 16 nt, Molluscum contagiosum virus
cgcucgccucugggcg

SEQ ID NO: 3090007 - RNA, 23 nt, Molluscum contagiosum virus
gcugcgcgaguaccugggcaggc

SEQ ID NO: 3090008 - RNA, 22 nt, Molluscum contagiosum virus
gcccagaacaugucgagaccuu

SEQ ID NO: 3090009 - RNA, 16 nt, Molluscum contagiosum virus
acgggcucgugcugga

SEQ ID NO: 3090010 - RNA, 23 nt, Molluscum contagiosum virus
cugcggguaguugcgagccagcc

SEQ ID NO: 3090011 - RNA, 21 nt, Molluscum contagiosum virus
ccgccagcgacgagcagcugc

SEQ ID NO: 3090012 - RNA, 14 nt, Molluscum contagiosum virus
gcggcggagacuga

SEQ ID NO: 3090013 - RNA, 20 nt, Molluscum contagiosum virus
aguccgucacggacagcagc

SEQ ID NO: 3090014 - RNA, 14 nt, Molluscum contagiosum virus
aucgccagcaucaa

SEQ ID NO: 3090015 - RNA, 14 nt, Molluscum contagiosum virus
accccgaaaggcac

SEQ ID NO: 3090016 - RNA, 21 nt, Molluscum contagiosum virus
ugagcgggguacaggcgcggc

SEQ ID NO: 3090017 - RNA, 17 nt, Molluscum contagiosum virus
uaccugguggagcacuu

SEQ ID NO: 3090018 - RNA, 12 nt, Molluscum contagiosum virus
uaccugcugcug

SEQ ID NO: 3090019 - RNA, 23 nt, Molluscum contagiosum virus
ccgcaggaaagguacccgcagga

SEQ ID NO: 3090020 - RNA, 18 nt, Molluscum contagiosum virus
cuggagcuggcugggcac

SEQ ID NO: 3090021 - RNA, 22 nt, Molluscum contagiosum virus
gccggcgggcgcgugcucacgc

SEQ ID NO: 3090022 - RNA, 15 nt, Molluscum contagiosum virus
gacacugugcuggcg

SEQ ID NO: 3090023 - RNA, 13 nt, Molluscum contagiosum virus
ccgagcuguucaa

SEQ ID NO: 3090024 - RNA, 22 nt, Molluscum contagiosum virus
acgcucgcgcuguauucggcgu

SEQ ID NO: 3090025 - RNA, 13 nt, Molluscum contagiosum virus
cgcaggccgcgcc

SEQ ID NO: 3090026 - RNA, 14 nt, Molluscum contagiosum virus
cuggccggcucgcu

SEQ ID NO: 3090027 - RNA, 20 nt, Molluscum contagiosum virus
cuuggcaauggcgcgcagcu

SEQ ID NO: 3090028 - RNA, 19 nt, Molluscum contagiosum virus
gcgcacgcgagcacgccug

SEQ ID NO: 3090029 - RNA, 19 nt, Molluscum contagiosum virus
gacaaggaaaggcacccac

SEQ ID NO: 3090030 - RNA, 21 nt, Molluscum contagiosum virus
gcugcgcgacgucgucaagga

SEQ ID NO: 3090031 - RNA, 13 nt, Molluscum contagiosum virus
cgugcaagcccag

SEQ ID NO: 3090032 - RNA, 18 nt, Molluscum contagiosum virus
gcccgagcccggccagac

SEQ ID NO: 3090033 - RNA, 23 nt, Molluscum contagiosum virus
ugccagcgggaaacugcugcccg

SEQ ID NO: 3090034 - RNA, 20 nt, Molluscum contagiosum virus
ucuccacgucgaucagcucc

SEQ ID NO: 3090035 - RNA, 14 nt, Molluscum contagiosum virus
acgagcagcugcug

SEQ ID NO: 3090036 - RNA, 21 nt, Molluscum contagiosum virus
gccuucguggagcccgugcug

SEQ ID NO: 3090037 - RNA, 21 nt, Molluscum contagiosum virus
ccgaagccgcaggccaggugc

SEQ ID NO: 3090038 - RNA, 17 nt, Molluscum contagiosum virus
cagcuccagcauggcgc

SEQ ID NO: 3090039 - RNA, 23 nt, Molluscum contagiosum virus
cucccaggaagacgugcugcgcg

SEQ ID NO: 3090040 - RNA, 21 nt, Molluscum contagiosum virus
caggcggugggcgccgcggcc

SEQ ID NO: 3090041 - RNA, 21 nt, Molluscum contagiosum virus
ccaccugagccucuggaagga

SEQ ID NO: 3090042 - RNA, 17 nt, Molluscum contagiosum virus
gacuacuacguggugcg

SEQ ID NO: 3090043 - RNA, 17 nt, Molluscum contagiosum virus
ggaaacgcuggcgagca

SEQ ID NO: 3090044 - RNA, 22 nt, Molluscum contagiosum virus
gcgcggcgcguccucggccaga

SEQ ID NO: 3090045 - RNA, 13 nt, Molluscum contagiosum virus
gcucgcgugcgug

SEQ ID NO: 3090046 - RNA, 20 nt, Molluscum contagiosum virus
ggcaggagccucuguccugc

SEQ ID NO: 3090047 - RNA, 20 nt, Molluscum contagiosum virus
gcacgcugcguuuccagggc

SEQ ID NO: 3090048 - RNA, 20 nt, Molluscum contagiosum virus
cgcgcgccgguagggugccg

SEQ ID NO: 3090049 - RNA, 14 nt, Molluscum contagiosum virus
gccaugcuccugau

SEQ ID NO: 3090050 - RNA, 18 nt, Molluscum contagiosum virus
gcuggcgcacuggggcga

SEQ ID NO: 3090051 - RNA, 16 nt, Molluscum contagiosum virus
cgcgucgcgcgccgca

SEQ ID NO: 3090052 - RNA, 23 nt, Molluscum contagiosum virus
cagcugcaggaccugcugguggu

SEQ ID NO: 3090053 - RNA, 15 nt, Molluscum contagiosum virus
gcucgcgcacgcgca

SEQ ID NO: 3090054 - RNA, 19 nt, Molluscum contagiosum virus
ucgcgcuuccggcggcucc

SEQ ID NO: 3090055 - RNA, 19 nt, Molluscum contagiosum virus
gacgaugguggcgcugcug

SEQ ID NO: 3090056 - RNA, 18 nt, Molluscum contagiosum virus
gcagaucgcgagaggaga

SEQ ID NO: 3090057 - RNA, 22 nt, Molluscum contagiosum virus
uccggcggcuggaccugcgcca

SEQ ID NO: 3090058 - RNA, 17 nt, Molluscum contagiosum virus
caugcgcgccgcgcugc

SEQ ID NO: 3090059 - RNA, 18 nt, Molluscum contagiosum virus
cagcagaggaguagcgug

SEQ ID NO: 3090060 - RNA, 15 nt, Molluscum contagiosum virus
cucggguuccagcuc

SEQ ID NO: 3090061 - RNA, 17 nt, Molluscum contagiosum virus
ggccaggcacuggcccu

SEQ ID NO: 3090062 - RNA, 16 nt, Molluscum contagiosum virus
gaggcgcuagugcaga

SEQ ID NO: 3090063 - RNA, 18 nt, Molluscum contagiosum virus
caaguucgcugcuggcag

SEQ ID NO: 3090064 - RNA, 23 nt, Molluscum contagiosum virus
agagcuccccgcgcgcagcgcgu

SEQ ID NO: 3090065 - RNA, 17 nt, Molluscum contagiosum virus
gggcuccuucuucagca

SEQ ID NO: 3090066 - RNA, 16 nt, Molluscum contagiosum virus
cgcaaagacggacccg

SEQ ID NO: 3090067 - RNA, 21 nt, Molluscum contagiosum virus
cuccgcggaggccaagcaaac

SEQ ID NO: 3090068 - RNA, 14 nt, Molluscum contagiosum virus
ggcgcccgugccgc

SEQ ID NO: 3090069 - RNA, 18 nt, Molluscum contagiosum virus
gacacgcugcgcgugcug

SEQ ID NO: 3090070 - RNA, 19 nt, Molluscum contagiosum virus
augcgcgggaugcuggacg

SEQ ID NO: 3090071 - RNA, 13 nt, Molluscum contagiosum virus
cucgugcugcucu

SEQ ID NO: 3090072 - RNA, 18 nt, Molluscum contagiosum virus
gugcaguggcuacuggag

SEQ ID NO: 3090073 - RNA, 18 nt, Molluscum contagiosum virus
ggcuguuguacuggagac

SEQ ID NO: 3090074 - RNA, 19 nt, Molluscum contagiosum virus
gccuuucgaguccccagac

SEQ ID NO: 3090075 - RNA, 18 nt, Molluscum contagiosum virus
gggaaagaugaagcucuc

SEQ ID NO: 3090076 - RNA, 22 nt, Molluscum contagiosum virus
cggacgcgggccgcgcgcacaa

SEQ ID NO: 3090077 - RNA, 20 nt, Molluscum contagiosum virus
ccgggccccugucgcgcacg

SEQ ID NO: 3090078 - RNA, 14 nt, Molluscum contagiosum virus
uggacgcuccgagc

SEQ ID NO: 3090079 - RNA, 22 nt, Molluscum contagiosum virus
gccccguaggcgggccugcgcc

SEQ ID NO: 3090080 - RNA, 15 nt, Molluscum contagiosum virus
cgccagugcuuuguc

SEQ ID NO: 3090081 - RNA, 13 nt, Molluscum contagiosum virus
caccugcggcugc

SEQ ID NO: 3090082 - RNA, 16 nt, Molluscum contagiosum virus
uccgagcggcugcucg

SEQ ID NO: 3090083 - RNA, 23 nt, Molluscum contagiosum virus
gcaccagcaccggcguguggcuc

SEQ ID NO: 3090084 - RNA, 18 nt, Molluscum contagiosum virus
acgauaaauggaccucaa

SEQ ID NO: 3090085 - RNA, 17 nt, Molluscum contagiosum virus
cgggcacgugcugcugc

SEQ ID NO: 3090086 - RNA, 14 nt, Molluscum contagiosum virus
gagcgcaugccggg

SEQ ID NO: 3090087 - RNA, 23 nt, Molluscum contagiosum virus
ggacagccaugaggacagcuugc

SEQ ID NO: 3090088 - RNA, 14 nt, Molluscum contagiosum virus
agcccgugcuggag

SEQ ID NO: 3090089 - RNA, 20 nt, Molluscum contagiosum virus
gcgcgagcggagcgggcacg

SEQ ID NO: 3090090 - RNA, 20 nt, Molluscum contagiosum virus
cgcaaggcaugcgcgcagug

SEQ ID NO: 3090091 - RNA, 19 nt, Molluscum contagiosum virus
ccuggugugccagcggcgc

SEQ ID NO: 3090092 - RNA, 17 nt, Molluscum contagiosum virus
ccaguaagcgacagguc

SEQ ID NO: 3090093 - RNA, 16 nt, Molluscum contagiosum virus
gugcgugccaggcgua

SEQ ID NO: 3090094 - RNA, 14 nt, Molluscum contagiosum virus
gagcguugucuuga

SEQ ID NO: 3090095 - RNA, 13 nt, Molluscum contagiosum virus
ucgugcuggagca

SEQ ID NO: 3090096 - RNA, 20 nt, Molluscum contagiosum virus
ccccgcgcgcccgcugcgcg

SEQ ID NO: 3090097 - RNA, 12 nt, Molluscum contagiosum virus
gcacgaggagcc

SEQ ID NO: 3090098 - RNA, 20 nt, Molluscum contagiosum virus
cucgacugcguugucuccuc

SEQ ID NO: 3090099 - RNA, 19 nt, Molluscum contagiosum virus
aucccacguacgagcagcu

SEQ ID NO: 3090100 - RNA, 19 nt, Molluscum contagiosum virus
ugccagcgggaaacugcug

SEQ ID NO: 3090101 - RNA, 16 nt, Molluscum contagiosum virus
gccgcccaagggcgua

SEQ ID NO: 3090102 - RNA, 21 nt, Molluscum contagiosum virus
caggucaucgggcugcagccc

SEQ ID NO: 3090103 - RNA, 17 nt, Molluscum contagiosum virus
acagcuccccgcgcaag

SEQ ID NO: 3090104 - RNA, 14 nt, Molluscum contagiosum virus
cgccgccagcuccg

SEQ ID NO: 3090105 - RNA, 21 nt, Molluscum contagiosum virus
cuucccgcugagcgcagcaca

SEQ ID NO: 3090106 - RNA, 23 nt, Molluscum contagiosum virus
agcagcgcgacuagccugugccc

SEQ ID NO: 3090107 - RNA, 22 nt, Molluscum contagiosum virus
cacuucucgagaccucgcgcuu

SEQ ID NO: 3090108 - RNA, 16 nt, Molluscum contagiosum virus
gaccugucgugcaaug

SEQ ID NO: 3090109 - RNA, 21 nt, Molluscum contagiosum virus
ugucgagaccuuccuccaggg

SEQ ID NO: 3090110 - RNA, 23 nt, Molluscum contagiosum virus
ccgcgccccacugugccagcagc

SEQ ID NO: 3090111 - RNA, 14 nt, Molluscum contagiosum virus
ccuucugccugccc

SEQ ID NO: 3090112 - RNA, 20 nt, Molluscum contagiosum virus
cagcucaagacgcugcuggc

SEQ ID NO: 3090113 - RNA, 23 nt, Molluscum contagiosum virus
cgggaagcugcacgugcagcggc

SEQ ID NO: 3090114 - RNA, 15 nt, Molluscum contagiosum virus
gaugcaggcacugcc

SEQ ID NO: 3090115 - RNA, 18 nt, Molluscum contagiosum virus
gagcgacauagcgcacca

SEQ ID NO: 3090116 - RNA, 14 nt, Molluscum contagiosum virus
cacgagcugcugcg

SEQ ID NO: 3090117 - RNA, 15 nt, Molluscum contagiosum virus
acacgcacuggcgcu

SEQ ID NO: 3090118 - RNA, 14 nt, Molluscum contagiosum virus
caccauccugcgcu

SEQ ID NO: 3090119 - RNA, 22 nt, Molluscum contagiosum virus
ccagcugcaaacauugccuggc

SEQ ID NO: 3090120 - RNA, 19 nt, Molluscum contagiosum virus
gccucagccgagcgccgcc

SEQ ID NO: 3090121 - RNA, 14 nt, Molluscum contagiosum virus
gcgcuuccgcgagu

SEQ ID NO: 3090122 - RNA, 17 nt, Molluscum contagiosum virus
gacggugcugcgcacgg

SEQ ID NO: 3090123 - RNA, 23 nt, Molluscum contagiosum virus
guuuccguguccgguacugcugc

SEQ ID NO: 3090124 - RNA, 15 nt, Molluscum contagiosum virus
gcguaucggagucag

SEQ ID NO: 3090125 - RNA, 20 nt, Molluscum contagiosum virus
gcccccgcaaaagaugaaaa

SEQ ID NO: 3090126 - RNA, 17 nt, Molluscum contagiosum virus
acccgagggcgugcgcu

SEQ ID NO: 3090127 - RNA, 17 nt, Molluscum contagiosum virus
aucccugcgcaccugca

SEQ ID NO: 3090128 - RNA, 23 nt, Molluscum contagiosum virus
aacaaguuccccgugagcgcgcu

SEQ ID NO: 3090129 - RNA, 13 nt, Molluscum contagiosum virus
cagcagcgugcau

SEQ ID NO: 3090130 - RNA, 18 nt, Molluscum contagiosum virus
cgcgugcuugcugcgcug

SEQ ID NO: 3090131 - RNA, 13 nt, Molluscum contagiosum virus
ugaugcuuuuguu

SEQ ID NO: 3090132 - RNA, 16 nt, Molluscum contagiosum virus
ggcacccgcaggaaag

SEQ ID NO: 3090133 - RNA, 15 nt, Molluscum contagiosum virus
ccgugcuugcgcacg

SEQ ID NO: 3090134 - RNA, 16 nt, Molluscum contagiosum virus
ucaagaacaauuacuc

SEQ ID NO: 3090135 - RNA, 14 nt, Molluscum contagiosum virus
cacacgcagugcca

SEQ ID NO: 3090136 - RNA, 20 nt, Molluscum contagiosum virus
ggacgcccuccucgaccugc

SEQ ID NO: 3090137 - RNA, 20 nt, Molluscum contagiosum virus
uccaaggaggucccuagccu

SEQ ID NO: 3090138 - RNA, 15 nt, Molluscum contagiosum virus
gagggcgcgcuggag

SEQ ID NO: 3090139 - RNA, 21 nt, Molluscum contagiosum virus
guacgcgugcgcuggcgcgcg

SEQ ID NO: 3090140 - RNA, 15 nt, Molluscum contagiosum virus
guucccauguaggag

SEQ ID NO: 3090141 - RNA, 17 nt, Molluscum contagiosum virus
ugccgcgcgcugcucug

SEQ ID NO: 3090142 - RNA, 16 nt, Molluscum contagiosum virus
gccccugccuuugcca

SEQ ID NO: 3090143 - RNA, 16 nt, Molluscum contagiosum virus
cugagcaagcucaaga

SEQ ID NO: 3090144 - RNA, 22 nt, Molluscum contagiosum virus
cgauggccacgcagaucaggag

SEQ ID NO: 3090145 - RNA, 12 nt, Molluscum contagiosum virus
cgcgagcugcua

SEQ ID NO: 3090146 - RNA, 18 nt, Molluscum contagiosum virus
gcugcggcugcuggagcu

SEQ ID NO: 3090147 - RNA, 23 nt, Molluscum contagiosum virus
gccuucuucgugcugugccuagg

SEQ ID NO: 3090148 - RNA, 14 nt, Molluscum contagiosum virus
cagaacguggucaa

SEQ ID NO: 3090149 - RNA, 13 nt, Molluscum contagiosum virus
aggacgagcugcu

SEQ ID NO: 3090150 - RNA, 22 nt, Molluscum contagiosum virus
cguaaaagugagagauaaaguc

SEQ ID NO: 3090151 - RNA, 21 nt, Molluscum contagiosum virus
uggcgccgcugcuggaacagg

SEQ ID NO: 3090152 - RNA, 22 nt, Molluscum contagiosum virus
aagcuggccgaggucuuccaca

SEQ ID NO: 3090153 - RNA, 21 nt, Molluscum contagiosum virus
gcgcgccgguagggugccgag

SEQ ID NO: 3090154 - RNA, 17 nt, Molluscum contagiosum virus
cgcggcuuggcgcccuu

SEQ ID NO: 3090155 - RNA, 20 nt, Molluscum contagiosum virus
acgacguacgagugcuggag

SEQ ID NO: 3090156 - RNA, 21 nt, Molluscum contagiosum virus
auugagccggacuuguaguuc

SEQ ID NO: 3090157 - RNA, 16 nt, Molluscum contagiosum virus
ucgcucgcucagcccc

SEQ ID NO: 3090158 - RNA, 21 nt, Molluscum contagiosum virus
cgugcucuuucccugccccga

SEQ ID NO: 3090159 - RNA, 17 nt, Molluscum contagiosum virus
gaguccacugccaaagc

SEQ ID NO: 3090160 - RNA, 13 nt, Molluscum contagiosum virus
agaggaaaggcgc

SEQ ID NO: 3090161 - RNA, 21 nt, Molluscum contagiosum virus
ccaucggaacuagcccuagcc

SEQ ID NO: 3090162 - RNA, 17 nt, Molluscum contagiosum virus
auggccggcaacuggcu

SEQ ID NO: 3090163 - RNA, 15 nt, Molluscum contagiosum virus
agcgcgcugcacacc

SEQ ID NO: 3090164 - RNA, 19 nt, Molluscum contagiosum virus
cgagcagauucacgagcuc

SEQ ID NO: 3090165 - RNA, 15 nt, Molluscum contagiosum virus
ccugucggagcagga

SEQ ID NO: 3090166 - RNA, 19 nt, Molluscum contagiosum virus
ggcgcaaccgcgugcgugc

SEQ ID NO: 3090167 - RNA, 10 nt, Molluscum contagiosum virus
uggacugugc

SEQ ID NO: 3090168 - RNA, 23 nt, Molluscum contagiosum virus
gccccucgugugucggcccggag

SEQ ID NO: 3090169 - RNA, 16 nt, Molluscum contagiosum virus
cgcgcgcagcaggugc

SEQ ID NO: 3090170 - RNA, 13 nt, Molluscum contagiosum virus
gccgcaaacacug

SEQ ID NO: 3090171 - RNA, 17 nt, Molluscum contagiosum virus
guuuguggcgacacgga

SEQ ID NO: 3090172 - RNA, 18 nt, Molluscum contagiosum virus
caccagcgcgcagaagcc

SEQ ID NO: 3090173 - RNA, 19 nt, Molluscum contagiosum virus
cagccguggaguccaugcc

SEQ ID NO: 3090174 - RNA, 16 nt, Molluscum contagiosum virus
ggcucgcgagugugca

SEQ ID NO: 3090175 - RNA, 14 nt, Molluscum contagiosum virus
ugguaguugcagcc

SEQ ID NO: 3090176 - RNA, 13 nt, Molluscum contagiosum virus
uccacggacaugg

SEQ ID NO: 3090177 - RNA, 22 nt, Molluscum contagiosum virus
gucgccggacagcucagcaggc

SEQ ID NO: 3090178 - RNA, 15 nt, Molluscum contagiosum virus
ggcccgcgcucgccg

SEQ ID NO: 3090179 - RNA, 15 nt, Molluscum contagiosum virus
ggccgacggcacggg

SEQ ID NO: 3090180 - RNA, 18 nt, Molluscum contagiosum virus
cccacgagcgccagccug

SEQ ID NO: 3090181 - RNA, 18 nt, Molluscum contagiosum virus
guuggcacccuucugagg

SEQ ID NO: 3090182 - RNA, 13 nt, Molluscum contagiosum virus
gcucguccccgug

SEQ ID NO: 3090183 - RNA, 21 nt, Molluscum contagiosum virus
gcugugcgcuacguggcgcga

SEQ ID NO: 3090184 - RNA, 14 nt, Molluscum contagiosum virus
agacgagcugugcg

SEQ ID NO: 3090185 - RNA, 21 nt, Molluscum contagiosum virus
cgcagccuccgugcgccaguc

SEQ ID NO: 3090186 - RNA, 15 nt, Molluscum contagiosum virus
cgugcugcugcagaa

SEQ ID NO: 3090187 - RNA, 13 nt, Molluscum contagiosum virus
uugaaaggcagaa

SEQ ID NO: 3090188 - RNA, 18 nt, Molluscum contagiosum virus
cgguagcguggagcuggu

SEQ ID NO: 3090189 - RNA, 13 nt, Molluscum contagiosum virus
acccagcaaggcc

SEQ ID NO: 3090190 - RNA, 20 nt, Molluscum contagiosum virus
cucuguagcaucugcgacac

SEQ ID NO: 3090191 - RNA, 18 nt, Molluscum contagiosum virus
gcgcuccgagcggcugcu

SEQ ID NO: 3090192 - RNA, 15 nt, Molluscum contagiosum virus
acgcgcucguccgcc

SEQ ID NO: 3090193 - RNA, 22 nt, Molluscum contagiosum virus
gaaggcauaccagauguucucg

SEQ ID NO: 3090194 - RNA, 14 nt, Molluscum contagiosum virus
acaaccacagcucu

SEQ ID NO: 3090195 - RNA, 18 nt, Molluscum contagiosum virus
agugccgcucgcuguccu

SEQ ID NO: 3090196 - RNA, 14 nt, Molluscum contagiosum virus
uacacuuccugcua

SEQ ID NO: 3090197 - RNA, 19 nt, Molluscum contagiosum virus
ccgccguacccggggagaa

SEQ ID NO: 3090198 - RNA, 17 nt, Molluscum contagiosum virus
caaauuccucgagaggg

SEQ ID NO: 3090199 - RNA, 18 nt, Molluscum contagiosum virus
agaggugcgugccccucg

SEQ ID NO: 3090200 - RNA, 18 nt, Molluscum contagiosum virus
caaagaucgcgguggcag

SEQ ID NO: 3090201 - RNA, 16 nt, Molluscum contagiosum virus
agcuggugauccugga

SEQ ID NO: 3090202 - RNA, 18 nt, Molluscum contagiosum virus
augcgcgggaugcuggac

SEQ ID NO: 3090203 - RNA, 23 nt, Molluscum contagiosum virus
gaggagauggaacugcagcagcu

SEQ ID NO: 3090204 - RNA, 17 nt, Molluscum contagiosum virus
cguggggagcuggagcg

SEQ ID NO: 3090205 - RNA, 22 nt, Molluscum contagiosum virus
cucgagcgcgcgccugcuggcg

SEQ ID NO: 3090206 - RNA, 19 nt, Molluscum contagiosum virus
gacgcguacauccgcgagc

SEQ ID NO: 3090207 - RNA, 17 nt, Molluscum contagiosum virus
gccgcgaaagcgucgug

SEQ ID NO: 3090208 - RNA, 20 nt, Molluscum contagiosum virus
acaccauccugcgcuuugcc

SEQ ID NO: 3090209 - RNA, 19 nt, Molluscum contagiosum virus
cagcgacgagcagcugcuu

SEQ ID NO: 3090210 - RNA, 24 nt, Molluscum contagiosum virus
cuugcucgaaguagccuccguagc

SEQ ID NO: 3090211 - RNA, 19 nt, Molluscum contagiosum virus
cugcuagagaaccugugcg

SEQ ID NO: 3090212 - RNA, 15 nt, Molluscum contagiosum virus
cagcucugcagcgcc

SEQ ID NO: 3090213 - RNA, 20 nt, Molluscum contagiosum virus
caagggcggucccgcgaacg

SEQ ID NO: 3090214 - RNA, 22 nt, Molluscum contagiosum virus
acgcagaccacggcgcgccgcc

SEQ ID NO: 3090215 - RNA, 12 nt, Molluscum contagiosum virus
agccagccaggc

SEQ ID NO: 3090216 - RNA, 20 nt, Molluscum contagiosum virus
ugcccgcggagaccaccgcu

SEQ ID NO: 3090217 - RNA, 22 nt, Molluscum contagiosum virus
ggcgcaucucgauucacaucuu

SEQ ID NO: 3090218 - RNA, 16 nt, Molluscum contagiosum virus
cggagcgcuagcaggg

SEQ ID NO: 3090219 - RNA, 22 nt, Molluscum contagiosum virus
cggggaugaacgcgcugcgcca

SEQ ID NO: 3090220 - RNA, 14 nt, Molluscum contagiosum virus
gaggcccaggccau

SEQ ID NO: 3090221 - RNA, 17 nt, Molluscum contagiosum virus
gcaccgcacgccagcag

SEQ ID NO: 3090222 - RNA, 23 nt, Molluscum contagiosum virus
cauuacccccccuucugucccaa

SEQ ID NO: 3090223 - RNA, 15 nt, Molluscum contagiosum virus
ugcgcggacagagcc

SEQ ID NO: 3090224 - RNA, 16 nt, Molluscum contagiosum virus
ggacugggaacccgug

SEQ ID NO: 3090225 - RNA, 17 nt, Molluscum contagiosum virus
ccggacgugcacgcacg

SEQ ID NO: 3090226 - RNA, 15 nt, Molluscum contagiosum virus
cucugcguguacgac

SEQ ID NO: 3090227 - RNA, 12 nt, Molluscum contagiosum virus
ccgaaagcugcc

SEQ ID NO: 3090228 - RNA, 14 nt, Molluscum contagiosum virus
guacuucuacggga

SEQ ID NO: 3090229 - RNA, 17 nt, Molluscum contagiosum virus
cugguuccucuccucau

SEQ ID NO: 3090230 - RNA, 18 nt, Molluscum contagiosum virus
ggugcuggugcuggucaa

SEQ ID NO: 3090231 - RNA, 16 nt, Molluscum contagiosum virus
cacuacaagcagccgc

SEQ ID NO: 3090232 - RNA, 16 nt, Molluscum contagiosum virus
cggcgcggcgagccgc

SEQ ID NO: 3090233 - RNA, 14 nt, Molluscum contagiosum virus
cgcaacaaggaaag

SEQ ID NO: 3090234 - RNA, 23 nt, Molluscum contagiosum virus
gggaacgaggaaaggcaccccga

SEQ ID NO: 3090235 - RNA, 22 nt, Molluscum contagiosum virus
ugccagaagcccugagaaggag

SEQ ID NO: 3090236 - RNA, 14 nt, Molluscum contagiosum virus
uaugcgaggccugc

SEQ ID NO: 3090237 - RNA, 21 nt, Molluscum contagiosum virus
ccagcucggguuccagcuccg

SEQ ID NO: 3090238 - RNA, 20 nt, Molluscum contagiosum virus
cucguggcguugcugcugcg

SEQ ID NO: 3090239 - RNA, 22 nt, Molluscum contagiosum virus
gccuggcggccaaccgccugcu

SEQ ID NO: 3090240 - RNA, 21 nt, Molluscum contagiosum virus
gguccgacaccagcggcaggc

SEQ ID NO: 3090241 - RNA, 14 nt, Molluscum contagiosum virus
gcagcuccagcaug

SEQ ID NO: 3090242 - RNA, 15 nt, Molluscum contagiosum virus
acguagagcagcgcu

SEQ ID NO: 3090243 - RNA, 11 nt, Molluscum contagiosum virus
ggcgcgccgcg

SEQ ID NO: 3090244 - RNA, 17 nt, Molluscum contagiosum virus
cacggacgagcccuucg

SEQ ID NO: 3090245 - RNA, 12 nt, Molluscum contagiosum virus
gugcgccuucgu

SEQ ID NO: 3090246 - RNA, 13 nt, Molluscum contagiosum virus
cacguagaggaag

SEQ ID NO: 3090247 - RNA, 21 nt, Molluscum contagiosum virus
aggcgaccagcugguccugaa

SEQ ID NO: 3090248 - RNA, 13 nt, Molluscum contagiosum virus
gcgcgugcugcug

SEQ ID NO: 3090249 - RNA, 14 nt, Molluscum contagiosum virus
ggccucguccugga

SEQ ID NO: 3090250 - RNA, 21 nt, Molluscum contagiosum virus
gccuccguuucccgcggcgug

SEQ ID NO: 3090251 - RNA, 23 nt, Molluscum contagiosum virus
ggcggagacgucuucgcgagcgu

SEQ ID NO: 3090252 - RNA, 14 nt, Molluscum contagiosum virus
gugacacgagccgu

SEQ ID NO: 3090253 - RNA, 15 nt, Molluscum contagiosum virus
cgccgcgcgcgccgg

SEQ ID NO: 3090254 - RNA, 14 nt, Molluscum contagiosum virus
cgcggugcagcugc

SEQ ID NO: 3090255 - RNA, 16 nt, Molluscum contagiosum virus
aagagcguccagccgc

SEQ ID NO: 3090256 - RNA, 17 nt, Molluscum contagiosum virus
caagcacgagcugcugc

SEQ ID NO: 3090257 - RNA, 20 nt, Molluscum contagiosum virus
ggcgcgugccgcugcgcgga

SEQ ID NO: 3090258 - RNA, 13 nt, Molluscum contagiosum virus
gccugugcuggcg

SEQ ID NO: 3090259 - RNA, 18 nt, Molluscum contagiosum virus
guggucgccuacgaggug

SEQ ID NO: 3090260 - RNA, 13 nt, Molluscum contagiosum virus
ggccgccgugugc

SEQ ID NO: 3090261 - RNA, 24 nt, Molluscum contagiosum virus
gcuaccgcgacggcgugcuggcca

SEQ ID NO: 3090262 - RNA, 13 nt, Molluscum contagiosum virus
gcugacgcgcagu

SEQ ID NO: 3090263 - RNA, 23 nt, Molluscum contagiosum virus
gcuuugaggaacuagugcugcug

SEQ ID NO: 3090264 - RNA, 12 nt, Molluscum contagiosum virus
uggccgagccgc

SEQ ID NO: 3090265 - RNA, 18 nt, Molluscum contagiosum virus
cgaacaaaaaacaacucu

SEQ ID NO: 3090266 - RNA, 23 nt, Molluscum contagiosum virus
gcacaagccguccgccucgagca

SEQ ID NO: 3090267 - RNA, 16 nt, Molluscum contagiosum virus
agcugcaccggcgcga

SEQ ID NO: 3090268 - RNA, 18 nt, Molluscum contagiosum virus
cucgggugugugccugcu

SEQ ID NO: 3090269 - RNA, 14 nt, Molluscum contagiosum virus
cgccgggccccugu

SEQ ID NO: 3090270 - RNA, 14 nt, Molluscum contagiosum virus
ccgcgaaggagaga

SEQ ID NO: 3090271 - RNA, 20 nt, Molluscum contagiosum virus
uuccacuacaagcagccgca

SEQ ID NO: 3090272 - RNA, 19 nt, Molluscum contagiosum virus
ccacguacgagcagcugcu

SEQ ID NO: 3090273 - RNA, 18 nt, Molluscum contagiosum virus
gugucgagcucgcgcgcc

SEQ ID NO: 3090274 - RNA, 20 nt, Molluscum contagiosum virus
cgaggaccggcgcaacgagc

SEQ ID NO: 3090275 - RNA, 12 nt, Molluscum contagiosum virus
agagcagugccg

SEQ ID NO: 3090276 - RNA, 12 nt, Molluscum contagiosum virus
gagcagcugcug

SEQ ID NO: 3090277 - RNA, 20 nt, Molluscum contagiosum virus
ggcucuggagcggccacucu

SEQ ID NO: 3090278 - RNA, 19 nt, Molluscum contagiosum virus
cacggacucgccgcgcgcc

SEQ ID NO: 3090279 - RNA, 18 nt, Molluscum contagiosum virus
gggcagcuucugcucgcg

SEQ ID NO: 3090280 - RNA, 18 nt, Molluscum contagiosum virus
gcgcaacgagcagcccgu

SEQ ID NO: 3090281 - RNA, 16 nt, Molluscum contagiosum virus
gcguacagcgcgcgug

SEQ ID NO: 3090282 - RNA, 15 nt, Molluscum contagiosum virus
ccgcgcugcuggcca

SEQ ID NO: 3090283 - RNA, 19 nt, Molluscum contagiosum virus
aacguagacagugcggcgc

SEQ ID NO: 3090284 - RNA, 19 nt, Molluscum contagiosum virus
ucucgcuggcuccgcugga

SEQ ID NO: 3090285 - RNA, 23 nt, Molluscum contagiosum virus
ccugugcgccaacaaccacucuu

SEQ ID NO: 3090286 - RNA, 23 nt, Molluscum contagiosum virus
ggcugccguuuuacacagggcuu

SEQ ID NO: 3090287 - RNA, 13 nt, Molluscum contagiosum virus
cacugcagcagcc

SEQ ID NO: 3090288 - RNA, 13 nt, Molluscum contagiosum virus
cagcuugcugcug

SEQ ID NO: 3090289 - RNA, 14 nt, Molluscum contagiosum virus
gccaucgagcuucc

SEQ ID NO: 3090290 - RNA, 23 nt, Molluscum contagiosum virus
cgugcucgguagcguggagcugg

SEQ ID NO: 3090291 - RNA, 21 nt, Molluscum contagiosum virus
gcgcaccgcguugccgcccgc

SEQ ID NO: 3090292 - RNA, 12 nt, Molluscum contagiosum virus
ugcucgccccuc

SEQ ID NO: 3090293 - RNA, 20 nt, Molluscum contagiosum virus
gcucgccuccuugcccgagg

SEQ ID NO: 3090294 - RNA, 13 nt, Molluscum contagiosum virus
cucucgaggcgga

SEQ ID NO: 3090295 - RNA, 17 nt, Molluscum contagiosum virus
cgacgccaucaggaaug

SEQ ID NO: 3090296 - RNA, 23 nt, Molluscum contagiosum virus
cacgacggaacguuggcccgcaa

SEQ ID NO: 3090297 - RNA, 19 nt, Molluscum contagiosum virus
gcucaagacgcugcuggcg

SEQ ID NO: 3090298 - RNA, 17 nt, Molluscum contagiosum virus
gcucuucgagacgcugc

SEQ ID NO: 3090299 - RNA, 20 nt, Molluscum contagiosum virus
cagccgugagcucccgcgcc

SEQ ID NO: 3090300 - RNA, 17 nt, Molluscum contagiosum virus
gaaaacgcgcggcagca

SEQ ID NO: 3090301 - RNA, 16 nt, Molluscum contagiosum virus
guuccggcagcgccgc

SEQ ID NO: 3090302 - RNA, 20 nt, Molluscum contagiosum virus
acggugcagccgcugcugcu

SEQ ID NO: 3090303 - RNA, 20 nt, Molluscum contagiosum virus
ggaggaucgcuacgugcgca

SEQ ID NO: 3090304 - RNA, 13 nt, Molluscum contagiosum virus
gcacgcgcacggg

SEQ ID NO: 3090305 - RNA, 12 nt, Molluscum contagiosum virus
uuguccaaugcu

SEQ ID NO: 3090306 - RNA, 20 nt, Molluscum contagiosum virus
ccucugcgagcgccugcgag

SEQ ID NO: 3090307 - RNA, 13 nt, Molluscum contagiosum virus
gcgcgagcagcug

SEQ ID NO: 3090308 - RNA, 17 nt, Molluscum contagiosum virus
uccugcgcccauuccug

SEQ ID NO: 3090309 - RNA, 18 nt, Molluscum contagiosum virus
gcgcuguauaguccccgg

SEQ ID NO: 3090310 - RNA, 23 nt, Molluscum contagiosum virus
ucacggcgacaacgacagagccc

SEQ ID NO: 3090311 - RNA, 16 nt, Molluscum contagiosum virus
ggccaugucugugcgc

SEQ ID NO: 3090312 - RNA, 14 nt, Molluscum contagiosum virus
cggcacgcugagca

SEQ ID NO: 3090313 - RNA, 15 nt, Molluscum contagiosum virus
ggaauaccggagaca

SEQ ID NO: 3090314 - RNA, 24 nt, Molluscum contagiosum virus
gcgcgaccaguacaucaccgccau

SEQ ID NO: 3090315 - RNA, 16 nt, Molluscum contagiosum virus
ccgcagcccgagcgcg

SEQ ID NO: 3090316 - RNA, 22 nt, Molluscum contagiosum virus
guguccacgaugaacggcuccu

SEQ ID NO: 3090317 - RNA, 16 nt, Molluscum contagiosum virus
gcgaccuacuccuggc

SEQ ID NO: 3090318 - RNA, 17 nt, Molluscum contagiosum virus
ggaaaaaucccccgcca

SEQ ID NO: 3090319 - RNA, 17 nt, Molluscum contagiosum virus
cagcaggugcacgugcu

SEQ ID NO: 3090320 - RNA, 14 nt, Molluscum contagiosum virus
aggcaaagcggggc

SEQ ID NO: 3090321 - RNA, 22 nt, Molluscum contagiosum virus
cacaguucacggcgcucgccuc

SEQ ID NO: 3090322 - RNA, 18 nt, Molluscum contagiosum virus
acguggacaagucacugc

SEQ ID NO: 3090323 - RNA, 13 nt, Molluscum contagiosum virus
gcagcuggagcug

SEQ ID NO: 3090324 - RNA, 24 nt, Molluscum contagiosum virus
uuucaaugcaguaugugaacacga

SEQ ID NO: 3090325 - RNA, 21 nt, Molluscum contagiosum virus
gacggggagcauguccgacuc

SEQ ID NO: 3090326 - RNA, 18 nt, Molluscum contagiosum virus
ugaaacaguaggacaugu

SEQ ID NO: 3090327 - RNA, 20 nt, Molluscum contagiosum virus
acgcgcacgggccugcgcgc

SEQ ID NO: 3090328 - RNA, 17 nt, Molluscum contagiosum virus
gcgcuggaugcugcucg

SEQ ID NO: 3090329 - RNA, 16 nt, Molluscum contagiosum virus
cggcagccgcagaugc

SEQ ID NO: 3090330 - RNA, 21 nt, Molluscum contagiosum virus
cccugucgcgcacgagcgcgg

SEQ ID NO: 3090331 - RNA, 23 nt, Molluscum contagiosum virus
uccaagaagacggcgcgcgcgcu

SEQ ID NO: 3090332 - RNA, 19 nt, Molluscum contagiosum virus
cugcgcgaguaccugggca

SEQ ID NO: 3090333 - RNA, 14 nt, Molluscum contagiosum virus
caccugcaggaaag

SEQ ID NO: 3090334 - RNA, 16 nt, Molluscum contagiosum virus
gucgugcaggccgugc

SEQ ID NO: 3090335 - RNA, 18 nt, Molluscum contagiosum virus
acgcgcacuugccuggcg

SEQ ID NO: 3090336 - RNA, 19 nt, Molluscum contagiosum virus
agaggccggcacaagccgu

SEQ ID NO: 3090337 - RNA, 15 nt, Molluscum contagiosum virus
cauuuucucuggaga

SEQ ID NO: 3090338 - RNA, 20 nt, Molluscum contagiosum virus
acuauguucuucgcagagga

SEQ ID NO: 3090339 - RNA, 15 nt, Molluscum contagiosum virus
gcccacgugccagcu

SEQ ID NO: 3090340 - RNA, 23 nt, Molluscum contagiosum virus
gcugaaggcauaccugugccagc

SEQ ID NO: 3090341 - RNA, 19 nt, Molluscum contagiosum virus
cgucgcggagggcgaggcc

SEQ ID NO: 3090342 - RNA, 13 nt, Molluscum contagiosum virus
auagcagagcacg

SEQ ID NO: 3090343 - RNA, 20 nt, Molluscum contagiosum virus
ccagauuagcaacugcccca

SEQ ID NO: 3090344 - RNA, 21 nt, Molluscum contagiosum virus
aguagcagcuucuuggagccc

SEQ ID NO: 3090345 - RNA, 16 nt, Molluscum contagiosum virus
acacgcgcggcggaga

SEQ ID NO: 3090346 - RNA, 18 nt, Molluscum contagiosum virus
caagaggggagccagccu

SEQ ID NO: 3090347 - RNA, 23 nt, Molluscum contagiosum virus
gacgcggccgcggagggaggcuc

SEQ ID NO: 3090348 - RNA, 15 nt, Molluscum contagiosum virus
acgagcagcugcugc

SEQ ID NO: 3090349 - RNA, 16 nt, Molluscum contagiosum virus
ggcgccaaccgcgagc

SEQ ID NO: 3090350 - RNA, 23 nt, Molluscum contagiosum virus
caggaaaggucgggcccgagcag

SEQ ID NO: 3090351 - RNA, 13 nt, Molluscum contagiosum virus
cagcuccugguag

SEQ ID NO: 3090352 - RNA, 21 nt, Molluscum contagiosum virus
gccucucucguggggaggaca

SEQ ID NO: 3090353 - RNA, 18 nt, Molluscum contagiosum virus
ccagcguggccagcuuca

SEQ ID NO: 3090354 - RNA, 18 nt, Molluscum contagiosum virus
cacgcgcaaggccgcgcc

SEQ ID NO: 3090355 - RNA, 15 nt, Molluscum contagiosum virus
gacuacgcacuggcg

SEQ ID NO: 3090356 - RNA, 21 nt, Molluscum contagiosum virus
gacuaccuggcggcgcuggag

SEQ ID NO: 3090357 - RNA, 22 nt, Molluscum contagiosum virus
cgugcuagcccgcaccugcgcc

SEQ ID NO: 3090358 - RNA, 15 nt, Molluscum contagiosum virus
cacuguaaucgucac

SEQ ID NO: 3090359 - RNA, 14 nt, Molluscum contagiosum virus
cccagcguggccag

SEQ ID NO: 3090360 - RNA, 22 nt, Molluscum contagiosum virus
ugacacgaguacgccagaauug

SEQ ID NO: 3090361 - RNA, 14 nt, Molluscum contagiosum virus
ggaagacgugcugc

SEQ ID NO: 3090362 - RNA, 17 nt, Molluscum contagiosum virus
accucgcgcgccgccgc

SEQ ID NO: 3090363 - RNA, 22 nt, Molluscum contagiosum virus
caggcggucuuccagcacugcg

SEQ ID NO: 3090364 - RNA, 13 nt, Molluscum contagiosum virus
acguaaagacggc

SEQ ID NO: 3090365 - RNA, 14 nt, Molluscum contagiosum virus
cggagcgcagcugc

SEQ ID NO: 3090366 - RNA, 17 nt, Molluscum contagiosum virus
ggugcagccgcugcugc

SEQ ID NO: 3090367 - RNA, 17 nt, Molluscum contagiosum virus
guuucugccgcgccucc

SEQ ID NO: 3090368 - RNA, 21 nt, Molluscum contagiosum virus
ugcccggccucgccuccgggc

SEQ ID NO: 3090369 - RNA, 16 nt, Molluscum contagiosum virus
ccgcgcaaaagcacag

SEQ ID NO: 3090370 - RNA, 23 nt, Molluscum contagiosum virus
aggaagcuggcgcgguccagccg

SEQ ID NO: 3090371 - RNA, 19 nt, Molluscum contagiosum virus
ccagcugccgcuugaagga

SEQ ID NO: 3090372 - RNA, 14 nt, Molluscum contagiosum virus
gcagucccagcacc

SEQ ID NO: 3090373 - RNA, 22 nt, Molluscum contagiosum virus
gaguggcguccgcacgaggagc

SEQ ID NO: 3090374 - RNA, 16 nt, Molluscum contagiosum virus
cguggcguugcugcug

SEQ ID NO: 3090375 - RNA, 21 nt, Molluscum contagiosum virus
gggcagccgcuggacgccucg

SEQ ID NO: 3090376 - RNA, 23 nt, Molluscum contagiosum virus
ggcgagcgcacgucuacgacauc

SEQ ID NO: 3090377 - RNA, 20 nt, Molluscum contagiosum virus
ugagcaggucggccagcagc

SEQ ID NO: 3090378 - RNA, 23 nt, Molluscum contagiosum virus
acgcuaaagucgcgcgugcgcag

SEQ ID NO: 3090379 - RNA, 19 nt, Molluscum contagiosum virus
aggagcuguccgagccgga

SEQ ID NO: 3090380 - RNA, 16 nt, Molluscum contagiosum virus
augggcucgggcaaga

SEQ ID NO: 3090381 - RNA, 23 nt, Molluscum contagiosum virus
ccguccgccucgagcacgccucc

SEQ ID NO: 3090382 - RNA, 12 nt, Molluscum contagiosum virus
accugcugcgag

SEQ ID NO: 3090383 - RNA, 12 nt, Molluscum contagiosum virus
aacgugcugcuc

SEQ ID NO: 3090384 - RNA, 14 nt, Molluscum contagiosum virus
gcuugccccucgug

SEQ ID NO: 3090385 - RNA, 17 nt, Molluscum contagiosum virus
acgcaggaugcuggggc

SEQ ID NO: 3090386 - RNA, 12 nt, Molluscum contagiosum virus
cagcccacgcug

SEQ ID NO: 3090387 - RNA, 23 nt, Molluscum contagiosum virus
caugcucgagccugccagcgcca

SEQ ID NO: 3090388 - RNA, 15 nt, Molluscum contagiosum virus
ucggcguggccaggc

SEQ ID NO: 3090389 - RNA, 14 nt, Molluscum contagiosum virus
gauaggacaugacu

SEQ ID NO: 3090390 - RNA, 10 nt, Molluscum contagiosum virus
cuacaaggug

SEQ ID NO: 3090391 - RNA, 14 nt, Molluscum contagiosum virus
cgcgcugcuggugc

SEQ ID NO: 3090392 - RNA, 18 nt, Molluscum contagiosum virus
caaguagguugcgucccg

SEQ ID NO: 3090393 - RNA, 13 nt, Molluscum contagiosum virus
cugagaggaccuc

SEQ ID NO: 3090394 - RNA, 16 nt, Molluscum contagiosum virus
ccgccgcgugcccguc

SEQ ID NO: 3090395 - RNA, 14 nt, Molluscum contagiosum virus
gaagugcuccgcac

SEQ ID NO: 3090396 - RNA, 16 nt, Molluscum contagiosum virus
ugcgcgccaagaacaa

SEQ ID NO: 3090397 - RNA, 13 nt, Molluscum contagiosum virus
gcgcaagugcgug

SEQ ID NO: 3090398 - RNA, 17 nt, Molluscum contagiosum virus
gaccgcagacaaagaca

SEQ ID NO: 3090399 - RNA, 12 nt, Molluscum contagiosum virus
cgggcgugcgca

SEQ ID NO: 3090400 - RNA, 21 nt, Molluscum contagiosum virus
ggacgagcugcuucgcgacca

SEQ ID NO: 3090401 - RNA, 22 nt, Molluscum contagiosum virus
cugggccccuacguggucaugg

SEQ ID NO: 3090402 - RNA, 17 nt, Molluscum contagiosum virus
cgcgagggcgcgcugga

SEQ ID NO: 3090403 - RNA, 13 nt, Molluscum contagiosum virus
aguagcgagcagg

SEQ ID NO: 3090404 - RNA, 15 nt, Molluscum contagiosum virus
ggcgcgcgccagcag

SEQ ID NO: 3090405 - RNA, 13 nt, Molluscum contagiosum virus
gguggcaggcgcg

SEQ ID NO: 3090406 - RNA, 18 nt, Molluscum contagiosum virus
gguccaccugcgacgccu

SEQ ID NO: 3090407 - RNA, 14 nt, Molluscum contagiosum virus
ggccgcacucgccg

SEQ ID NO: 3090408 - RNA, 14 nt, Molluscum contagiosum virus
cugcgcaagcucag

SEQ ID NO: 3090409 - RNA, 16 nt, Molluscum contagiosum virus
cagagccugcugcucu

SEQ ID NO: 3090410 - RNA, 14 nt, Molluscum contagiosum virus
gguacucaugcugc

SEQ ID NO: 3090411 - RNA, 14 nt, Molluscum contagiosum virus
cagcaugcgugcaa

SEQ ID NO: 3090412 - RNA, 14 nt, Molluscum contagiosum virus
ggaggcaagcgggc

SEQ ID NO: 3090413 - RNA, 14 nt, Molluscum contagiosum virus
cacgggaaggcucu

SEQ ID NO: 3090414 - RNA, 23 nt, Molluscum contagiosum virus
cgagcacccccgcugcacgcucu

SEQ ID NO: 3090415 - RNA, 21 nt, Molluscum contagiosum virus
gcaaagaaugcaugcggagcu

SEQ ID NO: 3090416 - RNA, 22 nt, Molluscum contagiosum virus
accgcgagcgcaugcgcgccgc

SEQ ID NO: 3090417 - RNA, 18 nt, Molluscum contagiosum virus
caagucaccgcuccgcag

SEQ ID NO: 3090418 - RNA, 15 nt, Molluscum contagiosum virus
ggcacgcacaaaguu

SEQ ID NO: 3090419 - RNA, 14 nt, Molluscum contagiosum virus
accacgugcgcugg

SEQ ID NO: 3090420 - RNA, 16 nt, Molluscum contagiosum virus
ugcucaagcaccugcg

SEQ ID NO: 3090421 - RNA, 16 nt, Molluscum contagiosum virus
uggacuucaggauggc

SEQ ID NO: 3090422 - RNA, 13 nt, Molluscum contagiosum virus
cugcaagccagcc

SEQ ID NO: 3090423 - RNA, 17 nt, Molluscum contagiosum virus
cuucggcggcugugccc

SEQ ID NO: 3090424 - RNA, 20 nt, Molluscum contagiosum virus
acucuucccguuccugggca

SEQ ID NO: 3090425 - RNA, 17 nt, Molluscum contagiosum virus
cgggugcccggacagag

SEQ ID NO: 3090426 - RNA, 20 nt, Molluscum contagiosum virus
gaugcgguccgacucggugc

SEQ ID NO: 3090427 - RNA, 21 nt, Molluscum contagiosum virus
cacauaguggcuuguugucga

SEQ ID NO: 3090428 - RNA, 15 nt, Molluscum contagiosum virus
cguccuugcucuggc

SEQ ID NO: 3090429 - RNA, 15 nt, Molluscum contagiosum virus
cuacgggaagcugca

SEQ ID NO: 3090430 - RNA, 16 nt, Molluscum contagiosum virus
uggcaccgggcgccgc

SEQ ID NO: 3090431 - RNA, 19 nt, Molluscum contagiosum virus
cuggaguaccggcucaaga

SEQ ID NO: 3090432 - RNA, 18 nt, Molluscum contagiosum virus
gccugcaaggaggucaag

SEQ ID NO: 3090433 - RNA, 15 nt, Molluscum contagiosum virus
ucgacguugacgagc

SEQ ID NO: 3090434 - RNA, 20 nt, Molluscum contagiosum virus
gcguaagagcgugaacauac

SEQ ID NO: 3090435 - RNA, 22 nt, Molluscum contagiosum virus
ucgcugcuccccgccagcacca

SEQ ID NO: 3090436 - RNA, 20 nt, Molluscum contagiosum virus
cucggcacugcuggcgcgcg

SEQ ID NO: 3090437 - RNA, 12 nt, Molluscum contagiosum virus
cgcggcagugcu

SEQ ID NO: 3090438 - RNA, 21 nt, Molluscum contagiosum virus
cagcgcgcccaccagcagcca

SEQ ID NO: 3090439 - RNA, 17 nt, Molluscum contagiosum virus
cuacagcagccgcagcc

SEQ ID NO: 3090440 - RNA, 17 nt, Molluscum contagiosum virus
ggcggggaucuugcgug

SEQ ID NO: 3090441 - RNA, 18 nt, Molluscum contagiosum virus
ggcgcgcgcgcuggcgug

SEQ ID NO: 3090442 - RNA, 18 nt, Molluscum contagiosum virus
cgucgcccggcaggcucc

SEQ ID NO: 3090443 - RNA, 23 nt, Molluscum contagiosum virus
cacaagggcagcucaagcugcuc

SEQ ID NO: 3090444 - RNA, 13 nt, Molluscum contagiosum virus
cgcggcaguggcc

SEQ ID NO: 3090445 - RNA, 15 nt, Molluscum contagiosum virus
gcgcgcgcucugccg

SEQ ID NO: 3090446 - RNA, 12 nt, Molluscum contagiosum virus
cgcugccagaga

SEQ ID NO: 3090447 - RNA, 13 nt, Molluscum contagiosum virus
agauggcugcucu

SEQ ID NO: 3090448 - RNA, 19 nt, Molluscum contagiosum virus
cuuggcgcccuuccuggag

SEQ ID NO: 3090449 - RNA, 21 nt, Molluscum contagiosum virus
aggacgacgacacagcccugg

SEQ ID NO: 3090450 - RNA, 22 nt, Molluscum contagiosum virus
caugacugcggacgggaagcuu

SEQ ID NO: 3090451 - RNA, 19 nt, Molluscum contagiosum virus
aggagcucuucgacagcgu

SEQ ID NO: 3090452 - RNA, 14 nt, Molluscum contagiosum virus
ugcguaaugcuggc

SEQ ID NO: 3090453 - RNA, 22 nt, Molluscum contagiosum virus
cgcgggcgccggcguccgcggc

SEQ ID NO: 3090454 - RNA, 12 nt, Molluscum contagiosum virus
cguuccuggcca

SEQ ID NO: 3090455 - RNA, 23 nt, Molluscum contagiosum virus
gcacgagcaguccgccucgagca

SEQ ID NO: 3090456 - RNA, 22 nt, Molluscum contagiosum virus
agcgccgccucgcgcgcacugc

SEQ ID NO: 3090457 - RNA, 18 nt, Molluscum contagiosum virus
gcagcgccagcuuggugc

SEQ ID NO: 3090458 - RNA, 21 nt, Molluscum contagiosum virus
gcucuacggcgugcugugccu

SEQ ID NO: 3090459 - RNA, 12 nt, Molluscum contagiosum virus
gagguggccaag

SEQ ID NO: 3090460 - RNA, 20 nt, Molluscum contagiosum virus
ggcucgcgugccccgggaag

SEQ ID NO: 3090461 - RNA, 20 nt, Molluscum contagiosum virus
cgcaaugcagugcaccagca

SEQ ID NO: 3090462 - RNA, 19 nt, Molluscum contagiosum virus
cucuacgccgcgcaccugg

SEQ ID NO: 3090463 - RNA, 14 nt, Molluscum contagiosum virus
ggucaccacgaucu

SEQ ID NO: 3090464 - RNA, 19 nt, Molluscum contagiosum virus
uucacgcccgcaaugcagu

SEQ ID NO: 3090465 - RNA, 20 nt, Molluscum contagiosum virus
uccucggcgcacacuccucg

SEQ ID NO: 3090466 - RNA, 22 nt, Molluscum contagiosum virus
ucguggggaggacaaaacugaa

SEQ ID NO: 3090467 - RNA, 19 nt, Molluscum contagiosum virus
agagcuuacuagacuggcu

SEQ ID NO: 3090468 - RNA, 18 nt, Molluscum contagiosum virus
caauggacacgcacuggc

SEQ ID NO: 3090469 - RNA, 21 nt, Molluscum contagiosum virus
ggcgcgcgcgcuagccgccgc

SEQ ID NO: 3090470 - RNA, 17 nt, Molluscum contagiosum virus
uucuucaaguaccuguc

SEQ ID NO: 3090471 - RNA, 13 nt, Molluscum contagiosum virus
acccucuucgacu

SEQ ID NO: 3090472 - RNA, 15 nt, Molluscum contagiosum virus
caacgcgggccaggc

SEQ ID NO: 3090473 - RNA, 22 nt, Molluscum contagiosum virus
accuuggcgcugcacaguucac

SEQ ID NO: 3090474 - RNA, 18 nt, Molluscum contagiosum virus
cguacgcacgugccgugc

SEQ ID NO: 3090475 - RNA, 16 nt, Molluscum contagiosum virus
gcacccgcaacaagga

SEQ ID NO: 3090476 - RNA, 22 nt, Molluscum contagiosum virus
cgcacuugccgggcgacggcgg

SEQ ID NO: 3090477 - RNA, 17 nt, Molluscum contagiosum virus
caggcacuggcccugcu

SEQ ID NO: 3090478 - RNA, 16 nt, Molluscum contagiosum virus
cucccgcccagcgugg

SEQ ID NO: 3090479 - RNA, 18 nt, Molluscum contagiosum virus
cggagaucaggcagcugc

SEQ ID NO: 3090480 - RNA, 13 nt, Molluscum contagiosum virus
agcugcugcgcua

SEQ ID NO: 3090481 - RNA, 21 nt, Molluscum contagiosum virus
gggcgggaagaaggugcucag

SEQ ID NO: 3090482 - RNA, 20 nt, Molluscum contagiosum virus
acuugcgcguccacaaaggc

SEQ ID NO: 3090483 - RNA, 18 nt, Molluscum contagiosum virus
agugguccaccagcugcc

SEQ ID NO: 3090484 - RNA, 23 nt, Molluscum contagiosum virus
gcgggcucuuccaccggcagcgc

SEQ ID NO: 3090485 - RNA, 22 nt, Molluscum contagiosum virus
ucucacgcgcuaccgcaagcuc

SEQ ID NO: 3090486 - RNA, 23 nt, Molluscum contagiosum virus
agcucugucccgcaagccacaca

SEQ ID NO: 3090487 - RNA, 19 nt, Molluscum contagiosum virus
gcgcgccgcagaacacggg

SEQ ID NO: 3090488 - RNA, 19 nt, Molluscum contagiosum virus
cuccgacuaccuaggcacu

SEQ ID NO: 3090489 - RNA, 13 nt, Molluscum contagiosum virus
ccgcccgcgcuuc

SEQ ID NO: 3090490 - RNA, 20 nt, Molluscum contagiosum virus
guacuccuugaagggcacaa

SEQ ID NO: 3090491 - RNA, 19 nt, Molluscum contagiosum virus
auggugcgguacaugcugu

SEQ ID NO: 3090492 - RNA, 16 nt, Molluscum contagiosum virus
gaaaggcacccgcagg

SEQ ID NO: 3090493 - RNA, 18 nt, Molluscum contagiosum virus
acgccuccaagaagaggc

SEQ ID NO: 3090494 - RNA, 15 nt, Molluscum contagiosum virus
ggacacuggagguga

SEQ ID NO: 3090495 - RNA, 18 nt, Molluscum contagiosum virus
acguccuugucgaacgac

SEQ ID NO: 3090496 - RNA, 22 nt, Molluscum contagiosum virus
cagaaggcguaugcgccaagcc

SEQ ID NO: 3090497 - RNA, 17 nt, Molluscum contagiosum virus
accugcaggaaaggcac

SEQ ID NO: 3090498 - RNA, 15 nt, Molluscum contagiosum virus
ggcuucgccgccgga

SEQ ID NO: 3090499 - RNA, 16 nt, Molluscum contagiosum virus
ugcgcagcguccggca

SEQ ID NO: 3090500 - RNA, 19 nt, Molluscum contagiosum virus
cacaccccuguaacaagga

SEQ ID NO: 3090501 - RNA, 20 nt, Molluscum contagiosum virus
uccaagaacaauacaaacaa

SEQ ID NO: 3090502 - RNA, 19 nt, Molluscum contagiosum virus
gugcacgcacgcgcgggca

SEQ ID NO: 3090503 - RNA, 17 nt, Molluscum contagiosum virus
uccaagaacgagaagag

SEQ ID NO: 3090504 - RNA, 17 nt, Molluscum contagiosum virus
cugcgcgcuagggucca

SEQ ID NO: 3090505 - RNA, 13 nt, Molluscum contagiosum virus
gggaacgaggaaa

SEQ ID NO: 3090506 - RNA, 18 nt, Molluscum contagiosum virus
cgccauccggcacugcgu

SEQ ID NO: 3090507 - RNA, 18 nt, Molluscum contagiosum virus
accgggagcauagcaaga

SEQ ID NO: 3090508 - RNA, 15 nt, Molluscum contagiosum virus
cggcgaacaccccga

SEQ ID NO: 3090509 - RNA, 22 nt, Molluscum contagiosum virus
ggaacgcuuggcgggcagcggc

SEQ ID NO: 3090510 - RNA, 17 nt, Molluscum contagiosum virus
acuaagccgcgugcugg

SEQ ID NO: 3090511 - RNA, 17 nt, Molluscum contagiosum virus
gcucgaucugcgccucc

SEQ ID NO: 3090512 - RNA, 16 nt, Molluscum contagiosum virus
acggagaccuggucac

SEQ ID NO: 3090513 - RNA, 16 nt, Molluscum contagiosum virus
augcagauuggaggag

SEQ ID NO: 3090514 - RNA, 22 nt, Molluscum contagiosum virus
uccuuccggagacaccagcucc

SEQ ID NO: 3090515 - RNA, 20 nt, Molluscum contagiosum virus
cgaggccuacagcgcgcugc

SEQ ID NO: 3090516 - RNA, 22 nt, Molluscum contagiosum virus
cccuggagcgcagucccagcac

SEQ ID NO: 3090517 - RNA, 17 nt, Molluscum contagiosum virus
cccgcggaagugcgagc

SEQ ID NO: 3090518 - RNA, 22 nt, Molluscum contagiosum virus
cacagccauuaacgaagagugg

SEQ ID NO: 3090519 - RNA, 20 nt, Molluscum contagiosum virus
cgcucggcguggugcuggcc

SEQ ID NO: 3090520 - RNA, 22 nt, Molluscum contagiosum virus
cggucgccuucuugcuggcgcu

SEQ ID NO: 3090521 - RNA, 18 nt, Molluscum contagiosum virus
cccacguacgagcagcug

SEQ ID NO: 3090522 - RNA, 21 nt, Molluscum contagiosum virus
ugucccugcauacacuuccug

SEQ ID NO: 3090523 - RNA, 17 nt, Molluscum contagiosum virus
gcgcgugagcacgggcg

SEQ ID NO: 3090524 - RNA, 22 nt, Molluscum contagiosum virus
caugucgagaccuuccuccagg

SEQ ID NO: 3090525 - RNA, 16 nt, Molluscum contagiosum virus
aaccuacgcuaccuga

SEQ ID NO: 3090526 - RNA, 13 nt, Molluscum contagiosum virus
gugggccgcggcg

SEQ ID NO: 3090527 - RNA, 14 nt, Molluscum contagiosum virus
caaacagccugugu

SEQ ID NO: 3090528 - RNA, 14 nt, Molluscum contagiosum virus
cgcgcgcgccucgc

SEQ ID NO: 3090529 - RNA, 15 nt, Molluscum contagiosum virus
gcggcgcucgcagca

SEQ ID NO: 3090530 - RNA, 21 nt, Molluscum contagiosum virus
ccgcgcgcucucacgcuucgu

SEQ ID NO: 3090531 - RNA, 16 nt, Molluscum contagiosum virus
gaugaaguuggucacc

SEQ ID NO: 3090532 - RNA, 16 nt, Molluscum contagiosum virus
gaagcuugcucagcag

SEQ ID NO: 3090533 - RNA, 14 nt, Molluscum contagiosum virus
cucauagcccaugc

SEQ ID NO: 3090534 - RNA, 21 nt, Molluscum contagiosum virus
ccuggcgagcgcucugcauug

SEQ ID NO: 3090535 - RNA, 23 nt, Molluscum contagiosum virus
acgcucuacggcgccuucgucgc

SEQ ID NO: 3090536 - RNA, 14 nt, Molluscum contagiosum virus
gcuugagcagcaaa

SEQ ID NO: 3090537 - RNA, 15 nt, Molluscum contagiosum virus
guacuacuuccgcaa

SEQ ID NO: 3090538 - RNA, 14 nt, Molluscum contagiosum virus
gcacauugcugcug

SEQ ID NO: 3090539 - RNA, 19 nt, Molluscum contagiosum virus
cgaggagggcagccucaac

SEQ ID NO: 3090540 - RNA, 19 nt, Molluscum contagiosum virus
auggcgcgcaaccagcugg

SEQ ID NO: 3090541 - RNA, 21 nt, Molluscum contagiosum virus
ucagccgagcgccgccagcuc

SEQ ID NO: 3090542 - RNA, 16 nt, Molluscum contagiosum virus
guucacggcgcucgcc

SEQ ID NO: 3090543 - RNA, 20 nt, Molluscum contagiosum virus
ggcgacuggcgacacauugc

SEQ ID NO: 3090544 - RNA, 22 nt, Molluscum contagiosum virus
aaagcugcuggcggagacacuc

SEQ ID NO: 3090545 - RNA, 15 nt, Molluscum contagiosum virus
gcgugccgcugcgcg

SEQ ID NO: 3090546 - RNA, 16 nt, Molluscum contagiosum virus
gucagcagcgcgagcu

SEQ ID NO: 3090547 - RNA, 15 nt, Molluscum contagiosum virus
cagccguggagucca

SEQ ID NO: 3090548 - RNA, 20 nt, Molluscum contagiosum virus
gcgcacgcgcgagcaugccg

SEQ ID NO: 3090549 - RNA, 21 nt, Molluscum contagiosum virus
gcucggugucgguaccugcag

SEQ ID NO: 3090550 - RNA, 17 nt, Molluscum contagiosum virus
gcaggacgacgacacag

SEQ ID NO: 3090551 - RNA, 21 nt, Molluscum contagiosum virus
ccuacguggcgucgcgccgcu

SEQ ID NO: 3090552 - RNA, 22 nt, Molluscum contagiosum virus
gccuccaagaagaggccagcac

SEQ ID NO: 3090553 - RNA, 14 nt, Molluscum contagiosum virus
cugaaccugggcgc

SEQ ID NO: 3090554 - RNA, 14 nt, Molluscum contagiosum virus
cgcgcguccacaag

SEQ ID NO: 3090555 - RNA, 23 nt, Molluscum contagiosum virus
cgcggcaaaugcgucccagcagc

SEQ ID NO: 3090556 - RNA, 22 nt, Molluscum contagiosum virus
ugcaacucgcgcugcagcaccu

SEQ ID NO: 3090557 - RNA, 17 nt, Molluscum contagiosum virus
cucauccucccugcggg

SEQ ID NO: 3090558 - RNA, 17 nt, Molluscum contagiosum virus
caggaagcgcgucauga

SEQ ID NO: 3090559 - RNA, 15 nt, Molluscum contagiosum virus
ugcgcgugugcagca

SEQ ID NO: 3090560 - RNA, 20 nt, Molluscum contagiosum virus
caugcagucacgacuguguu

SEQ ID NO: 3090561 - RNA, 17 nt, Molluscum contagiosum virus
gcaaguaccagccgcug

SEQ ID NO: 3090562 - RNA, 16 nt, Molluscum contagiosum virus
gagcugugcgagccag

SEQ ID NO: 3090563 - RNA, 19 nt, Molluscum contagiosum virus
caacaaggaaaggcacccg

SEQ ID NO: 3090564 - RNA, 13 nt, Molluscum contagiosum virus
uccguugcacgug

SEQ ID NO: 3090565 - RNA, 21 nt, Molluscum contagiosum virus
cacggcacgugcguacgcggc

SEQ ID NO: 3090566 - RNA, 15 nt, Molluscum contagiosum virus
cauagcgccacgagc

SEQ ID NO: 3090567 - RNA, 18 nt, Molluscum contagiosum virus
aucaggcagcugcugcgc

SEQ ID NO: 3090568 - RNA, 18 nt, Molluscum contagiosum virus
uuugacacgcucaucucg

SEQ ID NO: 3090569 - RNA, 19 nt, Molluscum contagiosum virus
cuacacgccgcuggagcac

SEQ ID NO: 3090570 - RNA, 16 nt, Molluscum contagiosum virus
ggagcccgugcuggag

SEQ ID NO: 3090571 - RNA, 14 nt, Molluscum contagiosum virus
ccccgagcugcggc

SEQ ID NO: 3090572 - RNA, 17 nt, Molluscum contagiosum virus
guucgcggagcugugcc

SEQ ID NO: 3090573 - RNA, 22 nt, Molluscum contagiosum virus
gcacguccucggucaccacucc

SEQ ID NO: 3090574 - RNA, 18 nt, Molluscum contagiosum virus
cagccgagcgccgccagc

SEQ ID NO: 3090575 - RNA, 16 nt, Molluscum contagiosum virus
cucagcacgcgcacag

SEQ ID NO: 3090576 - RNA, 21 nt, Molluscum contagiosum virus
gaaagguaccccgcaggaaag

SEQ ID NO: 3090577 - RNA, 11 nt, Molluscum contagiosum virus
cgccagcacca

SEQ ID NO: 3090578 - RNA, 20 nt, Molluscum contagiosum virus
ucgauggcgccguuggccac

SEQ ID NO: 3090579 - RNA, 17 nt, Molluscum contagiosum virus
acgcucuccaugcgcgc

SEQ ID NO: 3090580 - RNA, 15 nt, Molluscum contagiosum virus
acggagauggacaca

SEQ ID NO: 3090581 - RNA, 22 nt, Molluscum contagiosum virus
ccaagugcgcgugucuggagcc

SEQ ID NO: 3090582 - RNA, 20 nt, Molluscum contagiosum virus
auguacuucuacgagcagcg

SEQ ID NO: 3090583 - RNA, 18 nt, Molluscum contagiosum virus
ccucaccucugcgcggcc

SEQ ID NO: 3090584 - RNA, 22 nt, Molluscum contagiosum virus
cacggaaacgaacgcugcagcu

SEQ ID NO: 3090585 - RNA, 23 nt, Molluscum contagiosum virus
agcuuugugcgaccugcugcgag

SEQ ID NO: 3090586 - RNA, 21 nt, Molluscum contagiosum virus
gcuccacgcgcagcuucucug

SEQ ID NO: 3090587 - RNA, 22 nt, Molluscum contagiosum virus
aggcaccugcaggaaaggcacc

SEQ ID NO: 3090588 - RNA, 13 nt, Molluscum contagiosum virus
cgcucugccgccc

SEQ ID NO: 3090589 - RNA, 13 nt, Molluscum contagiosum virus
augcucgccagca

SEQ ID NO: 3090590 - RNA, 20 nt, Molluscum contagiosum virus
cggugugcuacugcacugca

SEQ ID NO: 3090591 - RNA, 23 nt, Molluscum contagiosum virus
ccgcgcugaugcuagcgugugcc

SEQ ID NO: 3090592 - RNA, 11 nt, Molluscum contagiosum virus
cuugcuuccag

SEQ ID NO: 3090593 - RNA, 19 nt, Molluscum contagiosum virus
cuuuggccucgcgagggcu

SEQ ID NO: 3090594 - RNA, 21 nt, Molluscum contagiosum virus
ugacaggcgcgcaagugcgug

SEQ ID NO: 3090595 - RNA, 18 nt, Molluscum contagiosum virus
gaaggcauaccugugcca

SEQ ID NO: 3090596 - RNA, 18 nt, Molluscum contagiosum virus
acgcuguacaugccgcag

SEQ ID NO: 3090597 - RNA, 16 nt, Molluscum contagiosum virus
gagcgcgcgcacgcga

SEQ ID NO: 3090598 - RNA, 21 nt, Molluscum contagiosum virus
ccucaagaagacgcagagcga

SEQ ID NO: 3090599 - RNA, 21 nt, Molluscum contagiosum virus
agggcgaguccccgagcagcg

SEQ ID NO: 3090600 - RNA, 16 nt, Molluscum contagiosum virus
cccgccgcgugcccgu

SEQ ID NO: 3090601 - RNA, 21 nt, Molluscum contagiosum virus
cacgccgcagcgcuggagcug

SEQ ID NO: 3090602 - RNA, 20 nt, Molluscum contagiosum virus
gacgugaucgcgcaggcgcg

SEQ ID NO: 3090603 - RNA, 23 nt, Molluscum contagiosum virus
cgcaccuuuggugcagaucucgc

SEQ ID NO: 3090604 - RNA, 15 nt, Molluscum contagiosum virus
aagcacgagcugcug

SEQ ID NO: 3090605 - RNA, 17 nt, Molluscum contagiosum virus
uacgcggcgggguccuc

SEQ ID NO: 3090606 - RNA, 23 nt, Molluscum contagiosum virus
gugggcgccgcggcgggggcagc

SEQ ID NO: 3090607 - RNA, 14 nt, Molluscum contagiosum virus
gcugcgcugcaacc

SEQ ID NO: 3090608 - RNA, 21 nt, Molluscum contagiosum virus
aucgagauggaggcccaggcc

SEQ ID NO: 3090609 - RNA, 12 nt, Molluscum contagiosum virus
cucgcugcuggg

SEQ ID NO: 3090610 - RNA, 23 nt, Molluscum contagiosum virus
cugccauggcagcucggaggcgc

SEQ ID NO: 3090611 - RNA, 16 nt, Molluscum contagiosum virus
cccagguucagcgcuc

SEQ ID NO: 3090612 - RNA, 15 nt, Molluscum contagiosum virus
acgacgugcugcugc

SEQ ID NO: 3090613 - RNA, 21 nt, Molluscum contagiosum virus
aagcagcgugucaagcggcac

SEQ ID NO: 3090614 - RNA, 14 nt, Molluscum contagiosum virus
caccuuccugggcg

SEQ ID NO: 3090615 - RNA, 20 nt, Molluscum contagiosum virus
cugcacgacguacgagugcu

SEQ ID NO: 3090616 - RNA, 14 nt, Molluscum contagiosum virus
gccgcggaggacuc

SEQ ID NO: 3090617 - RNA, 20 nt, Molluscum contagiosum virus
cgggggcucggaagagcguc

SEQ ID NO: 3090618 - RNA, 18 nt, Molluscum contagiosum virus
gaauaaaauagcagagca

SEQ ID NO: 3090619 - RNA, 17 nt, Molluscum contagiosum virus
acggcgugacggugcug

SEQ ID NO: 3090620 - RNA, 23 nt, Molluscum contagiosum virus
gauacacauugcguguggggcau

SEQ ID NO: 3090621 - RNA, 14 nt, Molluscum contagiosum virus
ggcgcgccgccggu

SEQ ID NO: 3090622 - RNA, 23 nt, Molluscum contagiosum virus
agugcauccgcaacguggcgcug

SEQ ID NO: 3090623 - RNA, 15 nt, Molluscum contagiosum virus
cggcuuccggcacca

SEQ ID NO: 3090624 - RNA, 19 nt, Molluscum contagiosum virus
cagggcgugcuugccugga

SEQ ID NO: 3090625 - RNA, 15 nt, Molluscum contagiosum virus
aaagggcggccgcag

SEQ ID NO: 3090626 - RNA, 15 nt, Molluscum contagiosum virus
ugacucggacacugg

SEQ ID NO: 3090627 - RNA, 20 nt, Molluscum contagiosum virus
caccgggguccgcuccuucu

SEQ ID NO: 3090628 - RNA, 21 nt, Molluscum contagiosum virus
ccgccgagauggagcucacgc

SEQ ID NO: 3090629 - RNA, 20 nt, Molluscum contagiosum virus
uggucgagggcgaggccaag

SEQ ID NO: 3090630 - RNA, 19 nt, Molluscum contagiosum virus
guagguacccgcaaccccg

SEQ ID NO: 3090631 - RNA, 15 nt, Molluscum contagiosum virus
cugcugcugcaaagc

SEQ ID NO: 3090632 - RNA, 15 nt, Molluscum contagiosum virus
cgaguccagcuucuc

SEQ ID NO: 3090633 - RNA, 21 nt, Molluscum contagiosum virus
cagcuggcgcgcgccgagccc

SEQ ID NO: 3090634 - RNA, 17 nt, Molluscum contagiosum virus
ugggcagcuucugcucg

SEQ ID NO: 3090635 - RNA, 15 nt, Molluscum contagiosum virus
gcaagcuuugugcuc

SEQ ID NO: 3090636 - RNA, 15 nt, Molluscum contagiosum virus
gacgacacagcccug

SEQ ID NO: 3090637 - RNA, 16 nt, Molluscum contagiosum virus
cagcggauagcuuuuc

SEQ ID NO: 3090638 - RNA, 23 nt, Molluscum contagiosum virus
ccaacacguuuucuuucauggcu

SEQ ID NO: 3090639 - RNA, 18 nt, Molluscum contagiosum virus
caggaaaggcacccgcaa

SEQ ID NO: 3090640 - RNA, 22 nt, Molluscum contagiosum virus
cuccgcgaccgcgaacugcaac

SEQ ID NO: 3090641 - RNA, 19 nt, Molluscum contagiosum virus
ucaguacaugcccggccuc

SEQ ID NO: 3090642 - RNA, 17 nt, Molluscum contagiosum virus
gcacgcuguccaggcgc

SEQ ID NO: 3090643 - RNA, 20 nt, Molluscum contagiosum virus
gucgucaaaggcaaagccug

SEQ ID NO: 3090644 - RNA, 18 nt, Molluscum contagiosum virus
cgcuggcgcgcgcgcugc

SEQ ID NO: 3090645 - RNA, 13 nt, Molluscum contagiosum virus
gucaucgggcugc

SEQ ID NO: 3090646 - RNA, 19 nt, Molluscum contagiosum virus
cuucacggagaucaggcag

SEQ ID NO: 3090647 - RNA, 15 nt, Molluscum contagiosum virus
accgcguugccgccc

SEQ ID NO: 3090648 - RNA, 14 nt, Molluscum contagiosum virus
accgccgcggccgc

SEQ ID NO: 3090649 - RNA, 14 nt, Molluscum contagiosum virus
agccccgcgccggc

SEQ ID NO: 3090650 - RNA, 23 nt, Molluscum contagiosum virus
gcuucccgaguacuacuacacug

SEQ ID NO: 3090651 - RNA, 14 nt, Molluscum contagiosum virus
ccgcgccagcaguc

SEQ ID NO: 3090652 - RNA, 15 nt, Molluscum contagiosum virus
acucugugaccugcg

SEQ ID NO: 3090653 - RNA, 16 nt, Molluscum contagiosum virus
cucguguguccgcacg

SEQ ID NO: 3090654 - RNA, 16 nt, Molluscum contagiosum virus
cacgagcacugccugc

SEQ ID NO: 3090655 - RNA, 15 nt, Molluscum contagiosum virus
uccuucuucagcagg

SEQ ID NO: 3090656 - RNA, 12 nt, Molluscum contagiosum virus
gaaaaaguucuu

SEQ ID NO: 3090657 - RNA, 22 nt, Molluscum contagiosum virus
acgcucaacgugggcaccugca

SEQ ID NO: 3090658 - RNA, 17 nt, Molluscum contagiosum virus
ggccgccauccgcgagc

SEQ ID NO: 3090659 - RNA, 17 nt, Molluscum contagiosum virus
ggccgccgcccgcgaau

SEQ ID NO: 3090660 - RNA, 23 nt, Molluscum contagiosum virus
cgcaacaaaagagcgcgccucuc

SEQ ID NO: 3090661 - RNA, 22 nt, Molluscum contagiosum virus
guuccgccuaccccuugcuuca

SEQ ID NO: 3090662 - RNA, 17 nt, Molluscum contagiosum virus
cgcagcccacgugccag

SEQ ID NO: 3090663 - RNA, 19 nt, Molluscum contagiosum virus
cacgaucaaggugcagaac

SEQ ID NO: 3090664 - RNA, 21 nt, Molluscum contagiosum virus
gccugcgcaacgcgggccagg

SEQ ID NO: 3090665 - RNA, 14 nt, Molluscum contagiosum virus
ggcacagucuggga

SEQ ID NO: 3090666 - RNA, 18 nt, Molluscum contagiosum virus
ucuuguugcuggggccug

SEQ ID NO: 3090667 - RNA, 15 nt, Molluscum contagiosum virus
accagauccgggcgc

SEQ ID NO: 3090668 - RNA, 23 nt, Molluscum contagiosum virus
cgcucgcgcgugcucgacucgga

SEQ ID NO: 3090669 - RNA, 16 nt, Molluscum contagiosum virus
uggacagcaagcagcg

SEQ ID NO: 3090670 - RNA, 17 nt, Molluscum contagiosum virus
agacccgaaagcugccc

SEQ ID NO: 3090671 - RNA, 23 nt, Molluscum contagiosum virus
gcaccuacgcgccgacaugcgca

SEQ ID NO: 3090672 - RNA, 15 nt, Molluscum contagiosum virus
ggagcccgugcugga

SEQ ID NO: 3090673 - RNA, 22 nt, Molluscum contagiosum virus
ccgccauuuccgagcgcgcacg

SEQ ID NO: 3090674 - RNA, 17 nt, Molluscum contagiosum virus
caaggaaaaggcacacc

SEQ ID NO: 3090675 - RNA, 19 nt, Molluscum contagiosum virus
aagaucgcgguggcaggcg

SEQ ID NO: 3090676 - RNA, 17 nt, Molluscum contagiosum virus
gcucgcgagugugcaug

SEQ ID NO: 3090677 - RNA, 14 nt, Molluscum contagiosum virus
cacgugguccacca

SEQ ID NO: 3090678 - RNA, 20 nt, Molluscum contagiosum virus
caggggccguucgcgcgcca

SEQ ID NO: 3090679 - RNA, 15 nt, Molluscum contagiosum virus
uaguugcgagccagc

SEQ ID NO: 3090680 - RNA, 22 nt, Molluscum contagiosum virus
gggccaggcacuggcccugcuu

SEQ ID NO: 3090681 - RNA, 17 nt, Molluscum contagiosum virus
uucuggucuggaaacac

SEQ ID NO: 3090682 - RNA, 19 nt, Molluscum contagiosum virus
ugacucggacacuggaggu

SEQ ID NO: 3090683 - RNA, 18 nt, Molluscum contagiosum virus
gagucacgcuugcagaca

SEQ ID NO: 3090684 - RNA, 21 nt, Molluscum contagiosum virus
ugccgggcgccggcucugccu

SEQ ID NO: 3090685 - RNA, 19 nt, Molluscum contagiosum virus
cguggacgagcgcuaccug

SEQ ID NO: 3090686 - RNA, 18 nt, Molluscum contagiosum virus
gaguacgacgcggagguc

SEQ ID NO: 3090687 - RNA, 14 nt, Molluscum contagiosum virus
gcaccgcggcgacg

SEQ ID NO: 3090688 - RNA, 22 nt, Molluscum contagiosum virus
guugccgcgcgcugcucuggag

SEQ ID NO: 3090689 - RNA, 18 nt, Molluscum contagiosum virus
cgcgucugcgaguggcgc

SEQ ID NO: 3090690 - RNA, 15 nt, Molluscum contagiosum virus
cagcuucugcucgcg

SEQ ID NO: 3090691 - RNA, 20 nt, Molluscum contagiosum virus
ugcgcgcgcucgcgcagguc

SEQ ID NO: 3090692 - RNA, 20 nt, Molluscum contagiosum virus
auggcgauagcgauggcugu

SEQ ID NO: 3090693 - RNA, 13 nt, Molluscum contagiosum virus
gcaaacgcacugu

SEQ ID NO: 3090694 - RNA, 20 nt, Molluscum contagiosum virus
gccgcucggcacugcuggcg

SEQ ID NO: 3090695 - RNA, 20 nt, Molluscum contagiosum virus
ccacggcgcgccgccggugc

SEQ ID NO: 3090696 - RNA, 14 nt, Molluscum contagiosum virus
ccgacuccaaggag

SEQ ID NO: 3090697 - RNA, 18 nt, Molluscum contagiosum virus
gcucucgcugcugcccau

SEQ ID NO: 3090698 - RNA, 20 nt, Molluscum contagiosum virus
gggccgcggcgcggcggaag

SEQ ID NO: 3090699 - RNA, 21 nt, Molluscum contagiosum virus
gcaccgcgacaggggccacaa

SEQ ID NO: 3090700 - RNA, 16 nt, Molluscum contagiosum virus
cgcacgugccgugcug

SEQ ID NO: 3090701 - RNA, 18 nt, Molluscum contagiosum virus
gugguggccaagauccug

SEQ ID NO: 3090702 - RNA, 20 nt, Molluscum contagiosum virus
cgcccguguucgcggagcug

SEQ ID NO: 3090703 - RNA, 19 nt, Molluscum contagiosum virus
ggaggcgcuagugcagaug

SEQ ID NO: 3090704 - RNA, 14 nt, Molluscum contagiosum virus
gcgggcgcgcgcca

SEQ ID NO: 3090705 - RNA, 18 nt, Molluscum contagiosum virus
aggcccacuuccgugagc

SEQ ID NO: 3090706 - RNA, 14 nt, Molluscum contagiosum virus
uccuggccaacagg

SEQ ID NO: 3090707 - RNA, 22 nt, Molluscum contagiosum virus
agcaccaagaagcggcccugca

SEQ ID NO: 3090708 - RNA, 18 nt, Molluscum contagiosum virus
ugaagaaggagcccuugc

SEQ ID NO: 3090709 - RNA, 14 nt, Molluscum contagiosum virus
cuccgaguccagcu

SEQ ID NO: 3090710 - RNA, 16 nt, Molluscum contagiosum virus
gcgcagucccagcacc

SEQ ID NO: 3090711 - RNA, 21 nt, Molluscum contagiosum virus
ccaguagcgaaugcagugccc

SEQ ID NO: 3090712 - RNA, 21 nt, Molluscum contagiosum virus
cuagcgggcaagcgcuucccu

SEQ ID NO: 3090713 - RNA, 20 nt, Molluscum contagiosum virus
ugaaaggcaccugcggcucg

SEQ ID NO: 3090714 - RNA, 17 nt, Molluscum contagiosum virus
cgcacaguaccagauua

SEQ ID NO: 3090715 - RNA, 19 nt, Molluscum contagiosum virus
cggcagcgucgcggagcgc

SEQ ID NO: 3090716 - RNA, 12 nt, Molluscum contagiosum virus
cgaguaccgcgc

SEQ ID NO: 3090717 - RNA, 16 nt, Molluscum contagiosum virus
ggcagcucggaggcgc

SEQ ID NO: 3090718 - RNA, 20 nt, Molluscum contagiosum virus
ugccacggccgcgcgcgacu

SEQ ID NO: 3090719 - RNA, 16 nt, Molluscum contagiosum virus
uugccgcgccuugagc

SEQ ID NO: 3090720 - RNA, 20 nt, Molluscum contagiosum virus
cccguaaagaagcggugcag

SEQ ID NO: 3090721 - RNA, 23 nt, Molluscum contagiosum virus
ugccgccaggaaaacggaaacag

SEQ ID NO: 3090722 - RNA, 23 nt, Molluscum contagiosum virus
cagagaaaggcacccaccaggaa

SEQ ID NO: 3090723 - RNA, 20 nt, Molluscum contagiosum virus
cuucuuuacgggcgccagcu

SEQ ID NO: 3090724 - RNA, 16 nt, Molluscum contagiosum virus
gggguguuuccuugcc

SEQ ID NO: 3090725 - RNA, 16 nt, Molluscum contagiosum virus
ggcgccggcucugccu

SEQ ID NO: 3090726 - RNA, 14 nt, Molluscum contagiosum virus
agaacugccugguc

SEQ ID NO: 3090727 - RNA, 14 nt, Molluscum contagiosum virus
gcgcgcgugccggg

SEQ ID NO: 3090728 - RNA, 15 nt, Molluscum contagiosum virus
gucaaugacacgagc

SEQ ID NO: 3090729 - RNA, 18 nt, Molluscum contagiosum virus
ccgcgcccgcggcgcacg

SEQ ID NO: 3090730 - RNA, 18 nt, Molluscum contagiosum virus
agcuucuuggagcccuug

SEQ ID NO: 3090731 - RNA, 17 nt, Molluscum contagiosum virus
gcacgccuccaagaaga

SEQ ID NO: 3090732 - RNA, 21 nt, Molluscum contagiosum virus
accgcgcgcgcaagcgccgcu

SEQ ID NO: 3090733 - RNA, 20 nt, Molluscum contagiosum virus
cugcugcaaagcgcggccgc

SEQ ID NO: 3090734 - RNA, 18 nt, Molluscum contagiosum virus
cgcgcucgggaagcacgu

SEQ ID NO: 3090735 - RNA, 16 nt, Molluscum contagiosum virus
ggcgccgcuaccagcu

SEQ ID NO: 3090736 - RNA, 15 nt, Molluscum contagiosum virus
cugcgggcggcacac

SEQ ID NO: 3090737 - RNA, 21 nt, Molluscum contagiosum virus
uccacaugccgcgcugcuccg

SEQ ID NO: 3090738 - RNA, 14 nt, Molluscum contagiosum virus
ggaggacacgcgca

SEQ ID NO: 3090739 - RNA, 15 nt, Molluscum contagiosum virus
gagcgugucagcagc

SEQ ID NO: 3090740 - RNA, 19 nt, Molluscum contagiosum virus
acguacgagugcuggagca

SEQ ID NO: 3090741 - RNA, 14 nt, Molluscum contagiosum virus
gcucaggccagcau

SEQ ID NO: 3090742 - RNA, 21 nt, Molluscum contagiosum virus
acugcacugcagcgagcucgc

SEQ ID NO: 3090743 - RNA, 17 nt, Molluscum contagiosum virus
cugcgcacgggcgcgcg

SEQ ID NO: 3090744 - RNA, 19 nt, Molluscum contagiosum virus
cgcugcgcgugcugggccc

SEQ ID NO: 3090745 - RNA, 14 nt, Molluscum contagiosum virus
ccaacagcagcugg

SEQ ID NO: 3090746 - RNA, 23 nt, Molluscum contagiosum virus
ugcuaacggacgcggccaugcuc

SEQ ID NO: 3090747 - RNA, 18 nt, Molluscum contagiosum virus
gucuuaacucagcgggca

SEQ ID NO: 3090748 - RNA, 13 nt, Molluscum contagiosum virus
ugcacgagccggc

SEQ ID NO: 3090749 - RNA, 22 nt, Molluscum contagiosum virus
ccaacccucgcaagcugagcgc

SEQ ID NO: 3090750 - RNA, 17 nt, Molluscum contagiosum virus
guuaaauggacgugcuc

SEQ ID NO: 3090751 - RNA, 11 nt, Molluscum contagiosum virus
ugucaagcacu

SEQ ID NO: 3090752 - RNA, 15 nt, Molluscum contagiosum virus
uucgcggagcugugc

SEQ ID NO: 3090753 - RNA, 18 nt, Molluscum contagiosum virus
gucacgcuagcgggccug

SEQ ID NO: 3090754 - RNA, 14 nt, Molluscum contagiosum virus
cgucauggagcagg

SEQ ID NO: 3090755 - RNA, 23 nt, Molluscum contagiosum virus
ccuuugcggcgagcgcuaucucu

SEQ ID NO: 3090756 - RNA, 18 nt, Molluscum contagiosum virus
cucugauuacauccugcc

SEQ ID NO: 3090757 - RNA, 21 nt, Molluscum contagiosum virus
caacaagcucgaacagagcgc

SEQ ID NO: 3090758 - RNA, 14 nt, Molluscum contagiosum virus
cuccuuagacaaaa

SEQ ID NO: 3090759 - RNA, 15 nt, Molluscum contagiosum virus
gcugaagaaggagcc

SEQ ID NO: 3090760 - RNA, 21 nt, Molluscum contagiosum virus
gugcugaagacgcuggccgug

SEQ ID NO: 3090761 - RNA, 18 nt, Molluscum contagiosum virus
ggugcuguccuucugguu

SEQ ID NO: 3090762 - RNA, 17 nt, Molluscum contagiosum virus
agcagcgcgacuagccu

SEQ ID NO: 3090763 - RNA, 15 nt, Molluscum contagiosum virus
ccccgcacaagggca

SEQ ID NO: 3090764 - RNA, 17 nt, Molluscum contagiosum virus
ggagcugguccagggcu

SEQ ID NO: 3090765 - RNA, 15 nt, Molluscum contagiosum virus
cguccggcaugcgcg

SEQ ID NO: 3090766 - RNA, 13 nt, Molluscum contagiosum virus
gcaggaugcuggg

SEQ ID NO: 3090767 - RNA, 19 nt, Molluscum contagiosum virus
aucgcgugcuugcugcgcu

SEQ ID NO: 3090768 - RNA, 18 nt, Molluscum contagiosum virus
ccgaggacgacgccgagc

SEQ ID NO: 3090769 - RNA, 14 nt, Molluscum contagiosum virus
caugcgcgcagugc

SEQ ID NO: 3090770 - RNA, 15 nt, Molluscum contagiosum virus
ggcaccccgaaggaa

SEQ ID NO: 3090771 - RNA, 22 nt, Molluscum contagiosum virus
acgaugucggaacccagaaaga

SEQ ID NO: 3090772 - RNA, 23 nt, Molluscum contagiosum virus
cacggagacgucuggggauggcc

SEQ ID NO: 3090773 - RNA, 20 nt, Molluscum contagiosum virus
ggacacgggugagcucgcca

SEQ ID NO: 3090774 - RNA, 16 nt, Molluscum contagiosum virus
cgagauugagcucuuu

SEQ ID NO: 3090775 - RNA, 21 nt, Molluscum contagiosum virus
cugcgcugccagcucgacacu

SEQ ID NO: 3090776 - RNA, 13 nt, Molluscum contagiosum virus
gcucuacgugcug

SEQ ID NO: 3090777 - RNA, 16 nt, Molluscum contagiosum virus
gcgcggugcugcgcca

SEQ ID NO: 3090778 - RNA, 21 nt, Molluscum contagiosum virus
gcacaugugcgugcaccucaa

SEQ ID NO: 3090779 - RNA, 16 nt, Molluscum contagiosum virus
gacgccguccgcgcag

SEQ ID NO: 3090780 - RNA, 13 nt, Molluscum contagiosum virus
cguagagcagcgc

SEQ ID NO: 3090781 - RNA, 16 nt, Molluscum contagiosum virus
guuccuggugugccag

SEQ ID NO: 3090782 - RNA, 16 nt, Molluscum contagiosum virus
gagaaaggcacccacc

SEQ ID NO: 3090783 - RNA, 13 nt, Molluscum contagiosum virus
cgagcgcaucagc

SEQ ID NO: 3090784 - RNA, 24 nt, Molluscum contagiosum virus
gcugcucgagauucguggcgagca

SEQ ID NO: 3090785 - RNA, 16 nt, Molluscum contagiosum virus
gccgaguacugcugcg

SEQ ID NO: 3090786 - RNA, 19 nt, Molluscum contagiosum virus
cgcgagcgacggcaggccc

SEQ ID NO: 3090787 - RNA, 22 nt, Molluscum contagiosum virus
ugcucuacuuccacgagcugac

SEQ ID NO: 3090788 - RNA, 14 nt, Molluscum contagiosum virus
accaguaccugcug

SEQ ID NO: 3090789 - RNA, 12 nt, Molluscum contagiosum virus
gcaggcuguguu

SEQ ID NO: 3090790 - RNA, 17 nt, Molluscum contagiosum virus
ugcgcaccgcgggcugg

SEQ ID NO: 3090791 - RNA, 19 nt, Molluscum contagiosum virus
gcucgccuccuugcccgag

SEQ ID NO: 3090792 - RNA, 12 nt, Molluscum contagiosum virus
ggcacgcagacc

SEQ ID NO: 3090793 - RNA, 15 nt, Molluscum contagiosum virus
cucacggacucgccg

SEQ ID NO: 3090794 - RNA, 14 nt, Molluscum contagiosum virus
cggagggcgaggcc

SEQ ID NO: 3090795 - RNA, 22 nt, Molluscum contagiosum virus
aggccccccgcaacaaggaaag

SEQ ID NO: 3090796 - RNA, 22 nt, Molluscum contagiosum virus
gcaucaugaaagaacgacucgc

SEQ ID NO: 3090797 - RNA, 14 nt, Molluscum contagiosum virus
cuucuuggagcccu

SEQ ID NO: 3090798 - RNA, 13 nt, Molluscum contagiosum virus
cacgaggagcccc

SEQ ID NO: 3090799 - RNA, 13 nt, Molluscum contagiosum virus
gacgauggccacg

SEQ ID NO: 3090800 - RNA, 19 nt, Molluscum contagiosum virus
gacaaaggcauuuuccugu

SEQ ID NO: 3090801 - RNA, 15 nt, Molluscum contagiosum virus
cucgcgcgcagcucg

SEQ ID NO: 3090802 - RNA, 16 nt, Molluscum contagiosum virus
cuccucgcacgggcgc

SEQ ID NO: 3090803 - RNA, 14 nt, Molluscum contagiosum virus
cuccgcgcaccgcg

SEQ ID NO: 3090804 - RNA, 21 nt, Molluscum contagiosum virus
aagcacgcaacgucgcacugg

SEQ ID NO: 3090805 - RNA, 20 nt, Molluscum contagiosum virus
gucacgacuguguucccggc

SEQ ID NO: 3090806 - RNA, 16 nt, Molluscum contagiosum virus
gcucgcuugcccggag

SEQ ID NO: 3090807 - RNA, 19 nt, Molluscum contagiosum virus
cucgcgcguccgcaaagac

SEQ ID NO: 3090808 - RNA, 13 nt, Molluscum contagiosum virus
acagccguggagu

SEQ ID NO: 3090809 - RNA, 13 nt, Molluscum contagiosum virus
uccccaagaccug

SEQ ID NO: 3090810 - RNA, 21 nt, Molluscum contagiosum virus
cagacccgaaagcugcccugc

SEQ ID NO: 3090811 - RNA, 17 nt, Molluscum contagiosum virus
gguggccaacggcgcca

SEQ ID NO: 3090812 - RNA, 12 nt, Molluscum contagiosum virus
aagcagccgcag

SEQ ID NO: 3090813 - RNA, 18 nt, Molluscum contagiosum virus
gcgcuuuuuuuguccugu

SEQ ID NO: 3090814 - RNA, 13 nt, Molluscum contagiosum virus
gcgagugugcgug

SEQ ID NO: 3090815 - RNA, 22 nt, Molluscum contagiosum virus
aggcacaccccuguaacaagga

SEQ ID NO: 3090816 - RNA, 14 nt, Molluscum contagiosum virus
ccuggagcgcaguc

SEQ ID NO: 3090817 - RNA, 20 nt, Molluscum contagiosum virus
gacauggagcgcaucauguu

SEQ ID NO: 3090818 - RNA, 12 nt, Molluscum contagiosum virus
aagccugcugcg

SEQ ID NO: 3090819 - RNA, 12 nt, Molluscum contagiosum virus
acgcgggccugu

SEQ ID NO: 3090820 - RNA, 16 nt, Molluscum contagiosum virus
acagcaucgggcuguc

SEQ ID NO: 3090821 - RNA, 13 nt, Molluscum contagiosum virus
cggcgcgaagcag

SEQ ID NO: 3090822 - RNA, 21 nt, Molluscum contagiosum virus
aguggcucuagaguacuaggu

SEQ ID NO: 3090823 - RNA, 21 nt, Molluscum contagiosum virus
gcgccggaacucgcgcgcgcc

SEQ ID NO: 3090824 - RNA, 13 nt, Molluscum contagiosum virus
ugucgacagagaa

SEQ ID NO: 3090825 - RNA, 18 nt, Molluscum contagiosum virus
ccaagaacaagcucgagg

SEQ ID NO: 3090826 - RNA, 14 nt, Molluscum contagiosum virus
accucaucaagccc

SEQ ID NO: 3090827 - RNA, 14 nt, Molluscum contagiosum virus
cucgcuugcccgga

SEQ ID NO: 3090828 - RNA, 15 nt, Molluscum contagiosum virus
gcucggcguggugcu

SEQ ID NO: 3090829 - RNA, 13 nt, Molluscum contagiosum virus
cgcaucagcacac

SEQ ID NO: 3090830 - RNA, 14 nt, Molluscum contagiosum virus
cguggccaggccgc

SEQ ID NO: 3090831 - RNA, 21 nt, Molluscum contagiosum virus
cgccuaccaccgggcacuucu

SEQ ID NO: 3090832 - RNA, 16 nt, Molluscum contagiosum virus
cuguccgcggaugcag

SEQ ID NO: 3090833 - RNA, 16 nt, Molluscum contagiosum virus
guguuggccaggcgcg

SEQ ID NO: 3090834 - RNA, 11 nt, Molluscum contagiosum virus
gcggagcuggc

SEQ ID NO: 3090835 - RNA, 19 nt, Molluscum contagiosum virus
agcgcgugacgcucacggc

SEQ ID NO: 3090836 - RNA, 21 nt, Molluscum contagiosum virus
cgggcuucgcugcgcaggugc

SEQ ID NO: 3090837 - RNA, 16 nt, Molluscum contagiosum virus
ucagaggauucuugca

SEQ ID NO: 3090838 - RNA, 17 nt, Molluscum contagiosum virus
cgugcgcaccaucuuca

SEQ ID NO: 3090839 - RNA, 13 nt, Molluscum contagiosum virus
gacgagcugugcg

SEQ ID NO: 3090840 - RNA, 14 nt, Molluscum contagiosum virus
cuuaugcauccuga

SEQ ID NO: 3090841 - RNA, 17 nt, Molluscum contagiosum virus
gcugugccgcagcaacc

SEQ ID NO: 3090842 - RNA, 14 nt, Molluscum contagiosum virus
guguacaaagagcu

SEQ ID NO: 3090843 - RNA, 10 nt, Molluscum contagiosum virus
uuccgggccc

SEQ ID NO: 3090844 - RNA, 19 nt, Molluscum contagiosum virus
aaagaagcggugcagcgcc

SEQ ID NO: 3090845 - RNA, 18 nt, Molluscum contagiosum virus
cgcgcugcgcgccgcgcc

SEQ ID NO: 3090846 - RNA, 13 nt, Molluscum contagiosum virus
cgacugccagcca

SEQ ID NO: 3090847 - RNA, 13 nt, Molluscum contagiosum virus
cuacaccagcugg

SEQ ID NO: 3090848 - RNA, 13 nt, Molluscum contagiosum virus
gaagcggaacucu

SEQ ID NO: 3090849 - RNA, 15 nt, Molluscum contagiosum virus
caugcacagcugcuc

SEQ ID NO: 3090850 - RNA, 21 nt, Molluscum contagiosum virus
gcaccgcguugccgcccgccg

SEQ ID NO: 3090851 - RNA, 15 nt, Molluscum contagiosum virus
gccugcccgugugcg

SEQ ID NO: 3090852 - RNA, 15 nt, Molluscum contagiosum virus
agcuagacuggagca

SEQ ID NO: 3090853 - RNA, 17 nt, Molluscum contagiosum virus
agagcguccagccgcag

SEQ ID NO: 3090854 - RNA, 14 nt, Molluscum contagiosum virus
acagcucuucgucu

SEQ ID NO: 3090855 - RNA, 13 nt, Molluscum contagiosum virus
gcguccggugcuc

SEQ ID NO: 3090856 - RNA, 21 nt, Molluscum contagiosum virus
gugucaacuucgcgcuguacc

SEQ ID NO: 3090857 - RNA, 20 nt, Molluscum contagiosum virus
guacgugcgccagcucuggg

SEQ ID NO: 3090858 - RNA, 16 nt, Molluscum contagiosum virus
gcccccgagcugcgug

SEQ ID NO: 3090859 - RNA, 15 nt, Molluscum contagiosum virus
aacgugcugcgccgc

SEQ ID NO: 3090860 - RNA, 20 nt, Molluscum contagiosum virus
gugagcucgccaauggagcc

SEQ ID NO: 3090861 - RNA, 19 nt, Molluscum contagiosum virus
cgaggucacucgcuacugc

SEQ ID NO: 3090862 - RNA, 23 nt, Molluscum contagiosum virus
gcggcacguuugcgucugcgagg

SEQ ID NO: 3090863 - RNA, 21 nt, Molluscum contagiosum virus
gucuccacgcgugcgcgccag

SEQ ID NO: 3090864 - RNA, 18 nt, Molluscum contagiosum virus
cggaagaauuccuucccg

SEQ ID NO: 3090865 - RNA, 19 nt, Molluscum contagiosum virus
guacagcgggcgcugcucg

SEQ ID NO: 3090866 - RNA, 19 nt, Molluscum contagiosum virus
gccccacugugccagcagc

SEQ ID NO: 3090867 - RNA, 17 nt, Molluscum contagiosum virus
gcguguuugugcugucc

SEQ ID NO: 3090868 - RNA, 21 nt, Molluscum contagiosum virus
cguagacagugcggcgcggcu

SEQ ID NO: 3090869 - RNA, 21 nt, Molluscum contagiosum virus
aggcaggccccgcaccagugc

SEQ ID NO: 3090870 - RNA, 17 nt, Molluscum contagiosum virus
acucucaucgagcaccu

SEQ ID NO: 3090871 - RNA, 17 nt, Molluscum contagiosum virus
cugcgcaagcucagccu

SEQ ID NO: 3090872 - RNA, 15 nt, Molluscum contagiosum virus
cuuuuuuuguccugu

SEQ ID NO: 3090873 - RNA, 16 nt, Molluscum contagiosum virus
ccugugcccuggaagc

SEQ ID NO: 3090874 - RNA, 20 nt, Molluscum contagiosum virus
ccagcgcgcccaccagcagc

SEQ ID NO: 3090875 - RNA, 19 nt, Molluscum contagiosum virus
cacgugcugcugcggcugc

SEQ ID NO: 3090876 - RNA, 21 nt, Molluscum contagiosum virus
gcacgcucauacuccugcugg

SEQ ID NO: 3090877 - RNA, 15 nt, Molluscum contagiosum virus
cacaaguccgcggcu

SEQ ID NO: 3090878 - RNA, 22 nt, Molluscum contagiosum virus
gcuuagcacacgcgcgcgcagg

SEQ ID NO: 3090879 - RNA, 21 nt, Molluscum contagiosum virus
gcgucuuugucacaauguuug

SEQ ID NO: 3090880 - RNA, 22 nt, Molluscum contagiosum virus
cccgugcucaggccagcaucuu

SEQ ID NO: 3090881 - RNA, 14 nt, Molluscum contagiosum virus
accacgagcacugc

SEQ ID NO: 3090882 - RNA, 15 nt, Molluscum contagiosum virus
agcaggaucggagcg

SEQ ID NO: 3090883 - RNA, 23 nt, Molluscum contagiosum virus
cagcucgcgccgccgcgccgcug

SEQ ID NO: 3090884 - RNA, 18 nt, Molluscum contagiosum virus
cacgagcaguccgccucg

SEQ ID NO: 3090885 - RNA, 21 nt, Molluscum contagiosum virus
uggacauccucaccuuccugg

SEQ ID NO: 3090886 - RNA, 15 nt, Molluscum contagiosum virus
cgcauguccacggac

SEQ ID NO: 3090887 - RNA, 20 nt, Molluscum contagiosum virus
gcuccagcguuuccucuggc

SEQ ID NO: 3090888 - RNA, 17 nt, Molluscum contagiosum virus
ccucuuuuugcgccgca

SEQ ID NO: 3090889 - RNA, 23 nt, Molluscum contagiosum virus
ggcgcucggcguggugcuggcca

SEQ ID NO: 3090890 - RNA, 22 nt, Molluscum contagiosum virus
cuuuucgcgccgcgggcacaug

SEQ ID NO: 3090891 - RNA, 19 nt, Molluscum contagiosum virus
gcacacgcgcgcgugcugc

SEQ ID NO: 3090892 - RNA, 17 nt, Molluscum contagiosum virus
cgccgucaauacucugu

SEQ ID NO: 3090893 - RNA, 16 nt, Molluscum contagiosum virus
ugccagcggcgccgca

SEQ ID NO: 3090894 - RNA, 14 nt, Molluscum contagiosum virus
ggcgcagagccugc

SEQ ID NO: 3090895 - RNA, 21 nt, Molluscum contagiosum virus
accagcgugcccuucuccgag

SEQ ID NO: 3090896 - RNA, 13 nt, Molluscum contagiosum virus
gcgccgcagaaca

SEQ ID NO: 3090897 - RNA, 17 nt, Molluscum contagiosum virus
acgccuggcggcagcac

SEQ ID NO: 3090898 - RNA, 20 nt, Molluscum contagiosum virus
ucuucacuccgcacagcuuc

SEQ ID NO: 3090899 - RNA, 13 nt, Molluscum contagiosum virus
cuccaugcugccg

SEQ ID NO: 3090900 - RNA, 18 nt, Molluscum contagiosum virus
aacgcgcgcgugcugucc

SEQ ID NO: 3090901 - RNA, 16 nt, Molluscum contagiosum virus
caaaaacugaaaagcg

SEQ ID NO: 3090902 - RNA, 14 nt, Molluscum contagiosum virus
ccgcuccagagccg

SEQ ID NO: 3090903 - RNA, 20 nt, Molluscum contagiosum virus
cacgcaggacuggcaccugc

SEQ ID NO: 3090904 - RNA, 17 nt, Molluscum contagiosum virus
cgacgccuuccugcugg

SEQ ID NO: 3090905 - RNA, 16 nt, Molluscum contagiosum virus
ccgugacgcugcggcg

SEQ ID NO: 3090906 - RNA, 15 nt, Molluscum contagiosum virus
gccccacugugccag

SEQ ID NO: 3090907 - RNA, 21 nt, Molluscum contagiosum virus
cagugcgugcucgguagcgug

SEQ ID NO: 3090908 - RNA, 19 nt, Molluscum contagiosum virus
ggcaccccgaaggaaaggc

SEQ ID NO: 3090909 - RNA, 21 nt, Molluscum contagiosum virus
aagcgcguucgcgcgugcugg

SEQ ID NO: 3090910 - RNA, 12 nt, Molluscum contagiosum virus
gccugcccugcu

SEQ ID NO: 3090911 - RNA, 15 nt, Molluscum contagiosum virus
ccaaccgccugcucu

SEQ ID NO: 3090912 - RNA, 15 nt, Molluscum contagiosum virus
ggcauggagggcgag

SEQ ID NO: 3090913 - RNA, 19 nt, Molluscum contagiosum virus
guccagcggcugcccgcgg

SEQ ID NO: 3090914 - RNA, 14 nt, Molluscum contagiosum virus
cacaaaucguccga

SEQ ID NO: 3090915 - RNA, 18 nt, Molluscum contagiosum virus
cgguggugcgccugcacu

SEQ ID NO: 3090916 - RNA, 16 nt, Molluscum contagiosum virus
uguugccuggagggca

SEQ ID NO: 3090917 - RNA, 18 nt, Molluscum contagiosum virus
gacgacuucggcgcaacg

SEQ ID NO: 3090918 - RNA, 14 nt, Molluscum contagiosum virus
ggcuccgcuggacc

SEQ ID NO: 3090919 - RNA, 16 nt, Molluscum contagiosum virus
gcaaguacaacccaaa

SEQ ID NO: 3090920 - RNA, 17 nt, Molluscum contagiosum virus
gcuucuuccggcagcug

SEQ ID NO: 3090921 - RNA, 17 nt, Molluscum contagiosum virus
cugcgcgugcugggccc

SEQ ID NO: 3090922 - RNA, 16 nt, Molluscum contagiosum virus
cagcucggaggcgcag

SEQ ID NO: 3090923 - RNA, 20 nt, Molluscum contagiosum virus
guccgccucgagcacgccuc

SEQ ID NO: 3090924 - RNA, 14 nt, Molluscum contagiosum virus
gcccuccucgaccu

SEQ ID NO: 3090925 - RNA, 16 nt, Molluscum contagiosum virus
ucaagaacaccaagag

SEQ ID NO: 3090926 - RNA, 20 nt, Molluscum contagiosum virus
gccggcgaaccgacugcccg

SEQ ID NO: 3090927 - RNA, 13 nt, Molluscum contagiosum virus
ccgugccccugcu

SEQ ID NO: 3090928 - RNA, 13 nt, Molluscum contagiosum virus
ccugccagcagag

SEQ ID NO: 3090929 - RNA, 19 nt, Molluscum contagiosum virus
uccugcugccgggagagga

SEQ ID NO: 3090930 - RNA, 19 nt, Molluscum contagiosum virus
cguacucgcguccgcgcag

SEQ ID NO: 3090931 - RNA, 23 nt, Molluscum contagiosum virus
gaggaacucgaggcucuguucug

SEQ ID NO: 3090932 - RNA, 14 nt, Molluscum contagiosum virus
gcaaugcgugcgug

SEQ ID NO: 3090933 - RNA, 17 nt, Molluscum contagiosum virus
ccggcggcaagcgagau

SEQ ID NO: 3090934 - RNA, 12 nt, Molluscum contagiosum virus
cacagcacaggc

SEQ ID NO: 3090935 - RNA, 11 nt, Molluscum contagiosum virus
guggccacagc

SEQ ID NO: 3090936 - RNA, 18 nt, Molluscum contagiosum virus
ucucgcggugacaggcag

SEQ ID NO: 3090937 - RNA, 22 nt, Molluscum contagiosum virus
aacaagcugcuggcacaaaucg

SEQ ID NO: 3090938 - RNA, 17 nt, Molluscum contagiosum virus
cugguucugcgcugcca

SEQ ID NO: 3090939 - RNA, 14 nt, Molluscum contagiosum virus
uccggcgcucgccu

SEQ ID NO: 3090940 - RNA, 19 nt, Molluscum contagiosum virus
uccgcccccagguggagcu

SEQ ID NO: 3090941 - RNA, 21 nt, Molluscum contagiosum virus
cuggccgcauuuucucuggag

SEQ ID NO: 3090942 - RNA, 13 nt, Molluscum contagiosum virus
gccuucucggugu

SEQ ID NO: 3090943 - RNA, 14 nt, Molluscum contagiosum virus
ggucaucgggcugc

SEQ ID NO: 3090944 - RNA, 19 nt, Molluscum contagiosum virus
ccaggcacacgcagugcca

SEQ ID NO: 3090945 - RNA, 16 nt, Molluscum contagiosum virus
cacaaagacgggcccg

SEQ ID NO: 3090946 - RNA, 20 nt, Molluscum contagiosum virus
cagcuggacggugcuggugc

SEQ ID NO: 3090947 - RNA, 14 nt, Molluscum contagiosum virus
caccgcaugggccc

SEQ ID NO: 3090948 - RNA, 18 nt, Molluscum contagiosum virus
ggaugccacgcagcuggc

SEQ ID NO: 3090949 - RNA, 17 nt, Molluscum contagiosum virus
ugaacgcgcugcgccac

SEQ ID NO: 3090950 - RNA, 16 nt, Molluscum contagiosum virus
aagcuaaaagagcugc

SEQ ID NO: 3090951 - RNA, 20 nt, Molluscum contagiosum virus
guagcagcgccugcacgcac

SEQ ID NO: 3090952 - RNA, 19 nt, Molluscum contagiosum virus
uuggcgcccgugccgccgg

SEQ ID NO: 3090953 - RNA, 13 nt, Molluscum contagiosum virus
cacagagggacag

SEQ ID NO: 3090954 - RNA, 22 nt, Molluscum contagiosum virus
cgccgagugcgacgcgcgucac

SEQ ID NO: 3090955 - RNA, 14 nt, Molluscum contagiosum virus
ucgagacaggccgg

SEQ ID NO: 3090956 - RNA, 24 nt, Molluscum contagiosum virus
gcgggccuguccgcgggcgcacgc

SEQ ID NO: 3090957 - RNA, 13 nt, Molluscum contagiosum virus
cccguuccugggc

SEQ ID NO: 3090958 - RNA, 14 nt, Molluscum contagiosum virus
ggugcaaccgcugc

SEQ ID NO: 3090959 - RNA, 23 nt, Molluscum contagiosum virus
gcaagcccgcgcgcgagcuggag

SEQ ID NO: 3090960 - RNA, 16 nt, Molluscum contagiosum virus
ccuugcucuggcucuc

SEQ ID NO: 3090961 - RNA, 12 nt, Molluscum contagiosum virus
ggcgcgugccgc

SEQ ID NO: 3090962 - RNA, 18 nt, Molluscum contagiosum virus
guaaagguacacuuuccg

SEQ ID NO: 3090963 - RNA, 17 nt, Molluscum contagiosum virus
cacgggaaggcucucaa

SEQ ID NO: 3090964 - RNA, 15 nt, Molluscum contagiosum virus
uaccggcucaagaac

SEQ ID NO: 3090965 - RNA, 19 nt, Molluscum contagiosum virus
cucccggcuuccgacaacu

SEQ ID NO: 3090966 - RNA, 23 nt, Molluscum contagiosum virus
auucuugcacgggcaugcacagc

SEQ ID NO: 3090967 - RNA, 20 nt, Molluscum contagiosum virus
guaccugcucgggcugcgcg

SEQ ID NO: 3090968 - RNA, 14 nt, Molluscum contagiosum virus
cgacagcgccgcca

SEQ ID NO: 3090969 - RNA, 14 nt, Molluscum contagiosum virus
agacugagucucca

SEQ ID NO: 3090970 - RNA, 16 nt, Molluscum contagiosum virus
cgcugaguuacguggc

SEQ ID NO: 3090971 - RNA, 14 nt, Molluscum contagiosum virus
cgcgcgugccgggc

SEQ ID NO: 3090972 - RNA, 14 nt, Molluscum contagiosum virus
gcaugucgcggugc

SEQ ID NO: 3090973 - RNA, 23 nt, Molluscum contagiosum virus
caccgcgccgaaacacggccucc

SEQ ID NO: 3090974 - RNA, 14 nt, Molluscum contagiosum virus
gcucgccgcgcgcc

SEQ ID NO: 3090975 - RNA, 20 nt, Molluscum contagiosum virus
uaaagaccgugucuggugua

SEQ ID NO: 3090976 - RNA, 22 nt, Molluscum contagiosum virus
cgcacggcuaggcgcggcgggc

SEQ ID NO: 3090977 - RNA, 20 nt, Molluscum contagiosum virus
gauacacauugcgugugggg

SEQ ID NO: 3090978 - RNA, 13 nt, Molluscum contagiosum virus
ccgcgccgcgccg

SEQ ID NO: 3090979 - RNA, 15 nt, Molluscum contagiosum virus
gagguggcacccugg

SEQ ID NO: 3090980 - RNA, 16 nt, Molluscum contagiosum virus
gccugcgcgagcaagc

SEQ ID NO: 3090981 - RNA, 12 nt, Molluscum contagiosum virus
cugcucuggagc

SEQ ID NO: 3090982 - RNA, 15 nt, Molluscum contagiosum virus
cgagcguugucuuga

SEQ ID NO: 3090983 - RNA, 12 nt, Molluscum contagiosum virus
ggaguccaugcc

SEQ ID NO: 3090984 - RNA, 19 nt, Molluscum contagiosum virus
agcacggccgccaccgcgc

SEQ ID NO: 3090985 - RNA, 15 nt, Molluscum contagiosum virus
cuggcuucuccaccu

SEQ ID NO: 3090986 - RNA, 14 nt, Molluscum contagiosum virus
ccaccagcgcggcc

SEQ ID NO: 3090987 - RNA, 14 nt, Molluscum contagiosum virus
gaagccgccagcca

SEQ ID NO: 3090988 - RNA, 19 nt, Molluscum contagiosum virus
agcacguuaaucacgauga

SEQ ID NO: 3090989 - RNA, 15 nt, Molluscum contagiosum virus
aacaggcacuucgca

SEQ ID NO: 3090990 - RNA, 21 nt, Molluscum contagiosum virus
cgcgggccuguccgcgggcgc

SEQ ID NO: 3090991 - RNA, 18 nt, Molluscum contagiosum virus
gccacgcggagcucgcca

SEQ ID NO: 3090992 - RNA, 23 nt, Molluscum contagiosum virus
ucacgcgcgauggcgccugcuuc

SEQ ID NO: 3090993 - RNA, 22 nt, Molluscum contagiosum virus
gacugcggacgggaagcuuuca

SEQ ID NO: 3090994 - RNA, 16 nt, Molluscum contagiosum virus
acauugccuuuugcac

SEQ ID NO: 3090995 - RNA, 22 nt, Molluscum contagiosum virus
gcuuccccgcacaagggcagcu

SEQ ID NO: 3090996 - RNA, 17 nt, Molluscum contagiosum virus
uagcagcuucuuggagc

SEQ ID NO: 3090997 - RNA, 21 nt, Molluscum contagiosum virus
ccgagcagaaggaagggcccg

SEQ ID NO: 3090998 - RNA, 18 nt, Molluscum contagiosum virus
accuccugcaccugcugg

SEQ ID NO: 3090999 - RNA, 18 nt, Molluscum contagiosum virus
ccacgcucgcgcgcaugc

SEQ ID NO: 3091000 - RNA, 15 nt, Molluscum contagiosum virus
gaccggcgucggcaa

SEQ ID NO: 3091001 - RNA, 20 nt, Molluscum contagiosum virus
gcagcuaccgcgcgcgcaag

SEQ ID NO: 3091002 - RNA, 21 nt, Molluscum contagiosum virus
gaagcaagacccagcaaggcc

SEQ ID NO: 3091003 - RNA, 23 nt, Molluscum contagiosum virus
agaaguugccgcaggaaccgcgu

SEQ ID NO: 3091004 - RNA, 15 nt, Molluscum contagiosum virus
ugcagcagcacaggu

SEQ ID NO: 3091005 - RNA, 22 nt, Molluscum contagiosum virus
acggagaucaggcagcugcugc

SEQ ID NO: 3091006 - RNA, 21 nt, Molluscum contagiosum virus
ugcacagccgcuuucugggcg

SEQ ID NO: 3091007 - RNA, 21 nt, Molluscum contagiosum virus
ccuagcuucugcguugccagc

SEQ ID NO: 3091008 - RNA, 15 nt, Molluscum contagiosum virus
ccgucccccgcggag

SEQ ID NO: 3091009 - RNA, 16 nt, Molluscum contagiosum virus
aggccuccuucccuga

SEQ ID NO: 3091010 - RNA, 19 nt, Molluscum contagiosum virus
cccgugcuggagggcacgc

SEQ ID NO: 3091011 - RNA, 22 nt, Molluscum contagiosum virus
acaagggcagcucaagcugcuc

SEQ ID NO: 3091012 - RNA, 15 nt, Molluscum contagiosum virus
agcuaaaagagcugc

SEQ ID NO: 3091013 - RNA, 15 nt, Molluscum contagiosum virus
gagacacgaguuucu

SEQ ID NO: 3091014 - RNA, 15 nt, Molluscum contagiosum virus
cugcgcgcggacuuc

SEQ ID NO: 3091015 - RNA, 13 nt, Molluscum contagiosum virus
gcggcugcuggag

SEQ ID NO: 3091016 - RNA, 16 nt, Molluscum contagiosum virus
gcugagcccuuugaug

SEQ ID NO: 3091017 - RNA, 16 nt, Molluscum contagiosum virus
ugcccgcgcccugcac

SEQ ID NO: 3091018 - RNA, 14 nt, Molluscum contagiosum virus
cgcacggaccucaa

SEQ ID NO: 3091019 - RNA, 17 nt, Molluscum contagiosum virus
gcauucucggacagugc

SEQ ID NO: 3091020 - RNA, 21 nt, Molluscum contagiosum virus
agcaccgccugcugcagcucc

SEQ ID NO: 3091021 - RNA, 12 nt, Molluscum contagiosum virus
cccacgagcgcc

SEQ ID NO: 3091022 - RNA, 23 nt, Molluscum contagiosum virus
cacuacucgucuugcgcgccacu

SEQ ID NO: 3091023 - RNA, 22 nt, Molluscum contagiosum virus
gcuggcgcuaccuaccggcagc

SEQ ID NO: 3091024 - RNA, 13 nt, Molluscum contagiosum virus
cguggugggccgc

SEQ ID NO: 3091025 - RNA, 14 nt, Molluscum contagiosum virus
ggcaccccgcagga

SEQ ID NO: 3091026 - RNA, 19 nt, Molluscum contagiosum virus
ggcgagacgugcggcacgc

SEQ ID NO: 3091027 - RNA, 16 nt, Molluscum contagiosum virus
cacccaccaggaacga

SEQ ID NO: 3091028 - RNA, 23 nt, Molluscum contagiosum virus
gcacgcugcuguccuucaagaac

SEQ ID NO: 3091029 - RNA, 19 nt, Molluscum contagiosum virus
gguggcacccuggcugcug

SEQ ID NO: 3091030 - RNA, 21 nt, Molluscum contagiosum virus
acggagcuacaaaacugaaaa

SEQ ID NO: 3091031 - RNA, 13 nt, Molluscum contagiosum virus
ccucugcgcggcc

SEQ ID NO: 3091032 - RNA, 22 nt, Molluscum contagiosum virus
ggagcccgaccccaagaagaac

SEQ ID NO: 3091033 - RNA, 20 nt, Molluscum contagiosum virus
cgcaggaaaggucgggcccg

SEQ ID NO: 3091034 - RNA, 20 nt, Molluscum contagiosum virus
aagcauccaggccuucgggc

SEQ ID NO: 3091035 - RNA, 20 nt, Molluscum contagiosum virus
acgaggucuuccauugcaug

SEQ ID NO: 3091036 - RNA, 19 nt, Molluscum contagiosum virus
gaagucguuaggcggcucc

SEQ ID NO: 3091037 - RNA, 21 nt, Molluscum contagiosum virus
ugcgcuacguuccgcgcgggg

SEQ ID NO: 3091038 - RNA, 13 nt, Molluscum contagiosum virus
cacgcgcacacgc

SEQ ID NO: 3091039 - RNA, 19 nt, Molluscum contagiosum virus
cuccuccugaugcccgcga

SEQ ID NO: 3091040 - RNA, 15 nt, Molluscum contagiosum virus
ucaagcaggcaugca

SEQ ID NO: 3091041 - RNA, 15 nt, Molluscum contagiosum virus
cgcaccagcugcaaa

SEQ ID NO: 3091042 - RNA, 16 nt, Molluscum contagiosum virus
gacuggcuucggggac

SEQ ID NO: 3091043 - RNA, 12 nt, Molluscum contagiosum virus
cgcggagcugug

SEQ ID NO: 3091044 - RNA, 13 nt, Molluscum contagiosum virus
gcuggcggugcuc

SEQ ID NO: 3091045 - RNA, 22 nt, Molluscum contagiosum virus
cagagaaaucccaagagccaug

SEQ ID NO: 3091046 - RNA, 14 nt, Molluscum contagiosum virus
cggcagcuggagcu

SEQ ID NO: 3091047 - RNA, 13 nt, Molluscum contagiosum virus
aggauggacaaag

SEQ ID NO: 3091048 - RNA, 22 nt, Molluscum contagiosum virus
augcugcucauggucgucuccg

SEQ ID NO: 3091049 - RNA, 20 nt, Molluscum contagiosum virus
ccaagggcguagagcaauac

SEQ ID NO: 3091050 - RNA, 20 nt, Molluscum contagiosum virus
agggaggcucgagcgcgcgc

SEQ ID NO: 3091051 - RNA, 17 nt, Molluscum contagiosum virus
cccgcgucccgacagca

SEQ ID NO: 3091052 - RNA, 23 nt, Molluscum contagiosum virus
gcggagccggccuagagcuggca

SEQ ID NO: 3091053 - RNA, 22 nt, Molluscum contagiosum virus
gugcucggugucgguaccugca

SEQ ID NO: 3091054 - RNA, 14 nt, Molluscum contagiosum virus
cgagaacggcucaa

SEQ ID NO: 3091055 - RNA, 19 nt, Molluscum contagiosum virus
ccggcagcgcgccuagcuc

SEQ ID NO: 3091056 - RNA, 13 nt, Molluscum contagiosum virus
aagugcuccgcac

SEQ ID NO: 3091057 - RNA, 18 nt, Molluscum contagiosum virus
ccaugcccgaccacgugc

SEQ ID NO: 3091058 - RNA, 19 nt, Molluscum contagiosum virus
cgagaccuacgucaagcag

SEQ ID NO: 3091059 - RNA, 20 nt, Molluscum contagiosum virus
gccaggcggucuuccagcac

SEQ ID NO: 3091060 - RNA, 19 nt, Molluscum contagiosum virus
cggaugcagaacagcacgu

SEQ ID NO: 3091061 - RNA, 16 nt, Molluscum contagiosum virus
gcggcggggcugcugg

SEQ ID NO: 3091062 - RNA, 14 nt, Molluscum contagiosum virus
gcucauagcccaug

SEQ ID NO: 3091063 - RNA, 22 nt, Molluscum contagiosum virus
gcgccacuagcaaggcgccgcg

SEQ ID NO: 3091064 - RNA, 15 nt, Molluscum contagiosum virus
acaucuaugcacggc

SEQ ID NO: 3091065 - RNA, 13 nt, Molluscum contagiosum virus
cgccuagcuccag

SEQ ID NO: 3091066 - RNA, 14 nt, Molluscum contagiosum virus
ccugcaccugcugg

SEQ ID NO: 3091067 - RNA, 14 nt, Molluscum contagiosum virus
ggcgggggcagcag

SEQ ID NO: 3091068 - RNA, 18 nt, Molluscum contagiosum virus
gcucaaucucgcccagca

SEQ ID NO: 3091069 - RNA, 19 nt, Molluscum contagiosum virus
caagcaccgccugcugcag

SEQ ID NO: 3091070 - RNA, 17 nt, Molluscum contagiosum virus
gcacgcggcucuggagc

SEQ ID NO: 3091071 - RNA, 15 nt, Molluscum contagiosum virus
cuuccgucugcugcu

SEQ ID NO: 3091072 - RNA, 19 nt, Molluscum contagiosum virus
cacccgagggcgugcgcuu

SEQ ID NO: 3091073 - RNA, 15 nt, Molluscum contagiosum virus
cgcgauucugcucuu

SEQ ID NO: 3091074 - RNA, 14 nt, Molluscum contagiosum virus
gcguucgacagcuc

SEQ ID NO: 3091075 - RNA, 22 nt, Molluscum contagiosum virus
gcucguuuucggauagccccuc

SEQ ID NO: 3091076 - RNA, 18 nt, Molluscum contagiosum virus
cgacgugccugccaucua

SEQ ID NO: 3091077 - RNA, 22 nt, Molluscum contagiosum virus
cgccgugggcagcuucugcucg

SEQ ID NO: 3091078 - RNA, 20 nt, Molluscum contagiosum virus
cgaacguuauccccuccaag

SEQ ID NO: 3091079 - RNA, 17 nt, Molluscum contagiosum virus
gcugcggcaacugccug

SEQ ID NO: 3091080 - RNA, 17 nt, Molluscum contagiosum virus
aagcaucaugaaagaac

SEQ ID NO: 3091081 - RNA, 19 nt, Molluscum contagiosum virus
cgcgccgcgggcgcagagc

SEQ ID NO: 3091082 - RNA, 17 nt, Molluscum contagiosum virus
accugcguucgcuccgu

SEQ ID NO: 3091083 - RNA, 21 nt, Molluscum contagiosum virus
gcggagcgcgcacggcagcgg

SEQ ID NO: 3091084 - RNA, 16 nt, Molluscum contagiosum virus
gacgagagggcgcgcg

SEQ ID NO: 3091085 - RNA, 19 nt, Molluscum contagiosum virus
caggaaagguaccccgcag

SEQ ID NO: 3091086 - RNA, 13 nt, Molluscum contagiosum virus
cgcggaccgcgcc

SEQ ID NO: 3091087 - RNA, 13 nt, Molluscum contagiosum virus
gugugcguacugg

SEQ ID NO: 3091088 - RNA, 18 nt, Molluscum contagiosum virus
caaauuccucgagaggga

SEQ ID NO: 3091089 - RNA, 15 nt, Molluscum contagiosum virus
cgcucuuacugcagc

SEQ ID NO: 3091090 - RNA, 18 nt, Molluscum contagiosum virus
gcccaggcgcgcgcucag

SEQ ID NO: 3091091 - RNA, 20 nt, Molluscum contagiosum virus
gacggcugcucgcugccugg

SEQ ID NO: 3091092 - RNA, 22 nt, Molluscum contagiosum virus
aggaaaggcaccugcaggaaag

SEQ ID NO: 3091093 - RNA, 22 nt, Molluscum contagiosum virus
ccggcgcgcgcgcgcaggcucg

SEQ ID NO: 3091094 - RNA, 16 nt, Molluscum contagiosum virus
gacagcuugcugcugu

SEQ ID NO: 3091095 - RNA, 21 nt, Molluscum contagiosum virus
uuccucgacgaggccuacagc

SEQ ID NO: 3091096 - RNA, 17 nt, Molluscum contagiosum virus
gcagaggacagcuccuu

SEQ ID NO: 3091097 - RNA, 18 nt, Molluscum contagiosum virus
augucuccccuugggcuc

SEQ ID NO: 3091098 - RNA, 16 nt, Molluscum contagiosum virus
cacccgugcgcgcgcu

SEQ ID NO: 3091099 - RNA, 16 nt, Molluscum contagiosum virus
cccacgugccagcuca

SEQ ID NO: 3091100 - RNA, 14 nt, Molluscum contagiosum virus
gaccgucacgacuc

SEQ ID NO: 3091101 - RNA, 16 nt, Molluscum contagiosum virus
gcgugcaugcccagca

SEQ ID NO: 3091102 - RNA, 14 nt, Molluscum contagiosum virus
uagcgccacgagca

SEQ ID NO: 3091103 - RNA, 18 nt, Molluscum contagiosum virus
ccguguccgguacugcug

SEQ ID NO: 3091104 - RNA, 22 nt, Molluscum contagiosum virus
gcaugcucacguacgacugcuu

SEQ ID NO: 3091105 - RNA, 12 nt, Molluscum contagiosum virus
ugugcgagcgca

SEQ ID NO: 3091106 - RNA, 21 nt, Molluscum contagiosum virus
acgaacggacgccuuuugugc

SEQ ID NO: 3091107 - RNA, 13 nt, Molluscum contagiosum virus
aucgacgagcacg

SEQ ID NO: 3091108 - RNA, 13 nt, Molluscum contagiosum virus
cccgggcggcgcg

SEQ ID NO: 3091109 - RNA, 18 nt, Molluscum contagiosum virus
gcugcccgcgcacgagcu

SEQ ID NO: 3091110 - RNA, 23 nt, Molluscum contagiosum virus
cgacaacacgcuguugcugcugc

SEQ ID NO: 3091111 - RNA, 13 nt, Molluscum contagiosum virus
ccgugcuugcuag

SEQ ID NO: 3091112 - RNA, 17 nt, Molluscum contagiosum virus
cgcguucgacagcucuu

SEQ ID NO: 3091113 - RNA, 13 nt, Molluscum contagiosum virus
acagagccccguu

SEQ ID NO: 3091114 - RNA, 19 nt, Molluscum contagiosum virus
ugcgcgugccucugccagc

SEQ ID NO: 3091115 - RNA, 16 nt, Molluscum contagiosum virus
caucuucaagccgcag

SEQ ID NO: 3091116 - RNA, 21 nt, Molluscum contagiosum virus
agcagcgugcauagugggcuu

SEQ ID NO: 3091117 - RNA, 17 nt, Molluscum contagiosum virus
ggcugcucccucucgag

SEQ ID NO: 3091118 - RNA, 21 nt, Molluscum contagiosum virus
cuuggcaauggcgcgcagcuc

SEQ ID NO: 3091119 - RNA, 22 nt, Molluscum contagiosum virus
gacgcugccggcaacgcugccg

SEQ ID NO: 3091120 - RNA, 16 nt, Molluscum contagiosum virus
ggcgcgccggccagcg

SEQ ID NO: 3091121 - RNA, 22 nt, Molluscum contagiosum virus
ggcaccccgaaaggcacccgca

SEQ ID NO: 3091122 - RNA, 21 nt, Molluscum contagiosum virus
gagcccgggcccgugcccgag

SEQ ID NO: 3091123 - RNA, 21 nt, Molluscum contagiosum virus
agcugcacgugcagcggcgcc

SEQ ID NO: 3091124 - RNA, 15 nt, Molluscum contagiosum virus
gcacgcgccgcgcgg

SEQ ID NO: 3091125 - RNA, 20 nt, Molluscum contagiosum virus
cgccucggacggaggucugc

SEQ ID NO: 3091126 - RNA, 16 nt, Molluscum contagiosum virus
agccgcucguccagcu

SEQ ID NO: 3091127 - RNA, 22 nt, Molluscum contagiosum virus
uccgcgggcgcgcgccagcagc

SEQ ID NO: 3091128 - RNA, 17 nt, Molluscum contagiosum virus
cagccugacggcagcaa

SEQ ID NO: 3091129 - RNA, 17 nt, Molluscum contagiosum virus
uuccuugcgcuuguccu

SEQ ID NO: 3091130 - RNA, 19 nt, Molluscum contagiosum virus
cgcgcccaccagcagccag

SEQ ID NO: 3091131 - RNA, 15 nt, Molluscum contagiosum virus
ccgcugagcgcagca

SEQ ID NO: 3091132 - RNA, 14 nt, Molluscum contagiosum virus
cgggcacgcagcuc

SEQ ID NO: 3091133 - RNA, 14 nt, Molluscum contagiosum virus
acgcacgaccucac

SEQ ID NO: 3091134 - RNA, 21 nt, Molluscum contagiosum virus
gcauugcgucuuacugcugca

SEQ ID NO: 3091135 - RNA, 13 nt, Molluscum contagiosum virus
cagccuguuuuua

SEQ ID NO: 3091136 - RNA, 13 nt, Molluscum contagiosum virus
cucugccugcaag

SEQ ID NO: 3091137 - RNA, 23 nt, Molluscum contagiosum virus
aggcgcacccucacaccuagagc

SEQ ID NO: 3091138 - RNA, 18 nt, Molluscum contagiosum virus
cggcuuccggcaccacgu

SEQ ID NO: 3091139 - RNA, 14 nt, Molluscum contagiosum virus
gcgcagucccagca

SEQ ID NO: 3091140 - RNA, 17 nt, Molluscum contagiosum virus
gccugugcccuggaagc

SEQ ID NO: 3091141 - RNA, 21 nt, Molluscum contagiosum virus
uggccaagcgcuccaacuucc

SEQ ID NO: 3091142 - RNA, 16 nt, Molluscum contagiosum virus
cugccgggagagccgc

SEQ ID NO: 3091143 - RNA, 20 nt, Molluscum contagiosum virus
gagcauguugucgaagaaca

SEQ ID NO: 3091144 - RNA, 13 nt, Molluscum contagiosum virus
guugccuggaggg

SEQ ID NO: 3091145 - RNA, 15 nt, Molluscum contagiosum virus
ugguaacaagagcuu

SEQ ID NO: 3091146 - RNA, 17 nt, Molluscum contagiosum virus
gcugugagcgcgccgcu

SEQ ID NO: 3091147 - RNA, 13 nt, Molluscum contagiosum virus
gcucgaggcgccg

SEQ ID NO: 3091148 - RNA, 21 nt, Molluscum contagiosum virus
accgggguccgcuccuucuca

SEQ ID NO: 3091149 - RNA, 21 nt, Molluscum contagiosum virus
uggcaugcgcccucacgugcu

SEQ ID NO: 3091150 - RNA, 17 nt, Molluscum contagiosum virus
cgcaguuuuuuuccgca

SEQ ID NO: 3091151 - RNA, 19 nt, Molluscum contagiosum virus
agaggccagcacaagccgu

SEQ ID NO: 3091152 - RNA, 16 nt, Molluscum contagiosum virus
ugauccuugccaagcc

SEQ ID NO: 3091153 - RNA, 17 nt, Molluscum contagiosum virus
gggcgcgaccggcgugc

SEQ ID NO: 3091154 - RNA, 13 nt, Molluscum contagiosum virus
gcgcgccagcacg

SEQ ID NO: 3091155 - RNA, 23 nt, Molluscum contagiosum virus
gcgaccagcucuuggcgggcacc

SEQ ID NO: 3091156 - RNA, 20 nt, Molluscum contagiosum virus
gagcgaaccgcggcagccuu

SEQ ID NO: 3091157 - RNA, 21 nt, Molluscum contagiosum virus
accuccuucgcguaccaagcc

SEQ ID NO: 3091158 - RNA, 22 nt, Molluscum contagiosum virus
uguuccacgaccgcaagugcac

SEQ ID NO: 3091159 - RNA, 17 nt, Molluscum contagiosum virus
guaagucgaagaggguc

SEQ ID NO: 3091160 - RNA, 17 nt, Molluscum contagiosum virus
gcugaguuacguggccg

SEQ ID NO: 3091161 - RNA, 16 nt, Molluscum contagiosum virus
cgauggacgccagcuu

SEQ ID NO: 3091162 - RNA, 13 nt, Molluscum contagiosum virus
gcugcgugugccg

SEQ ID NO: 3091163 - RNA, 17 nt, Molluscum contagiosum virus
ggcgcacaaucucgccg

SEQ ID NO: 3091164 - RNA, 22 nt, Molluscum contagiosum virus
gcguagcggacgaagcugugca

SEQ ID NO: 3091165 - RNA, 21 nt, Molluscum contagiosum virus
cgcggccacgcacucgcuggc

SEQ ID NO: 3091166 - RNA, 20 nt, Molluscum contagiosum virus
ccugcgggcggcacacacuu

SEQ ID NO: 3091167 - RNA, 20 nt, Molluscum contagiosum virus
gacugacgccgauguccugc

SEQ ID NO: 3091168 - RNA, 19 nt, Molluscum contagiosum virus
gcugagagacuucuugcac

SEQ ID NO: 3091169 - RNA, 16 nt, Molluscum contagiosum virus
uuuguguuggccaggc

SEQ ID NO: 3091170 - RNA, 22 nt, Molluscum contagiosum virus
ccgugcccgccgacugccgccg

SEQ ID NO: 3091171 - RNA, 22 nt, Molluscum contagiosum virus
ggcgcgccgucucgcggggcaa

SEQ ID NO: 3091172 - RNA, 12 nt, Molluscum contagiosum virus
cggcgcgcaccu

SEQ ID NO: 3091173 - RNA, 21 nt, Molluscum contagiosum virus
gcgcgcugguuaccaagggca

SEQ ID NO: 3091174 - RNA, 13 nt, Molluscum contagiosum virus
cuggcggugcucu

SEQ ID NO: 3091175 - RNA, 13 nt, Molluscum contagiosum virus
ccuccgcucugag

SEQ ID NO: 3091176 - RNA, 17 nt, Molluscum contagiosum virus
ccgcagcaagcagccgc

SEQ ID NO: 3091177 - RNA, 13 nt, Molluscum contagiosum virus
caacaugccuuuc

SEQ ID NO: 3091178 - RNA, 16 nt, Molluscum contagiosum virus
cgcgcccaccagcagc

SEQ ID NO: 3091179 - RNA, 17 nt, Molluscum contagiosum virus
cuccgacuccgagcgcg

SEQ ID NO: 3091180 - RNA, 15 nt, Molluscum contagiosum virus
gcaccgagugcuggc

SEQ ID NO: 3091181 - RNA, 18 nt, Molluscum contagiosum virus
caagcgcuacuugcuggc

SEQ ID NO: 3091182 - RNA, 20 nt, Molluscum contagiosum virus
agguggccaacggcgccauc

SEQ ID NO: 3091183 - RNA, 17 nt, Molluscum contagiosum virus
cagcggucucggcagca

SEQ ID NO: 3091184 - RNA, 15 nt, Molluscum contagiosum virus
gccgcaaccucuucc

SEQ ID NO: 3091185 - RNA, 21 nt, Molluscum contagiosum virus
ggagccucccccgcgcacugc

SEQ ID NO: 3091186 - RNA, 12 nt, Molluscum contagiosum virus
cgcggccugggc

SEQ ID NO: 3091187 - RNA, 18 nt, Molluscum contagiosum virus
ccgcgcggcgcucugcca

SEQ ID NO: 3091188 - RNA, 18 nt, Molluscum contagiosum virus
gaguggcucacagccgug

SEQ ID NO: 3091189 - RNA, 17 nt, Molluscum contagiosum virus
aagcgucgugcuccacg

SEQ ID NO: 3091190 - RNA, 16 nt, Molluscum contagiosum virus
cgacgguuuccgcgcc

SEQ ID NO: 3091191 - RNA, 21 nt, Molluscum contagiosum virus
cugccaccaugcgcacagcac

SEQ ID NO: 3091192 - RNA, 20 nt, Molluscum contagiosum virus
ccuuguucaccauccagccg

SEQ ID NO: 3091193 - RNA, 13 nt, Molluscum contagiosum virus
gcgcuucuauugc

SEQ ID NO: 3091194 - RNA, 15 nt, Molluscum contagiosum virus
uuauugaaaauaaag

SEQ ID NO: 3091195 - RNA, 18 nt, Molluscum contagiosum virus
cagccgcagaugcgcagc

SEQ ID NO: 3091196 - RNA, 15 nt, Molluscum contagiosum virus
ggaaggcgaccagcu

SEQ ID NO: 3091197 - RNA, 19 nt, Molluscum contagiosum virus
cugccgcgagcacuggcug

SEQ ID NO: 3091198 - RNA, 22 nt, Molluscum contagiosum virus
gcgggcgcgcgccagcagcgcc

SEQ ID NO: 3091199 - RNA, 16 nt, Molluscum contagiosum virus
aguugcgagccagcca

SEQ ID NO: 3091200 - RNA, 14 nt, Molluscum contagiosum virus
gcgcggcaagcagc

SEQ ID NO: 3091201 - RNA, 14 nt, Molluscum contagiosum virus
ggaagucguggccg

SEQ ID NO: 3091202 - RNA, 22 nt, Molluscum contagiosum virus
cgacugcgccuucugccugccc

SEQ ID NO: 3091203 - RNA, 18 nt, Molluscum contagiosum virus
accccgcaggaaaggcac

SEQ ID NO: 3091204 - RNA, 20 nt, Molluscum contagiosum virus
agguagugguccaccagcug

SEQ ID NO: 3091205 - RNA, 15 nt, Molluscum contagiosum virus
cggcuguggacauga

SEQ ID NO: 3091206 - RNA, 14 nt, Molluscum contagiosum virus
ugcgaguggcgcgc

SEQ ID NO: 3091207 - RNA, 17 nt, Molluscum contagiosum virus
cgaguugcgucucccgc

SEQ ID NO: 3091208 - RNA, 12 nt, Molluscum contagiosum virus
ccuuguccuggc

SEQ ID NO: 3091209 - RNA, 18 nt, Molluscum contagiosum virus
cugccgcgcaugcuggag

SEQ ID NO: 3091210 - RNA, 12 nt, Molluscum contagiosum virus
ucgcagugcccg

SEQ ID NO: 3091211 - RNA, 14 nt, Molluscum contagiosum virus
ggcgacuuguagug

SEQ ID NO: 3091212 - RNA, 21 nt, Molluscum contagiosum virus
acagacgaugacgaggagcug

SEQ ID NO: 3091213 - RNA, 21 nt, Molluscum contagiosum virus
gaauaccggagacaccagcuc

SEQ ID NO: 3091214 - RNA, 17 nt, Molluscum contagiosum virus
cgcgcgccgugccuggc

SEQ ID NO: 3091215 - RNA, 19 nt, Molluscum contagiosum virus
cuggcgaaaccugggcgcc

SEQ ID NO: 3091216 - RNA, 17 nt, Molluscum contagiosum virus
gcgcugcagcaccugca

SEQ ID NO: 3091217 - RNA, 17 nt, Molluscum contagiosum virus
ccgugggcagcuucugc

SEQ ID NO: 3091218 - RNA, 14 nt, Molluscum contagiosum virus
agcugcugcggcuc

SEQ ID NO: 3091219 - RNA, 14 nt, Molluscum contagiosum virus
cggacucgagcccc

SEQ ID NO: 3091220 - RNA, 19 nt, Molluscum contagiosum virus
cuagugccgagcucgccuc

SEQ ID NO: 3091221 - RNA, 17 nt, Molluscum contagiosum virus
cagcagccaggcuaggc

SEQ ID NO: 3091222 - RNA, 15 nt, Molluscum contagiosum virus
uacgcuacagcagcc

SEQ ID NO: 3091223 - RNA, 22 nt, Molluscum contagiosum virus
aggucaucaccagccugcucac

SEQ ID NO: 3091224 - RNA, 23 nt, Molluscum contagiosum virus
cucugcgaucgcgggcacgagca

SEQ ID NO: 3091225 - RNA, 21 nt, Molluscum contagiosum virus
accgugcccuggaccuccauc

SEQ ID NO: 3091226 - RNA, 16 nt, Molluscum contagiosum virus
cgcggacucgugcacc

SEQ ID NO: 3091227 - RNA, 19 nt, Molluscum contagiosum virus
ccacguugccgcgcgcugc

SEQ ID NO: 3091228 - RNA, 14 nt, Molluscum contagiosum virus
gagcagugccgccg

SEQ ID NO: 3091229 - RNA, 20 nt, Molluscum contagiosum virus
ugcuggcgcgcggagagcag

SEQ ID NO: 3091230 - RNA, 12 nt, Molluscum contagiosum virus
cgcggcgcagug

SEQ ID NO: 3091231 - RNA, 21 nt, Molluscum contagiosum virus
cgaguacgcucuccaugcgcg

SEQ ID NO: 3091232 - RNA, 15 nt, Molluscum contagiosum virus
ggccccuacgugguc

SEQ ID NO: 3091233 - RNA, 17 nt, Molluscum contagiosum virus
uagcagcgugcgcacca

SEQ ID NO: 3091234 - RNA, 19 nt, Molluscum contagiosum virus
acguccccgaacugcuggg

SEQ ID NO: 3091235 - RNA, 23 nt, Molluscum contagiosum virus
acaagcagccgcaguaccaguac

SEQ ID NO: 3091236 - RNA, 12 nt, Molluscum contagiosum virus
cgacagcucuuc

SEQ ID NO: 3091237 - RNA, 16 nt, Molluscum contagiosum virus
ccgcugcccgcgcacg

SEQ ID NO: 3091238 - RNA, 14 nt, Molluscum contagiosum virus
gcgagacgggcacg

SEQ ID NO: 3091239 - RNA, 19 nt, Molluscum contagiosum virus
gcacaguucacggcgcucg

SEQ ID NO: 3091240 - RNA, 18 nt, Molluscum contagiosum virus
acgagcugugcgagccag

SEQ ID NO: 3091241 - RNA, 15 nt, Molluscum contagiosum virus
gcagcagcuccucca

SEQ ID NO: 3091242 - RNA, 17 nt, Molluscum contagiosum virus
ccaugcgcacagcacuu

SEQ ID NO: 3091243 - RNA, 22 nt, Molluscum contagiosum virus
gugcucgcgagcguuucugccg

SEQ ID NO: 3091244 - RNA, 13 nt, Molluscum contagiosum virus
gcgcggcgcgccg

SEQ ID NO: 3091245 - RNA, 18 nt, Molluscum contagiosum virus
uccuucugguuccugcgc

SEQ ID NO: 3091246 - RNA, 19 nt, Molluscum contagiosum virus
gcccgaguuucggaagagc

SEQ ID NO: 3091247 - RNA, 16 nt, Molluscum contagiosum virus
acgagcacugccugcc

SEQ ID NO: 3091248 - RNA, 15 nt, Molluscum contagiosum virus
acggcgugcgccgcu

SEQ ID NO: 3091249 - RNA, 16 nt, Molluscum contagiosum virus
gcuccggucaccgcgu

SEQ ID NO: 3091250 - RNA, 21 nt, Molluscum contagiosum virus
ccugcugguucagguagcgcg

SEQ ID NO: 3091251 - RNA, 19 nt, Molluscum contagiosum virus
aaggauuuaaauggcgcgc

SEQ ID NO: 3091252 - RNA, 17 nt, Molluscum contagiosum virus
guggcgccgcugcugga

SEQ ID NO: 3091253 - RNA, 21 nt, Molluscum contagiosum virus
gcuccggcuuuauuuccggcu

SEQ ID NO: 3091254 - RNA, 22 nt, Molluscum contagiosum virus
cugcggagcgccuucugcaagc

SEQ ID NO: 3091255 - RNA, 22 nt, Molluscum contagiosum virus
gcagacgacucgcugccagaga

SEQ ID NO: 3091256 - RNA, 17 nt, Molluscum contagiosum virus
cacgcgcgcgugcugcu

SEQ ID NO: 3091257 - RNA, 22 nt, Molluscum contagiosum virus
uaaacaaacgugcaugcacaua

SEQ ID NO: 3091258 - RNA, 19 nt, Molluscum contagiosum virus
ugcucgcuugccgcuugag

SEQ ID NO: 3091259 - RNA, 13 nt, Molluscum contagiosum virus
gccggccgccggc

SEQ ID NO: 3091260 - RNA, 14 nt, Molluscum contagiosum virus
gcggcacuugcagg

SEQ ID NO: 3091261 - RNA, 20 nt, Molluscum contagiosum virus
aagagcacgaugcccagcag

SEQ ID NO: 3091262 - RNA, 18 nt, Molluscum contagiosum virus
acggcgaguucugccggc

SEQ ID NO: 3091263 - RNA, 12 nt, Molluscum contagiosum virus
cggucagacuuu

SEQ ID NO: 3091264 - RNA, 17 nt, Molluscum contagiosum virus
cggucggguacacgugc

SEQ ID NO: 3091265 - RNA, 18 nt, Molluscum contagiosum virus
ccugcugccgagcuucgu

SEQ ID NO: 3091266 - RNA, 19 nt, Molluscum contagiosum virus
ccgcgggcgcacgcuuguc

SEQ ID NO: 3091267 - RNA, 17 nt, Molluscum contagiosum virus
ucaccccgcugggccgc

SEQ ID NO: 3091268 - RNA, 17 nt, Molluscum contagiosum virus
gugccgaggcgcugccg

SEQ ID NO: 3091269 - RNA, 15 nt, Molluscum contagiosum virus
guucgcagugcccgg

SEQ ID NO: 3091270 - RNA, 20 nt, Molluscum contagiosum virus
cgccgacuuccgacgggccg

SEQ ID NO: 3091271 - RNA, 20 nt, Molluscum contagiosum virus
gcugcuuccgcaccuggucg

SEQ ID NO: 3091272 - RNA, 19 nt, Molluscum contagiosum virus
cagugcggccagcaccgcg

SEQ ID NO: 3091273 - RNA, 12 nt, Molluscum contagiosum virus
cuuccugcuggc

SEQ ID NO: 3091274 - RNA, 21 nt, Molluscum contagiosum virus
ccgcggcgugcagggcgugcu

SEQ ID NO: 3091275 - RNA, 18 nt, Molluscum contagiosum virus
gcgaaccgcggcagccuu

SEQ ID NO: 3091276 - RNA, 12 nt, Molluscum contagiosum virus
gaaguggccguc

SEQ ID NO: 3091277 - RNA, 15 nt, Molluscum contagiosum virus
cugcgcccauuccug

SEQ ID NO: 3091278 - RNA, 19 nt, Molluscum contagiosum virus
cgcgggcguguccgcgggc

SEQ ID NO: 3091279 - RNA, 20 nt, Molluscum contagiosum virus
ucguccgcucgugccacugc

SEQ ID NO: 3091280 - RNA, 15 nt, Molluscum contagiosum virus
cauggacgugcugcu

SEQ ID NO: 3091281 - RNA, 23 nt, Molluscum contagiosum virus
cugcacgcucuucgagacgcugc

SEQ ID NO: 3091282 - RNA, 21 nt, Molluscum contagiosum virus
cgcacacgcgcgcgugcugcu

SEQ ID NO: 3091283 - RNA, 19 nt, Molluscum contagiosum virus
cccgccgcguacaugcgug

SEQ ID NO: 3091284 - RNA, 16 nt, Molluscum contagiosum virus
cgcgagcgccacuagc

SEQ ID NO: 3091285 - RNA, 16 nt, Molluscum contagiosum virus
gagcaauggcggccug

SEQ ID NO: 3091286 - RNA, 18 nt, Molluscum contagiosum virus
gccgggcuugcucccucg

SEQ ID NO: 3091287 - RNA, 14 nt, Molluscum contagiosum virus
cuggcggagacacu

SEQ ID NO: 3091288 - RNA, 22 nt, Molluscum contagiosum virus
gcgcugcucgccgucgcagaag

SEQ ID NO: 3091289 - RNA, 16 nt, Molluscum contagiosum virus
cgcgggccgccgggcc

SEQ ID NO: 3091290 - RNA, 12 nt, Molluscum contagiosum virus
uaacuauguucu

SEQ ID NO: 3091291 - RNA, 13 nt, Molluscum contagiosum virus
acgagcagcugcu

SEQ ID NO: 3091292 - RNA, 22 nt, Molluscum contagiosum virus
cacgggcaugcacagcugcucg

SEQ ID NO: 3091293 - RNA, 13 nt, Molluscum contagiosum virus
cgggcgcaggccc

SEQ ID NO: 3091294 - RNA, 13 nt, Molluscum contagiosum virus
cccgcgcagcgcc

SEQ ID NO: 3091295 - RNA, 21 nt, Molluscum contagiosum virus
cgcugcguuuccagggcagua

SEQ ID NO: 3091296 - RNA, 21 nt, Molluscum contagiosum virus
ugcugucccaagacucugccg

SEQ ID NO: 3091297 - RNA, 14 nt, Molluscum contagiosum virus
ggagaacggacaaa

SEQ ID NO: 3091298 - RNA, 19 nt, Molluscum contagiosum virus
guaugaaucuacggcuguu

SEQ ID NO: 3091299 - RNA, 13 nt, Molluscum contagiosum virus
cugacugcugccc

SEQ ID NO: 3091300 - RNA, 18 nt, Molluscum contagiosum virus
acggucguccuggagccu

SEQ ID NO: 3091301 - RNA, 15 nt, Molluscum contagiosum virus
aggaaaggcacccgc

SEQ ID NO: 3091302 - RNA, 22 nt, Molluscum contagiosum virus
ggccuguccgcggaugcaggca

SEQ ID NO: 3091303 - RNA, 20 nt, Molluscum contagiosum virus
ucgagaccucgcgcuuccgg

SEQ ID NO: 3091304 - RNA, 15 nt, Molluscum contagiosum virus
cugucgcgcagcugc

SEQ ID NO: 3091305 - RNA, 19 nt, Molluscum contagiosum virus
gcgcgcucauggcgcgcaa

SEQ ID NO: 3091306 - RNA, 17 nt, Molluscum contagiosum virus
cgggugcauacgcagag

SEQ ID NO: 3091307 - RNA, 17 nt, Molluscum contagiosum virus
cgccuucgucgcgcgcu

SEQ ID NO: 3091308 - RNA, 19 nt, Molluscum contagiosum virus
gaacgcgcaagugugcgca

SEQ ID NO: 3091309 - RNA, 19 nt, Molluscum contagiosum virus
caaugcgcacgugcucgcg

SEQ ID NO: 3091310 - RNA, 16 nt, Molluscum contagiosum virus
gcaagccagcccgcug

SEQ ID NO: 3091311 - RNA, 19 nt, Molluscum contagiosum virus
cuaccacgagcacugccug

SEQ ID NO: 3091312 - RNA, 23 nt, Molluscum contagiosum virus
guuggggcggcggggcugcuggc

SEQ ID NO: 3091313 - RNA, 14 nt, Molluscum contagiosum virus
ugcgggcuguucca

SEQ ID NO: 3091314 - RNA, 13 nt, Molluscum contagiosum virus
uugagagcgcugg

SEQ ID NO: 3091315 - RNA, 21 nt, Molluscum contagiosum virus
uguaccuggugcgcccgcggc

SEQ ID NO: 3091316 - RNA, 14 nt, Molluscum contagiosum virus
acaugcagcugcag

SEQ ID NO: 3091317 - RNA, 18 nt, Molluscum contagiosum virus
gcaagagccgccggggcc

SEQ ID NO: 3091318 - RNA, 19 nt, Molluscum contagiosum virus
auacugcgggcuguuccaa

SEQ ID NO: 3091319 - RNA, 20 nt, Molluscum contagiosum virus
aaccacagcucuccgagaca

SEQ ID NO: 3091320 - RNA, 16 nt, Molluscum contagiosum virus
agcguuucugccggag

SEQ ID NO: 3091321 - RNA, 15 nt, Molluscum contagiosum virus
gcccgccgacugccg

SEQ ID NO: 3091322 - RNA, 22 nt, Molluscum contagiosum virus
gcgggcuguuccaagaagacua

SEQ ID NO: 3091323 - RNA, 17 nt, Molluscum contagiosum virus
ccagcuucaucaagcac

SEQ ID NO: 3091324 - RNA, 22 nt, Molluscum contagiosum virus
cuagcugugcgcuacguggcgc

SEQ ID NO: 3091325 - RNA, 13 nt, Molluscum contagiosum virus
aggguguggccua

SEQ ID NO: 3091326 - RNA, 17 nt, Molluscum contagiosum virus
cugacccccuccccagc

SEQ ID NO: 3091327 - RNA, 19 nt, Molluscum contagiosum virus
aacccguggccgagccgcu

SEQ ID NO: 3091328 - RNA, 15 nt, Molluscum contagiosum virus
acuacuacacugucg

SEQ ID NO: 3091329 - RNA, 14 nt, Molluscum contagiosum virus
ugccuguggcgcac

SEQ ID NO: 3091330 - RNA, 13 nt, Molluscum contagiosum virus
cgcguccaugcug

SEQ ID NO: 3091331 - RNA, 13 nt, Molluscum contagiosum virus
gcgcgcucugccg

SEQ ID NO: 3091332 - RNA, 14 nt, Molluscum contagiosum virus
cugaacaagcugca

SEQ ID NO: 3091333 - RNA, 18 nt, Molluscum contagiosum virus
gacgcaggaugcuggggc

SEQ ID NO: 3091334 - RNA, 22 nt, Molluscum contagiosum virus
gcccgaguagaagagcguggac

SEQ ID NO: 3091335 - RNA, 14 nt, Molluscum contagiosum virus
ccuccgagcgcgcg

SEQ ID NO: 3091336 - RNA, 14 nt, Molluscum contagiosum virus
gugggcaccugcau

SEQ ID NO: 3091337 - RNA, 12 nt, Molluscum contagiosum virus
cgagccagccag

SEQ ID NO: 3091338 - RNA, 17 nt, Molluscum contagiosum virus
gaaagcagcaaacugug

SEQ ID NO: 3091339 - RNA, 23 nt, Molluscum contagiosum virus
cuggugguaauggguaugggcuu

SEQ ID NO: 3091340 - RNA, 19 nt, Molluscum contagiosum virus
gucaucgggcugcagcccu

SEQ ID NO: 3091341 - RNA, 12 nt, Molluscum contagiosum virus
cgcaggacgcgg

SEQ ID NO: 3091342 - RNA, 19 nt, Molluscum contagiosum virus
cagcggaagaaacagccau

SEQ ID NO: 3091343 - RNA, 13 nt, Molluscum contagiosum virus
ggggcccaugcuc

SEQ ID NO: 3091344 - RNA, 13 nt, Molluscum contagiosum virus
ccucgagcacgcc

SEQ ID NO: 3091345 - RNA, 16 nt, Molluscum contagiosum virus
gcccggcggcccgcgg

SEQ ID NO: 3091346 - RNA, 14 nt, Molluscum contagiosum virus
gcaccugcuggaac

SEQ ID NO: 3091347 - RNA, 21 nt, Molluscum contagiosum virus
gcgggcauguccuuggcggug

SEQ ID NO: 3091348 - RNA, 21 nt, Molluscum contagiosum virus
cgcaccuggucgagcaccugu

SEQ ID NO: 3091349 - RNA, 20 nt, Molluscum contagiosum virus
agaauuucgacagcauccug

SEQ ID NO: 3091350 - RNA, 19 nt, Molluscum contagiosum virus
ucgcgagaaguucugcaca

SEQ ID NO: 3091351 - RNA, 21 nt, Molluscum contagiosum virus
ccccgcaggaaaggcaccccg

SEQ ID NO: 3091352 - RNA, 17 nt, Molluscum contagiosum virus
augcgcgguccuguccg

SEQ ID NO: 3091353 - RNA, 23 nt, Molluscum contagiosum virus
cguggcgccauugcucgcggugc

SEQ ID NO: 3091354 - RNA, 15 nt, Molluscum contagiosum virus
gcugauucugcuugc

SEQ ID NO: 3091355 - RNA, 22 nt, Molluscum contagiosum virus
ccgccggcgccgcuaccagcuc

SEQ ID NO: 3091356 - RNA, 23 nt, Molluscum contagiosum virus
aacuaagcuaaaagagcugcugc

SEQ ID NO: 3091357 - RNA, 20 nt, Molluscum contagiosum virus
cgcgacgacguugugcuccu

SEQ ID NO: 3091358 - RNA, 23 nt, Molluscum contagiosum virus
uacaacucgguggugcgccugca

SEQ ID NO: 3091359 - RNA, 16 nt, Molluscum contagiosum virus
ccgcgagauugagagc

SEQ ID NO: 3091360 - RNA, 17 nt, Molluscum contagiosum virus
agcucuucguggccaaa

SEQ ID NO: 3091361 - RNA, 18 nt, Molluscum contagiosum virus
ccugcaggaaaggcaccc

SEQ ID NO: 3091362 - RNA, 17 nt, Molluscum contagiosum virus
cuucucgccgcaccaca

SEQ ID NO: 3091363 - RNA, 18 nt, Molluscum contagiosum virus
guacucgcugcuccccgc

SEQ ID NO: 3091364 - RNA, 19 nt, Molluscum contagiosum virus
gucucgaugugacaacaug

SEQ ID NO: 3091365 - RNA, 20 nt, Molluscum contagiosum virus
agcauguccgacuccaagga

SEQ ID NO: 3091366 - RNA, 13 nt, Molluscum contagiosum virus
cacgcgcacgggc

SEQ ID NO: 3091367 - RNA, 15 nt, Molluscum contagiosum virus
cugcuugcggcacac

SEQ ID NO: 3091368 - RNA, 14 nt, Molluscum contagiosum virus
ucaccauccagccg

SEQ ID NO: 3091369 - RNA, 17 nt, Molluscum contagiosum virus
cggcguggccaggccgc

SEQ ID NO: 3091370 - RNA, 20 nt, Molluscum contagiosum virus
ccugucggcacaucucucag

SEQ ID NO: 3091371 - RNA, 12 nt, Molluscum contagiosum virus
ucucgaggccgg

SEQ ID NO: 3091372 - RNA, 19 nt, Molluscum contagiosum virus
cgcacgauguacuccacca

SEQ ID NO: 3091373 - RNA, 22 nt, Molluscum contagiosum virus
acagguagugguccaccagcug

SEQ ID NO: 3091374 - RNA, 12 nt, Molluscum contagiosum virus
cgcgccgcggcg

SEQ ID NO: 3091375 - RNA, 22 nt, Molluscum contagiosum virus
gcgggaccucuuucucgcgccg

SEQ ID NO: 3091376 - RNA, 19 nt, Molluscum contagiosum virus
gucgcccggcaggcucccg

SEQ ID NO: 3091377 - RNA, 14 nt, Molluscum contagiosum virus
gcaagcucccgcug

SEQ ID NO: 3091378 - RNA, 23 nt, Molluscum contagiosum virus
acaugcuagcgggcaagcgcuuc

SEQ ID NO: 3091379 - RNA, 19 nt, Molluscum contagiosum virus
gucaacagugcgugccagg

SEQ ID NO: 3091380 - RNA, 16 nt, Molluscum contagiosum virus
gacgccuuccugcugg

SEQ ID NO: 3091381 - RNA, 14 nt, Molluscum contagiosum virus
gcgcgcgugccgcc

SEQ ID NO: 3091382 - RNA, 16 nt, Molluscum contagiosum virus
gauaugcgccugugcc

SEQ ID NO: 3091383 - RNA, 13 nt, Molluscum contagiosum virus
ggcugcagcccuu

SEQ ID NO: 3091384 - RNA, 20 nt, Molluscum contagiosum virus
gauacccuuggcagcaacug

SEQ ID NO: 3091385 - RNA, 19 nt, Molluscum contagiosum virus
gcgcgccugccgccugcag

SEQ ID NO: 3091386 - RNA, 18 nt, Molluscum contagiosum virus
ggcgcaacgcuggccgcc

SEQ ID NO: 3091387 - RNA, 14 nt, Molluscum contagiosum virus
caccccgcagcuca

SEQ ID NO: 3091388 - RNA, 23 nt, Molluscum contagiosum virus
gaagggcgggaagaaggugcuca

SEQ ID NO: 3091389 - RNA, 14 nt, Molluscum contagiosum virus
auugccccugggcu

SEQ ID NO: 3091390 - RNA, 19 nt, Molluscum contagiosum virus
agcaacugcacagggauuc

SEQ ID NO: 3091391 - RNA, 16 nt, Molluscum contagiosum virus
acaagcugcuggcaca

SEQ ID NO: 3091392 - RNA, 16 nt, Molluscum contagiosum virus
agaucaggcagcugcu

SEQ ID NO: 3091393 - RNA, 19 nt, Molluscum contagiosum virus
ggcaacaugcggagacugu

SEQ ID NO: 3091394 - RNA, 14 nt, Molluscum contagiosum virus
gcuccaacagcagc

SEQ ID NO: 3091395 - RNA, 13 nt, Molluscum contagiosum virus
cuuugcggacgcg

SEQ ID NO: 3091396 - RNA, 18 nt, Molluscum contagiosum virus
caacguggcgccgcugcu

SEQ ID NO: 3091397 - RNA, 16 nt, Molluscum contagiosum virus
cacucguggcaacaac

SEQ ID NO: 3091398 - RNA, 15 nt, Molluscum contagiosum virus
cgcucgcgcugcuuc

SEQ ID NO: 3091399 - RNA, 20 nt, Molluscum contagiosum virus
gccugcaccgagugcuggcc

SEQ ID NO: 3091400 - RNA, 11 nt, Molluscum contagiosum virus
cgcgcucugcc

SEQ ID NO: 3091401 - RNA, 21 nt, Molluscum contagiosum virus
acagacggcgcgcucggagac

SEQ ID NO: 3091402 - RNA, 16 nt, Molluscum contagiosum virus
uugcgagccagccagg

SEQ ID NO: 3091403 - RNA, 20 nt, Molluscum contagiosum virus
cccagcgguggucuccgcgg

SEQ ID NO: 3091404 - RNA, 14 nt, Molluscum contagiosum virus
cauccugccacacc

SEQ ID NO: 3091405 - RNA, 21 nt, Molluscum contagiosum virus
ccuagcgcgcgugugcauggc

SEQ ID NO: 3091406 - RNA, 18 nt, Molluscum contagiosum virus
ccccuguaacaaggaaaa

SEQ ID NO: 3091407 - RNA, 16 nt, Molluscum contagiosum virus
cccauuccuguugcuc

SEQ ID NO: 3091408 - RNA, 20 nt, Molluscum contagiosum virus
cuaacggacgcggccaugcu

SEQ ID NO: 3091409 - RNA, 20 nt, Molluscum contagiosum virus
cggcaugcgcgcgcugccag

SEQ ID NO: 3091410 - RNA, 15 nt, Molluscum contagiosum virus
cguccgcgcagcucg

SEQ ID NO: 3091411 - RNA, 21 nt, Molluscum contagiosum virus
cggcguccgcagcggcgccac

SEQ ID NO: 3091412 - RNA, 16 nt, Molluscum contagiosum virus
cguauggaucuucuca

SEQ ID NO: 3091413 - RNA, 16 nt, Molluscum contagiosum virus
caaaagcacagcagga

SEQ ID NO: 3091414 - RNA, 13 nt, Molluscum contagiosum virus
accagaggguggc

SEQ ID NO: 3091415 - RNA, 16 nt, Molluscum contagiosum virus
ccgcacgugcugcgcu

SEQ ID NO: 3091416 - RNA, 21 nt, Molluscum contagiosum virus
ccgucucgcggaagaauuccu

SEQ ID NO: 3091417 - RNA, 19 nt, Molluscum contagiosum virus
gcggcgcgccgcccgggaa

SEQ ID NO: 3091418 - RNA, 17 nt, Molluscum contagiosum virus
gccgccgcaggcccggc

SEQ ID NO: 3091419 - RNA, 18 nt, Molluscum contagiosum virus
gcaguuccaccucgagcu

SEQ ID NO: 3091420 - RNA, 20 nt, Molluscum contagiosum virus
cccgcgguguccuugcgccg

SEQ ID NO: 3091421 - RNA, 14 nt, Molluscum contagiosum virus
gcuucggcucccag

SEQ ID NO: 3091422 - RNA, 19 nt, Molluscum contagiosum virus
augaaaagcauccaggccu

SEQ ID NO: 3091423 - RNA, 13 nt, Molluscum contagiosum virus
augcacagcugcu

SEQ ID NO: 3091424 - RNA, 13 nt, Molluscum contagiosum virus
acucgcugcuccc

SEQ ID NO: 3091425 - RNA, 15 nt, Molluscum contagiosum virus
cugcugcaaucugcg

SEQ ID NO: 3091426 - RNA, 12 nt, Molluscum contagiosum virus
ucgcggagcugu

SEQ ID NO: 3091427 - RNA, 15 nt, Molluscum contagiosum virus
agcaccgcacgccag

SEQ ID NO: 3091428 - RNA, 19 nt, Molluscum contagiosum virus
ccugcugguggugcuggag

SEQ ID NO: 3091429 - RNA, 17 nt, Molluscum contagiosum virus
gccggggcgcgcgcugc

SEQ ID NO: 3091430 - RNA, 15 nt, Molluscum contagiosum virus
uccgcaauuacgugc

SEQ ID NO: 3091431 - RNA, 17 nt, Molluscum contagiosum virus
gugcugcucugcgugcu

SEQ ID NO: 3091432 - RNA, 17 nt, Molluscum contagiosum virus
ccgacuccuuccggaga

SEQ ID NO: 3091433 - RNA, 16 nt, Molluscum contagiosum virus
cgcucauacuccugcu

SEQ ID NO: 3091434 - RNA, 22 nt, Molluscum contagiosum virus
ccgcccgggcguagccuagcca

SEQ ID NO: 3091435 - RNA, 13 nt, Molluscum contagiosum virus
cgcgcaucagcac

SEQ ID NO: 3091436 - RNA, 20 nt, Molluscum contagiosum virus
gucagcggcggccccugccu

SEQ ID NO: 3091437 - RNA, 17 nt, Molluscum contagiosum virus
guacgagcagcugcugc

SEQ ID NO: 3091438 - RNA, 20 nt, Molluscum contagiosum virus
gcucugauuacauccugccc

SEQ ID NO: 3091439 - RNA, 21 nt, Molluscum contagiosum virus
ugagaauaaaauagcagagca

SEQ ID NO: 3091440 - RNA, 16 nt, Molluscum contagiosum virus
ucaagcacgagcugcu

SEQ ID NO: 3091441 - RNA, 22 nt, Molluscum contagiosum virus
ggccgcggaggacucggaggcc

SEQ ID NO: 3091442 - RNA, 20 nt, Molluscum contagiosum virus
acgaggccuacgugcugcgc

SEQ ID NO: 3091443 - RNA, 17 nt, Molluscum contagiosum virus
cgcgguccagccgcacc

SEQ ID NO: 3091444 - RNA, 16 nt, Molluscum contagiosum virus
ggcgugcugugccugc

SEQ ID NO: 3091445 - RNA, 18 nt, Molluscum contagiosum virus
gcacccuggcugcugcgc

SEQ ID NO: 3091446 - RNA, 15 nt, Molluscum contagiosum virus
agcgugccgcggcac

SEQ ID NO: 3091447 - RNA, 21 nt, Molluscum contagiosum virus
gugccgcaagaaaggcggugc

SEQ ID NO: 3091448 - RNA, 14 nt, Molluscum contagiosum virus
ccgugcucaggcca

SEQ ID NO: 3091449 - RNA, 18 nt, Molluscum contagiosum virus
ccugccacaccagcuggc

SEQ ID NO: 3091450 - RNA, 23 nt, Molluscum contagiosum virus
ggaccuuggcgcgccgcugcccg

SEQ ID NO: 3091451 - RNA, 19 nt, Molluscum contagiosum virus
gcaacgacaaggaaaggca

SEQ ID NO: 3091452 - RNA, 13 nt, Molluscum contagiosum virus
agugcggaugugc

SEQ ID NO: 3091453 - RNA, 20 nt, Molluscum contagiosum virus
gcuggaccugcgccagcgcc

SEQ ID NO: 3091454 - RNA, 23 nt, Molluscum contagiosum virus
ccccaaaagugaagaucaagcac

SEQ ID NO: 3091455 - RNA, 21 nt, Molluscum contagiosum virus
cgcugcggcaacugccugcgc

SEQ ID NO: 3091456 - RNA, 14 nt, Molluscum contagiosum virus
ggccucgccuccgg

SEQ ID NO: 3091457 - RNA, 20 nt, Molluscum contagiosum virus
cagcgacagacaccggccuu

SEQ ID NO: 3091458 - RNA, 16 nt, Molluscum contagiosum virus
agagcacggacagcac

SEQ ID NO: 3091459 - RNA, 23 nt, Molluscum contagiosum virus
gccaccucgcacgugugcaggaa

SEQ ID NO: 3091460 - RNA, 17 nt, Molluscum contagiosum virus
cagucucgcgcuuccag

SEQ ID NO: 3091461 - RNA, 15 nt, Molluscum contagiosum virus
auguagccuacgugg

SEQ ID NO: 3091462 - RNA, 21 nt, Molluscum contagiosum virus
ggcaggcggccgcguugcagc

SEQ ID NO: 3091463 - RNA, 19 nt, Molluscum contagiosum virus
cgcugcgccggcugcgcca

SEQ ID NO: 3091464 - RNA, 20 nt, Molluscum contagiosum virus
agcacggcuugccgcucggc

SEQ ID NO: 3091465 - RNA, 17 nt, Molluscum contagiosum virus
ccgccgggccugcggcg

SEQ ID NO: 3091466 - RNA, 13 nt, Molluscum contagiosum virus
ggccggcgcgccg

SEQ ID NO: 3091467 - RNA, 16 nt, Molluscum contagiosum virus
gcgagaugcgcggaca

SEQ ID NO: 3091468 - RNA, 21 nt, Molluscum contagiosum virus
gccgcguacgcacgugccgug

SEQ ID NO: 3091469 - RNA, 23 nt, Molluscum contagiosum virus
cuacgaggccuacgugcugcgca

SEQ ID NO: 3091470 - RNA, 23 nt, Molluscum contagiosum virus
gcgccgccaugcugcgcgagcgc

SEQ ID NO: 3091471 - RNA, 22 nt, Molluscum contagiosum virus
cgcggcgcucugccaccgcggc

SEQ ID NO: 3091472 - RNA, 16 nt, Molluscum contagiosum virus
guguucccggcugccg

SEQ ID NO: 3091473 - RNA, 22 nt, Molluscum contagiosum virus
cguccacaaagcccuccugaga

SEQ ID NO: 3091474 - RNA, 18 nt, Molluscum contagiosum virus
cacgcugacgcgcagugc

SEQ ID NO: 3091475 - RNA, 17 nt, Molluscum contagiosum virus
cacaugccgcgcugcuc

SEQ ID NO: 3091476 - RNA, 21 nt, Molluscum contagiosum virus
cuucggcgcaacgcuggccgc

SEQ ID NO: 3091477 - RNA, 14 nt, Molluscum contagiosum virus
ccaacgccagcugu

SEQ ID NO: 3091478 - RNA, 18 nt, Molluscum contagiosum virus
gcugcgcuccaugcugcc

SEQ ID NO: 3091479 - RNA, 15 nt, Molluscum contagiosum virus
acauggaccgcguca

SEQ ID NO: 3091480 - RNA, 19 nt, Molluscum contagiosum virus
caucucgagacgcugccug

SEQ ID NO: 3091481 - RNA, 14 nt, Molluscum contagiosum virus
aaccacagcucucc

SEQ ID NO: 3091482 - RNA, 20 nt, Molluscum contagiosum virus
uucaagacuggcacuugcgc

SEQ ID NO: 3091483 - RNA, 21 nt, Molluscum contagiosum virus
cgaacaccuccugcuuugcac

SEQ ID NO: 3091484 - RNA, 17 nt, Molluscum contagiosum virus
cgcgcuucugccccguc

SEQ ID NO: 3091485 - RNA, 14 nt, Molluscum contagiosum virus
cuggaccugcgcca

SEQ ID NO: 3091486 - RNA, 21 nt, Molluscum contagiosum virus
gcucacgagauggcugcucuc

SEQ ID NO: 3091487 - RNA, 19 nt, Molluscum contagiosum virus
gacgcaggaugcuggggcu

SEQ ID NO: 3091488 - RNA, 23 nt, Molluscum contagiosum virus
aagcgcgcucgggcuagcaagca

SEQ ID NO: 3091489 - RNA, 21 nt, Molluscum contagiosum virus
agcucgguuggcggcgccgcg

SEQ ID NO: 3091490 - RNA, 20 nt, Molluscum contagiosum virus
cacgaggcagccgcggcgcc

SEQ ID NO: 3091491 - RNA, 17 nt, Molluscum contagiosum virus
uggcgcgccgcugcccg

SEQ ID NO: 3091492 - RNA, 14 nt, Molluscum contagiosum virus
augcgccugcacuu

SEQ ID NO: 3091493 - RNA, 19 nt, Molluscum contagiosum virus
agguaguuugcggagcaga

SEQ ID NO: 3091494 - RNA, 18 nt, Molluscum contagiosum virus
cuagccgugcgcgcacac

SEQ ID NO: 3091495 - RNA, 20 nt, Molluscum contagiosum virus
cccuucuuuccggcgcggcc

SEQ ID NO: 3091496 - RNA, 13 nt, Molluscum contagiosum virus
agccgcggaggcc

SEQ ID NO: 3091497 - RNA, 14 nt, Molluscum contagiosum virus
gacgacggcugcuc

SEQ ID NO: 3091498 - RNA, 19 nt, Molluscum contagiosum virus
cgggcgaaagcgccgcgcg

SEQ ID NO: 3091499 - RNA, 23 nt, Molluscum contagiosum virus
ccgcuggggcggagagcuccggc

SEQ ID NO: 3091500 - RNA, 17 nt, Molluscum contagiosum virus
cugcggcgcgugcugag

SEQ ID NO: 3091501 - RNA, 15 nt, Molluscum contagiosum virus
ugaucccggaacgca

SEQ ID NO: 3091502 - RNA, 21 nt, Molluscum contagiosum virus
gguggugggcgggugucuggg

SEQ ID NO: 3091503 - RNA, 23 nt, Molluscum contagiosum virus
cgcaacgucgcacuggccugcaa

SEQ ID NO: 3091504 - RNA, 23 nt, Molluscum contagiosum virus
ccuuguccgagcgaaccgcggca

SEQ ID NO: 3091505 - RNA, 13 nt, Molluscum contagiosum virus
cccgcgcugcgcg

SEQ ID NO: 3091506 - RNA, 14 nt, Molluscum contagiosum virus
ggcucguacugcug

SEQ ID NO: 3091507 - RNA, 14 nt, Molluscum contagiosum virus
uccccagcgccgcc

SEQ ID NO: 3091508 - RNA, 23 nt, Molluscum contagiosum virus
gcacgaggcagccgcggcgcccg

SEQ ID NO: 3091509 - RNA, 17 nt, Molluscum contagiosum virus
gccaaccuccugcaccu

SEQ ID NO: 3091510 - RNA, 21 nt, Molluscum contagiosum virus
acggcaagacgacacgagggc

SEQ ID NO: 3091511 - RNA, 19 nt, Molluscum contagiosum virus
acguggauaccaugcucuc

SEQ ID NO: 3091512 - RNA, 14 nt, Molluscum contagiosum virus
cucugcgagcgccu

SEQ ID NO: 3091513 - RNA, 16 nt, Molluscum contagiosum virus
cgcagcugccggggcc

SEQ ID NO: 3091514 - RNA, 13 nt, Molluscum contagiosum virus
ggcuaagcucugc

SEQ ID NO: 3091515 - RNA, 23 nt, Molluscum contagiosum virus
uacgcuacagcagccgcagccca

SEQ ID NO: 3091516 - RNA, 17 nt, Molluscum contagiosum virus
uucuacgggaagcugca

SEQ ID NO: 3091517 - RNA, 18 nt, Molluscum contagiosum virus
cgcugagcgcggagcugg

SEQ ID NO: 3091518 - RNA, 19 nt, Molluscum contagiosum virus
uggccggcaaggggccagc

SEQ ID NO: 3091519 - RNA, 19 nt, Molluscum contagiosum virus
uggugcucguggaaaagca

SEQ ID NO: 3091520 - RNA, 13 nt, Molluscum contagiosum virus
cgccgcgggccgc

SEQ ID NO: 3091521 - RNA, 16 nt, Molluscum contagiosum virus
gccucucucggagaag

SEQ ID NO: 3091522 - RNA, 14 nt, Molluscum contagiosum virus
gaacaccuccugcu

SEQ ID NO: 3091523 - RNA, 22 nt, Molluscum contagiosum virus
aaagacggggccgcgaaagagg

SEQ ID NO: 3091524 - RNA, 18 nt, Molluscum contagiosum virus
agcacgggcggaagcucc

SEQ ID NO: 3091525 - RNA, 18 nt, Molluscum contagiosum virus
cucuggcuucuccaccuu

SEQ ID NO: 3091526 - RNA, 21 nt, Molluscum contagiosum virus
cccgugccgccggcgccgcua

SEQ ID NO: 3091527 - RNA, 17 nt, Molluscum contagiosum virus
aucaggcagcugcugcg

SEQ ID NO: 3091528 - RNA, 16 nt, Molluscum contagiosum virus
cucacaccuagagcac

SEQ ID NO: 3091529 - RNA, 19 nt, Molluscum contagiosum virus
gcgcccgcguacacgugca

SEQ ID NO: 3091530 - RNA, 14 nt, Molluscum contagiosum virus
aucccccgccagga

SEQ ID NO: 3091531 - RNA, 13 nt, Molluscum contagiosum virus
gccagccuggagu

SEQ ID NO: 3091532 - RNA, 14 nt, Molluscum contagiosum virus
guuaaucacgauga

SEQ ID NO: 3091533 - RNA, 20 nt, Molluscum contagiosum virus
agcgcgcccaccagcagcca

SEQ ID NO: 3091534 - RNA, 14 nt, Molluscum contagiosum virus
cggcggcccgcggc

SEQ ID NO: 3091535 - RNA, 21 nt, Molluscum contagiosum virus
ccuaguucgagaagacggggc

SEQ ID NO: 3091536 - RNA, 13 nt, Molluscum contagiosum virus
ggcagccgcugga

SEQ ID NO: 3091537 - RNA, 16 nt, Molluscum contagiosum virus
cucgcggugacaggca

SEQ ID NO: 3091538 - RNA, 13 nt, Molluscum contagiosum virus
gcaguuggucacc

SEQ ID NO: 3091539 - RNA, 22 nt, Molluscum contagiosum virus
ggagccgcggcaguccgagcug

SEQ ID NO: 3091540 - RNA, 20 nt, Molluscum contagiosum virus
gcaggaaagguacccgcagg

SEQ ID NO: 3091541 - RNA, 21 nt, Molluscum contagiosum virus
ugcacuuucaacucucuaccu

SEQ ID NO: 3091542 - RNA, 19 nt, Molluscum contagiosum virus
cgcaugaaaggcaccugcg

SEQ ID NO: 3091543 - RNA, 17 nt, Molluscum contagiosum virus
cgcgcggugcugcgcca

SEQ ID NO: 3091544 - RNA, 12 nt, Molluscum contagiosum virus
aacgaaaagcca

SEQ ID NO: 3091545 - RNA, 17 nt, Molluscum contagiosum virus
cgccguuggccaccugg

SEQ ID NO: 3091546 - RNA, 13 nt, Molluscum contagiosum virus
cuccgaggcaggu

SEQ ID NO: 3091547 - RNA, 14 nt, Molluscum contagiosum virus
cgucgccgggcccc

SEQ ID NO: 3091548 - RNA, 16 nt, Molluscum contagiosum virus
uacgagcagcugcugc

SEQ ID NO: 3091549 - RNA, 20 nt, Molluscum contagiosum virus
aguugcgagccagccaggcg

SEQ ID NO: 3091550 - RNA, 18 nt, Molluscum contagiosum virus
gcugcugcggcugcugga

SEQ ID NO: 3091551 - RNA, 18 nt, Molluscum contagiosum virus
agcagcucggggcuguca

SEQ ID NO: 3091552 - RNA, 22 nt, Molluscum contagiosum virus
cgcgcgagugugugcaucccuc

SEQ ID NO: 3091553 - RNA, 21 nt, Molluscum contagiosum virus
gccacugccacggcugcaagc

SEQ ID NO: 3091554 - RNA, 13 nt, Molluscum contagiosum virus
cagugcaccagca

SEQ ID NO: 3091555 - RNA, 15 nt, Molluscum contagiosum virus
cacgcgggcgccggc

SEQ ID NO: 3091556 - RNA, 19 nt, Molluscum contagiosum virus
cugccgcgcaugcuggaga

SEQ ID NO: 3091557 - RNA, 21 nt, Molluscum contagiosum virus
ccagcgggaaacugcugcccg

SEQ ID NO: 3091558 - RNA, 21 nt, Molluscum contagiosum virus
cacgugccccgcgcgugcagu

SEQ ID NO: 3091559 - RNA, 17 nt, Molluscum contagiosum virus
cgcgacggugugccgcu

SEQ ID NO: 3091560 - RNA, 14 nt, Molluscum contagiosum virus
cuggcggcgcacgc

SEQ ID NO: 3091561 - RNA, 16 nt, Molluscum contagiosum virus
ccacggguagcagcgc

SEQ ID NO: 3091562 - RNA, 17 nt, Molluscum contagiosum virus
gucucggagaagaacag

SEQ ID NO: 3091563 - RNA, 18 nt, Molluscum contagiosum virus
cccgcugcgcauggccac

SEQ ID NO: 3091564 - RNA, 16 nt, Molluscum contagiosum virus
cuccaagaagaggccg

SEQ ID NO: 3091565 - RNA, 18 nt, Molluscum contagiosum virus
cgaggaaaggcaccccga

SEQ ID NO: 3091566 - RNA, 18 nt, Molluscum contagiosum virus
cuucucgagugcacguaa

SEQ ID NO: 3091567 - RNA, 16 nt, Molluscum contagiosum virus
cgcggaacugacugcu

SEQ ID NO: 3091568 - RNA, 18 nt, Molluscum contagiosum virus
uuccugaacaagcugcac

SEQ ID NO: 3091569 - RNA, 15 nt, Molluscum contagiosum virus
acacucuucgcaggc

SEQ ID NO: 3091570 - RNA, 14 nt, Molluscum contagiosum virus
gcgcgcgagcacag

SEQ ID NO: 3091571 - RNA, 23 nt, Molluscum contagiosum virus
cgugcgcaucccugcgcaccugc

SEQ ID NO: 3091572 - RNA, 15 nt, Molluscum contagiosum virus
gcagcaggcacucca

SEQ ID NO: 3091573 - RNA, 20 nt, Molluscum contagiosum virus
gcucaaggacuaccagcucu

SEQ ID NO: 3091574 - RNA, 19 nt, Molluscum contagiosum virus
augguugugcuuguucucu

SEQ ID NO: 3091575 - RNA, 17 nt, Molluscum contagiosum virus
cucacgcccucucgagg

SEQ ID NO: 3091576 - RNA, 20 nt, Molluscum contagiosum virus
agcucugcgcaaccuggauu

SEQ ID NO: 3091577 - RNA, 21 nt, Molluscum contagiosum virus
gggcugccggcgcgugagcgc

SEQ ID NO: 3091578 - RNA, 14 nt, Molluscum contagiosum virus
ccacgugcgcuggc

SEQ ID NO: 3091579 - RNA, 12 nt, Molluscum contagiosum virus
cugcuguuucug

SEQ ID NO: 3091580 - RNA, 13 nt, Molluscum contagiosum virus
uucccgugcaagg

SEQ ID NO: 3091581 - RNA, 18 nt, Molluscum contagiosum virus
gagcgcgcccccgagcug

SEQ ID NO: 3091582 - RNA, 19 nt, Molluscum contagiosum virus
agccgcguagcuagcucug

SEQ ID NO: 3091583 - RNA, 15 nt, Molluscum contagiosum virus
gccauccacgugggc

SEQ ID NO: 3091584 - RNA, 14 nt, Molluscum contagiosum virus
caggcagcugcugc

SEQ ID NO: 3091585 - RNA, 16 nt, Molluscum contagiosum virus
uagagcaauacguggc

SEQ ID NO: 3091586 - RNA, 16 nt, Molluscum contagiosum virus
ccacaugccgcgcugc

SEQ ID NO: 3091587 - RNA, 12 nt, Molluscum contagiosum virus
gccccucgagca

SEQ ID NO: 3091588 - RNA, 20 nt, Molluscum contagiosum virus
cgccauugcucgcggugccg

SEQ ID NO: 3091589 - RNA, 17 nt, Molluscum contagiosum virus
ccucgacgcgcugcucu

SEQ ID NO: 3091590 - RNA, 14 nt, Molluscum contagiosum virus
ggagccgcugcugc

SEQ ID NO: 3091591 - RNA, 14 nt, Molluscum contagiosum virus
gcuagcugcgugcg

SEQ ID NO: 3091592 - RNA, 18 nt, Molluscum contagiosum virus
ccagcgccucugcgagau

SEQ ID NO: 3091593 - RNA, 17 nt, Molluscum contagiosum virus
cucaagaucguuuugca

SEQ ID NO: 3091594 - RNA, 13 nt, Molluscum contagiosum virus
agcugugccaucu

SEQ ID NO: 3091595 - RNA, 16 nt, Molluscum contagiosum virus
cuggaggcaaucuguc

SEQ ID NO: 3091596 - RNA, 18 nt, Molluscum contagiosum virus
cggacaugagcuugcgca

SEQ ID NO: 3091597 - RNA, 13 nt, Molluscum contagiosum virus
aggguggcuugcu

SEQ ID NO: 3091598 - RNA, 23 nt, Molluscum contagiosum virus
gaccugauuuucccgggcggcgc

SEQ ID NO: 3091599 - RNA, 19 nt, Molluscum contagiosum virus
ggggaacucggcuucugcu

SEQ ID NO: 3091600 - RNA, 23 nt, Molluscum contagiosum virus
cugcacgucgaagaccaccagca

SEQ ID NO: 3091601 - RNA, 14 nt, Molluscum contagiosum virus
auggucucgcugcu

SEQ ID NO: 3091602 - RNA, 23 nt, Molluscum contagiosum virus
cugagcgggguacaggcgcggca

SEQ ID NO: 3091603 - RNA, 14 nt, Molluscum contagiosum virus
gggcgccgcggccu

SEQ ID NO: 3091604 - RNA, 14 nt, Molluscum contagiosum virus
gaccgucaaccugc

SEQ ID NO: 3091605 - RNA, 14 nt, Molluscum contagiosum virus
agcaccaagaagcg

SEQ ID NO: 3091606 - RNA, 15 nt, Molluscum contagiosum virus
aggugcugcgccacg

SEQ ID NO: 3091607 - RNA, 15 nt, Molluscum contagiosum virus
cgugcgcgcugcgcg

SEQ ID NO: 3091608 - RNA, 22 nt, Molluscum contagiosum virus
cuucgacuuacggacgcccucc

SEQ ID NO: 3091609 - RNA, 23 nt, Molluscum contagiosum virus
uggacgccggggggcgccaaguc

SEQ ID NO: 3091610 - RNA, 15 nt, Molluscum contagiosum virus
gcgcucggaggggcu

SEQ ID NO: 3091611 - RNA, 17 nt, Molluscum contagiosum virus
gugcugcgccacgugcg

SEQ ID NO: 3091612 - RNA, 15 nt, Molluscum contagiosum virus
gcagcugcuucucuu

SEQ ID NO: 3091613 - RNA, 20 nt, Molluscum contagiosum virus
gccagcgacgagcagcugcu

SEQ ID NO: 3091614 - RNA, 15 nt, Molluscum contagiosum virus
ucggacuuggccccu

SEQ ID NO: 3091615 - RNA, 18 nt, Molluscum contagiosum virus
acgcgcuugcgcggaaga

SEQ ID NO: 3091616 - RNA, 18 nt, Molluscum contagiosum virus
cagccacgacucgcgucu

SEQ ID NO: 3091617 - RNA, 18 nt, Molluscum contagiosum virus
uggacgagcgcuaccuga

SEQ ID NO: 3091618 - RNA, 21 nt, Molluscum contagiosum virus
gcucugacaacacgagccucg

SEQ ID NO: 3091619 - RNA, 19 nt, Molluscum contagiosum virus
gcacuagcacgggcgggac

SEQ ID NO: 3091620 - RNA, 22 nt, Molluscum contagiosum virus
cugcgccacgugcgcaucccug

SEQ ID NO: 3091621 - RNA, 23 nt, Molluscum contagiosum virus
ugcagcguuacguacagcgggcg

SEQ ID NO: 3091622 - RNA, 20 nt, Molluscum contagiosum virus
uccuggaguaccggcucaag

SEQ ID NO: 3091623 - RNA, 13 nt, Molluscum contagiosum virus
cgcaggaaaggca

SEQ ID NO: 3091624 - RNA, 14 nt, Molluscum contagiosum virus
gcgagcaggcgcag

SEQ ID NO: 3091625 - RNA, 12 nt, Molluscum contagiosum virus
acgcgagacugu

SEQ ID NO: 3091626 - RNA, 15 nt, Molluscum contagiosum virus
ggcgcagcgcggccu

SEQ ID NO: 3091627 - RNA, 16 nt, Molluscum contagiosum virus
gcaggaaaggcacccg

SEQ ID NO: 3091628 - RNA, 20 nt, Molluscum contagiosum virus
ucacgcugcucgugcugcuc

SEQ ID NO: 3091629 - RNA, 17 nt, Molluscum contagiosum virus
cacgggcccgcgcguga

SEQ ID NO: 3091630 - RNA, 13 nt, Molluscum contagiosum virus
agccugaggccgc

SEQ ID NO: 3091631 - RNA, 15 nt, Molluscum contagiosum virus
agcgccgcgcgcggc

SEQ ID NO: 3091632 - RNA, 13 nt, Molluscum contagiosum virus
ggcgcgcgcucag

SEQ ID NO: 3091633 - RNA, 22 nt, Molluscum contagiosum virus
gccgcgcccgcgucgcgcgccg

SEQ ID NO: 3091634 - RNA, 14 nt, Molluscum contagiosum virus
agaagaacagcacg

SEQ ID NO: 3091635 - RNA, 13 nt, Molluscum contagiosum virus
ggcggcacugcua

SEQ ID NO: 3091636 - RNA, 21 nt, Molluscum contagiosum virus
gccccguccucgcucgugcuc

SEQ ID NO: 3091637 - RNA, 19 nt, Molluscum contagiosum virus
cuuuccccuccuagcccag

SEQ ID NO: 3091638 - RNA, 21 nt, Molluscum contagiosum virus
gccagcgacaccgacgaggug

SEQ ID NO: 3091639 - RNA, 16 nt, Molluscum contagiosum virus
ucauacuccugcuggc

SEQ ID NO: 3091640 - RNA, 19 nt, Molluscum contagiosum virus
ggcucugucguugucgccg

SEQ ID NO: 3091641 - RNA, 16 nt, Molluscum contagiosum virus
cggacacgggugagcu

SEQ ID NO: 3091642 - RNA, 17 nt, Molluscum contagiosum virus
acgagcagcccgugcgc

SEQ ID NO: 3091643 - RNA, 23 nt, Molluscum contagiosum virus
uuuccggacgauaaauggaccuc

SEQ ID NO: 3091644 - RNA, 13 nt, Molluscum contagiosum virus
gacagcaucccug

SEQ ID NO: 3091645 - RNA, 13 nt, Molluscum contagiosum virus
acgaggacuggga

SEQ ID NO: 3091646 - RNA, 18 nt, Molluscum contagiosum virus
gcgcaucggcggcagcgc

SEQ ID NO: 3091647 - RNA, 23 nt, Molluscum contagiosum virus
ggcugcucgcugccuggugcaca

SEQ ID NO: 3091648 - RNA, 22 nt, Molluscum contagiosum virus
guggccgcgccgggcgccagaa

SEQ ID NO: 3091649 - RNA, 21 nt, Molluscum contagiosum virus
gcaagucugcgcaggacauga

SEQ ID NO: 3091650 - RNA, 18 nt, Molluscum contagiosum virus
accuuggugcucauccuc

SEQ ID NO: 3091651 - RNA, 15 nt, Molluscum contagiosum virus
gcacggacagcaccc

SEQ ID NO: 3091652 - RNA, 24 nt, Molluscum contagiosum virus
gcacgcacacgacgacggcugcuc

SEQ ID NO: 3091653 - RNA, 15 nt, Molluscum contagiosum virus
ugcagaugaggcugc

SEQ ID NO: 3091654 - RNA, 20 nt, Molluscum contagiosum virus
cccgugcuggagggcacgcu

SEQ ID NO: 3091655 - RNA, 13 nt, Molluscum contagiosum virus
gcagagcugcccg

SEQ ID NO: 3091656 - RNA, 21 nt, Molluscum contagiosum virus
gcggcguguuccggcagcgcc

SEQ ID NO: 3091657 - RNA, 16 nt, Molluscum contagiosum virus
auggcugcgaccaaga

SEQ ID NO: 3091658 - RNA, 16 nt, Molluscum contagiosum virus
cucgggcuagcaagca

SEQ ID NO: 3091659 - RNA, 12 nt, Molluscum contagiosum virus
gucucgcgcgcc

SEQ ID NO: 3091660 - RNA, 12 nt, Molluscum contagiosum virus
gccucgagcagg

SEQ ID NO: 3091661 - RNA, 15 nt, Molluscum contagiosum virus
cacugugccagcagc

SEQ ID NO: 3091662 - RNA, 22 nt, Molluscum contagiosum virus
ucauuguaaaacgacagacccc

SEQ ID NO: 3091663 - RNA, 16 nt, Molluscum contagiosum virus
ggcgcgacggcgacgc

SEQ ID NO: 3091664 - RNA, 19 nt, Molluscum contagiosum virus
ggacacgggugagcucgcc

SEQ ID NO: 3091665 - RNA, 22 nt, Molluscum contagiosum virus
agcggcugcccgcggagaccac

SEQ ID NO: 3091666 - RNA, 15 nt, Molluscum contagiosum virus
cgggucgcggggccc

SEQ ID NO: 3091667 - RNA, 20 nt, Molluscum contagiosum virus
uucacgcaaggaagcaacaa

SEQ ID NO: 3091668 - RNA, 17 nt, Molluscum contagiosum virus
cauagcgcaccagcugc

SEQ ID NO: 3091669 - RNA, 14 nt, Molluscum contagiosum virus
gcggccacucuccc

SEQ ID NO: 3091670 - RNA, 16 nt, Molluscum contagiosum virus
gcacgagccggcgccg

SEQ ID NO: 3091671 - RNA, 17 nt, Molluscum contagiosum virus
uccacuuucucuauuca

SEQ ID NO: 3091672 - RNA, 15 nt, Molluscum contagiosum virus
agccgcaggccaggu

SEQ ID NO: 3091673 - RNA, 13 nt, Molluscum contagiosum virus
gaagcccucaggg

SEQ ID NO: 3091674 - RNA, 19 nt, Molluscum contagiosum virus
cgcgucguucucuaccagc

SEQ ID NO: 3091675 - RNA, 19 nt, Molluscum contagiosum virus
ccagcgccagccugcuggc

SEQ ID NO: 3091676 - RNA, 18 nt, Molluscum contagiosum virus
gacuucuccgaccgugcc

SEQ ID NO: 3091677 - RNA, 19 nt, Molluscum contagiosum virus
gaauaaaauagcagagcac

SEQ ID NO: 3091678 - RNA, 19 nt, Molluscum contagiosum virus
aggcgccgucgacgcugac

SEQ ID NO: 3091679 - RNA, 17 nt, Molluscum contagiosum virus
acggcugcucgcugccu

SEQ ID NO: 3091680 - RNA, 14 nt, Molluscum contagiosum virus
gugcuugccuggaa

SEQ ID NO: 3091681 - RNA, 14 nt, Molluscum contagiosum virus
gacgugcggcacgc

SEQ ID NO: 3091682 - RNA, 19 nt, Molluscum contagiosum virus
cacugcgcgcgcggcgcag

SEQ ID NO: 3091683 - RNA, 20 nt, Molluscum contagiosum virus
ggcagaccccuugcuacagg

SEQ ID NO: 3091684 - RNA, 16 nt, Molluscum contagiosum virus
cgccgcggccugggcc

SEQ ID NO: 3091685 - RNA, 13 nt, Molluscum contagiosum virus
cgcguucuccagg

SEQ ID NO: 3091686 - RNA, 12 nt, Molluscum contagiosum virus
gcuaagcucugc

SEQ ID NO: 3091687 - RNA, 19 nt, Molluscum contagiosum virus
gcgggcccgugcucaggcc

SEQ ID NO: 3091688 - RNA, 19 nt, Molluscum contagiosum virus
gugccuuguacgggugcau

SEQ ID NO: 3091689 - RNA, 19 nt, Molluscum contagiosum virus
gcugcccgcggagaccacc

SEQ ID NO: 3091690 - RNA, 17 nt, Molluscum contagiosum virus
gcucgaaguagccuccg

SEQ ID NO: 3091691 - RNA, 17 nt, Molluscum contagiosum virus
caggaaagguaccccgc

SEQ ID NO: 3091692 - RNA, 16 nt, Molluscum contagiosum virus
cugcgccgcuuccugg

SEQ ID NO: 3091693 - RNA, 12 nt, Molluscum contagiosum virus
aagguggggcgc

SEQ ID NO: 3091694 - RNA, 15 nt, Molluscum contagiosum virus
acugcgccaaggugg

SEQ ID NO: 3091695 - RNA, 14 nt, Molluscum contagiosum virus
caacacggcggugc

SEQ ID NO: 3091696 - RNA, 18 nt, Molluscum contagiosum virus
caggcggugggcgccgcg

SEQ ID NO: 3091697 - RNA, 12 nt, Molluscum contagiosum virus
cucccgucgagc

SEQ ID NO: 3091698 - RNA, 16 nt, Molluscum contagiosum virus
ugccgcaguacgugac

SEQ ID NO: 3091699 - RNA, 15 nt, Molluscum contagiosum virus
cggugcagccgcugc

SEQ ID NO: 3091700 - RNA, 15 nt, Molluscum contagiosum virus
cacuguguccccuga

SEQ ID NO: 3091701 - RNA, 14 nt, Molluscum contagiosum virus
cagcgccgccaccu

SEQ ID NO: 3091702 - RNA, 14 nt, Molluscum contagiosum virus
acgacaugcacacg

SEQ ID NO: 3091703 - RNA, 15 nt, Molluscum contagiosum virus
ccucgcgcgccgccg

SEQ ID NO: 3091704 - RNA, 15 nt, Molluscum contagiosum virus
uugcuccaugacaga

SEQ ID NO: 3091705 - RNA, 20 nt, Molluscum contagiosum virus
accuggcgagcgcucugcau

SEQ ID NO: 3091706 - RNA, 14 nt, Molluscum contagiosum virus
gcugcgccugcagg

SEQ ID NO: 3091707 - RNA, 19 nt, Molluscum contagiosum virus
cgcguguuugugcuguccc

SEQ ID NO: 3091708 - RNA, 13 nt, Molluscum contagiosum virus
gugcgugcccagc

SEQ ID NO: 3091709 - RNA, 23 nt, Molluscum contagiosum virus
gccaacgcggacgcgcagcucga

SEQ ID NO: 3091710 - RNA, 17 nt, Molluscum contagiosum virus
gcggcgugcugcagccc

SEQ ID NO: 3091711 - RNA, 22 nt, Molluscum contagiosum virus
agcgccgccagcuccgcgcggc

SEQ ID NO: 3091712 - RNA, 14 nt, Molluscum contagiosum virus
ccuucgcggagcgc

SEQ ID NO: 3091713 - RNA, 22 nt, Molluscum contagiosum virus
acccgcgcucgacgcgugcaug

SEQ ID NO: 3091714 - RNA, 16 nt, Molluscum contagiosum virus
agcgcgcgccugcugg

SEQ ID NO: 3091715 - RNA, 15 nt, Molluscum contagiosum virus
aaaacggccgucucc

SEQ ID NO: 3091716 - RNA, 15 nt, Molluscum contagiosum virus
gccgcccguguacaa

SEQ ID NO: 3091717 - RNA, 18 nt, Molluscum contagiosum virus
gacuuuguccugagccuu

SEQ ID NO: 3091718 - RNA, 17 nt, Molluscum contagiosum virus
uccgcucgcgcugcuuc

SEQ ID NO: 3091719 - RNA, 22 nt, Molluscum contagiosum virus
ccacggcgagcugccauggcag

SEQ ID NO: 3091720 - RNA, 14 nt, Molluscum contagiosum virus
cagcacuucgcaga

SEQ ID NO: 3091721 - RNA, 20 nt, Molluscum contagiosum virus
acagugcggcgcggcugcuc

SEQ ID NO: 3091722 - RNA, 16 nt, Molluscum contagiosum virus
ggcgcgcgagcugcua

SEQ ID NO: 3091723 - RNA, 15 nt, Molluscum contagiosum virus
cuccgaguccagcuu

SEQ ID NO: 3091724 - RNA, 19 nt, Molluscum contagiosum virus
cugugcccuggaagcuucc

SEQ ID NO: 3091725 - RNA, 17 nt, Molluscum contagiosum virus
gaugcucaagcacugcc

SEQ ID NO: 3091726 - RNA, 14 nt, Molluscum contagiosum virus
ugaaucccacaaau

SEQ ID NO: 3091727 - RNA, 20 nt, Molluscum contagiosum virus
acgggcgugcgcagcagcuc

SEQ ID NO: 3091728 - RNA, 17 nt, Molluscum contagiosum virus
cgcggagggcgaggccu

SEQ ID NO: 3091729 - RNA, 17 nt, Molluscum contagiosum virus
gccgucgcgcgcugugg

SEQ ID NO: 3091730 - RNA, 21 nt, Molluscum contagiosum virus
gcacacgcgcgcgugcugcug

SEQ ID NO: 3091731 - RNA, 18 nt, Molluscum contagiosum virus
ggcugcucuccgaagaag

SEQ ID NO: 3091732 - RNA, 18 nt, Molluscum contagiosum virus
ccuccacguccaggccgc

SEQ ID NO: 3091733 - RNA, 14 nt, Molluscum contagiosum virus
cgucucgcucuucc

SEQ ID NO: 3091734 - RNA, 20 nt, Molluscum contagiosum virus
gcaccgcguugccgcccgcc

SEQ ID NO: 3091735 - RNA, 14 nt, Molluscum contagiosum virus
aguaccagccgcug

SEQ ID NO: 3091736 - RNA, 21 nt, Molluscum contagiosum virus
caaggccgcgcccaagaagaa

SEQ ID NO: 3091737 - RNA, 19 nt, Molluscum contagiosum virus
gauggcgcgcgugggcucg

SEQ ID NO: 3091738 - RNA, 15 nt, Molluscum contagiosum virus
gucucgcgcucgccu

SEQ ID NO: 3091739 - RNA, 17 nt, Molluscum contagiosum virus
augggcacggcaacgag

SEQ ID NO: 3091740 - RNA, 19 nt, Molluscum contagiosum virus
aaaaaucccccgccaggaa

SEQ ID NO: 3091741 - RNA, 18 nt, Molluscum contagiosum virus
gccuguaccugcucgggc

SEQ ID NO: 3091742 - RNA, 20 nt, Molluscum contagiosum virus
uguauaguccccggcgccgg

SEQ ID NO: 3091743 - RNA, 16 nt, Molluscum contagiosum virus
ccccgcgcguugcugc

SEQ ID NO: 3091744 - RNA, 14 nt, Molluscum contagiosum virus
uguccgcacgcaca

SEQ ID NO: 3091745 - RNA, 22 nt, Molluscum contagiosum virus
cuccaagaagaggccagcacaa

SEQ ID NO: 3091746 - RNA, 14 nt, Molluscum contagiosum virus
ggacgagcagagcc

SEQ ID NO: 3091747 - RNA, 18 nt, Molluscum contagiosum virus
aucgcagcagugccagca

SEQ ID NO: 3091748 - RNA, 14 nt, Molluscum contagiosum virus
gggcccugugccuc

SEQ ID NO: 3091749 - RNA, 22 nt, Molluscum contagiosum virus
cgcuccggucaccgcguccgcu

SEQ ID NO: 3091750 - RNA, 17 nt, Molluscum contagiosum virus
uccggaugaacagcuuc

SEQ ID NO: 3091751 - RNA, 13 nt, Molluscum contagiosum virus
ggccguccccgga

SEQ ID NO: 3091752 - RNA, 14 nt, Molluscum contagiosum virus
ccagccgcagccgc

SEQ ID NO: 3091753 - RNA, 20 nt, Molluscum contagiosum virus
aaagacggacccgcgaacga

SEQ ID NO: 3091754 - RNA, 19 nt, Molluscum contagiosum virus
caccgccuggugcugcgcg

SEQ ID NO: 3091755 - RNA, 23 nt, Molluscum contagiosum virus
gcacacuugcgcguccacaaagg

SEQ ID NO: 3091756 - RNA, 14 nt, Molluscum contagiosum virus
cgcaccugcuagag

SEQ ID NO: 3091757 - RNA, 20 nt, Molluscum contagiosum virus
aaggcaccugcaggaaaggc

SEQ ID NO: 3091758 - RNA, 16 nt, Molluscum contagiosum virus
agcugcaaacauugcc

SEQ ID NO: 3091759 - RNA, 20 nt, Molluscum contagiosum virus
uggacgaugguggcgcugcu

SEQ ID NO: 3091760 - RNA, 16 nt, Molluscum contagiosum virus
ccgaagaagaaaagac

SEQ ID NO: 3091761 - RNA, 16 nt, Molluscum contagiosum virus
cgcaggaccuggcugg

SEQ ID NO: 3091762 - RNA, 16 nt, Molluscum contagiosum virus
ggcaucaugagccagu

SEQ ID NO: 3091763 - RNA, 16 nt, Molluscum contagiosum virus
cucuggcuccagggga

SEQ ID NO: 3091764 - RNA, 13 nt, Molluscum contagiosum virus
ugugccagcagca

SEQ ID NO: 3091765 - RNA, 21 nt, Molluscum contagiosum virus
gcaccgcggcgacgucaaccg

SEQ ID NO: 3091766 - RNA, 19 nt, Molluscum contagiosum virus
cucggagaagaacagcacg

SEQ ID NO: 3091767 - RNA, 19 nt, Molluscum contagiosum virus
gcgggccuuugccgcugcc

SEQ ID NO: 3091768 - RNA, 14 nt, Molluscum contagiosum virus
guagcagcgccugc

SEQ ID NO: 3091769 - RNA, 17 nt, Molluscum contagiosum virus
gcccgucggggcaggga

SEQ ID NO: 3091770 - RNA, 16 nt, Molluscum contagiosum virus
ccccacgagagaggcu

SEQ ID NO: 3091771 - RNA, 21 nt, Molluscum contagiosum virus
cccgagcaggacgugcacgug

SEQ ID NO: 3091772 - RNA, 20 nt, Molluscum contagiosum virus
uggcgaaaccugggcgccgc

SEQ ID NO: 3091773 - RNA, 18 nt, Molluscum contagiosum virus
gccuuccgcgcgggcaug

SEQ ID NO: 3091774 - RNA, 23 nt, Molluscum contagiosum virus
ggugccggaguuuguagcucuag

SEQ ID NO: 3091775 - RNA, 15 nt, Molluscum contagiosum virus
accgggcacuucucg

SEQ ID NO: 3091776 - RNA, 19 nt, Molluscum contagiosum virus
gcggagcgccuucugcaag

SEQ ID NO: 3091777 - RNA, 20 nt, Molluscum contagiosum virus
cacaagauggcgcagcacuu

SEQ ID NO: 3091778 - RNA, 22 nt, Molluscum contagiosum virus
gcgggcacggcuaccacgagca

SEQ ID NO: 3091779 - RNA, 20 nt, Molluscum contagiosum virus
cuucgcguuccggcggcugg

SEQ ID NO: 3091780 - RNA, 14 nt, Molluscum contagiosum virus
gcgcgagcugugca

SEQ ID NO: 3091781 - RNA, 14 nt, Molluscum contagiosum virus
gcaaccagcuggcg

SEQ ID NO: 3091782 - RNA, 19 nt, Molluscum contagiosum virus
ggcgccgcugcuggaacag

SEQ ID NO: 3091783 - RNA, 16 nt, Molluscum contagiosum virus
ugcucacgcugcgcuc

SEQ ID NO: 3091784 - RNA, 23 nt, Molluscum contagiosum virus
ccggaccagauccgggcgcugca

SEQ ID NO: 3091785 - RNA, 14 nt, Molluscum contagiosum virus
cgcgccgcugcccg

SEQ ID NO: 3091786 - RNA, 13 nt, Molluscum contagiosum virus
cucgcggcagugc

SEQ ID NO: 3091787 - RNA, 13 nt, Molluscum contagiosum virus
aggugcugggcga

SEQ ID NO: 3091788 - RNA, 23 nt, Molluscum contagiosum virus
ugccgcugcgcuggaugcugcuc

SEQ ID NO: 3091789 - RNA, 17 nt, Molluscum contagiosum virus
gugaccauuacuucugu

SEQ ID NO: 3091790 - RNA, 15 nt, Molluscum contagiosum virus
gcaugaacucgcugc

SEQ ID NO: 3091791 - RNA, 13 nt, Molluscum contagiosum virus
agcccacgugcca

SEQ ID NO: 3091792 - RNA, 18 nt, Molluscum contagiosum virus
cuacugcaacguggcgcc

SEQ ID NO: 3091793 - RNA, 20 nt, Molluscum contagiosum virus
cguccgcucgugccacugcc

SEQ ID NO: 3091794 - RNA, 17 nt, Molluscum contagiosum virus
cgcuggcgugcgcagug

SEQ ID NO: 3091795 - RNA, 12 nt, Molluscum contagiosum virus
gagcagugccgc

SEQ ID NO: 3091796 - RNA, 16 nt, Molluscum contagiosum virus
cucugauuacauccug

SEQ ID NO: 3091797 - RNA, 14 nt, Molluscum contagiosum virus
cugcagcccuucca

SEQ ID NO: 3091798 - RNA, 16 nt, Molluscum contagiosum virus
cgcgcugcagcaccug

SEQ ID NO: 3091799 - RNA, 17 nt, Molluscum contagiosum virus
cugcugcagaacugccu

SEQ ID NO: 3091800 - RNA, 17 nt, Molluscum contagiosum virus
ggcauccggccgaggca

SEQ ID NO: 3091801 - RNA, 16 nt, Molluscum contagiosum virus
gugcugcgcgcccagg

SEQ ID NO: 3091802 - RNA, 14 nt, Molluscum contagiosum virus
caaggaaaggcacc

SEQ ID NO: 3091803 - RNA, 14 nt, Molluscum contagiosum virus
aacgagcagcccgu

SEQ ID NO: 3091804 - RNA, 21 nt, Molluscum contagiosum virus
cuucgguuucuaugcccagcc

SEQ ID NO: 3091805 - RNA, 19 nt, Molluscum contagiosum virus
cuuccccaagaccugcuuc

SEQ ID NO: 3091806 - RNA, 12 nt, Molluscum contagiosum virus
ccgacgggcccc

SEQ ID NO: 3091807 - RNA, 14 nt, Molluscum contagiosum virus
gcgccuagcuccag

SEQ ID NO: 3091808 - RNA, 17 nt, Molluscum contagiosum virus
ucucggacagugccucc

SEQ ID NO: 3091809 - RNA, 15 nt, Molluscum contagiosum virus
gcggcagcagccucg

SEQ ID NO: 3091810 - RNA, 17 nt, Molluscum contagiosum virus
gcugcuggcggugcucu

SEQ ID NO: 3091811 - RNA, 21 nt, Molluscum contagiosum virus
gccuguaccccgaacggcgug

SEQ ID NO: 3091812 - RNA, 13 nt, Molluscum contagiosum virus
agacguagagcag

SEQ ID NO: 3091813 - RNA, 23 nt, Molluscum contagiosum virus
cuguaggggagggcggcaagcuu

SEQ ID NO: 3091814 - RNA, 17 nt, Molluscum contagiosum virus
cgcaaggucuuccacgc

SEQ ID NO: 3091815 - RNA, 19 nt, Molluscum contagiosum virus
ucggcgagacgugcggcac

SEQ ID NO: 3091816 - RNA, 17 nt, Molluscum contagiosum virus
ugccucugccagccgcu

SEQ ID NO: 3091817 - RNA, 14 nt, Molluscum contagiosum virus
gcuguaccuggugc

SEQ ID NO: 3091818 - RNA, 17 nt, Molluscum contagiosum virus
cucgucgccgggccccu

SEQ ID NO: 3091819 - RNA, 23 nt, Molluscum contagiosum virus
agcgcgcccaccagcagccaggc

SEQ ID NO: 3091820 - RNA, 16 nt, Molluscum contagiosum virus
cggcacgcugcagaac

SEQ ID NO: 3091821 - RNA, 14 nt, Molluscum contagiosum virus
gucucgcugcuggg

SEQ ID NO: 3091822 - RNA, 17 nt, Molluscum contagiosum virus
cugcuggugcucgccug

SEQ ID NO: 3091823 - RNA, 20 nt, Molluscum contagiosum virus
ucgcgcgccugcgcgagcaa

SEQ ID NO: 3091824 - RNA, 21 nt, Molluscum contagiosum virus
cggagcggaucgugcuggaga

SEQ ID NO: 3091825 - RNA, 17 nt, Molluscum contagiosum virus
cgggcgccggcucugcc

SEQ ID NO: 3091826 - RNA, 20 nt, Molluscum contagiosum virus
gcacgccagguguuccugcc

SEQ ID NO: 3091827 - RNA, 20 nt, Molluscum contagiosum virus
acagucgcgcgccugccgcc

SEQ ID NO: 3091828 - RNA, 18 nt, Molluscum contagiosum virus
acgcgacggugugccgcu

SEQ ID NO: 3091829 - RNA, 15 nt, Molluscum contagiosum virus
cccgagcccgggccc

SEQ ID NO: 3091830 - RNA, 18 nt, Molluscum contagiosum virus
cucgcgucugcaaggccu

SEQ ID NO: 3091831 - RNA, 19 nt, Molluscum contagiosum virus
caacccgcggcgcgccgca

SEQ ID NO: 3091832 - RNA, 15 nt, Molluscum contagiosum virus
auggcggccugcccu

SEQ ID NO: 3091833 - RNA, 21 nt, Molluscum contagiosum virus
ucgcagacgcagcgcgagcug

SEQ ID NO: 3091834 - RNA, 18 nt, Molluscum contagiosum virus
cgcggcgugugcgggcuc

SEQ ID NO: 3091835 - RNA, 14 nt, Molluscum contagiosum virus
cuccuccaaucugc

SEQ ID NO: 3091836 - RNA, 17 nt, Molluscum contagiosum virus
cccguaggcgggccugc

SEQ ID NO: 3091837 - RNA, 14 nt, Molluscum contagiosum virus
ggcggaagcuccug

SEQ ID NO: 3091838 - RNA, 14 nt, Molluscum contagiosum virus
cgcggcuagcaccg

SEQ ID NO: 3091839 - RNA, 14 nt, Molluscum contagiosum virus
cucggcaacgccag

SEQ ID NO: 3091840 - RNA, 22 nt, Molluscum contagiosum virus
gcacgcccuggcccucggggcu

SEQ ID NO: 3091841 - RNA, 17 nt, Molluscum contagiosum virus
gccagcauggcgagccc

SEQ ID NO: 3091842 - RNA, 17 nt, Molluscum contagiosum virus
cacucacaugugcugcc

SEQ ID NO: 3091843 - RNA, 14 nt, Molluscum contagiosum virus
cuaccuggugcugg

SEQ ID NO: 3091844 - RNA, 23 nt, Molluscum contagiosum virus
ccgcugcgcuggaugcugcucga

SEQ ID NO: 3091845 - RNA, 12 nt, Molluscum contagiosum virus
ccuuucuuccag

SEQ ID NO: 3091846 - RNA, 18 nt, Molluscum contagiosum virus
cucgcgcgccagcacgcg

SEQ ID NO: 3091847 - RNA, 23 nt, Molluscum contagiosum virus
cgagcagcccgugcgccugccgc

SEQ ID NO: 3091848 - RNA, 14 nt, Molluscum contagiosum virus
ugcaaucugcgcuc

SEQ ID NO: 3091849 - RNA, 22 nt, Molluscum contagiosum virus
cuucaggcaagaggggagccag

SEQ ID NO: 3091850 - RNA, 23 nt, Molluscum contagiosum virus
cuuuucgggcaaacgccagugcu

SEQ ID NO: 3091851 - RNA, 20 nt, Molluscum contagiosum virus
aguggcuuguugucgagcag

SEQ ID NO: 3091852 - RNA, 13 nt, Molluscum contagiosum virus
uccaguggcgccc

SEQ ID NO: 3091853 - RNA, 20 nt, Molluscum contagiosum virus
cgucggucaccaccaccucc

SEQ ID NO: 3091854 - RNA, 16 nt, Molluscum contagiosum virus
ggcggccaaccgccug

SEQ ID NO: 3091855 - RNA, 16 nt, Molluscum contagiosum virus
agucagcggcggcccc

SEQ ID NO: 3091856 - RNA, 20 nt, Molluscum contagiosum virus
ggcucacagccguggagucc

SEQ ID NO: 3091857 - RNA, 22 nt, Molluscum contagiosum virus
ccgggcagauagcaaccucggg

SEQ ID NO: 3091858 - RNA, 16 nt, Molluscum contagiosum virus
agucgcuagaggagau

SEQ ID NO: 3091859 - RNA, 14 nt, Molluscum contagiosum virus
cuuggcgggcaccg

SEQ ID NO: 3091860 - RNA, 19 nt, Molluscum contagiosum virus
gcuugcccgaccuuggugc

SEQ ID NO: 3091861 - RNA, 16 nt, Molluscum contagiosum virus
gcgcgacaugcugccc

SEQ ID NO: 3091862 - RNA, 17 nt, Molluscum contagiosum virus
gcucccgcgccacgagc

SEQ ID NO: 3091863 - RNA, 22 nt, Molluscum contagiosum virus
cagauaguuuggacgagcugcu

SEQ ID NO: 3091864 - RNA, 17 nt, Molluscum contagiosum virus
cucucccgggcucuguc

SEQ ID NO: 3091865 - RNA, 21 nt, Molluscum contagiosum virus
gcugccagagauccgcccgcg

SEQ ID NO: 3091866 - RNA, 19 nt, Molluscum contagiosum virus
gaggccggccgugcagagc

SEQ ID NO: 3091867 - RNA, 13 nt, Molluscum contagiosum virus
ccgccagcaccau

SEQ ID NO: 3091868 - RNA, 22 nt, Molluscum contagiosum virus
gcccgacacguugcacugcgcg

SEQ ID NO: 3091869 - RNA, 18 nt, Molluscum contagiosum virus
gcacaccucgagcccgag

SEQ ID NO: 3091870 - RNA, 13 nt, Molluscum contagiosum virus
agcugugccgcag

SEQ ID NO: 3091871 - RNA, 17 nt, Molluscum contagiosum virus
gcacacgcgcgcgcagg

SEQ ID NO: 3091872 - RNA, 22 nt, Molluscum contagiosum virus
gcggcggccacgcucgcgcgca

SEQ ID NO: 3091873 - RNA, 21 nt, Molluscum contagiosum virus
accaugcucucgcugcugccc

SEQ ID NO: 3091874 - RNA, 21 nt, Molluscum contagiosum virus
acggucuugccgaagccgcag

SEQ ID NO: 3091875 - RNA, 22 nt, Molluscum contagiosum virus
gccaugaacaacauggugcugg

SEQ ID NO: 3091876 - RNA, 19 nt, Molluscum contagiosum virus
cgaguucugccggcucagc

SEQ ID NO: 3091877 - RNA, 16 nt, Molluscum contagiosum virus
caccugcacgagccgg

SEQ ID NO: 3091878 - RNA, 15 nt, Molluscum contagiosum virus
cugcuggcggugcuc

SEQ ID NO: 3091879 - RNA, 14 nt, Molluscum contagiosum virus
gcgccggaaguaga

SEQ ID NO: 3091880 - RNA, 20 nt, Molluscum contagiosum virus
aaaugguguacgaaaguacu

SEQ ID NO: 3091881 - RNA, 20 nt, Molluscum contagiosum virus
cgcggaggucgagcgcgccg

SEQ ID NO: 3091882 - RNA, 21 nt, Molluscum contagiosum virus
guuaaaaaugagaauaaaaua

SEQ ID NO: 3091883 - RNA, 16 nt, Molluscum contagiosum virus
cgagcugcugcgcgcc

SEQ ID NO: 3091884 - RNA, 20 nt, Molluscum contagiosum virus
cuuccggagacaccagcucc

SEQ ID NO: 3091885 - RNA, 23 nt, Molluscum contagiosum virus
gcguucaccuuggcgcugcacag

SEQ ID NO: 3091886 - RNA, 22 nt, Molluscum contagiosum virus
gcguccgcaaagccggccccgc

SEQ ID NO: 3091887 - RNA, 12 nt, Molluscum contagiosum virus
cugcgcgccgcu

SEQ ID NO: 3091888 - RNA, 17 nt, Molluscum contagiosum virus
gguccgggugcgagucu

SEQ ID NO: 3091889 - RNA, 11 nt, Molluscum contagiosum virus
cgcgcagcagc

SEQ ID NO: 3091890 - RNA, 16 nt, Molluscum contagiosum virus
caagccguccgccucg

SEQ ID NO: 3091891 - RNA, 13 nt, Molluscum contagiosum virus
gcgaccagcuggu

SEQ ID NO: 3091892 - RNA, 19 nt, Molluscum contagiosum virus
cuggugcucgccugcaucu

SEQ ID NO: 3091893 - RNA, 22 nt, Molluscum contagiosum virus
gccggcuguaaauggacccgcu

SEQ ID NO: 3091894 - RNA, 19 nt, Molluscum contagiosum virus
gcuucgucuucaccugcau

SEQ ID NO: 3091895 - RNA, 16 nt, Molluscum contagiosum virus
uguuggcgcgguccgc

SEQ ID NO: 3091896 - RNA, 18 nt, Molluscum contagiosum virus
cucaucggcgagcucuuu

SEQ ID NO: 3091897 - RNA, 21 nt, Molluscum contagiosum virus
accacuggacacgugccuucu

SEQ ID NO: 3091898 - RNA, 12 nt, Molluscum contagiosum virus
gaaacugcugcc

SEQ ID NO: 3091899 - RNA, 19 nt, Molluscum contagiosum virus
aaauggcugcgaccaagac

SEQ ID NO: 3091900 - RNA, 18 nt, Molluscum contagiosum virus
gcacugcucacggugcgc

SEQ ID NO: 3091901 - RNA, 21 nt, Molluscum contagiosum virus
cacugucucugcgcgagcagc

SEQ ID NO: 3091902 - RNA, 12 nt, Molluscum contagiosum virus
cccgagcccgcg

SEQ ID NO: 3091903 - RNA, 12 nt, Molluscum contagiosum virus
cagaccaagaag

SEQ ID NO: 3091904 - RNA, 16 nt, Molluscum contagiosum virus
acgccuagccugcagu

SEQ ID NO: 3091905 - RNA, 17 nt, Molluscum contagiosum virus
uggugcgcccgcggcac

SEQ ID NO: 3091906 - RNA, 19 nt, Molluscum contagiosum virus
cccacguacgagcagcugc

SEQ ID NO: 3091907 - RNA, 16 nt, Molluscum contagiosum virus
cacgacguacgagugc

SEQ ID NO: 3091908 - RNA, 18 nt, Molluscum contagiosum virus
gcgaucgcggccaugcgc

SEQ ID NO: 3091909 - RNA, 12 nt, Molluscum contagiosum virus
ccggacagagcc

SEQ ID NO: 3091910 - RNA, 22 nt, Molluscum contagiosum virus
ccucggacuucgacgcgcggca

SEQ ID NO: 3091911 - RNA, 16 nt, Molluscum contagiosum virus
cccgagcuacugcgcg

SEQ ID NO: 3091912 - RNA, 14 nt, Molluscum contagiosum virus
gcaguccgccucga

SEQ ID NO: 3091913 - RNA, 19 nt, Molluscum contagiosum virus
ccuggaguaccggcucaag

SEQ ID NO: 3091914 - RNA, 15 nt, Molluscum contagiosum virus
aucgcgagaggagac

SEQ ID NO: 3091915 - RNA, 16 nt, Molluscum contagiosum virus
acccuggcugcugcgc

SEQ ID NO: 3091916 - RNA, 19 nt, Molluscum contagiosum virus
cugcguugucuccuccuga

SEQ ID NO: 3091917 - RNA, 15 nt, Molluscum contagiosum virus
cauggagcaggagaa

SEQ ID NO: 3091918 - RNA, 14 nt, Molluscum contagiosum virus
ggagcugccgcugc

SEQ ID NO: 3091919 - RNA, 16 nt, Molluscum contagiosum virus
uguccugcgugcuucc

SEQ ID NO: 3091920 - RNA, 20 nt, Molluscum contagiosum virus
gcgggcgucaagacucgccc

SEQ ID NO: 3091921 - RNA, 16 nt, Molluscum contagiosum virus
cgcugcuccugcucug

SEQ ID NO: 3091922 - RNA, 20 nt, Molluscum contagiosum virus
ugccaccaugcgcacagcac

SEQ ID NO: 3091923 - RNA, 13 nt, Molluscum contagiosum virus
ugccuacucgcga

SEQ ID NO: 3091924 - RNA, 22 nt, Molluscum contagiosum virus
acugcugcaaucugcgcuccac

SEQ ID NO: 3091925 - RNA, 17 nt, Molluscum contagiosum virus
ucgagcgcgcuggacuu

SEQ ID NO: 3091926 - RNA, 15 nt, Molluscum contagiosum virus
gcucugccgcccgcg

SEQ ID NO: 3091927 - RNA, 14 nt, Molluscum contagiosum virus
aggaugcuggggcu

SEQ ID NO: 3091928 - RNA, 15 nt, Molluscum contagiosum virus
gcgcugguggaggag

SEQ ID NO: 3091929 - RNA, 19 nt, Molluscum contagiosum virus
cuucaaguuccuggagccc

SEQ ID NO: 3091930 - RNA, 18 nt, Molluscum contagiosum virus
ggacgucgcggccacgca

SEQ ID NO: 3091931 - RNA, 12 nt, Molluscum contagiosum virus
cggaagcuccug

SEQ ID NO: 3091932 - RNA, 20 nt, Molluscum contagiosum virus
ggcgugcagggcgugcuugc

SEQ ID NO: 3091933 - RNA, 16 nt, Molluscum contagiosum virus
gcccgccgcccaaggg

SEQ ID NO: 3091934 - RNA, 13 nt, Molluscum contagiosum virus
cgaucgcagcagu

SEQ ID NO: 3091935 - RNA, 14 nt, Molluscum contagiosum virus
gauggucucgcugc

SEQ ID NO: 3091936 - RNA, 15 nt, Molluscum contagiosum virus
ggcucgucguggacg

SEQ ID NO: 3091937 - RNA, 21 nt, Molluscum contagiosum virus
caggccgcccacgcucaacca

SEQ ID NO: 3091938 - RNA, 14 nt, Molluscum contagiosum virus
aucaucgcgcugcu

SEQ ID NO: 3091939 - RNA, 14 nt, Molluscum contagiosum virus
ccggagcgcggggc

SEQ ID NO: 3091940 - RNA, 17 nt, Molluscum contagiosum virus
gcuggagcugccgcugc

SEQ ID NO: 3091941 - RNA, 23 nt, Molluscum contagiosum virus
gcucauggucgucuccgggggcg

SEQ ID NO: 3091942 - RNA, 13 nt, Molluscum contagiosum virus
gcgcucgcgcagg

SEQ ID NO: 3091943 - RNA, 13 nt, Molluscum contagiosum virus
cgcgcgcgcgccg

SEQ ID NO: 3091944 - RNA, 22 nt, Molluscum contagiosum virus
gucgcaguacccgagcugugcc

SEQ ID NO: 3091945 - RNA, 17 nt, Molluscum contagiosum virus
cguuuucgucauggagc

SEQ ID NO: 3091946 - RNA, 19 nt, Molluscum contagiosum virus
gcgugggcagccgccuggc

SEQ ID NO: 3091947 - RNA, 14 nt, Molluscum contagiosum virus
ccaucggugggcuc

SEQ ID NO: 3091948 - RNA, 20 nt, Molluscum contagiosum virus
gccguguacaugcucaagca

SEQ ID NO: 3091949 - RNA, 12 nt, Molluscum contagiosum virus
cgccgaugcagu

SEQ ID NO: 3091950 - RNA, 19 nt, Molluscum contagiosum virus
ccucagccgagcgccgcca

SEQ ID NO: 3091951 - RNA, 22 nt, Molluscum contagiosum virus
cacaacuugggcccgccuccgg

SEQ ID NO: 3091952 - RNA, 22 nt, Molluscum contagiosum virus
ugcgcauggccacgcccgggcc

SEQ ID NO: 3091953 - RNA, 14 nt, Molluscum contagiosum virus
cgagcaggcgcagc

SEQ ID NO: 3091954 - RNA, 14 nt, Molluscum contagiosum virus
guugcgagccagcc

SEQ ID NO: 3091955 - RNA, 18 nt, Molluscum contagiosum virus
gcuggggccugugcugug

SEQ ID NO: 3091956 - RNA, 15 nt, Molluscum contagiosum virus
gagguucuccagaau

SEQ ID NO: 3091957 - RNA, 22 nt, Molluscum contagiosum virus
cgguagggugccgaggcgcugc

SEQ ID NO: 3091958 - RNA, 21 nt, Molluscum contagiosum virus
ccacgcagcuggcgggcgugc

SEQ ID NO: 3091959 - RNA, 22 nt, Molluscum contagiosum virus
cggccugcccugcucaugcgca

SEQ ID NO: 3091960 - RNA, 15 nt, Molluscum contagiosum virus
gcgccggcugcgcca

SEQ ID NO: 3091961 - RNA, 22 nt, Molluscum contagiosum virus
cgaaagaggaaagcgcacacuu

SEQ ID NO: 3091962 - RNA, 23 nt, Molluscum contagiosum virus
agagcccaaggggagacauaugu

SEQ ID NO: 3091963 - RNA, 23 nt, Molluscum contagiosum virus
gcgagauugagagcgcuggcuuc

SEQ ID NO: 3091964 - RNA, 15 nt, Molluscum contagiosum virus
cccucgcaagcugag

SEQ ID NO: 3091965 - RNA, 14 nt, Molluscum contagiosum virus
gucucggggcuccg

SEQ ID NO: 3091966 - RNA, 13 nt, Molluscum contagiosum virus
gcuccuucuucag

SEQ ID NO: 3091967 - RNA, 15 nt, Molluscum contagiosum virus
gagcgcaugccgggg

SEQ ID NO: 3091968 - RNA, 16 nt, Molluscum contagiosum virus
cugcgcgagcagcugc

SEQ ID NO: 3091969 - RNA, 15 nt, Molluscum contagiosum virus
cgcaaagccggcccc

SEQ ID NO: 3091970 - RNA, 13 nt, Molluscum contagiosum virus
gccuaggaggaga

SEQ ID NO: 3091971 - RNA, 15 nt, Molluscum contagiosum virus
ccggcgcggccuggc

SEQ ID NO: 3091972 - RNA, 16 nt, Molluscum contagiosum virus
gaguugcgcgagaacu

SEQ ID NO: 3091973 - RNA, 16 nt, Molluscum contagiosum virus
acgcgcacgggccugc

SEQ ID NO: 3091974 - RNA, 14 nt, Molluscum contagiosum virus
gccgcaaaagcaag

SEQ ID NO: 3091975 - RNA, 16 nt, Molluscum contagiosum virus
ugacaaggauggacaa

SEQ ID NO: 3091976 - RNA, 19 nt, Molluscum contagiosum virus
gcggaggucgagcgcgccg

SEQ ID NO: 3091977 - RNA, 13 nt, Molluscum contagiosum virus
cgcacccucacac

SEQ ID NO: 3091978 - RNA, 21 nt, Molluscum contagiosum virus
cuacauggacgugcugcuggc

SEQ ID NO: 3091979 - RNA, 19 nt, Molluscum contagiosum virus
cacgccgcucggcacugcu

SEQ ID NO: 3091980 - RNA, 22 nt, Molluscum contagiosum virus
ucgcauuaaacaacacgcgcga

SEQ ID NO: 3091981 - RNA, 13 nt, Molluscum contagiosum virus
cuccaagaacgag

SEQ ID NO: 3091982 - RNA, 22 nt, Molluscum contagiosum virus
gggaaaaaucccccgccaggaa

SEQ ID NO: 3091983 - RNA, 19 nt, Molluscum contagiosum virus
gccgcagcccgagcgcgcg

SEQ ID NO: 3091984 - RNA, 23 nt, Molluscum contagiosum virus
gcucaagacgcugcuggcgcaca

SEQ ID NO: 3091985 - RNA, 13 nt, Molluscum contagiosum virus
acuggcaccugcg

SEQ ID NO: 3091986 - RNA, 23 nt, Molluscum contagiosum virus
ugcuggaacgcuuggcgggcagc

SEQ ID NO: 3091987 - RNA, 18 nt, Molluscum contagiosum virus
ccuugauaaaagcacagu

SEQ ID NO: 3091988 - RNA, 13 nt, Molluscum contagiosum virus
gugcaccuggagc

SEQ ID NO: 3091989 - RNA, 13 nt, Molluscum contagiosum virus
gcaccgggcgccg

SEQ ID NO: 3091990 - RNA, 18 nt, Molluscum contagiosum virus
aaaggcacccaccaggaa

SEQ ID NO: 3091991 - RNA, 16 nt, Molluscum contagiosum virus
uggcacccuggcugcu

SEQ ID NO: 3091992 - RNA, 15 nt, Molluscum contagiosum virus
gucaagcaggcaugc

SEQ ID NO: 3091993 - RNA, 11 nt, Molluscum contagiosum virus
caacugccugc

SEQ ID NO: 3091994 - RNA, 14 nt, Molluscum contagiosum virus
uggaguacuucaag

SEQ ID NO: 3091995 - RNA, 14 nt, Molluscum contagiosum virus
ccgagcaagcgggc

SEQ ID NO: 3091996 - RNA, 14 nt, Molluscum contagiosum virus
gacucgucgagcac

SEQ ID NO: 3091997 - RNA, 17 nt, Molluscum contagiosum virus
aaacuccguacagcucc

SEQ ID NO: 3091998 - RNA, 15 nt, Molluscum contagiosum virus
ggcaggggccgccgc

SEQ ID NO: 3091999 - RNA, 21 nt, Molluscum contagiosum virus
guccgcccccagguggagcug

SEQ ID NO: 3092000 - RNA, 15 nt, Molluscum contagiosum virus
ugaacucgcugcugc

SEQ ID NO: 3092001 - RNA, 14 nt, Molluscum contagiosum virus
acugugccagcagc

SEQ ID NO: 3092002 - RNA, 16 nt, Molluscum contagiosum virus
agagccugcugcucuu

SEQ ID NO: 3092003 - RNA, 15 nt, Molluscum contagiosum virus
gagcgagugccgagc

SEQ ID NO: 3092004 - RNA, 18 nt, Molluscum contagiosum virus
agcucacggcuguggaca

SEQ ID NO: 3092005 - RNA, 16 nt, Molluscum contagiosum virus
cucgggccggcgcgcc

SEQ ID NO: 3092006 - RNA, 21 nt, Molluscum contagiosum virus
agccggccuagagcuggcacc

SEQ ID NO: 3092007 - RNA, 13 nt, Molluscum contagiosum virus
ggcgcuuggcgag

SEQ ID NO: 3092008 - RNA, 14 nt, Molluscum contagiosum virus
agaaugacuuagcc

SEQ ID NO: 3092009 - RNA, 15 nt, Molluscum contagiosum virus
ugccgcuggugggcg

SEQ ID NO: 3092010 - RNA, 14 nt, Molluscum contagiosum virus
gcggccguggcugc

SEQ ID NO: 3092011 - RNA, 23 nt, Molluscum contagiosum virus
cacgccagcagcagaggaguagc

SEQ ID NO: 3092012 - RNA, 13 nt, Molluscum contagiosum virus
agcacgccuggcg

SEQ ID NO: 3092013 - RNA, 18 nt, Molluscum contagiosum virus
gucgaguucgcucgcucg

SEQ ID NO: 3092014 - RNA, 17 nt, Molluscum contagiosum virus
uucgccggaggaaggac

SEQ ID NO: 3092015 - RNA, 19 nt, Molluscum contagiosum virus
gcagcggcgccacgagcgc

SEQ ID NO: 3092016 - RNA, 23 nt, Molluscum contagiosum virus
ugcaggccgagaugagcggcgcc

SEQ ID NO: 3092017 - RNA, 23 nt, Molluscum contagiosum virus
uugugcaauuccguccagugaaa

SEQ ID NO: 3092018 - RNA, 21 nt, Molluscum contagiosum virus
gcgagcgcgucugcucucggc

SEQ ID NO: 3092019 - RNA, 22 nt, Molluscum contagiosum virus
caaccgcugcuauuaccugaga

SEQ ID NO: 3092020 - RNA, 15 nt, Molluscum contagiosum virus
acgaacgacagcgcc

SEQ ID NO: 3092021 - RNA, 15 nt, Molluscum contagiosum virus
ggcgcgcccagcgcc

SEQ ID NO: 3092022 - RNA, 15 nt, Molluscum contagiosum virus
caacuguugccugga

SEQ ID NO: 3092023 - RNA, 23 nt, Molluscum contagiosum virus
gacuuugacuacuacguggugcg

SEQ ID NO: 3092024 - RNA, 13 nt, Molluscum contagiosum virus
acgaacuggcaau

SEQ ID NO: 3092025 - RNA, 18 nt, Molluscum contagiosum virus
ccggcaguagcagcgccg

SEQ ID NO: 3092026 - RNA, 15 nt, Molluscum contagiosum virus
cuuuggcgugaccau

SEQ ID NO: 3092027 - RNA, 18 nt, Molluscum contagiosum virus
cgggcaugcacagcugcu

SEQ ID NO: 3092028 - RNA, 22 nt, Molluscum contagiosum virus
agacuggagcacggacugggag

SEQ ID NO: 3092029 - RNA, 14 nt, Molluscum contagiosum virus
gcgcguggcucgcg

SEQ ID NO: 3092030 - RNA, 18 nt, Molluscum contagiosum virus
aaauccugguuccucucc

SEQ ID NO: 3092031 - RNA, 19 nt, Molluscum contagiosum virus
cuggccgcgauucugcucu

SEQ ID NO: 3092032 - RNA, 11 nt, Molluscum contagiosum virus
acaagcugcac

SEQ ID NO: 3092033 - RNA, 22 nt, Molluscum contagiosum virus
gcucgaagccuucgcagagacc

SEQ ID NO: 3092034 - RNA, 23 nt, Molluscum contagiosum virus
caaaguacuugccgucacggccg

SEQ ID NO: 3092035 - RNA, 16 nt, Molluscum contagiosum virus
gccgaacggcagaccc

SEQ ID NO: 3092036 - RNA, 21 nt, Molluscum contagiosum virus
gcgcugucgcgcaggcucugg

SEQ ID NO: 3092037 - RNA, 14 nt, Molluscum contagiosum virus
cuccuggccaacag

SEQ ID NO: 3092038 - RNA, 15 nt, Molluscum contagiosum virus
agacacgcuggucag

SEQ ID NO: 3092039 - RNA, 21 nt, Molluscum contagiosum virus
cguacucaacaagcugcuggc

SEQ ID NO: 3092040 - RNA, 15 nt, Molluscum contagiosum virus
cugcugaagaaggag

SEQ ID NO: 3092041 - RNA, 21 nt, Molluscum contagiosum virus
ggcacccgcaggaaagguacc

SEQ ID NO: 3092042 - RNA, 21 nt, Molluscum contagiosum virus
uuguccucuuggccccucccg

SEQ ID NO: 3092043 - RNA, 14 nt, Molluscum contagiosum virus
aacaugugccugcu

SEQ ID NO: 3092044 - RNA, 21 nt, Molluscum contagiosum virus
gcuaccacgggcccgcgcgug

SEQ ID NO: 3092045 - RNA, 17 nt, Molluscum contagiosum virus
cuggcaccugcggcugc

SEQ ID NO: 3092046 - RNA, 20 nt, Molluscum contagiosum virus
ccugaugacggcagacggca

SEQ ID NO: 3092047 - RNA, 15 nt, Molluscum contagiosum virus
ugcgcgccgcgccgc

SEQ ID NO: 3092048 - RNA, 14 nt, Molluscum contagiosum virus
gcugcugcggcucc

SEQ ID NO: 3092049 - RNA, 18 nt, Molluscum contagiosum virus
gcugaagaaggagcccuu

SEQ ID NO: 3092050 - RNA, 21 nt, Molluscum contagiosum virus
cggcgagacgugcggcacgcu

SEQ ID NO: 3092051 - RNA, 15 nt, Molluscum contagiosum virus
cagcgcgagcugugc

SEQ ID NO: 3092052 - RNA, 16 nt, Molluscum contagiosum virus
gcuuuuuuuguccugu

SEQ ID NO: 3092053 - RNA, 14 nt, Molluscum contagiosum virus
cggccgccaccgcg

SEQ ID NO: 3092054 - RNA, 18 nt, Molluscum contagiosum virus
acgccgggcacgcccgcg

SEQ ID NO: 3092055 - RNA, 13 nt, Molluscum contagiosum virus
ccaaggggagaca

SEQ ID NO: 3092056 - RNA, 14 nt, Molluscum contagiosum virus
guccgcggcgcgcc

SEQ ID NO: 3092057 - RNA, 22 nt, Molluscum contagiosum virus
gacaagcgcgucugcaucgugg

SEQ ID NO: 3092058 - RNA, 14 nt, Molluscum contagiosum virus
cgcuucggcuccca

SEQ ID NO: 3092059 - RNA, 19 nt, Molluscum contagiosum virus
cucgcgcaaguccagcgcg

SEQ ID NO: 3092060 - RNA, 19 nt, Molluscum contagiosum virus
ccguccucgcucgugcucu

SEQ ID NO: 3092061 - RNA, 14 nt, Molluscum contagiosum virus
cgaggagcacggca

SEQ ID NO: 3092062 - RNA, 23 nt, Molluscum contagiosum virus
cguguacaugaugcccuggugaa

SEQ ID NO: 3092063 - RNA, 21 nt, Molluscum contagiosum virus
accccgaaggaaaggcccccc

SEQ ID NO: 3092064 - RNA, 21 nt, Molluscum contagiosum virus
caacucgcgcugcagcaccug

SEQ ID NO: 3092065 - RNA, 21 nt, Molluscum contagiosum virus
ccgcgcgcgagcuggagcgcg

SEQ ID NO: 3092066 - RNA, 18 nt, Molluscum contagiosum virus
ucgcgacgacgagcacua

SEQ ID NO: 3092067 - RNA, 21 nt, Molluscum contagiosum virus
gccgcgcaugacagccauggc

SEQ ID NO: 3092068 - RNA, 13 nt, Molluscum contagiosum virus
cgcgagcaccacu

SEQ ID NO: 3092069 - RNA, 21 nt, Molluscum contagiosum virus
cgaccugcacgacccucuucg

SEQ ID NO: 3092070 - RNA, 16 nt, Molluscum contagiosum virus
caagcgcccucgugua

SEQ ID NO: 3092071 - RNA, 14 nt, Molluscum contagiosum virus
gccgugcagagcaa

SEQ ID NO: 3092072 - RNA, 21 nt, Molluscum contagiosum virus
cacgggcaugcacagcugcuc

SEQ ID NO: 3092073 - RNA, 16 nt, Molluscum contagiosum virus
agaucgcgagaggaga

SEQ ID NO: 3092074 - RNA, 18 nt, Molluscum contagiosum virus
ggagaacgcgaggccggc

SEQ ID NO: 3092075 - RNA, 13 nt, Molluscum contagiosum virus
gcggacgcgcagc

SEQ ID NO: 3092076 - RNA, 16 nt, Molluscum contagiosum virus
ggaucagccccgcgcc

SEQ ID NO: 3092077 - RNA, 14 nt, Molluscum contagiosum virus
ucguacucaacaag

SEQ ID NO: 3092078 - RNA, 14 nt, Molluscum contagiosum virus
gagugcuggagcag

SEQ ID NO: 3092079 - RNA, 23 nt, Molluscum contagiosum virus
gcccgcgcacgagcugcugcccg

SEQ ID NO: 3092080 - RNA, 16 nt, Molluscum contagiosum virus
acggagagcgcgcggc

SEQ ID NO: 3092081 - RNA, 18 nt, Molluscum contagiosum virus
cggcggggaugcuucccc

SEQ ID NO: 3092082 - RNA, 14 nt, Molluscum contagiosum virus
cuguaccggcucag

SEQ ID NO: 3092083 - RNA, 19 nt, Molluscum contagiosum virus
gagccauucuuaauccagu

SEQ ID NO: 3092084 - RNA, 14 nt, Molluscum contagiosum virus
gacaugcacacuca

SEQ ID NO: 3092085 - RNA, 11 nt, Molluscum contagiosum virus
ccaccaccagc

SEQ ID NO: 3092086 - RNA, 19 nt, Molluscum contagiosum virus
ucgaggagggcguccguaa

SEQ ID NO: 3092087 - RNA, 17 nt, Molluscum contagiosum virus
ggcgccgaugcagugcg

SEQ ID NO: 3092088 - RNA, 19 nt, Molluscum contagiosum virus
cuggcacaaaucgaggcgc

SEQ ID NO: 3092089 - RNA, 13 nt, Molluscum contagiosum virus
ggcaccacgugcg

SEQ ID NO: 3092090 - RNA, 19 nt, Molluscum contagiosum virus
gcguggcgcgcgagcugcu

SEQ ID NO: 3092091 - RNA, 18 nt, Molluscum contagiosum virus
agugccgcugagagacuu

SEQ ID NO: 3092092 - RNA, 21 nt, Molluscum contagiosum virus
gcacgcuugccuuggcgcccg

SEQ ID NO: 3092093 - RNA, 18 nt, Molluscum contagiosum virus
gcucacggcggcgcucaa

SEQ ID NO: 3092094 - RNA, 14 nt, Molluscum contagiosum virus
cugcgcaccugcac

SEQ ID NO: 3092095 - RNA, 15 nt, Molluscum contagiosum virus
ugaagcuggacgugg

SEQ ID NO: 3092096 - RNA, 17 nt, Molluscum contagiosum virus
gaacgaggcugcugccg

SEQ ID NO: 3092097 - RNA, 14 nt, Molluscum contagiosum virus
cgccagccugcugg

SEQ ID NO: 3092098 - RNA, 13 nt, Molluscum contagiosum virus
cggcacugcuggc

SEQ ID NO: 3092099 - RNA, 14 nt, Molluscum contagiosum virus
agagccgcuccugg

SEQ ID NO: 3092100 - RNA, 19 nt, Molluscum contagiosum virus
ucgcgcucuucaagaacag

SEQ ID NO: 3092101 - RNA, 16 nt, Molluscum contagiosum virus
cuccacgcgcagcuuc

SEQ ID NO: 3092102 - RNA, 19 nt, Molluscum contagiosum virus
gcgcgcgccaagugcuccg

SEQ ID NO: 3092103 - RNA, 16 nt, Molluscum contagiosum virus
cggcggggcugcuggc

SEQ ID NO: 3092104 - RNA, 18 nt, Molluscum contagiosum virus
cgugccgcggcacugggu

SEQ ID NO: 3092105 - RNA, 17 nt, Molluscum contagiosum virus
gaggcacgggcucgauc

SEQ ID NO: 3092106 - RNA, 16 nt, Molluscum contagiosum virus
ggcggcguaggccugc

SEQ ID NO: 3092107 - RNA, 15 nt, Molluscum contagiosum virus
accugcucgggcugc

SEQ ID NO: 3092108 - RNA, 19 nt, Molluscum contagiosum virus
ggccaaagccgcggaggcc

SEQ ID NO: 3092109 - RNA, 20 nt, Molluscum contagiosum virus
ucgcagccuccgugcgccag

SEQ ID NO: 3092110 - RNA, 19 nt, Molluscum contagiosum virus
caggcgauaggacaugacu

SEQ ID NO: 3092111 - RNA, 14 nt, Molluscum contagiosum virus
caaugaggagagga

SEQ ID NO: 3092112 - RNA, 14 nt, Molluscum contagiosum virus
auguccggcgcugg

SEQ ID NO: 3092113 - RNA, 13 nt, Molluscum contagiosum virus
gcucaacgugggc

SEQ ID NO: 3092114 - RNA, 17 nt, Molluscum contagiosum virus
cacggcgcccaggaaca

SEQ ID NO: 3092115 - RNA, 13 nt, Molluscum contagiosum virus
cgcgcgacuacgc

SEQ ID NO: 3092116 - RNA, 14 nt, Molluscum contagiosum virus
cggacagcucagca

SEQ ID NO: 3092117 - RNA, 14 nt, Molluscum contagiosum virus
cucgugcugggccu

SEQ ID NO: 3092118 - RNA, 14 nt, Molluscum contagiosum virus
aguggcaagggccu

SEQ ID NO: 3092119 - RNA, 14 nt, Molluscum contagiosum virus
ucucucgagagaca

SEQ ID NO: 3092120 - RNA, 14 nt, Molluscum contagiosum virus
acgaagcugugcaa

SEQ ID NO: 3092121 - RNA, 22 nt, Molluscum contagiosum virus
cccuucgcuugucgugcuuccu

SEQ ID NO: 3092122 - RNA, 15 nt, Molluscum contagiosum virus
gagacaggggggaga

SEQ ID NO: 3092123 - RNA, 14 nt, Molluscum contagiosum virus
agcaaggggucugc

SEQ ID NO: 3092124 - RNA, 21 nt, Molluscum contagiosum virus
ugcacuucggacaccucaccu

SEQ ID NO: 3092125 - RNA, 17 nt, Molluscum contagiosum virus
gcacccaccaggaacga

SEQ ID NO: 3092126 - RNA, 20 nt, Molluscum contagiosum virus
guucuccacguccgacucgg

SEQ ID NO: 3092127 - RNA, 19 nt, Molluscum contagiosum virus
ugcgucccagcagcugcuc

SEQ ID NO: 3092128 - RNA, 12 nt, Molluscum contagiosum virus
cuuagccacugu

SEQ ID NO: 3092129 - RNA, 23 nt, Molluscum contagiosum virus
gccuccaagaagaggccagcaca

SEQ ID NO: 3092130 - RNA, 19 nt, Molluscum contagiosum virus
ccaaggugaacgaccucaa

SEQ ID NO: 3092131 - RNA, 15 nt, Molluscum contagiosum virus
gcgaccgcgaacugc

SEQ ID NO: 3092132 - RNA, 16 nt, Molluscum contagiosum virus
uaauugaaaggcagaa

SEQ ID NO: 3092133 - RNA, 21 nt, Molluscum contagiosum virus
ccgcuuccuggcacuggcgcg

SEQ ID NO: 3092134 - RNA, 21 nt, Molluscum contagiosum virus
gcgccgcgcgcgcgcgagggc

SEQ ID NO: 3092135 - RNA, 14 nt, Molluscum contagiosum virus
gaucgcgcucuucc

SEQ ID NO: 3092136 - RNA, 15 nt, Molluscum contagiosum virus
gcaagcgggccagua

SEQ ID NO: 3092137 - RNA, 20 nt, Molluscum contagiosum virus
augccagacccgaaagcugc

SEQ ID NO: 3092138 - RNA, 12 nt, Molluscum contagiosum virus
cggcggcgcaac

SEQ ID NO: 3092139 - RNA, 17 nt, Molluscum contagiosum virus
cgccgucggccucgggc

SEQ ID NO: 3092140 - RNA, 22 nt, Molluscum contagiosum virus
ugucucugcgcgagcagcugcu

SEQ ID NO: 3092141 - RNA, 16 nt, Molluscum contagiosum virus
gacgcugcggcggcgc

SEQ ID NO: 3092142 - RNA, 17 nt, Molluscum contagiosum virus
gugcucgcacacgugca

SEQ ID NO: 3092143 - RNA, 16 nt, Molluscum contagiosum virus
gucugaccgcgggcac

SEQ ID NO: 3092144 - RNA, 17 nt, Molluscum contagiosum virus
aagucucucagcggcac

SEQ ID NO: 3092145 - RNA, 21 nt, Molluscum contagiosum virus
uccccgcacaagggcagcuca

SEQ ID NO: 3092146 - RNA, 11 nt, Molluscum contagiosum virus
uccugcugccg

SEQ ID NO: 3092147 - RNA, 21 nt, Molluscum contagiosum virus
cgugcagacgcucaacguggg

SEQ ID NO: 3092148 - RNA, 21 nt, Molluscum contagiosum virus
cuuguuuuuguacccuugcuc

SEQ ID NO: 3092149 - RNA, 12 nt, Molluscum contagiosum virus
uggacuucagga

SEQ ID NO: 3092150 - RNA, 19 nt, Molluscum contagiosum virus
cggcccgcggacgcgcagc

SEQ ID NO: 3092151 - RNA, 15 nt, Molluscum contagiosum virus
acgacggucacgcaa

SEQ ID NO: 3092152 - RNA, 18 nt, Molluscum contagiosum virus
cgcgcggcaagccuggcu

SEQ ID NO: 3092153 - RNA, 18 nt, Molluscum contagiosum virus
cggcgcccgugagcaugg

SEQ ID NO: 3092154 - RNA, 20 nt, Molluscum contagiosum virus
acgacacgagggccuuggcg

SEQ ID NO: 3092155 - RNA, 20 nt, Molluscum contagiosum virus
cuugguguucugcgcgccgc

SEQ ID NO: 3092156 - RNA, 19 nt, Molluscum contagiosum virus
ccuucucgucgagagcgcg

SEQ ID NO: 3092157 - RNA, 15 nt, Molluscum contagiosum virus
cgcgcucgucaaugc

SEQ ID NO: 3092158 - RNA, 18 nt, Molluscum contagiosum virus
agaaguucugcacagcac

SEQ ID NO: 3092159 - RNA, 14 nt, Molluscum contagiosum virus
gcgcccuuccugga

SEQ ID NO: 3092160 - RNA, 20 nt, Molluscum contagiosum virus
gcagcaaacugugcuccuga

SEQ ID NO: 3092161 - RNA, 23 nt, Molluscum contagiosum virus
guguuuuuuuuguuuggacccau

SEQ ID NO: 3092162 - RNA, 17 nt, Molluscum contagiosum virus
cuuggcgcccgugccgc

SEQ ID NO: 3092163 - RNA, 18 nt, Molluscum contagiosum virus
ccuggugcgcccgcggca

SEQ ID NO: 3092164 - RNA, 15 nt, Molluscum contagiosum virus
gcugcugcucgcacc

SEQ ID NO: 3092165 - RNA, 20 nt, Molluscum contagiosum virus
gcugcucgugcugcucugcg

SEQ ID NO: 3092166 - RNA, 13 nt, Molluscum contagiosum virus
cgauugccccugg

SEQ ID NO: 3092167 - RNA, 22 nt, Molluscum contagiosum virus
ggcccuaaauaaugaaccugca

SEQ ID NO: 3092168 - RNA, 13 nt, Molluscum contagiosum virus
gcugcgagagcau

SEQ ID NO: 3092169 - RNA, 19 nt, Molluscum contagiosum virus
ugugugcuuauaccaugga

SEQ ID NO: 3092170 - RNA, 14 nt, Molluscum contagiosum virus
ccugcgcgagcagu

SEQ ID NO: 3092171 - RNA, 11 nt, Molluscum contagiosum virus
ugccugcgcuu

SEQ ID NO: 3092172 - RNA, 15 nt, Molluscum contagiosum virus
caggcagcugcugcg

SEQ ID NO: 3092173 - RNA, 17 nt, Molluscum contagiosum virus
ccgcgggcgcacgcuug

SEQ ID NO: 3092174 - RNA, 15 nt, Molluscum contagiosum virus
cguugcugcccgugc

SEQ ID NO: 3092175 - RNA, 18 nt, Molluscum contagiosum virus
cuugcgcguccgcaaagc

SEQ ID NO: 3092176 - RNA, 12 nt, Molluscum contagiosum virus
cccgcgccagca

SEQ ID NO: 3092177 - RNA, 18 nt, Molluscum contagiosum virus
cgcugugagcgcgccgcu

SEQ ID NO: 3092178 - RNA, 21 nt, Molluscum contagiosum virus
cgagcacgccaaccaccacgu

SEQ ID NO: 3092179 - RNA, 17 nt, Molluscum contagiosum virus
cuucggggacacaagga

SEQ ID NO: 3092180 - RNA, 14 nt, Molluscum contagiosum virus
ucgcgggcgccgcg

SEQ ID NO: 3092181 - RNA, 23 nt, Molluscum contagiosum virus
ccgagcgcguccaugagcaucuc

SEQ ID NO: 3092182 - RNA, 14 nt, Molluscum contagiosum virus
cgaagaaggggccg

SEQ ID NO: 3092183 - RNA, 14 nt, Molluscum contagiosum virus
cgucuuacugcugc

SEQ ID NO: 3092184 - RNA, 22 nt, Molluscum contagiosum virus
gcaacaaggaaaggcaccugca

SEQ ID NO: 3092185 - RNA, 18 nt, Molluscum contagiosum virus
cguaacaauggacacgca

SEQ ID NO: 3092186 - RNA, 19 nt, Molluscum contagiosum virus
aggcaccugcggcucgcac

SEQ ID NO: 3092187 - RNA, 23 nt, Molluscum contagiosum virus
gagcggcgcgcgcugagcgcgga

SEQ ID NO: 3092188 - RNA, 19 nt, Molluscum contagiosum virus
cgaggcgcuugggcacugc

SEQ ID NO: 3092189 - RNA, 22 nt, Molluscum contagiosum virus
acugcgaucgcagcagugccag

SEQ ID NO: 3092190 - RNA, 17 nt, Molluscum contagiosum virus
gguagagcgugaugugc

SEQ ID NO: 3092191 - RNA, 16 nt, Molluscum contagiosum virus
uacugcagcagcuccu

SEQ ID NO: 3092192 - RNA, 20 nt, Molluscum contagiosum virus
guccuguguuuucagggcuc

SEQ ID NO: 3092193 - RNA, 14 nt, Molluscum contagiosum virus
agcugcgccugcag

SEQ ID NO: 3092194 - RNA, 14 nt, Molluscum contagiosum virus
gcgcgcgcgcaggc

SEQ ID NO: 3092195 - RNA, 16 nt, Molluscum contagiosum virus
acgcagcucuuccacg

SEQ ID NO: 3092196 - RNA, 16 nt, Molluscum contagiosum virus
cucgcgcgcgcacgcc

SEQ ID NO: 3092197 - RNA, 20 nt, Molluscum contagiosum virus
ucuacggcgugcugugccug

SEQ ID NO: 3092198 - RNA, 10 nt, Molluscum contagiosum virus
accagcagcc

SEQ ID NO: 3092199 - RNA, 14 nt, Molluscum contagiosum virus
agguugcgcagagc

SEQ ID NO: 3092200 - RNA, 17 nt, Molluscum contagiosum virus
gcuuccgucugcugcuc

SEQ ID NO: 3092201 - RNA, 17 nt, Molluscum contagiosum virus
ugcgcgugcugggcccc

SEQ ID NO: 3092202 - RNA, 21 nt, Molluscum contagiosum virus
ggagucaggcaaaagccgccg

SEQ ID NO: 3092203 - RNA, 19 nt, Molluscum contagiosum virus
ucgaaggagcccgucuaca

SEQ ID NO: 3092204 - RNA, 14 nt, Molluscum contagiosum virus
gcagcugcgccugc

SEQ ID NO: 3092205 - RNA, 22 nt, Molluscum contagiosum virus
uaccagaggguggcuugcugca

SEQ ID NO: 3092206 - RNA, 13 nt, Molluscum contagiosum virus
aggaggagaacuc

SEQ ID NO: 3092207 - RNA, 13 nt, Molluscum contagiosum virus
cgcaggagcaguc

SEQ ID NO: 3092208 - RNA, 15 nt, Molluscum contagiosum virus
gccuucuugcuggcg

SEQ ID NO: 3092209 - RNA, 15 nt, Molluscum contagiosum virus
aggcagugcuugagc

SEQ ID NO: 3092210 - RNA, 15 nt, Molluscum contagiosum virus
gccuucguggagccc

SEQ ID NO: 3092211 - RNA, 18 nt, Molluscum contagiosum virus
gaauccuuuacugcaaga

SEQ ID NO: 3092212 - RNA, 13 nt, Molluscum contagiosum virus
gccagccaggcgc

SEQ ID NO: 3092213 - RNA, 12 nt, Molluscum contagiosum virus
gaagcugcacgu

SEQ ID NO: 3092214 - RNA, 13 nt, Molluscum contagiosum virus
cagccucuacucc

SEQ ID NO: 3092215 - RNA, 22 nt, Molluscum contagiosum virus
gcacgcgaugagcgucucggug

SEQ ID NO: 3092216 - RNA, 15 nt, Molluscum contagiosum virus
aggaacugcccgcgu

SEQ ID NO: 3092217 - RNA, 21 nt, Molluscum contagiosum virus
cccgcggcgcgcagcucgccg

SEQ ID NO: 3092218 - RNA, 17 nt, Molluscum contagiosum virus
gccucccccgcgcacug

SEQ ID NO: 3092219 - RNA, 15 nt, Molluscum contagiosum virus
acccucagaccagag

SEQ ID NO: 3092220 - RNA, 17 nt, Molluscum contagiosum virus
aucgucacgugaacucc

SEQ ID NO: 3092221 - RNA, 19 nt, Molluscum contagiosum virus
gcgagcaggcgcaggccgc

SEQ ID NO: 3092222 - RNA, 23 nt, Molluscum contagiosum virus
ccagcgugacaaucucugcgccg

SEQ ID NO: 3092223 - RNA, 22 nt, Molluscum contagiosum virus
cacggccuucgcgcugcccgcg

SEQ ID NO: 3092224 - RNA, 13 nt, Molluscum contagiosum virus
cgcgccugcucuc

SEQ ID NO: 3092225 - RNA, 23 nt, Molluscum contagiosum virus
ggcccuucuugacgcgagacugu

SEQ ID NO: 3092226 - RNA, 20 nt, Molluscum contagiosum virus
uagcagcgugcgcaccagcu

SEQ ID NO: 3092227 - RNA, 17 nt, Molluscum contagiosum virus
uccaggcgccgcaccuc

SEQ ID NO: 3092228 - RNA, 15 nt, Molluscum contagiosum virus
gcgagcgcgucugcu

SEQ ID NO: 3092229 - RNA, 21 nt, Molluscum contagiosum virus
caggucaucgacgagcacgag

SEQ ID NO: 3092230 - RNA, 20 nt, Molluscum contagiosum virus
cgcgggccuguccgcgggcg

SEQ ID NO: 3092231 - RNA, 11 nt, Molluscum contagiosum virus
aucaugagcca

SEQ ID NO: 3092232 - RNA, 18 nt, Molluscum contagiosum virus
uagacuggcuucggggac

SEQ ID NO: 3092233 - RNA, 24 nt, Molluscum contagiosum virus
uugugaugauuugauggcugcuca

SEQ ID NO: 3092234 - RNA, 17 nt, Molluscum contagiosum virus
uggcgaucugcucgcag

SEQ ID NO: 3092235 - RNA, 18 nt, Molluscum contagiosum virus
caccgcaugggcccuggc

SEQ ID NO: 3092236 - RNA, 17 nt, Molluscum contagiosum virus
gacuuguguugagccuu

SEQ ID NO: 3092237 - RNA, 15 nt, Molluscum contagiosum virus
ggcggugggcgccgc

SEQ ID NO: 3092238 - RNA, 15 nt, Molluscum contagiosum virus
gcugcgcgcccaggc

SEQ ID NO: 3092239 - RNA, 18 nt, Molluscum contagiosum virus
cgcagggacgcgcuuuuc

SEQ ID NO: 3092240 - RNA, 12 nt, Molluscum contagiosum virus
ccccgccagcac

SEQ ID NO: 3092241 - RNA, 18 nt, Molluscum contagiosum virus
acuuccgcgcgcucuugc

SEQ ID NO: 3092242 - RNA, 23 nt, Molluscum contagiosum virus
ccgcaguuggucaccgccuguac

SEQ ID NO: 3092243 - RNA, 17 nt, Molluscum contagiosum virus
caguaaauagccaugcu

SEQ ID NO: 3092244 - RNA, 14 nt, Molluscum contagiosum virus
ccccugucgcgcac

SEQ ID NO: 3092245 - RNA, 16 nt, Molluscum contagiosum virus
cgcaccgccuggugcu

SEQ ID NO: 3092246 - RNA, 17 nt, Molluscum contagiosum virus
ccugugaacgcaccgcc

SEQ ID NO: 3092247 - RNA, 23 nt, Molluscum contagiosum virus
cccucccugguaguccugcuagc

SEQ ID NO: 3092248 - RNA, 16 nt, Molluscum contagiosum virus
guuggcccgcaaacac

SEQ ID NO: 3092249 - RNA, 18 nt, Molluscum contagiosum virus
acucuuguuuguuguccc

SEQ ID NO: 3092250 - RNA, 14 nt, Molluscum contagiosum virus
ccuuuacugcaaga

SEQ ID NO: 3092251 - RNA, 19 nt, Molluscum contagiosum virus
uccgcgcggcgcucugcca

SEQ ID NO: 3092252 - RNA, 22 nt, Molluscum contagiosum virus
caccgcgacaugccucgcggcc

SEQ ID NO: 3092253 - RNA, 22 nt, Molluscum contagiosum virus
gcagccuccgaacaaugaggag

SEQ ID NO: 3092254 - RNA, 13 nt, Molluscum contagiosum virus
ccaucguggugga

SEQ ID NO: 3092255 - RNA, 14 nt, Molluscum contagiosum virus
cuccgcgggcagcc

SEQ ID NO: 3092256 - RNA, 17 nt, Molluscum contagiosum virus
ugugggucucgagccgc

SEQ ID NO: 3092257 - RNA, 20 nt, Molluscum contagiosum virus
gcuuggacuccgaggcaggu

SEQ ID NO: 3092258 - RNA, 13 nt, Molluscum contagiosum virus
acgcucacggccu

SEQ ID NO: 3092259 - RNA, 16 nt, Molluscum contagiosum virus
ugccggcgcgugagcg

SEQ ID NO: 3092260 - RNA, 19 nt, Molluscum contagiosum virus
cccgcgcgcgagcuggagc

SEQ ID NO: 3092261 - RNA, 17 nt, Molluscum contagiosum virus
cgcguucuccaggaacg

SEQ ID NO: 3092262 - RNA, 22 nt, Molluscum contagiosum virus
gaacaguaacugcugcagugug

SEQ ID NO: 3092263 - RNA, 21 nt, Molluscum contagiosum virus
uuguccgcggacgcgggccug

SEQ ID NO: 3092264 - RNA, 21 nt, Molluscum contagiosum virus
guacaugcccggccucgccuc

SEQ ID NO: 3092265 - RNA, 16 nt, Molluscum contagiosum virus
cuucaaguuccuggag

SEQ ID NO: 3092266 - RNA, 13 nt, Molluscum contagiosum virus
cggagcugugcca

SEQ ID NO: 3092267 - RNA, 16 nt, Molluscum contagiosum virus
gcgcgagugcaaggag

SEQ ID NO: 3092268 - RNA, 12 nt, Molluscum contagiosum virus
cagcagcugcuc

SEQ ID NO: 3092269 - RNA, 15 nt, Molluscum contagiosum virus
cgugcaccucaagaa

SEQ ID NO: 3092270 - RNA, 15 nt, Molluscum contagiosum virus
agcggagaaaaggaa

SEQ ID NO: 3092271 - RNA, 21 nt, Molluscum contagiosum virus
ggcgcucggcguggugcuggc

SEQ ID NO: 3092272 - RNA, 19 nt, Molluscum contagiosum virus
gucacugcuagugcuggcc

SEQ ID NO: 3092273 - RNA, 14 nt, Molluscum contagiosum virus
ggcgucgcgcacag

SEQ ID NO: 3092274 - RNA, 11 nt, Molluscum contagiosum virus
ugcugcagcuc

SEQ ID NO: 3092275 - RNA, 20 nt, Molluscum contagiosum virus
gcucuacggcgugcugugcc

SEQ ID NO: 3092276 - RNA, 15 nt, Molluscum contagiosum virus
ugaaggcgcggcuac

SEQ ID NO: 3092277 - RNA, 13 nt, Molluscum contagiosum virus
aggacgcgugcaa

SEQ ID NO: 3092278 - RNA, 19 nt, Molluscum contagiosum virus
gguccugcgcgguggcuua

SEQ ID NO: 3092279 - RNA, 17 nt, Molluscum contagiosum virus
caggcgccgcaccucac

SEQ ID NO: 3092280 - RNA, 17 nt, Molluscum contagiosum virus
gcucauacuccugcugg

SEQ ID NO: 3092281 - RNA, 14 nt, Molluscum contagiosum virus
gugccgccgugggc

SEQ ID NO: 3092282 - RNA, 19 nt, Molluscum contagiosum virus
uacugcugcaggcaaagcg

SEQ ID NO: 3092283 - RNA, 21 nt, Molluscum contagiosum virus
agccgcuccuggucuucccgc

SEQ ID NO: 3092284 - RNA, 12 nt, Molluscum contagiosum virus
ggccgcuccaga

SEQ ID NO: 3092285 - RNA, 16 nt, Molluscum contagiosum virus
gccagcaccaugcgug

SEQ ID NO: 3092286 - RNA, 18 nt, Molluscum contagiosum virus
cgcacgcggaaacaagca

SEQ ID NO: 3092287 - RNA, 18 nt, Molluscum contagiosum virus
agagcccgccgggcaccg

SEQ ID NO: 3092288 - RNA, 14 nt, Molluscum contagiosum virus
gcgagcgcgccccc

SEQ ID NO: 3092289 - RNA, 20 nt, Molluscum contagiosum virus
ugcgcaacgcgggccaggca

SEQ ID NO: 3092290 - RNA, 15 nt, Molluscum contagiosum virus
cggccuuagugccgu

SEQ ID NO: 3092291 - RNA, 18 nt, Molluscum contagiosum virus
gcuuggugcgcucgagcu

SEQ ID NO: 3092292 - RNA, 19 nt, Molluscum contagiosum virus
ugccuuucgaguccccaga

SEQ ID NO: 3092293 - RNA, 21 nt, Molluscum contagiosum virus
accgcgcgaacgaggagggca

SEQ ID NO: 3092294 - RNA, 23 nt, Molluscum contagiosum virus
cacgagcgaguugagcaggucgg

SEQ ID NO: 3092295 - RNA, 13 nt, Molluscum contagiosum virus
gucaugugcgugg

SEQ ID NO: 3092296 - RNA, 13 nt, Molluscum contagiosum virus
cgcacggcuaggc

SEQ ID NO: 3092297 - RNA, 15 nt, Molluscum contagiosum virus
gucgcaaccccgcgc

SEQ ID NO: 3092298 - RNA, 17 nt, Molluscum contagiosum virus
caucucgauggcgccgu

SEQ ID NO: 3092299 - RNA, 15 nt, Molluscum contagiosum virus
cugcgccgccagcgu

SEQ ID NO: 3092300 - RNA, 13 nt, Molluscum contagiosum virus
gcaagcauggucu

SEQ ID NO: 3092301 - RNA, 14 nt, Molluscum contagiosum virus
gcgugcugggcccc

SEQ ID NO: 3092302 - RNA, 19 nt, Molluscum contagiosum virus
gccgcgugcaugcccagca

SEQ ID NO: 3092303 - RNA, 16 nt, Molluscum contagiosum virus
agcagugccagcagcc

SEQ ID NO: 3092304 - RNA, 15 nt, Molluscum contagiosum virus
uggcgcgcgagcugc

SEQ ID NO: 3092305 - RNA, 16 nt, Molluscum contagiosum virus
cgugcucguguguccg

SEQ ID NO: 3092306 - RNA, 14 nt, Molluscum contagiosum virus
cggcuucugcugca

SEQ ID NO: 3092307 - RNA, 15 nt, Molluscum contagiosum virus
gcaacgucgcacugg

SEQ ID NO: 3092308 - RNA, 17 nt, Molluscum contagiosum virus
gacccaucggagaagug

SEQ ID NO: 3092309 - RNA, 19 nt, Molluscum contagiosum virus
cauccugccacaccagcug

SEQ ID NO: 3092310 - RNA, 14 nt, Molluscum contagiosum virus
ggcaugcuugaggc

SEQ ID NO: 3092311 - RNA, 17 nt, Molluscum contagiosum virus
uggcuucggggacacaa

SEQ ID NO: 3092312 - RNA, 19 nt, Molluscum contagiosum virus
caagggacugcgcccgugc

SEQ ID NO: 3092313 - RNA, 14 nt, Molluscum contagiosum virus
gcgccgcgugcaug

SEQ ID NO: 3092314 - RNA, 16 nt, Molluscum contagiosum virus
auguugcucuaccugg

SEQ ID NO: 3092315 - RNA, 14 nt, Molluscum contagiosum virus
gcagaccccuugcu

SEQ ID NO: 3092316 - RNA, 16 nt, Molluscum contagiosum virus
acggcccaccuucuug

SEQ ID NO: 3092317 - RNA, 13 nt, Molluscum contagiosum virus
gcgcgccugcugg

SEQ ID NO: 3092318 - RNA, 13 nt, Molluscum contagiosum virus
gcacgagcugcug

SEQ ID NO: 3092319 - RNA, 17 nt, Molluscum contagiosum virus
cgcaugcacagccgcuu

SEQ ID NO: 3092320 - RNA, 13 nt, Molluscum contagiosum virus
agcaguaguugcu

SEQ ID NO: 3092321 - RNA, 19 nt, Molluscum contagiosum virus
ucaagcuggcaacgcagau

SEQ ID NO: 3092322 - RNA, 21 nt, Molluscum contagiosum virus
aacgcaaguacaacccaaaca

SEQ ID NO: 3092323 - RNA, 21 nt, Molluscum contagiosum virus
cagaguccgacccgugcugcu

SEQ ID NO: 3092324 - RNA, 21 nt, Molluscum contagiosum virus
cagcagcgcgacuagccugug

SEQ ID NO: 3092325 - RNA, 23 nt, Molluscum contagiosum virus
cucgagccugccagcgccagccu

SEQ ID NO: 3092326 - RNA, 21 nt, Molluscum contagiosum virus
cgcuguuuggaauugugcugc

SEQ ID NO: 3092327 - RNA, 20 nt, Molluscum contagiosum virus
gcuuuuugccgcucacagcu

SEQ ID NO: 3092328 - RNA, 14 nt, Molluscum contagiosum virus
gaagaccaccagca

SEQ ID NO: 3092329 - RNA, 17 nt, Molluscum contagiosum virus
ugcguguuggcuucugc

SEQ ID NO: 3092330 - RNA, 23 nt, Molluscum contagiosum virus
agcugcucaucggcgagcucuuu

SEQ ID NO: 3092331 - RNA, 13 nt, Molluscum contagiosum virus
uacccgcaggaaa

SEQ ID NO: 3092332 - RNA, 21 nt, Molluscum contagiosum virus
aagaacagucgcgcgccugcc

SEQ ID NO: 3092333 - RNA, 17 nt, Molluscum contagiosum virus
auucucucgagagacaa

SEQ ID NO: 3092334 - RNA, 19 nt, Molluscum contagiosum virus
ugcuuugugcgucucccag

SEQ ID NO: 3092335 - RNA, 19 nt, Molluscum contagiosum virus
agcgccgucucgcggaaga

SEQ ID NO: 3092336 - RNA, 16 nt, Molluscum contagiosum virus
guccccgaacugcugg

SEQ ID NO: 3092337 - RNA, 20 nt, Molluscum contagiosum virus
guccgcacgcacggagcaca

SEQ ID NO: 3092338 - RNA, 14 nt, Molluscum contagiosum virus
cagcgugccgcggc

SEQ ID NO: 3092339 - RNA, 17 nt, Molluscum contagiosum virus
cgcgugacuaccuugug

SEQ ID NO: 3092340 - RNA, 17 nt, Molluscum contagiosum virus
ucuuucacgcugcacga

SEQ ID NO: 3092341 - RNA, 14 nt, Molluscum contagiosum virus
uggcaaaggcaggg

SEQ ID NO: 3092342 - RNA, 22 nt, Molluscum contagiosum virus
gcuugaaggacgcguucuccag

SEQ ID NO: 3092343 - RNA, 20 nt, Molluscum contagiosum virus
uggcgcccuuuggcuagcac

SEQ ID NO: 3092344 - RNA, 19 nt, Molluscum contagiosum virus
ugcgcgcugcgggcgccgg

SEQ ID NO: 3092345 - RNA, 24 nt, Molluscum contagiosum virus
gccauggaggcgcuagugcagaug

SEQ ID NO: 3092346 - RNA, 20 nt, Molluscum contagiosum virus
cacgccgggaaacgcacagc

SEQ ID NO: 3092347 - RNA, 19 nt, Molluscum contagiosum virus
ccuggagggcagugccaag

SEQ ID NO: 3092348 - RNA, 15 nt, Molluscum contagiosum virus
agccagacgcagagc

SEQ ID NO: 3092349 - RNA, 22 nt, Molluscum contagiosum virus
gccaggcuaggcgcgacugcac

SEQ ID NO: 3092350 - RNA, 15 nt, Molluscum contagiosum virus
uguguuuugugccug

SEQ ID NO: 3092351 - RNA, 14 nt, Molluscum contagiosum virus
gcgcccaaggccgc

SEQ ID NO: 3092352 - RNA, 20 nt, Molluscum contagiosum virus
gcguccggcgcuugccccuc

SEQ ID NO: 3092353 - RNA, 19 nt, Molluscum contagiosum virus
ccugucgcgcacgagcgcg

SEQ ID NO: 3092354 - RNA, 20 nt, Molluscum contagiosum virus
cgagcacguggacagcaucc

SEQ ID NO: 3092355 - RNA, 23 nt, Molluscum contagiosum virus
acuggcaaugagggcgaggccgc

SEQ ID NO: 3092356 - RNA, 16 nt, Molluscum contagiosum virus
ccgugccuggcagugc

SEQ ID NO: 3092357 - RNA, 19 nt, Molluscum contagiosum virus
ucgaacaccuccugcuuug

SEQ ID NO: 3092358 - RNA, 14 nt, Molluscum contagiosum virus
cuguaccuggugcg

SEQ ID NO: 3092359 - RNA, 21 nt, Molluscum contagiosum virus
ggggaaugaucgacucgagca

SEQ ID NO: 3092360 - RNA, 21 nt, Molluscum contagiosum virus
gagcaagcgagagaggaguga

SEQ ID NO: 3092361 - RNA, 14 nt, Molluscum contagiosum virus
cuccgggcgcacaa

SEQ ID NO: 3092362 - RNA, 22 nt, Molluscum contagiosum virus
agcuggagcugccgcugcgcga

SEQ ID NO: 3092363 - RNA, 19 nt, Molluscum contagiosum virus
ccgccggugcgugcccagc

SEQ ID NO: 3092364 - RNA, 21 nt, Molluscum contagiosum virus
cagagaaaggcacccaccagg

SEQ ID NO: 3092365 - RNA, 17 nt, Molluscum contagiosum virus
gguucccggugcugcug

SEQ ID NO: 3092366 - RNA, 15 nt, Molluscum contagiosum virus
gcccgcggcgcacgg

SEQ ID NO: 3092367 - RNA, 16 nt, Molluscum contagiosum virus
auguagaacgccagga

SEQ ID NO: 3092368 - RNA, 19 nt, Molluscum contagiosum virus
cuagcagcgugcgcaccag

SEQ ID NO: 3092369 - RNA, 18 nt, Molluscum contagiosum virus
ggcgcguuuucgcggccu

SEQ ID NO: 3092370 - RNA, 22 nt, Molluscum contagiosum virus
uccuggcucgcgagugugcaug

SEQ ID NO: 3092371 - RNA, 22 nt, Molluscum contagiosum virus
guacggcccgaaggccaccucg

SEQ ID NO: 3092372 - RNA, 20 nt, Molluscum contagiosum virus
acucgcgcgcgccgggccgc

SEQ ID NO: 3092373 - RNA, 11 nt, Molluscum contagiosum virus
acagcaucccu

SEQ ID NO: 3092374 - RNA, 15 nt, Molluscum contagiosum virus
gagcacuuuggccuc

SEQ ID NO: 3092375 - RNA, 16 nt, Molluscum contagiosum virus
gccacgauggccggca

SEQ ID NO: 3092376 - RNA, 20 nt, Molluscum contagiosum virus
aaacgcacagccccugcugc

SEQ ID NO: 3092377 - RNA, 18 nt, Molluscum contagiosum virus
caaggaaaggcacccgca

SEQ ID NO: 3092378 - RNA, 19 nt, Molluscum contagiosum virus
ggccuucuaccacagguuu

SEQ ID NO: 3092379 - RNA, 20 nt, Molluscum contagiosum virus
augcucaagcaccugcgcuu

SEQ ID NO: 3092380 - RNA, 16 nt, Molluscum contagiosum virus
ggcacugcguacacau

SEQ ID NO: 3092381 - RNA, 23 nt, Molluscum contagiosum virus
gagcaagcgagagaggagugaag

SEQ ID NO: 3092382 - RNA, 17 nt, Molluscum contagiosum virus
gccgugcgcgcacacga

SEQ ID NO: 3092383 - RNA, 14 nt, Molluscum contagiosum virus
gcgcggagcucgcg

SEQ ID NO: 3092384 - RNA, 23 nt, Molluscum contagiosum virus
ggcugcccgcggagaccaccgcu

SEQ ID NO: 3092385 - RNA, 16 nt, Molluscum contagiosum virus
uuccggccuguaaaug

SEQ ID NO: 3092386 - RNA, 17 nt, Molluscum contagiosum virus
gcaaagcggggcgcgcg

SEQ ID NO: 3092387 - RNA, 14 nt, Molluscum contagiosum virus
ccagcgccagccug

SEQ ID NO: 3092388 - RNA, 18 nt, Molluscum contagiosum virus
cagcucgaugggcuccag

SEQ ID NO: 3092389 - RNA, 18 nt, Molluscum contagiosum virus
ccgcccgcggacucgugc

SEQ ID NO: 3092390 - RNA, 19 nt, Molluscum contagiosum virus
cucgccaaagcgcgccuuc

SEQ ID NO: 3092391 - RNA, 15 nt, Molluscum contagiosum virus
cgccguuggccaccu

SEQ ID NO: 3092392 - RNA, 14 nt, Molluscum contagiosum virus
cgcggucgggcccc

SEQ ID NO: 3092393 - RNA, 14 nt, Molluscum contagiosum virus
gacgccuuccugcu

SEQ ID NO: 3092394 - RNA, 17 nt, Molluscum contagiosum virus
ccucgagcacgccucca

SEQ ID NO: 3092395 - RNA, 17 nt, Molluscum contagiosum virus
ugagaggaccucccggc

SEQ ID NO: 3092396 - RNA, 17 nt, Molluscum contagiosum virus
gcucagccucuacucca

SEQ ID NO: 3092397 - RNA, 20 nt, Molluscum contagiosum virus
gccaucucgcacacugcagc

SEQ ID NO: 3092398 - RNA, 17 nt, Molluscum contagiosum virus
gcucugauuacauccug

SEQ ID NO: 3092399 - RNA, 19 nt, Molluscum contagiosum virus
cucgaacuccaggcgcacc

SEQ ID NO: 3092400 - RNA, 19 nt, Molluscum contagiosum virus
ggcuggaccugcgccagcg

SEQ ID NO: 3092401 - RNA, 16 nt, Molluscum contagiosum virus
cugguggagcacuucc

SEQ ID NO: 3092402 - RNA, 21 nt, Molluscum contagiosum virus
caugucgagaccuuccuccag

SEQ ID NO: 3092403 - RNA, 13 nt, Molluscum contagiosum virus
ccuguucuuccag

SEQ ID NO: 3092404 - RNA, 16 nt, Molluscum contagiosum virus
cacaguucacggcgcu

SEQ ID NO: 3092405 - RNA, 17 nt, Molluscum contagiosum virus
agcgacuacgcgcugcu

SEQ ID NO: 3092406 - RNA, 22 nt, Molluscum contagiosum virus
cggcgccccuccuaucucaaag

SEQ ID NO: 3092407 - RNA, 12 nt, Molluscum contagiosum virus
cgggaagcugca

SEQ ID NO: 3092408 - RNA, 19 nt, Molluscum contagiosum virus
cggcucaccgcgcagaagc

SEQ ID NO: 3092409 - RNA, 18 nt, Molluscum contagiosum virus
ggauacagcgcggagaga

SEQ ID NO: 3092410 - RNA, 15 nt, Molluscum contagiosum virus
gugguccaccagcac

SEQ ID NO: 3092411 - RNA, 20 nt, Molluscum contagiosum virus
gagaagcaaugcgcaaggcc

SEQ ID NO: 3092412 - RNA, 21 nt, Molluscum contagiosum virus
gagcaauggcggccugcccug

SEQ ID NO: 3092413 - RNA, 23 nt, Molluscum contagiosum virus
cggcgcgccgcgggccgccgggc

SEQ ID NO: 3092414 - RNA, 21 nt, Molluscum contagiosum virus
ugcagagcaaggcgagucaau

SEQ ID NO: 3092415 - RNA, 22 nt, Molluscum contagiosum virus
cagggcccgcgcucgccgcacg

SEQ ID NO: 3092416 - RNA, 17 nt, Molluscum contagiosum virus
ccgugcucaggccagca

SEQ ID NO: 3092417 - RNA, 18 nt, Molluscum contagiosum virus
gcugcaagauuguagaga

SEQ ID NO: 3092418 - RNA, 15 nt, Molluscum contagiosum virus
cauuccuuguccugg

SEQ ID NO: 3092419 - RNA, 22 nt, Molluscum contagiosum virus
ccuguucggcaugcagcgcagg

SEQ ID NO: 3092420 - RNA, 14 nt, Molluscum contagiosum virus
ucaccagccugcuc

SEQ ID NO: 3092421 - RNA, 18 nt, Molluscum contagiosum virus
gccucagccgagcgccgc

SEQ ID NO: 3092422 - RNA, 13 nt, Molluscum contagiosum virus
ucaagaagaacaa

SEQ ID NO: 3092423 - RNA, 20 nt, Molluscum contagiosum virus
gagcagguucucgcacagua

SEQ ID NO: 3092424 - RNA, 13 nt, Molluscum contagiosum virus
gagugcugagcca

SEQ ID NO: 3092425 - RNA, 21 nt, Molluscum contagiosum virus
cuugauuucgcgcagcaggca

SEQ ID NO: 3092426 - RNA, 17 nt, Molluscum contagiosum virus
gccgcgcuucgagcacg

SEQ ID NO: 3092427 - RNA, 13 nt, Molluscum contagiosum virus
cggccgcggacca

SEQ ID NO: 3092428 - RNA, 16 nt, Molluscum contagiosum virus
ccucccaagcagcgcg

SEQ ID NO: 3092429 - RNA, 14 nt, Molluscum contagiosum virus
ccuucuugcuggcg

SEQ ID NO: 3092430 - RNA, 22 nt, Molluscum contagiosum virus
ggcucgcucaucaccgacacgc

SEQ ID NO: 3092431 - RNA, 17 nt, Molluscum contagiosum virus
gagcuccgcgcaugcca

SEQ ID NO: 3092432 - RNA, 15 nt, Molluscum contagiosum virus
ggcgacacggagacg

SEQ ID NO: 3092433 - RNA, 21 nt, Molluscum contagiosum virus
ucuucgggaaggaacaaugcu

SEQ ID NO: 3092434 - RNA, 12 nt, Molluscum contagiosum virus
gaggugugccug

SEQ ID NO: 3092435 - RNA, 18 nt, Molluscum contagiosum virus
ggugugcacaugcccgug

SEQ ID NO: 3092436 - RNA, 12 nt, Molluscum contagiosum virus
gagagccuucgu

SEQ ID NO: 3092437 - RNA, 13 nt, Molluscum contagiosum virus
uccggagccaagc

SEQ ID NO: 3092438 - RNA, 18 nt, Molluscum contagiosum virus
accucaccgcgcacaucu

SEQ ID NO: 3092439 - RNA, 21 nt, Molluscum contagiosum virus
ucccgcggccgccacuguugc

SEQ ID NO: 3092440 - RNA, 21 nt, Molluscum contagiosum virus
cugcugcacagcuuccuggag

SEQ ID NO: 3092441 - RNA, 16 nt, Molluscum contagiosum virus
gaaaucgcaaagcacg

SEQ ID NO: 3092442 - RNA, 16 nt, Molluscum contagiosum virus
cgcugggccgcaugca

SEQ ID NO: 3092443 - RNA, 18 nt, Molluscum contagiosum virus
gcaccgcaugggcccugg

SEQ ID NO: 3092444 - RNA, 14 nt, Molluscum contagiosum virus
cccacugugccagc

SEQ ID NO: 3092445 - RNA, 21 nt, Molluscum contagiosum virus
cggccgggaucggacgcagac

SEQ ID NO: 3092446 - RNA, 17 nt, Molluscum contagiosum virus
uacacgcacgaccucac

SEQ ID NO: 3092447 - RNA, 20 nt, Molluscum contagiosum virus
cgcccgccagcauggcgagc

SEQ ID NO: 3092448 - RNA, 19 nt, Molluscum contagiosum virus
cucgcuggugugcacugau

SEQ ID NO: 3092449 - RNA, 15 nt, Molluscum contagiosum virus
uggacgugcugcugg

SEQ ID NO: 3092450 - RNA, 21 nt, Molluscum contagiosum virus
gaacagagaaaggcacccacc

SEQ ID NO: 3092451 - RNA, 15 nt, Molluscum contagiosum virus
cgccggcucugccuc

SEQ ID NO: 3092452 - RNA, 16 nt, Molluscum contagiosum virus
ggcucaagucgcccuu

SEQ ID NO: 3092453 - RNA, 22 nt, Molluscum contagiosum virus
ccguguauccaagaggccguca

SEQ ID NO: 3092454 - RNA, 22 nt, Molluscum contagiosum virus
cuccggcgucgaaacacugcgg

SEQ ID NO: 3092455 - RNA, 13 nt, Molluscum contagiosum virus
aucagagaagugc

SEQ ID NO: 3092456 - RNA, 17 nt, Molluscum contagiosum virus
gagacgugcggcacgcu

SEQ ID NO: 3092457 - RNA, 18 nt, Molluscum contagiosum virus
cgggcugcgcggcggugu

SEQ ID NO: 3092458 - RNA, 18 nt, Molluscum contagiosum virus
cggaauuccuugugcaau

SEQ ID NO: 3092459 - RNA, 20 nt, Molluscum contagiosum virus
ccgacccaucggagaagugc

SEQ ID NO: 3092460 - RNA, 14 nt, Molluscum contagiosum virus
ggacagcggaagaa

SEQ ID NO: 3092461 - RNA, 14 nt, Molluscum contagiosum virus
ugcgagcggcgcgc

SEQ ID NO: 3092462 - RNA, 14 nt, Molluscum contagiosum virus
cucuaccuggugcu

SEQ ID NO: 3092463 - RNA, 23 nt, Molluscum contagiosum virus
ucaguuuuguccuccccacgaga

SEQ ID NO: 3092464 - RNA, 14 nt, Molluscum contagiosum virus
gugguccaccagcu

SEQ ID NO: 3092465 - RNA, 18 nt, Molluscum contagiosum virus
cgcaaggaaaacugcauc

SEQ ID NO: 3092466 - RNA, 20 nt, Molluscum contagiosum virus
cagguagugguccaccagcu

SEQ ID NO: 3092467 - RNA, 16 nt, Molluscum contagiosum virus
gcacaagauggcgcag

SEQ ID NO: 3092468 - RNA, 22 nt, Molluscum contagiosum virus
cugcgcccgcaaaccuuggccc

SEQ ID NO: 3092469 - RNA, 23 nt, Molluscum contagiosum virus
cugagaggaccucccggcggcaa

SEQ ID NO: 3092470 - RNA, 16 nt, Molluscum contagiosum virus
cagacgcagagccaug

SEQ ID NO: 3092471 - RNA, 15 nt, Molluscum contagiosum virus
acggacccgcgaacg

SEQ ID NO: 3092472 - RNA, 18 nt, Molluscum contagiosum virus
caacguggcgcugaccuc

SEQ ID NO: 3092473 - RNA, 15 nt, Molluscum contagiosum virus
gcacggccggcgccg

SEQ ID NO: 3092474 - RNA, 16 nt, Molluscum contagiosum virus
gagcgaguugagcagg

SEQ ID NO: 3092475 - RNA, 16 nt, Molluscum contagiosum virus
acaguggcugugcgcc

SEQ ID NO: 3092476 - RNA, 13 nt, Molluscum contagiosum virus
cacaugugcugcc

SEQ ID NO: 3092477 - RNA, 13 nt, Molluscum contagiosum virus
uguacuugcuucc

SEQ ID NO: 3092478 - RNA, 22 nt, Molluscum contagiosum virus
ccugccgcgagcacuggcuggc

SEQ ID NO: 3092479 - RNA, 15 nt, Molluscum contagiosum virus
gcacauucucaacca

SEQ ID NO: 3092480 - RNA, 17 nt, Molluscum contagiosum virus
gugcauacgcagaggcg

SEQ ID NO: 3092481 - RNA, 17 nt, Molluscum contagiosum virus
guccgagccggacgcgc

SEQ ID NO: 3092482 - RNA, 15 nt, Molluscum contagiosum virus
cugcucgugcugcuc

SEQ ID NO: 3092483 - RNA, 15 nt, Molluscum contagiosum virus
cucgucgccgggccc

SEQ ID NO: 3092484 - RNA, 19 nt, Molluscum contagiosum virus
ccucgccaaagaggacgug

SEQ ID NO: 3092485 - RNA, 18 nt, Molluscum contagiosum virus
gccgucgcgagcuuggcc

SEQ ID NO: 3092486 - RNA, 16 nt, Molluscum contagiosum virus
cuugagcaccaagaag

SEQ ID NO: 3092487 - RNA, 17 nt, Molluscum contagiosum virus
gcgcgaguacaagcucg

SEQ ID NO: 3092488 - RNA, 14 nt, Molluscum contagiosum virus
ugcgcacagacggc

SEQ ID NO: 3092489 - RNA, 15 nt, Molluscum contagiosum virus
gccugccaucuacga

SEQ ID NO: 3092490 - RNA, 17 nt, Molluscum contagiosum virus
gcuggccgugcccgccg

SEQ ID NO: 3092491 - RNA, 18 nt, Molluscum contagiosum virus
gagacgugcggcacgcug

SEQ ID NO: 3092492 - RNA, 23 nt, Molluscum contagiosum virus
gccggcguucacggacucgagcc

SEQ ID NO: 3092493 - RNA, 21 nt, Molluscum contagiosum virus
ugcgcgucaugcgacugccag

SEQ ID NO: 3092494 - RNA, 19 nt, Molluscum contagiosum virus
ccgaugugagcaagcugca

SEQ ID NO: 3092495 - RNA, 15 nt, Molluscum contagiosum virus
uguugcguagagcaa

SEQ ID NO: 3092496 - RNA, 21 nt, Molluscum contagiosum virus
agacuuucugcagucagauug

SEQ ID NO: 3092497 - RNA, 22 nt, Molluscum contagiosum virus
gccaggcacacgcagugccacg

SEQ ID NO: 3092498 - RNA, 15 nt, Molluscum contagiosum virus
uggaaggcgaccagc

SEQ ID NO: 3092499 - RNA, 17 nt, Molluscum contagiosum virus
cugcacgacguacgagu

SEQ ID NO: 3092500 - RNA, 18 nt, Molluscum contagiosum virus
cggcaagccgugcuuugc

SEQ ID NO: 3092501 - RNA, 16 nt, Molluscum contagiosum virus
uguucuggucuggaaa

SEQ ID NO: 3092502 - RNA, 17 nt, Molluscum contagiosum virus
ccgcgggcgcagagccu

SEQ ID NO: 3092503 - RNA, 20 nt, Molluscum contagiosum virus
ggucguguacacgccgggaa

SEQ ID NO: 3092504 - RNA, 19 nt, Molluscum contagiosum virus
guccgcggacgcgggccug

SEQ ID NO: 3092505 - RNA, 17 nt, Molluscum contagiosum virus
gacaacucgcgggcaug

SEQ ID NO: 3092506 - RNA, 13 nt, Molluscum contagiosum virus
gcugcgcuaccac

SEQ ID NO: 3092507 - RNA, 18 nt, Molluscum contagiosum virus
agaaugacuuagccacug

SEQ ID NO: 3092508 - RNA, 17 nt, Molluscum contagiosum virus
ggcgcgaagcaggcgcc

SEQ ID NO: 3092509 - RNA, 17 nt, Molluscum contagiosum virus
gggaugcgcacacuugc

SEQ ID NO: 3092510 - RNA, 21 nt, Molluscum contagiosum virus
ggcggcacccgccgcggugcc

SEQ ID NO: 3092511 - RNA, 18 nt, Molluscum contagiosum virus
ucaaaggcaaagccugcu

SEQ ID NO: 3092512 - RNA, 21 nt, Molluscum contagiosum virus
gcgacuccuuugcgagcacug

SEQ ID NO: 3092513 - RNA, 21 nt, Molluscum contagiosum virus
cgugucacaauggcacuagcc

SEQ ID NO: 3092514 - RNA, 16 nt, Molluscum contagiosum virus
ccacuccgucgcgcuc

SEQ ID NO: 3092515 - RNA, 15 nt, Molluscum contagiosum virus
gaggacacgcgcacg

SEQ ID NO: 3092516 - RNA, 15 nt, Molluscum contagiosum virus
ugcgugcccagcagg

SEQ ID NO: 3092517 - RNA, 13 nt, Molluscum contagiosum virus
gcgcccgacucgc

SEQ ID NO: 3092518 - RNA, 21 nt, Molluscum contagiosum virus
ggaugaacaccauccugcgcu

SEQ ID NO: 3092519 - RNA, 17 nt, Molluscum contagiosum virus
gcgaacgccagaaaaca

SEQ ID NO: 3092520 - RNA, 23 nt, Molluscum contagiosum virus
gaaugacuuagccacugugcuga

SEQ ID NO: 3092521 - RNA, 15 nt, Molluscum contagiosum virus
ggacgcacagggcug

SEQ ID NO: 3092522 - RNA, 20 nt, Molluscum contagiosum virus
uggaccgguuccgugcgcuc

SEQ ID NO: 3092523 - RNA, 19 nt, Molluscum contagiosum virus
acgcgccucgagcagguca

SEQ ID NO: 3092524 - RNA, 22 nt, Molluscum contagiosum virus
cggcgccacgagcgccgcgacg

SEQ ID NO: 3092525 - RNA, 15 nt, Molluscum contagiosum virus
acgacggcugcucgc

SEQ ID NO: 3092526 - RNA, 16 nt, Molluscum contagiosum virus
ugcgcgugccucugcc

SEQ ID NO: 3092527 - RNA, 12 nt, Molluscum contagiosum virus
gucgcacuggcc

SEQ ID NO: 3092528 - RNA, 17 nt, Molluscum contagiosum virus
ggugcuggugcugguca

SEQ ID NO: 3092529 - RNA, 14 nt, Molluscum contagiosum virus
aagaccaccagcac

SEQ ID NO: 3092530 - RNA, 19 nt, Molluscum contagiosum virus
gggaacgaggaaaggcacc

SEQ ID NO: 3092531 - RNA, 22 nt, Molluscum contagiosum virus
gcuggcgcucggcguggugcug

SEQ ID NO: 3092532 - RNA, 19 nt, Molluscum contagiosum virus
caaggaaaggcaccugcag

SEQ ID NO: 3092533 - RNA, 19 nt, Molluscum contagiosum virus
gccuggccgaacugcucug

SEQ ID NO: 3092534 - RNA, 14 nt, Molluscum contagiosum virus
caccgcacgccagc

SEQ ID NO: 3092535 - RNA, 17 nt, Molluscum contagiosum virus
cggacgcgggccugucc

SEQ ID NO: 3092536 - RNA, 17 nt, Molluscum contagiosum virus
cugagccgcaagcacac

SEQ ID NO: 3092537 - RNA, 17 nt, Molluscum contagiosum virus
agcgccacgagcagugc

SEQ ID NO: 3092538 - RNA, 19 nt, Molluscum contagiosum virus
gcagagugaaucuugccug

SEQ ID NO: 3092539 - RNA, 18 nt, Molluscum contagiosum virus
ccgcaugggcccuggcgg

SEQ ID NO: 3092540 - RNA, 20 nt, Molluscum contagiosum virus
acccguggccgagccgcugg

SEQ ID NO: 3092541 - RNA, 18 nt, Molluscum contagiosum virus
gccugcacuacugcucca

SEQ ID NO: 3092542 - RNA, 18 nt, Molluscum contagiosum virus
gcacgcgaaguuccugca

SEQ ID NO: 3092543 - RNA, 16 nt, Molluscum contagiosum virus
augcgacugccagcca

SEQ ID NO: 3092544 - RNA, 14 nt, Molluscum contagiosum virus
aggcgcgugcccug

SEQ ID NO: 3092545 - RNA, 19 nt, Molluscum contagiosum virus
agcgguguugcuguuucca

SEQ ID NO: 3092546 - RNA, 21 nt, Molluscum contagiosum virus
cgugagagcaaagaaugcaug

SEQ ID NO: 3092547 - RNA, 16 nt, Molluscum contagiosum virus
gcgucaucgcugcacg

SEQ ID NO: 3092548 - RNA, 18 nt, Molluscum contagiosum virus
ggacacguugcagcagca

SEQ ID NO: 3092549 - RNA, 17 nt, Molluscum contagiosum virus
ucagcgcgcgcagcacc

SEQ ID NO: 3092550 - RNA, 15 nt, Molluscum contagiosum virus
cucgacaaugagcac

SEQ ID NO: 3092551 - RNA, 20 nt, Molluscum contagiosum virus
ucgggugcccggacagagcc

SEQ ID NO: 3092552 - RNA, 12 nt, Molluscum contagiosum virus
guugcugcugcc

SEQ ID NO: 3092553 - RNA, 20 nt, Molluscum contagiosum virus
agcuucgucuucaccugcau

SEQ ID NO: 3092554 - RNA, 12 nt, Molluscum contagiosum virus
cgagcucuccga

SEQ ID NO: 3092555 - RNA, 16 nt, Molluscum contagiosum virus
gucgugcaccuggagc

SEQ ID NO: 3092556 - RNA, 23 nt, Molluscum contagiosum virus
agugcuuugucgcaaccccgcgc

SEQ ID NO: 3092557 - RNA, 20 nt, Molluscum contagiosum virus
uccucuacaccagcuggacg

SEQ ID NO: 3092558 - RNA, 12 nt, Molluscum contagiosum virus
uaacaaggaaaa

SEQ ID NO: 3092559 - RNA, 20 nt, Molluscum contagiosum virus
uguuccguucgucagaggga

SEQ ID NO: 3092560 - RNA, 18 nt, Molluscum contagiosum virus
ccucgagaaagucaugcu

SEQ ID NO: 3092561 - RNA, 14 nt, Molluscum contagiosum virus
cggcgcgaaaaguc

SEQ ID NO: 3092562 - RNA, 13 nt, Molluscum contagiosum virus
aucgcgcugcugg

SEQ ID NO: 3092563 - RNA, 12 nt, Molluscum contagiosum virus
gagaaaggcacc

SEQ ID NO: 3092564 - RNA, 16 nt, Molluscum contagiosum virus
cucgucuugcgcgcca

SEQ ID NO: 3092565 - RNA, 23 nt, Molluscum contagiosum virus
ccuccgguuuucgcgggagcggc

SEQ ID NO: 3092566 - RNA, 20 nt, Molluscum contagiosum virus
cgcgggcgcgcgccagcagc

SEQ ID NO: 3092567 - RNA, 15 nt, Molluscum contagiosum virus
gcaauggcgcgcagc

SEQ ID NO: 3092568 - RNA, 20 nt, Molluscum contagiosum virus
gcucgaggaccucgcgcgcc

SEQ ID NO: 3092569 - RNA, 12 nt, Molluscum contagiosum virus
uggacacgugcg

SEQ ID NO: 3092570 - RNA, 17 nt, Molluscum contagiosum virus
ucgccgcgcgcgccagc

SEQ ID NO: 3092571 - RNA, 13 nt, Molluscum contagiosum virus
cgguacugcugca

SEQ ID NO: 3092572 - RNA, 14 nt, Molluscum contagiosum virus
aguaccugcugccg

SEQ ID NO: 3092573 - RNA, 11 nt, Molluscum contagiosum virus
gaaggcggcga

SEQ ID NO: 3092574 - RNA, 18 nt, Molluscum contagiosum virus
acacuugcacgcgcacgc

SEQ ID NO: 3092575 - RNA, 20 nt, Molluscum contagiosum virus
ccagugcgccucggacuucg

SEQ ID NO: 3092576 - RNA, 15 nt, Molluscum contagiosum virus
gcccggcgcccgcag

SEQ ID NO: 3092577 - RNA, 12 nt, Molluscum contagiosum virus
cggccuggccac

SEQ ID NO: 3092578 - RNA, 15 nt, Molluscum contagiosum virus
gcgagcgcgcgcugc

SEQ ID NO: 3092579 - RNA, 17 nt, Molluscum contagiosum virus
gcuucgccgcgcgcgcc

SEQ ID NO: 3092580 - RNA, 13 nt, Molluscum contagiosum virus
agcgcuggagcug

SEQ ID NO: 3092581 - RNA, 22 nt, Molluscum contagiosum virus
aguguugugaaguccucucucc

SEQ ID NO: 3092582 - RNA, 16 nt, Molluscum contagiosum virus
cguguuccggcagcgc

SEQ ID NO: 3092583 - RNA, 13 nt, Molluscum contagiosum virus
gaggaaaggcaca

SEQ ID NO: 3092584 - RNA, 20 nt, Molluscum contagiosum virus
ugccgcucgcuguccuuccg

SEQ ID NO: 3092585 - RNA, 22 nt, Molluscum contagiosum virus
ccagcgcgcgccuugcagcgca

SEQ ID NO: 3092586 - RNA, 12 nt, Molluscum contagiosum virus
gcugucucuguc

SEQ ID NO: 3092587 - RNA, 20 nt, Molluscum contagiosum virus
uccgaggaaacgcagcacuu

SEQ ID NO: 3092588 - RNA, 22 nt, Molluscum contagiosum virus
agcgcuggagcuggcugggcac

SEQ ID NO: 3092589 - RNA, 21 nt, Molluscum contagiosum virus
gcgcaccugcacgagccggcg

SEQ ID NO: 3092590 - RNA, 22 nt, Molluscum contagiosum virus
ugcacgacguacgagugcugga

SEQ ID NO: 3092591 - RNA, 23 nt, Molluscum contagiosum virus
acugucucugcgcgagcagcugc

SEQ ID NO: 3092592 - RNA, 23 nt, Molluscum contagiosum virus
gccacgcgggcccgugcucaggc

SEQ ID NO: 3092593 - RNA, 12 nt, Molluscum contagiosum virus
gagacggcagug

SEQ ID NO: 3092594 - RNA, 16 nt, Molluscum contagiosum virus
gcuugcuuccggugcc

SEQ ID NO: 3092595 - RNA, 14 nt, Molluscum contagiosum virus
cuaccugaagcugg

SEQ ID NO: 3092596 - RNA, 16 nt, Molluscum contagiosum virus
agacugacgccgaugu

SEQ ID NO: 3092597 - RNA, 15 nt, Molluscum contagiosum virus
gucgugcaggccgug

SEQ ID NO: 3092598 - RNA, 21 nt, Molluscum contagiosum virus
gccgcacaaccacagcucucc

SEQ ID NO: 3092599 - RNA, 12 nt, Molluscum contagiosum virus
agaauagcuggg

SEQ ID NO: 3092600 - RNA, 11 nt, Molluscum contagiosum virus
caccaggaaca

SEQ ID NO: 3092601 - RNA, 20 nt, Molluscum contagiosum virus
gcauguccuuggcggugcgc

SEQ ID NO: 3092602 - RNA, 18 nt, Molluscum contagiosum virus
cauccuggggaaccgcug

SEQ ID NO: 3092603 - RNA, 17 nt, Molluscum contagiosum virus
cucgggccggcgcgccg

SEQ ID NO: 3092604 - RNA, 23 nt, Molluscum contagiosum virus
caggagccucuguccugcgugcu

SEQ ID NO: 3092605 - RNA, 15 nt, Molluscum contagiosum virus
ggaacugacugcugc

SEQ ID NO: 3092606 - RNA, 15 nt, Molluscum contagiosum virus
ucgcagugcccgggg

SEQ ID NO: 3092607 - RNA, 23 nt, Molluscum contagiosum virus
cagagcgugcuggucaacagcua

SEQ ID NO: 3092608 - RNA, 21 nt, Molluscum contagiosum virus
ucgugccgccugcgcgcaccc

SEQ ID NO: 3092609 - RNA, 15 nt, Molluscum contagiosum virus
caguaccagauuagc

SEQ ID NO: 3092610 - RNA, 18 nt, Molluscum contagiosum virus
gcgccuuuuccgcgaagu

SEQ ID NO: 3092611 - RNA, 20 nt, Molluscum contagiosum virus
ugcggacgcaggaugcuggg

SEQ ID NO: 3092612 - RNA, 15 nt, Molluscum contagiosum virus
cgcggcacugggugc

SEQ ID NO: 3092613 - RNA, 15 nt, Molluscum contagiosum virus
agcaggcacuccagc

SEQ ID NO: 3092614 - RNA, 14 nt, Molluscum contagiosum virus
gaacucgcugcugc

SEQ ID NO: 3092615 - RNA, 17 nt, Molluscum contagiosum virus
ccgcgugcgccgccgca

SEQ ID NO: 3092616 - RNA, 21 nt, Molluscum contagiosum virus
acccuuaacucguagcuagcg

SEQ ID NO: 3092617 - RNA, 14 nt, Molluscum contagiosum virus
ccgcaccagugccg

SEQ ID NO: 3092618 - RNA, 19 nt, Molluscum contagiosum virus
cugcgcaucugcgagcgcg

SEQ ID NO: 3092619 - RNA, 21 nt, Molluscum contagiosum virus
cgcgcacgcggcgcucguggc

SEQ ID NO: 3092620 - RNA, 22 nt, Molluscum contagiosum virus
ggagagguugcgcggggcaggc

SEQ ID NO: 3092621 - RNA, 12 nt, Molluscum contagiosum virus
aggcccaggcca

SEQ ID NO: 3092622 - RNA, 15 nt, Molluscum contagiosum virus
cucgugccacugccg

SEQ ID NO: 3092623 - RNA, 14 nt, Molluscum contagiosum virus
auccugguuccucu

SEQ ID NO: 3092624 - RNA, 17 nt, Molluscum contagiosum virus
gcgaguucugccggcuc

SEQ ID NO: 3092625 - RNA, 20 nt, Molluscum contagiosum virus
gcaacaaggaaaggcacccg

SEQ ID NO: 3092626 - RNA, 20 nt, Molluscum contagiosum virus
aggaugccugccagcagagc

SEQ ID NO: 3092627 - RNA, 17 nt, Molluscum contagiosum virus
ggccucugccugcaagg

SEQ ID NO: 3092628 - RNA, 17 nt, Molluscum contagiosum virus
aaaagcacaguccaacc

SEQ ID NO: 3092629 - RNA, 16 nt, Molluscum contagiosum virus
guccaggcgcugcacg

SEQ ID NO: 3092630 - RNA, 21 nt, Molluscum contagiosum virus
gcugcccgcgcgcgacuacgc

SEQ ID NO: 3092631 - RNA, 15 nt, Molluscum contagiosum virus
cgagcaguccgccuc

SEQ ID NO: 3092632 - RNA, 13 nt, Molluscum contagiosum virus
cuccggggcgcaa

SEQ ID NO: 3092633 - RNA, 15 nt, Molluscum contagiosum virus
gccgccgcuggggcg

SEQ ID NO: 3092634 - RNA, 18 nt, Molluscum contagiosum virus
cacgcuacggcugccggc

SEQ ID NO: 3092635 - RNA, 13 nt, Molluscum contagiosum virus
cgccgcuggagca

SEQ ID NO: 3092636 - RNA, 16 nt, Molluscum contagiosum virus
caccgcguggcgcgcg

SEQ ID NO: 3092637 - RNA, 23 nt, Molluscum contagiosum virus
guacgcaacuugugcgcccccgc

SEQ ID NO: 3092638 - RNA, 18 nt, Molluscum contagiosum virus
cgaggaauuugcccccac

SEQ ID NO: 3092639 - RNA, 17 nt, Molluscum contagiosum virus
caugucgcggugcgugc

SEQ ID NO: 3092640 - RNA, 19 nt, Molluscum contagiosum virus
gcaggucaucgacgagcac

SEQ ID NO: 3092641 - RNA, 20 nt, Molluscum contagiosum virus
accaugcucucgcugcugcc

SEQ ID NO: 3092642 - RNA, 15 nt, Molluscum contagiosum virus
cgcacgaggagcccc

SEQ ID NO: 3092643 - RNA, 16 nt, Molluscum contagiosum virus
ugcugcugcagaacug

SEQ ID NO: 3092644 - RNA, 21 nt, Molluscum contagiosum virus
uggaguccaugcccacgcgca

SEQ ID NO: 3092645 - RNA, 20 nt, Molluscum contagiosum virus
guggcacccuggcugcugcg

SEQ ID NO: 3092646 - RNA, 19 nt, Molluscum contagiosum virus
agccucaucgugagccugg

SEQ ID NO: 3092647 - RNA, 16 nt, Molluscum contagiosum virus
accacgguccugggcg

SEQ ID NO: 3092648 - RNA, 23 nt, Molluscum contagiosum virus
aucaccagcuacgagccgcugcu

SEQ ID NO: 3092649 - RNA, 22 nt, Molluscum contagiosum virus
gacacguugcagcagcacaggu

SEQ ID NO: 3092650 - RNA, 17 nt, Molluscum contagiosum virus
cgggcccgccuuugugg

SEQ ID NO: 3092651 - RNA, 21 nt, Molluscum contagiosum virus
cagcggcgccaccggcagugc

SEQ ID NO: 3092652 - RNA, 16 nt, Molluscum contagiosum virus
gcgagcagaggcaugc

SEQ ID NO: 3092653 - RNA, 12 nt, Molluscum contagiosum virus
ugggcccgccuc

SEQ ID NO: 3092654 - RNA, 22 nt, Molluscum contagiosum virus
cugcuacaagcggugcagcuac

SEQ ID NO: 3092655 - RNA, 16 nt, Molluscum contagiosum virus
gggaccucuuucucgc

SEQ ID NO: 3092656 - RNA, 23 nt, Molluscum contagiosum virus
cccgcaggaaagguacccgcagg

SEQ ID NO: 3092657 - RNA, 22 nt, Molluscum contagiosum virus
gccgccggugcgugcccagcag

SEQ ID NO: 3092658 - RNA, 14 nt, Molluscum contagiosum virus
guagcgugcgccug

SEQ ID NO: 3092659 - RNA, 21 nt, Molluscum contagiosum virus
gugugccuguuugccacggcc

SEQ ID NO: 3092660 - RNA, 21 nt, Molluscum contagiosum virus
ugcgcucggaggggcuccggg

SEQ ID NO: 3092661 - RNA, 16 nt, Molluscum contagiosum virus
cgcgcaaaagcacagc

SEQ ID NO: 3092662 - RNA, 18 nt, Molluscum contagiosum virus
aagcuucgggccgcugcc

SEQ ID NO: 3092663 - RNA, 13 nt, Molluscum contagiosum virus
ggaggcgcuagug

SEQ ID NO: 3092664 - RNA, 15 nt, Molluscum contagiosum virus
gaagcccagcuucag

SEQ ID NO: 3092665 - RNA, 20 nt, Molluscum contagiosum virus
cgggugcccggacagagccc

SEQ ID NO: 3092666 - RNA, 16 nt, Molluscum contagiosum virus
gcgagcacgccugcac

SEQ ID NO: 3092667 - RNA, 19 nt, Molluscum contagiosum virus
acaugcgugcuagcccgca

SEQ ID NO: 3092668 - RNA, 22 nt, Molluscum contagiosum virus
gcaccugcuagagcauauccug

SEQ ID NO: 3092669 - RNA, 20 nt, Molluscum contagiosum virus
gggcagcucaagcugcucau

SEQ ID NO: 3092670 - RNA, 13 nt, Molluscum contagiosum virus
cagcaagcucgau

SEQ ID NO: 3092671 - RNA, 14 nt, Molluscum contagiosum virus
cagguggagcuguc

SEQ ID NO: 3092672 - RNA, 15 nt, Molluscum contagiosum virus
ccagucucgcgcuuc

SEQ ID NO: 3092673 - RNA, 21 nt, Molluscum contagiosum virus
aaaaagcugucgcgcagcagc

SEQ ID NO: 3092674 - RNA, 23 nt, Molluscum contagiosum virus
ggcaagaccaucaucgcgcugcu

SEQ ID NO: 3092675 - RNA, 15 nt, Molluscum contagiosum virus
ccgcgcgcucgcgcu

SEQ ID NO: 3092676 - RNA, 10 nt, Molluscum contagiosum virus
uuggccaggc

SEQ ID NO: 3092677 - RNA, 12 nt, Molluscum contagiosum virus
ggaugcgcacac

SEQ ID NO: 3092678 - RNA, 19 nt, Molluscum contagiosum virus
ccugcgccauccacguggg

SEQ ID NO: 3092679 - RNA, 17 nt, Molluscum contagiosum virus
gauaaaguccucugaag

SEQ ID NO: 3092680 - RNA, 17 nt, Molluscum contagiosum virus
gacuggccucguccugg

SEQ ID NO: 3092681 - RNA, 16 nt, Molluscum contagiosum virus
ggcgcgugcugagcua

SEQ ID NO: 3092682 - RNA, 21 nt, Molluscum contagiosum virus
gccagcucgacacugugcugg

SEQ ID NO: 3092683 - RNA, 14 nt, Molluscum contagiosum virus
ucgcagcguuccag

SEQ ID NO: 3092684 - RNA, 23 nt, Molluscum contagiosum virus
caaccgccugcucucgcgcgcca

SEQ ID NO: 3092685 - RNA, 18 nt, Molluscum contagiosum virus
gugggcagccgccuggcc

SEQ ID NO: 3092686 - RNA, 16 nt, Molluscum contagiosum virus
uucuaggccucagccg

SEQ ID NO: 3092687 - RNA, 17 nt, Molluscum contagiosum virus
acucucccgggcucugu

SEQ ID NO: 3092688 - RNA, 11 nt, Molluscum contagiosum virus
gcgguggugca

SEQ ID NO: 3092689 - RNA, 19 nt, Molluscum contagiosum virus
ggcgcaccugcuagagcau

SEQ ID NO: 3092690 - RNA, 19 nt, Molluscum contagiosum virus
ugcgcaacgcgggccaggc

SEQ ID NO: 3092691 - RNA, 16 nt, Molluscum contagiosum virus
uggaauugugcugcug

SEQ ID NO: 3092692 - RNA, 18 nt, Molluscum contagiosum virus
cgcguggcgaucugcucg

SEQ ID NO: 3092693 - RNA, 16 nt, Molluscum contagiosum virus
cugcgcuccgacgcgg

SEQ ID NO: 3092694 - RNA, 17 nt, Molluscum contagiosum virus
gcuacccguugcugcgc

SEQ ID NO: 3092695 - RNA, 18 nt, Molluscum contagiosum virus
cgucuuccccaagaccug

SEQ ID NO: 3092696 - RNA, 20 nt, Molluscum contagiosum virus
cgggcucgaggugugccugu

SEQ ID NO: 3092697 - RNA, 15 nt, Molluscum contagiosum virus
cugugcggagggugc

SEQ ID NO: 3092698 - RNA, 15 nt, Molluscum contagiosum virus
cggcucuggagcggc

SEQ ID NO: 3092699 - RNA, 23 nt, Molluscum contagiosum virus
cagcguguugcuguuccacauca

SEQ ID NO: 3092700 - RNA, 23 nt, Molluscum contagiosum virus
cuggcgcuaccuaccggcagcau

SEQ ID NO: 3092701 - RNA, 20 nt, Molluscum contagiosum virus
cugcucgcugccuggugcac

SEQ ID NO: 3092702 - RNA, 22 nt, Molluscum contagiosum virus
cuccgagcgcgcgcgcugcugg

SEQ ID NO: 3092703 - RNA, 19 nt, Molluscum contagiosum virus
cucgcgugccgcggacgcc

SEQ ID NO: 3092704 - RNA, 15 nt, Molluscum contagiosum virus
gcaccacgugcgcug

SEQ ID NO: 3092705 - RNA, 12 nt, Molluscum contagiosum virus
gugcucggcgug

SEQ ID NO: 3092706 - RNA, 24 nt, Molluscum contagiosum virus
ggcgacgcguacguguccaugcac

SEQ ID NO: 3092707 - RNA, 14 nt, Molluscum contagiosum virus
cggcuagaccuccu

SEQ ID NO: 3092708 - RNA, 19 nt, Molluscum contagiosum virus
gcgcuucuauugccgcgug

SEQ ID NO: 3092709 - RNA, 19 nt, Molluscum contagiosum virus
acuccgcgaggagauucgc

SEQ ID NO: 3092710 - RNA, 13 nt, Molluscum contagiosum virus
gcucgcuugcccg

SEQ ID NO: 3092711 - RNA, 13 nt, Molluscum contagiosum virus
acugcagcagcuc

SEQ ID NO: 3092712 - RNA, 14 nt, Molluscum contagiosum virus
cuccauggagcgcc

SEQ ID NO: 3092713 - RNA, 18 nt, Molluscum contagiosum virus
cgacaggaacgcaccacg

SEQ ID NO: 3092714 - RNA, 13 nt, Molluscum contagiosum virus
agcucggguucca

SEQ ID NO: 3092715 - RNA, 19 nt, Molluscum contagiosum virus
cguacgagcaggcgcagcg

SEQ ID NO: 3092716 - RNA, 15 nt, Molluscum contagiosum virus
ucguccuggagccua

SEQ ID NO: 3092717 - RNA, 14 nt, Molluscum contagiosum virus
gacgggcacgagca

SEQ ID NO: 3092718 - RNA, 16 nt, Molluscum contagiosum virus
cccccagguggagcug

SEQ ID NO: 3092719 - RNA, 10 nt, Molluscum contagiosum virus
gcacaccccu

SEQ ID NO: 3092720 - RNA, 19 nt, Molluscum contagiosum virus
caggcgcgaacucgcggca

SEQ ID NO: 3092721 - RNA, 16 nt, Molluscum contagiosum virus
agcgcagcacacuugu

SEQ ID NO: 3092722 - RNA, 22 nt, Molluscum contagiosum virus
cgcgcccccgugucggcgaaga

SEQ ID NO: 3092723 - RNA, 15 nt, Molluscum contagiosum virus
cagcuguuucugccg

SEQ ID NO: 3092724 - RNA, 15 nt, Molluscum contagiosum virus
cgaccuggaagccgc

SEQ ID NO: 3092725 - RNA, 15 nt, Molluscum contagiosum virus
aaaugcgcacacuug

SEQ ID NO: 3092726 - RNA, 19 nt, Molluscum contagiosum virus
cugccguuuuacacagggc

SEQ ID NO: 3092727 - RNA, 23 nt, Molluscum contagiosum virus
gucgcagcagcggucucggcagc

SEQ ID NO: 3092728 - RNA, 17 nt, Molluscum contagiosum virus
ccugcucgggcugcgcg

SEQ ID NO: 3092729 - RNA, 20 nt, Molluscum contagiosum virus
gacaaggaaaggcacccacc

SEQ ID NO: 3092730 - RNA, 22 nt, Molluscum contagiosum virus
cucaguugcgacggaaccgugg

SEQ ID NO: 3092731 - RNA, 14 nt, Molluscum contagiosum virus
uacuugcugguugc

SEQ ID NO: 3092732 - RNA, 18 nt, Molluscum contagiosum virus
agcaggcgccaucgcgcg

SEQ ID NO: 3092733 - RNA, 19 nt, Molluscum contagiosum virus
accgcguccgcuaccgcag

SEQ ID NO: 3092734 - RNA, 19 nt, Molluscum contagiosum virus
acuaccgcaaccagcugcu

SEQ ID NO: 3092735 - RNA, 14 nt, Molluscum contagiosum virus
cgacguggagccug

SEQ ID NO: 3092736 - RNA, 18 nt, Molluscum contagiosum virus
cugcgcgcacugcucgcg

SEQ ID NO: 3092737 - RNA, 18 nt, Molluscum contagiosum virus
cuucuucgcgagccacuc

SEQ ID NO: 3092738 - RNA, 13 nt, Molluscum contagiosum virus
ucucugcauguuu

SEQ ID NO: 3092739 - RNA, 19 nt, Molluscum contagiosum virus
caagaucaccccgcagcuc

SEQ ID NO: 3092740 - RNA, 21 nt, Molluscum contagiosum virus
agcgucgugugcgcgcacggc

SEQ ID NO: 3092741 - RNA, 15 nt, Molluscum contagiosum virus
cgagcagcugcugcg

SEQ ID NO: 3092742 - RNA, 20 nt, Molluscum contagiosum virus
gcacuucgcagacgacucgc

SEQ ID NO: 3092743 - RNA, 17 nt, Molluscum contagiosum virus
cgcuggcucgcgccugc

SEQ ID NO: 3092744 - RNA, 23 nt, Molluscum contagiosum virus
aucugacggucguccuggagccu

SEQ ID NO: 3092745 - RNA, 15 nt, Molluscum contagiosum virus
cucaggggcucuccu

SEQ ID NO: 3092746 - RNA, 14 nt, Molluscum contagiosum virus
ucuagccuccuugu

SEQ ID NO: 3092747 - RNA, 16 nt, Molluscum contagiosum virus
cgcgcgcaugcucgcg

SEQ ID NO: 3092748 - RNA, 13 nt, Molluscum contagiosum virus
ucaccuuccuggg

SEQ ID NO: 3092749 - RNA, 17 nt, Molluscum contagiosum virus
cgugaacuccaaggucg

SEQ ID NO: 3092750 - RNA, 20 nt, Molluscum contagiosum virus
ggaaggacagugucuuguca

SEQ ID NO: 3092751 - RNA, 22 nt, Molluscum contagiosum virus
cugcuggugcucgccugcaucu

SEQ ID NO: 3092752 - RNA, 20 nt, Molluscum contagiosum virus
cggcgcgggcaagcagggcc

SEQ ID NO: 3092753 - RNA, 16 nt, Molluscum contagiosum virus
gucucggggcuccgcc

SEQ ID NO: 3092754 - RNA, 15 nt, Molluscum contagiosum virus
gacuuccgacgggcc

SEQ ID NO: 3092755 - RNA, 19 nt, Molluscum contagiosum virus
ucaggcaagaggggagcca

SEQ ID NO: 3092756 - RNA, 21 nt, Molluscum contagiosum virus
caggccauggagcgcccgcug

SEQ ID NO: 3092757 - RNA, 21 nt, Molluscum contagiosum virus
cagcaggagcacgccuggcgg

SEQ ID NO: 3092758 - RNA, 17 nt, Molluscum contagiosum virus
cggaggucugcuuuguc

SEQ ID NO: 3092759 - RNA, 17 nt, Molluscum contagiosum virus
ccccgagcugcggcgcg

SEQ ID NO: 3092760 - RNA, 13 nt, Molluscum contagiosum virus
ugcgucccagcag

SEQ ID NO: 3092761 - RNA, 18 nt, Molluscum contagiosum virus
aagaggccagcacaagcc

SEQ ID NO: 3092762 - RNA, 16 nt, Molluscum contagiosum virus
caagacgcugcuggcg

SEQ ID NO: 3092763 - RNA, 19 nt, Molluscum contagiosum virus
cgugaggaggcggcacugc

SEQ ID NO: 3092764 - RNA, 18 nt, Molluscum contagiosum virus
ccgcucggcacugcuggc

SEQ ID NO: 3092765 - RNA, 20 nt, Molluscum contagiosum virus
uauuggacguccacaaagcc

SEQ ID NO: 3092766 - RNA, 22 nt, Molluscum contagiosum virus
cgagcacgccuccaagaagagg

SEQ ID NO: 3092767 - RNA, 13 nt, Molluscum contagiosum virus
aaccacagcucuc

SEQ ID NO: 3092768 - RNA, 16 nt, Molluscum contagiosum virus
acugcagcagcuccuc

SEQ ID NO: 3092769 - RNA, 15 nt, Molluscum contagiosum virus
guccgcacgcacgga

SEQ ID NO: 3092770 - RNA, 14 nt, Molluscum contagiosum virus
cgcgcacgagcugc

SEQ ID NO: 3092771 - RNA, 16 nt, Molluscum contagiosum virus
guccuucaagaacgac

SEQ ID NO: 3092772 - RNA, 16 nt, Molluscum contagiosum virus
cuccaacagcagcugg

SEQ ID NO: 3092773 - RNA, 21 nt, Molluscum contagiosum virus
cgcggcaccugucgcgcgccg

SEQ ID NO: 3092774 - RNA, 13 nt, Molluscum contagiosum virus
gccacgcccgggc

SEQ ID NO: 3092775 - RNA, 16 nt, Molluscum contagiosum virus
acgcaccgccuggugc

SEQ ID NO: 3092776 - RNA, 22 nt, Molluscum contagiosum virus
ccgagcgcuacgacgacaugca

SEQ ID NO: 3092777 - RNA, 20 nt, Molluscum contagiosum virus
gccagccucaucgugagccu

SEQ ID NO: 3092778 - RNA, 12 nt, Molluscum contagiosum virus
cuacuacacugu

SEQ ID NO: 3092779 - RNA, 18 nt, Molluscum contagiosum virus
ccacgaugaacggcuccu

SEQ ID NO: 3092780 - RNA, 19 nt, Molluscum contagiosum virus
gcucagcgccgcgugcaug

SEQ ID NO: 3092781 - RNA, 15 nt, Molluscum contagiosum virus
gcgcgcuaccugcgc

SEQ ID NO: 3092782 - RNA, 15 nt, Molluscum contagiosum virus
cggcagcucugcagc

SEQ ID NO: 3092783 - RNA, 16 nt, Molluscum contagiosum virus
guucccgcucaaccuc

SEQ ID NO: 3092784 - RNA, 15 nt, Molluscum contagiosum virus
gguuccagcuccggc

SEQ ID NO: 3092785 - RNA, 19 nt, Molluscum contagiosum virus
cccaugcucaccgccgaga

SEQ ID NO: 3092786 - RNA, 21 nt, Molluscum contagiosum virus
cgcggcaaaugcgucccagca

SEQ ID NO: 3092787 - RNA, 16 nt, Molluscum contagiosum virus
cgggcccgagcagaag

SEQ ID NO: 3092788 - RNA, 17 nt, Molluscum contagiosum virus
ccggcacgagcaguccg

SEQ ID NO: 3092789 - RNA, 14 nt, Molluscum contagiosum virus
gugcuccacgcgca

SEQ ID NO: 3092790 - RNA, 23 nt, Molluscum contagiosum virus
cagcagccgcagcccacgugcca

SEQ ID NO: 3092791 - RNA, 14 nt, Molluscum contagiosum virus
uggugcccaugcuc

SEQ ID NO: 3092792 - RNA, 15 nt, Molluscum contagiosum virus
gcgccgaugcagugc

SEQ ID NO: 3092793 - RNA, 23 nt, Molluscum contagiosum virus
gcgggugccgccgugggcgccgc

SEQ ID NO: 3092794 - RNA, 14 nt, Molluscum contagiosum virus
guugcagcccacca

SEQ ID NO: 3092795 - RNA, 20 nt, Molluscum contagiosum virus
gguugcccgccugccgcgag

SEQ ID NO: 3092796 - RNA, 13 nt, Molluscum contagiosum virus
uagaccuccuugc

SEQ ID NO: 3092797 - RNA, 20 nt, Molluscum contagiosum virus
gaacaguacuuugucgcacg

SEQ ID NO: 3092798 - RNA, 21 nt, Molluscum contagiosum virus
gcauggagagcguacucgggc

SEQ ID NO: 3092799 - RNA, 18 nt, Molluscum contagiosum virus
caccugcggcucgcacuu

SEQ ID NO: 3092800 - RNA, 15 nt, Molluscum contagiosum virus
ugcaugcccagcaug

SEQ ID NO: 3092801 - RNA, 19 nt, Molluscum contagiosum virus
acuggagcacggacuggga

SEQ ID NO: 3092802 - RNA, 16 nt, Molluscum contagiosum virus
uacaaaacaugcugua

SEQ ID NO: 3092803 - RNA, 16 nt, Molluscum contagiosum virus
uaaauggaccucaaga

SEQ ID NO: 3092804 - RNA, 13 nt, Molluscum contagiosum virus
cacgcuugccuug

SEQ ID NO: 3092805 - RNA, 20 nt, Molluscum contagiosum virus
acuccuuugcgagcacugua

SEQ ID NO: 3092806 - RNA, 18 nt, Molluscum contagiosum virus
cgcgcaguucgagcugcu

SEQ ID NO: 3092807 - RNA, 12 nt, Molluscum contagiosum virus
ucguccacaggc

SEQ ID NO: 3092808 - RNA, 17 nt, Molluscum contagiosum virus
gcagcacggacaugagc

SEQ ID NO: 3092809 - RNA, 13 nt, Molluscum contagiosum virus
acagagggacagc

SEQ ID NO: 3092810 - RNA, 18 nt, Molluscum contagiosum virus
acucggcuucugcugcac

SEQ ID NO: 3092811 - RNA, 12 nt, Molluscum contagiosum virus
gccccugggcuu

SEQ ID NO: 3092812 - RNA, 16 nt, Molluscum contagiosum virus
caugcggagcuggccg

SEQ ID NO: 3092813 - RNA, 15 nt, Molluscum contagiosum virus
ggggugauggcggug

SEQ ID NO: 3092814 - RNA, 19 nt, Molluscum contagiosum virus
gcagucacggucuugccga

SEQ ID NO: 3092815 - RNA, 16 nt, Molluscum contagiosum virus
cgucuuaugcauccug

SEQ ID NO: 3092816 - RNA, 21 nt, Molluscum contagiosum virus
cacgguucgcggcgcgcggcg

SEQ ID NO: 3092817 - RNA, 21 nt, Molluscum contagiosum virus
cccguaggcgggccugcgccc

SEQ ID NO: 3092818 - RNA, 17 nt, Molluscum contagiosum virus
augcacacgcaccgccu

SEQ ID NO: 3092819 - RNA, 24 nt, Molluscum contagiosum virus
guaugcguaguaguagcgcucgcc

SEQ ID NO: 3092820 - RNA, 20 nt, Molluscum contagiosum virus
acuaagaacguaaaaaagag

SEQ ID NO: 3092821 - RNA, 21 nt, Molluscum contagiosum virus
uucagagugacgcugcaagac

SEQ ID NO: 3092822 - RNA, 21 nt, Molluscum contagiosum virus
aacaagcguuuucgucaugga

SEQ ID NO: 3092823 - RNA, 15 nt, Molluscum contagiosum virus
ugccgugagcacgag

SEQ ID NO: 3092824 - RNA, 18 nt, Molluscum contagiosum virus
gacagcaagcagcgcgcg

SEQ ID NO: 3092825 - RNA, 18 nt, Molluscum contagiosum virus
ggcaccacgugcgcuggc

SEQ ID NO: 3092826 - RNA, 22 nt, Molluscum contagiosum virus
cccgcuaaagaucgugcgcuuc

SEQ ID NO: 3092827 - RNA, 14 nt, Molluscum contagiosum virus
ucgugcugugccua

SEQ ID NO: 3092828 - RNA, 18 nt, Molluscum contagiosum virus
gaagaguggcucacagcc

SEQ ID NO: 3092829 - RNA, 19 nt, Molluscum contagiosum virus
gagaugacgggcacgcuca

SEQ ID NO: 3092830 - RNA, 22 nt, Molluscum contagiosum virus
cugccgguggaagagcccgcac

SEQ ID NO: 3092831 - RNA, 14 nt, Molluscum contagiosum virus
accgcgcagaagcc

SEQ ID NO: 3092832 - RNA, 14 nt, Molluscum contagiosum virus
cuucaagcacgagc

SEQ ID NO: 3092833 - RNA, 15 nt, Molluscum contagiosum virus
caugcggcaggcgcu

SEQ ID NO: 3092834 - RNA, 22 nt, Molluscum contagiosum virus
ugcgcgaccgcaccgagcccgc

SEQ ID NO: 3092835 - RNA, 12 nt, Molluscum contagiosum virus
gccuggcuugcg

SEQ ID NO: 3092836 - RNA, 17 nt, Molluscum contagiosum virus
gcucgacgggcgcagcc

SEQ ID NO: 3092837 - RNA, 20 nt, Molluscum contagiosum virus
gugcugcgcgcccaggcgcg

SEQ ID NO: 3092838 - RNA, 16 nt, Molluscum contagiosum virus
caggccaggugcagcg

SEQ ID NO: 3092839 - RNA, 22 nt, Molluscum contagiosum virus
gcagcgucgcggagcgcgcacg

SEQ ID NO: 3092840 - RNA, 15 nt, Molluscum contagiosum virus
agaaggagcccuugc

SEQ ID NO: 3092841 - RNA, 13 nt, Molluscum contagiosum virus
uuacggagcuaca

SEQ ID NO: 3092842 - RNA, 14 nt, Molluscum contagiosum virus
cgugcaguugagag

SEQ ID NO: 3092843 - RNA, 13 nt, Molluscum contagiosum virus
ugucguggaggaa

SEQ ID NO: 3092844 - RNA, 20 nt, Molluscum contagiosum virus
cauuucacaaguggucuuug

SEQ ID NO: 3092845 - RNA, 16 nt, Molluscum contagiosum virus
cuggcguggcaaaggc

SEQ ID NO: 3092846 - RNA, 13 nt, Molluscum contagiosum virus
cugcagcagcccc

SEQ ID NO: 3092847 - RNA, 18 nt, Molluscum contagiosum virus
cgcgucggucaccaccac

SEQ ID NO: 3092848 - RNA, 22 nt, Molluscum contagiosum virus
cgcgcaggaccgucaccgcagu

SEQ ID NO: 3092849 - RNA, 20 nt, Molluscum contagiosum virus
cuuaacucagcgggcagaca

SEQ ID NO: 3092850 - RNA, 11 nt, Molluscum contagiosum virus
ugcgcauggug

SEQ ID NO: 3092851 - RNA, 22 nt, Molluscum contagiosum virus
uacacguggaauugcggccagg

SEQ ID NO: 3092852 - RNA, 20 nt, Molluscum contagiosum virus
gccauggagcgcccgcugcu

SEQ ID NO: 3092853 - RNA, 22 nt, Molluscum contagiosum virus
ggggaacucggcuucugcugca

SEQ ID NO: 3092854 - RNA, 20 nt, Molluscum contagiosum virus
ggcggagaugacgggcacgc

SEQ ID NO: 3092855 - RNA, 12 nt, Molluscum contagiosum virus
gcacgcacacga

SEQ ID NO: 3092856 - RNA, 15 nt, Molluscum contagiosum virus
gugcgcgcagacgug

SEQ ID NO: 3092857 - RNA, 17 nt, Molluscum contagiosum virus
guccgcaucggcgccgc

SEQ ID NO: 3092858 - RNA, 17 nt, Molluscum contagiosum virus
caugaacucgcugcugc

SEQ ID NO: 3092859 - RNA, 17 nt, Molluscum contagiosum virus
cugagcgcggagcuggc

SEQ ID NO: 3092860 - RNA, 12 nt, Molluscum contagiosum virus
ccggugccuggc

SEQ ID NO: 3092861 - RNA, 13 nt, Molluscum contagiosum virus
cggagagcagugc

SEQ ID NO: 3092862 - RNA, 12 nt, Molluscum contagiosum virus
cgcaaacacugu

SEQ ID NO: 3092863 - RNA, 17 nt, Molluscum contagiosum virus
cugagcaagcucaagaa

SEQ ID NO: 3092864 - RNA, 18 nt, Molluscum contagiosum virus
acaagcuagacuggagca

SEQ ID NO: 3092865 - RNA, 17 nt, Molluscum contagiosum virus
gcucgcgcgcgcacgcc

SEQ ID NO: 3092866 - RNA, 13 nt, Molluscum contagiosum virus
ugugcgagccagu

SEQ ID NO: 3092867 - RNA, 13 nt, Molluscum contagiosum virus
aggcagaagcuca

SEQ ID NO: 3092868 - RNA, 14 nt, Molluscum contagiosum virus
gugcgcuacguggc

SEQ ID NO: 3092869 - RNA, 20 nt, Molluscum contagiosum virus
ugcuggacacucgcggcaag

SEQ ID NO: 3092870 - RNA, 14 nt, Molluscum contagiosum virus
ugggagaacacgag

SEQ ID NO: 3092871 - RNA, 19 nt, Molluscum contagiosum virus
gcggcacgggcucgagcuc

SEQ ID NO: 3092872 - RNA, 19 nt, Molluscum contagiosum virus
aaacgcugacggcgcugcg

SEQ ID NO: 3092873 - RNA, 14 nt, Molluscum contagiosum virus
ccggugccagcucu

SEQ ID NO: 3092874 - RNA, 15 nt, Molluscum contagiosum virus
accucgcgcgccgcc

SEQ ID NO: 3092875 - RNA, 19 nt, Molluscum contagiosum virus
ccaagaggccgucacaugc

SEQ ID NO: 3092876 - RNA, 13 nt, Molluscum contagiosum virus
cgcugcuccugcu

SEQ ID NO: 3092877 - RNA, 22 nt, Molluscum contagiosum virus
cccuccuaucucaaagaacgcg

SEQ ID NO: 3092878 - RNA, 22 nt, Molluscum contagiosum virus
ccagccuggcggccaaccgccu

SEQ ID NO: 3092879 - RNA, 19 nt, Molluscum contagiosum virus
aacugcgucucaagacaag

SEQ ID NO: 3092880 - RNA, 14 nt, Molluscum contagiosum virus
uccccgccagcacc

SEQ ID NO: 3092881 - RNA, 20 nt, Molluscum contagiosum virus
acgagcugcugcgcgccgcc

SEQ ID NO: 3092882 - RNA, 14 nt, Molluscum contagiosum virus
cgcgcgcucacccu

SEQ ID NO: 3092883 - RNA, 13 nt, Molluscum contagiosum virus
gcacggcuaccac

SEQ ID NO: 3092884 - RNA, 11 nt, Molluscum contagiosum virus
aagcucagccu

SEQ ID NO: 3092885 - RNA, 17 nt, Molluscum contagiosum virus
ggagcuagcgcgcgccg

SEQ ID NO: 3092886 - RNA, 23 nt, Molluscum contagiosum virus
guuuccagggcaguacgcgcgug

SEQ ID NO: 3092887 - RNA, 21 nt, Molluscum contagiosum virus
acgcacagccccugcugcucg

SEQ ID NO: 3092888 - RNA, 17 nt, Molluscum contagiosum virus
gcucgugguugcgcacg

SEQ ID NO: 3092889 - RNA, 15 nt, Molluscum contagiosum virus
cucgcggucaauguu

SEQ ID NO: 3092890 - RNA, 17 nt, Molluscum contagiosum virus
auggacacgcacuggcg

SEQ ID NO: 3092891 - RNA, 18 nt, Molluscum contagiosum virus
gauuugauggcugcucau

SEQ ID NO: 3092892 - RNA, 18 nt, Molluscum contagiosum virus
gcggaugcuggcgagcac

SEQ ID NO: 3092893 - RNA, 19 nt, Molluscum contagiosum virus
aaagguaccccgcaggaaa

SEQ ID NO: 3092894 - RNA, 18 nt, Molluscum contagiosum virus
gcgauguacgcgugcagg

SEQ ID NO: 3092895 - RNA, 15 nt, Molluscum contagiosum virus
gccugccagcagagc

SEQ ID NO: 3092896 - RNA, 21 nt, Molluscum contagiosum virus
ggucgcccgccgagcucuucc

SEQ ID NO: 3092897 - RNA, 20 nt, Molluscum contagiosum virus
aggccugcugaagaaggagc

SEQ ID NO: 3092898 - RNA, 19 nt, Molluscum contagiosum virus
guguggcuugcgggacaga

SEQ ID NO: 3092899 - RNA, 14 nt, Molluscum contagiosum virus
acuuccgcaacgag

SEQ ID NO: 3092900 - RNA, 21 nt, Molluscum contagiosum virus
cgcgcgcuagccgccgcugcc

SEQ ID NO: 3092901 - RNA, 12 nt, Molluscum contagiosum virus
gcuccugcucug

SEQ ID NO: 3092902 - RNA, 22 nt, Molluscum contagiosum virus
ggcacgugcugcugcggcugcu

SEQ ID NO: 3092903 - RNA, 13 nt, Molluscum contagiosum virus
gcgcacgugcguc

SEQ ID NO: 3092904 - RNA, 21 nt, Molluscum contagiosum virus
cuuccacgaaaucgccgcgcg

SEQ ID NO: 3092905 - RNA, 21 nt, Molluscum contagiosum virus
ggccaggcgcggucgcccgcc

SEQ ID NO: 3092906 - RNA, 14 nt, Molluscum contagiosum virus
cccacgcuguacau

SEQ ID NO: 3092907 - RNA, 20 nt, Molluscum contagiosum virus
agcagcucggggcugucaga

SEQ ID NO: 3092908 - RNA, 16 nt, Molluscum contagiosum virus
ccgcggcgcccacggc

SEQ ID NO: 3092909 - RNA, 20 nt, Molluscum contagiosum virus
cgauacaaaacaugcuguau

SEQ ID NO: 3092910 - RNA, 20 nt, Molluscum contagiosum virus
cgggauggucucgcugcugg

SEQ ID NO: 3092911 - RNA, 17 nt, Molluscum contagiosum virus
acgcgcgcacaucggca

SEQ ID NO: 3092912 - RNA, 21 nt, Molluscum contagiosum virus
accagagugacgucuuccaga

SEQ ID NO: 3092913 - RNA, 14 nt, Molluscum contagiosum virus
ggugcgugcgggag

SEQ ID NO: 3092914 - RNA, 14 nt, Molluscum contagiosum virus
gcggcaaaggcccg

SEQ ID NO: 3092915 - RNA, 17 nt, Molluscum contagiosum virus
cguggccguagugcuca

SEQ ID NO: 3092916 - RNA, 16 nt, Molluscum contagiosum virus
gcacggacugggagca

SEQ ID NO: 3092917 - RNA, 21 nt, Molluscum contagiosum virus
cuacacauuccucggcgcaca

SEQ ID NO: 3092918 - RNA, 23 nt, Molluscum contagiosum virus
cuuagcuucagaacggaggacag

SEQ ID NO: 3092919 - RNA, 15 nt, Molluscum contagiosum virus
ccggggcccaugcuc

SEQ ID NO: 3092920 - RNA, 16 nt, Molluscum contagiosum virus
ucguccgcucgugcca

SEQ ID NO: 3092921 - RNA, 13 nt, Molluscum contagiosum virus
gcacaagggcagc

SEQ ID NO: 3092922 - RNA, 12 nt, Molluscum contagiosum virus
gcuggcccugcu

SEQ ID NO: 3092923 - RNA, 16 nt, Molluscum contagiosum virus
cacagccccugcugcu

SEQ ID NO: 3092924 - RNA, 21 nt, Molluscum contagiosum virus
gcaucgcaguucggcgacacg

SEQ ID NO: 3092925 - RNA, 18 nt, Molluscum contagiosum virus
ggcuccggcuuggacucc

SEQ ID NO: 3092926 - RNA, 13 nt, Molluscum contagiosum virus
agcauggccgcgu

SEQ ID NO: 3092927 - RNA, 17 nt, Molluscum contagiosum virus
gcccgcaaugcagugca

SEQ ID NO: 3092928 - RNA, 16 nt, Molluscum contagiosum virus
cgcugggcgcgccgcg

SEQ ID NO: 3092929 - RNA, 22 nt, Molluscum contagiosum virus
aacagagaaaggcacccaccag

SEQ ID NO: 3092930 - RNA, 20 nt, Molluscum contagiosum virus
cgggcgcuccgagcggcugc

SEQ ID NO: 3092931 - RNA, 15 nt, Molluscum contagiosum virus
cacgcacgaccucac

SEQ ID NO: 3092932 - RNA, 12 nt, Molluscum contagiosum virus
cuuucccccaca

SEQ ID NO: 3092933 - RNA, 14 nt, Molluscum contagiosum virus
cacacacggaagcu

SEQ ID NO: 3092934 - RNA, 21 nt, Molluscum contagiosum virus
gugccaucucgcacacugcag

SEQ ID NO: 3092935 - RNA, 14 nt, Molluscum contagiosum virus
cacgugcugcagcu

SEQ ID NO: 3092936 - RNA, 15 nt, Molluscum contagiosum virus
cugggcacaagcuuu

SEQ ID NO: 3092937 - RNA, 17 nt, Molluscum contagiosum virus
gacggugcuggugcugg

SEQ ID NO: 3092938 - RNA, 18 nt, Molluscum contagiosum virus
agucguuugcucggggcu

SEQ ID NO: 3092939 - RNA, 18 nt, Molluscum contagiosum virus
cgacaauacggugcagcc

SEQ ID NO: 3092940 - RNA, 17 nt, Molluscum contagiosum virus
gcucgcggugcagcugc

SEQ ID NO: 3092941 - RNA, 22 nt, Molluscum contagiosum virus
aaggacuaccagcucuucgugg

SEQ ID NO: 3092942 - RNA, 15 nt, Molluscum contagiosum virus
ccgcucggaauuccu

SEQ ID NO: 3092943 - RNA, 15 nt, Molluscum contagiosum virus
agacgcugcugcaca

SEQ ID NO: 3092944 - RNA, 18 nt, Molluscum contagiosum virus
gucacucgcgagacggaa

SEQ ID NO: 3092945 - RNA, 12 nt, Molluscum contagiosum virus
cuacgaggugcu

SEQ ID NO: 3092946 - RNA, 18 nt, Molluscum contagiosum virus
cgcccaccagcagccagg

SEQ ID NO: 3092947 - RNA, 16 nt, Molluscum contagiosum virus
gaacuagugcugcugg

SEQ ID NO: 3092948 - RNA, 17 nt, Molluscum contagiosum virus
accggagacaccagcuc

SEQ ID NO: 3092949 - RNA, 21 nt, Molluscum contagiosum virus
agcgcgcgccgucggccucgg

SEQ ID NO: 3092950 - RNA, 15 nt, Molluscum contagiosum virus
caguagcagcgccgg

SEQ ID NO: 3092951 - RNA, 16 nt, Molluscum contagiosum virus
cagcccugugcccgag

SEQ ID NO: 3092952 - RNA, 21 nt, Molluscum contagiosum virus
gcgaagagcacgaugcccagc

SEQ ID NO: 3092953 - RNA, 15 nt, Molluscum contagiosum virus
cguguuggcuucugc

SEQ ID NO: 3092954 - RNA, 16 nt, Molluscum contagiosum virus
gcagcagugccagcag

SEQ ID NO: 3092955 - RNA, 13 nt, Molluscum contagiosum virus
aggaacaaggcca

SEQ ID NO: 3092956 - RNA, 22 nt, Molluscum contagiosum virus
gaaaggccccccgcaacaagga

SEQ ID NO: 3092957 - RNA, 17 nt, Molluscum contagiosum virus
gcugcaaucugcgcucc

SEQ ID NO: 3092958 - RNA, 17 nt, Molluscum contagiosum virus
ggcauaccugugccagc

SEQ ID NO: 3092959 - RNA, 14 nt, Molluscum contagiosum virus
cgguguccucuuca

SEQ ID NO: 3092960 - RNA, 14 nt, Molluscum contagiosum virus
ggagcggaccccgg

SEQ ID NO: 3092961 - RNA, 14 nt, Molluscum contagiosum virus
agcgcggccguggc

SEQ ID NO: 3092962 - RNA, 20 nt, Molluscum contagiosum virus
cgcgaaacuggacugagccg

SEQ ID NO: 3092963 - RNA, 14 nt, Molluscum contagiosum virus
ccuccaagaagagg

SEQ ID NO: 3092964 - RNA, 14 nt, Molluscum contagiosum virus
cccgcggcgcgccg

SEQ ID NO: 3092965 - RNA, 21 nt, Molluscum contagiosum virus
cacgcuuguccgcggacgcgg

SEQ ID NO: 3092966 - RNA, 14 nt, Molluscum contagiosum virus
cagcccgcggugcg

SEQ ID NO: 3092967 - RNA, 18 nt, Molluscum contagiosum virus
cgcuaggggugccgcugc

SEQ ID NO: 3092968 - RNA, 17 nt, Molluscum contagiosum virus
ugcgcugucucuccgag

SEQ ID NO: 3092969 - RNA, 22 nt, Molluscum contagiosum virus
gugcuugcuucggcggcugugc

SEQ ID NO: 3092970 - RNA, 20 nt, Molluscum contagiosum virus
gccgagcgccgccagcuccg

SEQ ID NO: 3092971 - RNA, 17 nt, Molluscum contagiosum virus
cuugguggugaccgaga

SEQ ID NO: 3092972 - RNA, 21 nt, Molluscum contagiosum virus
gcucaugcgcgggaugcugga

SEQ ID NO: 3092973 - RNA, 20 nt, Molluscum contagiosum virus
aggaucggagcgcagcugcc

SEQ ID NO: 3092974 - RNA, 16 nt, Molluscum contagiosum virus
gccgcacucgccgcgg

SEQ ID NO: 3092975 - RNA, 16 nt, Molluscum contagiosum virus
gcccgcgucgcgcacg

SEQ ID NO: 3092976 - RNA, 19 nt, Molluscum contagiosum virus
gcgcugcgcggcggcagcu

SEQ ID NO: 3092977 - RNA, 14 nt, Molluscum contagiosum virus
gccgcggcgggggc

SEQ ID NO: 3092978 - RNA, 19 nt, Molluscum contagiosum virus
ucccgggcggcgcgccgcg

SEQ ID NO: 3092979 - RNA, 16 nt, Molluscum contagiosum virus
cugcccgcgcacgagc

SEQ ID NO: 3092980 - RNA, 16 nt, Molluscum contagiosum virus
ggcgcgaaaagucggg

SEQ ID NO: 3092981 - RNA, 22 nt, Molluscum contagiosum virus
aacauccugccacaccagcugg

SEQ ID NO: 3092982 - RNA, 20 nt, Molluscum contagiosum virus
ggcaccugcaucgcgccgcc

SEQ ID NO: 3092983 - RNA, 13 nt, Molluscum contagiosum virus
gcgaaggagagag

SEQ ID NO: 3092984 - RNA, 15 nt, Molluscum contagiosum virus
ccgcgacccagaagc

SEQ ID NO: 3092985 - RNA, 13 nt, Molluscum contagiosum virus
caggaccuggcug

SEQ ID NO: 3092986 - RNA, 13 nt, Molluscum contagiosum virus
cuuuccccggcgu

SEQ ID NO: 3092987 - RNA, 20 nt, Molluscum contagiosum virus
gggaccugguucaugcuggc

SEQ ID NO: 3092988 - RNA, 17 nt, Molluscum contagiosum virus
cgacggcacgggcacgc

SEQ ID NO: 3092989 - RNA, 23 nt, Molluscum contagiosum virus
cugcacgacggucacgcaagcuu

SEQ ID NO: 3092990 - RNA, 18 nt, Molluscum contagiosum virus
agucggcguggccaggcc

SEQ ID NO: 3092991 - RNA, 19 nt, Molluscum contagiosum virus
caacgcgcgcgugcugucc

SEQ ID NO: 3092992 - RNA, 19 nt, Molluscum contagiosum virus
acaugcagcugcaggaccu

SEQ ID NO: 3092993 - RNA, 16 nt, Molluscum contagiosum virus
gcuaccgcagccacgg

SEQ ID NO: 3092994 - RNA, 17 nt, Molluscum contagiosum virus
cgccggggcccaugcuc

SEQ ID NO: 3092995 - RNA, 13 nt, Molluscum contagiosum virus
ccggugucagccc

SEQ ID NO: 3092996 - RNA, 20 nt, Molluscum contagiosum virus
gcccgccagcauggcgagcc

SEQ ID NO: 3092997 - RNA, 20 nt, Molluscum contagiosum virus
ccugucaagacgggcacgcc

SEQ ID NO: 3092998 - RNA, 18 nt, Molluscum contagiosum virus
guuguugcaucuucuugc

SEQ ID NO: 3092999 - RNA, 20 nt, Molluscum contagiosum virus
cugcugcccccgccgcggcg

SEQ ID NO: 3093000 - RNA, 12 nt, Molluscum contagiosum virus
ucgcugccuggu

SEQ ID NO: 3093001 - RNA, 13 nt, Molluscum contagiosum virus
accgccugcucuc

SEQ ID NO: 3093002 - RNA, 17 nt, Molluscum contagiosum virus
gaacuucuacgccaaga

SEQ ID NO: 3093003 - RNA, 16 nt, Molluscum contagiosum virus
cguuccgggcccgggc

SEQ ID NO: 3093004 - RNA, 19 nt, Molluscum contagiosum virus
aggccaacuaccuggggcu

SEQ ID NO: 3093005 - RNA, 13 nt, Molluscum contagiosum virus
gcgugaccagugc

SEQ ID NO: 3093006 - RNA, 15 nt, Molluscum contagiosum virus
agcacgcgugugcga

SEQ ID NO: 3093007 - RNA, 21 nt, Molluscum contagiosum virus
ggacagagcccgcggcgcacg

SEQ ID NO: 3093008 - RNA, 14 nt, Molluscum contagiosum virus
cgcugcgcgccgcg

SEQ ID NO: 3093009 - RNA, 15 nt, Molluscum contagiosum virus
gcgccagcaagcucg

SEQ ID NO: 3093010 - RNA, 18 nt, Molluscum contagiosum virus
gcccgcugcgcgcucugg

SEQ ID NO: 3093011 - RNA, 14 nt, Molluscum contagiosum virus
ggagcggcauucga

SEQ ID NO: 3093012 - RNA, 17 nt, Molluscum contagiosum virus
cggagcugugccgcagc

SEQ ID NO: 3093013 - RNA, 11 nt, Molluscum contagiosum virus
gcaaccccgcg

SEQ ID NO: 3093014 - RNA, 16 nt, Molluscum contagiosum virus
caugaggggcggagac

SEQ ID NO: 3093015 - RNA, 23 nt, Molluscum contagiosum virus
gcagcguugcuauuaccugaccg

SEQ ID NO: 3093016 - RNA, 16 nt, Molluscum contagiosum virus
cugcgcgugcugggcc

SEQ ID NO: 3093017 - RNA, 19 nt, Molluscum contagiosum virus
gagcuccgugcugcggcaa

SEQ ID NO: 3093018 - RNA, 13 nt, Molluscum contagiosum virus
ucauggcgccgcu

SEQ ID NO: 3093019 - RNA, 15 nt, Molluscum contagiosum virus
gagggucgugcaggu

SEQ ID NO: 3093020 - RNA, 13 nt, Molluscum contagiosum virus
gcgugcucggugu

SEQ ID NO: 3093021 - RNA, 21 nt, Molluscum contagiosum virus
gcugcgcaucugcgagcgcga

SEQ ID NO: 3093022 - RNA, 13 nt, Molluscum contagiosum virus
acucgggugcccg

SEQ ID NO: 3093023 - RNA, 13 nt, Molluscum contagiosum virus
cuagccccagcac

SEQ ID NO: 3093024 - RNA, 23 nt, Molluscum contagiosum virus
gccgccugcgcgcacccgagggc

SEQ ID NO: 3093025 - RNA, 16 nt, Molluscum contagiosum virus
gccagugcgugcacug

SEQ ID NO: 3093026 - RNA, 18 nt, Molluscum contagiosum virus
ccgcugcgcaucugcgag

SEQ ID NO: 3093027 - RNA, 17 nt, Molluscum contagiosum virus
cgcgccgcgcugcuggc

SEQ ID NO: 3093028 - RNA, 23 nt, Molluscum contagiosum virus
ugggcaucgucucgcucuuccgc

SEQ ID NO: 3093029 - RNA, 13 nt, Molluscum contagiosum virus
cgcccuggagcgc

SEQ ID NO: 3093030 - RNA, 21 nt, Molluscum contagiosum virus
cgcccgcggcuuucucgcacu

SEQ ID NO: 3093031 - RNA, 15 nt, Molluscum contagiosum virus
cuguaacaaggaaaa

SEQ ID NO: 3093032 - RNA, 16 nt, Molluscum contagiosum virus
cgcucucucagggugg

SEQ ID NO: 3093033 - RNA, 21 nt, Molluscum contagiosum virus
gaaaggcaccccgaaggaaag

SEQ ID NO: 3093034 - RNA, 14 nt, Molluscum contagiosum virus
gcgcucgugucuag

SEQ ID NO: 3093035 - RNA, 22 nt, Molluscum contagiosum virus
acacucggcaugugcgcaccgc

SEQ ID NO: 3093036 - RNA, 22 nt, Molluscum contagiosum virus
gcucaccgccgagauggagcuc

SEQ ID NO: 3093037 - RNA, 20 nt, Molluscum contagiosum virus
cuggcggggcuggcagaaga

SEQ ID NO: 3093038 - RNA, 23 nt, Molluscum contagiosum virus
gcgccgaaguacuuuccucuucg

SEQ ID NO: 3093039 - RNA, 21 nt, Molluscum contagiosum virus
cgaggaacucuacgacaugcu

SEQ ID NO: 3093040 - RNA, 18 nt, Molluscum contagiosum virus
cuagugcgcgccaagaac

SEQ ID NO: 3093041 - RNA, 14 nt, Molluscum contagiosum virus
cacgcuguccaggc

SEQ ID NO: 3093042 - RNA, 22 nt, Molluscum contagiosum virus
gcaaccucgggaagcccucagg

SEQ ID NO: 3093043 - RNA, 18 nt, Molluscum contagiosum virus
cagcucgccgcgcgccgc

SEQ ID NO: 3093044 - RNA, 18 nt, Molluscum contagiosum virus
guacuaucagagacaggg

SEQ ID NO: 3093045 - RNA, 20 nt, Molluscum contagiosum virus
acgcgcugcgccacugccac

SEQ ID NO: 3093046 - RNA, 15 nt, Molluscum contagiosum virus
cgcguucggaacgcg

SEQ ID NO: 3093047 - RNA, 13 nt, Molluscum contagiosum virus
gcggagcugugcc

SEQ ID NO: 3093048 - RNA, 16 nt, Molluscum contagiosum virus
ucggcguuggccacga

SEQ ID NO: 3093049 - RNA, 15 nt, Molluscum contagiosum virus
gcucucgcugcugcc

SEQ ID NO: 3093050 - RNA, 16 nt, Molluscum contagiosum virus
cgggaaggggugaugg

SEQ ID NO: 3093051 - RNA, 20 nt, Molluscum contagiosum virus
gcccgcgcacgagcugcugc

SEQ ID NO: 3093052 - RNA, 16 nt, Molluscum contagiosum virus
ggucaagggugugggc

SEQ ID NO: 3093053 - RNA, 12 nt, Molluscum contagiosum virus
cggauugccgca

SEQ ID NO: 3093054 - RNA, 20 nt, Molluscum contagiosum virus
gcagccgcggcgcccggugc

SEQ ID NO: 3093055 - RNA, 15 nt, Molluscum contagiosum virus
ugccgcuugagcagc

SEQ ID NO: 3093056 - RNA, 14 nt, Molluscum contagiosum virus
gcgcgcccaggcgc

SEQ ID NO: 3093057 - RNA, 18 nt, Molluscum contagiosum virus
gcgccgcggcgggggcag

SEQ ID NO: 3093058 - RNA, 19 nt, Molluscum contagiosum virus
cuccuacacauuccucggc

SEQ ID NO: 3093059 - RNA, 16 nt, Molluscum contagiosum virus
ggagaugacgggcacg

SEQ ID NO: 3093060 - RNA, 19 nt, Molluscum contagiosum virus
cacguggaauugcggccag

SEQ ID NO: 3093061 - RNA, 15 nt, Molluscum contagiosum virus
cuccgcgggcagccg

SEQ ID NO: 3093062 - RNA, 19 nt, Molluscum contagiosum virus
acaaggagggagagcugcc

SEQ ID NO: 3093063 - RNA, 19 nt, Molluscum contagiosum virus
cgcagaccacggcgcgccg

SEQ ID NO: 3093064 - RNA, 15 nt, Molluscum contagiosum virus
gagcucguggacagc

SEQ ID NO: 3093065 - RNA, 18 nt, Molluscum contagiosum virus
cuccagaaucgcuuugcc

SEQ ID NO: 3093066 - RNA, 22 nt, Molluscum contagiosum virus
gcguccguaagucgaagagggu

SEQ ID NO: 3093067 - RNA, 16 nt, Molluscum contagiosum virus
gcgcuacgacgacaug

SEQ ID NO: 3093068 - RNA, 14 nt, Molluscum contagiosum virus
ugccgcggcagugg

SEQ ID NO: 3093069 - RNA, 19 nt, Molluscum contagiosum virus
acugcuagugcuggccgcc

SEQ ID NO: 3093070 - RNA, 16 nt, Molluscum contagiosum virus
gucaugcgacugccag

SEQ ID NO: 3093071 - RNA, 16 nt, Molluscum contagiosum virus
caugaccgcucgcgga

SEQ ID NO: 3093072 - RNA, 15 nt, Molluscum contagiosum virus
agcgcgcgccuugca

SEQ ID NO: 3093073 - RNA, 15 nt, Molluscum contagiosum virus
cacuggcccugcuug

SEQ ID NO: 3093074 - RNA, 13 nt, Molluscum contagiosum virus
ggcacgugccccg

SEQ ID NO: 3093075 - RNA, 14 nt, Molluscum contagiosum virus
cgcggcgguugccc

SEQ ID NO: 3093076 - RNA, 22 nt, Molluscum contagiosum virus
cuggagaccugucgugcaaugg

SEQ ID NO: 3093077 - RNA, 20 nt, Molluscum contagiosum virus
ccgcaguaccaguaccugcu

SEQ ID NO: 3093078 - RNA, 22 nt, Molluscum contagiosum virus
gcacaagggcagcucaagcugc

SEQ ID NO: 3093079 - RNA, 16 nt, Molluscum contagiosum virus
acgcacuucacggcgu

SEQ ID NO: 3093080 - RNA, 13 nt, Molluscum contagiosum virus
cguugcugcugcg

SEQ ID NO: 3093081 - RNA, 15 nt, Molluscum contagiosum virus
caccaccagcacgcu

SEQ ID NO: 3093082 - RNA, 14 nt, Molluscum contagiosum virus
ccugagcuucuuug

SEQ ID NO: 3093083 - RNA, 18 nt, Molluscum contagiosum virus
ugugcuccuuguccgagc

SEQ ID NO: 3093084 - RNA, 18 nt, Molluscum contagiosum virus
cuucgcguagucagggcc

SEQ ID NO: 3093085 - RNA, 15 nt, Molluscum contagiosum virus
gcacccgcaggaaag

SEQ ID NO: 3093086 - RNA, 20 nt, Molluscum contagiosum virus
ucguuugcucggggcugucg

SEQ ID NO: 3093087 - RNA, 18 nt, Molluscum contagiosum virus
ccgcugagcgcagcacac

SEQ ID NO: 3093088 - RNA, 16 nt, Molluscum contagiosum virus
agcgcgcuagcuccac

SEQ ID NO: 3093089 - RNA, 17 nt, Molluscum contagiosum virus
ucgacgagugcgccgcg

SEQ ID NO: 3093090 - RNA, 23 nt, Molluscum contagiosum virus
ugcuggacgcgcacgcgggacgc

SEQ ID NO: 3093091 - RNA, 18 nt, Molluscum contagiosum virus
ccgccgcaacauagucaa

SEQ ID NO: 3093092 - RNA, 18 nt, Molluscum contagiosum virus
gacgcguucuccaggaac

SEQ ID NO: 3093093 - RNA, 15 nt, Molluscum contagiosum virus
cggcgccgcgcaaga

SEQ ID NO: 3093094 - RNA, 16 nt, Molluscum contagiosum virus
cagucggugccagauu

SEQ ID NO: 3093095 - RNA, 24 nt, Molluscum contagiosum virus
ggacgcggugaccggagcggcgga

SEQ ID NO: 3093096 - RNA, 22 nt, Molluscum contagiosum virus
ugcccgccugccgcgagcacug

SEQ ID NO: 3093097 - RNA, 23 nt, Molluscum contagiosum virus
gugcacccuccgcacagagggac

SEQ ID NO: 3093098 - RNA, 23 nt, Molluscum contagiosum virus
cgcaggccgggcacccagcccug

SEQ ID NO: 3093099 - RNA, 14 nt, Molluscum contagiosum virus
cggacgcgcagcug

SEQ ID NO: 3093100 - RNA, 17 nt, Molluscum contagiosum virus
gauuucgcgcagcaggc

SEQ ID NO: 3093101 - RNA, 18 nt, Molluscum contagiosum virus
accuggcgagcgcucugc

SEQ ID NO: 3093102 - RNA, 16 nt, Molluscum contagiosum virus
accugagccucuggaa

SEQ ID NO: 3093103 - RNA, 19 nt, Molluscum contagiosum virus
cgucaugcgacugccagcc

SEQ ID NO: 3093104 - RNA, 21 nt, Molluscum contagiosum virus
cgaaaggcacccgcaggaaag

SEQ ID NO: 3093105 - RNA, 16 nt, Molluscum contagiosum virus
caggagcagucucugc

SEQ ID NO: 3093106 - RNA, 19 nt, Molluscum contagiosum virus
ugucugggcgagagcuuuu

SEQ ID NO: 3093107 - RNA, 20 nt, Molluscum contagiosum virus
cuggaguuuaaugacgcgca

SEQ ID NO: 3093108 - RNA, 14 nt, Molluscum contagiosum virus
ccgguccugacucc

SEQ ID NO: 3093109 - RNA, 15 nt, Molluscum contagiosum virus
gccgccgccgcgagg

SEQ ID NO: 3093110 - RNA, 23 nt, Molluscum contagiosum virus
gaagugcuccgcacguggaguca

SEQ ID NO: 3093111 - RNA, 12 nt, Molluscum contagiosum virus
gcagugccuugu

SEQ ID NO: 3093112 - RNA, 19 nt, Molluscum contagiosum virus
cugcgcgcucuggagccuc

SEQ ID NO: 3093113 - RNA, 15 nt, Molluscum contagiosum virus
gcucgcgcgcagcuc

SEQ ID NO: 3093114 - RNA, 14 nt, Molluscum contagiosum virus
cuggaggugaguca

SEQ ID NO: 3093115 - RNA, 19 nt, Molluscum contagiosum virus
gcgcaagcaccggcagcgc

SEQ ID NO: 3093116 - RNA, 19 nt, Molluscum contagiosum virus
gcgcugaucaccgaggagc

SEQ ID NO: 3093117 - RNA, 18 nt, Molluscum contagiosum virus
gacgcgaauacgcgcucc

SEQ ID NO: 3093118 - RNA, 15 nt, Molluscum contagiosum virus
cacccaccaggaaca

SEQ ID NO: 3093119 - RNA, 19 nt, Molluscum contagiosum virus
cguauccucgacgcgcugc

SEQ ID NO: 3093120 - RNA, 19 nt, Molluscum contagiosum virus
agcggauaugcgccugugc

SEQ ID NO: 3093121 - RNA, 22 nt, Molluscum contagiosum virus
cuuuugcgcgagagcuacagca

SEQ ID NO: 3093122 - RNA, 20 nt, Molluscum contagiosum virus
ucucugauaguaccacugug

SEQ ID NO: 3093123 - RNA, 22 nt, Molluscum contagiosum virus
cgacguguguccgagaucacgg

SEQ ID NO: 3093124 - RNA, 16 nt, Molluscum contagiosum virus
cagcagugccagcagc

SEQ ID NO: 3093125 - RNA, 12 nt, Molluscum contagiosum virus
agaagaggccgg

SEQ ID NO: 3093126 - RNA, 16 nt, Molluscum contagiosum virus
gcugucagaggauucu

SEQ ID NO: 3093127 - RNA, 17 nt, Molluscum contagiosum virus
gcgggccaggcacuggc

SEQ ID NO: 3093128 - RNA, 12 nt, Molluscum contagiosum virus
gcccgccagcau

SEQ ID NO: 3093129 - RNA, 15 nt, Molluscum contagiosum virus
augugaacacgacau

SEQ ID NO: 3093130 - RNA, 19 nt, Molluscum contagiosum virus
ucugcgcccgcggagaaag

SEQ ID NO: 3093131 - RNA, 23 nt, Molluscum contagiosum virus
gcacgccgccagcgacgagcagc

SEQ ID NO: 3093132 - RNA, 21 nt, Molluscum contagiosum virus
gcgagugugcgugucucucgu

SEQ ID NO: 3093133 - RNA, 22 nt, Molluscum contagiosum virus
augcgcgccgcgcugcuggcca

SEQ ID NO: 3093134 - RNA, 15 nt, Molluscum contagiosum virus
ccucgagcgccgccg

SEQ ID NO: 3093135 - RNA, 22 nt, Molluscum contagiosum virus
ugcagcuguccaaggugaacga

SEQ ID NO: 3093136 - RNA, 18 nt, Molluscum contagiosum virus
ccgcgugcaugcccagca

SEQ ID NO: 3093137 - RNA, 20 nt, Molluscum contagiosum virus
gccggcgcuucuacugcgca

SEQ ID NO: 3093138 - RNA, 13 nt, Molluscum contagiosum virus
ugguacagaugag

SEQ ID NO: 3093139 - RNA, 20 nt, Molluscum contagiosum virus
ggcgcacgccgaagagccgc

SEQ ID NO: 3093140 - RNA, 19 nt, Molluscum contagiosum virus
acgggcucugugcggacau

SEQ ID NO: 3093141 - RNA, 20 nt, Molluscum contagiosum virus
ggcuugcggcacgcacggcc

SEQ ID NO: 3093142 - RNA, 12 nt, Molluscum contagiosum virus
cacgccgcagcg

SEQ ID NO: 3093143 - RNA, 18 nt, Molluscum contagiosum virus
cgccaucgugguggagga

SEQ ID NO: 3093144 - RNA, 18 nt, Molluscum contagiosum virus
cuccaagaagaggccggc

SEQ ID NO: 3093145 - RNA, 17 nt, Molluscum contagiosum virus
ugcuccugcucuguugc

SEQ ID NO: 3093146 - RNA, 19 nt, Molluscum contagiosum virus
cagcaaacugugcuccuga

SEQ ID NO: 3093147 - RNA, 12 nt, Molluscum contagiosum virus
uggaggagccgc

SEQ ID NO: 3093148 - RNA, 18 nt, Molluscum contagiosum virus
caccgcgacaugccucgc

SEQ ID NO: 3093149 - RNA, 15 nt, Molluscum contagiosum virus
gccgucgggcgccaa

SEQ ID NO: 3093150 - RNA, 19 nt, Molluscum contagiosum virus
ccucaaggaggcgugcguu

SEQ ID NO: 3093151 - RNA, 13 nt, Molluscum contagiosum virus
gggccaggcacug

SEQ ID NO: 3093152 - RNA, 17 nt, Molluscum contagiosum virus
cgcucuuacugcagcag

SEQ ID NO: 3093153 - RNA, 17 nt, Molluscum contagiosum virus
auccacgcgugcugcgc

SEQ ID NO: 3093154 - RNA, 19 nt, Molluscum contagiosum virus
gcugcugcucuuccaggag

SEQ ID NO: 3093155 - RNA, 14 nt, Molluscum contagiosum virus
ccgggccugcggcg

SEQ ID NO: 3093156 - RNA, 20 nt, Molluscum contagiosum virus
acguacucgcugcuccccgc

SEQ ID NO: 3093157 - RNA, 21 nt, Molluscum contagiosum virus
accggcgcucacugcgaucgc

SEQ ID NO: 3093158 - RNA, 15 nt, Molluscum contagiosum virus
accgcgcgguccgcc

SEQ ID NO: 3093159 - RNA, 17 nt, Molluscum contagiosum virus
caguacaugcccggccu

SEQ ID NO: 3093160 - RNA, 22 nt, Molluscum contagiosum virus
ccuccacguccaggccgcggca

SEQ ID NO: 3093161 - RNA, 22 nt, Molluscum contagiosum virus
augcuuuuguuacucucagagc

SEQ ID NO: 3093162 - RNA, 13 nt, Molluscum contagiosum virus
ugguugccaggca

SEQ ID NO: 3093163 - RNA, 23 nt, Molluscum contagiosum virus
ggaaacgcacagccccugcugcu

SEQ ID NO: 3093164 - RNA, 14 nt, Molluscum contagiosum virus
ggcagaagcucauu

SEQ ID NO: 3093165 - RNA, 20 nt, Molluscum contagiosum virus
ucgcccguguucgcggagcu

SEQ ID NO: 3093166 - RNA, 21 nt, Molluscum contagiosum virus
ccuuggcggcgcggcuagcac

SEQ ID NO: 3093167 - RNA, 19 nt, Molluscum contagiosum virus
gcuaggauccugcucaaga

SEQ ID NO: 3093168 - RNA, 14 nt, Molluscum contagiosum virus
cgcuggagcacgac

SEQ ID NO: 3093169 - RNA, 19 nt, Molluscum contagiosum virus
cguggcgcgcgagcugcua

SEQ ID NO: 3093170 - RNA, 13 nt, Molluscum contagiosum virus
ucauggugcccau

SEQ ID NO: 3093171 - RNA, 20 nt, Molluscum contagiosum virus
cgcgcggggcacugcgcacg

SEQ ID NO: 3093172 - RNA, 16 nt, Molluscum contagiosum virus
ugcauggacauccuca

SEQ ID NO: 3093173 - RNA, 21 nt, Molluscum contagiosum virus
cgggcgccgcgcaauagcgcc

SEQ ID NO: 3093174 - RNA, 23 nt, Molluscum contagiosum virus
uugccgugcccaucuccuugucu

SEQ ID NO: 3093175 - RNA, 17 nt, Molluscum contagiosum virus
ccagcggcgccgcagcu

SEQ ID NO: 3093176 - RNA, 22 nt, Molluscum contagiosum virus
gccuccaagaagaggccggcac

SEQ ID NO: 3093177 - RNA, 23 nt, Molluscum contagiosum virus
cucgguagcguggagcuggucca

SEQ ID NO: 3093178 - RNA, 17 nt, Molluscum contagiosum virus
gcugagcaagcucaaga

SEQ ID NO: 3093179 - RNA, 22 nt, Molluscum contagiosum virus
cggcaagcgagaucccuccgag

SEQ ID NO: 3093180 - RNA, 13 nt, Molluscum contagiosum virus
gcaagccuggcuc

SEQ ID NO: 3093181 - RNA, 13 nt, Molluscum contagiosum virus
ccccgaaggaaag

SEQ ID NO: 3093182 - RNA, 22 nt, Molluscum contagiosum virus
gacgcggaugccacgcagcugg

SEQ ID NO: 3093183 - RNA, 14 nt, Molluscum contagiosum virus
gcugcgcgcggacu

SEQ ID NO: 3093184 - RNA, 17 nt, Molluscum contagiosum virus
gcgcuggagcuggcugg

SEQ ID NO: 3093185 - RNA, 15 nt, Molluscum contagiosum virus
gcugcggcugcugga

SEQ ID NO: 3093186 - RNA, 12 nt, Molluscum contagiosum virus
cagcuucugcuc

SEQ ID NO: 3093187 - RNA, 19 nt, Molluscum contagiosum virus
ccccuagaagaccacaucc

SEQ ID NO: 3093188 - RNA, 16 nt, Molluscum contagiosum virus
aggaaauguaguucuc

SEQ ID NO: 3093189 - RNA, 13 nt, Molluscum contagiosum virus
cggcgcgcagcuc

SEQ ID NO: 3093190 - RNA, 14 nt, Molluscum contagiosum virus
ggcacccgccagcu

SEQ ID NO: 3093191 - RNA, 14 nt, Molluscum contagiosum virus
cgucugcaaggccu

SEQ ID NO: 3093192 - RNA, 16 nt, Molluscum contagiosum virus
guugucuugaugcugu

SEQ ID NO: 3093193 - RNA, 13 nt, Molluscum contagiosum virus
gugcgugcacagc

SEQ ID NO: 3093194 - RNA, 18 nt, Molluscum contagiosum virus
ucccgaggcguccagcgg

SEQ ID NO: 3093195 - RNA, 15 nt, Molluscum contagiosum virus
aggaaaggcacccac

SEQ ID NO: 3093196 - RNA, 20 nt, Molluscum contagiosum virus
gcugugcccgcggcguuccc

SEQ ID NO: 3093197 - RNA, 20 nt, Molluscum contagiosum virus
ggugcccgccaagagcuggu

SEQ ID NO: 3093198 - RNA, 21 nt, Molluscum contagiosum virus
acaaucucgccggcuguaaau

SEQ ID NO: 3093199 - RNA, 18 nt, Molluscum contagiosum virus
ugcggagggugcacgcgg

SEQ ID NO: 3093200 - RNA, 19 nt, Molluscum contagiosum virus
ucaacagugcgugccaggc

SEQ ID NO: 3093201 - RNA, 19 nt, Molluscum contagiosum virus
ccgugagcagucccgagga

SEQ ID NO: 3093202 - RNA, 14 nt, Molluscum contagiosum virus
cgagagaauggagc

SEQ ID NO: 3093203 - RNA, 22 nt, Molluscum contagiosum virus
ccacgcucgcgcgcaugcucgc

SEQ ID NO: 3093204 - RNA, 13 nt, Molluscum contagiosum virus
aggccauggagcg

SEQ ID NO: 3093205 - RNA, 22 nt, Molluscum contagiosum virus
ccguuccacuacaagcagccgc

SEQ ID NO: 3093206 - RNA, 21 nt, Molluscum contagiosum virus
cuucguggccaaagucuuccu

SEQ ID NO: 3093207 - RNA, 20 nt, Molluscum contagiosum virus
gaagaggccagcacaagccg

SEQ ID NO: 3093208 - RNA, 16 nt, Molluscum contagiosum virus
aggcugcucccucucg

SEQ ID NO: 3093209 - RNA, 16 nt, Molluscum contagiosum virus
gaaacgggagucacuu

SEQ ID NO: 3093210 - RNA, 16 nt, Molluscum contagiosum virus
acaaggugcuguccuu

SEQ ID NO: 3093211 - RNA, 17 nt, Molluscum contagiosum virus
gacaagcuagacuggag

SEQ ID NO: 3093212 - RNA, 16 nt, Molluscum contagiosum virus
acgguagcuagcucug

SEQ ID NO: 3093213 - RNA, 22 nt, Molluscum contagiosum virus
cuggccgaugccuaugccgagg

SEQ ID NO: 3093214 - RNA, 18 nt, Molluscum contagiosum virus
ccggcucaagaacaccaa

SEQ ID NO: 3093215 - RNA, 18 nt, Molluscum contagiosum virus
cugcugguggugcuggag

SEQ ID NO: 3093216 - RNA, 17 nt, Molluscum contagiosum virus
cgcgcgccuugcagcgc

SEQ ID NO: 3093217 - RNA, 19 nt, Molluscum contagiosum virus
cccgacuuuucgcgccgcg

SEQ ID NO: 3093218 - RNA, 16 nt, Molluscum contagiosum virus
gacgacgccgagcccg

SEQ ID NO: 3093219 - RNA, 17 nt, Molluscum contagiosum virus
acgcgcgcgccucgcca

SEQ ID NO: 3093220 - RNA, 19 nt, Molluscum contagiosum virus
augcucaagcaccugcgcu

SEQ ID NO: 3093221 - RNA, 14 nt, Molluscum contagiosum virus
acgacgccgagccc

SEQ ID NO: 3093222 - RNA, 21 nt, Molluscum contagiosum virus
cuuccggagacaccagcuccg

SEQ ID NO: 3093223 - RNA, 13 nt, Molluscum contagiosum virus
ucgugucuguguu

SEQ ID NO: 3093224 - RNA, 12 nt, Molluscum contagiosum virus
ccgauguccugc

SEQ ID NO: 3093225 - RNA, 15 nt, Molluscum contagiosum virus
gcacgagcugcugcc

SEQ ID NO: 3093226 - RNA, 13 nt, Molluscum contagiosum virus
gacgugggcgacg

SEQ ID NO: 3093227 - RNA, 18 nt, Molluscum contagiosum virus
acacccgugcccgcuccg

SEQ ID NO: 3093228 - RNA, 20 nt, Molluscum contagiosum virus
gcccuccucgaccugcacga

SEQ ID NO: 3093229 - RNA, 20 nt, Molluscum contagiosum virus
gauuccgcuguacgugcugc

SEQ ID NO: 3093230 - RNA, 21 nt, Molluscum contagiosum virus
gugcacgcuguccaggcgcug

SEQ ID NO: 3093231 - RNA, 21 nt, Molluscum contagiosum virus
ugcgaaguuggucaacaacac

SEQ ID NO: 3093232 - RNA, 20 nt, Molluscum contagiosum virus
gcccgcgagcacgggcgcca

SEQ ID NO: 3093233 - RNA, 13 nt, Molluscum contagiosum virus
cgacgagcagcug

SEQ ID NO: 3093234 - RNA, 16 nt, Molluscum contagiosum virus
gcucgcucgcgcgcag

SEQ ID NO: 3093235 - RNA, 15 nt, Molluscum contagiosum virus
acagccccugcugcu

SEQ ID NO: 3093236 - RNA, 22 nt, Molluscum contagiosum virus
ccgacaucgugccgaagagcgu

SEQ ID NO: 3093237 - RNA, 20 nt, Molluscum contagiosum virus
cgcgcucgcucgcgcuccgc

SEQ ID NO: 3093238 - RNA, 22 nt, Molluscum contagiosum virus
augcuucccccuugcgucuccg

SEQ ID NO: 3093239 - RNA, 17 nt, Molluscum contagiosum virus
gcggaucgugcuggaga

SEQ ID NO: 3093240 - RNA, 18 nt, Molluscum contagiosum virus
ugcugccaauaccaggcc

SEQ ID NO: 3093241 - RNA, 23 nt, Molluscum contagiosum virus
agugaaggguguggccuacgugg

SEQ ID NO: 3093242 - RNA, 22 nt, Molluscum contagiosum virus
cgugcuccucgcguagcagcgc

SEQ ID NO: 3093243 - RNA, 17 nt, Molluscum contagiosum virus
cuggcgcucgcgcgcac

SEQ ID NO: 3093244 - RNA, 23 nt, Molluscum contagiosum virus
cgauuuguuugcaccggcaacag

SEQ ID NO: 3093245 - RNA, 13 nt, Molluscum contagiosum virus
gacagcucagcag

SEQ ID NO: 3093246 - RNA, 16 nt, Molluscum contagiosum virus
accggagacaccagcu

SEQ ID NO: 3093247 - RNA, 22 nt, Molluscum contagiosum virus
cccaagugcgcgugucuggagc

SEQ ID NO: 3093248 - RNA, 17 nt, Molluscum contagiosum virus
uguuuccuugccuucuc

SEQ ID NO: 3093249 - RNA, 16 nt, Molluscum contagiosum virus
guacuuucacgacugu

SEQ ID NO: 3093250 - RNA, 15 nt, Molluscum contagiosum virus
guucgcaacaaaaga

SEQ ID NO: 3093251 - RNA, 23 nt, Molluscum contagiosum virus
cgacgucgucaaggauguagccu

SEQ ID NO: 3093252 - RNA, 13 nt, Molluscum contagiosum virus
cuugugacccgca

SEQ ID NO: 3093253 - RNA, 18 nt, Molluscum contagiosum virus
cugccgcgagcacuggcu

SEQ ID NO: 3093254 - RNA, 15 nt, Molluscum contagiosum virus
agcuucgcgagcccg

SEQ ID NO: 3093255 - RNA, 15 nt, Molluscum contagiosum virus
ccgcgcgaacaaaaa

SEQ ID NO: 3093256 - RNA, 14 nt, Molluscum contagiosum virus
gaccgugcccugga

SEQ ID NO: 3093257 - RNA, 16 nt, Molluscum contagiosum virus
gcgcugcugcuucugc

SEQ ID NO: 3093258 - RNA, 16 nt, Molluscum contagiosum virus
ggcccgcggcgcgccg

SEQ ID NO: 3093259 - RNA, 18 nt, Molluscum contagiosum virus
gcaacgugcugcgccgcc

SEQ ID NO: 3093260 - RNA, 16 nt, Molluscum contagiosum virus
cucgugcugggccugc

SEQ ID NO: 3093261 - RNA, 14 nt, Molluscum contagiosum virus
ggaacagggaaaaa

SEQ ID NO: 3093262 - RNA, 23 nt, Molluscum contagiosum virus
ucgaccucugcuucacgcugcuc

SEQ ID NO: 3093263 - RNA, 22 nt, Molluscum contagiosum virus
gcacaccccuguaacaaggaaa

SEQ ID NO: 3093264 - RNA, 21 nt, Molluscum contagiosum virus
agggcuccuucuucagcaggc

SEQ ID NO: 3093265 - RNA, 23 nt, Molluscum contagiosum virus
ccggggaugaacgcgcugcgcca

SEQ ID NO: 3093266 - RNA, 17 nt, Molluscum contagiosum virus
gugaaucugacacuugc

SEQ ID NO: 3093267 - RNA, 17 nt, Molluscum contagiosum virus
gcccagcguggccagcu

SEQ ID NO: 3093268 - RNA, 12 nt, Molluscum contagiosum virus
uguuccugccgg

SEQ ID NO: 3093269 - RNA, 13 nt, Molluscum contagiosum virus
cugcugagcgggg

SEQ ID NO: 3093270 - RNA, 23 nt, Molluscum contagiosum virus
cuccugugucgcgcgagcaaaga

SEQ ID NO: 3093271 - RNA, 19 nt, Molluscum contagiosum virus
gcucuacgagacucuggaa

SEQ ID NO: 3093272 - RNA, 13 nt, Molluscum contagiosum virus
ggcgggugccgug

SEQ ID NO: 3093273 - RNA, 15 nt, Molluscum contagiosum virus
ugccgcgcgcgccgc

SEQ ID NO: 3093274 - RNA, 16 nt, Molluscum contagiosum virus
cucucgagcucacagg

SEQ ID NO: 3093275 - RNA, 13 nt, Molluscum contagiosum virus
cugggcaggccgc

SEQ ID NO: 3093276 - RNA, 22 nt, Molluscum contagiosum virus
uaucccagaaaacgcacugucg

SEQ ID NO: 3093277 - RNA, 21 nt, Molluscum contagiosum virus
gagcuugcgcgcggugcgggc

SEQ ID NO: 3093278 - RNA, 17 nt, Molluscum contagiosum virus
gaacuggcgcagcagga

SEQ ID NO: 3093279 - RNA, 14 nt, Molluscum contagiosum virus
agcuagugcacacc

SEQ ID NO: 3093280 - RNA, 17 nt, Molluscum contagiosum virus
aguacgauggaugcugg

SEQ ID NO: 3093281 - RNA, 15 nt, Molluscum contagiosum virus
ggcgggcggcgucgc

SEQ ID NO: 3093282 - RNA, 13 nt, Molluscum contagiosum virus
cuccgagcgcgcg

SEQ ID NO: 3093283 - RNA, 13 nt, Molluscum contagiosum virus
gccgccgcccgcg

SEQ ID NO: 3093284 - RNA, 16 nt, Molluscum contagiosum virus
cgggugccgugccccu

SEQ ID NO: 3093285 - RNA, 14 nt, Molluscum contagiosum virus
gaggaccccgccgc

SEQ ID NO: 3093286 - RNA, 23 nt, Molluscum contagiosum virus
cagcucgccgcgcgccgcugcuc

SEQ ID NO: 3093287 - RNA, 21 nt, Molluscum contagiosum virus
ccagcucgacacugugcuggc

SEQ ID NO: 3093288 - RNA, 19 nt, Molluscum contagiosum virus
agccucccccgcgcacugc

SEQ ID NO: 3093289 - RNA, 16 nt, Molluscum contagiosum virus
caaggaaaaggcacac

SEQ ID NO: 3093290 - RNA, 16 nt, Molluscum contagiosum virus
acaacucugcucgugc

SEQ ID NO: 3093291 - RNA, 18 nt, Molluscum contagiosum virus
ccugccgcgagcacuggc

SEQ ID NO: 3093292 - RNA, 18 nt, Molluscum contagiosum virus
gaacgucuucgagagccu

SEQ ID NO: 3093293 - RNA, 16 nt, Molluscum contagiosum virus
ugguccggcgugagcu

SEQ ID NO: 3093294 - RNA, 20 nt, Molluscum contagiosum virus
gccggucuccacguggccag

SEQ ID NO: 3093295 - RNA, 18 nt, Molluscum contagiosum virus
acagccgcuuucugggcg

SEQ ID NO: 3093296 - RNA, 21 nt, Molluscum contagiosum virus
cgucuuuuugcggcgccgccg

SEQ ID NO: 3093297 - RNA, 14 nt, Molluscum contagiosum virus
gcggcgccgcagcu

SEQ ID NO: 3093298 - RNA, 16 nt, Molluscum contagiosum virus
cgcgcguugccugaga

SEQ ID NO: 3093299 - RNA, 17 nt, Molluscum contagiosum virus
gcacgucuuugacccca

SEQ ID NO: 3093300 - RNA, 18 nt, Molluscum contagiosum virus
cggcguccggugcucgcc

SEQ ID NO: 3093301 - RNA, 16 nt, Molluscum contagiosum virus
cguuccacuacaagca

SEQ ID NO: 3093302 - RNA, 14 nt, Molluscum contagiosum virus
cgccgcgggcacau

SEQ ID NO: 3093303 - RNA, 15 nt, Molluscum contagiosum virus
gacaccagcggcagg

SEQ ID NO: 3093304 - RNA, 18 nt, Molluscum contagiosum virus
ccagcguuuccucuggcu

SEQ ID NO: 3093305 - RNA, 14 nt, Molluscum contagiosum virus
cuggccaacacuac

SEQ ID NO: 3093306 - RNA, 23 nt, Molluscum contagiosum virus
cuguugccuggagggcagugcca

SEQ ID NO: 3093307 - RNA, 14 nt, Molluscum contagiosum virus
ucccaggaagacgu

SEQ ID NO: 3093308 - RNA, 14 nt, Molluscum contagiosum virus
gcgcgcgccagcag

SEQ ID NO: 3093309 - RNA, 16 nt, Molluscum contagiosum virus
accacagucggugcca

SEQ ID NO: 3093310 - RNA, 20 nt, Molluscum contagiosum virus
uugcucgcgcuccugcguga

SEQ ID NO: 3093311 - RNA, 21 nt, Molluscum contagiosum virus
cucgagcgcgcgccugcuggc

SEQ ID NO: 3093312 - RNA, 19 nt, Molluscum contagiosum virus
cguggucgcgcgcgcucug

SEQ ID NO: 3093313 - RNA, 16 nt, Molluscum contagiosum virus
gccccgacgccagcgc

SEQ ID NO: 3093314 - RNA, 14 nt, Molluscum contagiosum virus
cuuacugcugcaau

SEQ ID NO: 3093315 - RNA, 18 nt, Molluscum contagiosum virus
guacgagcagcugcugcg

SEQ ID NO: 3093316 - RNA, 15 nt, Molluscum contagiosum virus
ccgcggccugggcca

SEQ ID NO: 3093317 - RNA, 13 nt, Molluscum contagiosum virus
ggcaacugccugc

SEQ ID NO: 3093318 - RNA, 18 nt, Molluscum contagiosum virus
ccuccugcaccugcugga

SEQ ID NO: 3093319 - RNA, 14 nt, Molluscum contagiosum virus
cacacgcaccgccu

SEQ ID NO: 3093320 - RNA, 19 nt, Molluscum contagiosum virus
ggacgcgcuugcgcggaag

SEQ ID NO: 3093321 - RNA, 13 nt, Molluscum contagiosum virus
caagcacugccuc

SEQ ID NO: 3093322 - RNA, 15 nt, Molluscum contagiosum virus
gagacgcugcugcac

SEQ ID NO: 3093323 - RNA, 18 nt, Molluscum contagiosum virus
ccgucuugcgcacacacu

SEQ ID NO: 3093324 - RNA, 19 nt, Molluscum contagiosum virus
cagagcugcccgccagaag

SEQ ID NO: 3093325 - RNA, 16 nt, Molluscum contagiosum virus
agggagccucgcuggu

SEQ ID NO: 3093326 - RNA, 20 nt, Molluscum contagiosum virus
gcagcacaugcaggccgaga

SEQ ID NO: 3093327 - RNA, 20 nt, Molluscum contagiosum virus
gaggcccaggccauggagcg

SEQ ID NO: 3093328 - RNA, 17 nt, Molluscum contagiosum virus
acaugccgcgcugcucc

SEQ ID NO: 3093329 - RNA, 17 nt, Molluscum contagiosum virus
uacuccacuaccaacuc

SEQ ID NO: 3093330 - RNA, 17 nt, Molluscum contagiosum virus
aguaucggcaacauuua

SEQ ID NO: 3093331 - RNA, 21 nt, Molluscum contagiosum virus
guccccguccgugucgagcug

SEQ ID NO: 3093332 - RNA, 22 nt, Molluscum contagiosum virus
ccuugucgagacaggccggggc

SEQ ID NO: 3093333 - RNA, 23 nt, Molluscum contagiosum virus
ggcacgcugcguuuccagggcag

SEQ ID NO: 3093334 - RNA, 17 nt, Molluscum contagiosum virus
gccugcacuacugcucc

SEQ ID NO: 3093335 - RNA, 15 nt, Molluscum contagiosum virus
ccgcggcgacgucaa

SEQ ID NO: 3093336 - RNA, 13 nt, Molluscum contagiosum virus
cgcccgugccgcc

SEQ ID NO: 3093337 - RNA, 22 nt, Molluscum contagiosum virus
cguguacaugaugcccugguga

SEQ ID NO: 3093338 - RNA, 15 nt, Molluscum contagiosum virus
aacaugaaggaaagu

SEQ ID NO: 3093339 - RNA, 11 nt, Molluscum contagiosum virus
ucccucugugc

SEQ ID NO: 3093340 - RNA, 22 nt, Molluscum contagiosum virus
cgggaaggggugauggcgguga

SEQ ID NO: 3093341 - RNA, 15 nt, Molluscum contagiosum virus
gacgcagcgcgagcu

SEQ ID NO: 3093342 - RNA, 22 nt, Molluscum contagiosum virus
ccagcgacaccgacgaggugcg

SEQ ID NO: 3093343 - RNA, 21 nt, Molluscum contagiosum virus
ccgcaaggaaaacugcauccu

SEQ ID NO: 3093344 - RNA, 14 nt, Molluscum contagiosum virus
cgcucgcgugccgc

SEQ ID NO: 3093345 - RNA, 19 nt, Molluscum contagiosum virus
gugcgugcccagcagguag

SEQ ID NO: 3093346 - RNA, 20 nt, Molluscum contagiosum virus
gccacugccacggcugcaag

SEQ ID NO: 3093347 - RNA, 15 nt, Molluscum contagiosum virus
uggcuucgcaagcau

SEQ ID NO: 3093348 - RNA, 21 nt, Molluscum contagiosum virus
ugcgcgagacgcugcugcaca

SEQ ID NO: 3093349 - RNA, 16 nt, Molluscum contagiosum virus
cgcgccgcgccgcacg

SEQ ID NO: 3093350 - RNA, 15 nt, Molluscum contagiosum virus
ugcccgcgcgcgacu

SEQ ID NO: 3093351 - RNA, 22 nt, Molluscum contagiosum virus
gcgugacccucuucgacuuacg

SEQ ID NO: 3093352 - RNA, 17 nt, Molluscum contagiosum virus
acccaucggagaagugc

SEQ ID NO: 3093353 - RNA, 14 nt, Molluscum contagiosum virus
cuagacuggagcac

SEQ ID NO: 3093354 - RNA, 12 nt, Molluscum contagiosum virus
cucgcagccucc

SEQ ID NO: 3093355 - RNA, 20 nt, Molluscum contagiosum virus
gccugcgcgagcaagcgccc

SEQ ID NO: 3093356 - RNA, 13 nt, Molluscum contagiosum virus
cgucgcgcaggcg

SEQ ID NO: 3093357 - RNA, 15 nt, Molluscum contagiosum virus
ugccgcgggacgaga

SEQ ID NO: 3093358 - RNA, 22 nt, Molluscum contagiosum virus
ggcgagcaagauggugucgccg

SEQ ID NO: 3093359 - RNA, 15 nt, Molluscum contagiosum virus
ccucggucaacggca

SEQ ID NO: 3093360 - RNA, 20 nt, Molluscum contagiosum virus
cuacgcgagcacugcgcgcg

SEQ ID NO: 3093361 - RNA, 12 nt, Molluscum contagiosum virus
ccgcgcgcgccg

SEQ ID NO: 3093362 - RNA, 13 nt, Molluscum contagiosum virus
cgcaauucccggc

SEQ ID NO: 3093363 - RNA, 18 nt, Molluscum contagiosum virus
caucuagccuccuugucu

SEQ ID NO: 3093364 - RNA, 12 nt, Molluscum contagiosum virus
ugcggcggcucg

SEQ ID NO: 3093365 - RNA, 15 nt, Molluscum contagiosum virus
ugacggcagcaagcg

SEQ ID NO: 3093366 - RNA, 19 nt, Molluscum contagiosum virus
caccguugccgcggcagug

SEQ ID NO: 3093367 - RNA, 18 nt, Molluscum contagiosum virus
cuagcgugagagcaaaga

SEQ ID NO: 3093368 - RNA, 12 nt, Molluscum contagiosum virus
cagcaccugcag

SEQ ID NO: 3093369 - RNA, 16 nt, Molluscum contagiosum virus
acgaaagcaaaggagu

SEQ ID NO: 3093370 - RNA, 14 nt, Molluscum contagiosum virus
aggcacccaccagg

SEQ ID NO: 3093371 - RNA, 15 nt, Molluscum contagiosum virus
caccucgagcucguu

SEQ ID NO: 3093372 - RNA, 17 nt, Molluscum contagiosum virus
uguggcgccgaugcagu

SEQ ID NO: 3093373 - RNA, 15 nt, Molluscum contagiosum virus
ccgacucggugcuca

SEQ ID NO: 3093374 - RNA, 18 nt, Molluscum contagiosum virus
ggccgcauuuucucugga

SEQ ID NO: 3093375 - RNA, 21 nt, Molluscum contagiosum virus
ggccguguacaugcucaagca

SEQ ID NO: 3093376 - RNA, 18 nt, Molluscum contagiosum virus
gcugguucugcucgcagg

SEQ ID NO: 3093377 - RNA, 20 nt, Molluscum contagiosum virus
cgcacgauguacuccaccau

SEQ ID NO: 3093378 - RNA, 12 nt, Molluscum contagiosum virus
ggacagcaaaca

SEQ ID NO: 3093379 - RNA, 20 nt, Molluscum contagiosum virus
cacgugcucaagugcgucga

SEQ ID NO: 3093380 - RNA, 16 nt, Molluscum contagiosum virus
gcugcgcuggaugcug

SEQ ID NO: 3093381 - RNA, 21 nt, Molluscum contagiosum virus
uggccuguaguagcagcuucu

SEQ ID NO: 3093382 - RNA, 14 nt, Molluscum contagiosum virus
gcgcgcgcgaacgc

SEQ ID NO: 3093383 - RNA, 17 nt, Molluscum contagiosum virus
uccaaaagacagaggcc

SEQ ID NO: 3093384 - RNA, 19 nt, Molluscum contagiosum virus
cagucgccuuccugcgccc

SEQ ID NO: 3093385 - RNA, 19 nt, Molluscum contagiosum virus
ggggcugucagaggauucu

SEQ ID NO: 3093386 - RNA, 17 nt, Molluscum contagiosum virus
ugcaguuccaccucgag

SEQ ID NO: 3093387 - RNA, 20 nt, Molluscum contagiosum virus
gccgcuccuucgaagagguc

SEQ ID NO: 3093388 - RNA, 21 nt, Molluscum contagiosum virus
caagaaacgggagucacuucu

SEQ ID NO: 3093389 - RNA, 16 nt, Molluscum contagiosum virus
aggcgccgaagagugc

SEQ ID NO: 3093390 - RNA, 18 nt, Molluscum contagiosum virus
cagggcggcgccugcgcc

SEQ ID NO: 3093391 - RNA, 17 nt, Molluscum contagiosum virus
auccaugucgagcccug

SEQ ID NO: 3093392 - RNA, 18 nt, Molluscum contagiosum virus
gcgcugcugacacgcucu

SEQ ID NO: 3093393 - RNA, 23 nt, Molluscum contagiosum virus
gaguacgagcgcguaagaccaug

SEQ ID NO: 3093394 - RNA, 22 nt, Molluscum contagiosum virus
uccacgaugaacggcuccuuga

SEQ ID NO: 3093395 - RNA, 18 nt, Molluscum contagiosum virus
gcacuguguccccugagc

SEQ ID NO: 3093396 - RNA, 18 nt, Molluscum contagiosum virus
acugcggacaccagaacc

SEQ ID NO: 3093397 - RNA, 16 nt, Molluscum contagiosum virus
gcucucgcugcugccc

SEQ ID NO: 3093398 - RNA, 12 nt, Molluscum contagiosum virus
agccugcucacg

SEQ ID NO: 3093399 - RNA, 17 nt, Molluscum contagiosum virus
cugaggaagcaagaccc

SEQ ID NO: 3093400 - RNA, 14 nt, Molluscum contagiosum virus
cccacgugccaaga

SEQ ID NO: 3093401 - RNA, 20 nt, Molluscum contagiosum virus
agcugacccucgcggcucug

SEQ ID NO: 3093402 - RNA, 20 nt, Molluscum contagiosum virus
caggucaucgacgagcacga

SEQ ID NO: 3093403 - RNA, 14 nt, Molluscum contagiosum virus
gcccccgagcgcuu

SEQ ID NO: 3093404 - RNA, 21 nt, Molluscum contagiosum virus
guccggcaugcgcgcgcugcc

SEQ ID NO: 3093405 - RNA, 14 nt, Molluscum contagiosum virus
uaccccgcaggaaa

SEQ ID NO: 3093406 - RNA, 17 nt, Molluscum contagiosum virus
cgcagccuccgugcgcc

SEQ ID NO: 3093407 - RNA, 11 nt, Molluscum contagiosum virus
guguuucucgc

SEQ ID NO: 3093408 - RNA, 14 nt, Molluscum contagiosum virus
cgcugcgccacugc

SEQ ID NO: 3093409 - RNA, 21 nt, Molluscum contagiosum virus
ggccugcugaagaaggagccc

SEQ ID NO: 3093410 - RNA, 19 nt, Molluscum contagiosum virus
ugccagcgccagccugcug

SEQ ID NO: 3093411 - RNA, 23 nt, Molluscum contagiosum virus
gccgaugccuaugccgagguggc

SEQ ID NO: 3093412 - RNA, 18 nt, Molluscum contagiosum virus
auggacaaagaugcagcc

SEQ ID NO: 3093413 - RNA, 16 nt, Molluscum contagiosum virus
gccuacgugcugcgca

SEQ ID NO: 3093414 - RNA, 16 nt, Molluscum contagiosum virus
gcgcgggagcucacgg

SEQ ID NO: 3093415 - RNA, 15 nt, Molluscum contagiosum virus
ccccggcgccggcac

SEQ ID NO: 3093416 - RNA, 23 nt, Molluscum contagiosum virus
ugcgcaucccugcgcaccugcac

SEQ ID NO: 3093417 - RNA, 14 nt, Molluscum contagiosum virus
gcgcgugcuggacg

SEQ ID NO: 3093418 - RNA, 22 nt, Molluscum contagiosum virus
uguucaccaccaccagcacgcu

SEQ ID NO: 3093419 - RNA, 16 nt, Molluscum contagiosum virus
cugcgcuacauguaug

SEQ ID NO: 3093420 - RNA, 21 nt, Molluscum contagiosum virus
auugcccgcgcgcggacagcc

SEQ ID NO: 3093421 - RNA, 20 nt, Molluscum contagiosum virus
gagacggaaauguuguuuga

SEQ ID NO: 3093422 - RNA, 14 nt, Molluscum contagiosum virus
ccaggaacagggaa

SEQ ID NO: 3093423 - RNA, 15 nt, Molluscum contagiosum virus
ccaugcgcagugccu

SEQ ID NO: 3093424 - RNA, 20 nt, Molluscum contagiosum virus
agucaggcaaaagccgccgc

SEQ ID NO: 3093425 - RNA, 19 nt, Molluscum contagiosum virus
acagucuagugcguccgcc

SEQ ID NO: 3093426 - RNA, 13 nt, Molluscum contagiosum virus
cgaagagcagaag

SEQ ID NO: 3093427 - RNA, 22 nt, Molluscum contagiosum virus
gccagccgcucguccagcugcg

SEQ ID NO: 3093428 - RNA, 19 nt, Molluscum contagiosum virus
gcgccggaaacggaccugg

SEQ ID NO: 3093429 - RNA, 22 nt, Molluscum contagiosum virus
ggucaagaacaugugcuccgcc

SEQ ID NO: 3093430 - RNA, 14 nt, Molluscum contagiosum virus
gauggacgccagcu

SEQ ID NO: 3093431 - RNA, 18 nt, Molluscum contagiosum virus
agucgccuuccugcgccc

SEQ ID NO: 3093432 - RNA, 23 nt, Molluscum contagiosum virus
gauggcgccugcuucgcgccgcc

SEQ ID NO: 3093433 - RNA, 22 nt, Molluscum contagiosum virus
cccgcaggaaagguaccccgca

SEQ ID NO: 3093434 - RNA, 21 nt, Molluscum contagiosum virus
cuggacugagccgcaagcaca

SEQ ID NO: 3093435 - RNA, 14 nt, Molluscum contagiosum virus
aacgcgggccaggc

SEQ ID NO: 3093436 - RNA, 19 nt, Molluscum contagiosum virus
ggaaccguggugcgcgacc

SEQ ID NO: 3093437 - RNA, 21 nt, Molluscum contagiosum virus
gcgcgcgucgagggcgccggg

SEQ ID NO: 3093438 - RNA, 14 nt, Molluscum contagiosum virus
ggcgcgcugugagc

SEQ ID NO: 3093439 - RNA, 12 nt, Molluscum contagiosum virus
gccgcgggcaca

SEQ ID NO: 3093440 - RNA, 13 nt, Molluscum contagiosum virus
gacagcauccugg

SEQ ID NO: 3093441 - RNA, 14 nt, Molluscum contagiosum virus
cugccgggagagcc

SEQ ID NO: 3093442 - RNA, 16 nt, Molluscum contagiosum virus
gggcuccuucuucuuu

SEQ ID NO: 3093443 - RNA, 15 nt, Molluscum contagiosum virus
uguaguuaaaugacg

SEQ ID NO: 3093444 - RNA, 18 nt, Molluscum contagiosum virus
acacgcugcgcgugcugg

SEQ ID NO: 3093445 - RNA, 22 nt, Molluscum contagiosum virus
ucucgauggcgccguuggccac

SEQ ID NO: 3093446 - RNA, 12 nt, Molluscum contagiosum virus
ugaacaagcugc

SEQ ID NO: 3093447 - RNA, 22 nt, Molluscum contagiosum virus
guggcgcgaagugaacucuucc

SEQ ID NO: 3093448 - RNA, 18 nt, Molluscum contagiosum virus
cgcacgcgcgggcaucaa

SEQ ID NO: 3093449 - RNA, 14 nt, Molluscum contagiosum virus
ccgguacugcugca

SEQ ID NO: 3093450 - RNA, 12 nt, Molluscum contagiosum virus
cccagguggagc

SEQ ID NO: 3093451 - RNA, 21 nt, Molluscum contagiosum virus
gcuuagcuuccgucugcugcu

SEQ ID NO: 3093452 - RNA, 20 nt, Molluscum contagiosum virus
augcgguguguguucucaaa

SEQ ID NO: 3093453 - RNA, 20 nt, Molluscum contagiosum virus
cggcagcgacuacgcgcugc

SEQ ID NO: 3093454 - RNA, 15 nt, Molluscum contagiosum virus
cuagugcugcugggc

SEQ ID NO: 3093455 - RNA, 21 nt, Molluscum contagiosum virus
cguacgagcaggcgcagcgcg

SEQ ID NO: 3093456 - RNA, 15 nt, Molluscum contagiosum virus
cggcgcccgugagca

SEQ ID NO: 3093457 - RNA, 13 nt, Molluscum contagiosum virus
ccguccgcgcagc

SEQ ID NO: 3093458 - RNA, 15 nt, Molluscum contagiosum virus
gcagcguuccaggaa

SEQ ID NO: 3093459 - RNA, 14 nt, Molluscum contagiosum virus
gcgcuggagaaaga

SEQ ID NO: 3093460 - RNA, 15 nt, Molluscum contagiosum virus
cgccggacagcucag

SEQ ID NO: 3093461 - RNA, 13 nt, Molluscum contagiosum virus
agaucaggcagcu

SEQ ID NO: 3093462 - RNA, 20 nt, Molluscum contagiosum virus
auuucguucgacuacacgcg

SEQ ID NO: 3093463 - RNA, 20 nt, Molluscum contagiosum virus
agacauuucuccuccggggc

SEQ ID NO: 3093464 - RNA, 17 nt, Molluscum contagiosum virus
cgcgcaguucgagcugc

SEQ ID NO: 3093465 - RNA, 13 nt, Molluscum contagiosum virus
uggacagcaagca

SEQ ID NO: 3093466 - RNA, 15 nt, Molluscum contagiosum virus
ggcacccaccaggaa

SEQ ID NO: 3093467 - RNA, 14 nt, Molluscum contagiosum virus
ggagggagagcugc

SEQ ID NO: 3093468 - RNA, 13 nt, Molluscum contagiosum virus
cuuuucuaggccu

SEQ ID NO: 3093469 - RNA, 16 nt, Molluscum contagiosum virus
caacauggugcuggcc

SEQ ID NO: 3093470 - RNA, 23 nt, Molluscum contagiosum virus
cagccauggccuguaguagcagc

SEQ ID NO: 3093471 - RNA, 14 nt, Molluscum contagiosum virus
cgggcccgcgaacg

SEQ ID NO: 3093472 - RNA, 15 nt, Molluscum contagiosum virus
agcaccgcaugggcc

SEQ ID NO: 3093473 - RNA, 16 nt, Molluscum contagiosum virus
caaugaggagaggaac

SEQ ID NO: 3093474 - RNA, 18 nt, Molluscum contagiosum virus
acucgcugcugcucuucc

SEQ ID NO: 3093475 - RNA, 13 nt, Molluscum contagiosum virus
cucagaccagagu

SEQ ID NO: 3093476 - RNA, 22 nt, Molluscum contagiosum virus
ccugguacgcgcgcgcgcucac

SEQ ID NO: 3093477 - RNA, 18 nt, Molluscum contagiosum virus
acgcugcacgagcugcug

SEQ ID NO: 3093478 - RNA, 17 nt, Molluscum contagiosum virus
cguggccaggccgcgcc

SEQ ID NO: 3093479 - RNA, 11 nt, Molluscum contagiosum virus
gcacaguucac

SEQ ID NO: 3093480 - RNA, 18 nt, Molluscum contagiosum virus
ggucguccuggagccuag

SEQ ID NO: 3093481 - RNA, 23 nt, Molluscum contagiosum virus
gccaccagcgcggccguggcugc

SEQ ID NO: 3093482 - RNA, 17 nt, Molluscum contagiosum virus
uccccgaacugcugggc

SEQ ID NO: 3093483 - RNA, 14 nt, Molluscum contagiosum virus
ugauuugcgcacca

SEQ ID NO: 3093484 - RNA, 21 nt, Molluscum contagiosum virus
cugcgugugccggugcugcgg

SEQ ID NO: 3093485 - RNA, 19 nt, Molluscum contagiosum virus
gcucguuuucggauagccc

SEQ ID NO: 3093486 - RNA, 18 nt, Molluscum contagiosum virus
acgucauuguaaaacgac

SEQ ID NO: 3093487 - RNA, 22 nt, Molluscum contagiosum virus
acgcugccggcaacgcugccgc

SEQ ID NO: 3093488 - RNA, 21 nt, Molluscum contagiosum virus
gugcaugacggcgcgagccag

SEQ ID NO: 3093489 - RNA, 20 nt, Molluscum contagiosum virus
cguguacgacgugcugcugc

SEQ ID NO: 3093490 - RNA, 16 nt, Molluscum contagiosum virus
cccgcgcccgcgccgc

SEQ ID NO: 3093491 - RNA, 18 nt, Molluscum contagiosum virus
acgugcuuccccgccauc

SEQ ID NO: 3093492 - RNA, 19 nt, Molluscum contagiosum virus
ccuggucuucccgcuggcg

SEQ ID NO: 3093493 - RNA, 14 nt, Molluscum contagiosum virus
ggaugccugccagc

SEQ ID NO: 3093494 - RNA, 19 nt, Molluscum contagiosum virus
acaggcgcggcagccgcag

SEQ ID NO: 3093495 - RNA, 21 nt, Molluscum contagiosum virus
gcaccguaccgcgcccgccag

SEQ ID NO: 3093496 - RNA, 18 nt, Molluscum contagiosum virus
gcuccgcggaggccaagc

SEQ ID NO: 3093497 - RNA, 14 nt, Molluscum contagiosum virus
agcgccgccagcuc

SEQ ID NO: 3093498 - RNA, 14 nt, Molluscum contagiosum virus
cgcgugccuguggc

SEQ ID NO: 3093499 - RNA, 20 nt, Molluscum contagiosum virus
caggaacgaggaaaggcaca

SEQ ID NO: 3093500 - RNA, 14 nt, Molluscum contagiosum virus
cuugcauguucucu

SEQ ID NO: 3093501 - RNA, 14 nt, Molluscum contagiosum virus
gcacacgcaccgcc

SEQ ID NO: 3093502 - RNA, 21 nt, Molluscum contagiosum virus
ucacaagcaccgccugcugca

SEQ ID NO: 3093503 - RNA, 15 nt, Molluscum contagiosum virus
gcaaccgcgugcgug

SEQ ID NO: 3093504 - RNA, 12 nt, Molluscum contagiosum virus
cgcgcccacggg

SEQ ID NO: 3093505 - RNA, 14 nt, Molluscum contagiosum virus
uacgcuacagcagc

SEQ ID NO: 3093506 - RNA, 20 nt, Molluscum contagiosum virus
gcucuacggcgaguucugcc

SEQ ID NO: 3093507 - RNA, 21 nt, Molluscum contagiosum virus
gaacaccuccugcuuugcacg

SEQ ID NO: 3093508 - RNA, 23 nt, Molluscum contagiosum virus
guccccgagcagcggggacucuc

SEQ ID NO: 3093509 - RNA, 17 nt, Molluscum contagiosum virus
ggccuguucggcaugca

SEQ ID NO: 3093510 - RNA, 15 nt, Molluscum contagiosum virus
accuggcggcgcugg

SEQ ID NO: 3093511 - RNA, 13 nt, Molluscum contagiosum virus
uucguggcgcugg

SEQ ID NO: 3093512 - RNA, 22 nt, Molluscum contagiosum virus
gauggaggcccaggccauggag

SEQ ID NO: 3093513 - RNA, 20 nt, Molluscum contagiosum virus
cgcgcgcuagccgccgcugc

SEQ ID NO: 3093514 - RNA, 14 nt, Molluscum contagiosum virus
gcgugcugcagccc

SEQ ID NO: 3093515 - RNA, 22 nt, Molluscum contagiosum virus
ggaacgaggaaaggcacacccc

SEQ ID NO: 3093516 - RNA, 23 nt, Molluscum contagiosum virus
ucagaaauacaccggcuuggcca

SEQ ID NO: 3093517 - RNA, 14 nt, Molluscum contagiosum virus
uccagcgcgcucga

SEQ ID NO: 3093518 - RNA, 16 nt, Molluscum contagiosum virus
uggauaccaugcucuc

SEQ ID NO: 3093519 - RNA, 16 nt, Molluscum contagiosum virus
gaacgcgcaagugugc

SEQ ID NO: 3093520 - RNA, 21 nt, Molluscum contagiosum virus
cguucgcaacaaaagagcgcg

SEQ ID NO: 3093521 - RNA, 14 nt, Molluscum contagiosum virus
acgcgcgugguaca

SEQ ID NO: 3093522 - RNA, 16 nt, Molluscum contagiosum virus
cgauguacuccaccau

SEQ ID NO: 3093523 - RNA, 23 nt, Molluscum contagiosum virus
gugcugcugcggcugcuggagcu

SEQ ID NO: 3093524 - RNA, 22 nt, Molluscum contagiosum virus
cgacacgagcgaguugagcagg

SEQ ID NO: 3093525 - RNA, 15 nt, Molluscum contagiosum virus
ugcagagcgugcugg

SEQ ID NO: 3093526 - RNA, 19 nt, Molluscum contagiosum virus
ucguucgcggggccggcuu

SEQ ID NO: 3093527 - RNA, 22 nt, Molluscum contagiosum virus
uccauugcauggacauccucac

SEQ ID NO: 3093528 - RNA, 21 nt, Molluscum contagiosum virus
cuguucggcaugcagcgcagg

SEQ ID NO: 3093529 - RNA, 21 nt, Molluscum contagiosum virus
cgccuccaagaagaggccggc

SEQ ID NO: 3093530 - RNA, 20 nt, Molluscum contagiosum virus
acgaggucgcguccacgcag

SEQ ID NO: 3093531 - RNA, 19 nt, Molluscum contagiosum virus
gcaacgcacaaaacacaaa

SEQ ID NO: 3093532 - RNA, 10 nt, Molluscum contagiosum virus
ccggcugccc

SEQ ID NO: 3093533 - RNA, 23 nt, Molluscum contagiosum virus
acgggcacgccgugggcagcuuc

SEQ ID NO: 3093534 - RNA, 13 nt, Molluscum contagiosum virus
ugcagcagcacag

SEQ ID NO: 3093535 - RNA, 15 nt, Molluscum contagiosum virus
cgcgccugccgccug

SEQ ID NO: 3093536 - RNA, 20 nt, Molluscum contagiosum virus
aguggcguccgcacgaggag

SEQ ID NO: 3093537 - RNA, 22 nt, Molluscum contagiosum virus
gcaccgcgccccacugugccag

SEQ ID NO: 3093538 - RNA, 19 nt, Molluscum contagiosum virus
aguagcgcucgcccagcuc

SEQ ID NO: 3093539 - RNA, 14 nt, Molluscum contagiosum virus
cggacgcgggccgc

SEQ ID NO: 3093540 - RNA, 11 nt, Molluscum contagiosum virus
agcucuucccc

SEQ ID NO: 3093541 - RNA, 19 nt, Molluscum contagiosum virus
gccuccgguacguacagug

SEQ ID NO: 3093542 - RNA, 17 nt, Molluscum contagiosum virus
cccgcugcacgcucuuc

SEQ ID NO: 3093543 - RNA, 21 nt, Molluscum contagiosum virus
ggcaccugcaggaaaggcacc

SEQ ID NO: 3093544 - RNA, 14 nt, Molluscum contagiosum virus
accuuccugggcgg

SEQ ID NO: 3093545 - RNA, 12 nt, Molluscum contagiosum virus
ccacuggugugu

SEQ ID NO: 3093546 - RNA, 13 nt, Molluscum contagiosum virus
ccucgagcagcgg

SEQ ID NO: 3093547 - RNA, 18 nt, Molluscum contagiosum virus
ccuggcagugccgggcgc

SEQ ID NO: 3093548 - RNA, 23 nt, Molluscum contagiosum virus
uguguacgacgcgcccacgugcc

SEQ ID NO: 3093549 - RNA, 19 nt, Molluscum contagiosum virus
augcgcgggcuacuuuucg

SEQ ID NO: 3093550 - RNA, 14 nt, Molluscum contagiosum virus
agaccaccagcacc

SEQ ID NO: 3093551 - RNA, 23 nt, Molluscum contagiosum virus
cuuccgcgagcacguggacagca

SEQ ID NO: 3093552 - RNA, 14 nt, Molluscum contagiosum virus
gggcgcgggccugu

SEQ ID NO: 3093553 - RNA, 22 nt, Molluscum contagiosum virus
guaguugcgagccagccaggcg

SEQ ID NO: 3093554 - RNA, 21 nt, Molluscum contagiosum virus
ggcacgggcucgagcucuucu

SEQ ID NO: 3093555 - RNA, 14 nt, Molluscum contagiosum virus
ugagugcugagcca

SEQ ID NO: 3093556 - RNA, 17 nt, Molluscum contagiosum virus
cgcgugaguccgcggcg

SEQ ID NO: 3093557 - RNA, 14 nt, Molluscum contagiosum virus
aggccuugcuccca

SEQ ID NO: 3093558 - RNA, 21 nt, Molluscum contagiosum virus
cugcuggccaacccucgcaag

SEQ ID NO: 3093559 - RNA, 17 nt, Molluscum contagiosum virus
guagcgcucgcccagcu

SEQ ID NO: 3093560 - RNA, 13 nt, Molluscum contagiosum virus
gagcgcagcugcc

SEQ ID NO: 3093561 - RNA, 18 nt, Molluscum contagiosum virus
gcaagcuucgggccgcug

SEQ ID NO: 3093562 - RNA, 21 nt, Molluscum contagiosum virus
cguggcgcgcgacgugugcuc

SEQ ID NO: 3093563 - RNA, 17 nt, Molluscum contagiosum virus
agagcauuagcagcgag

SEQ ID NO: 3093564 - RNA, 14 nt, Molluscum contagiosum virus
aaugcgcacacuug

SEQ ID NO: 3093565 - RNA, 17 nt, Molluscum contagiosum virus
aggagacguagagcagc

SEQ ID NO: 3093566 - RNA, 22 nt, Molluscum contagiosum virus
cagcaggugcacgugcugcagc

SEQ ID NO: 3093567 - RNA, 12 nt, Molluscum contagiosum virus
gcacgggcgcag

SEQ ID NO: 3093568 - RNA, 16 nt, Molluscum contagiosum virus
aggucuuccacaugcc

SEQ ID NO: 3093569 - RNA, 12 nt, Molluscum contagiosum virus
acucgcugcugc

SEQ ID NO: 3093570 - RNA, 20 nt, Molluscum contagiosum virus
ccguguaagcccgcuaugaa

SEQ ID NO: 3093571 - RNA, 17 nt, Molluscum contagiosum virus
ugcucgccagcagguuc

SEQ ID NO: 3093572 - RNA, 18 nt, Molluscum contagiosum virus
cagcugcgcgagccgcug

SEQ ID NO: 3093573 - RNA, 16 nt, Molluscum contagiosum virus
guacaggcgcggcagc

SEQ ID NO: 3093574 - RNA, 23 nt, Molluscum contagiosum virus
cgccgcgcaugacagccauggcc

SEQ ID NO: 3093575 - RNA, 14 nt, Molluscum contagiosum virus
gcgcaccugcuaga

SEQ ID NO: 3093576 - RNA, 20 nt, Molluscum contagiosum virus
gucaauggcgcgcgagcaca

SEQ ID NO: 3093577 - RNA, 16 nt, Molluscum contagiosum virus
guccucgacaaugagc

SEQ ID NO: 3093578 - RNA, 14 nt, Molluscum contagiosum virus
cgcgcgcaccugca

SEQ ID NO: 3093579 - RNA, 22 nt, Molluscum contagiosum virus
cccguggccgagccgcuggccg

SEQ ID NO: 3093580 - RNA, 13 nt, Molluscum contagiosum virus
uagccuacguggc

SEQ ID NO: 3093581 - RNA, 17 nt, Molluscum contagiosum virus
cgggccuuugccgcugc

SEQ ID NO: 3093582 - RNA, 23 nt, Molluscum contagiosum virus
caguaccgugucaaacugcuugu

SEQ ID NO: 3093583 - RNA, 14 nt, Molluscum contagiosum virus
ggcgccgcugcugg

SEQ ID NO: 3093584 - RNA, 14 nt, Molluscum contagiosum virus
cugcucgcgcacgc

SEQ ID NO: 3093585 - RNA, 15 nt, Molluscum contagiosum virus
auguacgucgucauc

SEQ ID NO: 3093586 - RNA, 12 nt, Molluscum contagiosum virus
cucacgcuguuu

SEQ ID NO: 3093587 - RNA, 14 nt, Molluscum contagiosum virus
acggacgcccuccu

SEQ ID NO: 3093588 - RNA, 20 nt, Molluscum contagiosum virus
ccgcuuucgcaaacaagcau

SEQ ID NO: 3093589 - RNA, 16 nt, Molluscum contagiosum virus
cagucgcgacgcgcuu

SEQ ID NO: 3093590 - RNA, 21 nt, Molluscum contagiosum virus
gccugcacgcgcacuugccug

SEQ ID NO: 3093591 - RNA, 20 nt, Molluscum contagiosum virus
cgaggcacucgucgcgcugc

SEQ ID NO: 3093592 - RNA, 22 nt, Molluscum contagiosum virus
cgacucggacacguugcagcag

SEQ ID NO: 3093593 - RNA, 18 nt, Molluscum contagiosum virus
augaagaugucgccgcgu

SEQ ID NO: 3093594 - RNA, 14 nt, Molluscum contagiosum virus
accucgcgcgccgc

SEQ ID NO: 3093595 - RNA, 22 nt, Molluscum contagiosum virus
guuuccugcggcgcugcuacaa

SEQ ID NO: 3093596 - RNA, 19 nt, Molluscum contagiosum virus
cgaggcguccagcggcugc

SEQ ID NO: 3093597 - RNA, 15 nt, Molluscum contagiosum virus
guaagcgacagguca

SEQ ID NO: 3093598 - RNA, 21 nt, Molluscum contagiosum virus
uuugcaaguucgcugcuggca

SEQ ID NO: 3093599 - RNA, 17 nt, Molluscum contagiosum virus
cgcggucgggccccugc

SEQ ID NO: 3093600 - RNA, 16 nt, Molluscum contagiosum virus
gcugcgaccaagacag

SEQ ID NO: 3093601 - RNA, 13 nt, Molluscum contagiosum virus
accuccuucgcgu

SEQ ID NO: 3093602 - RNA, 14 nt, Molluscum contagiosum virus
agccugcugcucuu

SEQ ID NO: 3093603 - RNA, 17 nt, Molluscum contagiosum virus
gagaagaacagcacgaa

SEQ ID NO: 3093604 - RNA, 18 nt, Molluscum contagiosum virus
ugcgucgacguggagccu

SEQ ID NO: 3093605 - RNA, 13 nt, Molluscum contagiosum virus
ugaaccugggcau

SEQ ID NO: 3093606 - RNA, 22 nt, Molluscum contagiosum virus
gacggcccccuuacgcuacagc

SEQ ID NO: 3093607 - RNA, 18 nt, Molluscum contagiosum virus
gcacaguccagcccgcgg

SEQ ID NO: 3093608 - RNA, 22 nt, Molluscum contagiosum virus
ccggacgauaaauggaccucaa

SEQ ID NO: 3093609 - RNA, 12 nt, Molluscum contagiosum virus
cacacucgcucu

SEQ ID NO: 3093610 - RNA, 16 nt, Molluscum contagiosum virus
cgaccgcgcacgcagc

SEQ ID NO: 3093611 - RNA, 12 nt, Molluscum contagiosum virus
gcuccgccugca

SEQ ID NO: 3093612 - RNA, 16 nt, Molluscum contagiosum virus
acugcguugucuccuc

SEQ ID NO: 3093613 - RNA, 13 nt, Molluscum contagiosum virus
ugguccaccagcu

SEQ ID NO: 3093614 - RNA, 17 nt, Molluscum contagiosum virus
gcgcugccagcucgaca

SEQ ID NO: 3093615 - RNA, 13 nt, Molluscum contagiosum virus
acgugcugcugcg

SEQ ID NO: 3093616 - RNA, 14 nt, Molluscum contagiosum virus
cacaagcaccgccu

SEQ ID NO: 3093617 - RNA, 15 nt, Molluscum contagiosum virus
agucuucaagacugg

SEQ ID NO: 3093618 - RNA, 13 nt, Molluscum contagiosum virus
cgggccuguccgc

SEQ ID NO: 3093619 - RNA, 20 nt, Molluscum contagiosum virus
ccgcuaccgcagccacggcc

SEQ ID NO: 3093620 - RNA, 13 nt, Molluscum contagiosum virus
uccuccagggcac

SEQ ID NO: 3093621 - RNA, 14 nt, Molluscum contagiosum virus
gcgcucgagcuccg

SEQ ID NO: 3093622 - RNA, 22 nt, Molluscum contagiosum virus
gaaagcgucgugugcgcgcacg

SEQ ID NO: 3093623 - RNA, 13 nt, Molluscum contagiosum virus
gcgccauccacgu

SEQ ID NO: 3093624 - RNA, 18 nt, Molluscum contagiosum virus
cacaucucucagggcagc

SEQ ID NO: 3093625 - RNA, 19 nt, Molluscum contagiosum virus
cgcaggcccggcggcccgc

SEQ ID NO: 3093626 - RNA, 22 nt, Molluscum contagiosum virus
caccgcguccgcuaccgcagcc

SEQ ID NO: 3093627 - RNA, 19 nt, Molluscum contagiosum virus
cggcggcugugcccgcggc

SEQ ID NO: 3093628 - RNA, 19 nt, Molluscum contagiosum virus
agggcuccuucuucagcag

SEQ ID NO: 3093629 - RNA, 21 nt, Molluscum contagiosum virus
caagcacuacauggacgugcu

SEQ ID NO: 3093630 - RNA, 11 nt, Molluscum contagiosum virus
ugcgccgccgc

SEQ ID NO: 3093631 - RNA, 16 nt, Molluscum contagiosum virus
cuggaaggagcugggc

SEQ ID NO: 3093632 - RNA, 20 nt, Molluscum contagiosum virus
cguacgcgccggggcgcgcg

SEQ ID NO: 3093633 - RNA, 18 nt, Molluscum contagiosum virus
gccuguaccugcgacagc

SEQ ID NO: 3093634 - RNA, 16 nt, Molluscum contagiosum virus
gcggacgcgggccugu

SEQ ID NO: 3093635 - RNA, 15 nt, Molluscum contagiosum virus
caggccuccuucccu

SEQ ID NO: 3093636 - RNA, 17 nt, Molluscum contagiosum virus
cgcggucgcgcccuugc

SEQ ID NO: 3093637 - RNA, 20 nt, Molluscum contagiosum virus
gcagcauuuuggugggcacg

SEQ ID NO: 3093638 - RNA, 20 nt, Molluscum contagiosum virus
cgagggagccucgcuggugu

SEQ ID NO: 3093639 - RNA, 22 nt, Molluscum contagiosum virus
ggacgcgugcaagcccagcagc

SEQ ID NO: 3093640 - RNA, 20 nt, Molluscum contagiosum virus
ggcuccuucuucagcaggcc

SEQ ID NO: 3093641 - RNA, 14 nt, Molluscum contagiosum virus
gucuuacugcugca

SEQ ID NO: 3093642 - RNA, 14 nt, Molluscum contagiosum virus
cuggagcagguucu

SEQ ID NO: 3093643 - RNA, 17 nt, Molluscum contagiosum virus
cggugggcgccgcggcc

SEQ ID NO: 3093644 - RNA, 23 nt, Molluscum contagiosum virus
ccggcgccgacagcgcgcgcacg

SEQ ID NO: 3093645 - RNA, 18 nt, Molluscum contagiosum virus
cagagcccgggagagugg

SEQ ID NO: 3093646 - RNA, 22 nt, Molluscum contagiosum virus
ucgugguggaggacgacaauac

SEQ ID NO: 3093647 - RNA, 21 nt, Molluscum contagiosum virus
cuccgaggaaacgcagcacuu

SEQ ID NO: 3093648 - RNA, 12 nt, Molluscum contagiosum virus
acaugccgcgcu

SEQ ID NO: 3093649 - RNA, 16 nt, Molluscum contagiosum virus
cccugguaguccugcu

SEQ ID NO: 3093650 - RNA, 18 nt, Molluscum contagiosum virus
gcggcuccaacagcagcu

SEQ ID NO: 3093651 - RNA, 22 nt, Molluscum contagiosum virus
ggagggugcacgcgggcgccgg

SEQ ID NO: 3093652 - RNA, 12 nt, Molluscum contagiosum virus
uggacagcaucc

SEQ ID NO: 3093653 - RNA, 17 nt, Molluscum contagiosum virus
acgcggaugccacgcag

SEQ ID NO: 3093654 - RNA, 13 nt, Molluscum contagiosum virus
gaugcgcaugcgg

SEQ ID NO: 3093655 - RNA, 18 nt, Molluscum contagiosum virus
cgggauggucucgcugcu

SEQ ID NO: 3093656 - RNA, 17 nt, Molluscum contagiosum virus
gcugcaggaccugcugg

SEQ ID NO: 3093657 - RNA, 22 nt, Molluscum contagiosum virus
ccuuccggagacaccagcuccg

SEQ ID NO: 3093658 - RNA, 14 nt, Molluscum contagiosum virus
gcgcucgccucugg

SEQ ID NO: 3093659 - RNA, 13 nt, Molluscum contagiosum virus
gggaucuugcgug

SEQ ID NO: 3093660 - RNA, 17 nt, Molluscum contagiosum virus
ugcgcuggaugcugcuc

SEQ ID NO: 3093661 - RNA, 20 nt, Molluscum contagiosum virus
cgagccgcugcuccugcucu

SEQ ID NO: 3093662 - RNA, 17 nt, Molluscum contagiosum virus
gucgugcaccuggagca

SEQ ID NO: 3093663 - RNA, 12 nt, Molluscum contagiosum virus
acucagcgggca

SEQ ID NO: 3093664 - RNA, 23 nt, Molluscum contagiosum virus
cuauucucguggcguugcugcug

SEQ ID NO: 3093665 - RNA, 20 nt, Molluscum contagiosum virus
aacuacuuccugcagcuguc

SEQ ID NO: 3093666 - RNA, 14 nt, Molluscum contagiosum virus
cggcgugcugugcc

SEQ ID NO: 3093667 - RNA, 14 nt, Molluscum contagiosum virus
gcgccgcgggcaca

SEQ ID NO: 3093668 - RNA, 13 nt, Molluscum contagiosum virus
gcggaugcucgcu

SEQ ID NO: 3093669 - RNA, 18 nt, Molluscum contagiosum virus
gcugcgcacgugcgcgcc

SEQ ID NO: 3093670 - RNA, 12 nt, Molluscum contagiosum virus
uucguggccaaa

SEQ ID NO: 3093671 - RNA, 12 nt, Molluscum contagiosum virus
cggaggcagcgc

SEQ ID NO: 3093672 - RNA, 13 nt, Molluscum contagiosum virus
agcgcucugcauu

SEQ ID NO: 3093673 - RNA, 16 nt, Molluscum contagiosum virus
cuucgugcugugccua

SEQ ID NO: 3093674 - RNA, 23 nt, Molluscum contagiosum virus
caugcucgcggucgggccccugc

SEQ ID NO: 3093675 - RNA, 17 nt, Molluscum contagiosum virus
cuggugcgcccgcggca

SEQ ID NO: 3093676 - RNA, 16 nt, Molluscum contagiosum virus
gcuccugaucugcgug

SEQ ID NO: 3093677 - RNA, 13 nt, Molluscum contagiosum virus
acggaggucugcu

SEQ ID NO: 3093678 - RNA, 13 nt, Molluscum contagiosum virus
caaauggagauga

SEQ ID NO: 3093679 - RNA, 19 nt, Molluscum contagiosum virus
ccgucuugcgcacacacuu

SEQ ID NO: 3093680 - RNA, 17 nt, Molluscum contagiosum virus
ggagaagugcuccgcac

SEQ ID NO: 3093681 - RNA, 19 nt, Molluscum contagiosum virus
agacgcguaccagcgccug

SEQ ID NO: 3093682 - RNA, 13 nt, Molluscum contagiosum virus
cgcgaaacuggac

SEQ ID NO: 3093683 - RNA, 22 nt, Molluscum contagiosum virus
gccgcggaccacgacgggcuca

SEQ ID NO: 3093684 - RNA, 10 nt, Molluscum contagiosum virus
gggggcagca

SEQ ID NO: 3093685 - RNA, 18 nt, Molluscum contagiosum virus
ugcggcuccaacagcagc

SEQ ID NO: 3093686 - RNA, 17 nt, Molluscum contagiosum virus
acuguguucccggcugc

SEQ ID NO: 3093687 - RNA, 15 nt, Molluscum contagiosum virus
cggcccgagcaggac

SEQ ID NO: 3093688 - RNA, 17 nt, Molluscum contagiosum virus
cuagcucgcgcgcggca

SEQ ID NO: 3093689 - RNA, 18 nt, Molluscum contagiosum virus
cgcgcgagggcgcgcugg

SEQ ID NO: 3093690 - RNA, 13 nt, Molluscum contagiosum virus
acccuggcugcug

SEQ ID NO: 3093691 - RNA, 14 nt, Molluscum contagiosum virus
uucaccugcauuga

SEQ ID NO: 3093692 - RNA, 21 nt, Molluscum contagiosum virus
gccgccggggcccaugcucac

SEQ ID NO: 3093693 - RNA, 16 nt, Molluscum contagiosum virus
cugccacggcugcaag

SEQ ID NO: 3093694 - RNA, 17 nt, Molluscum contagiosum virus
gccgcgcgucugcgagu

SEQ ID NO: 3093695 - RNA, 16 nt, Molluscum contagiosum virus
agcucaagacgcugcu

SEQ ID NO: 3093696 - RNA, 20 nt, Molluscum contagiosum virus
ggcgcacgcuuguccgcgga

SEQ ID NO: 3093697 - RNA, 14 nt, Molluscum contagiosum virus
ccugagaagcugua

SEQ ID NO: 3093698 - RNA, 20 nt, Molluscum contagiosum virus
cacgcgggcccgugcucagg

SEQ ID NO: 3093699 - RNA, 21 nt, Molluscum contagiosum virus
guagucuggccgggcucgggc

SEQ ID NO: 3093700 - RNA, 22 nt, Molluscum contagiosum virus
cacguccguugcacgugcgugc

SEQ ID NO: 3093701 - RNA, 13 nt, Molluscum contagiosum virus
uucucaaauaaag

SEQ ID NO: 3093702 - RNA, 13 nt, Molluscum contagiosum virus
caaagccugcugc

SEQ ID NO: 3093703 - RNA, 13 nt, Molluscum contagiosum virus
gcguugcugcugc

SEQ ID NO: 3093704 - RNA, 22 nt, Molluscum contagiosum virus
cugcuagugcgcgccaagaaca

SEQ ID NO: 3093705 - RNA, 17 nt, Molluscum contagiosum virus
cgccgccgcgccgcugc

SEQ ID NO: 3093706 - RNA, 17 nt, Molluscum contagiosum virus
gaggucaugaccaagga

SEQ ID NO: 3093707 - RNA, 19 nt, Molluscum contagiosum virus
ucuacggcgugcugugccu

SEQ ID NO: 3093708 - RNA, 18 nt, Molluscum contagiosum virus
caacguaguacugcagca

SEQ ID NO: 3093709 - RNA, 14 nt, Molluscum contagiosum virus
gccaguggccagcg

SEQ ID NO: 3093710 - RNA, 23 nt, Molluscum contagiosum virus
uuccagcucggguuccagcuccg

SEQ ID NO: 3093711 - RNA, 18 nt, Molluscum contagiosum virus
gcagcgcuugcgcgccaa

SEQ ID NO: 3093712 - RNA, 21 nt, Molluscum contagiosum virus
cgagucguacacgcagagcca

SEQ ID NO: 3093713 - RNA, 17 nt, Molluscum contagiosum virus
cgccucucgaggccggc

SEQ ID NO: 3093714 - RNA, 14 nt, Molluscum contagiosum virus
uacucaugcugcuc

SEQ ID NO: 3093715 - RNA, 21 nt, Molluscum contagiosum virus
cucucgaagcagugcucggga

SEQ ID NO: 3093716 - RNA, 15 nt, Molluscum contagiosum virus
ccgggcuugcucccu

SEQ ID NO: 3093717 - RNA, 20 nt, Molluscum contagiosum virus
gacgagcugugcgagccagu

SEQ ID NO: 3093718 - RNA, 19 nt, Molluscum contagiosum virus
gcauagugggcuugcggca

SEQ ID NO: 3093719 - RNA, 21 nt, Molluscum contagiosum virus
cucuucucgcagcguuccagg

SEQ ID NO: 3093720 - RNA, 12 nt, Molluscum contagiosum virus
ucggcacugcuc

SEQ ID NO: 3093721 - RNA, 22 nt, Molluscum contagiosum virus
cuacgcuccguaaccaugaaga

SEQ ID NO: 3093722 - RNA, 17 nt, Molluscum contagiosum virus
cgcgaccuacuccuggc

SEQ ID NO: 3093723 - RNA, 23 nt, Molluscum contagiosum virus
caaggaaaggcaccugcaggaaa

SEQ ID NO: 3093724 - RNA, 19 nt, Molluscum contagiosum virus
gacaagcuagacuggagca

SEQ ID NO: 3093725 - RNA, 16 nt, Molluscum contagiosum virus
ccugcaccaccagugc

SEQ ID NO: 3093726 - RNA, 20 nt, Molluscum contagiosum virus
agcggacuacaucgcucucu

SEQ ID NO: 3093727 - RNA, 22 nt, Molluscum contagiosum virus
agcgccacgcccucgccugcga

SEQ ID NO: 3093728 - RNA, 15 nt, Molluscum contagiosum virus
gaugccugccagcag

SEQ ID NO: 3093729 - RNA, 21 nt, Molluscum contagiosum virus
cgcauccucaaccgcugcaau

SEQ ID NO: 3093730 - RNA, 20 nt, Molluscum contagiosum virus
ccgggagagccgcuccuggu

SEQ ID NO: 3093731 - RNA, 15 nt, Molluscum contagiosum virus
guucgagcugcugcg

SEQ ID NO: 3093732 - RNA, 15 nt, Molluscum contagiosum virus
auccugguuccucuc

SEQ ID NO: 3093733 - RNA, 18 nt, Molluscum contagiosum virus
cggcaaaugcgucccagc

SEQ ID NO: 3093734 - RNA, 13 nt, Molluscum contagiosum virus
gaguggcucacag

SEQ ID NO: 3093735 - RNA, 12 nt, Molluscum contagiosum virus
cugccuggugca

SEQ ID NO: 3093736 - RNA, 14 nt, Molluscum contagiosum virus
cagcgcgcagaagc

SEQ ID NO: 3093737 - RNA, 20 nt, Molluscum contagiosum virus
cugccaauaccaggccacgu

SEQ ID NO: 3093738 - RNA, 23 nt, Molluscum contagiosum virus
cccgcguccgugcgcagggcaau

SEQ ID NO: 3093739 - RNA, 23 nt, Molluscum contagiosum virus
uggaucaccacuggacacgugcc

SEQ ID NO: 3093740 - RNA, 23 nt, Molluscum contagiosum virus
cuacuggccgcgauucugcucuu

SEQ ID NO: 3093741 - RNA, 15 nt, Molluscum contagiosum virus
uccuggggcuggaca

SEQ ID NO: 3093742 - RNA, 15 nt, Molluscum contagiosum virus
ggaagacgucgggaa

SEQ ID NO: 3093743 - RNA, 14 nt, Molluscum contagiosum virus
gcacguggcgcaca

SEQ ID NO: 3093744 - RNA, 15 nt, Molluscum contagiosum virus
guccgcggggcuccu

SEQ ID NO: 3093745 - RNA, 16 nt, Molluscum contagiosum virus
agaacaugcucgccag

SEQ ID NO: 3093746 - RNA, 20 nt, Molluscum contagiosum virus
ugcagcugcaggaccugcug

SEQ ID NO: 3093747 - RNA, 17 nt, Molluscum contagiosum virus
gguggugggcggguguc

SEQ ID NO: 3093748 - RNA, 22 nt, Molluscum contagiosum virus
aguaccagccgcugcgccgcca

SEQ ID NO: 3093749 - RNA, 9 nt, Molluscum contagiosum virus
cagugucuu

SEQ ID NO: 3093750 - RNA, 18 nt, Molluscum contagiosum virus
cacugccacggcugcaag

SEQ ID NO: 3093751 - RNA, 22 nt, Molluscum contagiosum virus
ucuuuguggucaagacuggccu

SEQ ID NO: 3093752 - RNA, 23 nt, Molluscum contagiosum virus
ccuggcgcgugcgagcagaggca

SEQ ID NO: 3093753 - RNA, 14 nt, Molluscum contagiosum virus
gcgccgaugcagug

SEQ ID NO: 3093754 - RNA, 18 nt, Molluscum contagiosum virus
ccaugcucucgcugcugc

SEQ ID NO: 3093755 - RNA, 16 nt, Molluscum contagiosum virus
cgcgugccucugccag

SEQ ID NO: 3093756 - RNA, 14 nt, Molluscum contagiosum virus
gacacgcgugucug

SEQ ID NO: 3093757 - RNA, 19 nt, Molluscum contagiosum virus
gagcagcgcuagccccagc

SEQ ID NO: 3093758 - RNA, 21 nt, Molluscum contagiosum virus
cccgagcucgacugcguuguc

SEQ ID NO: 3093759 - RNA, 18 nt, Molluscum contagiosum virus
acuccaaggagggcaaga

SEQ ID NO: 3093760 - RNA, 16 nt, Molluscum contagiosum virus
agaagcggcccugcac

SEQ ID NO: 3093761 - RNA, 13 nt, Molluscum contagiosum virus
ccaucgagcuucc

SEQ ID NO: 3093762 - RNA, 20 nt, Molluscum contagiosum virus
ggagcucgacucgagcgagc

SEQ ID NO: 3093763 - RNA, 15 nt, Molluscum contagiosum virus
cuuguugucugcgga

SEQ ID NO: 3093764 - RNA, 15 nt, Molluscum contagiosum virus
gcaccgccuggugcu

SEQ ID NO: 3093765 - RNA, 20 nt, Molluscum contagiosum virus
uacaccagcuggacggugcu

SEQ ID NO: 3093766 - RNA, 21 nt, Molluscum contagiosum virus
cacgucgacaaguccaccuuc

SEQ ID NO: 3093767 - RNA, 18 nt, Molluscum contagiosum virus
cggcgcgggcaagcaggg

SEQ ID NO: 3093768 - RNA, 13 nt, Molluscum contagiosum virus
cucgcccagcucg

SEQ ID NO: 3093769 - RNA, 18 nt, Molluscum contagiosum virus
ggcgcacgccgaagagcc

SEQ ID NO: 3093770 - RNA, 13 nt, Molluscum contagiosum virus
ugcacccuccgca

SEQ ID NO: 3093771 - RNA, 22 nt, Molluscum contagiosum virus
cgacaugcacacgcaccgccug

SEQ ID NO: 3093772 - RNA, 12 nt, Molluscum contagiosum virus
ggcagcugcugc

SEQ ID NO: 3093773 - RNA, 18 nt, Molluscum contagiosum virus
caggucaucgggcugcag

SEQ ID NO: 3093774 - RNA, 16 nt, Molluscum contagiosum virus
cccgcugagcgcagca

SEQ ID NO: 3093775 - RNA, 16 nt, Molluscum contagiosum virus
gacgccggcgcccgcg

SEQ ID NO: 3093776 - RNA, 21 nt, Molluscum contagiosum virus
ggcgcgugagcgccuaccgca

SEQ ID NO: 3093777 - RNA, 13 nt, Molluscum contagiosum virus
cguucuccaggaa

SEQ ID NO: 3093778 - RNA, 20 nt, Molluscum contagiosum virus
uucgccccgagaauaccguc

SEQ ID NO: 3093779 - RNA, 12 nt, Molluscum contagiosum virus
guccuggagccu

SEQ ID NO: 3093780 - RNA, 21 nt, Molluscum contagiosum virus
gcgaccaguacaucaccgcca

SEQ ID NO: 3093781 - RNA, 22 nt, Molluscum contagiosum virus
ccgccuacggggcugcuccggc

SEQ ID NO: 3093782 - RNA, 22 nt, Molluscum contagiosum virus
cgaccgcuuucgcaaacaagca

SEQ ID NO: 3093783 - RNA, 15 nt, Molluscum contagiosum virus
aggaugcuggggcuc

SEQ ID NO: 3093784 - RNA, 20 nt, Molluscum contagiosum virus
ugaaucaugccuuuccgagc

SEQ ID NO: 3093785 - RNA, 18 nt, Molluscum contagiosum virus
aaagccagacgcagagcc

SEQ ID NO: 3093786 - RNA, 23 nt, Molluscum contagiosum virus
cgaccuggaagccgccagccacg

SEQ ID NO: 3093787 - RNA, 15 nt, Molluscum contagiosum virus
uguaucaugcacaug

SEQ ID NO: 3093788 - RNA, 18 nt, Molluscum contagiosum virus
caucucgcacacugcagc

SEQ ID NO: 3093789 - RNA, 12 nt, Molluscum contagiosum virus
uccggcagcgcc

SEQ ID NO: 3093790 - RNA, 17 nt, Molluscum contagiosum virus
acgccugcuagcggccu

SEQ ID NO: 3093791 - RNA, 16 nt, Molluscum contagiosum virus
ggcuuguagucgcccc

SEQ ID NO: 3093792 - RNA, 14 nt, Molluscum contagiosum virus
gcucaagcacugcc

SEQ ID NO: 3093793 - RNA, 14 nt, Molluscum contagiosum virus
guucuagcagcgug

SEQ ID NO: 3093794 - RNA, 18 nt, Molluscum contagiosum virus
cgugcugcgcuaccacga

SEQ ID NO: 3093795 - RNA, 21 nt, Molluscum contagiosum virus
gcaggcgcugcgcggcgcgcg

SEQ ID NO: 3093796 - RNA, 16 nt, Molluscum contagiosum virus
gugcauggcggcggcc

SEQ ID NO: 3093797 - RNA, 18 nt, Molluscum contagiosum virus
cugcuuccgcaccugguc

SEQ ID NO: 3093798 - RNA, 15 nt, Molluscum contagiosum virus
cagcgcuagccccag

SEQ ID NO: 3093799 - RNA, 15 nt, Molluscum contagiosum virus
acgcgcgcggcaagc

SEQ ID NO: 3093800 - RNA, 21 nt, Molluscum contagiosum virus
cugcgauacccuuggcagcaa

SEQ ID NO: 3093801 - RNA, 13 nt, Molluscum contagiosum virus
cugcagcagcugg

SEQ ID NO: 3093802 - RNA, 20 nt, Molluscum contagiosum virus
cucgcagcguuccaggaacg

SEQ ID NO: 3093803 - RNA, 20 nt, Molluscum contagiosum virus
cacgugccagagucgccgcu

SEQ ID NO: 3093804 - RNA, 21 nt, Molluscum contagiosum virus
gaaggagcccgucuacauuuu

SEQ ID NO: 3093805 - RNA, 21 nt, Molluscum contagiosum virus
ucucagagcuccgcgcaugcc

SEQ ID NO: 3093806 - RNA, 20 nt, Molluscum contagiosum virus
cgcggagaagugcgcagcuu

SEQ ID NO: 3093807 - RNA, 16 nt, Molluscum contagiosum virus
acgccagguguuccug

SEQ ID NO: 3093808 - RNA, 11 nt, Molluscum contagiosum virus
agugcucuuua

SEQ ID NO: 3093809 - RNA, 19 nt, Molluscum contagiosum virus
cgcguccacgaacgacagc

SEQ ID NO: 3093810 - RNA, 18 nt, Molluscum contagiosum virus
acaagcguguucgugccg

SEQ ID NO: 3093811 - RNA, 21 nt, Molluscum contagiosum virus
gucugaaaggacaugggcaca

SEQ ID NO: 3093812 - RNA, 18 nt, Molluscum contagiosum virus
gccgcagaacacgggggc

SEQ ID NO: 3093813 - RNA, 17 nt, Molluscum contagiosum virus
cgugcccgccgacugcc

SEQ ID NO: 3093814 - RNA, 15 nt, Molluscum contagiosum virus
gaacuagugcugcug

SEQ ID NO: 3093815 - RNA, 21 nt, Molluscum contagiosum virus
ggcguccggugcucgccccuc

SEQ ID NO: 3093816 - RNA, 18 nt, Molluscum contagiosum virus
gcugagcgcgcugcgccg

SEQ ID NO: 3093817 - RNA, 20 nt, Molluscum contagiosum virus
ccggcgcgagaugcucgccg

SEQ ID NO: 3093818 - RNA, 14 nt, Molluscum contagiosum virus
uugcgcguccacaa

SEQ ID NO: 3093819 - RNA, 22 nt, Molluscum contagiosum virus
cagcucggguuccagcuccggc

SEQ ID NO: 3093820 - RNA, 21 nt, Molluscum contagiosum virus
acguucgagaccagccgcgag

SEQ ID NO: 3093821 - RNA, 21 nt, Molluscum contagiosum virus
cagcuucuuggagcccuugau

SEQ ID NO: 3093822 - RNA, 17 nt, Molluscum contagiosum virus
cacggcgcucgccucug

SEQ ID NO: 3093823 - RNA, 11 nt, Molluscum contagiosum virus
aucuuacaggc

SEQ ID NO: 3093824 - RNA, 22 nt, Molluscum contagiosum virus
cgggcucuuccaccggcagcgc

SEQ ID NO: 3093825 - RNA, 21 nt, Molluscum contagiosum virus
cccguguucgcggagcugugc

SEQ ID NO: 3093826 - RNA, 23 nt, Molluscum contagiosum virus
acccugcacgcuacggcugccgg

SEQ ID NO: 3093827 - RNA, 23 nt, Molluscum contagiosum virus
aucugacggugcaaccgcugcuc

SEQ ID NO: 3093828 - RNA, 21 nt, Molluscum contagiosum virus
agcaccggcggguccgcaggc

SEQ ID NO: 3093829 - RNA, 23 nt, Molluscum contagiosum virus
aaugugcuggucaagaacaugug

SEQ ID NO: 3093830 - RNA, 22 nt, Molluscum contagiosum virus
cacgagcaguccgccucgagca

SEQ ID NO: 3093831 - RNA, 16 nt, Molluscum contagiosum virus
ucgcgcugcucuucgc

SEQ ID NO: 3093832 - RNA, 17 nt, Molluscum contagiosum virus
ccgugugcgaagggcuu

SEQ ID NO: 3093833 - RNA, 20 nt, Molluscum contagiosum virus
gucacggccuucgcgcugcc

SEQ ID NO: 3093834 - RNA, 14 nt, Molluscum contagiosum virus
gcauggagggcgag

SEQ ID NO: 3093835 - RNA, 15 nt, Molluscum contagiosum virus
gucucucugucuccc

SEQ ID NO: 3093836 - RNA, 20 nt, Molluscum contagiosum virus
uggcucuagaguacuaggug

SEQ ID NO: 3093837 - RNA, 12 nt, Molluscum contagiosum virus
gcaggccucuuu

SEQ ID NO: 3093838 - RNA, 20 nt, Molluscum contagiosum virus
cugcuccgcggaggccaagc

SEQ ID NO: 3093839 - RNA, 18 nt, Molluscum contagiosum virus
cguuuucgcggccuuaaa

SEQ ID NO: 3093840 - RNA, 14 nt, Molluscum contagiosum virus
gcucacgcugcccg

SEQ ID NO: 3093841 - RNA, 14 nt, Molluscum contagiosum virus
acggcgcucgccuc

SEQ ID NO: 3093842 - RNA, 21 nt, Molluscum contagiosum virus
gggcuucgcugcgcaggugca

SEQ ID NO: 3093843 - RNA, 16 nt, Molluscum contagiosum virus
ugagucacgcuugcag

SEQ ID NO: 3093844 - RNA, 19 nt, Molluscum contagiosum virus
gcugggcgguugccugcac

SEQ ID NO: 3093845 - RNA, 23 nt, Molluscum contagiosum virus
ggccgagcgugaccagugcgugc

SEQ ID NO: 3093846 - RNA, 14 nt, Molluscum contagiosum virus
gcuccggcugcucc

SEQ ID NO: 3093847 - RNA, 12 nt, Molluscum contagiosum virus
uccgcucucgag

SEQ ID NO: 3093848 - RNA, 22 nt, Molluscum contagiosum virus
gcggccacucucccgggcucug

SEQ ID NO: 3093849 - RNA, 13 nt, Molluscum contagiosum virus
ugcugcaggcgua

SEQ ID NO: 3093850 - RNA, 17 nt, Molluscum contagiosum virus
gcccgcgcgcgacuacg

SEQ ID NO: 3093851 - RNA, 13 nt, Molluscum contagiosum virus
gcacggacagcac

SEQ ID NO: 3093852 - RNA, 13 nt, Molluscum contagiosum virus
gaaacaagcgugu

SEQ ID NO: 3093853 - RNA, 18 nt, Molluscum contagiosum virus
ggucuccgcgggcagccg

SEQ ID NO: 3093854 - RNA, 12 nt, Molluscum contagiosum virus
gcuccucuucag

SEQ ID NO: 3093855 - RNA, 16 nt, Molluscum contagiosum virus
cgugcgcagcagcucg

SEQ ID NO: 3093856 - RNA, 18 nt, Molluscum contagiosum virus
cguaaugauugucaagca

SEQ ID NO: 3093857 - RNA, 20 nt, Molluscum contagiosum virus
cgggcgcagagccugcugcu

SEQ ID NO: 3093858 - RNA, 14 nt, Molluscum contagiosum virus
gaagccgcaggcca

SEQ ID NO: 3093859 - RNA, 16 nt, Molluscum contagiosum virus
cgcgcaaccagcuggc

SEQ ID NO: 3093860 - RNA, 12 nt, Molluscum contagiosum virus
cgccgcgcggcu

SEQ ID NO: 3093861 - RNA, 13 nt, Molluscum contagiosum virus
gaaaaaaacugcg

SEQ ID NO: 3093862 - RNA, 21 nt, Molluscum contagiosum virus
ccccaugcccgaccacgugcc

SEQ ID NO: 3093863 - RNA, 16 nt, Molluscum contagiosum virus
aacaagacgaacaugu

SEQ ID NO: 3093864 - RNA, 21 nt, Molluscum contagiosum virus
cggaacucgcgcgcgccgggc

SEQ ID NO: 3093865 - RNA, 14 nt, Molluscum contagiosum virus
cugcugcucgaagc

SEQ ID NO: 3093866 - RNA, 15 nt, Molluscum contagiosum virus
cgccgggcgccagaa

SEQ ID NO: 3093867 - RNA, 21 nt, Molluscum contagiosum virus
cuuccggcccgacacacuccu

SEQ ID NO: 3093868 - RNA, 16 nt, Molluscum contagiosum virus
cugcggcgcgugccgc

SEQ ID NO: 3093869 - RNA, 20 nt, Molluscum contagiosum virus
agccgcgugcuggcggggcu

SEQ ID NO: 3093870 - RNA, 20 nt, Molluscum contagiosum virus
gaacaccccgagcuggugau

SEQ ID NO: 3093871 - RNA, 17 nt, Molluscum contagiosum virus
caagaagcgcuucuuug

SEQ ID NO: 3093872 - RNA, 22 nt, Molluscum contagiosum virus
agagguugagcuuggugcagcg

SEQ ID NO: 3093873 - RNA, 22 nt, Molluscum contagiosum virus
ugucgucaaaggcaaagccugc

SEQ ID NO: 3093874 - RNA, 13 nt, Molluscum contagiosum virus
cgcccgcgccgca

SEQ ID NO: 3093875 - RNA, 15 nt, Molluscum contagiosum virus
gugcucaggccagca

SEQ ID NO: 3093876 - RNA, 18 nt, Molluscum contagiosum virus
aacucggcuucugcugca

SEQ ID NO: 3093877 - RNA, 18 nt, Molluscum contagiosum virus
gccgcacgcugcugcgug

SEQ ID NO: 3093878 - RNA, 21 nt, Molluscum contagiosum virus
ggccaaagucuuccuggggcu

SEQ ID NO: 3093879 - RNA, 19 nt, Molluscum contagiosum virus
ucgaacgacggcccccuua

SEQ ID NO: 3093880 - RNA, 22 nt, Molluscum contagiosum virus
caugagguacuccacgcccggc

SEQ ID NO: 3093881 - RNA, 20 nt, Molluscum contagiosum virus
auagcgccacgagcagugcc

SEQ ID NO: 3093882 - RNA, 19 nt, Molluscum contagiosum virus
cgcaggaaagguacccgca

SEQ ID NO: 3093883 - RNA, 15 nt, Molluscum contagiosum virus
cgcggcagacgccag

SEQ ID NO: 3093884 - RNA, 19 nt, Molluscum contagiosum virus
cgcggaugccacgcagcug

SEQ ID NO: 3093885 - RNA, 17 nt, Molluscum contagiosum virus
ugaccauggacacgcug

SEQ ID NO: 3093886 - RNA, 13 nt, Molluscum contagiosum virus
gcgacccagaagc

SEQ ID NO: 3093887 - RNA, 18 nt, Molluscum contagiosum virus
gcuucaaguuccuggagc

SEQ ID NO: 3093888 - RNA, 16 nt, Molluscum contagiosum virus
ucgccggcaccacggu

SEQ ID NO: 3093889 - RNA, 15 nt, Molluscum contagiosum virus
gccacgcagcuggcg

SEQ ID NO: 3093890 - RNA, 19 nt, Molluscum contagiosum virus
agcgcggaggcgcuaccuc

SEQ ID NO: 3093891 - RNA, 17 nt, Molluscum contagiosum virus
guuccggugucagcccc

SEQ ID NO: 3093892 - RNA, 23 nt, Molluscum contagiosum virus
cgcgauugcguguuggcuucugc

SEQ ID NO: 3093893 - RNA, 17 nt, Molluscum contagiosum virus
gcgccggcugcgccacc

SEQ ID NO: 3093894 - RNA, 13 nt, Molluscum contagiosum virus
cccagcaaggccc

SEQ ID NO: 3093895 - RNA, 12 nt, Molluscum contagiosum virus
uacgcgagcacu

SEQ ID NO: 3093896 - RNA, 19 nt, Molluscum contagiosum virus
cucgucgcugcggacaaga

SEQ ID NO: 3093897 - RNA, 12 nt, Molluscum contagiosum virus
guacccuggcag

SEQ ID NO: 3093898 - RNA, 14 nt, Molluscum contagiosum virus
gacuccaaggaggu

SEQ ID NO: 3093899 - RNA, 19 nt, Molluscum contagiosum virus
cuuugugcgaccugcugcg

SEQ ID NO: 3093900 - RNA, 14 nt, Molluscum contagiosum virus
gcgcgcgcucugcc

SEQ ID NO: 3093901 - RNA, 24 nt, Molluscum contagiosum virus
ucugcgcgcgguaacgcgcgcgcc

SEQ ID NO: 3093902 - RNA, 19 nt, Molluscum contagiosum virus
uaguagcgcucgcccagcu

SEQ ID NO: 3093903 - RNA, 14 nt, Molluscum contagiosum virus
gagugacgccucga

SEQ ID NO: 3093904 - RNA, 18 nt, Molluscum contagiosum virus
gggcgucgugcaccugga

SEQ ID NO: 3093905 - RNA, 15 nt, Molluscum contagiosum virus
gcuugcugcaguaug

SEQ ID NO: 3093906 - RNA, 14 nt, Molluscum contagiosum virus
ugcgucccagcagc

SEQ ID NO: 3093907 - RNA, 23 nt, Molluscum contagiosum virus
cgggcguggggagcuggagcgag

SEQ ID NO: 3093908 - RNA, 16 nt, Molluscum contagiosum virus
cggcgcgugccgcugc

SEQ ID NO: 3093909 - RNA, 15 nt, Molluscum contagiosum virus
uucccaagcaaagcc

SEQ ID NO: 3093910 - RNA, 20 nt, Molluscum contagiosum virus
gcgacgcaaaagaggccugc

SEQ ID NO: 3093911 - RNA, 19 nt, Molluscum contagiosum virus
acgugcuucacgaccuggu

SEQ ID NO: 3093912 - RNA, 17 nt, Molluscum contagiosum virus
ggcaccccgaaggaaag

SEQ ID NO: 3093913 - RNA, 17 nt, Molluscum contagiosum virus
gcagucacgacuguguu

SEQ ID NO: 3093914 - RNA, 16 nt, Molluscum contagiosum virus
gcccgcgucccgacag

SEQ ID NO: 3093915 - RNA, 19 nt, Molluscum contagiosum virus
ugcacuucggacaccucac

SEQ ID NO: 3093916 - RNA, 20 nt, Molluscum contagiosum virus
caaagcugugcguacaccua

SEQ ID NO: 3093917 - RNA, 13 nt, Molluscum contagiosum virus
gcgaccagcucuu

SEQ ID NO: 3093918 - RNA, 23 nt, Molluscum contagiosum virus
cuacagcgcgcugcacaccgagc

SEQ ID NO: 3093919 - RNA, 19 nt, Molluscum contagiosum virus
uggccgcauuuucucugga

SEQ ID NO: 3093920 - RNA, 21 nt, Molluscum contagiosum virus
gcgguucacuagcgcaggcag

SEQ ID NO: 3093921 - RNA, 21 nt, Molluscum contagiosum virus
agugcgagccgugaccuucgu

SEQ ID NO: 3093922 - RNA, 22 nt, Molluscum contagiosum virus
cagggcacgaucgcgagacccc

SEQ ID NO: 3093923 - RNA, 16 nt, Molluscum contagiosum virus
guacacgcagagccag

SEQ ID NO: 3093924 - RNA, 17 nt, Molluscum contagiosum virus
cagacaaagacaguccg

SEQ ID NO: 3093925 - RNA, 17 nt, Molluscum contagiosum virus
ugcggcacgggcucgag

SEQ ID NO: 3093926 - RNA, 14 nt, Molluscum contagiosum virus
ccgccggcgccgcu

SEQ ID NO: 3093927 - RNA, 19 nt, Molluscum contagiosum virus
agccaugaggacagcuugc

SEQ ID NO: 3093928 - RNA, 11 nt, Molluscum contagiosum virus
cgaaguuucac

SEQ ID NO: 3093929 - RNA, 18 nt, Molluscum contagiosum virus
gcccgucuuuccuggcuc

SEQ ID NO: 3093930 - RNA, 14 nt, Molluscum contagiosum virus
cggccgcgcucguc

SEQ ID NO: 3093931 - RNA, 18 nt, Molluscum contagiosum virus
aauggacacgcacuggcg

SEQ ID NO: 3093932 - RNA, 19 nt, Molluscum contagiosum virus
gcucgcaggcggugggcgc

SEQ ID NO: 3093933 - RNA, 23 nt, Molluscum contagiosum virus
aucgccuuugugacaaggaugga

SEQ ID NO: 3093934 - RNA, 23 nt, Molluscum contagiosum virus
ggagacgucguggauggcguccu

SEQ ID NO: 3093935 - RNA, 21 nt, Molluscum contagiosum virus
caaggcgcgcaucgcgggcac

SEQ ID NO: 3093936 - RNA, 14 nt, Molluscum contagiosum virus
cucugcgccgcgcg

SEQ ID NO: 3093937 - RNA, 18 nt, Molluscum contagiosum virus
aucgagcuucccgagguc

SEQ ID NO: 3093938 - RNA, 16 nt, Molluscum contagiosum virus
uuaggcaucucgugca

SEQ ID NO: 3093939 - RNA, 16 nt, Molluscum contagiosum virus
ccaugucgaacaccuc

SEQ ID NO: 3093940 - RNA, 22 nt, Molluscum contagiosum virus
ugcucguggaaaagcagggccc

SEQ ID NO: 3093941 - RNA, 13 nt, Molluscum contagiosum virus
ggagcugugccgc

SEQ ID NO: 3093942 - RNA, 16 nt, Molluscum contagiosum virus
gcaacucgcgcugcag

SEQ ID NO: 3093943 - RNA, 17 nt, Molluscum contagiosum virus
cacguggagucacgacc

SEQ ID NO: 3093944 - RNA, 14 nt, Molluscum contagiosum virus
ccgcggcgcccacg

SEQ ID NO: 3093945 - RNA, 19 nt, Molluscum contagiosum virus
ugcuggccaucgagcuucc

SEQ ID NO: 3093946 - RNA, 15 nt, Molluscum contagiosum virus
gagcaggagaacuac

SEQ ID NO: 3093947 - RNA, 19 nt, Molluscum contagiosum virus
ggugguuggcgugcucgcu

SEQ ID NO: 3093948 - RNA, 15 nt, Molluscum contagiosum virus
agcaagcucaagaag

SEQ ID NO: 3093949 - RNA, 16 nt, Molluscum contagiosum virus
agggugccgaggcgcu

SEQ ID NO: 3093950 - RNA, 19 nt, Molluscum contagiosum virus
caaaacugaaaaaggauca

SEQ ID NO: 3093951 - RNA, 22 nt, Molluscum contagiosum virus
ccgcgggcagccgcuggacgcc

SEQ ID NO: 3093952 - RNA, 16 nt, Molluscum contagiosum virus
agacgugcugcgcgcc

SEQ ID NO: 3093953 - RNA, 21 nt, Molluscum contagiosum virus
cugaggaagcaagacccagca

SEQ ID NO: 3093954 - RNA, 18 nt, Molluscum contagiosum virus
cacgugcgcuggcccacg

SEQ ID NO: 3093955 - RNA, 20 nt, Molluscum contagiosum virus
ucuuugcgcgcggggcacug

SEQ ID NO: 3093956 - RNA, 18 nt, Molluscum contagiosum virus
uucacuccgcacagcuuc

SEQ ID NO: 3093957 - RNA, 23 nt, Molluscum contagiosum virus
gaaaaggcacaccccgggaacga

SEQ ID NO: 3093958 - RNA, 18 nt, Molluscum contagiosum virus
gcucggguuccagcuccg

SEQ ID NO: 3093959 - RNA, 19 nt, Molluscum contagiosum virus
cgcgggcgcagagccugcu

SEQ ID NO: 3093960 - RNA, 17 nt, Molluscum contagiosum virus
ggacagcuugcugcugu

SEQ ID NO: 3093961 - RNA, 15 nt, Molluscum contagiosum virus
cgagauggagcucac

SEQ ID NO: 3093962 - RNA, 17 nt, Molluscum contagiosum virus
gacguacgagugcugga

SEQ ID NO: 3093963 - RNA, 19 nt, Molluscum contagiosum virus
gcccacggcggcacccgcc

SEQ ID NO: 3093964 - RNA, 21 nt, Molluscum contagiosum virus
cgggcacgcgcgcgccuuucc

SEQ ID NO: 3093965 - RNA, 14 nt, Molluscum contagiosum virus
aacucguaggacaa

SEQ ID NO: 3093966 - RNA, 13 nt, Molluscum contagiosum virus
agccagccaggcg

SEQ ID NO: 3093967 - RNA, 14 nt, Molluscum contagiosum virus
cgcgagcugcugcg

SEQ ID NO: 3093968 - RNA, 14 nt, Molluscum contagiosum virus
gaagcuccugcugg

SEQ ID NO: 3093969 - RNA, 16 nt, Molluscum contagiosum virus
cuuggccccucccggu

SEQ ID NO: 3093970 - RNA, 13 nt, Molluscum contagiosum virus
cugcgcaagcgcu

SEQ ID NO: 3093971 - RNA, 17 nt, Molluscum contagiosum virus
ggaucggagcgcagcug

SEQ ID NO: 3093972 - RNA, 23 nt, Molluscum contagiosum virus
cgggaugcuggacgggcacgagc

SEQ ID NO: 3093973 - RNA, 20 nt, Molluscum contagiosum virus
ugguggccaagauccuguac

SEQ ID NO: 3093974 - RNA, 21 nt, Molluscum contagiosum virus
ucgagcauuugcucgcucgga

SEQ ID NO: 3093975 - RNA, 18 nt, Molluscum contagiosum virus
ggcgagucgcgggcgcgc

SEQ ID NO: 3093976 - RNA, 18 nt, Molluscum contagiosum virus
ucugcgcgagcagcugcu

SEQ ID NO: 3093977 - RNA, 16 nt, Molluscum contagiosum virus
cugcagcccuuccacg

SEQ ID NO: 3093978 - RNA, 21 nt, Molluscum contagiosum virus
gcguggggagcuggagcgagu

SEQ ID NO: 3093979 - RNA, 19 nt, Molluscum contagiosum virus
ggacaugagcuugcgcacg

SEQ ID NO: 3093980 - RNA, 16 nt, Molluscum contagiosum virus
ucugugaccugcgcca

SEQ ID NO: 3093981 - RNA, 15 nt, Molluscum contagiosum virus
ccucgugcugggccu

SEQ ID NO: 3093982 - RNA, 14 nt, Molluscum contagiosum virus
cgaaguccugggcg

SEQ ID NO: 3093983 - RNA, 17 nt, Molluscum contagiosum virus
ggcgcaucagagaagug

SEQ ID NO: 3093984 - RNA, 17 nt, Molluscum contagiosum virus
cguccagccgcagccgc

SEQ ID NO: 3093985 - RNA, 21 nt, Molluscum contagiosum virus
agcgccggaaacggaccugga

SEQ ID NO: 3093986 - RNA, 16 nt, Molluscum contagiosum virus
cgcggaagaagcugcg

SEQ ID NO: 3093987 - RNA, 15 nt, Molluscum contagiosum virus
cgcgccgcugcgccg

SEQ ID NO: 3093988 - RNA, 18 nt, Molluscum contagiosum virus
gcacggcacccgccagcu

SEQ ID NO: 3093989 - RNA, 13 nt, Molluscum contagiosum virus
gcucguccagcug

SEQ ID NO: 3093990 - RNA, 13 nt, Molluscum contagiosum virus
acugcagcagccc

SEQ ID NO: 3093991 - RNA, 16 nt, Molluscum contagiosum virus
cacgugccaagaccug

SEQ ID NO: 3093992 - RNA, 21 nt, Molluscum contagiosum virus
ugcacgcgugugguugcuugc

SEQ ID NO: 3093993 - RNA, 16 nt, Molluscum contagiosum virus
gcgcgcauuuaccggc

SEQ ID NO: 3093994 - RNA, 14 nt, Molluscum contagiosum virus
guucgacaaggacg

SEQ ID NO: 3093995 - RNA, 16 nt, Molluscum contagiosum virus
auacaaaguugaccac

SEQ ID NO: 3093996 - RNA, 17 nt, Molluscum contagiosum virus
gcgccgggcgccagaac

SEQ ID NO: 3093997 - RNA, 18 nt, Molluscum contagiosum virus
gugcagggcgugcuugcc

SEQ ID NO: 3093998 - RNA, 15 nt, Molluscum contagiosum virus
cuccucgcucugcuc

SEQ ID NO: 3093999 - RNA, 17 nt, Molluscum contagiosum virus
caugaguuucuggugcc

SEQ ID NO: 3094000 - RNA, 16 nt, Molluscum contagiosum virus
acuugcuuccucuccc

SEQ ID NO: 3094001 - RNA, 23 nt, Molluscum contagiosum virus
ccgagguggcacccuggcugcug

SEQ ID NO: 3094002 - RNA, 19 nt, Molluscum contagiosum virus
cgacucggaugcgcugccg

SEQ ID NO: 3094003 - RNA, 18 nt, Molluscum contagiosum virus
cccucaggggcucuccua

SEQ ID NO: 3094004 - RNA, 20 nt, Molluscum contagiosum virus
cugcacagcuuccuggagua

SEQ ID NO: 3094005 - RNA, 23 nt, Molluscum contagiosum virus
ccaugaggacagcuugcugcugu

SEQ ID NO: 3094006 - RNA, 18 nt, Molluscum contagiosum virus
uggccguagugcucaucg

SEQ ID NO: 3094007 - RNA, 19 nt, Molluscum contagiosum virus
cgagcaauugcugggcaca

SEQ ID NO: 3094008 - RNA, 19 nt, Molluscum contagiosum virus
cagcuccuagcgcgcgugu

SEQ ID NO: 3094009 - RNA, 21 nt, Molluscum contagiosum virus
aguccucgacaaugagcacuu

SEQ ID NO: 3094010 - RNA, 18 nt, Molluscum contagiosum virus
cgucuccgggggcgcgcu

SEQ ID NO: 3094011 - RNA, 18 nt, Molluscum contagiosum virus
gcccgacacguugcacug

SEQ ID NO: 3094012 - RNA, 13 nt, Molluscum contagiosum virus
caaacgccagugc

SEQ ID NO: 3094013 - RNA, 16 nt, Molluscum contagiosum virus
cugcucgcgcucgcgg

SEQ ID NO: 3094014 - RNA, 22 nt, Molluscum contagiosum virus
gccuacucgcgacgcguccgcc

SEQ ID NO: 3094015 - RNA, 21 nt, Molluscum contagiosum virus
ggcugccgcugccugugccca

SEQ ID NO: 3094016 - RNA, 21 nt, Molluscum contagiosum virus
agccucccccgcgcacugcca

SEQ ID NO: 3094017 - RNA, 19 nt, Molluscum contagiosum virus
cggagaccuggucacacug

SEQ ID NO: 3094018 - RNA, 16 nt, Molluscum contagiosum virus
ugcggacgcgggccgc

SEQ ID NO: 3094019 - RNA, 16 nt, Molluscum contagiosum virus
gcccgcgaacgagaga

SEQ ID NO: 3094020 - RNA, 12 nt, Molluscum contagiosum virus
ggacgcacuaga

SEQ ID NO: 3094021 - RNA, 20 nt, Molluscum contagiosum virus
ccgacgcgggcgcgcacccc

SEQ ID NO: 3094022 - RNA, 18 nt, Molluscum contagiosum virus
cacgcgcacuugccuggc

SEQ ID NO: 3094023 - RNA, 14 nt, Molluscum contagiosum virus
gcugcggcugcugc

SEQ ID NO: 3094024 - RNA, 14 nt, Molluscum contagiosum virus
caggaaagguaccc

SEQ ID NO: 3094025 - RNA, 16 nt, Molluscum contagiosum virus
cgcuguugcugcugcc

SEQ ID NO: 3094026 - RNA, 20 nt, Molluscum contagiosum virus
ucucaaccaccugagccucu

SEQ ID NO: 3094027 - RNA, 16 nt, Molluscum contagiosum virus
gaggcggcacugcuag

SEQ ID NO: 3094028 - RNA, 13 nt, Molluscum contagiosum virus
ccucugccagccg

SEQ ID NO: 3094029 - RNA, 22 nt, Molluscum contagiosum virus
gcuggccaacacuaccacagcc

SEQ ID NO: 3094030 - RNA, 21 nt, Molluscum contagiosum virus
ggcgcugucgcgcaggcucug

SEQ ID NO: 3094031 - RNA, 18 nt, Molluscum contagiosum virus
acuaccuggcggcgcugg

SEQ ID NO: 3094032 - RNA, 20 nt, Molluscum contagiosum virus
gcaucgcgggcacgcagcuc

SEQ ID NO: 3094033 - RNA, 21 nt, Molluscum contagiosum virus
ugcuuugucugcaggcagaag

SEQ ID NO: 3094034 - RNA, 11 nt, Molluscum contagiosum virus
gcaaggcccac

SEQ ID NO: 3094035 - RNA, 20 nt, Molluscum contagiosum virus
uggucgcgcgcgcucugccg

SEQ ID NO: 3094036 - RNA, 14 nt, Molluscum contagiosum virus
gucucgcgcucgcc

SEQ ID NO: 3094037 - RNA, 16 nt, Molluscum contagiosum virus
ccgaagucuaggcagc

SEQ ID NO: 3094038 - RNA, 15 nt, Molluscum contagiosum virus
acagaugccacgacc

SEQ ID NO: 3094039 - RNA, 13 nt, Molluscum contagiosum virus
agcagcgccugca

SEQ ID NO: 3094040 - RNA, 22 nt, Molluscum contagiosum virus
ccaacacgcaaucgcgcgcgca

SEQ ID NO: 3094041 - RNA, 13 nt, Molluscum contagiosum virus
ugcuccaugacag

SEQ ID NO: 3094042 - RNA, 22 nt, Molluscum contagiosum virus
gccucgcguuagcgcuggcccg

SEQ ID NO: 3094043 - RNA, 20 nt, Molluscum contagiosum virus
ccgcgagcuaaucagcgcca

SEQ ID NO: 3094044 - RNA, 11 nt, Molluscum contagiosum virus
ccuagcuccag

SEQ ID NO: 3094045 - RNA, 12 nt, Molluscum contagiosum virus
ccucacgugcug

SEQ ID NO: 3094046 - RNA, 17 nt, Molluscum contagiosum virus
acggguguacaaagagc

SEQ ID NO: 3094047 - RNA, 21 nt, Molluscum contagiosum virus
cagccaugaggacagcuugcu

SEQ ID NO: 3094048 - RNA, 20 nt, Molluscum contagiosum virus
gcuucgcuggcggggacagc

SEQ ID NO: 3094049 - RNA, 22 nt, Molluscum contagiosum virus
cagcacgggccggggccucgcg

SEQ ID NO: 3094050 - RNA, 15 nt, Molluscum contagiosum virus
agcaccaagaagcgg

SEQ ID NO: 3094051 - RNA, 16 nt, Molluscum contagiosum virus
agaggggagccagccu

SEQ ID NO: 3094052 - RNA, 14 nt, Molluscum contagiosum virus
cgguggcggcucug

SEQ ID NO: 3094053 - RNA, 19 nt, Molluscum contagiosum virus
gugcgcgugucuggagccc

SEQ ID NO: 3094054 - RNA, 17 nt, Molluscum contagiosum virus
cgcaggcgucaugcgcg

SEQ ID NO: 3094055 - RNA, 18 nt, Molluscum contagiosum virus
aucgcgcucaggaccagu

SEQ ID NO: 3094056 - RNA, 11 nt, Molluscum contagiosum virus
caagacuggcc

SEQ ID NO: 3094057 - RNA, 13 nt, Molluscum contagiosum virus
uacugcacugcag

SEQ ID NO: 3094058 - RNA, 21 nt, Molluscum contagiosum virus
cgagagaggagugaagggugu

SEQ ID NO: 3094059 - RNA, 19 nt, Molluscum contagiosum virus
ggaagcaacgacaaggaaa

SEQ ID NO: 3094060 - RNA, 14 nt, Molluscum contagiosum virus
agcacgccuccaag

SEQ ID NO: 3094061 - RNA, 14 nt, Molluscum contagiosum virus
gcgggaagggguga

SEQ ID NO: 3094062 - RNA, 15 nt, Molluscum contagiosum virus
cccgcgcccgcgccg

SEQ ID NO: 3094063 - RNA, 22 nt, Molluscum contagiosum virus
ggcucgagcgcgcgccugcugg

SEQ ID NO: 3094064 - RNA, 13 nt, Molluscum contagiosum virus
uaugcccagccug

SEQ ID NO: 3094065 - RNA, 13 nt, Molluscum contagiosum virus
accugcugcugag

SEQ ID NO: 3094066 - RNA, 23 nt, Molluscum contagiosum virus
gccucggacggaggucugcuuug

SEQ ID NO: 3094067 - RNA, 20 nt, Molluscum contagiosum virus
cauccuugauaaaagcacag

SEQ ID NO: 3094068 - RNA, 13 nt, Molluscum contagiosum virus
guggacgagcaga

SEQ ID NO: 3094069 - RNA, 15 nt, Molluscum contagiosum virus
guucugcgcgccgcu

SEQ ID NO: 3094070 - RNA, 15 nt, Molluscum contagiosum virus
uugcuacaggacguc

SEQ ID NO: 3094071 - RNA, 18 nt, Molluscum contagiosum virus
cgacgggcgcgcuucuca

SEQ ID NO: 3094072 - RNA, 17 nt, Molluscum contagiosum virus
gugcucgccugcaucuu

SEQ ID NO: 3094073 - RNA, 16 nt, Molluscum contagiosum virus
gcgcggccuggccacg

SEQ ID NO: 3094074 - RNA, 16 nt, Molluscum contagiosum virus
aucacggcgugcgcga

SEQ ID NO: 3094075 - RNA, 23 nt, Molluscum contagiosum virus
aggggugccgcugcgcuggaugc

SEQ ID NO: 3094076 - RNA, 14 nt, Molluscum contagiosum virus
gccgcggcagcucu

SEQ ID NO: 3094077 - RNA, 21 nt, Molluscum contagiosum virus
gugcagcugccgcagagccgc

SEQ ID NO: 3094078 - RNA, 18 nt, Molluscum contagiosum virus
gccaagcguuggcgcccg

SEQ ID NO: 3094079 - RNA, 22 nt, Molluscum contagiosum virus
ggguaaugcagauuggaggagg

SEQ ID NO: 3094080 - RNA, 21 nt, Molluscum contagiosum virus
ccgccaacgcggacgcgcagc

SEQ ID NO: 3094081 - RNA, 18 nt, Molluscum contagiosum virus
gcacgcgccgcgcggcuc

SEQ ID NO: 3094082 - RNA, 19 nt, Molluscum contagiosum virus
aguugcgagccagccaggc

SEQ ID NO: 3094083 - RNA, 13 nt, Molluscum contagiosum virus
ccccgugagcgcg

SEQ ID NO: 3094084 - RNA, 23 nt, Molluscum contagiosum virus
ccgcagcacgcgugugcgagcac

SEQ ID NO: 3094085 - RNA, 22 nt, Molluscum contagiosum virus
gcucgcgagcguuucugccgga

SEQ ID NO: 3094086 - RNA, 19 nt, Molluscum contagiosum virus
ccggccuuguucgcgcuuc

SEQ ID NO: 3094087 - RNA, 13 nt, Molluscum contagiosum virus
gcgugcgcuggcg

SEQ ID NO: 3094088 - RNA, 17 nt, Molluscum contagiosum virus
ggagcggccacucuccc

SEQ ID NO: 3094089 - RNA, 18 nt, Molluscum contagiosum virus
cagugcgccucggacuuc

SEQ ID NO: 3094090 - RNA, 15 nt, Molluscum contagiosum virus
agagccgcgugcgcc

SEQ ID NO: 3094091 - RNA, 12 nt, Molluscum contagiosum virus
ugcggcugcugg

SEQ ID NO: 3094092 - RNA, 19 nt, Molluscum contagiosum virus
ugcccgccagaagugaaau

SEQ ID NO: 3094093 - RNA, 17 nt, Molluscum contagiosum virus
cuggcacuggcgcgcac

SEQ ID NO: 3094094 - RNA, 13 nt, Molluscum contagiosum virus
gacgugcugcugc

SEQ ID NO: 3094095 - RNA, 23 nt, Molluscum contagiosum virus
cagauccgggcgcugcaccgcuu

SEQ ID NO: 3094096 - RNA, 17 nt, Molluscum contagiosum virus
cgcggcgccuugcuagu

SEQ ID NO: 3094097 - RNA, 13 nt, Molluscum contagiosum virus
aggcugcugccgc

SEQ ID NO: 3094098 - RNA, 23 nt, Molluscum contagiosum virus
uggaacgagagugugcaugcugu

SEQ ID NO: 3094099 - RNA, 19 nt, Molluscum contagiosum virus
gcuccgcacguggagucac

SEQ ID NO: 3094100 - RNA, 17 nt, Molluscum contagiosum virus
cggagacaccagcuccg

SEQ ID NO: 3094101 - RNA, 13 nt, Molluscum contagiosum virus
cugcgcgagccgc

SEQ ID NO: 3094102 - RNA, 16 nt, Molluscum contagiosum virus
gacgugaucgcgcagg

SEQ ID NO: 3094103 - RNA, 23 nt, Molluscum contagiosum virus
gugcaaaucgcguacgguguccu

SEQ ID NO: 3094104 - RNA, 14 nt, Molluscum contagiosum virus
cgacgagcacgagc

SEQ ID NO: 3094105 - RNA, 22 nt, Molluscum contagiosum virus
gucggcaccgcgccgaaacacg

SEQ ID NO: 3094106 - RNA, 11 nt, Molluscum contagiosum virus
ugcuugcuucc

SEQ ID NO: 3094107 - RNA, 14 nt, Molluscum contagiosum virus
cgcgagugugcgug

SEQ ID NO: 3094108 - RNA, 21 nt, Molluscum contagiosum virus
uccaguaagcgacaggucagg

SEQ ID NO: 3094109 - RNA, 23 nt, Molluscum contagiosum virus
cguguacaugcucaagcaccugc

SEQ ID NO: 3094110 - RNA, 21 nt, Molluscum contagiosum virus
ccgcguagcuagcucugcgcg

SEQ ID NO: 3094111 - RNA, 16 nt, Molluscum contagiosum virus
gcgcgugcugucagug

SEQ ID NO: 3094112 - RNA, 21 nt, Molluscum contagiosum virus
gagaaaggcacccaccaggaa

SEQ ID NO: 3094113 - RNA, 15 nt, Molluscum contagiosum virus
gccugcaaggagguc

SEQ ID NO: 3094114 - RNA, 18 nt, Molluscum contagiosum virus
cgcggcaagccuggcucc

SEQ ID NO: 3094115 - RNA, 20 nt, Molluscum contagiosum virus
cgugcugcucugcgugcuug

SEQ ID NO: 3094116 - RNA, 17 nt, Molluscum contagiosum virus
cuuccggugccggccgc

SEQ ID NO: 3094117 - RNA, 15 nt, Molluscum contagiosum virus
ccucgagcgcgcugg

SEQ ID NO: 3094118 - RNA, 17 nt, Molluscum contagiosum virus
ccugcuuccuccuccaa

SEQ ID NO: 3094119 - RNA, 21 nt, Molluscum contagiosum virus
agccugugcccuggaagcuuc

SEQ ID NO: 3094120 - RNA, 15 nt, Molluscum contagiosum virus
cugugcuucccgaaa

SEQ ID NO: 3094121 - RNA, 23 nt, Molluscum contagiosum virus
ggccaaggucucgagcuccaggg

SEQ ID NO: 3094122 - RNA, 19 nt, Molluscum contagiosum virus
gugcuggggcuagcgcugc

SEQ ID NO: 3094123 - RNA, 22 nt, Molluscum contagiosum virus
gccagcgggaaacugcugcccg

SEQ ID NO: 3094124 - RNA, 22 nt, Molluscum contagiosum virus
uggccucugccugcaaggaggu

SEQ ID NO: 3094125 - RNA, 14 nt, Molluscum contagiosum virus
guugccggagcuga

SEQ ID NO: 3094126 - RNA, 16 nt, Molluscum contagiosum virus
ccuggcagugccgggc

SEQ ID NO: 3094127 - RNA, 22 nt, Molluscum contagiosum virus
agcagcaaacugugcuccugag

SEQ ID NO: 3094128 - RNA, 22 nt, Molluscum contagiosum virus
cgcuggggcgugacucggccgc

SEQ ID NO: 3094129 - RNA, 18 nt, Molluscum contagiosum virus
cccgcgcguugcugcccg

SEQ ID NO: 3094130 - RNA, 17 nt, Molluscum contagiosum virus
cggcguguuccggcagc

SEQ ID NO: 3094131 - RNA, 19 nt, Molluscum contagiosum virus
gccgcaggaaccgcgugcg

SEQ ID NO: 3094132 - RNA, 14 nt, Molluscum contagiosum virus
ccugcugcgcagca

SEQ ID NO: 3094133 - RNA, 14 nt, Molluscum contagiosum virus
cgugcugcagcugc

SEQ ID NO: 3094134 - RNA, 13 nt, Molluscum contagiosum virus
ugaaggcauaccu

SEQ ID NO: 3094135 - RNA, 16 nt, Molluscum contagiosum virus
gugcgccuucgucacg

SEQ ID NO: 3094136 - RNA, 14 nt, Molluscum contagiosum virus
gagggacacgcacu

SEQ ID NO: 3094137 - RNA, 21 nt, Molluscum contagiosum virus
gcaagcccggaagcuugcuca

SEQ ID NO: 3094138 - RNA, 12 nt, Molluscum contagiosum virus
cgcugcgggcgc

SEQ ID NO: 3094139 - RNA, 16 nt, Molluscum contagiosum virus
cugcagcccgacgcgg

SEQ ID NO: 3094140 - RNA, 16 nt, Molluscum contagiosum virus
cgaggccgcgcucuuc

SEQ ID NO: 3094141 - RNA, 15 nt, Molluscum contagiosum virus
cacagccccugcugc

SEQ ID NO: 3094142 - RNA, 22 nt, Molluscum contagiosum virus
gugcucguggaaaagcagggcc

SEQ ID NO: 3094143 - RNA, 11 nt, Molluscum contagiosum virus
aggcggcuccu

SEQ ID NO: 3094144 - RNA, 13 nt, Molluscum contagiosum virus
acaaagucgcgcg

SEQ ID NO: 3094145 - RNA, 21 nt, Molluscum contagiosum virus
ugguguauccaggaucacgau

SEQ ID NO: 3094146 - RNA, 14 nt, Molluscum contagiosum virus
cacggacagcaccc

SEQ ID NO: 3094147 - RNA, 16 nt, Molluscum contagiosum virus
gcuguugcugcugccg

SEQ ID NO: 3094148 - RNA, 14 nt, Molluscum contagiosum virus
ggagguuggaagca

SEQ ID NO: 3094149 - RNA, 16 nt, Molluscum contagiosum virus
accgcgcgcgcuccga

SEQ ID NO: 3094150 - RNA, 14 nt, Molluscum contagiosum virus
cgugcgagcggcgc

SEQ ID NO: 3094151 - RNA, 15 nt, Molluscum contagiosum virus
cagcucaagcugcuc

SEQ ID NO: 3094152 - RNA, 19 nt, Molluscum contagiosum virus
gccccgacgccagcgcgcc

SEQ ID NO: 3094153 - RNA, 18 nt, Molluscum contagiosum virus
gcuggcgcgcgccgagcc

SEQ ID NO: 3094154 - RNA, 19 nt, Molluscum contagiosum virus
cagcgcgcccaccagcagc

SEQ ID NO: 3094155 - RNA, 15 nt, Molluscum contagiosum virus
cgcagcaagcagccg

SEQ ID NO: 3094156 - RNA, 18 nt, Molluscum contagiosum virus
uacgcgcgcgugcugcua

SEQ ID NO: 3094157 - RNA, 13 nt, Molluscum contagiosum virus
gucuaccccgcgu

SEQ ID NO: 3094158 - RNA, 16 nt, Molluscum contagiosum virus
cagcaaacagccugug

SEQ ID NO: 3094159 - RNA, 15 nt, Molluscum contagiosum virus
cagggcgugcuugcc

SEQ ID NO: 3094160 - RNA, 23 nt, Molluscum contagiosum virus
ccggcaucgcgcugcuggugcuc

SEQ ID NO: 3094161 - RNA, 21 nt, Molluscum contagiosum virus
ccuggugcugcgcgacaugcu

SEQ ID NO: 3094162 - RNA, 13 nt, Molluscum contagiosum virus
cccacguacgagc

SEQ ID NO: 3094163 - RNA, 18 nt, Molluscum contagiosum virus
acggagcuacaaaacuga

SEQ ID NO: 3094164 - RNA, 22 nt, Molluscum contagiosum virus
gcacaacgggcucgugcuggag

SEQ ID NO: 3094165 - RNA, 20 nt, Molluscum contagiosum virus
cuucgucaagcagcgcgcca

SEQ ID NO: 3094166 - RNA, 17 nt, Molluscum contagiosum virus
guggcacccuggcugcu

SEQ ID NO: 3094167 - RNA, 21 nt, Molluscum contagiosum virus
ggcacaggguuccgcgccugc

SEQ ID NO: 3094168 - RNA, 17 nt, Molluscum contagiosum virus
ggcggcgcaaggacacc

SEQ ID NO: 3094169 - RNA, 17 nt, Molluscum contagiosum virus
cgcugagcaagcucaag

SEQ ID NO: 3094170 - RNA, 19 nt, Molluscum contagiosum virus
caccucaccgcgcacaucu

SEQ ID NO: 3094171 - RNA, 17 nt, Molluscum contagiosum virus
ggcguccggcgcuugcc

SEQ ID NO: 3094172 - RNA, 19 nt, Molluscum contagiosum virus
cuggagaccugucgugcaa

SEQ ID NO: 3094173 - RNA, 11 nt, Molluscum contagiosum virus
cccaccaggaa

SEQ ID NO: 3094174 - RNA, 14 nt, Molluscum contagiosum virus
caccagcugccgcu

SEQ ID NO: 3094175 - RNA, 13 nt, Molluscum contagiosum virus
cgcuuccgcggcc

SEQ ID NO: 3094176 - RNA, 21 nt, Molluscum contagiosum virus
gacaacugcgucucaagacaa

SEQ ID NO: 3094177 - RNA, 15 nt, Molluscum contagiosum virus
gcagcagugccagca

SEQ ID NO: 3094178 - RNA, 17 nt, Molluscum contagiosum virus
uccacgugguccaccag

SEQ ID NO: 3094179 - RNA, 23 nt, Molluscum contagiosum virus
ucccaagcaaagccucucucgug

SEQ ID NO: 3094180 - RNA, 12 nt, Molluscum contagiosum virus
gccgcuccagag

SEQ ID NO: 3094181 - RNA, 22 nt, Molluscum contagiosum virus
acgggcccgcguggcaagggcu

SEQ ID NO: 3094182 - RNA, 22 nt, Molluscum contagiosum virus
ugcgagggagccucgcuggugu

SEQ ID NO: 3094183 - RNA, 15 nt, Molluscum contagiosum virus
gaugcgcggacagag

SEQ ID NO: 3094184 - RNA, 23 nt, Molluscum contagiosum virus
cccauacucgaacgcaaggugug

SEQ ID NO: 3094185 - RNA, 17 nt, Molluscum contagiosum virus
cucgcggggcaagcgcg

SEQ ID NO: 3094186 - RNA, 17 nt, Molluscum contagiosum virus
acccgcaggaaaggcac

SEQ ID NO: 3094187 - RNA, 14 nt, Molluscum contagiosum virus
gcgccgccagcucc

SEQ ID NO: 3094188 - RNA, 22 nt, Molluscum contagiosum virus
cugccagcucgacacugugcug

SEQ ID NO: 3094189 - RNA, 16 nt, Molluscum contagiosum virus
caccccgcugggccgc

SEQ ID NO: 3094190 - RNA, 16 nt, Molluscum contagiosum virus
ugcgcuggcccacgcu

SEQ ID NO: 3094191 - RNA, 13 nt, Molluscum contagiosum virus
cccugcugcucgc

SEQ ID NO: 3094192 - RNA, 18 nt, Molluscum contagiosum virus
ucgccgaacggcagaccc

SEQ ID NO: 3094193 - RNA, 20 nt, Molluscum contagiosum virus
gccucgcgcgcacugcggga

SEQ ID NO: 3094194 - RNA, 20 nt, Molluscum contagiosum virus
acggcgacuuguagugcccg

SEQ ID NO: 3094195 - RNA, 16 nt, Molluscum contagiosum virus
cuacgaguucugcauc

SEQ ID NO: 3094196 - RNA, 22 nt, Molluscum contagiosum virus
gugcucuuuaguacaacgcgcu

SEQ ID NO: 3094197 - RNA, 22 nt, Molluscum contagiosum virus
ggugcugcgcgacaugcugccc

SEQ ID NO: 3094198 - RNA, 15 nt, Molluscum contagiosum virus
cgcgcugcagcaccu

SEQ ID NO: 3094199 - RNA, 13 nt, Molluscum contagiosum virus
uugggcacugcua

SEQ ID NO: 3094200 - RNA, 21 nt, Molluscum contagiosum virus
cgcucgggccggcgcgccgcg

SEQ ID NO: 3094201 - RNA, 21 nt, Molluscum contagiosum virus
uccaggaacgccgccacgccg

SEQ ID NO: 3094202 - RNA, 14 nt, Molluscum contagiosum virus
gcguggacaacagc

SEQ ID NO: 3094203 - RNA, 14 nt, Molluscum contagiosum virus
caaaggugcucacc

SEQ ID NO: 3094204 - RNA, 20 nt, Molluscum contagiosum virus
ccgcgcgcggugcugcgcca

SEQ ID NO: 3094205 - RNA, 15 nt, Molluscum contagiosum virus
aagaagcccaaggag

SEQ ID NO: 3094206 - RNA, 20 nt, Molluscum contagiosum virus
cauggucgcauccgaccucu

SEQ ID NO: 3094207 - RNA, 19 nt, Molluscum contagiosum virus
ccagcgcgcucgaggcgcc

SEQ ID NO: 3094208 - RNA, 16 nt, Molluscum contagiosum virus
cgcagcgcggccuggu

SEQ ID NO: 3094209 - RNA, 21 nt, Molluscum contagiosum virus
ggcccgcguggcaagggcucc

SEQ ID NO: 3094210 - RNA, 15 nt, Molluscum contagiosum virus
cggcggggcugcugg

SEQ ID NO: 3094211 - RNA, 16 nt, Molluscum contagiosum virus
cguccuagagcagaag

SEQ ID NO: 3094212 - RNA, 22 nt, Molluscum contagiosum virus
gaaaggcacccaccaggaacga

SEQ ID NO: 3094213 - RNA, 15 nt, Molluscum contagiosum virus
cugugagcgcgccgc

SEQ ID NO: 3094214 - RNA, 16 nt, Molluscum contagiosum virus
acuugugcgcccccgc

SEQ ID NO: 3094215 - RNA, 16 nt, Molluscum contagiosum virus
cggacgcggccaugcu

SEQ ID NO: 3094216 - RNA, 19 nt, Molluscum contagiosum virus
cgugggcggcauccugaug

SEQ ID NO: 3094217 - RNA, 21 nt, Molluscum contagiosum virus
gcucggaggcuugccccgcgc

SEQ ID NO: 3094218 - RNA, 19 nt, Molluscum contagiosum virus
ucgaagaccaccagcacca

SEQ ID NO: 3094219 - RNA, 22 nt, Molluscum contagiosum virus
acgcggcguacaucgacuacgc

SEQ ID NO: 3094220 - RNA, 13 nt, Molluscum contagiosum virus
cuggcgcagcagg

SEQ ID NO: 3094221 - RNA, 20 nt, Molluscum contagiosum virus
ccgcgcccgcggcgcacggc

SEQ ID NO: 3094222 - RNA, 22 nt, Molluscum contagiosum virus
ccgagcggcaagccgugcuuug

SEQ ID NO: 3094223 - RNA, 12 nt, Molluscum contagiosum virus
cccgcgggccgc

SEQ ID NO: 3094224 - RNA, 21 nt, Molluscum contagiosum virus
aacagcauuagcgccaaggcg

SEQ ID NO: 3094225 - RNA, 22 nt, Molluscum contagiosum virus
cugcaggaaaggcacccgcagg

SEQ ID NO: 3094226 - RNA, 20 nt, Molluscum contagiosum virus
ggacgccagcuugagcacac

SEQ ID NO: 3094227 - RNA, 18 nt, Molluscum contagiosum virus
gcacgcgcgacaucuucc

SEQ ID NO: 3094228 - RNA, 18 nt, Molluscum contagiosum virus
acgcgcugcuagagaacc

SEQ ID NO: 3094229 - RNA, 21 nt, Molluscum contagiosum virus
ggaagucggcguggccaggcc

SEQ ID NO: 3094230 - RNA, 14 nt, Molluscum contagiosum virus
gcugugcgagccag

SEQ ID NO: 3094231 - RNA, 15 nt, Molluscum contagiosum virus
uggaggauucuugua

SEQ ID NO: 3094232 - RNA, 18 nt, Molluscum contagiosum virus
cuucuucgugcugugccu

SEQ ID NO: 3094233 - RNA, 13 nt, Molluscum contagiosum virus
gcgagugugcaug

SEQ ID NO: 3094234 - RNA, 14 nt, Molluscum contagiosum virus
gcauguccuuggcg

SEQ ID NO: 3094235 - RNA, 20 nt, Molluscum contagiosum virus
gcugcgccggcugcgccacc

SEQ ID NO: 3094236 - RNA, 15 nt, Molluscum contagiosum virus
cgacagagcccggga

SEQ ID NO: 3094237 - RNA, 16 nt, Molluscum contagiosum virus
cgacauguacauagcc

SEQ ID NO: 3094238 - RNA, 19 nt, Molluscum contagiosum virus
cgguugcgcgugugcagca

SEQ ID NO: 3094239 - RNA, 13 nt, Molluscum contagiosum virus
cgagcauuccgag

SEQ ID NO: 3094240 - RNA, 22 nt, Molluscum contagiosum virus
cucucgggcucgcgggacgacg

SEQ ID NO: 3094241 - RNA, 16 nt, Molluscum contagiosum virus
agcagcuggccggcuc

SEQ ID NO: 3094242 - RNA, 21 nt, Molluscum contagiosum virus
cacagcaggagcacgccuggc

SEQ ID NO: 3094243 - RNA, 14 nt, Molluscum contagiosum virus
ccacgcgggcccgu

SEQ ID NO: 3094244 - RNA, 16 nt, Molluscum contagiosum virus
cggccaaccgccugcu

SEQ ID NO: 3094245 - RNA, 12 nt, Molluscum contagiosum virus
ccgcugcuggaa

SEQ ID NO: 3094246 - RNA, 13 nt, Molluscum contagiosum virus
cgcggcgcagugc

SEQ ID NO: 3094247 - RNA, 13 nt, Molluscum contagiosum virus
acuuccgcgcgcu

SEQ ID NO: 3094248 - RNA, 14 nt, Molluscum contagiosum virus
uucgcgagccacuc

SEQ ID NO: 3094249 - RNA, 12 nt, Molluscum contagiosum virus
agcccccucaga

SEQ ID NO: 3094250 - RNA, 17 nt, Molluscum contagiosum virus
gcgacguucgagaccag

SEQ ID NO: 3094251 - RNA, 18 nt, Molluscum contagiosum virus
acugcgccuucugccugc

SEQ ID NO: 3094252 - RNA, 22 nt, Molluscum contagiosum virus
ucagugggcguuacagcaccuu

SEQ ID NO: 3094253 - RNA, 19 nt, Molluscum contagiosum virus
cuacauggacgugcugcug

SEQ ID NO: 3094254 - RNA, 17 nt, Molluscum contagiosum virus
cccggcacgugccccgc

SEQ ID NO: 3094255 - RNA, 14 nt, Molluscum contagiosum virus
ugcuggagcggcau

SEQ ID NO: 3094256 - RNA, 19 nt, Molluscum contagiosum virus
ccugcgggagauccuggcg

SEQ ID NO: 3094257 - RNA, 23 nt, Molluscum contagiosum virus
cgcgaacuacuuccugcagcugu

SEQ ID NO: 3094258 - RNA, 18 nt, Molluscum contagiosum virus
gggcgccggcucugccuc

SEQ ID NO: 3094259 - RNA, 13 nt, Molluscum contagiosum virus
cguucaccuuggc

SEQ ID NO: 3094260 - RNA, 15 nt, Molluscum contagiosum virus
ucgacgccaacuucg

SEQ ID NO: 3094261 - RNA, 17 nt, Molluscum contagiosum virus
gcagagcgagggcgacg

SEQ ID NO: 3094262 - RNA, 20 nt, Molluscum contagiosum virus
agcggcgacuugcugcggag

SEQ ID NO: 3094263 - RNA, 16 nt, Molluscum contagiosum virus
ucgcgucacguccuca

SEQ ID NO: 3094264 - RNA, 17 nt, Molluscum contagiosum virus
gagcucgguagccaggc

SEQ ID NO: 3094265 - RNA, 15 nt, Molluscum contagiosum virus
cgacccguaccccga

SEQ ID NO: 3094266 - RNA, 21 nt, Molluscum contagiosum virus
uacucgagcacggccgccacc

SEQ ID NO: 3094267 - RNA, 18 nt, Molluscum contagiosum virus
accgcaaccagcugcugu

SEQ ID NO: 3094268 - RNA, 20 nt, Molluscum contagiosum virus
ugcccggcggcaagcccgga

SEQ ID NO: 3094269 - RNA, 16 nt, Molluscum contagiosum virus
aggucaucaccagccu

SEQ ID NO: 3094270 - RNA, 20 nt, Molluscum contagiosum virus
ccacaaagcccuccugagaa

SEQ ID NO: 3094271 - RNA, 13 nt, Molluscum contagiosum virus
gcugcgcgccgcc

SEQ ID NO: 3094272 - RNA, 22 nt, Molluscum contagiosum virus
ccuacgcuaccugaagcuggac

SEQ ID NO: 3094273 - RNA, 15 nt, Molluscum contagiosum virus
acgcgaaacuggacu

SEQ ID NO: 3094274 - RNA, 16 nt, Molluscum contagiosum virus
agcgugcccuucuccg

SEQ ID NO: 3094275 - RNA, 16 nt, Molluscum contagiosum virus
cucauccucccugcgg

SEQ ID NO: 3094276 - RNA, 15 nt, Molluscum contagiosum virus
ccgccuguaccugcu

SEQ ID NO: 3094277 - RNA, 20 nt, Molluscum contagiosum virus
ccggcggcaagcccggaagc

SEQ ID NO: 3094278 - RNA, 15 nt, Molluscum contagiosum virus
accuguaugaucugc

SEQ ID NO: 3094279 - RNA, 16 nt, Molluscum contagiosum virus
cgcgugcgugcugcgc

SEQ ID NO: 3094280 - RNA, 20 nt, Molluscum contagiosum virus
cccgcaaaccuuggcccuuu

SEQ ID NO: 3094281 - RNA, 14 nt, Molluscum contagiosum virus
ugcacgcgggcgcc

SEQ ID NO: 3094282 - RNA, 23 nt, Molluscum contagiosum virus
caccagugccgacgugugccgcu

SEQ ID NO: 3094283 - RNA, 12 nt, Molluscum contagiosum virus
cggacagcaccc

SEQ ID NO: 3094284 - RNA, 20 nt, Molluscum contagiosum virus
ucuuccacgccuucguggag

SEQ ID NO: 3094285 - RNA, 13 nt, Molluscum contagiosum virus
ccguccucgcucg

SEQ ID NO: 3094286 - RNA, 23 nt, Molluscum contagiosum virus
agcugacucggacacuggaggug

SEQ ID NO: 3094287 - RNA, 17 nt, Molluscum contagiosum virus
gcaguccgccucgagca

SEQ ID NO: 3094288 - RNA, 21 nt, Molluscum contagiosum virus
uagcaggaucggagcgcagcu

SEQ ID NO: 3094289 - RNA, 17 nt, Molluscum contagiosum virus
gacccucgcggcucugg

SEQ ID NO: 3094290 - RNA, 20 nt, Molluscum contagiosum virus
cgucugcucucggcggccgg

SEQ ID NO: 3094291 - RNA, 19 nt, Molluscum contagiosum virus
cgcgugcaugcgagcgcgg

SEQ ID NO: 3094292 - RNA, 15 nt, Molluscum contagiosum virus
cgcgucgagggcgcc

SEQ ID NO: 3094293 - RNA, 11 nt, Molluscum contagiosum virus
agcguggagcu

SEQ ID NO: 3094294 - RNA, 15 nt, Molluscum contagiosum virus
ggcgccgcugcugga

SEQ ID NO: 3094295 - RNA, 22 nt, Molluscum contagiosum virus
ugcuggcgcgcgcgcgccggaa

SEQ ID NO: 3094296 - RNA, 21 nt, Molluscum contagiosum virus
ugccacguacuugcugguugc

SEQ ID NO: 3094297 - RNA, 17 nt, Molluscum contagiosum virus
ggcgcguuucggccugc

SEQ ID NO: 3094298 - RNA, 23 nt, Molluscum contagiosum virus
cgcaaggugugcgcgcugcacgc

SEQ ID NO: 3094299 - RNA, 16 nt, Molluscum contagiosum virus
aagacuggcucagaac

SEQ ID NO: 3094300 - RNA, 15 nt, Molluscum contagiosum virus
cgccagaagugaaau

SEQ ID NO: 3094301 - RNA, 12 nt, Molluscum contagiosum virus
augaccaaggag

SEQ ID NO: 3094302 - RNA, 12 nt, Molluscum contagiosum virus
ggaccugcgcca

SEQ ID NO: 3094303 - RNA, 16 nt, Molluscum contagiosum virus
cagcgggcgcugcucg

SEQ ID NO: 3094304 - RNA, 15 nt, Molluscum contagiosum virus
gacggcgacgacagc

SEQ ID NO: 3094305 - RNA, 13 nt, Molluscum contagiosum virus
gggguccgcuccu

SEQ ID NO: 3094306 - RNA, 20 nt, Molluscum contagiosum virus
gggccuguucggcaugcagc

SEQ ID NO: 3094307 - RNA, 20 nt, Molluscum contagiosum virus
ggcgcgccgccggugcgugc

SEQ ID NO: 3094308 - RNA, 23 nt, Molluscum contagiosum virus
cggcgcguccucggccagagccu

SEQ ID NO: 3094309 - RNA, 12 nt, Molluscum contagiosum virus
gcgccgccgcag

SEQ ID NO: 3094310 - RNA, 13 nt, Molluscum contagiosum virus
aagucgaagaggg

SEQ ID NO: 3094311 - RNA, 23 nt, Molluscum contagiosum virus
cagauaguuuggacgagcugcuu

SEQ ID NO: 3094312 - RNA, 20 nt, Molluscum contagiosum virus
cggugcaaccgcugcucgac

SEQ ID NO: 3094313 - RNA, 16 nt, Molluscum contagiosum virus
ggagaagugcuccgca

SEQ ID NO: 3094314 - RNA, 16 nt, Molluscum contagiosum virus
accgcuagagugcgcg

SEQ ID NO: 3094315 - RNA, 22 nt, Molluscum contagiosum virus
gaacaaugcugcaucuagccuc

SEQ ID NO: 3094316 - RNA, 22 nt, Molluscum contagiosum virus
cgcauggggaacagcuuggcac

SEQ ID NO: 3094317 - RNA, 23 nt, Molluscum contagiosum virus
acgcgucgcgcaggcgcccaacg

SEQ ID NO: 3094318 - RNA, 21 nt, Molluscum contagiosum virus
gacguguguccgagaucacgg

SEQ ID NO: 3094319 - RNA, 16 nt, Molluscum contagiosum virus
acgagcagcugcugcg

SEQ ID NO: 3094320 - RNA, 16 nt, Molluscum contagiosum virus
auuccucgagagggag

SEQ ID NO: 3094321 - RNA, 17 nt, Molluscum contagiosum virus
agaagaggccagcacaa

SEQ ID NO: 3094322 - RNA, 19 nt, Molluscum contagiosum virus
augcggauccuccggauga

SEQ ID NO: 3094323 - RNA, 14 nt, Molluscum contagiosum virus
ugggcuucaaguuc

SEQ ID NO: 3094324 - RNA, 20 nt, Molluscum contagiosum virus
acaugucguaccugguggcc

SEQ ID NO: 3094325 - RNA, 18 nt, Molluscum contagiosum virus
ccuggugugccagcggcg

SEQ ID NO: 3094326 - RNA, 22 nt, Molluscum contagiosum virus
ccucgcgggaggcuccugccgu

SEQ ID NO: 3094327 - RNA, 16 nt, Molluscum contagiosum virus
aggcgaggucacacuc

SEQ ID NO: 3094328 - RNA, 17 nt, Molluscum contagiosum virus
ggagacagggugccuac

SEQ ID NO: 3094329 - RNA, 20 nt, Molluscum contagiosum virus
cucuggucgagaugcucuac

SEQ ID NO: 3094330 - RNA, 15 nt, Molluscum contagiosum virus
ucgcggacggcgcgc

SEQ ID NO: 3094331 - RNA, 18 nt, Molluscum contagiosum virus
gcuccgagcggcugcucg

SEQ ID NO: 3094332 - RNA, 18 nt, Molluscum contagiosum virus
ugccaggcggucuuccag

SEQ ID NO: 3094333 - RNA, 14 nt, Molluscum contagiosum virus
ccgcaaccagcugc

SEQ ID NO: 3094334 - RNA, 15 nt, Molluscum contagiosum virus
ccaagaagacuacca

SEQ ID NO: 3094335 - RNA, 20 nt, Molluscum contagiosum virus
ggaccugcgccagcgccugu

SEQ ID NO: 3094336 - RNA, 21 nt, Molluscum contagiosum virus
cgcgcccaggcgcgcgcucag

SEQ ID NO: 3094337 - RNA, 12 nt, Molluscum contagiosum virus
gagcuggccacu

SEQ ID NO: 3094338 - RNA, 15 nt, Molluscum contagiosum virus
cgguggugcauccug

SEQ ID NO: 3094339 - RNA, 22 nt, Molluscum contagiosum virus
gguggagguuuuccuguggccg

SEQ ID NO: 3094340 - RNA, 15 nt, Molluscum contagiosum virus
gcacgacccucuucu

SEQ ID NO: 3094341 - RNA, 19 nt, Molluscum contagiosum virus
cacuaccgcaaccagcugc

SEQ ID NO: 3094342 - RNA, 12 nt, Molluscum contagiosum virus
uucguggccaac

SEQ ID NO: 3094343 - RNA, 17 nt, Molluscum contagiosum virus
gacgcgcgcggcaagca

SEQ ID NO: 3094344 - RNA, 19 nt, Molluscum contagiosum virus
acgacgcgcccacgugcca

SEQ ID NO: 3094345 - RNA, 18 nt, Molluscum contagiosum virus
ccagcuuggugcgcucga

SEQ ID NO: 3094346 - RNA, 12 nt, Molluscum contagiosum virus
gcgcgugcaguu

SEQ ID NO: 3094347 - RNA, 21 nt, Molluscum contagiosum virus
ccuaucccggagcgcggggca

SEQ ID NO: 3094348 - RNA, 21 nt, Molluscum contagiosum virus
cgccgcagcgcuggagcuggc

SEQ ID NO: 3094349 - RNA, 19 nt, Molluscum contagiosum virus
cccgccagcaccaugcgug

SEQ ID NO: 3094350 - RNA, 15 nt, Molluscum contagiosum virus
ucgucgagcacgaag

SEQ ID NO: 3094351 - RNA, 18 nt, Molluscum contagiosum virus
aggccccgcaccagugcc

SEQ ID NO: 3094352 - RNA, 21 nt, Molluscum contagiosum virus
ggcugcccuguuacggacggc

SEQ ID NO: 3094353 - RNA, 22 nt, Molluscum contagiosum virus
cacgcugcgcgugcugggcccc

SEQ ID NO: 3094354 - RNA, 14 nt, Molluscum contagiosum virus
guacccgcaggaaa

SEQ ID NO: 3094355 - RNA, 19 nt, Molluscum contagiosum virus
aacaggggccguucgcgcg

SEQ ID NO: 3094356 - RNA, 12 nt, Molluscum contagiosum virus
cucgcgcacgcg

SEQ ID NO: 3094357 - RNA, 17 nt, Molluscum contagiosum virus
cucaaucucgcccagca

SEQ ID NO: 3094358 - RNA, 16 nt, Molluscum contagiosum virus
acacgagggccuuggc

SEQ ID NO: 3094359 - RNA, 23 nt, Molluscum contagiosum virus
cuucgcagaggacagcuccuucu

SEQ ID NO: 3094360 - RNA, 13 nt, Molluscum contagiosum virus
cuggagcgcaaau

SEQ ID NO: 3094361 - RNA, 17 nt, Molluscum contagiosum virus
cagcucaagcugcucau

SEQ ID NO: 3094362 - RNA, 19 nt, Molluscum contagiosum virus
caucccgcacgugggcuac

SEQ ID NO: 3094363 - RNA, 16 nt, Molluscum contagiosum virus
guggcaugcgcccuca

SEQ ID NO: 3094364 - RNA, 12 nt, Molluscum contagiosum virus
agcucagccucu

SEQ ID NO: 3094365 - RNA, 23 nt, Molluscum contagiosum virus
gccgcgaaagaggaaagcgcaca

SEQ ID NO: 3094366 - RNA, 13 nt, Molluscum contagiosum virus
gaacugcagcagc

SEQ ID NO: 3094367 - RNA, 20 nt, Molluscum contagiosum virus
cgucuuucccagaagggcuu

SEQ ID NO: 3094368 - RNA, 21 nt, Molluscum contagiosum virus
ggcccacgcuggcgcucggcg

SEQ ID NO: 3094369 - RNA, 16 nt, Molluscum contagiosum virus
acaaggaaaggcaccc

SEQ ID NO: 3094370 - RNA, 18 nt, Molluscum contagiosum virus
ugcagcagguugaagcuc

SEQ ID NO: 3094371 - RNA, 17 nt, Molluscum contagiosum virus
gcgccgcacgugcugcg

SEQ ID NO: 3094372 - RNA, 14 nt, Molluscum contagiosum virus
accccgagcugcgg

SEQ ID NO: 3094373 - RNA, 15 nt, Molluscum contagiosum virus
acgaggaaaggcacc

SEQ ID NO: 3094374 - RNA, 23 nt, Molluscum contagiosum virus
cggcacccgugcgcgcgcugaga

SEQ ID NO: 3094375 - RNA, 16 nt, Molluscum contagiosum virus
ccgcagcaagcagccg

SEQ ID NO: 3094376 - RNA, 16 nt, Molluscum contagiosum virus
ugggcguggcgcaccu

SEQ ID NO: 3094377 - RNA, 18 nt, Molluscum contagiosum virus
acgcuaccugaagcugga

SEQ ID NO: 3094378 - RNA, 19 nt, Molluscum contagiosum virus
ugcuccgcacguggaguca

SEQ ID NO: 3094379 - RNA, 18 nt, Molluscum contagiosum virus
gccacggcgagcugccau

SEQ ID NO: 3094380 - RNA, 21 nt, Molluscum contagiosum virus
ggagccggccuagagcuggca

SEQ ID NO: 3094381 - RNA, 23 nt, Molluscum contagiosum virus
acggcgcgcgcgcuagccgccgc

SEQ ID NO: 3094382 - RNA, 17 nt, Molluscum contagiosum virus
gcgcgauggcgccugcu

SEQ ID NO: 3094383 - RNA, 22 nt, Molluscum contagiosum virus
cgcggcgagugcggccaccagc

SEQ ID NO: 3094384 - RNA, 14 nt, Molluscum contagiosum virus
gcucggcccgcgga

SEQ ID NO: 3094385 - RNA, 19 nt, Molluscum contagiosum virus
ggucgacgggaacgagguc

SEQ ID NO: 3094386 - RNA, 23 nt, Molluscum contagiosum virus
ucaauggcgcgcgagcacagcgc

SEQ ID NO: 3094387 - RNA, 14 nt, Molluscum contagiosum virus
uggcggggcuggca

SEQ ID NO: 3094388 - RNA, 18 nt, Molluscum contagiosum virus
gacgcgcaagugugcgca

SEQ ID NO: 3094389 - RNA, 15 nt, Molluscum contagiosum virus
cggcaggcucccgcu

SEQ ID NO: 3094390 - RNA, 15 nt, Molluscum contagiosum virus
cggccgugcagagca

SEQ ID NO: 3094391 - RNA, 21 nt, Molluscum contagiosum virus
gccucagccgagcgccgccag

SEQ ID NO: 3094392 - RNA, 14 nt, Molluscum contagiosum virus
cgcgagcgcaugcg

SEQ ID NO: 3094393 - RNA, 22 nt, Molluscum contagiosum virus
cugcgcgcguugccugagaagc

SEQ ID NO: 3094394 - RNA, 19 nt, Molluscum contagiosum virus
gcgagcuaaucagcgccau

SEQ ID NO: 3094395 - RNA, 13 nt, Molluscum contagiosum virus
ccgucccccgcgg

SEQ ID NO: 3094396 - RNA, 19 nt, Molluscum contagiosum virus
ucaaucucgcccagcaccu

SEQ ID NO: 3094397 - RNA, 15 nt, Molluscum contagiosum virus
ggaucacggcucugc

SEQ ID NO: 3094398 - RNA, 16 nt, Molluscum contagiosum virus
gcucaccgccgagaug

SEQ ID NO: 3094399 - RNA, 18 nt, Molluscum contagiosum virus
ccugcggcucgcacuugc

SEQ ID NO: 3094400 - RNA, 15 nt, Molluscum contagiosum virus
cagcaucccugccac

SEQ ID NO: 3094401 - RNA, 20 nt, Molluscum contagiosum virus
gagcgcauucgcgcgccccc

SEQ ID NO: 3094402 - RNA, 19 nt, Molluscum contagiosum virus
cgcaggaaccgcgugcgca

SEQ ID NO: 3094403 - RNA, 17 nt, Molluscum contagiosum virus
gcguccacgaugcgcuc

SEQ ID NO: 3094404 - RNA, 15 nt, Molluscum contagiosum virus
gcgagcaugccgccg

SEQ ID NO: 3094405 - RNA, 21 nt, Molluscum contagiosum virus
accagcuacgagccgcugcuc

SEQ ID NO: 3094406 - RNA, 18 nt, Molluscum contagiosum virus
cggcaagcuucgggccgc

SEQ ID NO: 3094407 - RNA, 12 nt, Molluscum contagiosum virus
gugcuggggcua

SEQ ID NO: 3094408 - RNA, 14 nt, Molluscum contagiosum virus
ugccauggcagcuc

SEQ ID NO: 3094409 - RNA, 15 nt, Molluscum contagiosum virus
cgagcgaaccgcggc

SEQ ID NO: 3094410 - RNA, 14 nt, Molluscum contagiosum virus
gcgcacugcucgcg

SEQ ID NO: 3094411 - RNA, 15 nt, Molluscum contagiosum virus
aaagagcguccagcc

SEQ ID NO: 3094412 - RNA, 17 nt, Molluscum contagiosum virus
cgcgcaccugcacgagc

SEQ ID NO: 3094413 - RNA, 15 nt, Molluscum contagiosum virus
cagccgagcgccgcc

SEQ ID NO: 3094414 - RNA, 18 nt, Molluscum contagiosum virus
cauaguacgauggaugcu

SEQ ID NO: 3094415 - RNA, 20 nt, Molluscum contagiosum virus
gugcgucgacguggagccug

SEQ ID NO: 3094416 - RNA, 15 nt, Molluscum contagiosum virus
cgacucucaacgagc

SEQ ID NO: 3094417 - RNA, 13 nt, Molluscum contagiosum virus
cuugcggcacaca

SEQ ID NO: 3094418 - RNA, 23 nt, Molluscum contagiosum virus
ccuuuugcgcgcugcgggcgccg

SEQ ID NO: 3094419 - RNA, 12 nt, Molluscum contagiosum virus
cgcggcguuccc

SEQ ID NO: 3094420 - RNA, 12 nt, Molluscum contagiosum virus
ucgcggagggcg

SEQ ID NO: 3094421 - RNA, 23 nt, Molluscum contagiosum virus
guugccaggcacacgcagugcca

SEQ ID NO: 3094422 - RNA, 10 nt, Molluscum contagiosum virus
agcaugucac

SEQ ID NO: 3094423 - RNA, 13 nt, Molluscum contagiosum virus
cuacuccuggcca

SEQ ID NO: 3094424 - RNA, 18 nt, Molluscum contagiosum virus
ugcugguucugcucgcag

SEQ ID NO: 3094425 - RNA, 15 nt, Molluscum contagiosum virus
cgcaacauguccgca

SEQ ID NO: 3094426 - RNA, 14 nt, Molluscum contagiosum virus
guagcuggcaguca

SEQ ID NO: 3094427 - RNA, 15 nt, Molluscum contagiosum virus
ccgcagaugcgcagc

SEQ ID NO: 3094428 - RNA, 19 nt, Molluscum contagiosum virus
ugcugcgcgcgccaugguu

SEQ ID NO: 3094429 - RNA, 16 nt, Molluscum contagiosum virus
cuucgugcugaagacg

SEQ ID NO: 3094430 - RNA, 15 nt, Molluscum contagiosum virus
acgacagaccccuga

SEQ ID NO: 3094431 - RNA, 17 nt, Molluscum contagiosum virus
gcccgccugccgcgagc

SEQ ID NO: 3094432 - RNA, 14 nt, Molluscum contagiosum virus
cgcaccagcugcaa

SEQ ID NO: 3094433 - RNA, 16 nt, Molluscum contagiosum virus
cgagcaacaggggccg

SEQ ID NO: 3094434 - RNA, 19 nt, Molluscum contagiosum virus
ucgcgggaccgcccuugug

SEQ ID NO: 3094435 - RNA, 22 nt, Molluscum contagiosum virus
ccacgcaggacuggcaccugcg

SEQ ID NO: 3094436 - RNA, 23 nt, Molluscum contagiosum virus
acgacgacggcugcucgcugccu

SEQ ID NO: 3094437 - RNA, 20 nt, Molluscum contagiosum virus
gaaacugcugcccgcgcagc

SEQ ID NO: 3094438 - RNA, 17 nt, Molluscum contagiosum virus
cucccugguaguccugc

SEQ ID NO: 3094439 - RNA, 14 nt, Molluscum contagiosum virus
ggcgagcgcugccg

SEQ ID NO: 3094440 - RNA, 21 nt, Molluscum contagiosum virus
cacgacucgcgucugcaaggc

SEQ ID NO: 3094441 - RNA, 22 nt, Molluscum contagiosum virus
cuccgagcgcgacuuguccuca

SEQ ID NO: 3094442 - RNA, 23 nt, Molluscum contagiosum virus
cccgcaggaaaggcaccccgcag

SEQ ID NO: 3094443 - RNA, 20 nt, Molluscum contagiosum virus
cagccgcaguaccaguaccu

SEQ ID NO: 3094444 - RNA, 23 nt, Molluscum contagiosum virus
aagucguuugcucggggcugucg

SEQ ID NO: 3094445 - RNA, 15 nt, Molluscum contagiosum virus
gugcaccuggagcag

SEQ ID NO: 3094446 - RNA, 15 nt, Molluscum contagiosum virus
ucggaggcugcuccc

SEQ ID NO: 3094447 - RNA, 21 nt, Molluscum contagiosum virus
gcuacgcuggacuuccugcug

SEQ ID NO: 3094448 - RNA, 18 nt, Molluscum contagiosum virus
cagcguguucggggccgc

SEQ ID NO: 3094449 - RNA, 14 nt, Molluscum contagiosum virus
cuccgcacguggaa

SEQ ID NO: 3094450 - RNA, 16 nt, Molluscum contagiosum virus
ugcgcaagcucagccu

SEQ ID NO: 3094451 - RNA, 20 nt, Molluscum contagiosum virus
cguuccggcggcuggaccug

SEQ ID NO: 3094452 - RNA, 19 nt, Molluscum contagiosum virus
acuggccgcgauucugcuc

SEQ ID NO: 3094453 - RNA, 17 nt, Molluscum contagiosum virus
cgcggcgcuacuggccg

SEQ ID NO: 3094454 - RNA, 23 nt, Molluscum contagiosum virus
ccaagaacaauacaaacaacaac

SEQ ID NO: 3094455 - RNA, 19 nt, Molluscum contagiosum virus
ccggcgaaccgacugcccg

SEQ ID NO: 3094456 - RNA, 19 nt, Molluscum contagiosum virus
caccgcgggcgugcccggc

SEQ ID NO: 3094457 - RNA, 19 nt, Molluscum contagiosum virus
gugcgccgccgcaggcccg

SEQ ID NO: 3094458 - RNA, 15 nt, Molluscum contagiosum virus
gacgucaaccgggcu

SEQ ID NO: 3094459 - RNA, 21 nt, Molluscum contagiosum virus
acguacuggugcccaccccgc

SEQ ID NO: 3094460 - RNA, 12 nt, Molluscum contagiosum virus
guaccagccgcu

SEQ ID NO: 3094461 - RNA, 23 nt, Molluscum contagiosum virus
uaagaguccacugccaaagcuau

SEQ ID NO: 3094462 - RNA, 13 nt, Molluscum contagiosum virus
ugcaucgugggca

SEQ ID NO: 3094463 - RNA, 14 nt, Molluscum contagiosum virus
gcgcgcggcaagca

SEQ ID NO: 3094464 - RNA, 22 nt, Molluscum contagiosum virus
agcgucgcggagcgcgcacggc

SEQ ID NO: 3094465 - RNA, 13 nt, Molluscum contagiosum virus
gaccugcuggugg

SEQ ID NO: 3094466 - RNA, 15 nt, Molluscum contagiosum virus
cgggcagacaggcuc

SEQ ID NO: 3094467 - RNA, 22 nt, Molluscum contagiosum virus
ccgucuccacaaagacgggccc

SEQ ID NO: 3094468 - RNA, 14 nt, Molluscum contagiosum virus
acgcgcugcgccac

SEQ ID NO: 3094469 - RNA, 16 nt, Molluscum contagiosum virus
gcuuggccauggugga

SEQ ID NO: 3094470 - RNA, 19 nt, Molluscum contagiosum virus
gcgcagugcggccagcacc

SEQ ID NO: 3094471 - RNA, 14 nt, Molluscum contagiosum virus
cugcaggaccugcu

SEQ ID NO: 3094472 - RNA, 17 nt, Molluscum contagiosum virus
gucacgcgucgcgcgcc

SEQ ID NO: 3094473 - RNA, 21 nt, Molluscum contagiosum virus
cuugcgagcgcugccugugcu

SEQ ID NO: 3094474 - RNA, 14 nt, Molluscum contagiosum virus
cguugugcuccuug

SEQ ID NO: 3094475 - RNA, 15 nt, Molluscum contagiosum virus
gacacguacacgcug

SEQ ID NO: 3094476 - RNA, 15 nt, Molluscum contagiosum virus
caucuacagccgccu

SEQ ID NO: 3094477 - RNA, 17 nt, Molluscum contagiosum virus
acaugaccaagcacauu

SEQ ID NO: 3094478 - RNA, 13 nt, Molluscum contagiosum virus
ucgucgccgggcc

SEQ ID NO: 3094479 - RNA, 17 nt, Molluscum contagiosum virus
gguuccgcgccugccca

SEQ ID NO: 3094480 - RNA, 14 nt, Molluscum contagiosum virus
gacgugcugcgcaa

SEQ ID NO: 3094481 - RNA, 14 nt, Molluscum contagiosum virus
ugcuauuaccugac

SEQ ID NO: 3094482 - RNA, 22 nt, Molluscum contagiosum virus
caucggagaagugcuccgcacg

SEQ ID NO: 3094483 - RNA, 23 nt, Molluscum contagiosum virus
gagcucgccaugugcgaagacga

SEQ ID NO: 3094484 - RNA, 18 nt, Molluscum contagiosum virus
agacauaguaccaugacg

SEQ ID NO: 3094485 - RNA, 20 nt, Molluscum contagiosum virus
gcgcaugguggcgauccugu

SEQ ID NO: 3094486 - RNA, 20 nt, Molluscum contagiosum virus
caucgagaugcucaagcacu

SEQ ID NO: 3094487 - RNA, 15 nt, Molluscum contagiosum virus
cuaccugaagcugga

SEQ ID NO: 3094488 - RNA, 15 nt, Molluscum contagiosum virus
cagaggacuuuaucu

SEQ ID NO: 3094489 - RNA, 21 nt, Molluscum contagiosum virus
agaucaggcagcugcugcgcu

SEQ ID NO: 3094490 - RNA, 16 nt, Molluscum contagiosum virus
gccucgaugccaacag

SEQ ID NO: 3094491 - RNA, 19 nt, Molluscum contagiosum virus
gccaucgagaugcucaagc

SEQ ID NO: 3094492 - RNA, 20 nt, Molluscum contagiosum virus
ccuucgcuugucgugcuucc

SEQ ID NO: 3094493 - RNA, 22 nt, Molluscum contagiosum virus
uugaggaacuagugcugcuggg

SEQ ID NO: 3094494 - RNA, 19 nt, Molluscum contagiosum virus
ucgggcugcagcccuucca

SEQ ID NO: 3094495 - RNA, 23 nt, Molluscum contagiosum virus
gcuuguucaccaccaccagcacg

SEQ ID NO: 3094496 - RNA, 14 nt, Molluscum contagiosum virus
gucccgcgcuccga

SEQ ID NO: 3094497 - RNA, 17 nt, Molluscum contagiosum virus
cucugccggcgcaaucu

SEQ ID NO: 3094498 - RNA, 23 nt, Molluscum contagiosum virus
aaggaugccugccagcagagcug

SEQ ID NO: 3094499 - RNA, 16 nt, Molluscum contagiosum virus
aggaaaggccccccgc

SEQ ID NO: 3094500 - RNA, 16 nt, Molluscum contagiosum virus
agggcggagccccgag

SEQ ID NO: 3094501 - RNA, 19 nt, Molluscum contagiosum virus
gacgugguacuggcgcccg

SEQ ID NO: 3094502 - RNA, 15 nt, Molluscum contagiosum virus
cucaagcacugccuc

SEQ ID NO: 3094503 - RNA, 17 nt, Molluscum contagiosum virus
cuugauaaaagcacagu

SEQ ID NO: 3094504 - RNA, 14 nt, Molluscum contagiosum virus
acggcgcccaggaa

SEQ ID NO: 3094505 - RNA, 17 nt, Molluscum contagiosum virus
uacccuuggcagcaacu

SEQ ID NO: 3094506 - RNA, 15 nt, Molluscum contagiosum virus
gggcaaugggcacgc

SEQ ID NO: 3094507 - RNA, 17 nt, Molluscum contagiosum virus
cguuccaggaacgccgc

SEQ ID NO: 3094508 - RNA, 17 nt, Molluscum contagiosum virus
ucgacagcauccuggag

SEQ ID NO: 3094509 - RNA, 15 nt, Molluscum contagiosum virus
cucugucgacagucu

SEQ ID NO: 3094510 - RNA, 16 nt, Molluscum contagiosum virus
caagcgccgcucggua

SEQ ID NO: 3094511 - RNA, 22 nt, Molluscum contagiosum virus
ccaugcucgagccugccagcgc

SEQ ID NO: 3094512 - RNA, 18 nt, Molluscum contagiosum virus
ucuccggaggccgcuccc

SEQ ID NO: 3094513 - RNA, 13 nt, Molluscum contagiosum virus
cugacggcgcugc

SEQ ID NO: 3094514 - RNA, 17 nt, Molluscum contagiosum virus
accgacgaggugcgcgc

SEQ ID NO: 3094515 - RNA, 22 nt, Molluscum contagiosum virus
aguuggcgcgcaagcgcugcuc

SEQ ID NO: 3094516 - RNA, 15 nt, Molluscum contagiosum virus
cagccucaaccugaa

SEQ ID NO: 3094517 - RNA, 13 nt, Molluscum contagiosum virus
gaaagaaaacgug

SEQ ID NO: 3094518 - RNA, 18 nt, Molluscum contagiosum virus
gcuccgggcgcuccgagc

SEQ ID NO: 3094519 - RNA, 18 nt, Molluscum contagiosum virus
agccgcuggacgccucgg

SEQ ID NO: 3094520 - RNA, 19 nt, Molluscum contagiosum virus
ugcugguggugcuggagcg

SEQ ID NO: 3094521 - RNA, 20 nt, Molluscum contagiosum virus
cgaacgagggacacgcacuu

SEQ ID NO: 3094522 - RNA, 15 nt, Molluscum contagiosum virus
gccgcggcagcucug

SEQ ID NO: 3094523 - RNA, 18 nt, Molluscum contagiosum virus
ccgcaagaagcgaaacac

SEQ ID NO: 3094524 - RNA, 17 nt, Molluscum contagiosum virus
ccguaggcgggccugcg

SEQ ID NO: 3094525 - RNA, 18 nt, Molluscum contagiosum virus
gacgcggaugccacgcag

SEQ ID NO: 3094526 - RNA, 21 nt, Molluscum contagiosum virus
caccggcggguccgcaggcuc

SEQ ID NO: 3094527 - RNA, 23 nt, Molluscum contagiosum virus
ucgugguugcgcacguuggccac

SEQ ID NO: 3094528 - RNA, 17 nt, Molluscum contagiosum virus
guggcguugcugcugcg

SEQ ID NO: 3094529 - RNA, 12 nt, Molluscum contagiosum virus
cucgagggcgcc

SEQ ID NO: 3094530 - RNA, 19 nt, Molluscum contagiosum virus
gcgcccuuugcggcacggg

SEQ ID NO: 3094531 - RNA, 20 nt, Molluscum contagiosum virus
gcagcgcgugacgcucacgg

SEQ ID NO: 3094532 - RNA, 14 nt, Molluscum contagiosum virus
ccggcgcgugagcg

SEQ ID NO: 3094533 - RNA, 18 nt, Molluscum contagiosum virus
uaccugcaggaggaccgc

SEQ ID NO: 3094534 - RNA, 15 nt, Molluscum contagiosum virus
gcgcggcgcgccgcc

SEQ ID NO: 3094535 - RNA, 17 nt, Molluscum contagiosum virus
auggccgagaaaaagcu

SEQ ID NO: 3094536 - RNA, 18 nt, Molluscum contagiosum virus
gcagcucggcgagagcgc

SEQ ID NO: 3094537 - RNA, 23 nt, Molluscum contagiosum virus
cggcgcccgcgugcacccuccgc

SEQ ID NO: 3094538 - RNA, 19 nt, Molluscum contagiosum virus
ucgacgugcagacgcucaa

SEQ ID NO: 3094539 - RNA, 18 nt, Molluscum contagiosum virus
gcuucggcggcugugccc

SEQ ID NO: 3094540 - RNA, 17 nt, Molluscum contagiosum virus
ggcacgagcaguccgcc

SEQ ID NO: 3094541 - RNA, 22 nt, Molluscum contagiosum virus
gaagacauugccuuuugcacag

SEQ ID NO: 3094542 - RNA, 12 nt, Molluscum contagiosum virus
gacucgcagcuc

SEQ ID NO: 3094543 - RNA, 16 nt, Molluscum contagiosum virus
cgacuagccugugccc

SEQ ID NO: 3094544 - RNA, 22 nt, Molluscum contagiosum virus
cgccacuggaagaacaggccgc

SEQ ID NO: 3094545 - RNA, 15 nt, Molluscum contagiosum virus
ccucagccgagcgcc

SEQ ID NO: 3094546 - RNA, 21 nt, Molluscum contagiosum virus
ucgcggagcugugccgcagca

SEQ ID NO: 3094547 - RNA, 14 nt, Molluscum contagiosum virus
gcggggagcucugc

SEQ ID NO: 3094548 - RNA, 23 nt, Molluscum contagiosum virus
gacgcgcguucuuugugcggcuc

SEQ ID NO: 3094549 - RNA, 22 nt, Molluscum contagiosum virus
uacgagccgcuguccgaggacu

SEQ ID NO: 3094550 - RNA, 17 nt, Molluscum contagiosum virus
aacucacggaugcgcgc

SEQ ID NO: 3094551 - RNA, 13 nt, Molluscum contagiosum virus
gcacccuggcugc

SEQ ID NO: 3094552 - RNA, 15 nt, Molluscum contagiosum virus
aaacacugucucugc

SEQ ID NO: 3094553 - RNA, 12 nt, Molluscum contagiosum virus
gcgcgcugugag

SEQ ID NO: 3094554 - RNA, 14 nt, Molluscum contagiosum virus
guuccugccgggag

SEQ ID NO: 3094555 - RNA, 13 nt, Molluscum contagiosum virus
accuggaguacuu

SEQ ID NO: 3094556 - RNA, 23 nt, Molluscum contagiosum virus
gcucgcgcuguauucggcguacg

SEQ ID NO: 3094557 - RNA, 19 nt, Molluscum contagiosum virus
gucccgcgaacgagggaca

SEQ ID NO: 3094558 - RNA, 16 nt, Molluscum contagiosum virus
aaggacguccuguagc

SEQ ID NO: 3094559 - RNA, 19 nt, Molluscum contagiosum virus
ccaagguuugcgggcgcag

SEQ ID NO: 3094560 - RNA, 17 nt, Molluscum contagiosum virus
acauugcugcugcaggc

SEQ ID NO: 3094561 - RNA, 11 nt, Molluscum contagiosum virus
ucuuucucuag

SEQ ID NO: 3094562 - RNA, 12 nt, Molluscum contagiosum virus
uucgagcugcug

SEQ ID NO: 3094563 - RNA, 17 nt, Molluscum contagiosum virus
acagagcccgcggcgca

SEQ ID NO: 3094564 - RNA, 11 nt, Molluscum contagiosum virus
gagucgcgccu

SEQ ID NO: 3094565 - RNA, 19 nt, Molluscum contagiosum virus
gcgcaguucgagcugcugc

SEQ ID NO: 3094566 - RNA, 15 nt, Molluscum contagiosum virus
caacagcgcaagcug

SEQ ID NO: 3094567 - RNA, 13 nt, Molluscum contagiosum virus
cgccgcgugcaug

SEQ ID NO: 3094568 - RNA, 12 nt, Molluscum contagiosum virus
cagugacagacu

SEQ ID NO: 3094569 - RNA, 21 nt, Molluscum contagiosum virus
gucgagagcgcguucacaaag

SEQ ID NO: 3094570 - RNA, 16 nt, Molluscum contagiosum virus
auccucaaccgcugca

SEQ ID NO: 3094571 - RNA, 12 nt, Molluscum contagiosum virus
uguccucucgag

SEQ ID NO: 3094572 - RNA, 13 nt, Molluscum contagiosum virus
aggcgcuggugga

SEQ ID NO: 3094573 - RNA, 20 nt, Molluscum contagiosum virus
acugggaacccguggccgag

SEQ ID NO: 3094574 - RNA, 23 nt, Molluscum contagiosum virus
auagcgcgcuagcuccacgugcc

SEQ ID NO: 3094575 - RNA, 23 nt, Molluscum contagiosum virus
gcccgggagaguggccgcuccag

SEQ ID NO: 3094576 - RNA, 15 nt, Molluscum contagiosum virus
caggaugcugguguc

SEQ ID NO: 3094577 - RNA, 13 nt, Molluscum contagiosum virus
aggcaaaguucuc

SEQ ID NO: 3094578 - RNA, 14 nt, Molluscum contagiosum virus
gcgcgcaccugcac

SEQ ID NO: 3094579 - RNA, 14 nt, Molluscum contagiosum virus
accgcggcagccuu

SEQ ID NO: 3094580 - RNA, 22 nt, Molluscum contagiosum virus
gcggcauugugguguucgcagg

SEQ ID NO: 3094581 - RNA, 23 nt, Molluscum contagiosum virus
gcagcgcccgcguacacgugcac

SEQ ID NO: 3094582 - RNA, 20 nt, Molluscum contagiosum virus
uacgacgcgcccacgugcca

SEQ ID NO: 3094583 - RNA, 13 nt, Molluscum contagiosum virus
cgccuucugccug

SEQ ID NO: 3094584 - RNA, 15 nt, Molluscum contagiosum virus
cggacuucucgcuca

SEQ ID NO: 3094585 - RNA, 13 nt, Molluscum contagiosum virus
cgcgccugcuggc

SEQ ID NO: 3094586 - RNA, 20 nt, Molluscum contagiosum virus
acaagggcagcucaagcugc

SEQ ID NO: 3094587 - RNA, 11 nt, Molluscum contagiosum virus
gggccgcgagg

SEQ ID NO: 3094588 - RNA, 21 nt, Molluscum contagiosum virus
cacacgcaccgccuggugcug

SEQ ID NO: 3094589 - RNA, 19 nt, Molluscum contagiosum virus
agcauauccugauuucguu

SEQ ID NO: 3094590 - RNA, 20 nt, Molluscum contagiosum virus
guacacguagaggaaguaga

SEQ ID NO: 3094591 - RNA, 15 nt, Molluscum contagiosum virus
ugagcuagugccgag

SEQ ID NO: 3094592 - RNA, 22 nt, Molluscum contagiosum virus
gaccagcugguccugaacagca

SEQ ID NO: 3094593 - RNA, 14 nt, Molluscum contagiosum virus
gacacguugcacug

SEQ ID NO: 3094594 - RNA, 15 nt, Molluscum contagiosum virus
ggggcuggcagaaga

SEQ ID NO: 3094595 - RNA, 21 nt, Molluscum contagiosum virus
gagcggcgccgacaacgugcu

SEQ ID NO: 3094596 - RNA, 14 nt, Molluscum contagiosum virus
acggcgugcgcgag

SEQ ID NO: 3094597 - RNA, 19 nt, Molluscum contagiosum virus
agcguugucuugaugcugu

SEQ ID NO: 3094598 - RNA, 16 nt, Molluscum contagiosum virus
acaguaggacaugucc

SEQ ID NO: 3094599 - RNA, 22 nt, Molluscum contagiosum virus
gaccugcgccauccacgugggc

SEQ ID NO: 3094600 - RNA, 15 nt, Molluscum contagiosum virus
gcgugacccucuucg

SEQ ID NO: 3094601 - RNA, 12 nt, Molluscum contagiosum virus
ggcgcggcagcc

SEQ ID NO: 3094602 - RNA, 19 nt, Molluscum contagiosum virus
gccgagcucuuccccgcgg

SEQ ID NO: 3094603 - RNA, 15 nt, Molluscum contagiosum virus
cgcugcgccgcuucc

SEQ ID NO: 3094604 - RNA, 20 nt, Molluscum contagiosum virus
cgcgaacgaggagggcagcc

SEQ ID NO: 3094605 - RNA, 21 nt, Molluscum contagiosum virus
cuggaguacuucaagcacgag

SEQ ID NO: 3094606 - RNA, 15 nt, Molluscum contagiosum virus
caagccguccgccuc

SEQ ID NO: 3094607 - RNA, 14 nt, Molluscum contagiosum virus
ccgcaagcacggaa

SEQ ID NO: 3094608 - RNA, 15 nt, Molluscum contagiosum virus
gaccgucaccgcagu

SEQ ID NO: 3094609 - RNA, 13 nt, Molluscum contagiosum virus
agacacgagcgcg

SEQ ID NO: 3094610 - RNA, 17 nt, Molluscum contagiosum virus
guaccgcgcgcacgcgg

SEQ ID NO: 3094611 - RNA, 17 nt, Molluscum contagiosum virus
ggucucggggcuccgcc

SEQ ID NO: 3094612 - RNA, 21 nt, Molluscum contagiosum virus
cgacggucacgcaagcuuugu

SEQ ID NO: 3094613 - RNA, 21 nt, Molluscum contagiosum virus
ccgcccgcgcuucugccugcu

SEQ ID NO: 3094614 - RNA, 14 nt, Molluscum contagiosum virus
cggcgcucgccccu

SEQ ID NO: 3094615 - RNA, 19 nt, Molluscum contagiosum virus
ccucuggaaggagcugggc

SEQ ID NO: 3094616 - RNA, 14 nt, Molluscum contagiosum virus
acgcaaaagaggcc

SEQ ID NO: 3094617 - RNA, 20 nt, Molluscum contagiosum virus
guccacggcgcgcaccuaca

SEQ ID NO: 3094618 - RNA, 18 nt, Molluscum contagiosum virus
ucuccgcgggcagccgcu

SEQ ID NO: 3094619 - RNA, 19 nt, Molluscum contagiosum virus
caaggaaaacugcauccug

SEQ ID NO: 3094620 - RNA, 18 nt, Molluscum contagiosum virus
gcaacgcgcgcgcgcugg

SEQ ID NO: 3094621 - RNA, 18 nt, Molluscum contagiosum virus
ggaggaccacgccgacca

SEQ ID NO: 3094622 - RNA, 12 nt, Molluscum contagiosum virus
uacuccugcugg

SEQ ID NO: 3094623 - RNA, 14 nt, Molluscum contagiosum virus
cagcugcugcgcuu

SEQ ID NO: 3094624 - RNA, 17 nt, Molluscum contagiosum virus
gggcuucgccgccggag

SEQ ID NO: 3094625 - RNA, 13 nt, Molluscum contagiosum virus
cgucucggagaag

SEQ ID NO: 3094626 - RNA, 13 nt, Molluscum contagiosum virus
acgguccugggcg

SEQ ID NO: 3094627 - RNA, 22 nt, Molluscum contagiosum virus
cgcacggccugcggcaggaagc

SEQ ID NO: 3094628 - RNA, 16 nt, Molluscum contagiosum virus
cagcgcgaaccauuuu

SEQ ID NO: 3094629 - RNA, 15 nt, Molluscum contagiosum virus
gccagguguuccugc

SEQ ID NO: 3094630 - RNA, 23 nt, Molluscum contagiosum virus
cgcgcucgcgggagcgggagggc

SEQ ID NO: 3094631 - RNA, 13 nt, Molluscum contagiosum virus
agggcgagucucc

SEQ ID NO: 3094632 - RNA, 14 nt, Molluscum contagiosum virus
cacguacgagcagc

SEQ ID NO: 3094633 - RNA, 14 nt, Molluscum contagiosum virus
cucagcaaggaggg

SEQ ID NO: 3094634 - RNA, 17 nt, Molluscum contagiosum virus
cgcuugcccggagccgg

SEQ ID NO: 3094635 - RNA, 15 nt, Molluscum contagiosum virus
cuccagguccuccag

SEQ ID NO: 3094636 - RNA, 17 nt, Molluscum contagiosum virus
gcaacgcgggccaggca

SEQ ID NO: 3094637 - RNA, 21 nt, Molluscum contagiosum virus
gaugcugaacgaucucugacc

SEQ ID NO: 3094638 - RNA, 12 nt, Molluscum contagiosum virus
cggcugcgccac

SEQ ID NO: 3094639 - RNA, 18 nt, Molluscum contagiosum virus
cucuucggggacggcgug

SEQ ID NO: 3094640 - RNA, 22 nt, Molluscum contagiosum virus
ucgcgcacgaccacgugcagga

SEQ ID NO: 3094641 - RNA, 13 nt, Molluscum contagiosum virus
cagcuguuucugc

SEQ ID NO: 3094642 - RNA, 13 nt, Molluscum contagiosum virus
cgagaugcucgcc

SEQ ID NO: 3094643 - RNA, 23 nt, Molluscum contagiosum virus
augaagcucucgcgcgcagggcg

SEQ ID NO: 3094644 - RNA, 21 nt, Molluscum contagiosum virus
augucgccgcguagccgccgc

SEQ ID NO: 3094645 - RNA, 20 nt, Molluscum contagiosum virus
acgcugcucgugcugcucug

SEQ ID NO: 3094646 - RNA, 13 nt, Molluscum contagiosum virus
cucggaggcgcag

SEQ ID NO: 3094647 - RNA, 14 nt, Molluscum contagiosum virus
cgucuuaacucagc

SEQ ID NO: 3094648 - RNA, 17 nt, Molluscum contagiosum virus
gucaucaccagccugcu

SEQ ID NO: 3094649 - RNA, 13 nt, Molluscum contagiosum virus
cagcgccgccucg

SEQ ID NO: 3094650 - RNA, 19 nt, Molluscum contagiosum virus
ccagcccgcugcgcauggc

SEQ ID NO: 3094651 - RNA, 13 nt, Molluscum contagiosum virus
cgccacugccacg

SEQ ID NO: 3094652 - RNA, 17 nt, Molluscum contagiosum virus
acagucuugcgcagcgc

SEQ ID NO: 3094653 - RNA, 18 nt, Molluscum contagiosum virus
guucgcggagcugugccg

SEQ ID NO: 3094654 - RNA, 19 nt, Molluscum contagiosum virus
ccacguccaggccgcggca

SEQ ID NO: 3094655 - RNA, 16 nt, Molluscum contagiosum virus
cugcggcugcuggagc

SEQ ID NO: 3094656 - RNA, 18 nt, Molluscum contagiosum virus
gcgugaacaauacaugcu

SEQ ID NO: 3094657 - RNA, 17 nt, Molluscum contagiosum virus
gcacuggccugcaaacg

SEQ ID NO: 3094658 - RNA, 15 nt, Molluscum contagiosum virus
agcagccgcagccca

SEQ ID NO: 3094659 - RNA, 17 nt, Molluscum contagiosum virus
guuccgcgccugcccau

SEQ ID NO: 3094660 - RNA, 21 nt, Molluscum contagiosum virus
ccuugcgagcgcugccugugc

SEQ ID NO: 3094661 - RNA, 13 nt, Molluscum contagiosum virus
ccgcagccacggc

SEQ ID NO: 3094662 - RNA, 13 nt, Molluscum contagiosum virus
ugccgcagcccga

SEQ ID NO: 3094663 - RNA, 14 nt, Molluscum contagiosum virus
acucgcugcugcuc

SEQ ID NO: 3094664 - RNA, 15 nt, Molluscum contagiosum virus
cagcagcgccagcuu

SEQ ID NO: 3094665 - RNA, 21 nt, Molluscum contagiosum virus
ccaagaagaagcagcagacca

SEQ ID NO: 3094666 - RNA, 17 nt, Molluscum contagiosum virus
ccgccgucggcgugccg

SEQ ID NO: 3094667 - RNA, 23 nt, Molluscum contagiosum virus
cagcuugguaaugagcagcacgc

SEQ ID NO: 3094668 - RNA, 15 nt, Molluscum contagiosum virus
cggauaugcgccugu

SEQ ID NO: 3094669 - RNA, 16 nt, Molluscum contagiosum virus
cugucccuugauccag

SEQ ID NO: 3094670 - RNA, 22 nt, Molluscum contagiosum virus
cugcgcauggccacgcccgggc

SEQ ID NO: 3094671 - RNA, 17 nt, Molluscum contagiosum virus
ucgaagcccagcuucag

SEQ ID NO: 3094672 - RNA, 15 nt, Molluscum contagiosum virus
ggacgcccuccucga

SEQ ID NO: 3094673 - RNA, 15 nt, Molluscum contagiosum virus
cguccccggaaagca

SEQ ID NO: 3094674 - RNA, 24 nt, Molluscum contagiosum virus
ggcagaaacucuccgacgugcugc

SEQ ID NO: 3094675 - RNA, 20 nt, Molluscum contagiosum virus
aacacugacgcucgggccgg

SEQ ID NO: 3094676 - RNA, 17 nt, Molluscum contagiosum virus
gccccgcgcgugcaguu

SEQ ID NO: 3094677 - RNA, 19 nt, Molluscum contagiosum virus
ggcgcaccuuuggugcaga

SEQ ID NO: 3094678 - RNA, 14 nt, Molluscum contagiosum virus
uggacgaggccaac

SEQ ID NO: 3094679 - RNA, 14 nt, Molluscum contagiosum virus
auacucuguagcau

SEQ ID NO: 3094680 - RNA, 19 nt, Molluscum contagiosum virus
cccgcgcucuuacugcagc

SEQ ID NO: 3094681 - RNA, 21 nt, Molluscum contagiosum virus
ccccguccgugucgagcugcc

SEQ ID NO: 3094682 - RNA, 15 nt, Molluscum contagiosum virus
acgccaucaggaaug

SEQ ID NO: 3094683 - RNA, 15 nt, Molluscum contagiosum virus
cgucgcgcgccgugc

SEQ ID NO: 3094684 - RNA, 11 nt, Molluscum contagiosum virus
cccgugguggg

SEQ ID NO: 3094685 - RNA, 12 nt, Molluscum contagiosum virus
uggcgcgccgcu

SEQ ID NO: 3094686 - RNA, 16 nt, Molluscum contagiosum virus
cgcuugcucacgcugc

SEQ ID NO: 3094687 - RNA, 13 nt, Molluscum contagiosum virus
cgcagcgugccgc

SEQ ID NO: 3094688 - RNA, 14 nt, Molluscum contagiosum virus
ccgcggggcuccuc

SEQ ID NO: 3094689 - RNA, 20 nt, Molluscum contagiosum virus
agaaaggcacccaccaggaa

SEQ ID NO: 3094690 - RNA, 19 nt, Molluscum contagiosum virus
cagcucguugcgcagccgg

SEQ ID NO: 3094691 - RNA, 16 nt, Molluscum contagiosum virus
ggcccgccuccgggca

SEQ ID NO: 3094692 - RNA, 18 nt, Molluscum contagiosum virus
gaacagggaaaaaucccc

SEQ ID NO: 3094693 - RNA, 22 nt, Molluscum contagiosum virus
gacgccucgggaaaacgcgcgg

SEQ ID NO: 3094694 - RNA, 17 nt, Molluscum contagiosum virus
ccgcaccagugccgacg

SEQ ID NO: 3094695 - RNA, 13 nt, Molluscum contagiosum virus
caacaagcugcug

SEQ ID NO: 3094696 - RNA, 16 nt, Molluscum contagiosum virus
gcaugcacagcugcuc

SEQ ID NO: 3094697 - RNA, 17 nt, Molluscum contagiosum virus
cugcagcagcuccagca

SEQ ID NO: 3094698 - RNA, 20 nt, Molluscum contagiosum virus
cuaucagagacaggggggag

SEQ ID NO: 3094699 - RNA, 16 nt, Molluscum contagiosum virus
ggcuugccccgcgcgu

SEQ ID NO: 3094700 - RNA, 23 nt, Molluscum contagiosum virus
cugcagcgccgcgcgguugagcu

SEQ ID NO: 3094701 - RNA, 13 nt, Molluscum contagiosum virus
aaggaagcaacaa

SEQ ID NO: 3094702 - RNA, 14 nt, Molluscum contagiosum virus
augaacagcuucac

SEQ ID NO: 3094703 - RNA, 16 nt, Molluscum contagiosum virus
ggccaggcacuggccc

SEQ ID NO: 3094704 - RNA, 15 nt, Molluscum contagiosum virus
cacgcgcccgccgcc

SEQ ID NO: 3094705 - RNA, 19 nt, Molluscum contagiosum virus
agccugcucacggcggcgc

SEQ ID NO: 3094706 - RNA, 17 nt, Molluscum contagiosum virus
cguucccaagcaaagcc

SEQ ID NO: 3094707 - RNA, 18 nt, Molluscum contagiosum virus
gcgggacagagcucggca

SEQ ID NO: 3094708 - RNA, 15 nt, Molluscum contagiosum virus
gucaucggagagccc

SEQ ID NO: 3094709 - RNA, 12 nt, Molluscum contagiosum virus
cggccagcaccg

SEQ ID NO: 3094710 - RNA, 23 nt, Molluscum contagiosum virus
uccaagaacaauacaaacaacaa

SEQ ID NO: 3094711 - RNA, 23 nt, Molluscum contagiosum virus
uggagacggaggugguggccaag

SEQ ID NO: 3094712 - RNA, 12 nt, Molluscum contagiosum virus
ggacagugccuc

SEQ ID NO: 3094713 - RNA, 10 nt, Molluscum contagiosum virus
ggcaagccug

SEQ ID NO: 3094714 - RNA, 16 nt, Molluscum contagiosum virus
aguggcgugacagguc

SEQ ID NO: 3094715 - RNA, 14 nt, Molluscum contagiosum virus
augauugucaagca

SEQ ID NO: 3094716 - RNA, 18 nt, Molluscum contagiosum virus
cgggugccgugccccugc

SEQ ID NO: 3094717 - RNA, 12 nt, Molluscum contagiosum virus
cgggcccgccuu

SEQ ID NO: 3094718 - RNA, 14 nt, Molluscum contagiosum virus
caugcggagcuggc

SEQ ID NO: 3094719 - RNA, 17 nt, Molluscum contagiosum virus
caaagucgcgcgcggcc

SEQ ID NO: 3094720 - RNA, 18 nt, Molluscum contagiosum virus
gcgcacgcggcucuggag

SEQ ID NO: 3094721 - RNA, 19 nt, Molluscum contagiosum virus
cacagucuugcgcagcgcc

SEQ ID NO: 3094722 - RNA, 17 nt, Molluscum contagiosum virus
cccgcgagcacgggcgc

SEQ ID NO: 3094723 - RNA, 13 nt, Molluscum contagiosum virus
gcaacaggggccg

SEQ ID NO: 3094724 - RNA, 20 nt, Molluscum contagiosum virus
caugcggcaggcgcugcgcg

SEQ ID NO: 3094725 - RNA, 20 nt, Molluscum contagiosum virus
cgaguacgccaucguggugg

SEQ ID NO: 3094726 - RNA, 15 nt, Molluscum contagiosum virus
ugcgguacaugcugu

SEQ ID NO: 3094727 - RNA, 21 nt, Molluscum contagiosum virus
aaacugcugcccgcgcagcgc

SEQ ID NO: 3094728 - RNA, 21 nt, Molluscum contagiosum virus
gcacgauggggcgcucgggca

SEQ ID NO: 3094729 - RNA, 16 nt, Molluscum contagiosum virus
gggcccgcgaaggaga

SEQ ID NO: 3094730 - RNA, 12 nt, Molluscum contagiosum virus
cgccgcugcucg

SEQ ID NO: 3094731 - RNA, 14 nt, Molluscum contagiosum virus
caggcgcagcgcgg

SEQ ID NO: 3094732 - RNA, 19 nt, Molluscum contagiosum virus
ggccgcggaggacucggag

SEQ ID NO: 3094733 - RNA, 23 nt, Molluscum contagiosum virus
gcgagggcgaguccccgagcagc

SEQ ID NO: 3094734 - RNA, 17 nt, Molluscum contagiosum virus
gcgcucguacucguugc

SEQ ID NO: 3094735 - RNA, 20 nt, Molluscum contagiosum virus
gacgccagcgauugcccgcg

SEQ ID NO: 3094736 - RNA, 22 nt, Molluscum contagiosum virus
cggcgggcacauccgcuaccug

SEQ ID NO: 3094737 - RNA, 19 nt, Molluscum contagiosum virus
agugaaggguguggccuac

SEQ ID NO: 3094738 - RNA, 15 nt, Molluscum contagiosum virus
gaccaccagcaccag

SEQ ID NO: 3094739 - RNA, 23 nt, Molluscum contagiosum virus
cgauggaaggcgaccagcugguc

SEQ ID NO: 3094740 - RNA, 23 nt, Molluscum contagiosum virus
gcuaccaagaacagagaaaggca

SEQ ID NO: 3094741 - RNA, 23 nt, Molluscum contagiosum virus
gguggugcgccugcacuacugcu

SEQ ID NO: 3094742 - RNA, 12 nt, Molluscum contagiosum virus
cacugugcuggc

SEQ ID NO: 3094743 - RNA, 23 nt, Molluscum contagiosum virus
acguguacaugaugcccugguga

SEQ ID NO: 3094744 - RNA, 15 nt, Molluscum contagiosum virus
cgugaacgaggcugc

SEQ ID NO: 3094745 - RNA, 21 nt, Molluscum contagiosum virus
cccgucuccacaaagacgggc

SEQ ID NO: 3094746 - RNA, 16 nt, Molluscum contagiosum virus
ggucguccuggagccu

SEQ ID NO: 3094747 - RNA, 23 nt, Molluscum contagiosum virus
gcgccugccgcgcaugcuggaga

SEQ ID NO: 3094748 - RNA, 18 nt, Molluscum contagiosum virus
gugccgagcucgccuccu

SEQ ID NO: 3094749 - RNA, 23 nt, Molluscum contagiosum virus
ggcacgaucgcgagacccccguu

SEQ ID NO: 3094750 - RNA, 21 nt, Molluscum contagiosum virus
guacccgagcugugccaacau

SEQ ID NO: 3094751 - RNA, 22 nt, Molluscum contagiosum virus
uucuugguguucugcgcgccgc

SEQ ID NO: 3094752 - RNA, 22 nt, Molluscum contagiosum virus
gcgcggcguggcgcugaggaag

SEQ ID NO: 3094753 - RNA, 18 nt, Molluscum contagiosum virus
cuuccccgcacaagggca

SEQ ID NO: 3094754 - RNA, 23 nt, Molluscum contagiosum virus
cgagggcgggcacgugcugcugc

SEQ ID NO: 3094755 - RNA, 16 nt, Molluscum contagiosum virus
gccaacgccagcugua

SEQ ID NO: 3094756 - RNA, 16 nt, Molluscum contagiosum virus
gcuccccgccagcacc

SEQ ID NO: 3094757 - RNA, 14 nt, Molluscum contagiosum virus
gcuggacgggcacg

SEQ ID NO: 3094758 - RNA, 14 nt, Molluscum contagiosum virus
uccgggcgcuccga

SEQ ID NO: 3094759 - RNA, 15 nt, Molluscum contagiosum virus
ggccuguaccugcga

SEQ ID NO: 3094760 - RNA, 14 nt, Molluscum contagiosum virus
cgugcuccacgcgc

SEQ ID NO: 3094761 - RNA, 20 nt, Molluscum contagiosum virus
uugaacaucuaugcacggca

SEQ ID NO: 3094762 - RNA, 14 nt, Molluscum contagiosum virus
cugcugcgcgccgc

SEQ ID NO: 3094763 - RNA, 21 nt, Molluscum contagiosum virus
caguagcgaaugcagugcccg

SEQ ID NO: 3094764 - RNA, 16 nt, Molluscum contagiosum virus
ccaugugucuuguggc

SEQ ID NO: 3094765 - RNA, 17 nt, Molluscum contagiosum virus
cgggcaaugggcacgcu

SEQ ID NO: 3094766 - RNA, 14 nt, Molluscum contagiosum virus
agacgcugcugcac

SEQ ID NO: 3094767 - RNA, 11 nt, Molluscum contagiosum virus
auauccagccc

SEQ ID NO: 3094768 - RNA, 14 nt, Molluscum contagiosum virus
gccuaccugcagga

SEQ ID NO: 3094769 - RNA, 15 nt, Molluscum contagiosum virus
agagcgcgcggcgcc

SEQ ID NO: 3094770 - RNA, 19 nt, Molluscum contagiosum virus
cgaagaguuggacagccau

SEQ ID NO: 3094771 - RNA, 16 nt, Molluscum contagiosum virus
gccccugggcuucugg

SEQ ID NO: 3094772 - RNA, 19 nt, Molluscum contagiosum virus
guaccugcaggcucuaagc

SEQ ID NO: 3094773 - RNA, 14 nt, Molluscum contagiosum virus
ccccguccuugcuc

SEQ ID NO: 3094774 - RNA, 18 nt, Molluscum contagiosum virus
ugcaguugagagcagcgg

SEQ ID NO: 3094775 - RNA, 17 nt, Molluscum contagiosum virus
gucgcaguacccgagcu

SEQ ID NO: 3094776 - RNA, 17 nt, Molluscum contagiosum virus
aaccugggcgccgcgcu

SEQ ID NO: 3094777 - RNA, 17 nt, Molluscum contagiosum virus
ccguccuugcucuggcu

SEQ ID NO: 3094778 - RNA, 17 nt, Molluscum contagiosum virus
cgcgcucgcgugccgcg

SEQ ID NO: 3094779 - RNA, 22 nt, Molluscum contagiosum virus
cugcggcgcgugccgcugcgcg

SEQ ID NO: 3094780 - RNA, 19 nt, Molluscum contagiosum virus
cagcacaaacucgcagaac

SEQ ID NO: 3094781 - RNA, 19 nt, Molluscum contagiosum virus
caagcuggaggcugccccu

SEQ ID NO: 3094782 - RNA, 17 nt, Molluscum contagiosum virus
cccggcgggcucuuccu

SEQ ID NO: 3094783 - RNA, 21 nt, Molluscum contagiosum virus
cuagcauuccuucacacagac

SEQ ID NO: 3094784 - RNA, 18 nt, Molluscum contagiosum virus
uccgggcacguccgccuc

SEQ ID NO: 3094785 - RNA, 22 nt, Molluscum contagiosum virus
agcgcgcccaccagcagccagg

SEQ ID NO: 3094786 - RNA, 20 nt, Molluscum contagiosum virus
ucucguucgcgaccuggcgc

SEQ ID NO: 3094787 - RNA, 14 nt, Molluscum contagiosum virus
gcgucgccugagcu

SEQ ID NO: 3094788 - RNA, 13 nt, Molluscum contagiosum virus
cgcgagcugcugc

SEQ ID NO: 3094789 - RNA, 14 nt, Molluscum contagiosum virus
cucguacugcugca

SEQ ID NO: 3094790 - RNA, 13 nt, Molluscum contagiosum virus
acuccugcuggcg

SEQ ID NO: 3094791 - RNA, 14 nt, Molluscum contagiosum virus
agagggucgugcag

SEQ ID NO: 3094792 - RNA, 17 nt, Molluscum contagiosum virus
gcgcgggaugcuggacg

SEQ ID NO: 3094793 - RNA, 16 nt, Molluscum contagiosum virus
gcaggagcacgccugg

SEQ ID NO: 3094794 - RNA, 22 nt, Molluscum contagiosum virus
gcagccccguaggcgggccugc

SEQ ID NO: 3094795 - RNA, 19 nt, Molluscum contagiosum virus
gcccgcugcgcgcucugga

SEQ ID NO: 3094796 - RNA, 23 nt, Molluscum contagiosum virus
acggagcgcgucuauccugucag

SEQ ID NO: 3094797 - RNA, 22 nt, Molluscum contagiosum virus
cccucuaaauggccgcgccgcg

SEQ ID NO: 3094798 - RNA, 13 nt, Molluscum contagiosum virus
acacgagggccuu

SEQ ID NO: 3094799 - RNA, 15 nt, Molluscum contagiosum virus
cuuccggcagcugga

SEQ ID NO: 3094800 - RNA, 15 nt, Molluscum contagiosum virus
gccagcggcgccgca

SEQ ID NO: 3094801 - RNA, 21 nt, Molluscum contagiosum virus
gcgcgacuuguccucaagucg

SEQ ID NO: 3094802 - RNA, 15 nt, Molluscum contagiosum virus
cucuucgcaggcgug

SEQ ID NO: 3094803 - RNA, 21 nt, Molluscum contagiosum virus
guacugaacgucuucgagagc

SEQ ID NO: 3094804 - RNA, 21 nt, Molluscum contagiosum virus
ugacugugucgacuucaccuu

SEQ ID NO: 3094805 - RNA, 22 nt, Molluscum contagiosum virus
gaccugucgugcaauggcaggu

SEQ ID NO: 3094806 - RNA, 14 nt, Molluscum contagiosum virus
cucgcgagcacuuu

SEQ ID NO: 3094807 - RNA, 15 nt, Molluscum contagiosum virus
ggcacccgcaggaaa

SEQ ID NO: 3094808 - RNA, 18 nt, Molluscum contagiosum virus
cguccgcacgaggagccc

SEQ ID NO: 3094809 - RNA, 15 nt, Molluscum contagiosum virus
cgccucgagcgcgcu

SEQ ID NO: 3094810 - RNA, 17 nt, Molluscum contagiosum virus
cuguaaauggaccacaa

SEQ ID NO: 3094811 - RNA, 23 nt, Molluscum contagiosum virus
acgccaacuucgucucgagcuuc

SEQ ID NO: 3094812 - RNA, 13 nt, Molluscum contagiosum virus
gcgccacugccac

SEQ ID NO: 3094813 - RNA, 12 nt, Molluscum contagiosum virus
acgcgagcacug

SEQ ID NO: 3094814 - RNA, 14 nt, Molluscum contagiosum virus
cggcggcgcgaagc

SEQ ID NO: 3094815 - RNA, 18 nt, Molluscum contagiosum virus
cugcugccgagcuucguc

SEQ ID NO: 3094816 - RNA, 13 nt, Molluscum contagiosum virus
cguggacaacagc

SEQ ID NO: 3094817 - RNA, 19 nt, Molluscum contagiosum virus
cguacgcgcagggagcugc

SEQ ID NO: 3094818 - RNA, 22 nt, Molluscum contagiosum virus
ccccaugcccgaccacgugcca

SEQ ID NO: 3094819 - RNA, 15 nt, Molluscum contagiosum virus
gaggcggcacugcua

SEQ ID NO: 3094820 - RNA, 18 nt, Molluscum contagiosum virus
uccggucgcccuccgccg

SEQ ID NO: 3094821 - RNA, 20 nt, Molluscum contagiosum virus
gcucaugguuugcgugggug

SEQ ID NO: 3094822 - RNA, 12 nt, Molluscum contagiosum virus
gcacugcuacga

SEQ ID NO: 3094823 - RNA, 21 nt, Molluscum contagiosum virus
gcgcggcccgagcaggacgug

SEQ ID NO: 3094824 - RNA, 23 nt, Molluscum contagiosum virus
gcggcacgccgcucggcacugcu

SEQ ID NO: 3094825 - RNA, 14 nt, Molluscum contagiosum virus
gcugccgcagagcc

SEQ ID NO: 3094826 - RNA, 16 nt, Molluscum contagiosum virus
ugcgugacccucuucg

SEQ ID NO: 3094827 - RNA, 21 nt, Molluscum contagiosum virus
ccgcaaauuccguccccucuc

SEQ ID NO: 3094828 - RNA, 24 nt, Molluscum contagiosum virus
cgcgaaggcaaccgcgacgagcag

SEQ ID NO: 3094829 - RNA, 18 nt, Molluscum contagiosum virus
cgcacggugugcuacugc

SEQ ID NO: 3094830 - RNA, 19 nt, Molluscum contagiosum virus
uuguagcgguugaccagcu

SEQ ID NO: 3094831 - RNA, 21 nt, Molluscum contagiosum virus
cgugcucgcgagcguuucugc

SEQ ID NO: 3094832 - RNA, 12 nt, Molluscum contagiosum virus
ucacgcaagcuu

SEQ ID NO: 3094833 - RNA, 18 nt, Molluscum contagiosum virus
guggcgccgaugcagugc

SEQ ID NO: 3094834 - RNA, 18 nt, Molluscum contagiosum virus
cagaggcgcguccgcggc

SEQ ID NO: 3094835 - RNA, 18 nt, Molluscum contagiosum virus
ucacggcuguggacauga

SEQ ID NO: 3094836 - RNA, 23 nt, Molluscum contagiosum virus
ccaaugcuuucccguuagagaca

SEQ ID NO: 3094837 - RNA, 23 nt, Molluscum contagiosum virus
cuaccugcgcaagcucagccucu

SEQ ID NO: 3094838 - RNA, 17 nt, Molluscum contagiosum virus
cgcgggccuuugccgcu

SEQ ID NO: 3094839 - RNA, 21 nt, Molluscum contagiosum virus
ucccgcugagcgcagcacacu

SEQ ID NO: 3094840 - RNA, 17 nt, Molluscum contagiosum virus
cgagggcgggcacgugc

SEQ ID NO: 3094841 - RNA, 15 nt, Molluscum contagiosum virus
cugcgcuccaugcug

SEQ ID NO: 3094842 - RNA, 16 nt, Molluscum contagiosum virus
ccggcagcuggagcug

SEQ ID NO: 3094843 - RNA, 15 nt, Molluscum contagiosum virus
uccuuucgacgcugc

SEQ ID NO: 3094844 - RNA, 22 nt, Molluscum contagiosum virus
agcaccucaacuguugccugga

SEQ ID NO: 3094845 - RNA, 23 nt, Molluscum contagiosum virus
agcgcuucuagcucgcgcgcggc

SEQ ID NO: 3094846 - RNA, 22 nt, Molluscum contagiosum virus
cagagaccgucaaccugcugcc

SEQ ID NO: 3094847 - RNA, 20 nt, Molluscum contagiosum virus
uccgccucgagcacgccucc

SEQ ID NO: 3094848 - RNA, 19 nt, Molluscum contagiosum virus
acaggcgcgcaagugcgug

SEQ ID NO: 3094849 - RNA, 14 nt, Molluscum contagiosum virus
ccacucuccuucag

SEQ ID NO: 3094850 - RNA, 13 nt, Molluscum contagiosum virus
cgcggcgagccgc

SEQ ID NO: 3094851 - RNA, 20 nt, Molluscum contagiosum virus
ugucaucaccccgcugggcc

SEQ ID NO: 3094852 - RNA, 15 nt, Molluscum contagiosum virus
gcuggccucugccug

SEQ ID NO: 3094853 - RNA, 20 nt, Molluscum contagiosum virus
gacgcgcguggagcgcgcgg

SEQ ID NO: 3094854 - RNA, 13 nt, Molluscum contagiosum virus
augucgagcccug

SEQ ID NO: 3094855 - RNA, 17 nt, Molluscum contagiosum virus
caccaccuccagguccc

SEQ ID NO: 3094856 - RNA, 19 nt, Molluscum contagiosum virus
guacgagcagcugcugcgc

SEQ ID NO: 3094857 - RNA, 17 nt, Molluscum contagiosum virus
cgugccuggcagugccg

SEQ ID NO: 3094858 - RNA, 13 nt, Molluscum contagiosum virus
cccgcaagccaca

SEQ ID NO: 3094859 - RNA, 14 nt, Molluscum contagiosum virus
gcucgccuuucccc

SEQ ID NO: 3094860 - RNA, 13 nt, Molluscum contagiosum virus
gcucgugcuggag

SEQ ID NO: 3094861 - RNA, 20 nt, Molluscum contagiosum virus
ggcgaacaucucggcuccgc

SEQ ID NO: 3094862 - RNA, 22 nt, Molluscum contagiosum virus
aggugcagaaccugcgggugga

SEQ ID NO: 3094863 - RNA, 21 nt, Molluscum contagiosum virus
ccgcgaggacccgcgcuuugu

SEQ ID NO: 3094864 - RNA, 22 nt, Molluscum contagiosum virus
ucuucguggcgcugggcgcgcc

SEQ ID NO: 3094865 - RNA, 11 nt, Molluscum contagiosum virus
cugcaccacca

SEQ ID NO: 3094866 - RNA, 14 nt, Molluscum contagiosum virus
gcgcccaggaacag

SEQ ID NO: 3094867 - RNA, 14 nt, Molluscum contagiosum virus
ucgcaacaaaagag

SEQ ID NO: 3094868 - RNA, 18 nt, Molluscum contagiosum virus
guaccaguaccugcugcc

SEQ ID NO: 3094869 - RNA, 14 nt, Molluscum contagiosum virus
acgacucgcugcca

SEQ ID NO: 3094870 - RNA, 22 nt, Molluscum contagiosum virus
ccacgccaagcgcuugcucuuc

SEQ ID NO: 3094871 - RNA, 17 nt, Molluscum contagiosum virus
agcgauguuuugaugag

SEQ ID NO: 3094872 - RNA, 20 nt, Molluscum contagiosum virus
aaagcgaaguuugccagcgu

SEQ ID NO: 3094873 - RNA, 17 nt, Molluscum contagiosum virus
cgccggacagcucagca

SEQ ID NO: 3094874 - RNA, 19 nt, Molluscum contagiosum virus
gaugguggcgcugcugccc

SEQ ID NO: 3094875 - RNA, 16 nt, Molluscum contagiosum virus
caggaccugcuggugg

SEQ ID NO: 3094876 - RNA, 20 nt, Molluscum contagiosum virus
cccggcgcgcgcggcgcgcc

SEQ ID NO: 3094877 - RNA, 16 nt, Molluscum contagiosum virus
accacgagcacugccu

SEQ ID NO: 3094878 - RNA, 19 nt, Molluscum contagiosum virus
gcgcggggcacugcgcacg

SEQ ID NO: 3094879 - RNA, 16 nt, Molluscum contagiosum virus
acuaagcuaaaagagc

SEQ ID NO: 3094880 - RNA, 19 nt, Molluscum contagiosum virus
acucgcguccgcgcagcuc

SEQ ID NO: 3094881 - RNA, 14 nt, Molluscum contagiosum virus
ccgcugagcgcagc

SEQ ID NO: 3094882 - RNA, 22 nt, Molluscum contagiosum virus
ccaacacguuuucuuucauggc

SEQ ID NO: 3094883 - RNA, 18 nt, Molluscum contagiosum virus
cgcaaagucaucugccuc

SEQ ID NO: 3094884 - RNA, 23 nt, Molluscum contagiosum virus
acguggucgcgcgcgcucugccg

SEQ ID NO: 3094885 - RNA, 21 nt, Molluscum contagiosum virus
gagcacgagcauuccgagccg

SEQ ID NO: 3094886 - RNA, 14 nt, Molluscum contagiosum virus
ucccggcggcaagc

SEQ ID NO: 3094887 - RNA, 19 nt, Molluscum contagiosum virus
gagugcuggccgagcguga

SEQ ID NO: 3094888 - RNA, 16 nt, Molluscum contagiosum virus
acagcgcgcgugccgc

SEQ ID NO: 3094889 - RNA, 12 nt, Molluscum contagiosum virus
gcucagcgcuuc

SEQ ID NO: 3094890 - RNA, 14 nt, Molluscum contagiosum virus
ccaguacuucaucu

SEQ ID NO: 3094891 - RNA, 15 nt, Molluscum contagiosum virus
ccaggaacaguaccg

SEQ ID NO: 3094892 - RNA, 20 nt, Molluscum contagiosum virus
gcgcucgcucgcgcgcagcu

SEQ ID NO: 3094893 - RNA, 16 nt, Molluscum contagiosum virus
cagcaggccucuuuug

SEQ ID NO: 3094894 - RNA, 16 nt, Molluscum contagiosum virus
gcaagugcacaccaga

SEQ ID NO: 3094895 - RNA, 12 nt, Molluscum contagiosum virus
acagccgcgcgg

SEQ ID NO: 3094896 - RNA, 14 nt, Molluscum contagiosum virus
agagggcagaacag

SEQ ID NO: 3094897 - RNA, 21 nt, Molluscum contagiosum virus
ugugacacgagccgugugcuc

SEQ ID NO: 3094898 - RNA, 17 nt, Molluscum contagiosum virus
cgcugcgcggagcucgc

SEQ ID NO: 3094899 - RNA, 18 nt, Molluscum contagiosum virus
acgccagcagcagaggag

SEQ ID NO: 3094900 - RNA, 23 nt, Molluscum contagiosum virus
cagaaggcguaugcgccaagccu

SEQ ID NO: 3094901 - RNA, 22 nt, Molluscum contagiosum virus
cgccucugggcgucgcacaguu

SEQ ID NO: 3094902 - RNA, 20 nt, Molluscum contagiosum virus
gugacggccguguacaugcu

SEQ ID NO: 3094903 - RNA, 18 nt, Molluscum contagiosum virus
cggaagcucacaucuguc

SEQ ID NO: 3094904 - RNA, 18 nt, Molluscum contagiosum virus
gugcccaguuauucucug

SEQ ID NO: 3094905 - RNA, 22 nt, Molluscum contagiosum virus
cgcgaacgagaaaugcgcacac

SEQ ID NO: 3094906 - RNA, 16 nt, Molluscum contagiosum virus
ugcccggacagagccc

SEQ ID NO: 3094907 - RNA, 14 nt, Molluscum contagiosum virus
gccgcgcugcuggc

SEQ ID NO: 3094908 - RNA, 15 nt, Molluscum contagiosum virus
gccgcuugagcagca

SEQ ID NO: 3094909 - RNA, 14 nt, Molluscum contagiosum virus
gcggcaagccuggc

SEQ ID NO: 3094910 - RNA, 14 nt, Molluscum contagiosum virus
gcgacgacagcgac

SEQ ID NO: 3094911 - RNA, 17 nt, Molluscum contagiosum virus
gagcaauggcggccugc

SEQ ID NO: 3094912 - RNA, 19 nt, Molluscum contagiosum virus
cacaaagagcacggacagc

SEQ ID NO: 3094913 - RNA, 17 nt, Molluscum contagiosum virus
ggcacccaccaggaacg

SEQ ID NO: 3094914 - RNA, 23 nt, Molluscum contagiosum virus
gagcgcgucugcucucggcggcc

SEQ ID NO: 3094915 - RNA, 13 nt, Molluscum contagiosum virus
ccccgagcagcgg

SEQ ID NO: 3094916 - RNA, 21 nt, Molluscum contagiosum virus
cgcgugcugcgcggcgccgca

SEQ ID NO: 3094917 - RNA, 17 nt, Molluscum contagiosum virus
acgugcgcgagcucgag

SEQ ID NO: 3094918 - RNA, 12 nt, Molluscum contagiosum virus
gugcccugucca

SEQ ID NO: 3094919 - RNA, 23 nt, Molluscum contagiosum virus
aaaggcacccgcaacaaggaaag

SEQ ID NO: 3094920 - RNA, 17 nt, Molluscum contagiosum virus
gcgcaagucaccgcucc

SEQ ID NO: 3094921 - RNA, 21 nt, Molluscum contagiosum virus
cgcgcugagcgcggagcuggc

SEQ ID NO: 3094922 - RNA, 17 nt, Molluscum contagiosum virus
cugcggacgcgggccgc

SEQ ID NO: 3094923 - RNA, 18 nt, Molluscum contagiosum virus
ugcacgagccggcgccgu

SEQ ID NO: 3094924 - RNA, 20 nt, Molluscum contagiosum virus
accgcagacaaagacagucc

SEQ ID NO: 3094925 - RNA, 13 nt, Molluscum contagiosum virus
ucgucaacaacac

SEQ ID NO: 3094926 - RNA, 24 nt, Molluscum contagiosum virus
aggcgcugguggaggagccgugga

SEQ ID NO: 3094927 - RNA, 23 nt, Molluscum contagiosum virus
gcuuucagagugacgcugcaaga

SEQ ID NO: 3094928 - RNA, 19 nt, Molluscum contagiosum virus
cggccuguucuuccagugg

SEQ ID NO: 3094929 - RNA, 15 nt, Molluscum contagiosum virus
ggcuggacugugcuu

SEQ ID NO: 3094930 - RNA, 18 nt, Molluscum contagiosum virus
caacgcgacgauggccac

SEQ ID NO: 3094931 - RNA, 14 nt, Molluscum contagiosum virus
gcaugcacagcugc

SEQ ID NO: 3094932 - RNA, 14 nt, Molluscum contagiosum virus
gcuagcgugugccg

SEQ ID NO: 3094933 - RNA, 22 nt, Molluscum contagiosum virus
gcgcgcccaccagcagccaggc

SEQ ID NO: 3094934 - RNA, 23 nt, Molluscum contagiosum virus
gagcugcugcgcgaguaccuggg

SEQ ID NO: 3094935 - RNA, 16 nt, Molluscum contagiosum virus
cagcgugguguucgcc

SEQ ID NO: 3094936 - RNA, 17 nt, Molluscum contagiosum virus
cagcaccugcaguucca

SEQ ID NO: 3094937 - RNA, 12 nt, Molluscum contagiosum virus
ccggcucugccu

SEQ ID NO: 3094938 - RNA, 22 nt, Molluscum contagiosum virus
ggccauggagcgcccgcugcuc

SEQ ID NO: 3094939 - RNA, 14 nt, Molluscum contagiosum virus
uguugucucucgag

SEQ ID NO: 3094940 - RNA, 18 nt, Molluscum contagiosum virus
cucgguagcguggagcug

SEQ ID NO: 3094941 - RNA, 23 nt, Molluscum contagiosum virus
aucccacguacgagcagcugcug

SEQ ID NO: 3094942 - RNA, 18 nt, Molluscum contagiosum virus
ccgcgugcgugcacagcg

SEQ ID NO: 3094943 - RNA, 16 nt, Molluscum contagiosum virus
cgccgcacgugcugcg

SEQ ID NO: 3094944 - RNA, 21 nt, Molluscum contagiosum virus
ucaaauccugguuccucuccu

SEQ ID NO: 3094945 - RNA, 16 nt, Molluscum contagiosum virus
aguuccuggugugcca

SEQ ID NO: 3094946 - RNA, 21 nt, Molluscum contagiosum virus
ggcagcgcgauugcuggaggu

SEQ ID NO: 3094947 - RNA, 11 nt, Molluscum contagiosum virus
cguugucuuua

SEQ ID NO: 3094948 - RNA, 15 nt, Molluscum contagiosum virus
ccgcuuccuggcacu

SEQ ID NO: 3094949 - RNA, 17 nt, Molluscum contagiosum virus
gaaaggcaccccgcagg

SEQ ID NO: 3094950 - RNA, 16 nt, Molluscum contagiosum virus
gcugcgccacugccac

SEQ ID NO: 3094951 - RNA, 21 nt, Molluscum contagiosum virus
cauguugcucuaccuggugcu

SEQ ID NO: 3094952 - RNA, 18 nt, Molluscum contagiosum virus
cgagaaaugcgcacacuu

SEQ ID NO: 3094953 - RNA, 12 nt, Molluscum contagiosum virus
cgcgcaagugug

SEQ ID NO: 3094954 - RNA, 12 nt, Molluscum contagiosum virus
caacagcagcug

SEQ ID NO: 3094955 - RNA, 17 nt, Molluscum contagiosum virus
gccgguacucgugcguc

SEQ ID NO: 3094956 - RNA, 22 nt, Molluscum contagiosum virus
gcuggagaaagaagugugccug

SEQ ID NO: 3094957 - RNA, 15 nt, Molluscum contagiosum virus
agcgcgugcucuuuc

SEQ ID NO: 3094958 - RNA, 17 nt, Molluscum contagiosum virus
cuucgcgcccgacgagc

SEQ ID NO: 3094959 - RNA, 16 nt, Molluscum contagiosum virus
acgcugcggcggcgca

SEQ ID NO: 3094960 - RNA, 16 nt, Molluscum contagiosum virus
cucaagcaccugcgcu

SEQ ID NO: 3094961 - RNA, 15 nt, Molluscum contagiosum virus
gacagcgcgcgcacg

SEQ ID NO: 3094962 - RNA, 21 nt, Molluscum contagiosum virus
ggcgugugcgcgagcugaggc

SEQ ID NO: 3094963 - RNA, 12 nt, Molluscum contagiosum virus
gagacucuggaa

SEQ ID NO: 3094964 - RNA, 21 nt, Molluscum contagiosum virus
cauccacauuacgcucgugga

SEQ ID NO: 3094965 - RNA, 20 nt, Molluscum contagiosum virus
cgucuuuuugcggcgccgcc

SEQ ID NO: 3094966 - RNA, 20 nt, Molluscum contagiosum virus
cgacugcgccuucugccugc

SEQ ID NO: 3094967 - RNA, 19 nt, Molluscum contagiosum virus
gccgcggucguguacacgc

SEQ ID NO: 3094968 - RNA, 18 nt, Molluscum contagiosum virus
caccuuucauucgcuggu

SEQ ID NO: 3094969 - RNA, 21 nt, Molluscum contagiosum virus
gcgcaagcagcucggcgagag

SEQ ID NO: 3094970 - RNA, 16 nt, Molluscum contagiosum virus
cguccagccgcagccg

SEQ ID NO: 3094971 - RNA, 19 nt, Molluscum contagiosum virus
gcacaugugcgugcaccuc

SEQ ID NO: 3094972 - RNA, 22 nt, Molluscum contagiosum virus
ccacgcuguacaugccgcagua

SEQ ID NO: 3094973 - RNA, 21 nt, Molluscum contagiosum virus
ccucgcucgagggcgccgugc

SEQ ID NO: 3094974 - RNA, 20 nt, Molluscum contagiosum virus
acgccgugacggcccaccuu

SEQ ID NO: 3094975 - RNA, 12 nt, Molluscum contagiosum virus
ccaccagcacca

SEQ ID NO: 3094976 - RNA, 22 nt, Molluscum contagiosum virus
ccagagucgccgcugcgcaucu

SEQ ID NO: 3094977 - RNA, 16 nt, Molluscum contagiosum virus
uccaagaagaggccag

SEQ ID NO: 3094978 - RNA, 18 nt, Molluscum contagiosum virus
cgccugcuagcggccugu

SEQ ID NO: 3094979 - RNA, 13 nt, Molluscum contagiosum virus
ucgcgggcacgag

SEQ ID NO: 3094980 - RNA, 20 nt, Molluscum contagiosum virus
ccgcugcgcuucgagcugcc

SEQ ID NO: 3094981 - RNA, 17 nt, Molluscum contagiosum virus
gcuuggugcgcucgagc

SEQ ID NO: 3094982 - RNA, 14 nt, Molluscum contagiosum virus
gccgcgugcuggcg

SEQ ID NO: 3094983 - RNA, 16 nt, Molluscum contagiosum virus
ggaacccagaaagaag

SEQ ID NO: 3094984 - RNA, 17 nt, Molluscum contagiosum virus
aggccgcgcccaagaag

SEQ ID NO: 3094985 - RNA, 15 nt, Molluscum contagiosum virus
ggagacguagagcag

SEQ ID NO: 3094986 - RNA, 14 nt, Molluscum contagiosum virus
gcggcgcggcugcu

SEQ ID NO: 3094987 - RNA, 21 nt, Molluscum contagiosum virus
gccacgcagcuggcgggcgug

SEQ ID NO: 3094988 - RNA, 20 nt, Molluscum contagiosum virus
gucuggcucguacugcugca

SEQ ID NO: 3094989 - RNA, 19 nt, Molluscum contagiosum virus
cucgcaggcggugggcgcc

SEQ ID NO: 3094990 - RNA, 16 nt, Molluscum contagiosum virus
cagaugaggcugcucu

SEQ ID NO: 3094991 - RNA, 13 nt, Molluscum contagiosum virus
cugaaccugggcg

SEQ ID NO: 3094992 - RNA, 19 nt, Molluscum contagiosum virus
gccagcacgcgcucguccg

SEQ ID NO: 3094993 - RNA, 14 nt, Molluscum contagiosum virus
gcggacgaagcugu

SEQ ID NO: 3094994 - RNA, 13 nt, Molluscum contagiosum virus
agccugccgcgag

SEQ ID NO: 3094995 - RNA, 13 nt, Molluscum contagiosum virus
ucgcggugccgga

SEQ ID NO: 3094996 - RNA, 18 nt, Molluscum contagiosum virus
cagacgcagagccaugcc

SEQ ID NO: 3094997 - RNA, 15 nt, Molluscum contagiosum virus
cacugccacggcugc

SEQ ID NO: 3094998 - RNA, 18 nt, Molluscum contagiosum virus
gugcacauugcugcugca

SEQ ID NO: 3094999 - RNA, 18 nt, Molluscum contagiosum virus
accucuuucucgcgccgu

SEQ ID NO: 3095000 - RNA, 23 nt, Molluscum contagiosum virus
gcgcauucccguggaccucauca

SEQ ID NO: 3095001 - RNA, 19 nt, Molluscum contagiosum virus
cuugccgcuugagcagcaa

SEQ ID NO: 3095002 - RNA, 17 nt, Molluscum contagiosum virus
agcgacgagcagcugcu

SEQ ID NO: 3095003 - RNA, 19 nt, Molluscum contagiosum virus
cgggcccgugcucaggcca

SEQ ID NO: 3095004 - RNA, 13 nt, Molluscum contagiosum virus
cggcgcgcagcgc

SEQ ID NO: 3095005 - RNA, 15 nt, Molluscum contagiosum virus
cguaguccagcgcgu

SEQ ID NO: 3095006 - RNA, 21 nt, Molluscum contagiosum virus
ggcgcgccgcgggccgccggg

SEQ ID NO: 3095007 - RNA, 17 nt, Molluscum contagiosum virus
cggugcccgccaagagc

SEQ ID NO: 3095008 - RNA, 21 nt, Molluscum contagiosum virus
gcucuuggcguucgcagugcc

SEQ ID NO: 3095009 - RNA, 17 nt, Molluscum contagiosum virus
acgcuacagcagccgca

SEQ ID NO: 3095010 - RNA, 15 nt, Molluscum contagiosum virus
ugcccgcgcccugca

SEQ ID NO: 3095011 - RNA, 21 nt, Molluscum contagiosum virus
agagaacaacgaaaacugaaa

SEQ ID NO: 3095012 - RNA, 12 nt, Molluscum contagiosum virus
aggacuaccugg

SEQ ID NO: 3095013 - RNA, 15 nt, Molluscum contagiosum virus
cuggacgggcacgag

SEQ ID NO: 3095014 - RNA, 21 nt, Molluscum contagiosum virus
cgccaccucggcguuggccac

SEQ ID NO: 3095015 - RNA, 19 nt, Molluscum contagiosum virus
cgagcgcgcgcugcgcgcc

SEQ ID NO: 3095016 - RNA, 21 nt, Molluscum contagiosum virus
caagacgacacgagggccuug

SEQ ID NO: 3095017 - RNA, 17 nt, Molluscum contagiosum virus
uccccgcgggccgccgc

SEQ ID NO: 3095018 - RNA, 17 nt, Molluscum contagiosum virus
cugggcgucgugcaccu

SEQ ID NO: 3095019 - RNA, 18 nt, Molluscum contagiosum virus
agcugcaggaccugcugg

SEQ ID NO: 3095020 - RNA, 14 nt, Molluscum contagiosum virus
ugguacagaugagu

SEQ ID NO: 3095021 - RNA, 16 nt, Molluscum contagiosum virus
ugucaguggacaagcu

SEQ ID NO: 3095022 - RNA, 22 nt, Molluscum contagiosum virus
aagcuggcgggugccgugcccc

SEQ ID NO: 3095023 - RNA, 19 nt, Molluscum contagiosum virus
gcugcguucgagcugaucg

SEQ ID NO: 3095024 - RNA, 15 nt, Molluscum contagiosum virus
cgaauccuuuacugc

SEQ ID NO: 3095025 - RNA, 16 nt, Molluscum contagiosum virus
cccucgcaagcugagc

SEQ ID NO: 3095026 - RNA, 12 nt, Molluscum contagiosum virus
cagucagcggcg

SEQ ID NO: 3095027 - RNA, 16 nt, Molluscum contagiosum virus
accaguaccugcugcc

SEQ ID NO: 3095028 - RNA, 20 nt, Molluscum contagiosum virus
cgcgugcgccgccgcaggcc

SEQ ID NO: 3095029 - RNA, 15 nt, Molluscum contagiosum virus
ggugcacgugcugca

SEQ ID NO: 3095030 - RNA, 23 nt, Molluscum contagiosum virus
ggcuguagaagagcgguuccugc

SEQ ID NO: 3095031 - RNA, 14 nt, Molluscum contagiosum virus
gaacucgaggcucu

SEQ ID NO: 3095032 - RNA, 16 nt, Molluscum contagiosum virus
gcuggaugcugcucga

SEQ ID NO: 3095033 - RNA, 16 nt, Molluscum contagiosum virus
ggaauugugcugcugu

SEQ ID NO: 3095034 - RNA, 15 nt, Molluscum contagiosum virus
guuccuggugugcca

SEQ ID NO: 3095035 - RNA, 17 nt, Molluscum contagiosum virus
caggcgauaggacauga

SEQ ID NO: 3095036 - RNA, 17 nt, Molluscum contagiosum virus
gacguggugcucgugga

SEQ ID NO: 3095037 - RNA, 20 nt, Molluscum contagiosum virus
uucacgcugcacgagcugcu

SEQ ID NO: 3095038 - RNA, 19 nt, Molluscum contagiosum virus
cgcgcgagcgcuacaugca

SEQ ID NO: 3095039 - RNA, 18 nt, Molluscum contagiosum virus
gcgugcuuuuucugugcg

SEQ ID NO: 3095040 - RNA, 20 nt, Molluscum contagiosum virus
ggcagcaacugcacagggau

SEQ ID NO: 3095041 - RNA, 22 nt, Molluscum contagiosum virus
ggacgaagcugugcaagagcuc

SEQ ID NO: 3095042 - RNA, 20 nt, Molluscum contagiosum virus
gaugaguaccgcgggcgcag

SEQ ID NO: 3095043 - RNA, 21 nt, Molluscum contagiosum virus
cgcacaaccacagcucuccga

SEQ ID NO: 3095044 - RNA, 13 nt, Molluscum contagiosum virus
gccgcgcugcugg

SEQ ID NO: 3095045 - RNA, 21 nt, Molluscum contagiosum virus
gcgcaagugugcgcaucccuc

SEQ ID NO: 3095046 - RNA, 19 nt, Molluscum contagiosum virus
cgagagugacgccucgaga

SEQ ID NO: 3095047 - RNA, 16 nt, Molluscum contagiosum virus
ccgcgcuucugccugc

SEQ ID NO: 3095048 - RNA, 19 nt, Molluscum contagiosum virus
ccggagacaccagcuccgc

SEQ ID NO: 3095049 - RNA, 16 nt, Molluscum contagiosum virus
aggaaaggcaccccgc

SEQ ID NO: 3095050 - RNA, 21 nt, Molluscum contagiosum virus
uugaggaacuagugcugcugg

SEQ ID NO: 3095051 - RNA, 17 nt, Molluscum contagiosum virus
cguggcucgcgaccgca

SEQ ID NO: 3095052 - RNA, 15 nt, Molluscum contagiosum virus
uguccacgacacugg

SEQ ID NO: 3095053 - RNA, 20 nt, Molluscum contagiosum virus
acuccaaggucgagcugacu

SEQ ID NO: 3095054 - RNA, 21 nt, Molluscum contagiosum virus
cgcuggugggcgugcggcgca

SEQ ID NO: 3095055 - RNA, 14 nt, Molluscum contagiosum virus
cugcuggcccugcu

SEQ ID NO: 3095056 - RNA, 13 nt, Molluscum contagiosum virus
gguacagaugagu

SEQ ID NO: 3095057 - RNA, 16 nt, Molluscum contagiosum virus
uccccgccagcaccau

SEQ ID NO: 3095058 - RNA, 12 nt, Molluscum contagiosum virus
agcccuccugag

SEQ ID NO: 3095059 - RNA, 16 nt, Molluscum contagiosum virus
gcgugcuagcccgcac

SEQ ID NO: 3095060 - RNA, 21 nt, Molluscum contagiosum virus
cgccuccaagaagaggccagc

SEQ ID NO: 3095061 - RNA, 13 nt, Molluscum contagiosum virus
agaugcgcggaca

SEQ ID NO: 3095062 - RNA, 17 nt, Molluscum contagiosum virus
gugugcggagagccgcc

SEQ ID NO: 3095063 - RNA, 20 nt, Molluscum contagiosum virus
cagcgguggucuccgcgggc

SEQ ID NO: 3095064 - RNA, 19 nt, Molluscum contagiosum virus
ccgucaaccugcugccucc

SEQ ID NO: 3095065 - RNA, 15 nt, Molluscum contagiosum virus
cgcgcucgugccgcc

SEQ ID NO: 3095066 - RNA, 23 nt, Molluscum contagiosum virus
gagauggcugcucucggcagcgu

SEQ ID NO: 3095067 - RNA, 22 nt, Molluscum contagiosum virus
gacacucuucgcaggcgugcuc

SEQ ID NO: 3095068 - RNA, 21 nt, Molluscum contagiosum virus
cgcguccacaaaggcgggccc

SEQ ID NO: 3095069 - RNA, 18 nt, Molluscum contagiosum virus
ucggagcgcagcugccgg

SEQ ID NO: 3095070 - RNA, 22 nt, Molluscum contagiosum virus
ccagcgugcagacgaccgucac

SEQ ID NO: 3095071 - RNA, 19 nt, Molluscum contagiosum virus
cagccugcucacgcccgag

SEQ ID NO: 3095072 - RNA, 13 nt, Molluscum contagiosum virus
uggugggcacgca

SEQ ID NO: 3095073 - RNA, 19 nt, Molluscum contagiosum virus
cgcggcgagucgcgggcgc

SEQ ID NO: 3095074 - RNA, 15 nt, Molluscum contagiosum virus
gcgcgcgccagcagc

SEQ ID NO: 3095075 - RNA, 15 nt, Molluscum contagiosum virus
ccuccugaugcccgc

SEQ ID NO: 3095076 - RNA, 22 nt, Molluscum contagiosum virus
ccaguccgcggcgcgccggcca

SEQ ID NO: 3095077 - RNA, 17 nt, Molluscum contagiosum virus
gcccgagcccgagcccg

SEQ ID NO: 3095078 - RNA, 18 nt, Molluscum contagiosum virus
cagcgccagccugcuggc

SEQ ID NO: 3095079 - RNA, 18 nt, Molluscum contagiosum virus
gauuacaucgaaaccauc

SEQ ID NO: 3095080 - RNA, 21 nt, Molluscum contagiosum virus
cccgcgaaggagagagagaca

SEQ ID NO: 3095081 - RNA, 19 nt, Molluscum contagiosum virus
aggccccccgcaacaagga

SEQ ID NO: 3095082 - RNA, 19 nt, Molluscum contagiosum virus
gaccuuggugcucauccuc

SEQ ID NO: 3095083 - RNA, 20 nt, Molluscum contagiosum virus
uccuucuucaaguaccuguc

SEQ ID NO: 3095084 - RNA, 14 nt, Molluscum contagiosum virus
ucggaagagcgucc

SEQ ID NO: 3095085 - RNA, 17 nt, Molluscum contagiosum virus
gcgcugagcgcggagcu

SEQ ID NO: 3095086 - RNA, 16 nt, Molluscum contagiosum virus
ccgacgccgccaaugc

SEQ ID NO: 3095087 - RNA, 14 nt, Molluscum contagiosum virus
gcgcccccgcuugc

SEQ ID NO: 3095088 - RNA, 16 nt, Molluscum contagiosum virus
ugccgcugagagacuu

SEQ ID NO: 3095089 - RNA, 15 nt, Molluscum contagiosum virus
gcggaagacgcgagc

SEQ ID NO: 3095090 - RNA, 14 nt, Molluscum contagiosum virus
accagguagagcaa

SEQ ID NO: 3095091 - RNA, 23 nt, Molluscum contagiosum virus
cucgcugccuggugcacacacac

SEQ ID NO: 3095092 - RNA, 17 nt, Molluscum contagiosum virus
ccuucgcguccacgggu

SEQ ID NO: 3095093 - RNA, 17 nt, Molluscum contagiosum virus
cacgguccugggcgacg

SEQ ID NO: 3095094 - RNA, 20 nt, Molluscum contagiosum virus
gccaacacuaccacagccau

SEQ ID NO: 3095095 - RNA, 17 nt, Molluscum contagiosum virus
gauggaaggcgaccagc

SEQ ID NO: 3095096 - RNA, 14 nt, Molluscum contagiosum virus
gcaaggaagcaaca

SEQ ID NO: 3095097 - RNA, 16 nt, Molluscum contagiosum virus
gcaaugcgcaaggccg

SEQ ID NO: 3095098 - RNA, 21 nt, Molluscum contagiosum virus
cugcgcccgcaaaccuuggcc

SEQ ID NO: 3095099 - RNA, 20 nt, Molluscum contagiosum virus
cgugcgcgugcggcggcgcg

SEQ ID NO: 3095100 - RNA, 22 nt, Molluscum contagiosum virus
ggcaacugccugcgcuagugaa

SEQ ID NO: 3095101 - RNA, 13 nt, Molluscum contagiosum virus
gcggcgugcaggg

SEQ ID NO: 3095102 - RNA, 20 nt, Molluscum contagiosum virus
ggcaccguaccgcgcccgcc

SEQ ID NO: 3095103 - RNA, 21 nt, Molluscum contagiosum virus
uggaccacaagcaguaccugc

SEQ ID NO: 3095104 - RNA, 15 nt, Molluscum contagiosum virus
agagcccgccgggca

SEQ ID NO: 3095105 - RNA, 13 nt, Molluscum contagiosum virus
aggcacaccccgg

SEQ ID NO: 3095106 - RNA, 14 nt, Molluscum contagiosum virus
cgcgccgcgcugcu

SEQ ID NO: 3095107 - RNA, 18 nt, Molluscum contagiosum virus
cggcgcgcagcucgccgc

SEQ ID NO: 3095108 - RNA, 13 nt, Molluscum contagiosum virus
ccgucugcugcuc

SEQ ID NO: 3095109 - RNA, 19 nt, Molluscum contagiosum virus
ucuuccggcccgacacacu

SEQ ID NO: 3095110 - RNA, 17 nt, Molluscum contagiosum virus
gccggcucaagcuggca

SEQ ID NO: 3095111 - RNA, 19 nt, Molluscum contagiosum virus
gcggcgacuugcugcggag

SEQ ID NO: 3095112 - RNA, 12 nt, Molluscum contagiosum virus
cgccaacuccuu

SEQ ID NO: 3095113 - RNA, 20 nt, Molluscum contagiosum virus
gcgggcccgcgaacgagaga

SEQ ID NO: 3095114 - RNA, 17 nt, Molluscum contagiosum virus
gcguggagcgcgcggac

SEQ ID NO: 3095115 - RNA, 17 nt, Molluscum contagiosum virus
ccacugugccagcagca

SEQ ID NO: 3095116 - RNA, 14 nt, Molluscum contagiosum virus
cggcguggccaggc

SEQ ID NO: 3095117 - RNA, 21 nt, Molluscum contagiosum virus
cgcgcaaaagcacagcaggag

SEQ ID NO: 3095118 - RNA, 12 nt, Molluscum contagiosum virus
cgcgggcgcaga

SEQ ID NO: 3095119 - RNA, 22 nt, Molluscum contagiosum virus
ggaagcuggcgcgguccagccg

SEQ ID NO: 3095120 - RNA, 21 nt, Molluscum contagiosum virus
gugcgagaacuggcgcagcag

SEQ ID NO: 3095121 - RNA, 12 nt, Molluscum contagiosum virus
agacgcugcugc

SEQ ID NO: 3095122 - RNA, 16 nt, Molluscum contagiosum virus
ccucacggcgagcgcg

SEQ ID NO: 3095123 - RNA, 19 nt, Molluscum contagiosum virus
cuaccugguggagcacuuc

SEQ ID NO: 3095124 - RNA, 23 nt, Molluscum contagiosum virus
ucgcuugccggcggcgcaagcac

SEQ ID NO: 3095125 - RNA, 22 nt, Molluscum contagiosum virus
cgcgcauggggaacagcuuggc

SEQ ID NO: 3095126 - RNA, 21 nt, Molluscum contagiosum virus
gacucagcauguugcucuacc

SEQ ID NO: 3095127 - RNA, 18 nt, Molluscum contagiosum virus
gcuacgucgcggcgcacg

SEQ ID NO: 3095128 - RNA, 18 nt, Molluscum contagiosum virus
gaacguuauccccuccaa

SEQ ID NO: 3095129 - RNA, 17 nt, Molluscum contagiosum virus
cagcagugccagcagcc

SEQ ID NO: 3095130 - RNA, 17 nt, Molluscum contagiosum virus
gaaaacguagacagugc

SEQ ID NO: 3095131 - RNA, 17 nt, Molluscum contagiosum virus
gaagcugugcaagagcu

SEQ ID NO: 3095132 - RNA, 20 nt, Molluscum contagiosum virus
cuuuuuccugaacaagcugc

SEQ ID NO: 3095133 - RNA, 13 nt, Molluscum contagiosum virus
agcaggcgcaggc

SEQ ID NO: 3095134 - RNA, 19 nt, Molluscum contagiosum virus
gcacgcugagcaagcucaa

SEQ ID NO: 3095135 - RNA, 15 nt, Molluscum contagiosum virus
cacgaccgcaagugc

SEQ ID NO: 3095136 - RNA, 18 nt, Molluscum contagiosum virus
ugagcuagugccgagcuc

SEQ ID NO: 3095137 - RNA, 18 nt, Molluscum contagiosum virus
ugcagauuggaggaggaa

SEQ ID NO: 3095138 - RNA, 13 nt, Molluscum contagiosum virus
ggcgcgccgcacg

SEQ ID NO: 3095139 - RNA, 17 nt, Molluscum contagiosum virus
gcccgcgcccgcgccgc

SEQ ID NO: 3095140 - RNA, 22 nt, Molluscum contagiosum virus
cccgcgcaagagccgccggggc

SEQ ID NO: 3095141 - RNA, 13 nt, Molluscum contagiosum virus
cgcaaaucuguuc

SEQ ID NO: 3095142 - RNA, 15 nt, Molluscum contagiosum virus
gcgcgagcccaccga

SEQ ID NO: 3095143 - RNA, 16 nt, Molluscum contagiosum virus
aagugugcgcaucccu

SEQ ID NO: 3095144 - RNA, 16 nt, Molluscum contagiosum virus
agcucacggcugugga

SEQ ID NO: 3095145 - RNA, 22 nt, Molluscum contagiosum virus
ccacgugcuccgugugccaguc

SEQ ID NO: 3095146 - RNA, 19 nt, Molluscum contagiosum virus
ccagcgugcccuucuccga

SEQ ID NO: 3095147 - RNA, 21 nt, Molluscum contagiosum virus
accccgaaaggcacccgcagg

SEQ ID NO: 3095148 - RNA, 15 nt, Molluscum contagiosum virus
ccugcgcgagcaguu

SEQ ID NO: 3095149 - RNA, 14 nt, Molluscum contagiosum virus
cacgagcugcugcc

SEQ ID NO: 3095150 - RNA, 11 nt, Molluscum contagiosum virus
ccgaaggaaag

SEQ ID NO: 3095151 - RNA, 23 nt, Molluscum contagiosum virus
cucguucgcgggaccgcccuugu

SEQ ID NO: 3095152 - RNA, 23 nt, Molluscum contagiosum virus
acuguugccuggagggcagugcc

SEQ ID NO: 3095153 - RNA, 13 nt, Molluscum contagiosum virus
acgcgcacacgcu

SEQ ID NO: 3095154 - RNA, 13 nt, Molluscum contagiosum virus
cguccacaaaggc

SEQ ID NO: 3095155 - RNA, 14 nt, Molluscum contagiosum virus
acgcuacagcagcc

SEQ ID NO: 3095156 - RNA, 23 nt, Molluscum contagiosum virus
gccagugcuuugucgcaaccccg

SEQ ID NO: 3095157 - RNA, 16 nt, Molluscum contagiosum virus
gccgccaugcugcgcg

SEQ ID NO: 3095158 - RNA, 22 nt, Molluscum contagiosum virus
agauucggaggcggagcugccc

SEQ ID NO: 3095159 - RNA, 14 nt, Molluscum contagiosum virus
cuucgaagaggucu

SEQ ID NO: 3095160 - RNA, 23 nt, Molluscum contagiosum virus
uaagcucugcguuuugcgcggca

SEQ ID NO: 3095161 - RNA, 22 nt, Molluscum contagiosum virus
cucugccaccaugcgcacagca

SEQ ID NO: 3095162 - RNA, 16 nt, Molluscum contagiosum virus
gcucgcgugccgcgga

SEQ ID NO: 3095163 - RNA, 14 nt, Molluscum contagiosum virus
acacgccgcuggag

SEQ ID NO: 3095164 - RNA, 14 nt, Molluscum contagiosum virus
gcgcgagcugcugc

SEQ ID NO: 3095165 - RNA, 21 nt, Molluscum contagiosum virus
acgugcuacuacuguaaggcg

SEQ ID NO: 3095166 - RNA, 17 nt, Molluscum contagiosum virus
ccauacgccuagccugc

SEQ ID NO: 3095167 - RNA, 13 nt, Molluscum contagiosum virus
ccgagcggggacg

SEQ ID NO: 3095168 - RNA, 14 nt, Molluscum contagiosum virus
cuuucuccaugucg

SEQ ID NO: 3095169 - RNA, 22 nt, Molluscum contagiosum virus
cgcgggcugggaaagggcugcu

SEQ ID NO: 3095170 - RNA, 21 nt, Molluscum contagiosum virus
agugccacguacuugcugguu

SEQ ID NO: 3095171 - RNA, 20 nt, Molluscum contagiosum virus
cgguggucuccgcgggcagc

SEQ ID NO: 3095172 - RNA, 16 nt, Molluscum contagiosum virus
augugcgagaacuggc

SEQ ID NO: 3095173 - RNA, 22 nt, Molluscum contagiosum virus
cuagcagacaacugcgucucaa

SEQ ID NO: 3095174 - RNA, 16 nt, Molluscum contagiosum virus
gccucugugcggcgcc

SEQ ID NO: 3095175 - RNA, 12 nt, Molluscum contagiosum virus
cugcgcaauaag

SEQ ID NO: 3095176 - RNA, 17 nt, Molluscum contagiosum virus
ggggccacaagcacgca

SEQ ID NO: 3095177 - RNA, 22 nt, Molluscum contagiosum virus
cgcgaaguuccugcauuucaug

SEQ ID NO: 3095178 - RNA, 15 nt, Molluscum contagiosum virus
cgcgccauggcgagc

SEQ ID NO: 3095179 - RNA, 13 nt, Molluscum contagiosum virus
aggccugcugaag

SEQ ID NO: 3095180 - RNA, 17 nt, Molluscum contagiosum virus
ccugucggcacaucucu

SEQ ID NO: 3095181 - RNA, 17 nt, Molluscum contagiosum virus
cgcgagaugcgcggaca

SEQ ID NO: 3095182 - RNA, 21 nt, Molluscum contagiosum virus
gcccgcggacaucgacgccaa

SEQ ID NO: 3095183 - RNA, 21 nt, Molluscum contagiosum virus
cuaccuggcggcgcuggagac

SEQ ID NO: 3095184 - RNA, 11 nt, Molluscum contagiosum virus
ccuggagccua

SEQ ID NO: 3095185 - RNA, 22 nt, Molluscum contagiosum virus
cgcauggccacgcccgggcccg

SEQ ID NO: 3095186 - RNA, 19 nt, Molluscum contagiosum virus
cggcuccaacagcagcugg

SEQ ID NO: 3095187 - RNA, 17 nt, Molluscum contagiosum virus
cucguggaaaagcaggg

SEQ ID NO: 3095188 - RNA, 13 nt, Molluscum contagiosum virus
gggcacuucucgc

SEQ ID NO: 3095189 - RNA, 13 nt, Molluscum contagiosum virus
gccucccccgcgc

SEQ ID NO: 3095190 - RNA, 17 nt, Molluscum contagiosum virus
gugccgccgcgcgcgcc

SEQ ID NO: 3095191 - RNA, 15 nt, Molluscum contagiosum virus
uggcaccggaagcaa

SEQ ID NO: 3095192 - RNA, 13 nt, Molluscum contagiosum virus
uggaugcugcucg

SEQ ID NO: 3095193 - RNA, 17 nt, Molluscum contagiosum virus
gcgcggaagaagcugcg

SEQ ID NO: 3095194 - RNA, 16 nt, Molluscum contagiosum virus
cgcgagcgcgcgcugc

SEQ ID NO: 3095195 - RNA, 12 nt, Molluscum contagiosum virus
ugcgcaaggccg

SEQ ID NO: 3095196 - RNA, 15 nt, Molluscum contagiosum virus
gcaccugcaggaaag

SEQ ID NO: 3095197 - RNA, 16 nt, Molluscum contagiosum virus
gcccaugcucgagccu

SEQ ID NO: 3095198 - RNA, 13 nt, Molluscum contagiosum virus
ugagagcaaagaa

SEQ ID NO: 3095199 - RNA, 15 nt, Molluscum contagiosum virus
caugcagcugcagga

SEQ ID NO: 3095200 - RNA, 22 nt, Molluscum contagiosum virus
gacccaucggagaagugcuccg

SEQ ID NO: 3095201 - RNA, 18 nt, Molluscum contagiosum virus
gccggcaucuucggcgug

SEQ ID NO: 3095202 - RNA, 16 nt, Molluscum contagiosum virus
ccccgacgccagcgcg

SEQ ID NO: 3095203 - RNA, 20 nt, Molluscum contagiosum virus
cucgaggaccucgcgcgccg

SEQ ID NO: 3095204 - RNA, 20 nt, Molluscum contagiosum virus
ugugcggcucgagacccaca

SEQ ID NO: 3095205 - RNA, 12 nt, Molluscum contagiosum virus
cggcacugcuag

SEQ ID NO: 3095206 - RNA, 24 nt, Molluscum contagiosum virus
cgcacggugugcuacugcacugca

SEQ ID NO: 3095207 - RNA, 19 nt, Molluscum contagiosum virus
guucugcgcugccagcucg

SEQ ID NO: 3095208 - RNA, 16 nt, Molluscum contagiosum virus
cggcagcaagcgcacc

SEQ ID NO: 3095209 - RNA, 21 nt, Molluscum contagiosum virus
uaccaagaacagagaaaggca

SEQ ID NO: 3095210 - RNA, 19 nt, Molluscum contagiosum virus
acgccgcgcaccuggagua

SEQ ID NO: 3095211 - RNA, 21 nt, Molluscum contagiosum virus
cuccgccgggaauaccggaga

SEQ ID NO: 3095212 - RNA, 22 nt, Molluscum contagiosum virus
acaggccgcuagcaggcgucgc

SEQ ID NO: 3095213 - RNA, 12 nt, Molluscum contagiosum virus
uggacugagccg

SEQ ID NO: 3095214 - RNA, 14 nt, Molluscum contagiosum virus
gagucgcgccucga

SEQ ID NO: 3095215 - RNA, 14 nt, Molluscum contagiosum virus
gcuggacggugcug

SEQ ID NO: 3095216 - RNA, 14 nt, Molluscum contagiosum virus
ggcacccaccagga

SEQ ID NO: 3095217 - RNA, 18 nt, Molluscum contagiosum virus
cugcccguggugggccgc

SEQ ID NO: 3095218 - RNA, 19 nt, Molluscum contagiosum virus
ccacuacaagcagccgcag

SEQ ID NO: 3095219 - RNA, 20 nt, Molluscum contagiosum virus
cgggguaccacagucggugc

SEQ ID NO: 3095220 - RNA, 19 nt, Molluscum contagiosum virus
uggacgugcugcuggcccu

SEQ ID NO: 3095221 - RNA, 20 nt, Molluscum contagiosum virus
gugccaucucgcacacugca

SEQ ID NO: 3095222 - RNA, 18 nt, Molluscum contagiosum virus
aggcgcggcagccgcaga

SEQ ID NO: 3095223 - RNA, 14 nt, Molluscum contagiosum virus
caaccagacgugcu

SEQ ID NO: 3095224 - RNA, 21 nt, Molluscum contagiosum virus
cgcggaggucgagcgcgccgc

SEQ ID NO: 3095225 - RNA, 16 nt, Molluscum contagiosum virus
gaggccggcacaagcc

SEQ ID NO: 3095226 - RNA, 11 nt, Molluscum contagiosum virus
ccagcggcgcc

SEQ ID NO: 3095227 - RNA, 20 nt, Molluscum contagiosum virus
cgucucggagaagaacagca

SEQ ID NO: 3095228 - RNA, 14 nt, Molluscum contagiosum virus
caccgggcgccgcg

SEQ ID NO: 3095229 - RNA, 20 nt, Molluscum contagiosum virus
ggcaccgcggcgggugccgc

SEQ ID NO: 3095230 - RNA, 23 nt, Molluscum contagiosum virus
gcacugcuacgagccgcuguccg

SEQ ID NO: 3095231 - RNA, 17 nt, Molluscum contagiosum virus
cuucccguuccugggca

SEQ ID NO: 3095232 - RNA, 20 nt, Molluscum contagiosum virus
cccgcaggaaaggcaccccg

SEQ ID NO: 3095233 - RNA, 21 nt, Molluscum contagiosum virus
uagagcaaaggaagagcccgc

SEQ ID NO: 3095234 - RNA, 14 nt, Molluscum contagiosum virus
cuggagcaagcgcg

SEQ ID NO: 3095235 - RNA, 14 nt, Molluscum contagiosum virus
uucgccggaggaag

SEQ ID NO: 3095236 - RNA, 19 nt, Molluscum contagiosum virus
agcggcauucgaaccugga

SEQ ID NO: 3095237 - RNA, 20 nt, Molluscum contagiosum virus
cacgcgcgagcggagcgggc

SEQ ID NO: 3095238 - RNA, 17 nt, Molluscum contagiosum virus
ugcgcgugucuggagcc

SEQ ID NO: 3095239 - RNA, 16 nt, Molluscum contagiosum virus
guggugacucgccgug

SEQ ID NO: 3095240 - RNA, 16 nt, Molluscum contagiosum virus
gcggugacuugccgug

SEQ ID NO: 3095241 - RNA, 10 nt, Molluscum contagiosum virus
cgcaccagug

SEQ ID NO: 3095242 - RNA, 12 nt, Molluscum contagiosum virus
agagcugcugcg

SEQ ID NO: 3095243 - RNA, 16 nt, Molluscum contagiosum virus
cgcgcgcuacgcgccg

SEQ ID NO: 3095244 - RNA, 13 nt, Molluscum contagiosum virus
agccccucgagca

SEQ ID NO: 3095245 - RNA, 14 nt, Molluscum contagiosum virus
gcgaggcgcgcacg

SEQ ID NO: 3095246 - RNA, 15 nt, Molluscum contagiosum virus
cagccccugcugcuc

SEQ ID NO: 3095247 - RNA, 14 nt, Molluscum contagiosum virus
guacgcggaggcgc

SEQ ID NO: 3095248 - RNA, 20 nt, Molluscum contagiosum virus
cggaaacgaacgcugcagcu

SEQ ID NO: 3095249 - RNA, 19 nt, Molluscum contagiosum virus
gacuucuugcgcggcggcc

SEQ ID NO: 3095250 - RNA, 22 nt, Molluscum contagiosum virus
augcgcccucacgugcugauca

SEQ ID NO: 3095251 - RNA, 19 nt, Molluscum contagiosum virus
acgcccuccucgaccugca

SEQ ID NO: 3095252 - RNA, 18 nt, Molluscum contagiosum virus
agacaugucguaccuggu

SEQ ID NO: 3095253 - RNA, 19 nt, Molluscum contagiosum virus
ggcgagcgccgcucgcacg

SEQ ID NO: 3095254 - RNA, 17 nt, Molluscum contagiosum virus
aguccgcgcccaaggcc

SEQ ID NO: 3095255 - RNA, 22 nt, Molluscum contagiosum virus
cacaagccguccgccucgagca

SEQ ID NO: 3095256 - RNA, 17 nt, Molluscum contagiosum virus
cgcugcacgagcugcug

SEQ ID NO: 3095257 - RNA, 15 nt, Molluscum contagiosum virus
acuuugucgcacgag

SEQ ID NO: 3095258 - RNA, 17 nt, Molluscum contagiosum virus
cccgaggcguccagcgg

SEQ ID NO: 3095259 - RNA, 18 nt, Molluscum contagiosum virus
gcgcagugcggccagcac

SEQ ID NO: 3095260 - RNA, 15 nt, Molluscum contagiosum virus
agcuucucgccagaa

SEQ ID NO: 3095261 - RNA, 15 nt, Molluscum contagiosum virus
gcuccaacagcagcu

SEQ ID NO: 3095262 - RNA, 14 nt, Molluscum contagiosum virus
gccgguggcgcgcg

SEQ ID NO: 3095263 - RNA, 20 nt, Molluscum contagiosum virus
gccuggagggcagugccaag

SEQ ID NO: 3095264 - RNA, 18 nt, Molluscum contagiosum virus
agugugccugcugcgcuu

SEQ ID NO: 3095265 - RNA, 16 nt, Molluscum contagiosum virus
cucacaugugcugccg

SEQ ID NO: 3095266 - RNA, 16 nt, Molluscum contagiosum virus
aacagcuuggcacagu

SEQ ID NO: 3095267 - RNA, 23 nt, Molluscum contagiosum virus
aggaguuggcgcgcaagcgcugc

SEQ ID NO: 3095268 - RNA, 14 nt, Molluscum contagiosum virus
acagagugccuggc

SEQ ID NO: 3095269 - RNA, 13 nt, Molluscum contagiosum virus
cucagcaggcugu

SEQ ID NO: 3095270 - RNA, 20 nt, Molluscum contagiosum virus
cccgcggcuaccacgggccc

SEQ ID NO: 3095271 - RNA, 22 nt, Molluscum contagiosum virus
ccgccgacgccuuccugcuggc

SEQ ID NO: 3095272 - RNA, 12 nt, Molluscum contagiosum virus
gcuggccaacac

SEQ ID NO: 3095273 - RNA, 16 nt, Molluscum contagiosum virus
ucaccuuccugggcgg

SEQ ID NO: 3095274 - RNA, 15 nt, Molluscum contagiosum virus
gcuuggcgggcagcg

SEQ ID NO: 3095275 - RNA, 19 nt, Molluscum contagiosum virus
gagagccgcuccuggucuu

SEQ ID NO: 3095276 - RNA, 17 nt, Molluscum contagiosum virus
caaguucgcugcuggca

SEQ ID NO: 3095277 - RNA, 18 nt, Molluscum contagiosum virus
caaaugcgucccagcagc

SEQ ID NO: 3095278 - RNA, 15 nt, Molluscum contagiosum virus
ggcgcaucagagaag

SEQ ID NO: 3095279 - RNA, 15 nt, Molluscum contagiosum virus
cagccaggcgccggc

SEQ ID NO: 3095280 - RNA, 15 nt, Molluscum contagiosum virus
gagauugagcucuuu

SEQ ID NO: 3095281 - RNA, 19 nt, Molluscum contagiosum virus
ucgcgggcguggggagcug

SEQ ID NO: 3095282 - RNA, 16 nt, Molluscum contagiosum virus
auugcguguuggcuuc

SEQ ID NO: 3095283 - RNA, 21 nt, Molluscum contagiosum virus
caggaacgaggaaaggcacac

SEQ ID NO: 3095284 - RNA, 19 nt, Molluscum contagiosum virus
gcgggccaggcacuggccc

SEQ ID NO: 3095285 - RNA, 19 nt, Molluscum contagiosum virus
ccgcuguacgugcugcccg

SEQ ID NO: 3095286 - RNA, 15 nt, Molluscum contagiosum virus
cuccuagcccagcac

SEQ ID NO: 3095287 - RNA, 22 nt, Molluscum contagiosum virus
gucggcgauguacgcgugcagg

SEQ ID NO: 3095288 - RNA, 13 nt, Molluscum contagiosum virus
accagcagccagg

SEQ ID NO: 3095289 - RNA, 18 nt, Molluscum contagiosum virus
cucacggcggcgcucaac

SEQ ID NO: 3095290 - RNA, 16 nt, Molluscum contagiosum virus
gcuacaccgagaucau

SEQ ID NO: 3095291 - RNA, 22 nt, Molluscum contagiosum virus
cugcugguggugcuggagcggc

SEQ ID NO: 3095292 - RNA, 11 nt, Molluscum contagiosum virus
gaagcugucaa

SEQ ID NO: 3095293 - RNA, 15 nt, Molluscum contagiosum virus
gcgcgagugugcgug

SEQ ID NO: 3095294 - RNA, 23 nt, Molluscum contagiosum virus
cacuaccgcaaccagcugcuguc

SEQ ID NO: 3095295 - RNA, 18 nt, Molluscum contagiosum virus
gggcacgcccgcgguguc

SEQ ID NO: 3095296 - RNA, 15 nt, Molluscum contagiosum virus
cugcugguucugcuc

SEQ ID NO: 3095297 - RNA, 18 nt, Molluscum contagiosum virus
cuuggacagcaagcagcg

SEQ ID NO: 3095298 - RNA, 21 nt, Molluscum contagiosum virus
aagagaccuggagguacuguc

SEQ ID NO: 3095299 - RNA, 21 nt, Molluscum contagiosum virus
auccgcgcgcucucacgcuuc

SEQ ID NO: 3095300 - RNA, 13 nt, Molluscum contagiosum virus
gacggcgcgcagc

SEQ ID NO: 3095301 - RNA, 23 nt, Molluscum contagiosum virus
acgaaucgcucgcggugcagcug

SEQ ID NO: 3095302 - RNA, 15 nt, Molluscum contagiosum virus
gagaggagugaaggg

SEQ ID NO: 3095303 - RNA, 12 nt, Molluscum contagiosum virus
cgccggugcgug

SEQ ID NO: 3095304 - RNA, 20 nt, Molluscum contagiosum virus
cguccacggguagcagcgcc

SEQ ID NO: 3095305 - RNA, 12 nt, Molluscum contagiosum virus
ucuuaauccagu

SEQ ID NO: 3095306 - RNA, 20 nt, Molluscum contagiosum virus
ggcacccgcaacaaggaaag

SEQ ID NO: 3095307 - RNA, 19 nt, Molluscum contagiosum virus
ugcaccgagugcuggccga

SEQ ID NO: 3095308 - RNA, 21 nt, Molluscum contagiosum virus
ggggagcauguccgacuccaa

SEQ ID NO: 3095309 - RNA, 12 nt, Molluscum contagiosum virus
acgcgcagcugu

SEQ ID NO: 3095310 - RNA, 19 nt, Molluscum contagiosum virus
ccuucaacgcgcgugcgua

SEQ ID NO: 3095311 - RNA, 15 nt, Molluscum contagiosum virus
gcacccaccaggaac

SEQ ID NO: 3095312 - RNA, 13 nt, Molluscum contagiosum virus
cgaggaccccgcc

SEQ ID NO: 3095313 - RNA, 20 nt, Molluscum contagiosum virus
ggucugcuuugucugcaggc

SEQ ID NO: 3095314 - RNA, 12 nt, Molluscum contagiosum virus
uguuauuucagu

SEQ ID NO: 3095315 - RNA, 22 nt, Molluscum contagiosum virus
ggaggucugcuuugucugcagg

SEQ ID NO: 3095316 - RNA, 12 nt, Molluscum contagiosum virus
acaccagcugga

SEQ ID NO: 3095317 - RNA, 20 nt, Molluscum contagiosum virus
agcgcggggguguugcugau

SEQ ID NO: 3095318 - RNA, 15 nt, Molluscum contagiosum virus
cucuguucugcuugg

SEQ ID NO: 3095319 - RNA, 20 nt, Molluscum contagiosum virus
cgagaagaccuguucuuuca

SEQ ID NO: 3095320 - RNA, 16 nt, Molluscum contagiosum virus
cccggcacgugccccg

SEQ ID NO: 3095321 - RNA, 20 nt, Molluscum contagiosum virus
uaccgcaaccagcugcuguc

SEQ ID NO: 3095322 - RNA, 14 nt, Molluscum contagiosum virus
ggcccgcgagcacg

SEQ ID NO: 3095323 - RNA, 20 nt, Molluscum contagiosum virus
cgcgcuacguacucuccaac

SEQ ID NO: 3095324 - RNA, 23 nt, Molluscum contagiosum virus
gcugcgguagcggacgcggugac

SEQ ID NO: 3095325 - RNA, 16 nt, Molluscum contagiosum virus
gcgaagagccccacca

SEQ ID NO: 3095326 - RNA, 17 nt, Molluscum contagiosum virus
gacucagcauguugcuc

SEQ ID NO: 3095327 - RNA, 12 nt, Molluscum contagiosum virus
gugcaccuggag

SEQ ID NO: 3095328 - RNA, 18 nt, Molluscum contagiosum virus
cugcgccggcugcgccac

SEQ ID NO: 3095329 - RNA, 17 nt, Molluscum contagiosum virus
cguucgcgcgccaguac

SEQ ID NO: 3095330 - RNA, 18 nt, Molluscum contagiosum virus
aucucuggauugucuuuu

SEQ ID NO: 3095331 - RNA, 14 nt, Molluscum contagiosum virus
uucugcugcacaca

SEQ ID NO: 3095332 - RNA, 17 nt, Molluscum contagiosum virus
accugcugguggugcug

SEQ ID NO: 3095333 - RNA, 18 nt, Molluscum contagiosum virus
ccgggcgccggcucugcc

SEQ ID NO: 3095334 - RNA, 21 nt, Molluscum contagiosum virus
gccagcgccuguccgugggcg

SEQ ID NO: 3095335 - RNA, 18 nt, Molluscum contagiosum virus
gcgcuucuuccggcagcu

SEQ ID NO: 3095336 - RNA, 17 nt, Molluscum contagiosum virus
cggcgcucgccucuggg

SEQ ID NO: 3095337 - RNA, 15 nt, Molluscum contagiosum virus
auggccggcaacugg

SEQ ID NO: 3095338 - RNA, 21 nt, Molluscum contagiosum virus
aggcacccgcaacaaggaaag

SEQ ID NO: 3095339 - RNA, 21 nt, Molluscum contagiosum virus
ccgggccugcggcggcgcacg

SEQ ID NO: 3095340 - RNA, 16 nt, Molluscum contagiosum virus
gccgcgcugcuggcca

SEQ ID NO: 3095341 - RNA, 19 nt, Molluscum contagiosum virus
uagcccaggaacaucugca

SEQ ID NO: 3095342 - RNA, 14 nt, Molluscum contagiosum virus
ugcacgugcagcgg

SEQ ID NO: 3095343 - RNA, 20 nt, Molluscum contagiosum virus
acgcuguccaggcgcugcac

SEQ ID NO: 3095344 - RNA, 14 nt, Molluscum contagiosum virus
cucaagcacugccu

SEQ ID NO: 3095345 - RNA, 16 nt, Molluscum contagiosum virus
cggugagugcgcgcac

SEQ ID NO: 3095346 - RNA, 23 nt, Molluscum contagiosum virus
cgggcccgacacguugcacugcg

SEQ ID NO: 3095347 - RNA, 18 nt, Molluscum contagiosum virus
gcaaccagcuggcgcccg

SEQ ID NO: 3095348 - RNA, 19 nt, Molluscum contagiosum virus
gugcggccaccagcgcggc

SEQ ID NO: 3095349 - RNA, 15 nt, Molluscum contagiosum virus
aggacaucuacaucg

SEQ ID NO: 3095350 - RNA, 14 nt, Molluscum contagiosum virus
accagcaccagcac

SEQ ID NO: 3095351 - RNA, 19 nt, Molluscum contagiosum virus
guacucgcguccgcgcagc

SEQ ID NO: 3095352 - RNA, 14 nt, Molluscum contagiosum virus
ccgcucgcgcugcu

SEQ ID NO: 3095353 - RNA, 17 nt, Molluscum contagiosum virus
aagcccggaagcuugcu

SEQ ID NO: 3095354 - RNA, 22 nt, Molluscum contagiosum virus
uguuucucgcgaaucacaaaca

SEQ ID NO: 3095355 - RNA, 20 nt, Molluscum contagiosum virus
ggugagccguuccacacaga

SEQ ID NO: 3095356 - RNA, 20 nt, Molluscum contagiosum virus
gagcacuggcuggcguucga

SEQ ID NO: 3095357 - RNA, 13 nt, Molluscum contagiosum virus
cuccagcguggug

SEQ ID NO: 3095358 - RNA, 14 nt, Molluscum contagiosum virus
agcagaccaagaag

SEQ ID NO: 3095359 - RNA, 18 nt, Molluscum contagiosum virus
ucacgugcuugcccgacc

SEQ ID NO: 3095360 - RNA, 16 nt, Molluscum contagiosum virus
cggucaacggcacagu

SEQ ID NO: 3095361 - RNA, 15 nt, Molluscum contagiosum virus
gcuuacacacgcacc

SEQ ID NO: 3095362 - RNA, 18 nt, Molluscum contagiosum virus
cugcucuacuuccacgag

SEQ ID NO: 3095363 - RNA, 23 nt, Molluscum contagiosum virus
acgacaagcguaagccaccgcgc

SEQ ID NO: 3095364 - RNA, 18 nt, Molluscum contagiosum virus
gagacuuccuugcgcagg

SEQ ID NO: 3095365 - RNA, 23 nt, Molluscum contagiosum virus
cugcgcuuuuuuuguccuguguu

SEQ ID NO: 3095366 - RNA, 17 nt, Molluscum contagiosum virus
gacucgcgucugcaagg

SEQ ID NO: 3095367 - RNA, 16 nt, Molluscum contagiosum virus
accuuggcgcgccgcu

SEQ ID NO: 3095368 - RNA, 15 nt, Molluscum contagiosum virus
ugcagcugcaggacc

SEQ ID NO: 3095369 - RNA, 18 nt, Molluscum contagiosum virus
gcugccgcgggacgagag

SEQ ID NO: 3095370 - RNA, 22 nt, Molluscum contagiosum virus
cgggaggcguccugcgggagca

SEQ ID NO: 3095371 - RNA, 17 nt, Molluscum contagiosum virus
gaccugcugcgagagca

SEQ ID NO: 3095372 - RNA, 23 nt, Molluscum contagiosum virus
gcgcacaagauggcgcagcacuu

SEQ ID NO: 3095373 - RNA, 20 nt, Molluscum contagiosum virus
uggaucuucucaagagccgc

SEQ ID NO: 3095374 - RNA, 13 nt, Molluscum contagiosum virus
cgaagaggucucu

SEQ ID NO: 3095375 - RNA, 21 nt, Molluscum contagiosum virus
gacgcguucuagcagcgugcg

SEQ ID NO: 3095376 - RNA, 20 nt, Molluscum contagiosum virus
cgagggcgcgaccggcgugc

SEQ ID NO: 3095377 - RNA, 22 nt, Molluscum contagiosum virus
gguaccccgcaggaaaggcacc

SEQ ID NO: 3095378 - RNA, 14 nt, Molluscum contagiosum virus
aagcacugccucau

SEQ ID NO: 3095379 - RNA, 20 nt, Molluscum contagiosum virus
agugcgucgacguggagccu

SEQ ID NO: 3095380 - RNA, 20 nt, Molluscum contagiosum virus
ccgcauuuucucuggagagc

SEQ ID NO: 3095381 - RNA, 14 nt, Molluscum contagiosum virus
ccggcagcgccgcg

SEQ ID NO: 3095382 - RNA, 14 nt, Molluscum contagiosum virus
caagcucgaacaga

SEQ ID NO: 3095383 - RNA, 13 nt, Molluscum contagiosum virus
gaggccagcacaa

SEQ ID NO: 3095384 - RNA, 23 nt, Molluscum contagiosum virus
cgagacuugugcccauguccuuu

SEQ ID NO: 3095385 - RNA, 17 nt, Molluscum contagiosum virus
guuccuggugugccagc

SEQ ID NO: 3095386 - RNA, 16 nt, Molluscum contagiosum virus
gcuggcgggugccgug

SEQ ID NO: 3095387 - RNA, 22 nt, Molluscum contagiosum virus
ugcacagcacaggccccagcaa

SEQ ID NO: 3095388 - RNA, 15 nt, Molluscum contagiosum virus
ccgacccggcucgcu

SEQ ID NO: 3095389 - RNA, 23 nt, Molluscum contagiosum virus
acgcugcagcuaggauccugcuc

SEQ ID NO: 3095390 - RNA, 19 nt, Molluscum contagiosum virus
cccggcggcccgcggcgcg

SEQ ID NO: 3095391 - RNA, 21 nt, Molluscum contagiosum virus
cacucgcuggccucugccugc

SEQ ID NO: 3095392 - RNA, 16 nt, Molluscum contagiosum virus
cugcgcugccagcucg

SEQ ID NO: 3095393 - RNA, 11 nt, Molluscum contagiosum virus
gcgcucaucaa

SEQ ID NO: 3095394 - RNA, 15 nt, Molluscum contagiosum virus
ggccaaagccgcgga

SEQ ID NO: 3095395 - RNA, 17 nt, Molluscum contagiosum virus
aaggcacccaccaggaa

SEQ ID NO: 3095396 - RNA, 21 nt, Molluscum contagiosum virus
ccccgaaaggcacccgcagga

SEQ ID NO: 3095397 - RNA, 16 nt, Molluscum contagiosum virus
cgcguccgccucuucc

SEQ ID NO: 3095398 - RNA, 20 nt, Molluscum contagiosum virus
cagccgcacggcgcccagga

SEQ ID NO: 3095399 - RNA, 21 nt, Molluscum contagiosum virus
gcaggaucggagcgcagcugc

SEQ ID NO: 3095400 - RNA, 16 nt, Molluscum contagiosum virus
gggccgcgaaagagga

SEQ ID NO: 3095401 - RNA, 18 nt, Molluscum contagiosum virus
gacguacgagcaggcgca

SEQ ID NO: 3095402 - RNA, 16 nt, Molluscum contagiosum virus
ggacacuggcaccgga

SEQ ID NO: 3095403 - RNA, 20 nt, Molluscum contagiosum virus
gacgccgacaacagugaaga

SEQ ID NO: 3095404 - RNA, 15 nt, Molluscum contagiosum virus
cgggcggaagcuccu

SEQ ID NO: 3095405 - RNA, 17 nt, Molluscum contagiosum virus
gaccacggcgcgccgcc

SEQ ID NO: 3095406 - RNA, 17 nt, Molluscum contagiosum virus
gaaaacuuguggcgcaa

SEQ ID NO: 3095407 - RNA, 13 nt, Molluscum contagiosum virus
ugcgcggcgccgc

SEQ ID NO: 3095408 - RNA, 18 nt, Molluscum contagiosum virus
gagcagugccgcucgcug

SEQ ID NO: 3095409 - RNA, 21 nt, Molluscum contagiosum virus
ucacagguagugguccaccag

SEQ ID NO: 3095410 - RNA, 17 nt, Molluscum contagiosum virus
cugcgugcuugugcgcc

SEQ ID NO: 3095411 - RNA, 14 nt, Molluscum contagiosum virus
agaagcggcccugc

SEQ ID NO: 3095412 - RNA, 16 nt, Molluscum contagiosum virus
gccgagcaauugcugg

SEQ ID NO: 3095413 - RNA, 14 nt, Molluscum contagiosum virus
gagccugccgcgag

SEQ ID NO: 3095414 - RNA, 11 nt, Molluscum contagiosum virus
uaguccugcua

SEQ ID NO: 3095415 - RNA, 12 nt, Molluscum contagiosum virus
gggaagcacagu

SEQ ID NO: 3095416 - RNA, 24 nt, Molluscum contagiosum virus
ccgccgucgcccggcaggcucccg

SEQ ID NO: 3095417 - RNA, 18 nt, Molluscum contagiosum virus
cagccugcuggcaccgcg

SEQ ID NO: 3095418 - RNA, 17 nt, Molluscum contagiosum virus
cucaagacgcugcuggc

SEQ ID NO: 3095419 - RNA, 18 nt, Molluscum contagiosum virus
gacaaggagaugggcacg

SEQ ID NO: 3095420 - RNA, 21 nt, Molluscum contagiosum virus
caacgacaaggaaaggcaccc

SEQ ID NO: 3095421 - RNA, 22 nt, Molluscum contagiosum virus
cgugcacgugguuugcucgauc

SEQ ID NO: 3095422 - RNA, 16 nt, Molluscum contagiosum virus
gugcgcaccagcugca

SEQ ID NO: 3095423 - RNA, 15 nt, Molluscum contagiosum virus
uggcuucggggacac

SEQ ID NO: 3095424 - RNA, 14 nt, Molluscum contagiosum virus
cgagcgcgggcgcc

SEQ ID NO: 3095425 - RNA, 14 nt, Molluscum contagiosum virus
accgcaccgagccc

SEQ ID NO: 3095426 - RNA, 14 nt, Molluscum contagiosum virus
ggaacaaugcugca

SEQ ID NO: 3095427 - RNA, 21 nt, Molluscum contagiosum virus
auaccaagucuucggaguggg

SEQ ID NO: 3095428 - RNA, 14 nt, Molluscum contagiosum virus
ucaccuuccugggc

SEQ ID NO: 3095429 - RNA, 17 nt, Molluscum contagiosum virus
cugccggcucaagcugg

SEQ ID NO: 3095430 - RNA, 20 nt, Molluscum contagiosum virus
cgggcugucgcccggcagcg

SEQ ID NO: 3095431 - RNA, 14 nt, Molluscum contagiosum virus
uucugcgcagggac

SEQ ID NO: 3095432 - RNA, 22 nt, Molluscum contagiosum virus
ugcgcgcacggcuaggcgcggc

SEQ ID NO: 3095433 - RNA, 17 nt, Molluscum contagiosum virus
guccccgaacugcuggg

SEQ ID NO: 3095434 - RNA, 14 nt, Molluscum contagiosum virus
gcucaccgcgcaga

SEQ ID NO: 3095435 - RNA, 13 nt, Molluscum contagiosum virus
cugcucgggcugc

SEQ ID NO: 3095436 - RNA, 17 nt, Molluscum contagiosum virus
ggagacaccagcuccgc

SEQ ID NO: 3095437 - RNA, 18 nt, Molluscum contagiosum virus
acccuuggcagcaacugc

SEQ ID NO: 3095438 - RNA, 14 nt, Molluscum contagiosum virus
cugccagcagagcu

SEQ ID NO: 3095439 - RNA, 14 nt, Molluscum contagiosum virus
gcaugugcgagcgc

SEQ ID NO: 3095440 - RNA, 16 nt, Molluscum contagiosum virus
cagugcgugcacuguc

SEQ ID NO: 3095441 - RNA, 12 nt, Molluscum contagiosum virus
gucaccgcgucc

SEQ ID NO: 3095442 - RNA, 20 nt, Molluscum contagiosum virus
auguucucuuuguuccugcg

SEQ ID NO: 3095443 - RNA, 14 nt, Molluscum contagiosum virus
cucguggacagccu

SEQ ID NO: 3095444 - RNA, 21 nt, Molluscum contagiosum virus
cugcacgucgaagaccaccag

SEQ ID NO: 3095445 - RNA, 14 nt, Molluscum contagiosum virus
caucgcgcugcucu

SEQ ID NO: 3095446 - RNA, 19 nt, Molluscum contagiosum virus
ggcagcccgucggccacag

SEQ ID NO: 3095447 - RNA, 17 nt, Molluscum contagiosum virus
uacgagacucuggaagc

SEQ ID NO: 3095448 - RNA, 14 nt, Molluscum contagiosum virus
cgaagagcagaagg

SEQ ID NO: 3095449 - RNA, 23 nt, Molluscum contagiosum virus
gugcauggcggcggccacgcucg

SEQ ID NO: 3095450 - RNA, 15 nt, Molluscum contagiosum virus
acgccuucuuccugc

SEQ ID NO: 3095451 - RNA, 15 nt, Molluscum contagiosum virus
cccucaggggcucuc

SEQ ID NO: 3095452 - RNA, 15 nt, Molluscum contagiosum virus
gcgcgggccuguccg

SEQ ID NO: 3095453 - RNA, 22 nt, Molluscum contagiosum virus
cucgguacaacuuuuccugcgu

SEQ ID NO: 3095454 - RNA, 20 nt, Molluscum contagiosum virus
guuccguucgucagagggac

SEQ ID NO: 3095455 - RNA, 15 nt, Molluscum contagiosum virus
cgcgcgccugcuggc

SEQ ID NO: 3095456 - RNA, 19 nt, Molluscum contagiosum virus
guuugcgcucucagagcau

SEQ ID NO: 3095457 - RNA, 14 nt, Molluscum contagiosum virus
gcggcaggcgcugc

SEQ ID NO: 3095458 - RNA, 19 nt, Molluscum contagiosum virus
gcccgaggagagcggcgcc

SEQ ID NO: 3095459 - RNA, 17 nt, Molluscum contagiosum virus
cgcgcugcucuggagca

SEQ ID NO: 3095460 - RNA, 16 nt, Molluscum contagiosum virus
gcacagaaagccaacg

SEQ ID NO: 3095461 - RNA, 19 nt, Molluscum contagiosum virus
cggagcuggccacucucgc

SEQ ID NO: 3095462 - RNA, 12 nt, Molluscum contagiosum virus
acgccggcaagc

SEQ ID NO: 3095463 - RNA, 21 nt, Molluscum contagiosum virus
acugaaaacuuaucccagaaa

SEQ ID NO: 3095464 - RNA, 16 nt, Molluscum contagiosum virus
uggucucgcugcuggg

SEQ ID NO: 3095465 - RNA, 13 nt, Molluscum contagiosum virus
ugcuggcgggcgc

SEQ ID NO: 3095466 - RNA, 15 nt, Molluscum contagiosum virus
gcagacuaagaacgu

SEQ ID NO: 3095467 - RNA, 19 nt, Molluscum contagiosum virus
augccuuucaggggucugu

SEQ ID NO: 3095468 - RNA, 17 nt, Molluscum contagiosum virus
gcugcggcugcugccug

SEQ ID NO: 3095469 - RNA, 19 nt, Molluscum contagiosum virus
cgcgcaagaacaaccagac

SEQ ID NO: 3095470 - RNA, 16 nt, Molluscum contagiosum virus
acaugccgcgcugcuc

SEQ ID NO: 3095471 - RNA, 12 nt, Molluscum contagiosum virus
cgcgcugcucuc

SEQ ID NO: 3095472 - RNA, 20 nt, Molluscum contagiosum virus
ggugcaaccgcugcucgaca

SEQ ID NO: 3095473 - RNA, 17 nt, Molluscum contagiosum virus
ugcuggcggggcuggca

SEQ ID NO: 3095474 - RNA, 15 nt, Molluscum contagiosum virus
gucgcgcgcugugga

SEQ ID NO: 3095475 - RNA, 14 nt, Molluscum contagiosum virus
gcagugccagcagc

SEQ ID NO: 3095476 - RNA, 20 nt, Molluscum contagiosum virus
cugcaggaccugcugguggu

SEQ ID NO: 3095477 - RNA, 18 nt, Molluscum contagiosum virus
gcacaguccaacccgcgg

SEQ ID NO: 3095478 - RNA, 16 nt, Molluscum contagiosum virus
uggacacgcacuggcg

SEQ ID NO: 3095479 - RNA, 17 nt, Molluscum contagiosum virus
ggcuggaccugcgccag

SEQ ID NO: 3095480 - RNA, 19 nt, Molluscum contagiosum virus
cacugucguaacaauggac

SEQ ID NO: 3095481 - RNA, 17 nt, Molluscum contagiosum virus
ccgcgcgcgccagcuau

SEQ ID NO: 3095482 - RNA, 15 nt, Molluscum contagiosum virus
gaugcucgcuugccg

SEQ ID NO: 3095483 - RNA, 18 nt, Molluscum contagiosum virus
ggugccuggcguccgcac

SEQ ID NO: 3095484 - RNA, 18 nt, Molluscum contagiosum virus
caacauggugcuggccau

SEQ ID NO: 3095485 - RNA, 18 nt, Molluscum contagiosum virus
cuucaaguuccuggagcc

SEQ ID NO: 3095486 - RNA, 17 nt, Molluscum contagiosum virus
gcuuguugucgagcaga

SEQ ID NO: 3095487 - RNA, 13 nt, Molluscum contagiosum virus
gcgugagagccau

SEQ ID NO: 3095488 - RNA, 22 nt, Molluscum contagiosum virus
aguacuucuacgggaagcugca

SEQ ID NO: 3095489 - RNA, 18 nt, Molluscum contagiosum virus
gaucaggcagcugcugcg

SEQ ID NO: 3095490 - RNA, 14 nt, Molluscum contagiosum virus
caagcccagcagcg

SEQ ID NO: 3095491 - RNA, 16 nt, Molluscum contagiosum virus
cgcagugcggccagca

SEQ ID NO: 3095492 - RNA, 14 nt, Molluscum contagiosum virus
uugggcacuuccug

SEQ ID NO: 3095493 - RNA, 20 nt, Molluscum contagiosum virus
uguccacgaugaacggcucc

SEQ ID NO: 3095494 - RNA, 24 nt, Molluscum contagiosum virus
guugcgcagcacaaacucgcagaa

SEQ ID NO: 3095495 - RNA, 20 nt, Molluscum contagiosum virus
guggaucgcgcgcaccugca

SEQ ID NO: 3095496 - RNA, 14 nt, Molluscum contagiosum virus
ccgccugcugcagc

SEQ ID NO: 3095497 - RNA, 16 nt, Molluscum contagiosum virus
gauggacgccagcuug

SEQ ID NO: 3095498 - RNA, 13 nt, Molluscum contagiosum virus
ugcacuacugcuc

SEQ ID NO: 3095499 - RNA, 16 nt, Molluscum contagiosum virus
gcagcguuccaggaac

SEQ ID NO: 3095500 - RNA, 16 nt, Molluscum contagiosum virus
gcccuacgcgcgcgug

SEQ ID NO: 3095501 - RNA, 15 nt, Molluscum contagiosum virus
ccucuuuugggcacg

SEQ ID NO: 3095502 - RNA, 15 nt, Molluscum contagiosum virus
ccagcgcgcagaagc

SEQ ID NO: 3095503 - RNA, 22 nt, Molluscum contagiosum virus
guguuuuaauuuuccaaccugu

SEQ ID NO: 3095504 - RNA, 19 nt, Molluscum contagiosum virus
uccccguccuugcucuggc

SEQ ID NO: 3095505 - RNA, 14 nt, Molluscum contagiosum virus
gccccgcgccagca

SEQ ID NO: 3095506 - RNA, 20 nt, Molluscum contagiosum virus
cgacgugaucgcgcaggcgc

SEQ ID NO: 3095507 - RNA, 16 nt, Molluscum contagiosum virus
cagaaaacgcacuguc

SEQ ID NO: 3095508 - RNA, 18 nt, Molluscum contagiosum virus
ccacgagagaggcuuugc

SEQ ID NO: 3095509 - RNA, 21 nt, Molluscum contagiosum virus
gcaauggcggccugcccugcu

SEQ ID NO: 3095510 - RNA, 20 nt, Molluscum contagiosum virus
acucgagcacguagugcucg

SEQ ID NO: 3095511 - RNA, 13 nt, Molluscum contagiosum virus
cagcaccagguag

SEQ ID NO: 3095512 - RNA, 18 nt, Molluscum contagiosum virus
ggcaaaagggcucugcca

SEQ ID NO: 3095513 - RNA, 12 nt, Molluscum contagiosum virus
cacgcagagcca

SEQ ID NO: 3095514 - RNA, 15 nt, Molluscum contagiosum virus
guccccggcgccggc

SEQ ID NO: 3095515 - RNA, 21 nt, Molluscum contagiosum virus
cggcgcggcuagcaccgcaug

SEQ ID NO: 3095516 - RNA, 17 nt, Molluscum contagiosum virus
caauggacacgcacugg

SEQ ID NO: 3095517 - RNA, 20 nt, Molluscum contagiosum virus
gagcacaaagagacgcggcc

SEQ ID NO: 3095518 - RNA, 19 nt, Molluscum contagiosum virus
ggcgccagcuaagccggag

SEQ ID NO: 3095519 - RNA, 14 nt, Molluscum contagiosum virus
acgcagcaggcacg

SEQ ID NO: 3095520 - RNA, 16 nt, Molluscum contagiosum virus
uguccuacacgccgcu

SEQ ID NO: 3095521 - RNA, 16 nt, Molluscum contagiosum virus
ccgacucgcagcucac

SEQ ID NO: 3095522 - RNA, 16 nt, Molluscum contagiosum virus
ccgcugcuccugcucu

SEQ ID NO: 3095523 - RNA, 15 nt, Molluscum contagiosum virus
gaccgcgggcacggg

SEQ ID NO: 3095524 - RNA, 16 nt, Molluscum contagiosum virus
cgugcauggcacgcga

SEQ ID NO: 3095525 - RNA, 15 nt, Molluscum contagiosum virus
uguugccuggagggc

SEQ ID NO: 3095526 - RNA, 12 nt, Molluscum contagiosum virus
ggcacagucugg

SEQ ID NO: 3095527 - RNA, 14 nt, Molluscum contagiosum virus
gcugaugcccaggc

SEQ ID NO: 3095528 - RNA, 22 nt, Molluscum contagiosum virus
caccagcuggacggugcuggug

SEQ ID NO: 3095529 - RNA, 13 nt, Molluscum contagiosum virus
agauggacacagc

SEQ ID NO: 3095530 - RNA, 18 nt, Molluscum contagiosum virus
gcccaagaagaagcagca

SEQ ID NO: 3095531 - RNA, 13 nt, Molluscum contagiosum virus
gcccccgccgcgg

SEQ ID NO: 3095532 - RNA, 19 nt, Molluscum contagiosum virus
cuacgacaugcucgcgcuc

SEQ ID NO: 3095533 - RNA, 22 nt, Molluscum contagiosum virus
gugcgccgcgccgaaguacuuu

SEQ ID NO: 3095534 - RNA, 22 nt, Molluscum contagiosum virus
cacggcgacaacgacagagccc

SEQ ID NO: 3095535 - RNA, 20 nt, Molluscum contagiosum virus
gccgucgucaacaacacgau

SEQ ID NO: 3095536 - RNA, 16 nt, Molluscum contagiosum virus
cgcgcgugugcauggc

SEQ ID NO: 3095537 - RNA, 11 nt, Molluscum contagiosum virus
cggaggcugcu

SEQ ID NO: 3095538 - RNA, 13 nt, Molluscum contagiosum virus
cggagaggggacg

SEQ ID NO: 3095539 - RNA, 23 nt, Molluscum contagiosum virus
caaccccgcgcguacgcugcucg

SEQ ID NO: 3095540 - RNA, 17 nt, Molluscum contagiosum virus
ccgcggcgcgcagcucg

SEQ ID NO: 3095541 - RNA, 22 nt, Molluscum contagiosum virus
ugcaaccgcugcucgacauuaa

SEQ ID NO: 3095542 - RNA, 20 nt, Molluscum contagiosum virus
cacagccccugcugcucgcg

SEQ ID NO: 3095543 - RNA, 16 nt, Molluscum contagiosum virus
agcugugcgagccagu

SEQ ID NO: 3095544 - RNA, 15 nt, Molluscum contagiosum virus
gcgcguucggaacgc

SEQ ID NO: 3095545 - RNA, 12 nt, Molluscum contagiosum virus
ccacgugccaag

SEQ ID NO: 3095546 - RNA, 20 nt, Molluscum contagiosum virus
gcagcgcgugcgcaggagca

SEQ ID NO: 3095547 - RNA, 13 nt, Molluscum contagiosum virus
cgccgccaugcug

SEQ ID NO: 3095548 - RNA, 23 nt, Molluscum contagiosum virus
gcagccgcggcgcccggugccag

SEQ ID NO: 3095549 - RNA, 13 nt, Molluscum contagiosum virus
gccgugccuggca

SEQ ID NO: 3095550 - RNA, 15 nt, Molluscum contagiosum virus
ucgagcuuccucaag

SEQ ID NO: 3095551 - RNA, 14 nt, Molluscum contagiosum virus
cggccagcgugcag

SEQ ID NO: 3095552 - RNA, 18 nt, Molluscum contagiosum virus
guggccgagccgcuggcc

SEQ ID NO: 3095553 - RNA, 14 nt, Molluscum contagiosum virus
cauccucaccuucc

SEQ ID NO: 3095554 - RNA, 17 nt, Molluscum contagiosum virus
gacuggcacgcgccgcg

SEQ ID NO: 3095555 - RNA, 15 nt, Molluscum contagiosum virus
ccgagggcgugcgcu

SEQ ID NO: 3095556 - RNA, 21 nt, Molluscum contagiosum virus
cagcgcgcgcagcaccgcggc

SEQ ID NO: 3095557 - RNA, 20 nt, Molluscum contagiosum virus
cgagguggcacccuggcugc

SEQ ID NO: 3095558 - RNA, 14 nt, Molluscum contagiosum virus
cacgggccugcgcg

SEQ ID NO: 3095559 - RNA, 23 nt, Molluscum contagiosum virus
ccagcucggguuccagcuccggc

SEQ ID NO: 3095560 - RNA, 21 nt, Molluscum contagiosum virus
gcagagguaaucccgagcuuc

SEQ ID NO: 3095561 - RNA, 16 nt, Molluscum contagiosum virus
uuuuccggggacggag

SEQ ID NO: 3095562 - RNA, 20 nt, Molluscum contagiosum virus
ccgaggagagcggcgccccu

SEQ ID NO: 3095563 - RNA, 21 nt, Molluscum contagiosum virus
gcgugaggaggcggcacugcu

SEQ ID NO: 3095564 - RNA, 16 nt, Molluscum contagiosum virus
ugccgcgcgcgccgca

SEQ ID NO: 3095565 - RNA, 20 nt, Molluscum contagiosum virus
ggaccucuuucucgcgccgu

SEQ ID NO: 3095566 - RNA, 19 nt, Molluscum contagiosum virus
gcugggaaagggcugcuug

SEQ ID NO: 3095567 - RNA, 18 nt, Molluscum contagiosum virus
gccguccaugugcccgcg

SEQ ID NO: 3095568 - RNA, 20 nt, Molluscum contagiosum virus
gccccacugugccagcagca

SEQ ID NO: 3095569 - RNA, 13 nt, Molluscum contagiosum virus
gacgaagcugugc

SEQ ID NO: 3095570 - RNA, 18 nt, Molluscum contagiosum virus
gcacgcgcacgcucucgc

SEQ ID NO: 3095571 - RNA, 22 nt, Molluscum contagiosum virus
ugugcacaugcccgugcaccuc

SEQ ID NO: 3095572 - RNA, 18 nt, Molluscum contagiosum virus
cgaaguuccugcauuuca

SEQ ID NO: 3095573 - RNA, 14 nt, Molluscum contagiosum virus
ugcgcggggcaggc

SEQ ID NO: 3095574 - RNA, 18 nt, Molluscum contagiosum virus
acgcaggaugcuggggcu

SEQ ID NO: 3095575 - RNA, 13 nt, Molluscum contagiosum virus
cgaggagaaagua

SEQ ID NO: 3095576 - RNA, 15 nt, Molluscum contagiosum virus
aguaccggccaaggc

SEQ ID NO: 3095577 - RNA, 13 nt, Molluscum contagiosum virus
cuuggcgagcgcu

SEQ ID NO: 3095578 - RNA, 16 nt, Molluscum contagiosum virus
gaggcccugcuugccc

SEQ ID NO: 3095579 - RNA, 17 nt, Molluscum contagiosum virus
cugugcccuggaagcuu

SEQ ID NO: 3095580 - RNA, 21 nt, Molluscum contagiosum virus
acguaguacugcagcagcucc

SEQ ID NO: 3095581 - RNA, 13 nt, Molluscum contagiosum virus
cgccgaugcagug

SEQ ID NO: 3095582 - RNA, 21 nt, Molluscum contagiosum virus
aggcucgagcgcgcgccugcu

SEQ ID NO: 3095583 - RNA, 19 nt, Molluscum contagiosum virus
guuuucacgcaaggaagca

SEQ ID NO: 3095584 - RNA, 21 nt, Molluscum contagiosum virus
gggcgcgcggcaagccuggcu

SEQ ID NO: 3095585 - RNA, 14 nt, Molluscum contagiosum virus
gcuggcggcgcacg

SEQ ID NO: 3095586 - RNA, 14 nt, Molluscum contagiosum virus
cgccggcucugccu

SEQ ID NO: 3095587 - RNA, 22 nt, Molluscum contagiosum virus
cucgaggcgcuugggcacugcu

SEQ ID NO: 3095588 - RNA, 21 nt, Molluscum contagiosum virus
augcugguucugcgcugccag

SEQ ID NO: 3095589 - RNA, 16 nt, Molluscum contagiosum virus
gcgccgcgcggcuccu

SEQ ID NO: 3095590 - RNA, 20 nt, Molluscum contagiosum virus
cgucgggcgccaacacgagc

SEQ ID NO: 3095591 - RNA, 15 nt, Molluscum contagiosum virus
cacccgcaacaagga

SEQ ID NO: 3095592 - RNA, 21 nt, Molluscum contagiosum virus
gccgcggacgccggcgcccgc

SEQ ID NO: 3095593 - RNA, 18 nt, Molluscum contagiosum virus
ggucgugugcguacuggg

SEQ ID NO: 3095594 - RNA, 14 nt, Molluscum contagiosum virus
guguugcugaugcc

SEQ ID NO: 3095595 - RNA, 19 nt, Molluscum contagiosum virus
guucuucgcagaggacagc

SEQ ID NO: 3095596 - RNA, 15 nt, Molluscum contagiosum virus
cuccgcacagaggga

SEQ ID NO: 3095597 - RNA, 15 nt, Molluscum contagiosum virus
cuggacgccucggga

SEQ ID NO: 3095598 - RNA, 17 nt, Molluscum contagiosum virus
cggacacguacacgcug

SEQ ID NO: 3095599 - RNA, 15 nt, Molluscum contagiosum virus
ucuuccccgagagcu

SEQ ID NO: 3095600 - RNA, 19 nt, Molluscum contagiosum virus
cagcgugccgcggcacugg

SEQ ID NO: 3095601 - RNA, 20 nt, Molluscum contagiosum virus
ccgcgcgcugcucuggagca

SEQ ID NO: 3095602 - RNA, 22 nt, Molluscum contagiosum virus
cagauccgggcgcugcaccgcu

SEQ ID NO: 3095603 - RNA, 20 nt, Molluscum contagiosum virus
cagccucugugcggcgccgu

SEQ ID NO: 3095604 - RNA, 19 nt, Molluscum contagiosum virus
gcgccagggcggagccccg

SEQ ID NO: 3095605 - RNA, 16 nt, Molluscum contagiosum virus
uggagacggcaguguc

SEQ ID NO: 3095606 - RNA, 14 nt, Molluscum contagiosum virus
acguccuagagcag

SEQ ID NO: 3095607 - RNA, 14 nt, Molluscum contagiosum virus
uccgucgcgcucga

SEQ ID NO: 3095608 - RNA, 23 nt, Molluscum contagiosum virus
ggagacaccagcuccgccgggaa

SEQ ID NO: 3095609 - RNA, 21 nt, Molluscum contagiosum virus
cuggccaaggacgacaacacu

SEQ ID NO: 3095610 - RNA, 13 nt, Molluscum contagiosum virus
cgggcgccagcua

SEQ ID NO: 3095611 - RNA, 16 nt, Molluscum contagiosum virus
gcuggcgcucggcgug

SEQ ID NO: 3095612 - RNA, 18 nt, Molluscum contagiosum virus
acgcgcacgcgcacacgc

SEQ ID NO: 3095613 - RNA, 11 nt, Molluscum contagiosum virus
cgcgcagcgcc

SEQ ID NO: 3095614 - RNA, 22 nt, Molluscum contagiosum virus
cccaagcgcaccguugacgagc

SEQ ID NO: 3095615 - RNA, 19 nt, Molluscum contagiosum virus
gcaggucaucgggcugcag

SEQ ID NO: 3095616 - RNA, 18 nt, Molluscum contagiosum virus
ccgcacguggagucacga

SEQ ID NO: 3095617 - RNA, 16 nt, Molluscum contagiosum virus
uccuggggcuggacag

SEQ ID NO: 3095618 - RNA, 13 nt, Molluscum contagiosum virus
gcgcaccuggagu

SEQ ID NO: 3095619 - RNA, 20 nt, Molluscum contagiosum virus
gacggugugccgcugguggg

SEQ ID NO: 3095620 - RNA, 18 nt, Molluscum contagiosum virus
ccggcguuggcuuucugu

SEQ ID NO: 3095621 - RNA, 21 nt, Molluscum contagiosum virus
ccuggcucgcgagugugcaug

SEQ ID NO: 3095622 - RNA, 9 nt, Molluscum contagiosum virus
ccagcagcg

SEQ ID NO: 3095623 - RNA, 21 nt, Molluscum contagiosum virus
gguccaccagcugccgcuuga

SEQ ID NO: 3095624 - RNA, 13 nt, Molluscum contagiosum virus
cguagccuagcca

SEQ ID NO: 3095625 - RNA, 15 nt, Molluscum contagiosum virus
cgcucgccuuucccc

SEQ ID NO: 3095626 - RNA, 16 nt, Molluscum contagiosum virus
gcaggcacgacgccga

SEQ ID NO: 3095627 - RNA, 22 nt, Molluscum contagiosum virus
uggcgcagcaggaugcuggugu

SEQ ID NO: 3095628 - RNA, 23 nt, Molluscum contagiosum virus
agugcgggagcaagucugcgcag

SEQ ID NO: 3095629 - RNA, 21 nt, Molluscum contagiosum virus
ucccggcgcgcgcggcgcgcc

SEQ ID NO: 3095630 - RNA, 16 nt, Molluscum contagiosum virus
caacgcuuggcaagcu

SEQ ID NO: 3095631 - RNA, 15 nt, Molluscum contagiosum virus
ggcugcucgcugccu

SEQ ID NO: 3095632 - RNA, 14 nt, Molluscum contagiosum virus
cugugcucgcgccu

SEQ ID NO: 3095633 - RNA, 22 nt, Molluscum contagiosum virus
cgagcgcguccaugagcaucuc

SEQ ID NO: 3095634 - RNA, 15 nt, Molluscum contagiosum virus
caagaggggagccag

SEQ ID NO: 3095635 - RNA, 16 nt, Molluscum contagiosum virus
cgcccucgcgccugac

SEQ ID NO: 3095636 - RNA, 18 nt, Molluscum contagiosum virus
gcgggagggcgcaacucc

SEQ ID NO: 3095637 - RNA, 15 nt, Molluscum contagiosum virus
gacggaacgagccug

SEQ ID NO: 3095638 - RNA, 21 nt, Molluscum contagiosum virus
gucucugcgcgagcagcugcu

SEQ ID NO: 3095639 - RNA, 19 nt, Molluscum contagiosum virus
aguacugcagcagcuccuc

SEQ ID NO: 3095640 - RNA, 14 nt, Molluscum contagiosum virus
uguuuucauuucgc

SEQ ID NO: 3095641 - RNA, 13 nt, Molluscum contagiosum virus
cagcuaugcgccc

SEQ ID NO: 3095642 - RNA, 15 nt, Molluscum contagiosum virus
cccgacucgcagcuc

SEQ ID NO: 3095643 - RNA, 22 nt, Molluscum contagiosum virus
gccugccgcgcaugcuggagac

SEQ ID NO: 3095644 - RNA, 18 nt, Molluscum contagiosum virus
ccaagaggacgagcugcu

SEQ ID NO: 3095645 - RNA, 22 nt, Molluscum contagiosum virus
ucgcggucgacgagugcgccgc

SEQ ID NO: 3095646 - RNA, 15 nt, Molluscum contagiosum virus
gccacgagcgccgcg

SEQ ID NO: 3095647 - RNA, 16 nt, Molluscum contagiosum virus
gcugcacaugugcgug

SEQ ID NO: 3095648 - RNA, 15 nt, Molluscum contagiosum virus
caggaacaucugcaa

SEQ ID NO: 3095649 - RNA, 21 nt, Molluscum contagiosum virus
cagcggaagaaacagccaugu

SEQ ID NO: 3095650 - RNA, 11 nt, Molluscum contagiosum virus
ugacagcaucg

SEQ ID NO: 3095651 - RNA, 13 nt, Molluscum contagiosum virus
cgugacagucagc

SEQ ID NO: 3095652 - RNA, 17 nt, Molluscum contagiosum virus
ggccucgccuccgggcg

SEQ ID NO: 3095653 - RNA, 18 nt, Molluscum contagiosum virus
gaaucgagaugcgccgca

SEQ ID NO: 3095654 - RNA, 14 nt, Molluscum contagiosum virus
cgggggcgcuuccc

SEQ ID NO: 3095655 - RNA, 15 nt, Molluscum contagiosum virus
ggaggcggcacugcu

SEQ ID NO: 3095656 - RNA, 21 nt, Molluscum contagiosum virus
cugcacgaccgcggacuccuu

SEQ ID NO: 3095657 - RNA, 18 nt, Molluscum contagiosum virus
ggcugucgcccggcagcg

SEQ ID NO: 3095658 - RNA, 14 nt, Molluscum contagiosum virus
gcacgcggcucugg

SEQ ID NO: 3095659 - RNA, 17 nt, Molluscum contagiosum virus
gcgcgccuuccgcgcgg

SEQ ID NO: 3095660 - RNA, 22 nt, Molluscum contagiosum virus
gcuggagaacggcgugcgagug

SEQ ID NO: 3095661 - RNA, 20 nt, Molluscum contagiosum virus
gcaucuagucagcggcgguc

SEQ ID NO: 3095662 - RNA, 21 nt, Molluscum contagiosum virus
gcgggcggcacacacuugcac

SEQ ID NO: 3095663 - RNA, 17 nt, Molluscum contagiosum virus
gggcucagcaaggaggg

SEQ ID NO: 3095664 - RNA, 15 nt, Molluscum contagiosum virus
acgcuugccuuggcg

SEQ ID NO: 3095665 - RNA, 14 nt, Molluscum contagiosum virus
caugcgugcuucac

SEQ ID NO: 3095666 - RNA, 22 nt, Molluscum contagiosum virus
agcgacgagcagcugcuucucu

SEQ ID NO: 3095667 - RNA, 20 nt, Molluscum contagiosum virus
gcugcaguguguacggcgug

SEQ ID NO: 3095668 - RNA, 18 nt, Molluscum contagiosum virus
cugucccuugauccaggc

SEQ ID NO: 3095669 - RNA, 17 nt, Molluscum contagiosum virus
cgcgugcgagcggcgcg

SEQ ID NO: 3095670 - RNA, 16 nt, Molluscum contagiosum virus
uguagaacgccaggaa

SEQ ID NO: 3095671 - RNA, 23 nt, Molluscum contagiosum virus
aaagcgccgcgcgcggcuaagcu

SEQ ID NO: 3095672 - RNA, 15 nt, Molluscum contagiosum virus
ggccaaccuccugca

SEQ ID NO: 3095673 - RNA, 16 nt, Molluscum contagiosum virus
gcuccucgcacgggcg

SEQ ID NO: 3095674 - RNA, 19 nt, Molluscum contagiosum virus
gcgcgcggaagcccgccuc

SEQ ID NO: 3095675 - RNA, 14 nt, Molluscum contagiosum virus
cugcaggaaaggca

SEQ ID NO: 3095676 - RNA, 22 nt, Molluscum contagiosum virus
gacgcgggccuguccgcgggcg

SEQ ID NO: 3095677 - RNA, 21 nt, Molluscum contagiosum virus
acuuaacggccaauaaaugau

SEQ ID NO: 3095678 - RNA, 15 nt, Molluscum contagiosum virus
caccgcaugggcccu

SEQ ID NO: 3095679 - RNA, 21 nt, Molluscum contagiosum virus
gcacccuccgcacagagggac

SEQ ID NO: 3095680 - RNA, 20 nt, Molluscum contagiosum virus
caagcuucgggccgcugccg

SEQ ID NO: 3095681 - RNA, 20 nt, Molluscum contagiosum virus
cucgccuccuugcccgagga

SEQ ID NO: 3095682 - RNA, 17 nt, Molluscum contagiosum virus
ugggaaagggcugcuug

SEQ ID NO: 3095683 - RNA, 22 nt, Molluscum contagiosum virus
ugcguagagcaaaggaagagcc

SEQ ID NO: 3095684 - RNA, 19 nt, Molluscum contagiosum virus
cgcgccgggccgcgguggc

SEQ ID NO: 3095685 - RNA, 13 nt, Molluscum contagiosum virus
ccacgcagcuggc

SEQ ID NO: 3095686 - RNA, 14 nt, Molluscum contagiosum virus
cugccgcgcaauac

SEQ ID NO: 3095687 - RNA, 13 nt, Molluscum contagiosum virus
agcaaccucggga

SEQ ID NO: 3095688 - RNA, 15 nt, Molluscum contagiosum virus
cgccagcucugggcg

SEQ ID NO: 3095689 - RNA, 18 nt, Molluscum contagiosum virus
cucgcugcuccccgccag

SEQ ID NO: 3095690 - RNA, 17 nt, Molluscum contagiosum virus
cgcgagacgggcacgcg

SEQ ID NO: 3095691 - RNA, 17 nt, Molluscum contagiosum virus
accgacaaggagggaga

SEQ ID NO: 3095692 - RNA, 12 nt, Molluscum contagiosum virus
uccugcugguuc

SEQ ID NO: 3095693 - RNA, 23 nt, Molluscum contagiosum virus
aggcaggccccgcaccagugccg

SEQ ID NO: 3095694 - RNA, 21 nt, Molluscum contagiosum virus
gcagacgccgagcgggcaaug

SEQ ID NO: 3095695 - RNA, 13 nt, Molluscum contagiosum virus
cgccgcgccgcac

SEQ ID NO: 3095696 - RNA, 19 nt, Molluscum contagiosum virus
cacaguccaacccgcggcg

SEQ ID NO: 3095697 - RNA, 13 nt, Molluscum contagiosum virus
cgagcacgccucc

SEQ ID NO: 3095698 - RNA, 17 nt, Molluscum contagiosum virus
gcucaagacgcugcugg

SEQ ID NO: 3095699 - RNA, 20 nt, Molluscum contagiosum virus
acuaccuggcggcgcuggag

SEQ ID NO: 3095700 - RNA, 16 nt, Molluscum contagiosum virus
acggacaugagcuugc

SEQ ID NO: 3095701 - RNA, 15 nt, Molluscum contagiosum virus
cgguccagccgcacc

SEQ ID NO: 3095702 - RNA, 20 nt, Molluscum contagiosum virus
cuucucgcagcguuccagga

SEQ ID NO: 3095703 - RNA, 13 nt, Molluscum contagiosum virus
cgcgcgagcugga

SEQ ID NO: 3095704 - RNA, 13 nt, Molluscum contagiosum virus
uugaccagcucca

SEQ ID NO: 3095705 - RNA, 13 nt, Molluscum contagiosum virus
caccgagcccgcc

SEQ ID NO: 3095706 - RNA, 21 nt, Molluscum contagiosum virus
ccgcgggcgcagacgccgagc

SEQ ID NO: 3095707 - RNA, 20 nt, Molluscum contagiosum virus
ggcgcgccuaguucgagaag

SEQ ID NO: 3095708 - RNA, 12 nt, Molluscum contagiosum virus
uaaccaugaaga

SEQ ID NO: 3095709 - RNA, 15 nt, Molluscum contagiosum virus
ccgcagcaagcagcc

SEQ ID NO: 3095710 - RNA, 13 nt, Molluscum contagiosum virus
cgcgcggcagcag

SEQ ID NO: 3095711 - RNA, 15 nt, Molluscum contagiosum virus
acccuggcugcugcg

SEQ ID NO: 3095712 - RNA, 17 nt, Molluscum contagiosum virus
agugcagaugaggcugc

SEQ ID NO: 3095713 - RNA, 15 nt, Molluscum contagiosum virus
gcgcgcugcgcgccg

SEQ ID NO: 3095714 - RNA, 18 nt, Molluscum contagiosum virus
cgacauuucgcgccuguc

SEQ ID NO: 3095715 - RNA, 15 nt, Molluscum contagiosum virus
uggccgcgcgcgcac

SEQ ID NO: 3095716 - RNA, 19 nt, Molluscum contagiosum virus
gugacgcugcaagacggaa

SEQ ID NO: 3095717 - RNA, 21 nt, Molluscum contagiosum virus
guggcguccgcacgaggagcc

SEQ ID NO: 3095718 - RNA, 15 nt, Molluscum contagiosum virus
uccccgcgggccgcc

SEQ ID NO: 3095719 - RNA, 15 nt, Molluscum contagiosum virus
gcuggcugggcacuc

SEQ ID NO: 3095720 - RNA, 19 nt, Molluscum contagiosum virus
uccuguagcaaggggucug

SEQ ID NO: 3095721 - RNA, 18 nt, Molluscum contagiosum virus
gucgcgcgagaagucggg

SEQ ID NO: 3095722 - RNA, 13 nt, Molluscum contagiosum virus
ugaagcucucgcg

SEQ ID NO: 3095723 - RNA, 12 nt, Molluscum contagiosum virus
caccagcaccag

SEQ ID NO: 3095724 - RNA, 22 nt, Molluscum contagiosum virus
aggacgccggcaagccgagcca

SEQ ID NO: 3095725 - RNA, 20 nt, Molluscum contagiosum virus
gagagccgccuuugcgcugu

SEQ ID NO: 3095726 - RNA, 20 nt, Molluscum contagiosum virus
cagugccgccgcgcaaaagc

SEQ ID NO: 3095727 - RNA, 18 nt, Molluscum contagiosum virus
ucacaagcaccgccugcu

SEQ ID NO: 3095728 - RNA, 15 nt, Molluscum contagiosum virus
gcgcgccggcccgag

SEQ ID NO: 3095729 - RNA, 17 nt, Molluscum contagiosum virus
uuggacagcaagcagcg

SEQ ID NO: 3095730 - RNA, 17 nt, Molluscum contagiosum virus
caccgggcgccgcggcu

SEQ ID NO: 3095731 - RNA, 13 nt, Molluscum contagiosum virus
ugccguccccgcg

SEQ ID NO: 3095732 - RNA, 15 nt, Molluscum contagiosum virus
cgccgccgcgccgcu

SEQ ID NO: 3095733 - RNA, 15 nt, Molluscum contagiosum virus
cacuucgucaagcag

SEQ ID NO: 3095734 - RNA, 23 nt, Molluscum contagiosum virus
gauggcaagucucgcuuccggga

SEQ ID NO: 3095735 - RNA, 16 nt, Molluscum contagiosum virus
gggcggccgcagcaag

SEQ ID NO: 3095736 - RNA, 12 nt, Molluscum contagiosum virus
ggaagcugcacg

SEQ ID NO: 3095737 - RNA, 18 nt, Molluscum contagiosum virus
gcauaccugugccagcgc

SEQ ID NO: 3095738 - RNA, 17 nt, Molluscum contagiosum virus
cgacgccgagcccgagc

SEQ ID NO: 3095739 - RNA, 13 nt, Molluscum contagiosum virus
cugcuguuggccu

SEQ ID NO: 3095740 - RNA, 22 nt, Molluscum contagiosum virus
gccacucgcauugcguuggcaa

SEQ ID NO: 3095741 - RNA, 18 nt, Molluscum contagiosum virus
caucgcgcugcuggugcu

SEQ ID NO: 3095742 - RNA, 12 nt, Molluscum contagiosum virus
ccagcagcuccu

SEQ ID NO: 3095743 - RNA, 19 nt, Molluscum contagiosum virus
ccaugaggacagcuugcug

SEQ ID NO: 3095744 - RNA, 18 nt, Molluscum contagiosum virus
gacggcgugcgccgcucc

SEQ ID NO: 3095745 - RNA, 14 nt, Molluscum contagiosum virus
uguccgcaagcacg

SEQ ID NO: 3095746 - RNA, 22 nt, Molluscum contagiosum virus
gcccgagggcgggcacgugcug

SEQ ID NO: 3095747 - RNA, 15 nt, Molluscum contagiosum virus
ccggugucagccccg

SEQ ID NO: 3095748 - RNA, 16 nt, Molluscum contagiosum virus
acagcgggcgcugcuc

SEQ ID NO: 3095749 - RNA, 18 nt, Molluscum contagiosum virus
gggcacggcacccgccag

SEQ ID NO: 3095750 - RNA, 17 nt, Molluscum contagiosum virus
gugccagcagcauuuug

SEQ ID NO: 3095751 - RNA, 21 nt, Molluscum contagiosum virus
gagugucucgaaccgaggccg

SEQ ID NO: 3095752 - RNA, 19 nt, Molluscum contagiosum virus
uggagggcuccucuucaga

SEQ ID NO: 3095753 - RNA, 16 nt, Molluscum contagiosum virus
cuuguccgcggacgcg

SEQ ID NO: 3095754 - RNA, 14 nt, Molluscum contagiosum virus
guguuuugugccug

SEQ ID NO: 3095755 - RNA, 20 nt, Molluscum contagiosum virus
cgagcgggcaaugggcacgc

SEQ ID NO: 3095756 - RNA, 14 nt, Molluscum contagiosum virus
uggccaaggucucg

SEQ ID NO: 3095757 - RNA, 16 nt, Molluscum contagiosum virus
cgagcugugcgagcca

SEQ ID NO: 3095758 - RNA, 17 nt, Molluscum contagiosum virus
aauagcuggggcaaaga

SEQ ID NO: 3095759 - RNA, 15 nt, Molluscum contagiosum virus
cgcgcagcugcgccu

SEQ ID NO: 3095760 - RNA, 15 nt, Molluscum contagiosum virus
gcccgugccgccggc

SEQ ID NO: 3095761 - RNA, 19 nt, Molluscum contagiosum virus
caaggacaucuacagccgc

SEQ ID NO: 3095762 - RNA, 13 nt, Molluscum contagiosum virus
cguacccuggcag

SEQ ID NO: 3095763 - RNA, 19 nt, Molluscum contagiosum virus
ggccgcccacgcucaacca

SEQ ID NO: 3095764 - RNA, 14 nt, Molluscum contagiosum virus
cuuucucagagaaa

SEQ ID NO: 3095765 - RNA, 21 nt, Molluscum contagiosum virus
ggcaucuucggcguguucaug

SEQ ID NO: 3095766 - RNA, 12 nt, Molluscum contagiosum virus
augcacacacuc

SEQ ID NO: 3095767 - RNA, 12 nt, Molluscum contagiosum virus
ccaugcugaucu

SEQ ID NO: 3095768 - RNA, 13 nt, Molluscum contagiosum virus
gcgugcugggccc

SEQ ID NO: 3095769 - RNA, 17 nt, Molluscum contagiosum virus
gcuccucgagcgccgcc

SEQ ID NO: 3095770 - RNA, 12 nt, Molluscum contagiosum virus
cgagagcggcgu

SEQ ID NO: 3095771 - RNA, 14 nt, Molluscum contagiosum virus
guaccgcgcgcacg

SEQ ID NO: 3095772 - RNA, 16 nt, Molluscum contagiosum virus
ucgaagcccagcuuca

SEQ ID NO: 3095773 - RNA, 17 nt, Molluscum contagiosum virus
gcgucgacguggagccu

SEQ ID NO: 3095774 - RNA, 14 nt, Molluscum contagiosum virus
aagcccagcuucag

SEQ ID NO: 3095775 - RNA, 18 nt, Molluscum contagiosum virus
aaggcaaagccugcugcg

SEQ ID NO: 3095776 - RNA, 23 nt, Molluscum contagiosum virus
aagcucgcgcugcugacacgcuc

SEQ ID NO: 3095777 - RNA, 18 nt, Molluscum contagiosum virus
cuguaccugcgacagcug

SEQ ID NO: 3095778 - RNA, 15 nt, Molluscum contagiosum virus
aagcugucgcgcagc

SEQ ID NO: 3095779 - RNA, 18 nt, Molluscum contagiosum virus
aacaucuaugcacggcac

SEQ ID NO: 3095780 - RNA, 22 nt, Molluscum contagiosum virus
gcgggcacgugcugcugcggcu

SEQ ID NO: 3095781 - RNA, 15 nt, Molluscum contagiosum virus
caucucgugcaugac

SEQ ID NO: 3095782 - RNA, 12 nt, Molluscum contagiosum virus
cgcgcucuuccc

SEQ ID NO: 3095783 - RNA, 15 nt, Molluscum contagiosum virus
gaacgaggcugcugc

SEQ ID NO: 3095784 - RNA, 18 nt, Molluscum contagiosum virus
gcuggggcucgcgcaaua

SEQ ID NO: 3095785 - RNA, 20 nt, Molluscum contagiosum virus
ucgugcucguguugugccug

SEQ ID NO: 3095786 - RNA, 22 nt, Molluscum contagiosum virus
auggacauccucaccuuccugg

SEQ ID NO: 3095787 - RNA, 21 nt, Molluscum contagiosum virus
aacaccagcgugcccuucucc

SEQ ID NO: 3095788 - RNA, 15 nt, Molluscum contagiosum virus
gcaagccuggcuccu

SEQ ID NO: 3095789 - RNA, 17 nt, Molluscum contagiosum virus
gcgucaucgcugcacgc

SEQ ID NO: 3095790 - RNA, 14 nt, Molluscum contagiosum virus
cucgcccgcgcgcg

SEQ ID NO: 3095791 - RNA, 19 nt, Molluscum contagiosum virus
gcaggucggccagcagcuc

SEQ ID NO: 3095792 - RNA, 23 nt, Molluscum contagiosum virus
acuuuggcuacgacggcgacgag

SEQ ID NO: 3095793 - RNA, 16 nt, Molluscum contagiosum virus
cacucuuucacgcugc

SEQ ID NO: 3095794 - RNA, 17 nt, Molluscum contagiosum virus
ugccggcgcgugagcgc

SEQ ID NO: 3095795 - RNA, 16 nt, Molluscum contagiosum virus
guacgagcaggcgcag

SEQ ID NO: 3095796 - RNA, 21 nt, Molluscum contagiosum virus
cgagcggcuuuucgccggagg

SEQ ID NO: 3095797 - RNA, 21 nt, Molluscum contagiosum virus
cgcagagccugcugcucuucg

SEQ ID NO: 3095798 - RNA, 16 nt, Molluscum contagiosum virus
gcugcgcgcucuggag

SEQ ID NO: 3095799 - RNA, 18 nt, Molluscum contagiosum virus
gacggacgaagagacgcc

SEQ ID NO: 3095800 - RNA, 15 nt, Molluscum contagiosum virus
cgcgauggcgccugc

SEQ ID NO: 3095801 - RNA, 20 nt, Molluscum contagiosum virus
ucgacugcgccuucugccug

SEQ ID NO: 3095802 - RNA, 16 nt, Molluscum contagiosum virus
guccacgacgagccug

SEQ ID NO: 3095803 - RNA, 21 nt, Molluscum contagiosum virus
cgccgcgcgcgauguacaagc

SEQ ID NO: 3095804 - RNA, 12 nt, Molluscum contagiosum virus
cacugcagcagc

SEQ ID NO: 3095805 - RNA, 13 nt, Molluscum contagiosum virus
gacuacgcacggc

SEQ ID NO: 3095806 - RNA, 18 nt, Molluscum contagiosum virus
uggcggggaucuugcgug

SEQ ID NO: 3095807 - RNA, 19 nt, Molluscum contagiosum virus
uaccggagacaccagcucc

SEQ ID NO: 3095808 - RNA, 21 nt, Molluscum contagiosum virus
aucccagaaaacgcacugucg

SEQ ID NO: 3095809 - RNA, 18 nt, Molluscum contagiosum virus
cgcggaacugacugcugc

SEQ ID NO: 3095810 - RNA, 19 nt, Molluscum contagiosum virus
ggggcucuccuacacauuc

SEQ ID NO: 3095811 - RNA, 18 nt, Molluscum contagiosum virus
aaaacgcgcggcagcagc

SEQ ID NO: 3095812 - RNA, 16 nt, Molluscum contagiosum virus
aagaggugcgugcccc

SEQ ID NO: 3095813 - RNA, 17 nt, Molluscum contagiosum virus
cccagcagcgagaccau

SEQ ID NO: 3095814 - RNA, 17 nt, Molluscum contagiosum virus
cguacagcgggcgcugc

SEQ ID NO: 3095815 - RNA, 13 nt, Molluscum contagiosum virus
gcucuacggcgug

SEQ ID NO: 3095816 - RNA, 18 nt, Molluscum contagiosum virus
ggcgagacgugcggcacg

SEQ ID NO: 3095817 - RNA, 21 nt, Molluscum contagiosum virus
gcgcagcauucccggcgcgcg

SEQ ID NO: 3095818 - RNA, 21 nt, Molluscum contagiosum virus
gcagccgcguagcuagcucug

SEQ ID NO: 3095819 - RNA, 12 nt, Molluscum contagiosum virus
gaaggagcccuu

SEQ ID NO: 3095820 - RNA, 18 nt, Molluscum contagiosum virus
agggcggcgccugcgccu

SEQ ID NO: 3095821 - RNA, 13 nt, Molluscum contagiosum virus
acuaccugcugcu

SEQ ID NO: 3095822 - RNA, 13 nt, Molluscum contagiosum virus
cacugugcuggcg

SEQ ID NO: 3095823 - RNA, 14 nt, Molluscum contagiosum virus
cugcacgagcugcu

SEQ ID NO: 3095824 - RNA, 15 nt, Molluscum contagiosum virus
gccucgcgagggcuc

SEQ ID NO: 3095825 - RNA, 11 nt, Molluscum contagiosum virus
caccaggaacg

SEQ ID NO: 3095826 - RNA, 19 nt, Molluscum contagiosum virus
guggaguuuagcaagguca

SEQ ID NO: 3095827 - RNA, 21 nt, Molluscum contagiosum virus
gcgccugcacuacugcuccau

SEQ ID NO: 3095828 - RNA, 15 nt, Molluscum contagiosum virus
acuguugguuaauuu

SEQ ID NO: 3095829 - RNA, 18 nt, Molluscum contagiosum virus
gccgcuucgggcucagca

SEQ ID NO: 3095830 - RNA, 23 nt, Molluscum contagiosum virus
aucgacugcgccuucugccugcc

SEQ ID NO: 3095831 - RNA, 22 nt, Molluscum contagiosum virus
cgccagcuaagccggagcagcc

SEQ ID NO: 3095832 - RNA, 11 nt, Molluscum contagiosum virus
aaguuccugca

SEQ ID NO: 3095833 - RNA, 12 nt, Molluscum contagiosum virus
cgccgccaugcu

SEQ ID NO: 3095834 - RNA, 23 nt, Molluscum contagiosum virus
caggccggucgcggaagacgugc

SEQ ID NO: 3095835 - RNA, 13 nt, Molluscum contagiosum virus
gcgcugcucgccg

SEQ ID NO: 3095836 - RNA, 22 nt, Molluscum contagiosum virus
aaacgcacagccccugcugcuc

SEQ ID NO: 3095837 - RNA, 15 nt, Molluscum contagiosum virus
ucuuucauggcuccc

SEQ ID NO: 3095838 - RNA, 19 nt, Molluscum contagiosum virus
gcaugggcccuggcggcuu

SEQ ID NO: 3095839 - RNA, 13 nt, Molluscum contagiosum virus
gagcacuggcugg

SEQ ID NO: 3095840 - RNA, 18 nt, Molluscum contagiosum virus
cagcucgucaacggugcg

SEQ ID NO: 3095841 - RNA, 20 nt, Molluscum contagiosum virus
accggcaagcuucgggccgc

SEQ ID NO: 3095842 - RNA, 13 nt, Molluscum contagiosum virus
ccgcagcccgagc

SEQ ID NO: 3095843 - RNA, 10 nt, Molluscum contagiosum virus
gcggcagcag

SEQ ID NO: 3095844 - RNA, 18 nt, Molluscum contagiosum virus
gagaacucgcgugccuug

SEQ ID NO: 3095845 - RNA, 19 nt, Molluscum contagiosum virus
ccgcgcgcucucacgcuuc

SEQ ID NO: 3095846 - RNA, 13 nt, Molluscum contagiosum virus
gcggcgccuugcu

SEQ ID NO: 3095847 - RNA, 14 nt, Molluscum contagiosum virus
ugcucuucggggac

SEQ ID NO: 3095848 - RNA, 13 nt, Molluscum contagiosum virus
gcagcccaccagc

SEQ ID NO: 3095849 - RNA, 20 nt, Molluscum contagiosum virus
gagaucuuugaccgcuucga

SEQ ID NO: 3095850 - RNA, 13 nt, Molluscum contagiosum virus
gcccgccagcaug

SEQ ID NO: 3095851 - RNA, 18 nt, Molluscum contagiosum virus
gcaugugcgagcgcagcu

SEQ ID NO: 3095852 - RNA, 14 nt, Molluscum contagiosum virus
gcacgauguacucc

SEQ ID NO: 3095853 - RNA, 14 nt, Molluscum contagiosum virus
caagguggggcgca

SEQ ID NO: 3095854 - RNA, 17 nt, Molluscum contagiosum virus
gcgucucugcgcagagc

SEQ ID NO: 3095855 - RNA, 15 nt, Molluscum contagiosum virus
ccgcgcgcgcuccga

SEQ ID NO: 3095856 - RNA, 14 nt, Molluscum contagiosum virus
cgagcugugcauug

SEQ ID NO: 3095857 - RNA, 17 nt, Molluscum contagiosum virus
cucggcguggugcuggc

SEQ ID NO: 3095858 - RNA, 17 nt, Molluscum contagiosum virus
gccgccaaugcugccgu

SEQ ID NO: 3095859 - RNA, 23 nt, Molluscum contagiosum virus
gacgggcucaucccgggacacga

SEQ ID NO: 3095860 - RNA, 16 nt, Molluscum contagiosum virus
cuccacaugccuucag

SEQ ID NO: 3095861 - RNA, 13 nt, Molluscum contagiosum virus
cgcugcagcaccu

SEQ ID NO: 3095862 - RNA, 15 nt, Molluscum contagiosum virus
ggacggcgcgcagcg

SEQ ID NO: 3095863 - RNA, 17 nt, Molluscum contagiosum virus
ccugcacuacugcucca

SEQ ID NO: 3095864 - RNA, 19 nt, Molluscum contagiosum virus
agugcgggagcaagucugc

SEQ ID NO: 3095865 - RNA, 16 nt, Molluscum contagiosum virus
aggucuacgaggagca

SEQ ID NO: 3095866 - RNA, 23 nt, Molluscum contagiosum virus
uguguucccggcugccgcugccu

SEQ ID NO: 3095867 - RNA, 18 nt, Molluscum contagiosum virus
aagaacaugugcuccgcc

SEQ ID NO: 3095868 - RNA, 17 nt, Molluscum contagiosum virus
cacgagauggcugcucu

SEQ ID NO: 3095869 - RNA, 14 nt, Molluscum contagiosum virus
ccucgcgcacagac

SEQ ID NO: 3095870 - RNA, 22 nt, Molluscum contagiosum virus
ccgcgucgcgcacgcgcgcuua

SEQ ID NO: 3095871 - RNA, 15 nt, Molluscum contagiosum virus
agucgcuagaggaga

SEQ ID NO: 3095872 - RNA, 17 nt, Molluscum contagiosum virus
ccgcgugcaugcccagc

SEQ ID NO: 3095873 - RNA, 14 nt, Molluscum contagiosum virus
acuagugcugcugg

SEQ ID NO: 3095874 - RNA, 19 nt, Molluscum contagiosum virus
acgcuggacuuccugcugc

SEQ ID NO: 3095875 - RNA, 16 nt, Molluscum contagiosum virus
cgagcacagcgcgcgg

SEQ ID NO: 3095876 - RNA, 23 nt, Molluscum contagiosum virus
aacacagugcguuugccagaagc

SEQ ID NO: 3095877 - RNA, 20 nt, Molluscum contagiosum virus
cacgcgaauguccggcgcug

SEQ ID NO: 3095878 - RNA, 20 nt, Molluscum contagiosum virus
cuauuaccugaccgacggcg

SEQ ID NO: 3095879 - RNA, 22 nt, Molluscum contagiosum virus
cgcgccgaggacgcgcccggga

SEQ ID NO: 3095880 - RNA, 18 nt, Molluscum contagiosum virus
gcuguccuucugguuccu

SEQ ID NO: 3095881 - RNA, 12 nt, Molluscum contagiosum virus
gcuggcggggac

SEQ ID NO: 3095882 - RNA, 17 nt, Molluscum contagiosum virus
caagcccggcaugggca

SEQ ID NO: 3095883 - RNA, 20 nt, Molluscum contagiosum virus
ggcucguccucgggcgccaa

SEQ ID NO: 3095884 - RNA, 19 nt, Molluscum contagiosum virus
caggagcauggccgcgucc

SEQ ID NO: 3095885 - RNA, 15 nt, Molluscum contagiosum virus
uuugcgcgagagcua

SEQ ID NO: 3095886 - RNA, 18 nt, Molluscum contagiosum virus
ucccugccacaugcagua

SEQ ID NO: 3095887 - RNA, 15 nt, Molluscum contagiosum virus
guccucggccagagc

SEQ ID NO: 3095888 - RNA, 13 nt, Molluscum contagiosum virus
ggcugcccgcgga

SEQ ID NO: 3095889 - RNA, 15 nt, Molluscum contagiosum virus
ugcugcgcagcaucc

SEQ ID NO: 3095890 - RNA, 13 nt, Molluscum contagiosum virus
ggcguugcugcug

SEQ ID NO: 3095891 - RNA, 22 nt, Molluscum contagiosum virus
acgacucgcgucugcaaggccu

SEQ ID NO: 3095892 - RNA, 19 nt, Molluscum contagiosum virus
ccugucaagacgggcacgc

SEQ ID NO: 3095893 - RNA, 20 nt, Molluscum contagiosum virus
gcuacgucgcggcgcacggu

SEQ ID NO: 3095894 - RNA, 20 nt, Molluscum contagiosum virus
aucagguccacguggugguu

SEQ ID NO: 3095895 - RNA, 23 nt, Molluscum contagiosum virus
agcgcguucgcgcgugcuggacg

SEQ ID NO: 3095896 - RNA, 19 nt, Molluscum contagiosum virus
gugaacgaggcugcugccg

SEQ ID NO: 3095897 - RNA, 14 nt, Molluscum contagiosum virus
cgccuucugccugc

SEQ ID NO: 3095898 - RNA, 17 nt, Molluscum contagiosum virus
ccgcauguccacggaca

SEQ ID NO: 3095899 - RNA, 23 nt, Molluscum contagiosum virus
ccugugcugugcagaacuucucg

SEQ ID NO: 3095900 - RNA, 20 nt, Molluscum contagiosum virus
ugacacaccgcguggacaac

SEQ ID NO: 3095901 - RNA, 14 nt, Molluscum contagiosum virus
gccgcuuccuggca

SEQ ID NO: 3095902 - RNA, 18 nt, Molluscum contagiosum virus
aggaucggagcgcagcug

SEQ ID NO: 3095903 - RNA, 22 nt, Molluscum contagiosum virus
accugggcgucgugcaccugga

SEQ ID NO: 3095904 - RNA, 18 nt, Molluscum contagiosum virus
cuaagcuaaaagagcugc

SEQ ID NO: 3095905 - RNA, 15 nt, Molluscum contagiosum virus
ucgggaagcccucag

SEQ ID NO: 3095906 - RNA, 15 nt, Molluscum contagiosum virus
gcagcggcaaaggcc

SEQ ID NO: 3095907 - RNA, 15 nt, Molluscum contagiosum virus
aaguguacuauuaca

SEQ ID NO: 3095908 - RNA, 18 nt, Molluscum contagiosum virus
gcgcgaccuacuccuggc

SEQ ID NO: 3095909 - RNA, 14 nt, Molluscum contagiosum virus
acggcgcgcaccua

SEQ ID NO: 3095910 - RNA, 20 nt, Molluscum contagiosum virus
aggcgcgcucuacgagacuc

SEQ ID NO: 3095911 - RNA, 22 nt, Molluscum contagiosum virus
gacuccgaggcagguuccggug

SEQ ID NO: 3095912 - RNA, 15 nt, Molluscum contagiosum virus
gcugguucugcgcug

SEQ ID NO: 3095913 - RNA, 20 nt, Molluscum contagiosum virus
gcagcaggugcacgugcugc

SEQ ID NO: 3095914 - RNA, 17 nt, Molluscum contagiosum virus
uggacgcgcaagugugc

SEQ ID NO: 3095915 - RNA, 16 nt, Molluscum contagiosum virus
ccggcgugagcucguc

SEQ ID NO: 3095916 - RNA, 14 nt, Molluscum contagiosum virus
cccucgugcugggc

SEQ ID NO: 3095917 - RNA, 14 nt, Molluscum contagiosum virus
guguccucuucaca

SEQ ID NO: 3095918 - RNA, 19 nt, Molluscum contagiosum virus
cugaccgcgggcacgggca

SEQ ID NO: 3095919 - RNA, 21 nt, Molluscum contagiosum virus
gcaggaaaggcacccgcagga

SEQ ID NO: 3095920 - RNA, 15 nt, Molluscum contagiosum virus
gccagcgauugcccg

SEQ ID NO: 3095921 - RNA, 17 nt, Molluscum contagiosum virus
gcaaggcaugcgcgcag

SEQ ID NO: 3095922 - RNA, 14 nt, Molluscum contagiosum virus
cgggugcauacgca

SEQ ID NO: 3095923 - RNA, 17 nt, Molluscum contagiosum virus
gccgcgggcgcagagcc

SEQ ID NO: 3095924 - RNA, 13 nt, Molluscum contagiosum virus
ggucgaggagggc

SEQ ID NO: 3095925 - RNA, 19 nt, Molluscum contagiosum virus
cuccacuaccaacucugug

SEQ ID NO: 3095926 - RNA, 22 nt, Molluscum contagiosum virus
gauccuccggaugaacagcuuc

SEQ ID NO: 3095927 - RNA, 21 nt, Molluscum contagiosum virus
cacgcaagcuuugugcucgcu

SEQ ID NO: 3095928 - RNA, 19 nt, Molluscum contagiosum virus
cuccgaccgugcccuggac

SEQ ID NO: 3095929 - RNA, 12 nt, Molluscum contagiosum virus
gcgcucuucccg

SEQ ID NO: 3095930 - RNA, 17 nt, Molluscum contagiosum virus
cugcaggaccugcuggu

SEQ ID NO: 3095931 - RNA, 17 nt, Molluscum contagiosum virus
cgcacgaccacgugcag

SEQ ID NO: 3095932 - RNA, 15 nt, Molluscum contagiosum virus
gccugcugcagcucc

SEQ ID NO: 3095933 - RNA, 23 nt, Molluscum contagiosum virus
cacagucuccacgcgugcgcgcc

SEQ ID NO: 3095934 - RNA, 18 nt, Molluscum contagiosum virus
gcacgccgcucggcacug

SEQ ID NO: 3095935 - RNA, 16 nt, Molluscum contagiosum virus
cacgcuacgcagcgcg

SEQ ID NO: 3095936 - RNA, 16 nt, Molluscum contagiosum virus
acgcgucgcgcgccgc

SEQ ID NO: 3095937 - RNA, 18 nt, Molluscum contagiosum virus
ugccugagaagcuguacc

SEQ ID NO: 3095938 - RNA, 17 nt, Molluscum contagiosum virus
gagagcgcgcggcgccg

SEQ ID NO: 3095939 - RNA, 14 nt, Molluscum contagiosum virus
cgaacugcccggcg

SEQ ID NO: 3095940 - RNA, 11 nt, Molluscum contagiosum virus
cgaccagcugg

SEQ ID NO: 3095941 - RNA, 22 nt, Molluscum contagiosum virus
uccgagcgaaccgcggcagccu

SEQ ID NO: 3095942 - RNA, 20 nt, Molluscum contagiosum virus
gcgcgcugcucuggagcaag

SEQ ID NO: 3095943 - RNA, 18 nt, Molluscum contagiosum virus
gacccagcaaggcccacu

SEQ ID NO: 3095944 - RNA, 14 nt, Molluscum contagiosum virus
gugugagucgcccu

SEQ ID NO: 3095945 - RNA, 18 nt, Molluscum contagiosum virus
cacaagccguugucuugg

SEQ ID NO: 3095946 - RNA, 14 nt, Molluscum contagiosum virus
aaaggcaccugcgg

SEQ ID NO: 3095947 - RNA, 17 nt, Molluscum contagiosum virus
acugcccggcggcaagc

SEQ ID NO: 3095948 - RNA, 20 nt, Molluscum contagiosum virus
guuuucuuucauggcucccg

SEQ ID NO: 3095949 - RNA, 16 nt, Molluscum contagiosum virus
cgcgccgcgcugcugg

SEQ ID NO: 3095950 - RNA, 22 nt, Molluscum contagiosum virus
cucgagcaggucaucgggcugc

SEQ ID NO: 3095951 - RNA, 14 nt, Molluscum contagiosum virus
cugccgcagagccg

SEQ ID NO: 3095952 - RNA, 16 nt, Molluscum contagiosum virus
guuucgcaugcacagc

SEQ ID NO: 3095953 - RNA, 17 nt, Molluscum contagiosum virus
gcuaccugaagcuggac

SEQ ID NO: 3095954 - RNA, 17 nt, Molluscum contagiosum virus
gcuagcucuggcagccc

SEQ ID NO: 3095955 - RNA, 23 nt, Molluscum contagiosum virus
aagcuggcgggugccgugccccu

SEQ ID NO: 3095956 - RNA, 22 nt, Molluscum contagiosum virus
ucccugcauacacuuccugcua

SEQ ID NO: 3095957 - RNA, 19 nt, Molluscum contagiosum virus
acacgagugcccgcgcgcu

SEQ ID NO: 3095958 - RNA, 13 nt, Molluscum contagiosum virus
ucaagauccaagc

SEQ ID NO: 3095959 - RNA, 19 nt, Molluscum contagiosum virus
ugcgcgcguugccugagaa

SEQ ID NO: 3095960 - RNA, 18 nt, Molluscum contagiosum virus
cgagauucguggcgagca

SEQ ID NO: 3095961 - RNA, 10 nt, Molluscum contagiosum virus
gcccagcgcc

SEQ ID NO: 3095962 - RNA, 17 nt, Molluscum contagiosum virus
acgcgcgcgugcugcua

SEQ ID NO: 3095963 - RNA, 19 nt, Molluscum contagiosum virus
gcuacagcagccgcagccc

SEQ ID NO: 3095964 - RNA, 21 nt, Molluscum contagiosum virus
ugcugcccccgccgcggcgcc

SEQ ID NO: 3095965 - RNA, 14 nt, Molluscum contagiosum virus
gagcggccuccgga

SEQ ID NO: 3095966 - RNA, 14 nt, Molluscum contagiosum virus
aguugcgagccagc

SEQ ID NO: 3095967 - RNA, 18 nt, Molluscum contagiosum virus
uaguagcagcuucuugga

SEQ ID NO: 3095968 - RNA, 21 nt, Molluscum contagiosum virus
cgcggaccuaaagcugcuggc

SEQ ID NO: 3095969 - RNA, 19 nt, Molluscum contagiosum virus
acugcguugucuccuccug

SEQ ID NO: 3095970 - RNA, 18 nt, Molluscum contagiosum virus
uguucaccauccagccgu

SEQ ID NO: 3095971 - RNA, 22 nt, Molluscum contagiosum virus
gacacggagcggaucgugcugg

SEQ ID NO: 3095972 - RNA, 20 nt, Molluscum contagiosum virus
agacuucuugcacgcucggc

SEQ ID NO: 3095973 - RNA, 20 nt, Molluscum contagiosum virus
ccuggcgagcgcucugcauu

SEQ ID NO: 3095974 - RNA, 20 nt, Molluscum contagiosum virus
ucuuccagaagguacugaac

SEQ ID NO: 3095975 - RNA, 18 nt, Molluscum contagiosum virus
ugcaacgcaggacacugu

SEQ ID NO: 3095976 - RNA, 16 nt, Molluscum contagiosum virus
ccaaggacgacaacac

SEQ ID NO: 3095977 - RNA, 15 nt, Molluscum contagiosum virus
cgacgacggcacgcu

SEQ ID NO: 3095978 - RNA, 15 nt, Molluscum contagiosum virus
ggcgccggcucugcc

SEQ ID NO: 3095979 - RNA, 21 nt, Molluscum contagiosum virus
gugccgggcgccggcucugcc

SEQ ID NO: 3095980 - RNA, 19 nt, Molluscum contagiosum virus
gcgcagguagcggcucgcg

SEQ ID NO: 3095981 - RNA, 24 nt, Molluscum contagiosum virus
cgagcacguuccaaaagacagagg

SEQ ID NO: 3095982 - RNA, 13 nt, Molluscum contagiosum virus
caaggaucucugc

SEQ ID NO: 3095983 - RNA, 12 nt, Molluscum contagiosum virus
uccagcgcauca

SEQ ID NO: 3095984 - RNA, 15 nt, Molluscum contagiosum virus
ugaccagcuccacgu

SEQ ID NO: 3095985 - RNA, 19 nt, Molluscum contagiosum virus
cauccggccgaggcacgcg

SEQ ID NO: 3095986 - RNA, 20 nt, Molluscum contagiosum virus
auccagcccugugcccgagu

SEQ ID NO: 3095987 - RNA, 18 nt, Molluscum contagiosum virus
acgcagcgcgagcugugc

SEQ ID NO: 3095988 - RNA, 16 nt, Molluscum contagiosum virus
gagcccgaccccaaga

SEQ ID NO: 3095989 - RNA, 21 nt, Molluscum contagiosum virus
ccagaggguggcuugcugcag

SEQ ID NO: 3095990 - RNA, 16 nt, Molluscum contagiosum virus
cgggcgcgccaacgac

SEQ ID NO: 3095991 - RNA, 22 nt, Molluscum contagiosum virus
cugcgcacacgucagccgcacg

SEQ ID NO: 3095992 - RNA, 23 nt, Molluscum contagiosum virus
gagacuucuccgaccgugcccug

SEQ ID NO: 3095993 - RNA, 14 nt, Molluscum contagiosum virus
ccagcggcugcccg

SEQ ID NO: 3095994 - RNA, 13 nt, Molluscum contagiosum virus
ccucggccagagc

SEQ ID NO: 3095995 - RNA, 18 nt, Molluscum contagiosum virus
accuuggcgcugcacagu

SEQ ID NO: 3095996 - RNA, 19 nt, Molluscum contagiosum virus
ggcacccaccaggaacagg

SEQ ID NO: 3095997 - RNA, 23 nt, Molluscum contagiosum virus
ugaucuccacaugccuucaggaa

SEQ ID NO: 3095998 - RNA, 13 nt, Molluscum contagiosum virus
gacuugcugcgga

SEQ ID NO: 3095999 - RNA, 12 nt, Molluscum contagiosum virus
aaguccagcgcg

SEQ ID NO: 3096000 - RNA, 15 nt, Molluscum contagiosum virus
cugggaaagggcugc

SEQ ID NO: 3096001 - RNA, 19 nt, Molluscum contagiosum virus
cacugugcugacccccucc

SEQ ID NO: 3096002 - RNA, 21 nt, Molluscum contagiosum virus
gcgcggggcacugcgcacgga

SEQ ID NO: 3096003 - RNA, 15 nt, Molluscum contagiosum virus
uccggcgcuggagaa

SEQ ID NO: 3096004 - RNA, 19 nt, Molluscum contagiosum virus
uguaccugcgacagcugcu

SEQ ID NO: 3096005 - RNA, 14 nt, Molluscum contagiosum virus
cgagcgcgcgcugc

SEQ ID NO: 3096006 - RNA, 20 nt, Molluscum contagiosum virus
gaggcuccugccgucgcccg

SEQ ID NO: 3096007 - RNA, 16 nt, Molluscum contagiosum virus
cgccuuccugcuggcg

SEQ ID NO: 3096008 - RNA, 22 nt, Molluscum contagiosum virus
ugaaaagcuauccgcugucuga

SEQ ID NO: 3096009 - RNA, 15 nt, Molluscum contagiosum virus
gacagcgugcgcggg

SEQ ID NO: 3096010 - RNA, 21 nt, Molluscum contagiosum virus
cugccggcgcgugagcgccua

SEQ ID NO: 3096011 - RNA, 22 nt, Molluscum contagiosum virus
ccgagguggcacccuggcugcu

SEQ ID NO: 3096012 - RNA, 17 nt, Molluscum contagiosum virus
ugaaguccucucucccc

SEQ ID NO: 3096013 - RNA, 22 nt, Molluscum contagiosum virus
ggcgcaggugcgggcuagcacg

SEQ ID NO: 3096014 - RNA, 17 nt, Molluscum contagiosum virus
gcagacguacgagcagg

SEQ ID NO: 3096015 - RNA, 13 nt, Molluscum contagiosum virus
cgaacaccuccug

SEQ ID NO: 3096016 - RNA, 21 nt, Molluscum contagiosum virus
aagagcacgaugcccagcagc

SEQ ID NO: 3096017 - RNA, 22 nt, Molluscum contagiosum virus
ugcugcucgacgggcgcagcca

SEQ ID NO: 3096018 - RNA, 18 nt, Molluscum contagiosum virus
uagcaccgcaugggcccu

SEQ ID NO: 3096019 - RNA, 16 nt, Molluscum contagiosum virus
cugcgcucggcgcgcg

SEQ ID NO: 3096020 - RNA, 20 nt, Molluscum contagiosum virus
ggccugcguggacagcaucc

SEQ ID NO: 3096021 - RNA, 15 nt, Molluscum contagiosum virus
cgcuggcacggccgg

SEQ ID NO: 3096022 - RNA, 17 nt, Molluscum contagiosum virus
agcgucgaacuucuccu

SEQ ID NO: 3096023 - RNA, 15 nt, Molluscum contagiosum virus
cugcacgggcacgcc

SEQ ID NO: 3096024 - RNA, 19 nt, Molluscum contagiosum virus
gacgugcugcugcagaacu

SEQ ID NO: 3096025 - RNA, 16 nt, Molluscum contagiosum virus
cggcuuguagucgccc

SEQ ID NO: 3096026 - RNA, 15 nt, Molluscum contagiosum virus
cgcaggaccgcgacc

SEQ ID NO: 3096027 - RNA, 15 nt, Molluscum contagiosum virus
ccaugcuccugaucu

SEQ ID NO: 3096028 - RNA, 19 nt, Molluscum contagiosum virus
cgugcgcgacggcgagcuc

SEQ ID NO: 3096029 - RNA, 21 nt, Molluscum contagiosum virus
ugccagcgggaaacugcugcc

SEQ ID NO: 3096030 - RNA, 12 nt, Molluscum contagiosum virus
gcucgccagcag

SEQ ID NO: 3096031 - RNA, 16 nt, Molluscum contagiosum virus
ccgcggagcugugcca

SEQ ID NO: 3096032 - RNA, 14 nt, Molluscum contagiosum virus
ccuuuguggacgcg

SEQ ID NO: 3096033 - RNA, 18 nt, Molluscum contagiosum virus
cgcugcuccccgccagca

SEQ ID NO: 3096034 - RNA, 20 nt, Molluscum contagiosum virus
caccucaagaagacgcagag

SEQ ID NO: 3096035 - RNA, 19 nt, Molluscum contagiosum virus
cucgaggcgcuugggcacu

SEQ ID NO: 3096036 - RNA, 21 nt, Molluscum contagiosum virus
uuguuuuucgggaagcacagu

SEQ ID NO: 3096037 - RNA, 22 nt, Molluscum contagiosum virus
gcuccgcgcggcgcucugccac

SEQ ID NO: 3096038 - RNA, 14 nt, Molluscum contagiosum virus
aggaucccugcccg

SEQ ID NO: 3096039 - RNA, 12 nt, Molluscum contagiosum virus
cagcucgcgccg

SEQ ID NO: 3096040 - RNA, 16 nt, Molluscum contagiosum virus
gcgccuagcuccagcg

SEQ ID NO: 3096041 - RNA, 14 nt, Molluscum contagiosum virus
gcagauuggaggag

SEQ ID NO: 3096042 - RNA, 16 nt, Molluscum contagiosum virus
caggucuucaacgagg

SEQ ID NO: 3096043 - RNA, 12 nt, Molluscum contagiosum virus
cucgcugcugcc

SEQ ID NO: 3096044 - RNA, 18 nt, Molluscum contagiosum virus
aacaagaucaccccgcag

SEQ ID NO: 3096045 - RNA, 13 nt, Molluscum contagiosum virus
gcgggcugggaaa

SEQ ID NO: 3096046 - RNA, 13 nt, Molluscum contagiosum virus
ccagcgugcagac

SEQ ID NO: 3096047 - RNA, 16 nt, Molluscum contagiosum virus
cugcguuuccagggca

SEQ ID NO: 3096048 - RNA, 16 nt, Molluscum contagiosum virus
cggccucgccuccggg

SEQ ID NO: 3096049 - RNA, 23 nt, Molluscum contagiosum virus
ccaggaaaggcaggagccucugu

SEQ ID NO: 3096050 - RNA, 16 nt, Molluscum contagiosum virus
caagcacgagcugcug

SEQ ID NO: 3096051 - RNA, 20 nt, Molluscum contagiosum virus
gcgggcguggggagcuggag

SEQ ID NO: 3096052 - RNA, 19 nt, Molluscum contagiosum virus
ggacgcaggaugcuggggc

SEQ ID NO: 3096053 - RNA, 21 nt, Molluscum contagiosum virus
gagcgcuucuuccggcagcug

SEQ ID NO: 3096054 - RNA, 11 nt, Molluscum contagiosum virus
gagguggccaa

SEQ ID NO: 3096055 - RNA, 15 nt, Molluscum contagiosum virus
ggcgagauugagcuc

SEQ ID NO: 3096056 - RNA, 14 nt, Molluscum contagiosum virus
aggagacguagagc

SEQ ID NO: 3096057 - RNA, 20 nt, Molluscum contagiosum virus
gcugcucgcgcgcgcacgcc

SEQ ID NO: 3096058 - RNA, 14 nt, Molluscum contagiosum virus
agcugcugcgcucc

SEQ ID NO: 3096059 - RNA, 14 nt, Molluscum contagiosum virus
agcgguuccugcuu

SEQ ID NO: 3096060 - RNA, 14 nt, Molluscum contagiosum virus
agccgcuccugguc

SEQ ID NO: 3096061 - RNA, 15 nt, Molluscum contagiosum virus
agcugguccagggcu

SEQ ID NO: 3096062 - RNA, 16 nt, Molluscum contagiosum virus
gaaccauuuuuugccc

SEQ ID NO: 3096063 - RNA, 15 nt, Molluscum contagiosum virus
gcucguccagcugcg

SEQ ID NO: 3096064 - RNA, 16 nt, Molluscum contagiosum virus
acugcaagaucuauca

SEQ ID NO: 3096065 - RNA, 15 nt, Molluscum contagiosum virus
gcccugcacgaccgc

SEQ ID NO: 3096066 - RNA, 19 nt, Molluscum contagiosum virus
gguccgcguuggcagcggc

SEQ ID NO: 3096067 - RNA, 18 nt, Molluscum contagiosum virus
gagcaggacgugcacgug

SEQ ID NO: 3096068 - RNA, 13 nt, Molluscum contagiosum virus
gugcccgagcccg

SEQ ID NO: 3096069 - RNA, 21 nt, Molluscum contagiosum virus
ccacgcaggacuggcaccugc

SEQ ID NO: 3096070 - RNA, 18 nt, Molluscum contagiosum virus
accguggaggagccgccc

SEQ ID NO: 3096071 - RNA, 17 nt, Molluscum contagiosum virus
cggcugccgcugccugu

SEQ ID NO: 3096072 - RNA, 16 nt, Molluscum contagiosum virus
gcgagcgacggcaggc

SEQ ID NO: 3096073 - RNA, 18 nt, Molluscum contagiosum virus
cagucgcaguacccgagc

SEQ ID NO: 3096074 - RNA, 20 nt, Molluscum contagiosum virus
gcagagguaaucccgagcuu

SEQ ID NO: 3096075 - RNA, 23 nt, Molluscum contagiosum virus
agcucgcgcaguuagaaaugcuu

SEQ ID NO: 3096076 - RNA, 15 nt, Molluscum contagiosum virus
gccacucuccuucag

SEQ ID NO: 3096077 - RNA, 14 nt, Molluscum contagiosum virus
ggacgagcugcuuc

SEQ ID NO: 3096078 - RNA, 12 nt, Molluscum contagiosum virus
guccacguggug

SEQ ID NO: 3096079 - RNA, 19 nt, Molluscum contagiosum virus
ccccgcugggccgcaugca

SEQ ID NO: 3096080 - RNA, 14 nt, Molluscum contagiosum virus
accgcaaccagcug

SEQ ID NO: 3096081 - RNA, 11 nt, Molluscum contagiosum virus
ggaaaggcacc

SEQ ID NO: 3096082 - RNA, 23 nt, Molluscum contagiosum virus
gcagcgucgcggagcgcgcacgg

SEQ ID NO: 3096083 - RNA, 19 nt, Molluscum contagiosum virus
ccugcggacccgccggugc

SEQ ID NO: 3096084 - RNA, 13 nt, Molluscum contagiosum virus
cacgcgcccgccg

SEQ ID NO: 3096085 - RNA, 16 nt, Molluscum contagiosum virus
cugcgcuucgagcugc

SEQ ID NO: 3096086 - RNA, 14 nt, Molluscum contagiosum virus
cuacgagcagcgcu

SEQ ID NO: 3096087 - RNA, 19 nt, Molluscum contagiosum virus
cgcagugcggccagcaccg

SEQ ID NO: 3096088 - RNA, 21 nt, Molluscum contagiosum virus
cgauguagguacccgcaaccc

SEQ ID NO: 3096089 - RNA, 14 nt, Molluscum contagiosum virus
cccgcugcgcgcuc

SEQ ID NO: 3096090 - RNA, 21 nt, Molluscum contagiosum virus
ccuaccugcaggaggaccgcg

SEQ ID NO: 3096091 - RNA, 16 nt, Molluscum contagiosum virus
gcaagaggggagccag

SEQ ID NO: 3096092 - RNA, 19 nt, Molluscum contagiosum virus
cucgcguccgcgcagcucg

SEQ ID NO: 3096093 - RNA, 15 nt, Molluscum contagiosum virus
cacgagggccuuggc

SEQ ID NO: 3096094 - RNA, 22 nt, Molluscum contagiosum virus
ucaaccccucggaggaaaagca

SEQ ID NO: 3096095 - RNA, 15 nt, Molluscum contagiosum virus
gucuugcgcagcgcc

SEQ ID NO: 3096096 - RNA, 18 nt, Molluscum contagiosum virus
cgcgcaaaaggcacgagg

SEQ ID NO: 3096097 - RNA, 17 nt, Molluscum contagiosum virus
ggcagcuggagcugccg

SEQ ID NO: 3096098 - RNA, 17 nt, Molluscum contagiosum virus
gcgccuuuccucucccg

SEQ ID NO: 3096099 - RNA, 17 nt, Molluscum contagiosum virus
cuggagcuggcugggca

SEQ ID NO: 3096100 - RNA, 17 nt, Molluscum contagiosum virus
gauggucucgcugcugg

SEQ ID NO: 3096101 - RNA, 21 nt, Molluscum contagiosum virus
acucaauucaaguuugacaag

SEQ ID NO: 3096102 - RNA, 16 nt, Molluscum contagiosum virus
agcacguuguucuugc

SEQ ID NO: 3096103 - RNA, 21 nt, Molluscum contagiosum virus
ggugcacgugcugcagcugcg

SEQ ID NO: 3096104 - RNA, 21 nt, Molluscum contagiosum virus
gguacccgcaggaaaggcacc

SEQ ID NO: 3096105 - RNA, 14 nt, Molluscum contagiosum virus
gaccuacuccuggc

SEQ ID NO: 3096106 - RNA, 18 nt, Molluscum contagiosum virus
caacaggagcauuccuug

SEQ ID NO: 3096107 - RNA, 16 nt, Molluscum contagiosum virus
gaacugcagcagcugg

SEQ ID NO: 3096108 - RNA, 12 nt, Molluscum contagiosum virus
cccgcgccgccc

SEQ ID NO: 3096109 - RNA, 21 nt, Molluscum contagiosum virus
ccucuccggucgcccuccgcc

SEQ ID NO: 3096110 - RNA, 23 nt, Molluscum contagiosum virus
cauggagagcguacucgggccgc

SEQ ID NO: 3096111 - RNA, 18 nt, Molluscum contagiosum virus
cgccuucugcaagcugcc

SEQ ID NO: 3096112 - RNA, 14 nt, Molluscum contagiosum virus
aacgcccaauucug

SEQ ID NO: 3096113 - RNA, 18 nt, Molluscum contagiosum virus
cgugaugugcgcacagac

SEQ ID NO: 3096114 - RNA, 15 nt, Molluscum contagiosum virus
cacacgcaccgccug

SEQ ID NO: 3096115 - RNA, 13 nt, Molluscum contagiosum virus
ucuucagaggaca

SEQ ID NO: 3096116 - RNA, 12 nt, Molluscum contagiosum virus
ggcaggcucccg

SEQ ID NO: 3096117 - RNA, 21 nt, Molluscum contagiosum virus
ucccgcgccacgagcgccgcg

SEQ ID NO: 3096118 - RNA, 16 nt, Molluscum contagiosum virus
gcgcacgcccucgccg

SEQ ID NO: 3096119 - RNA, 22 nt, Molluscum contagiosum virus
cccggcagcgacuacgcgcugc

SEQ ID NO: 3096120 - RNA, 13 nt, Molluscum contagiosum virus
ccgcaacgagguc

SEQ ID NO: 3096121 - RNA, 14 nt, Molluscum contagiosum virus
ggagcuggagcgag

SEQ ID NO: 3096122 - RNA, 17 nt, Molluscum contagiosum virus
cgugucaagcggcacgu

SEQ ID NO: 3096123 - RNA, 16 nt, Molluscum contagiosum virus
cgcuggaugcugcucg

SEQ ID NO: 3096124 - RNA, 21 nt, Molluscum contagiosum virus
ugcucaccgccgagauggagc

SEQ ID NO: 3096125 - RNA, 21 nt, Molluscum contagiosum virus
cacuugcgcguucgcaaagac

SEQ ID NO: 3096126 - RNA, 13 nt, Molluscum contagiosum virus
uggacgcuccgag

SEQ ID NO: 3096127 - RNA, 22 nt, Molluscum contagiosum virus
cagcaggcacgacgccgacacc

SEQ ID NO: 3096128 - RNA, 16 nt, Molluscum contagiosum virus
gugccgaggcgcugcc

SEQ ID NO: 3096129 - RNA, 17 nt, Molluscum contagiosum virus
acggcgugcugugccug

SEQ ID NO: 3096130 - RNA, 23 nt, Molluscum contagiosum virus
cgcggacacguuccagagcacug

SEQ ID NO: 3096131 - RNA, 15 nt, Molluscum contagiosum virus
gugcgcgugcgccug

SEQ ID NO: 3096132 - RNA, 23 nt, Molluscum contagiosum virus
gaccagauccgggcgcugcaccg

SEQ ID NO: 3096133 - RNA, 22 nt, Molluscum contagiosum virus
acugcggugacgguccugcgcg

SEQ ID NO: 3096134 - RNA, 23 nt, Molluscum contagiosum virus
ugcggcgcgggcaagcagggccu

SEQ ID NO: 3096135 - RNA, 13 nt, Molluscum contagiosum virus
gcaccaccagugc

SEQ ID NO: 3096136 - RNA, 15 nt, Molluscum contagiosum virus
cuagcgcuggcugca

SEQ ID NO: 3096137 - RNA, 13 nt, Molluscum contagiosum virus
uacgcgccagugc

SEQ ID NO: 3096138 - RNA, 15 nt, Molluscum contagiosum virus
gcguggccaggccgc

SEQ ID NO: 3096139 - RNA, 16 nt, Molluscum contagiosum virus
cucggcuucugcugca

SEQ ID NO: 3096140 - RNA, 16 nt, Molluscum contagiosum virus
ucgacgcgcugcucuc

SEQ ID NO: 3096141 - RNA, 17 nt, Molluscum contagiosum virus
ccggcagcuggagcugc

SEQ ID NO: 3096142 - RNA, 16 nt, Molluscum contagiosum virus
gcaccagguagagcaa

SEQ ID NO: 3096143 - RNA, 18 nt, Molluscum contagiosum virus
acgcgcccuggagcgcag

SEQ ID NO: 3096144 - RNA, 18 nt, Molluscum contagiosum virus
acacgucagccgcacggc

SEQ ID NO: 3096145 - RNA, 16 nt, Molluscum contagiosum virus
cuccaagaagaggcca

SEQ ID NO: 3096146 - RNA, 15 nt, Molluscum contagiosum virus
cgagugcuggagcag

SEQ ID NO: 3096147 - RNA, 23 nt, Molluscum contagiosum virus
agcuugacgcguacauccgcgag

SEQ ID NO: 3096148 - RNA, 21 nt, Molluscum contagiosum virus
gcgccgcgugcaugcccagca

SEQ ID NO: 3096149 - RNA, 12 nt, Molluscum contagiosum virus
agugcaccagca

SEQ ID NO: 3096150 - RNA, 21 nt, Molluscum contagiosum virus
cgccugaaccugggcgcgcac

SEQ ID NO: 3096151 - RNA, 13 nt, Molluscum contagiosum virus
ccacggcgcgccg

SEQ ID NO: 3096152 - RNA, 15 nt, Molluscum contagiosum virus
cucgugcugcucugc

SEQ ID NO: 3096153 - RNA, 20 nt, Molluscum contagiosum virus
ugcgggucucggggcuccgc

SEQ ID NO: 3096154 - RNA, 12 nt, Molluscum contagiosum virus
cgcgcugcugcu

SEQ ID NO: 3096155 - RNA, 12 nt, Molluscum contagiosum virus
cgaggcugcugc

SEQ ID NO: 3096156 - RNA, 21 nt, Molluscum contagiosum virus
agcuggacggugcuggugcug

SEQ ID NO: 3096157 - RNA, 22 nt, Molluscum contagiosum virus
ccgggaacgaggaaaggcaccc

SEQ ID NO: 3096158 - RNA, 12 nt, Molluscum contagiosum virus
cgcccagcaccu

SEQ ID NO: 3096159 - RNA, 16 nt, Molluscum contagiosum virus
gccgagguggcacccu

SEQ ID NO: 3096160 - RNA, 16 nt, Molluscum contagiosum virus
gcgcgcaucgcgggca

SEQ ID NO: 3096161 - RNA, 21 nt, Molluscum contagiosum virus
gagcaccaagaagcggcccug

SEQ ID NO: 3096162 - RNA, 22 nt, Molluscum contagiosum virus
caccgcggcgcggagcgcuucu

SEQ ID NO: 3096163 - RNA, 23 nt, Molluscum contagiosum virus
gccugcggguaguugcgagccag

SEQ ID NO: 3096164 - RNA, 20 nt, Molluscum contagiosum virus
agccucaucgugagccuggu

SEQ ID NO: 3096165 - RNA, 14 nt, Molluscum contagiosum virus
cucgcuuagccaac

SEQ ID NO: 3096166 - RNA, 14 nt, Molluscum contagiosum virus
cgcacgccagccug

SEQ ID NO: 3096167 - RNA, 14 nt, Molluscum contagiosum virus
cgcccgccagcaug

SEQ ID NO: 3096168 - RNA, 14 nt, Molluscum contagiosum virus
gaaucacggccagu

SEQ ID NO: 3096169 - RNA, 21 nt, Molluscum contagiosum virus
ggcguccggcgcuugccccuc

SEQ ID NO: 3096170 - RNA, 21 nt, Molluscum contagiosum virus
gcacagacauggcccgcgcgg

SEQ ID NO: 3096171 - RNA, 22 nt, Molluscum contagiosum virus
cgcgugcggugacuugccgugu

SEQ ID NO: 3096172 - RNA, 14 nt, Molluscum contagiosum virus
uacagcgcgcugca

SEQ ID NO: 3096173 - RNA, 15 nt, Molluscum contagiosum virus
guguuuugugccugc

SEQ ID NO: 3096174 - RNA, 19 nt, Molluscum contagiosum virus
accacccgaaagucccgcu

SEQ ID NO: 3096175 - RNA, 15 nt, Molluscum contagiosum virus
gcaaggcccacuucc

SEQ ID NO: 3096176 - RNA, 19 nt, Molluscum contagiosum virus
gagcaguucgcgcgccugc

SEQ ID NO: 3096177 - RNA, 17 nt, Molluscum contagiosum virus
cgccaagagcuggucgc

SEQ ID NO: 3096178 - RNA, 17 nt, Molluscum contagiosum virus
gugcacuagcacgggcg

SEQ ID NO: 3096179 - RNA, 15 nt, Molluscum contagiosum virus
gaugugacaacaugu

SEQ ID NO: 3096180 - RNA, 17 nt, Molluscum contagiosum virus
ucgcugcuccccgccag

SEQ ID NO: 3096181 - RNA, 13 nt, Molluscum contagiosum virus
gcaagacccagca

SEQ ID NO: 3096182 - RNA, 15 nt, Molluscum contagiosum virus
uggcgccgaugcagu

SEQ ID NO: 3096183 - RNA, 16 nt, Molluscum contagiosum virus
augcgcaagcagcucg

SEQ ID NO: 3096184 - RNA, 16 nt, Molluscum contagiosum virus
ugggcuucggaacgcu

SEQ ID NO: 3096185 - RNA, 14 nt, Molluscum contagiosum virus
gcuugggcacugcu

SEQ ID NO: 3096186 - RNA, 14 nt, Molluscum contagiosum virus
acguacagcgggcg

SEQ ID NO: 3096187 - RNA, 13 nt, Molluscum contagiosum virus
uucgucauggagc

SEQ ID NO: 3096188 - RNA, 13 nt, Molluscum contagiosum virus
gcucagcgccgcg

SEQ ID NO: 3096189 - RNA, 14 nt, Molluscum contagiosum virus
guggccaggccgcg

SEQ ID NO: 3096190 - RNA, 17 nt, Molluscum contagiosum virus
cgagucucuguaacaag

SEQ ID NO: 3096191 - RNA, 15 nt, Molluscum contagiosum virus
gacaaugagcacuug

SEQ ID NO: 3096192 - RNA, 21 nt, Molluscum contagiosum virus
agagaccgucaaccugcugcc

SEQ ID NO: 3096193 - RNA, 14 nt, Molluscum contagiosum virus
agucucuguaacaa

SEQ ID NO: 3096194 - RNA, 14 nt, Molluscum contagiosum virus
cgcgccgcccggga

SEQ ID NO: 3096195 - RNA, 13 nt, Molluscum contagiosum virus
cacgagcugcugu

SEQ ID NO: 3096196 - RNA, 13 nt, Molluscum contagiosum virus
gggcgcuccgagc

SEQ ID NO: 3096197 - RNA, 13 nt, Molluscum contagiosum virus
cgugcgcagcagc

SEQ ID NO: 3096198 - RNA, 22 nt, Molluscum contagiosum virus
cgccuucguggagcccgugcug

SEQ ID NO: 3096199 - RNA, 15 nt, Molluscum contagiosum virus
gcugcuccugcucug

SEQ ID NO: 3096200 - RNA, 20 nt, Molluscum contagiosum virus
gccgagccaaggaugccugc

SEQ ID NO: 3096201 - RNA, 20 nt, Molluscum contagiosum virus
gcggaccuaaagcugcuggc

SEQ ID NO: 3096202 - RNA, 21 nt, Molluscum contagiosum virus
cgcggcaagccuggcuccugu

SEQ ID NO: 3096203 - RNA, 17 nt, Molluscum contagiosum virus
aacacugacgcucgggc

SEQ ID NO: 3096204 - RNA, 16 nt, Molluscum contagiosum virus
uuuccuugccuucucg

SEQ ID NO: 3096205 - RNA, 15 nt, Molluscum contagiosum virus
ucugccggaguaaau

SEQ ID NO: 3096206 - RNA, 19 nt, Molluscum contagiosum virus
ugugguucaugacggcgug

SEQ ID NO: 3096207 - RNA, 16 nt, Molluscum contagiosum virus
uacaggcgcggcagcc

SEQ ID NO: 3096208 - RNA, 14 nt, Molluscum contagiosum virus
acgcugcugcacag

SEQ ID NO: 3096209 - RNA, 19 nt, Molluscum contagiosum virus
gcgagaugcgcggacagag

SEQ ID NO: 3096210 - RNA, 20 nt, Molluscum contagiosum virus
uguuccaagaagacuaccac

SEQ ID NO: 3096211 - RNA, 19 nt, Molluscum contagiosum virus
aggagagagagacaugcac

SEQ ID NO: 3096212 - RNA, 19 nt, Molluscum contagiosum virus
gacugcccgcgcccugcac

SEQ ID NO: 3096213 - RNA, 21 nt, Molluscum contagiosum virus
gcgcgagugugugcaucccuc

SEQ ID NO: 3096214 - RNA, 22 nt, Molluscum contagiosum virus
uguccgaggacuuccgcgcgcu

SEQ ID NO: 3096215 - RNA, 13 nt, Molluscum contagiosum virus
cuugcgcagcgcc

SEQ ID NO: 3096216 - RNA, 15 nt, Molluscum contagiosum virus
cucggcuucugcugc

SEQ ID NO: 3096217 - RNA, 17 nt, Molluscum contagiosum virus
ugcggcgcgggcaagca

SEQ ID NO: 3096218 - RNA, 14 nt, Molluscum contagiosum virus
cuucguggcgcugg

SEQ ID NO: 3096219 - RNA, 22 nt, Molluscum contagiosum virus
gucuagccgugaacgaggcugc

SEQ ID NO: 3096220 - RNA, 24 nt, Molluscum contagiosum virus
cgcaagugugcgcaucccucgucu

SEQ ID NO: 3096221 - RNA, 15 nt, Molluscum contagiosum virus
gacccaucggagaag

SEQ ID NO: 3096222 - RNA, 18 nt, Molluscum contagiosum virus
acucgcgcgcgccgggcc

SEQ ID NO: 3096223 - RNA, 23 nt, Molluscum contagiosum virus
cccgagcuaaauggacgcggacc

SEQ ID NO: 3096224 - RNA, 18 nt, Molluscum contagiosum virus
aauccaugucgagcccug

SEQ ID NO: 3096225 - RNA, 18 nt, Molluscum contagiosum virus
ucagccccgggcccgcau

SEQ ID NO: 3096226 - RNA, 15 nt, Molluscum contagiosum virus
caccagcaccagcac

SEQ ID NO: 3096227 - RNA, 16 nt, Molluscum contagiosum virus
cggcacaugcagcugc

SEQ ID NO: 3096228 - RNA, 20 nt, Molluscum contagiosum virus
guacuucaagcacgagcugc

SEQ ID NO: 3096229 - RNA, 12 nt, Molluscum contagiosum virus
ccaggcacuggc

SEQ ID NO: 3096230 - RNA, 17 nt, Molluscum contagiosum virus
gcaccugcaucgcgccg

SEQ ID NO: 3096231 - RNA, 22 nt, Molluscum contagiosum virus
gcgcuuccgcgagucugccagc

SEQ ID NO: 3096232 - RNA, 20 nt, Molluscum contagiosum virus
cuucguggccuaccugcagg

SEQ ID NO: 3096233 - RNA, 16 nt, Molluscum contagiosum virus
gaggaggcaagcgggc

SEQ ID NO: 3096234 - RNA, 14 nt, Molluscum contagiosum virus
ggccagccucaucg

SEQ ID NO: 3096235 - RNA, 13 nt, Molluscum contagiosum virus
gcgugcucgacuc

SEQ ID NO: 3096236 - RNA, 18 nt, Molluscum contagiosum virus
augcagauuggaggagga

SEQ ID NO: 3096237 - RNA, 14 nt, Molluscum contagiosum virus
gcauggcggcggcc

SEQ ID NO: 3096238 - RNA, 16 nt, Molluscum contagiosum virus
gagugcuggagcagac

SEQ ID NO: 3096239 - RNA, 21 nt, Molluscum contagiosum virus
cugcggcuccaacagcagcug

SEQ ID NO: 3096240 - RNA, 21 nt, Molluscum contagiosum virus
accuuccuccagggcacgauc

SEQ ID NO: 3096241 - RNA, 13 nt, Molluscum contagiosum virus
guggcaagggcuc

SEQ ID NO: 3096242 - RNA, 20 nt, Molluscum contagiosum virus
caagugcgcgugucuggagc

SEQ ID NO: 3096243 - RNA, 15 nt, Molluscum contagiosum virus
accgagugcuggccg

SEQ ID NO: 3096244 - RNA, 14 nt, Molluscum contagiosum virus
guccacgcgcccga

SEQ ID NO: 3096245 - RNA, 22 nt, Molluscum contagiosum virus
ggcacccgcaacaaggaaaggc

SEQ ID NO: 3096246 - RNA, 17 nt, Molluscum contagiosum virus
cucgccuccgggcgcac

SEQ ID NO: 3096247 - RNA, 16 nt, Molluscum contagiosum virus
cgugcgcuggcgcgcg

SEQ ID NO: 3096248 - RNA, 21 nt, Molluscum contagiosum virus
ugagcaggucggccagcagcu

SEQ ID NO: 3096249 - RNA, 23 nt, Molluscum contagiosum virus
gcacuugcaggccuccuucccug

SEQ ID NO: 3096250 - RNA, 21 nt, Molluscum contagiosum virus
cugccgguggaagagcccgca

SEQ ID NO: 3096251 - RNA, 20 nt, Molluscum contagiosum virus
gccugcugcucuucgugcug

SEQ ID NO: 3096252 - RNA, 22 nt, Molluscum contagiosum virus
acgcgccgcgcgcuuacuaagc

SEQ ID NO: 3096253 - RNA, 15 nt, Molluscum contagiosum virus
ggagcuccgugcugc

SEQ ID NO: 3096254 - RNA, 17 nt, Molluscum contagiosum virus
gccggcaaggggccagc

SEQ ID NO: 3096255 - RNA, 14 nt, Molluscum contagiosum virus
ggccuaccugcagg

SEQ ID NO: 3096256 - RNA, 15 nt, Molluscum contagiosum virus
cagaaucgcuuugcc

SEQ ID NO: 3096257 - RNA, 11 nt, Molluscum contagiosum virus
cuugggcacug

SEQ ID NO: 3096258 - RNA, 19 nt, Molluscum contagiosum virus
gcgcgacgucgucaaggau

SEQ ID NO: 3096259 - RNA, 21 nt, Molluscum contagiosum virus
cccggcaggcucccgcugucg

SEQ ID NO: 3096260 - RNA, 20 nt, Molluscum contagiosum virus
cguuacggagaccuggucac

SEQ ID NO: 3096261 - RNA, 16 nt, Molluscum contagiosum virus
cuacagcgcgcugcac

SEQ ID NO: 3096262 - RNA, 13 nt, Molluscum contagiosum virus
cggcgcggagcgc

SEQ ID NO: 3096263 - RNA, 22 nt, Molluscum contagiosum virus
acacgagggccuuggcggcgcg

SEQ ID NO: 3096264 - RNA, 16 nt, Molluscum contagiosum virus
ucggaugcgcugccgg

SEQ ID NO: 3096265 - RNA, 17 nt, Molluscum contagiosum virus
aucacggccgggauuug

SEQ ID NO: 3096266 - RNA, 15 nt, Molluscum contagiosum virus
gccgagcgcacgccg

SEQ ID NO: 3096267 - RNA, 20 nt, Molluscum contagiosum virus
uugccccgcgcguugcugcc

SEQ ID NO: 3096268 - RNA, 23 nt, Molluscum contagiosum virus
ccugcgaaaaagcccgcggguac

SEQ ID NO: 3096269 - RNA, 14 nt, Molluscum contagiosum virus
cgucuucuaccgcc

SEQ ID NO: 3096270 - RNA, 22 nt, Molluscum contagiosum virus
cggacgcccuccucgaccugca

SEQ ID NO: 3096271 - RNA, 13 nt, Molluscum contagiosum virus
gcuguuucugccg

SEQ ID NO: 3096272 - RNA, 12 nt, Molluscum contagiosum virus
agcucagcaggc

SEQ ID NO: 3096273 - RNA, 19 nt, Molluscum contagiosum virus
ggcguguccgcgggcgcgc

SEQ ID NO: 3096274 - RNA, 18 nt, Molluscum contagiosum virus
ugcgagccagccaggcgc

SEQ ID NO: 3096275 - RNA, 19 nt, Molluscum contagiosum virus
acgcacgcuugccuuggcg

SEQ ID NO: 3096276 - RNA, 19 nt, Molluscum contagiosum virus
uugaucgacauggagcgca

SEQ ID NO: 3096277 - RNA, 17 nt, Molluscum contagiosum virus
ggagaacaugcucgcca

SEQ ID NO: 3096278 - RNA, 13 nt, Molluscum contagiosum virus
cccggcgcgcgcg

SEQ ID NO: 3096279 - RNA, 16 nt, Molluscum contagiosum virus
uaacgugauccgagac

SEQ ID NO: 3096280 - RNA, 19 nt, Molluscum contagiosum virus
ucugucguggaggaaacac

SEQ ID NO: 3096281 - RNA, 17 nt, Molluscum contagiosum virus
cccgccgacugccgccg

SEQ ID NO: 3096282 - RNA, 14 nt, Molluscum contagiosum virus
uccaguaccagcuc

SEQ ID NO: 3096283 - RNA, 20 nt, Molluscum contagiosum virus
ccuugccgaggaggugcucu

SEQ ID NO: 3096284 - RNA, 22 nt, Molluscum contagiosum virus
acugucucugcgcgagcagcug

SEQ ID NO: 3096285 - RNA, 22 nt, Molluscum contagiosum virus
cgugcagggcgugcuugccugg

SEQ ID NO: 3096286 - RNA, 16 nt, Molluscum contagiosum virus
caucggcggcagcgcc

SEQ ID NO: 3096287 - RNA, 15 nt, Molluscum contagiosum virus
cggcaguagcagcgc

SEQ ID NO: 3096288 - RNA, 23 nt, Molluscum contagiosum virus
gcuuccucuacaccagcuggacg

SEQ ID NO: 3096289 - RNA, 16 nt, Molluscum contagiosum virus
cgcacucgcuggccuc

SEQ ID NO: 3096290 - RNA, 16 nt, Molluscum contagiosum virus
acagagaaaggcaccc

SEQ ID NO: 3096291 - RNA, 19 nt, Molluscum contagiosum virus
guggcaaaccacgagcgug

SEQ ID NO: 3096292 - RNA, 11 nt, Molluscum contagiosum virus
guauuuccagc

SEQ ID NO: 3096293 - RNA, 18 nt, Molluscum contagiosum virus
cccgccuucgacggcuuc

SEQ ID NO: 3096294 - RNA, 13 nt, Molluscum contagiosum virus
gcguccgcaggcg

SEQ ID NO: 3096295 - RNA, 14 nt, Molluscum contagiosum virus
agugccgagcucgc

SEQ ID NO: 3096296 - RNA, 20 nt, Molluscum contagiosum virus
cgcgugcgcgugccucugcc

SEQ ID NO: 3096297 - RNA, 18 nt, Molluscum contagiosum virus
gcccgcgaaggagagaga

SEQ ID NO: 3096298 - RNA, 18 nt, Molluscum contagiosum virus
gcugguuaccaagggcau

SEQ ID NO: 3096299 - RNA, 19 nt, Molluscum contagiosum virus
caaggccgcgcccaagaag

SEQ ID NO: 3096300 - RNA, 12 nt, Molluscum contagiosum virus
cguacugcugca

SEQ ID NO: 3096301 - RNA, 17 nt, Molluscum contagiosum virus
gcugcucgacgggcgca

SEQ ID NO: 3096302 - RNA, 16 nt, Molluscum contagiosum virus
uccugaacaagcugca

SEQ ID NO: 3096303 - RNA, 17 nt, Molluscum contagiosum virus
gcgugggugaggagcuc

SEQ ID NO: 3096304 - RNA, 15 nt, Molluscum contagiosum virus
gccugugccugcaag

SEQ ID NO: 3096305 - RNA, 14 nt, Molluscum contagiosum virus
agcgcuggcuucuu

SEQ ID NO: 3096306 - RNA, 14 nt, Molluscum contagiosum virus
cgugcagggcgugc

SEQ ID NO: 3096307 - RNA, 23 nt, Molluscum contagiosum virus
uagagcacgaagcuacgcuccgu

SEQ ID NO: 3096308 - RNA, 15 nt, Molluscum contagiosum virus
cugaaaauagagagu

SEQ ID NO: 3096309 - RNA, 23 nt, Molluscum contagiosum virus
caugcgugcuucacgugcuugcc

SEQ ID NO: 3096310 - RNA, 21 nt, Molluscum contagiosum virus
cagccuguuuuuaucgagccg

SEQ ID NO: 3096311 - RNA, 13 nt, Molluscum contagiosum virus
uccaggcgccgca

SEQ ID NO: 3096312 - RNA, 15 nt, Molluscum contagiosum virus
ggcuguggacaugau

SEQ ID NO: 3096313 - RNA, 17 nt, Molluscum contagiosum virus
ggugcauacgcagaggc

SEQ ID NO: 3096314 - RNA, 13 nt, Molluscum contagiosum virus
cuuccagcacugc

SEQ ID NO: 3096315 - RNA, 19 nt, Molluscum contagiosum virus
ucgcgggcccgccuuugug

SEQ ID NO: 3096316 - RNA, 20 nt, Molluscum contagiosum virus
guagugguccaccagcugcc

SEQ ID NO: 3096317 - RNA, 22 nt, Molluscum contagiosum virus
acugccuggucacagacacgcu

SEQ ID NO: 3096318 - RNA, 17 nt, Molluscum contagiosum virus
ggaugccuuucaggggu

SEQ ID NO: 3096319 - RNA, 22 nt, Molluscum contagiosum virus
cuuguccgcggacgcgggccug

SEQ ID NO: 3096320 - RNA, 21 nt, Molluscum contagiosum virus
ggccacucucccgggcucugu

SEQ ID NO: 3096321 - RNA, 13 nt, Molluscum contagiosum virus
ucucuucaugaaa

SEQ ID NO: 3096322 - RNA, 22 nt, Molluscum contagiosum virus
gcaaagaaugcaugcggagcug

SEQ ID NO: 3096323 - RNA, 14 nt, Molluscum contagiosum virus
ucgucaaugcgcac

SEQ ID NO: 3096324 - RNA, 15 nt, Molluscum contagiosum virus
gcacggcgcccagga

SEQ ID NO: 3096325 - RNA, 15 nt, Molluscum contagiosum virus
ccacugugccagcag

SEQ ID NO: 3096326 - RNA, 16 nt, Molluscum contagiosum virus
ccguaagucgaagagg

SEQ ID NO: 3096327 - RNA, 15 nt, Molluscum contagiosum virus
cagugccgcugagag

SEQ ID NO: 3096328 - RNA, 15 nt, Molluscum contagiosum virus
cgccggcugcgccac

SEQ ID NO: 3096329 - RNA, 21 nt, Molluscum contagiosum virus
cagaaggggggguaaugcaga

SEQ ID NO: 3096330 - RNA, 17 nt, Molluscum contagiosum virus
gcgcucacugcgaucgc

SEQ ID NO: 3096331 - RNA, 23 nt, Molluscum contagiosum virus
aacaacuugggagcaaggccugg

SEQ ID NO: 3096332 - RNA, 17 nt, Molluscum contagiosum virus
ucugccaccaugcgcac

SEQ ID NO: 3096333 - RNA, 21 nt, Molluscum contagiosum virus
gagggcagccucaaccugaac

SEQ ID NO: 3096334 - RNA, 18 nt, Molluscum contagiosum virus
ccaacacuaccacagcca

SEQ ID NO: 3096335 - RNA, 14 nt, Molluscum contagiosum virus
acaagccguccgcc

SEQ ID NO: 3096336 - RNA, 18 nt, Molluscum contagiosum virus
gcgcggaagcccgagcgc

SEQ ID NO: 3096337 - RNA, 13 nt, Molluscum contagiosum virus
acaaaaacugaaa

SEQ ID NO: 3096338 - RNA, 16 nt, Molluscum contagiosum virus
cgccugugccugcaag

SEQ ID NO: 3096339 - RNA, 13 nt, Molluscum contagiosum virus
cgcggccugggcc

SEQ ID NO: 3096340 - RNA, 18 nt, Molluscum contagiosum virus
cgcggauauggcgcgccg

SEQ ID NO: 3096341 - RNA, 14 nt, Molluscum contagiosum virus
gacgugcugcugca

SEQ ID NO: 3096342 - RNA, 18 nt, Molluscum contagiosum virus
gcgugcggaucggcacug

SEQ ID NO: 3096343 - RNA, 17 nt, Molluscum contagiosum virus
gcacacgcgucgcgcag

SEQ ID NO: 3096344 - RNA, 13 nt, Molluscum contagiosum virus
cgcaagcgugugu

SEQ ID NO: 3096345 - RNA, 21 nt, Molluscum contagiosum virus
cagccgcugcgccgccagcgu

SEQ ID NO: 3096346 - RNA, 18 nt, Molluscum contagiosum virus
caagacccagcaaggccc

SEQ ID NO: 3096347 - RNA, 17 nt, Molluscum contagiosum virus
ggagacuugagcccaga

SEQ ID NO: 3096348 - RNA, 17 nt, Molluscum contagiosum virus
caguucgagcugcugcg

SEQ ID NO: 3096349 - RNA, 18 nt, Molluscum contagiosum virus
uagaagagcgguuccugc

SEQ ID NO: 3096350 - RNA, 21 nt, Molluscum contagiosum virus
cgccgggaaacgcacagcccc

SEQ ID NO: 3096351 - RNA, 18 nt, Molluscum contagiosum virus
ggagggcacgcugcacau

SEQ ID NO: 3096352 - RNA, 16 nt, Molluscum contagiosum virus
auuguagagacgcugc

SEQ ID NO: 3096353 - RNA, 20 nt, Molluscum contagiosum virus
gcgcaagucaccgcuccgca

SEQ ID NO: 3096354 - RNA, 19 nt, Molluscum contagiosum virus
gcuccgccgggaauaccgg

SEQ ID NO: 3096355 - RNA, 15 nt, Molluscum contagiosum virus
ugccggcucagcgug

SEQ ID NO: 3096356 - RNA, 14 nt, Molluscum contagiosum virus
gcugccgcugcgcg

SEQ ID NO: 3096357 - RNA, 20 nt, Molluscum contagiosum virus
gcaaaugcgucccagcagcu

SEQ ID NO: 3096358 - RNA, 11 nt, Molluscum contagiosum virus
accggagaggg

SEQ ID NO: 3096359 - RNA, 23 nt, Molluscum contagiosum virus
gauucgugcucguguugugccug

SEQ ID NO: 3096360 - RNA, 12 nt, Molluscum contagiosum virus
ggaggacggcgc

SEQ ID NO: 3096361 - RNA, 13 nt, Molluscum contagiosum virus
gaaucuugccugu

SEQ ID NO: 3096362 - RNA, 15 nt, Molluscum contagiosum virus
acgcgggccaggcac

SEQ ID NO: 3096363 - RNA, 15 nt, Molluscum contagiosum virus
gcugcuccccgccag

SEQ ID NO: 3096364 - RNA, 16 nt, Molluscum contagiosum virus
gaacgaggagggcagc

SEQ ID NO: 3096365 - RNA, 23 nt, Molluscum contagiosum virus
acgcacacgacgacggcugcucg

SEQ ID NO: 3096366 - RNA, 14 nt, Molluscum contagiosum virus
ccuuggacacgugc

SEQ ID NO: 3096367 - RNA, 18 nt, Molluscum contagiosum virus
gcgcacgccgcucucgug

SEQ ID NO: 3096368 - RNA, 21 nt, Molluscum contagiosum virus
ggcgcccgugccgccggcgcc

SEQ ID NO: 3096369 - RNA, 14 nt, Molluscum contagiosum virus
gcgacuacaccugg

SEQ ID NO: 3096370 - RNA, 18 nt, Molluscum contagiosum virus
cgccagguguuccugccg

SEQ ID NO: 3096371 - RNA, 15 nt, Molluscum contagiosum virus
uggcgcugggcgcgc

SEQ ID NO: 3096372 - RNA, 19 nt, Molluscum contagiosum virus
cugcccgaguuucggaaga

SEQ ID NO: 3096373 - RNA, 19 nt, Molluscum contagiosum virus
ccguccuugcucuggcucu

SEQ ID NO: 3096374 - RNA, 17 nt, Molluscum contagiosum virus
ucggaacccagaaagaa

SEQ ID NO: 3096375 - RNA, 16 nt, Molluscum contagiosum virus
cgugggcggcauccug

SEQ ID NO: 3096376 - RNA, 17 nt, Molluscum contagiosum virus
caagaaggcgcuggugg

SEQ ID NO: 3096377 - RNA, 13 nt, Molluscum contagiosum virus
ggacgugcugcug

SEQ ID NO: 3096378 - RNA, 16 nt, Molluscum contagiosum virus
gcucggcacugcuggc

SEQ ID NO: 3096379 - RNA, 16 nt, Molluscum contagiosum virus
gggcaugcacagcugc

SEQ ID NO: 3096380 - RNA, 13 nt, Molluscum contagiosum virus
ugguggagcacuu

SEQ ID NO: 3096381 - RNA, 23 nt, Molluscum contagiosum virus
aguggcggcaaaagggcucugcc

SEQ ID NO: 3096382 - RNA, 21 nt, Molluscum contagiosum virus
accgacguuuucuuugcgcuc

SEQ ID NO: 3096383 - RNA, 15 nt, Molluscum contagiosum virus
gcgcagucccagcac

SEQ ID NO: 3096384 - RNA, 23 nt, Molluscum contagiosum virus
ucgccggaggaaggacagugucu

SEQ ID NO: 3096385 - RNA, 18 nt, Molluscum contagiosum virus
cuagcgggccuguaccug

SEQ ID NO: 3096386 - RNA, 18 nt, Molluscum contagiosum virus
ccacgaccgcaagugcac

SEQ ID NO: 3096387 - RNA, 19 nt, Molluscum contagiosum virus
gcaggucaacuccgagcgc

SEQ ID NO: 3096388 - RNA, 17 nt, Molluscum contagiosum virus
gagaagcuguaccuggu

SEQ ID NO: 3096389 - RNA, 14 nt, Molluscum contagiosum virus
aggcaggggccgcc

SEQ ID NO: 3096390 - RNA, 22 nt, Molluscum contagiosum virus
cagcgcuuuguugccucaguac

SEQ ID NO: 3096391 - RNA, 16 nt, Molluscum contagiosum virus
accgucgcguggugcu

SEQ ID NO: 3096392 - RNA, 23 nt, Molluscum contagiosum virus
gacucgcugccagagauccgccc

SEQ ID NO: 3096393 - RNA, 16 nt, Molluscum contagiosum virus
gcggcguacgcgcagg

SEQ ID NO: 3096394 - RNA, 16 nt, Molluscum contagiosum virus
cacaagggcagcucaa

SEQ ID NO: 3096395 - RNA, 14 nt, Molluscum contagiosum virus
caguucgagcugcu

SEQ ID NO: 3096396 - RNA, 13 nt, Molluscum contagiosum virus
cgcgugcgccugc

SEQ ID NO: 3096397 - RNA, 12 nt, Molluscum contagiosum virus
aucgacgagguc

SEQ ID NO: 3096398 - RNA, 17 nt, Molluscum contagiosum virus
augguguacgaaaguac

SEQ ID NO: 3096399 - RNA, 17 nt, Molluscum contagiosum virus
ccgacacguugcacugc

SEQ ID NO: 3096400 - RNA, 19 nt, Molluscum contagiosum virus
guaugcgaggccugcgugg

SEQ ID NO: 3096401 - RNA, 15 nt, Molluscum contagiosum virus
gccgcggccgcgaga

SEQ ID NO: 3096402 - RNA, 16 nt, Molluscum contagiosum virus
gcauacacuuccugcu

SEQ ID NO: 3096403 - RNA, 19 nt, Molluscum contagiosum virus
gagguaguuugcggagcag

SEQ ID NO: 3096404 - RNA, 16 nt, Molluscum contagiosum virus
ccugaacaagcugcac

SEQ ID NO: 3096405 - RNA, 21 nt, Molluscum contagiosum virus
ggcaugcgcgcagugccgcug

SEQ ID NO: 3096406 - RNA, 16 nt, Molluscum contagiosum virus
gccagcguacggcccg

SEQ ID NO: 3096407 - RNA, 23 nt, Molluscum contagiosum virus
guaguccaggugguagcggaggc

SEQ ID NO: 3096408 - RNA, 20 nt, Molluscum contagiosum virus
cggcccgaguacgcucucca

SEQ ID NO: 3096409 - RNA, 21 nt, Molluscum contagiosum virus
ggucacgcgcaaggccgcgcc

SEQ ID NO: 3096410 - RNA, 19 nt, Molluscum contagiosum virus
uggccuaccugcaggagga

SEQ ID NO: 3096411 - RNA, 16 nt, Molluscum contagiosum virus
uccagcccugugcccg

SEQ ID NO: 3096412 - RNA, 16 nt, Molluscum contagiosum virus
gcauuccuuguccugg

SEQ ID NO: 3096413 - RNA, 19 nt, Molluscum contagiosum virus
gcgugcucgacucggaugc

SEQ ID NO: 3096414 - RNA, 15 nt, Molluscum contagiosum virus
ccugaacaagcugca

SEQ ID NO: 3096415 - RNA, 20 nt, Molluscum contagiosum virus
gcaucugcgcgugcugucag

SEQ ID NO: 3096416 - RNA, 18 nt, Molluscum contagiosum virus
gugacggcccaccuucuu

SEQ ID NO: 3096417 - RNA, 12 nt, Molluscum contagiosum virus
cgcggcgcacaa

SEQ ID NO: 3096418 - RNA, 16 nt, Molluscum contagiosum virus
cuuggcgggcagcggc

SEQ ID NO: 3096419 - RNA, 21 nt, Molluscum contagiosum virus
cucuacgccgcgcaccuggag

SEQ ID NO: 3096420 - RNA, 21 nt, Molluscum contagiosum virus
uaccugaagcuggacgugggc

SEQ ID NO: 3096421 - RNA, 12 nt, Molluscum contagiosum virus
ccagcagcugcu

SEQ ID NO: 3096422 - RNA, 19 nt, Molluscum contagiosum virus
cgcgugcucacgcccuuca

SEQ ID NO: 3096423 - RNA, 21 nt, Molluscum contagiosum virus
cggagcgcgcacggcagcggc

SEQ ID NO: 3096424 - RNA, 22 nt, Molluscum contagiosum virus
caagcguuuucgucauggagca

SEQ ID NO: 3096425 - RNA, 12 nt, Molluscum contagiosum virus
ggcacguccgcc

SEQ ID NO: 3096426 - RNA, 16 nt, Molluscum contagiosum virus
uccggcagcuggagcu

SEQ ID NO: 3096427 - RNA, 22 nt, Molluscum contagiosum virus
gcacgcguaaacgcggugagug

SEQ ID NO: 3096428 - RNA, 15 nt, Molluscum contagiosum virus
ccuggcggcagcacg

SEQ ID NO: 3096429 - RNA, 13 nt, Molluscum contagiosum virus
ucaaccugcugcc

SEQ ID NO: 3096430 - RNA, 18 nt, Molluscum contagiosum virus
gcugcacaugugcgugca

SEQ ID NO: 3096431 - RNA, 19 nt, Molluscum contagiosum virus
agcucguggacagccugca

SEQ ID NO: 3096432 - RNA, 21 nt, Molluscum contagiosum virus
gucguccggaggcacgggcuc

SEQ ID NO: 3096433 - RNA, 21 nt, Molluscum contagiosum virus
acccaucggagaagugcuccg

SEQ ID NO: 3096434 - RNA, 22 nt, Molluscum contagiosum virus
gccaucgugcgcgacuuggggc

SEQ ID NO: 3096435 - RNA, 15 nt, Molluscum contagiosum virus
ucggcaugcagcgca

SEQ ID NO: 3096436 - RNA, 20 nt, Molluscum contagiosum virus
gcugcuccgugcccacgagc

SEQ ID NO: 3096437 - RNA, 17 nt, Molluscum contagiosum virus
ccgcgcgcucgcgcuuc

SEQ ID NO: 3096438 - RNA, 14 nt, Molluscum contagiosum virus
cucgagcuccaggg

SEQ ID NO: 3096439 - RNA, 15 nt, Molluscum contagiosum virus
gugacaaucucugcg

SEQ ID NO: 3096440 - RNA, 18 nt, Molluscum contagiosum virus
gaggaaaggcacaccccu

SEQ ID NO: 3096441 - RNA, 19 nt, Molluscum contagiosum virus
cagugcggcgcggcugcuc

SEQ ID NO: 3096442 - RNA, 23 nt, Molluscum contagiosum virus
cucuguugcguuggcgccagccu

SEQ ID NO: 3096443 - RNA, 14 nt, Molluscum contagiosum virus
accugcggcugcgg

SEQ ID NO: 3096444 - RNA, 14 nt, Molluscum contagiosum virus
uaagaguccacugc

SEQ ID NO: 3096445 - RNA, 13 nt, Molluscum contagiosum virus
cacaucaugggcu

SEQ ID NO: 3096446 - RNA, 17 nt, Molluscum contagiosum virus
ugcacgcuguccaggcg

SEQ ID NO: 3096447 - RNA, 15 nt, Molluscum contagiosum virus
caaagcccuccugag

SEQ ID NO: 3096448 - RNA, 19 nt, Molluscum contagiosum virus
gccgggccugcggcggcgc

SEQ ID NO: 3096449 - RNA, 17 nt, Molluscum contagiosum virus
cggcccgagcaggacgu

SEQ ID NO: 3096450 - RNA, 13 nt, Molluscum contagiosum virus
ugcgugcuagccc

SEQ ID NO: 3096451 - RNA, 14 nt, Molluscum contagiosum virus
gccugcgcgcaccc

SEQ ID NO: 3096452 - RNA, 13 nt, Molluscum contagiosum virus
cucccagcagcgu

SEQ ID NO: 3096453 - RNA, 13 nt, Molluscum contagiosum virus
cgcaggaaaggua

SEQ ID NO: 3096454 - RNA, 19 nt, Molluscum contagiosum virus
gcgugccgggcuugcuccc

SEQ ID NO: 3096455 - RNA, 13 nt, Molluscum contagiosum virus
ccgcggccugggc

SEQ ID NO: 3096456 - RNA, 20 nt, Molluscum contagiosum virus
gccuaggaggagaacuccaa

SEQ ID NO: 3096457 - RNA, 16 nt, Molluscum contagiosum virus
gcagugcaccagcacc

SEQ ID NO: 3096458 - RNA, 14 nt, Molluscum contagiosum virus
gcugguucugcucg

SEQ ID NO: 3096459 - RNA, 20 nt, Molluscum contagiosum virus
cgcgggccuuugccgcugcc

SEQ ID NO: 3096460 - RNA, 12 nt, Molluscum contagiosum virus
gcgguggugaaa

SEQ ID NO: 3096461 - RNA, 15 nt, Molluscum contagiosum virus
cugcccucgggagaa

SEQ ID NO: 3096462 - RNA, 12 nt, Molluscum contagiosum virus
gcgcgccuuccg

SEQ ID NO: 3096463 - RNA, 14 nt, Molluscum contagiosum virus
gccgccgggccugc

SEQ ID NO: 3096464 - RNA, 20 nt, Molluscum contagiosum virus
gugcacucgagaagaggguc

SEQ ID NO: 3096465 - RNA, 16 nt, Molluscum contagiosum virus
caggcgucgcgcacag

SEQ ID NO: 3096466 - RNA, 14 nt, Molluscum contagiosum virus
guucugcucgcagg

SEQ ID NO: 3096467 - RNA, 15 nt, Molluscum contagiosum virus
gcacgcaacugcccg

SEQ ID NO: 3096468 - RNA, 15 nt, Molluscum contagiosum virus
acgggaagcuuucag

SEQ ID NO: 3096469 - RNA, 20 nt, Molluscum contagiosum virus
guaauccaugucgagcccug

SEQ ID NO: 3096470 - RNA, 19 nt, Molluscum contagiosum virus
acgggcccgcgaaggagag

SEQ ID NO: 3096471 - RNA, 19 nt, Molluscum contagiosum virus
gccggcaucgcgcugcugg

SEQ ID NO: 3096472 - RNA, 17 nt, Molluscum contagiosum virus
gcgauugccccugggcu

SEQ ID NO: 3096473 - RNA, 20 nt, Molluscum contagiosum virus
gccaaggaugccugccagca

SEQ ID NO: 3096474 - RNA, 17 nt, Molluscum contagiosum virus
ucuacgggaagcugcac

SEQ ID NO: 3096475 - RNA, 14 nt, Molluscum contagiosum virus
gccccugcugcucg

SEQ ID NO: 3096476 - RNA, 20 nt, Molluscum contagiosum virus
augggcgugcucacgcugcc

SEQ ID NO: 3096477 - RNA, 22 nt, Molluscum contagiosum virus
agggcuccuucuucagcaggcc

SEQ ID NO: 3096478 - RNA, 16 nt, Molluscum contagiosum virus
cgucgcacaguucacg

SEQ ID NO: 3096479 - RNA, 15 nt, Molluscum contagiosum virus
cgcggaaacaugugu

SEQ ID NO: 3096480 - RNA, 14 nt, Molluscum contagiosum virus
gccagugcaguggc

SEQ ID NO: 3096481 - RNA, 13 nt, Molluscum contagiosum virus
cccgcggagcugu

SEQ ID NO: 3096482 - RNA, 16 nt, Molluscum contagiosum virus
gcgcggcccgagcagg

SEQ ID NO: 3096483 - RNA, 14 nt, Molluscum contagiosum virus
gugcgccugugcug

SEQ ID NO: 3096484 - RNA, 14 nt, Molluscum contagiosum virus
gcgcuugggcacug

SEQ ID NO: 3096485 - RNA, 17 nt, Molluscum contagiosum virus
ggaacucgaggcucugu

SEQ ID NO: 3096486 - RNA, 20 nt, Molluscum contagiosum virus
cagcugcuucucuucaugaa

SEQ ID NO: 3096487 - RNA, 18 nt, Molluscum contagiosum virus
aaucucgccggcuguaaa

SEQ ID NO: 3096488 - RNA, 20 nt, Molluscum contagiosum virus
cagcgcuuguuucgcaugca

SEQ ID NO: 3096489 - RNA, 20 nt, Molluscum contagiosum virus
gcgcugcuauacgcgccagu

SEQ ID NO: 3096490 - RNA, 21 nt, Molluscum contagiosum virus
gcaagaugacgacgggagagg

SEQ ID NO: 3096491 - RNA, 14 nt, Molluscum contagiosum virus
gcaccgggcgccgc

SEQ ID NO: 3096492 - RNA, 16 nt, Molluscum contagiosum virus
gccagcagcuccuggu

SEQ ID NO: 3096493 - RNA, 15 nt, Molluscum contagiosum virus
ggcggcugugcccgc

SEQ ID NO: 3096494 - RNA, 13 nt, Molluscum contagiosum virus
ggcgugcugugcc

SEQ ID NO: 3096495 - RNA, 23 nt, Molluscum contagiosum virus
agcaaccucgggaagcccucagg

SEQ ID NO: 3096496 - RNA, 16 nt, Molluscum contagiosum virus
cgggcugucgcccggc

SEQ ID NO: 3096497 - RNA, 16 nt, Molluscum contagiosum virus
ccacgaccgcaagugc

SEQ ID NO: 3096498 - RNA, 19 nt, Molluscum contagiosum virus
cggcguccggcgcucgccc

SEQ ID NO: 3096499 - RNA, 23 nt, Molluscum contagiosum virus
caugugcgagaacuggcgcagca

SEQ ID NO: 3096500 - RNA, 18 nt, Molluscum contagiosum virus
uaguugcgagccagccag

SEQ ID NO: 3096501 - RNA, 23 nt, Molluscum contagiosum virus
agcgcuugcucuucgaccucugc

SEQ ID NO: 3096502 - RNA, 13 nt, Molluscum contagiosum virus
cgcacgugcugcg

SEQ ID NO: 3096503 - RNA, 13 nt, Molluscum contagiosum virus
gcgcaaaagcaca

SEQ ID NO: 3096504 - RNA, 23 nt, Molluscum contagiosum virus
cggacgcccuccucgaccugcac

SEQ ID NO: 3096505 - RNA, 14 nt, Molluscum contagiosum virus
cuaugcccagccug

SEQ ID NO: 3096506 - RNA, 17 nt, Molluscum contagiosum virus
gaagagggucgugcagg

SEQ ID NO: 3096507 - RNA, 13 nt, Molluscum contagiosum virus
cgagcguguccag

SEQ ID NO: 3096508 - RNA, 23 nt, Molluscum contagiosum virus
cacgcaaggcaugcgcgcagugc

SEQ ID NO: 3096509 - RNA, 15 nt, Molluscum contagiosum virus
ucuacgccagcgacg

SEQ ID NO: 3096510 - RNA, 23 nt, Molluscum contagiosum virus
caccuuggcgcugcacaguucac

SEQ ID NO: 3096511 - RNA, 15 nt, Molluscum contagiosum virus
cggcgcgcagcgcgu

SEQ ID NO: 3096512 - RNA, 21 nt, Molluscum contagiosum virus
ugcuguccuucaagaacgaca

SEQ ID NO: 3096513 - RNA, 16 nt, Molluscum contagiosum virus
aaacuggacugagccg

SEQ ID NO: 3096514 - RNA, 21 nt, Molluscum contagiosum virus
gcgccgcgcaugacagccaug

SEQ ID NO: 3096515 - RNA, 12 nt, Molluscum contagiosum virus
gaggcugcucuc

SEQ ID NO: 3096516 - RNA, 19 nt, Molluscum contagiosum virus
caaggaaaggcacccgcag

SEQ ID NO: 3096517 - RNA, 15 nt, Molluscum contagiosum virus
gcgcacgccagccug

SEQ ID NO: 3096518 - RNA, 12 nt, Molluscum contagiosum virus
acgaagcugugc

SEQ ID NO: 3096519 - RNA, 20 nt, Molluscum contagiosum virus
ucgugcucguguguccgcac

SEQ ID NO: 3096520 - RNA, 21 nt, Molluscum contagiosum virus
cacgccgcucucgugcaaagc

SEQ ID NO: 3096521 - RNA, 23 nt, Molluscum contagiosum virus
cgaacgagagacacgcacacucg

SEQ ID NO: 3096522 - RNA, 14 nt, Molluscum contagiosum virus
acgaggccuacagc

SEQ ID NO: 3096523 - RNA, 20 nt, Molluscum contagiosum virus
cagguucucgcacaguacca

SEQ ID NO: 3096524 - RNA, 15 nt, Molluscum contagiosum virus
acgugcgugcccaag

SEQ ID NO: 3096525 - RNA, 12 nt, Molluscum contagiosum virus
ccaccagcugcc

SEQ ID NO: 3096526 - RNA, 16 nt, Molluscum contagiosum virus
caggcgcagcgcggcc

SEQ ID NO: 3096527 - RNA, 17 nt, Molluscum contagiosum virus
gguagugguccaccagc

SEQ ID NO: 3096528 - RNA, 18 nt, Molluscum contagiosum virus
ggcaagcuucgggccgcu

SEQ ID NO: 3096529 - RNA, 16 nt, Molluscum contagiosum virus
guccgccucgagcacg

SEQ ID NO: 3096530 - RNA, 13 nt, Molluscum contagiosum virus
cuuguugugcuuu

SEQ ID NO: 3096531 - RNA, 23 nt, Molluscum contagiosum virus
cagcgugcgcgggcacgccgcag

SEQ ID NO: 3096532 - RNA, 14 nt, Molluscum contagiosum virus
cgcgagcgcgcccc

SEQ ID NO: 3096533 - RNA, 16 nt, Molluscum contagiosum virus
gcacaugcagcugcag

SEQ ID NO: 3096534 - RNA, 19 nt, Molluscum contagiosum virus
gcucgcacccgcgccgcgg

SEQ ID NO: 3096535 - RNA, 15 nt, Molluscum contagiosum virus
gacgcgccucgagca

SEQ ID NO: 3096536 - RNA, 12 nt, Molluscum contagiosum virus
cgccgcaaagcu

SEQ ID NO: 3096537 - RNA, 21 nt, Molluscum contagiosum virus
gaaccccucgugcugggccug

SEQ ID NO: 3096538 - RNA, 18 nt, Molluscum contagiosum virus
ggacgaugguggcgcugc

SEQ ID NO: 3096539 - RNA, 22 nt, Molluscum contagiosum virus
gaagacgugcugcgcgcccagg

SEQ ID NO: 3096540 - RNA, 18 nt, Molluscum contagiosum virus
ggacagugccuccgcgga

SEQ ID NO: 3096541 - RNA, 14 nt, Molluscum contagiosum virus
uggcguugcugcug

SEQ ID NO: 3096542 - RNA, 21 nt, Molluscum contagiosum virus
augugagcaagcugcaagcca

SEQ ID NO: 3096543 - RNA, 20 nt, Molluscum contagiosum virus
ucuucaccugcauugagcuc

SEQ ID NO: 3096544 - RNA, 22 nt, Molluscum contagiosum virus
uucuucgcagaggacagcuccu

SEQ ID NO: 3096545 - RNA, 16 nt, Molluscum contagiosum virus
gaacugacugcugccc

SEQ ID NO: 3096546 - RNA, 17 nt, Molluscum contagiosum virus
acugccgccgccgcgag

SEQ ID NO: 3096547 - RNA, 16 nt, Molluscum contagiosum virus
ucuccaugucgucaaa

SEQ ID NO: 3096548 - RNA, 14 nt, Molluscum contagiosum virus
agaggagauggcaa

SEQ ID NO: 3096549 - RNA, 17 nt, Molluscum contagiosum virus
agagcaucgagcuggug

SEQ ID NO: 3096550 - RNA, 14 nt, Molluscum contagiosum virus
cgcgcccugcacga

SEQ ID NO: 3096551 - RNA, 14 nt, Molluscum contagiosum virus
cgacgugcagacgc

SEQ ID NO: 3096552 - RNA, 18 nt, Molluscum contagiosum virus
cggcggcgcacgcggcuc

SEQ ID NO: 3096553 - RNA, 21 nt, Molluscum contagiosum virus
gugcuugcgcacggaccucaa

SEQ ID NO: 3096554 - RNA, 12 nt, Molluscum contagiosum virus
cggcggccacac

SEQ ID NO: 3096555 - RNA, 20 nt, Molluscum contagiosum virus
guccucgugggauaggcaca

SEQ ID NO: 3096556 - RNA, 21 nt, Molluscum contagiosum virus
cagcgggcuacucgagcacgg

SEQ ID NO: 3096557 - RNA, 24 nt, Molluscum contagiosum virus
gcggcaaaugcgucccagcagcug

SEQ ID NO: 3096558 - RNA, 23 nt, Molluscum contagiosum virus
gccgcgcuucacggagaucaggc

SEQ ID NO: 3096559 - RNA, 22 nt, Molluscum contagiosum virus
gugcgacucgucgagcacgaag

SEQ ID NO: 3096560 - RNA, 12 nt, Molluscum contagiosum virus
ccugccuguggg

SEQ ID NO: 3096561 - RNA, 12 nt, Molluscum contagiosum virus
gaaugcccgcaa

SEQ ID NO: 3096562 - RNA, 21 nt, Molluscum contagiosum virus
gcccgcgcucuuacugcagca

SEQ ID NO: 3096563 - RNA, 17 nt, Molluscum contagiosum virus
cucgcgcguccgcaaag

SEQ ID NO: 3096564 - RNA, 18 nt, Molluscum contagiosum virus
ggcgaccagcugguccug

SEQ ID NO: 3096565 - RNA, 16 nt, Molluscum contagiosum virus
cucgcugcugcucuuc

SEQ ID NO: 3096566 - RNA, 14 nt, Molluscum contagiosum virus
uuuguccugagccu

SEQ ID NO: 3096567 - RNA, 23 nt, Molluscum contagiosum virus
cggagcgccuucugcaagcugcc

SEQ ID NO: 3096568 - RNA, 15 nt, Molluscum contagiosum virus
ggcgaccagcucuug

SEQ ID NO: 3096569 - RNA, 17 nt, Molluscum contagiosum virus
ggcgcgcgcgcuagccg

SEQ ID NO: 3096570 - RNA, 12 nt, Molluscum contagiosum virus
acggcccaccuu

SEQ ID NO: 3096571 - RNA, 15 nt, Molluscum contagiosum virus
guaccagccgcugcg

SEQ ID NO: 3096572 - RNA, 13 nt, Molluscum contagiosum virus
ugcgcccacgagu

SEQ ID NO: 3096573 - RNA, 13 nt, Molluscum contagiosum virus
ccugcgcaacgcg

SEQ ID NO: 3096574 - RNA, 20 nt, Molluscum contagiosum virus
gcucaucggcgagcucuuuu

SEQ ID NO: 3096575 - RNA, 19 nt, Molluscum contagiosum virus
acacgcgcgcgugcugcug

SEQ ID NO: 3096576 - RNA, 18 nt, Molluscum contagiosum virus
gagcucgguagccaggcg

SEQ ID NO: 3096577 - RNA, 14 nt, Molluscum contagiosum virus
ccugguuugcgcuc

SEQ ID NO: 3096578 - RNA, 21 nt, Molluscum contagiosum virus
uagcgugagagcaaagaaugc

SEQ ID NO: 3096579 - RNA, 10 nt, Molluscum contagiosum virus
cuccagagcc

SEQ ID NO: 3096580 - RNA, 17 nt, Molluscum contagiosum virus
cucuucccguuccuggg

SEQ ID NO: 3096581 - RNA, 23 nt, Molluscum contagiosum virus
ccugucaucaccccgcugggccg

SEQ ID NO: 3096582 - RNA, 20 nt, Molluscum contagiosum virus
accgucaaccugcugccucc

SEQ ID NO: 3096583 - RNA, 17 nt, Molluscum contagiosum virus
agggcuacgaguucugc

SEQ ID NO: 3096584 - RNA, 18 nt, Molluscum contagiosum virus
cucggacggaggucugcu

SEQ ID NO: 3096585 - RNA, 17 nt, Molluscum contagiosum virus
ugcucgcggagggcagc

SEQ ID NO: 3096586 - RNA, 18 nt, Molluscum contagiosum virus
cuccuuugcgagcacugu

SEQ ID NO: 3096587 - RNA, 14 nt, Molluscum contagiosum virus
gacaggaugccugu

SEQ ID NO: 3096588 - RNA, 16 nt, Molluscum contagiosum virus
ugggaaaccucaccuc

SEQ ID NO: 3096589 - RNA, 18 nt, Molluscum contagiosum virus
ccgcaguaccggccaagg

SEQ ID NO: 3096590 - RNA, 20 nt, Molluscum contagiosum virus
gcucauccucccugcgggcg

SEQ ID NO: 3096591 - RNA, 17 nt, Molluscum contagiosum virus
cggcccgaaggccaccu

SEQ ID NO: 3096592 - RNA, 12 nt, Molluscum contagiosum virus
gguugccaggca

SEQ ID NO: 3096593 - RNA, 13 nt, Molluscum contagiosum virus
gcagcugccgcag

SEQ ID NO: 3096594 - RNA, 19 nt, Molluscum contagiosum virus
cgcccagcucgaugggcuc

SEQ ID NO: 3096595 - RNA, 13 nt, Molluscum contagiosum virus
gcaacgcgggcca

SEQ ID NO: 3096596 - RNA, 14 nt, Molluscum contagiosum virus
ugccuuucuuccag

SEQ ID NO: 3096597 - RNA, 20 nt, Molluscum contagiosum virus
gggcacccagcccugguuug

SEQ ID NO: 3096598 - RNA, 13 nt, Molluscum contagiosum virus
ucucgcccagcac

SEQ ID NO: 3096599 - RNA, 14 nt, Molluscum contagiosum virus
gagaccgucaaccu

SEQ ID NO: 3096600 - RNA, 23 nt, Molluscum contagiosum virus
cgaggaccggcgcaacgagcagc

SEQ ID NO: 3096601 - RNA, 12 nt, Molluscum contagiosum virus
aacagucgcgcg

SEQ ID NO: 3096602 - RNA, 18 nt, Molluscum contagiosum virus
aucccccgccaggaacga

SEQ ID NO: 3096603 - RNA, 17 nt, Molluscum contagiosum virus
ucaagaagcccaaggag

SEQ ID NO: 3096604 - RNA, 17 nt, Molluscum contagiosum virus
cgcgucacggauacugu

SEQ ID NO: 3096605 - RNA, 23 nt, Molluscum contagiosum virus
gaaagcgucgugcuccacgcgca

SEQ ID NO: 3096606 - RNA, 17 nt, Molluscum contagiosum virus
cggacacguugcagcag

SEQ ID NO: 3096607 - RNA, 17 nt, Molluscum contagiosum virus
ucgcgcacagaaagcca

SEQ ID NO: 3096608 - RNA, 21 nt, Molluscum contagiosum virus
auguccaugucgcgcaucacc

SEQ ID NO: 3096609 - RNA, 19 nt, Molluscum contagiosum virus
cgcgaacucgcggcagugc

SEQ ID NO: 3096610 - RNA, 16 nt, Molluscum contagiosum virus
ugcugaagaaggagcc

SEQ ID NO: 3096611 - RNA, 22 nt, Molluscum contagiosum virus
gcugcucgcugccuggugcaca

SEQ ID NO: 3096612 - RNA, 22 nt, Molluscum contagiosum virus
gacuccuuccggagacaccagc

SEQ ID NO: 3096613 - RNA, 14 nt, Molluscum contagiosum virus
aagucaugcucgcg

SEQ ID NO: 3096614 - RNA, 17 nt, Molluscum contagiosum virus
agcaguaccugcuaacu

SEQ ID NO: 3096615 - RNA, 21 nt, Molluscum contagiosum virus
gcuggagcgagugcgcgugcg

SEQ ID NO: 3096616 - RNA, 23 nt, Molluscum contagiosum virus
cgcagcgcuggagcuggcugggc

SEQ ID NO: 3096617 - RNA, 17 nt, Molluscum contagiosum virus
cugcacuucggacaccu

SEQ ID NO: 3096618 - RNA, 14 nt, Molluscum contagiosum virus
cacccgugcccgcu

SEQ ID NO: 3096619 - RNA, 12 nt, Molluscum contagiosum virus
cucuaggagcuc

SEQ ID NO: 3096620 - RNA, 11 nt, Molluscum contagiosum virus
uucugccugcu

SEQ ID NO: 3096621 - RNA, 14 nt, Molluscum contagiosum virus
gcuacuugcuggcg

SEQ ID NO: 3096622 - RNA, 17 nt, Molluscum contagiosum virus
ugccggcucagcgugga

SEQ ID NO: 3096623 - RNA, 15 nt, Molluscum contagiosum virus
ucgacguggagccug

SEQ ID NO: 3096624 - RNA, 20 nt, Molluscum contagiosum virus
aaugagcacuugccgcgccu

SEQ ID NO: 3096625 - RNA, 19 nt, Molluscum contagiosum virus
ggagcgcagucccagcacc

SEQ ID NO: 3096626 - RNA, 16 nt, Molluscum contagiosum virus
gcuggagacggcagug

SEQ ID NO: 3096627 - RNA, 20 nt, Molluscum contagiosum virus
cagaucgcgagaggagacgg

SEQ ID NO: 3096628 - RNA, 18 nt, Molluscum contagiosum virus
ggcugcuggcggugcucu

SEQ ID NO: 3096629 - RNA, 16 nt, Molluscum contagiosum virus
uagcguugguaacaag

SEQ ID NO: 3096630 - RNA, 18 nt, Molluscum contagiosum virus
aaugcaugcggagcuggc

SEQ ID NO: 3096631 - RNA, 16 nt, Molluscum contagiosum virus
cugccuggugcacaca

SEQ ID NO: 3096632 - RNA, 20 nt, Molluscum contagiosum virus
cgcgccgaggacuaccuggc

SEQ ID NO: 3096633 - RNA, 22 nt, Molluscum contagiosum virus
acgacaaggaaaggcacccacc

SEQ ID NO: 3096634 - RNA, 17 nt, Molluscum contagiosum virus
uccccaagaccugcuuc

SEQ ID NO: 3096635 - RNA, 22 nt, Molluscum contagiosum virus
acguccaggccgcggcagcucu

SEQ ID NO: 3096636 - RNA, 18 nt, Molluscum contagiosum virus
gcagccgcugcugcugca

SEQ ID NO: 3096637 - RNA, 18 nt, Molluscum contagiosum virus
ccggcugccgcugccugu

SEQ ID NO: 3096638 - RNA, 19 nt, Molluscum contagiosum virus
gcagccccgacgccagcgc

SEQ ID NO: 3096639 - RNA, 17 nt, Molluscum contagiosum virus
cgccgagcccgagcccg

SEQ ID NO: 3096640 - RNA, 17 nt, Molluscum contagiosum virus
gcuagcgcuggagauga

SEQ ID NO: 3096641 - RNA, 11 nt, Molluscum contagiosum virus
cccgcccgugc

SEQ ID NO: 3096642 - RNA, 18 nt, Molluscum contagiosum virus
gcugcacgugcagcggcg

SEQ ID NO: 3096643 - RNA, 15 nt, Molluscum contagiosum virus
guacggcgguucgca

SEQ ID NO: 3096644 - RNA, 17 nt, Molluscum contagiosum virus
gccagcgucgcgcgccg

SEQ ID NO: 3096645 - RNA, 15 nt, Molluscum contagiosum virus
uguggccuacguggc

SEQ ID NO: 3096646 - RNA, 17 nt, Molluscum contagiosum virus
aaggcaccugcaggaaa

SEQ ID NO: 3096647 - RNA, 15 nt, Molluscum contagiosum virus
gcgcgcccaccagca

SEQ ID NO: 3096648 - RNA, 18 nt, Molluscum contagiosum virus
gaagugacuagcgcuggc

SEQ ID NO: 3096649 - RNA, 19 nt, Molluscum contagiosum virus
cguaguacugcagcagcuc

SEQ ID NO: 3096650 - RNA, 22 nt, Molluscum contagiosum virus
cggacgccuuuugugcagcgcg

SEQ ID NO: 3096651 - RNA, 22 nt, Molluscum contagiosum virus
cggccguggcaaacaggcacac

SEQ ID NO: 3096652 - RNA, 21 nt, Molluscum contagiosum virus
ccaccucggcguuggccacga

SEQ ID NO: 3096653 - RNA, 13 nt, Molluscum contagiosum virus
gccgagcucgccu

SEQ ID NO: 3096654 - RNA, 21 nt, Molluscum contagiosum virus
gcaucagagaagugcuccgca

SEQ ID NO: 3096655 - RNA, 17 nt, Molluscum contagiosum virus
cgcgucugcaaggccug

SEQ ID NO: 3096656 - RNA, 23 nt, Molluscum contagiosum virus
cucugcucgugcccgcacacgca

SEQ ID NO: 3096657 - RNA, 22 nt, Molluscum contagiosum virus
ccacagguuucucaacaugaau

SEQ ID NO: 3096658 - RNA, 12 nt, Molluscum contagiosum virus
agaggggcaaca

SEQ ID NO: 3096659 - RNA, 17 nt, Molluscum contagiosum virus
gcggcagugcuggugaa

SEQ ID NO: 3096660 - RNA, 17 nt, Molluscum contagiosum virus
ugcagccgcugcugcug

SEQ ID NO: 3096661 - RNA, 20 nt, Molluscum contagiosum virus
cccggcugccgcugccugug

SEQ ID NO: 3096662 - RNA, 14 nt, Molluscum contagiosum virus
ccacgugccagagu

SEQ ID NO: 3096663 - RNA, 14 nt, Molluscum contagiosum virus
gccgcgcugcuccg

SEQ ID NO: 3096664 - RNA, 16 nt, Molluscum contagiosum virus
cgggagcucacggcug

SEQ ID NO: 3096665 - RNA, 13 nt, Molluscum contagiosum virus
cgcgcaagugcgu

SEQ ID NO: 3096666 - RNA, 19 nt, Molluscum contagiosum virus
acgggcacgcgcgcgccuu

SEQ ID NO: 3096667 - RNA, 20 nt, Molluscum contagiosum virus
aucuucgaaguggccgucgc

SEQ ID NO: 3096668 - RNA, 18 nt, Molluscum contagiosum virus
ggacgaagcugugcaaga

SEQ ID NO: 3096669 - RNA, 14 nt, Molluscum contagiosum virus
cgacgggccccugu

SEQ ID NO: 3096670 - RNA, 15 nt, Molluscum contagiosum virus
uugacgcccauuaaa

SEQ ID NO: 3096671 - RNA, 23 nt, Molluscum contagiosum virus
ucgcgcuuuuccagguggccaac

SEQ ID NO: 3096672 - RNA, 14 nt, Molluscum contagiosum virus
agcggcgagcuuug

SEQ ID NO: 3096673 - RNA, 13 nt, Molluscum contagiosum virus
cuugggcucuggc

SEQ ID NO: 3096674 - RNA, 22 nt, Molluscum contagiosum virus
gaaggaucccugcccgcgugag

SEQ ID NO: 3096675 - RNA, 15 nt, Molluscum contagiosum virus
ucaggcagcugcugc

SEQ ID NO: 3096676 - RNA, 20 nt, Molluscum contagiosum virus
cagcucauagcccaugcgca

SEQ ID NO: 3096677 - RNA, 12 nt, Molluscum contagiosum virus
gcgccuugcagc

SEQ ID NO: 3096678 - RNA, 18 nt, Molluscum contagiosum virus
ccugcugguggugcugga

SEQ ID NO: 3096679 - RNA, 11 nt, Molluscum contagiosum virus
agcaggcacuc

SEQ ID NO: 3096680 - RNA, 15 nt, Molluscum contagiosum virus
gaacugacugcugcc

SEQ ID NO: 3096681 - RNA, 18 nt, Molluscum contagiosum virus
gcugcuucccgcugagcg

SEQ ID NO: 3096682 - RNA, 19 nt, Molluscum contagiosum virus
acgcucgcgacgugcgcgc

SEQ ID NO: 3096683 - RNA, 18 nt, Molluscum contagiosum virus
ccgaggcagguuccggug

SEQ ID NO: 3096684 - RNA, 21 nt, Molluscum contagiosum virus
cgugcgccaguccgcggcgcg

SEQ ID NO: 3096685 - RNA, 23 nt, Molluscum contagiosum virus
cugcuucccgcugagcgcagcac

SEQ ID NO: 3096686 - RNA, 21 nt, Molluscum contagiosum virus
uacuucggacgcgaacugccc

SEQ ID NO: 3096687 - RNA, 15 nt, Molluscum contagiosum virus
cgucuuacugcugca

SEQ ID NO: 3096688 - RNA, 17 nt, Molluscum contagiosum virus
cgcacaacuugggcccg

SEQ ID NO: 3096689 - RNA, 17 nt, Molluscum contagiosum virus
gaaggcauaccugugcc

SEQ ID NO: 3096690 - RNA, 16 nt, Molluscum contagiosum virus
ucuugugaggaaacac

SEQ ID NO: 3096691 - RNA, 12 nt, Molluscum contagiosum virus
gagccgcccgcg

SEQ ID NO: 3096692 - RNA, 23 nt, Molluscum contagiosum virus
cgagcgcauucgcgcgcccccgc

SEQ ID NO: 3096693 - RNA, 16 nt, Molluscum contagiosum virus
cggcgugcuggccagc

SEQ ID NO: 3096694 - RNA, 22 nt, Molluscum contagiosum virus
ccgccgcgaggacccgcgcuuu

SEQ ID NO: 3096695 - RNA, 19 nt, Molluscum contagiosum virus
gcugcgagaacucgcgugc

SEQ ID NO: 3096696 - RNA, 24 nt, Molluscum contagiosum virus
augcuugcuuccggugccggccgc

SEQ ID NO: 3096697 - RNA, 15 nt, Molluscum contagiosum virus
cggcguuucucaggu

SEQ ID NO: 3096698 - RNA, 23 nt, Molluscum contagiosum virus
caggucggccagcagcuccuggu

SEQ ID NO: 3096699 - RNA, 14 nt, Molluscum contagiosum virus
gcgccggacuacua

SEQ ID NO: 3096700 - RNA, 18 nt, Molluscum contagiosum virus
cccgcgcgcggacagccu

SEQ ID NO: 3096701 - RNA, 19 nt, Molluscum contagiosum virus
cucagccucuacuccacua

SEQ ID NO: 3096702 - RNA, 20 nt, Molluscum contagiosum virus
cgggaauaccggagacacca

SEQ ID NO: 3096703 - RNA, 17 nt, Molluscum contagiosum virus
caccagcaccagcacaa

SEQ ID NO: 3096704 - RNA, 20 nt, Molluscum contagiosum virus
gccagcguacggcccgaagg

SEQ ID NO: 3096705 - RNA, 17 nt, Molluscum contagiosum virus
gcccgagcgucaguguu

SEQ ID NO: 3096706 - RNA, 15 nt, Molluscum contagiosum virus
cccucggcgcgccgu

SEQ ID NO: 3096707 - RNA, 12 nt, Molluscum contagiosum virus
gggccgcgaggc

SEQ ID NO: 3096708 - RNA, 14 nt, Molluscum contagiosum virus
aggcagcugcugcg

SEQ ID NO: 3096709 - RNA, 13 nt, Molluscum contagiosum virus
uggccauggugga

SEQ ID NO: 3096710 - RNA, 14 nt, Molluscum contagiosum virus
ucggaacgcuaucc

SEQ ID NO: 3096711 - RNA, 13 nt, Molluscum contagiosum virus
cacaugccuucag

SEQ ID NO: 3096712 - RNA, 20 nt, Molluscum contagiosum virus
cugcgggcgccgggcgcgcc

SEQ ID NO: 3096713 - RNA, 19 nt, Molluscum contagiosum virus
agcgcguccaugcugaucu

SEQ ID NO: 3096714 - RNA, 22 nt, Molluscum contagiosum virus
cgcggacacauugcgaggcacc

SEQ ID NO: 3096715 - RNA, 20 nt, Molluscum contagiosum virus
gggcacggcacccgccagcu

SEQ ID NO: 3096716 - RNA, 21 nt, Molluscum contagiosum virus
agcucgacugcguugucuccu

SEQ ID NO: 3096717 - RNA, 17 nt, Molluscum contagiosum virus
cacgcccgcaaugcagu

SEQ ID NO: 3096718 - RNA, 12 nt, Molluscum contagiosum virus
ucuccacaaaga

SEQ ID NO: 3096719 - RNA, 18 nt, Molluscum contagiosum virus
cguggaguccaugcccac

SEQ ID NO: 3096720 - RNA, 14 nt, Molluscum contagiosum virus
ccacgcccgggccc

SEQ ID NO: 3096721 - RNA, 16 nt, Molluscum contagiosum virus
ugacgcgcggcggcgc

SEQ ID NO: 3096722 - RNA, 17 nt, Molluscum contagiosum virus
gcgcugcgcgcgcucgc

SEQ ID NO: 3096723 - RNA, 19 nt, Molluscum contagiosum virus
cgacgcaaaagaggccugc

SEQ ID NO: 3096724 - RNA, 14 nt, Molluscum contagiosum virus
aggagagagagaca

SEQ ID NO: 3096725 - RNA, 14 nt, Molluscum contagiosum virus
gcgcgggccugucc

SEQ ID NO: 3096726 - RNA, 23 nt, Molluscum contagiosum virus
ggaccgcgcgaacgaggagggca

SEQ ID NO: 3096727 - RNA, 20 nt, Molluscum contagiosum virus
gcuucuccaccuucaggacg

SEQ ID NO: 3096728 - RNA, 19 nt, Molluscum contagiosum virus
ugccuggagggcagugcca

SEQ ID NO: 3096729 - RNA, 19 nt, Molluscum contagiosum virus
gcccuccucgaccugcacg

SEQ ID NO: 3096730 - RNA, 14 nt, Molluscum contagiosum virus
ggcggccguguccu

SEQ ID NO: 3096731 - RNA, 15 nt, Molluscum contagiosum virus
agcaaugcgcaaggc

SEQ ID NO: 3096732 - RNA, 15 nt, Molluscum contagiosum virus
aguaccuagugcaca

SEQ ID NO: 3096733 - RNA, 20 nt, Molluscum contagiosum virus
gcacagcacaggccccagca

SEQ ID NO: 3096734 - RNA, 22 nt, Molluscum contagiosum virus
acugcugcccgcgcagcgccac

SEQ ID NO: 3096735 - RNA, 22 nt, Molluscum contagiosum virus
cgaugacaucuggaggcaaucu

SEQ ID NO: 3096736 - RNA, 22 nt, Molluscum contagiosum virus
gcugccgguggaagagcccgca

SEQ ID NO: 3096737 - RNA, 16 nt, Molluscum contagiosum virus
gcgggcuacucgagca

SEQ ID NO: 3096738 - RNA, 15 nt, Molluscum contagiosum virus
cgcgugcgcagcacg

SEQ ID NO: 3096739 - RNA, 23 nt, Molluscum contagiosum virus
ucgacugcguugucuccuccuga

SEQ ID NO: 3096740 - RNA, 13 nt, Molluscum contagiosum virus
ccgcuuccuggca

SEQ ID NO: 3096741 - RNA, 22 nt, Molluscum contagiosum virus
acgcgccgaggacuaccuggcg

SEQ ID NO: 3096742 - RNA, 19 nt, Molluscum contagiosum virus
gccgggaauaccggagaca

SEQ ID NO: 3096743 - RNA, 13 nt, Molluscum contagiosum virus
cuguggcgcacac

SEQ ID NO: 3096744 - RNA, 17 nt, Molluscum contagiosum virus
gcugcccgcgcagcgcc

SEQ ID NO: 3096745 - RNA, 17 nt, Molluscum contagiosum virus
ggcccgcgcggagacgc

SEQ ID NO: 3096746 - RNA, 22 nt, Molluscum contagiosum virus
uccucgagagggagcagccucc

SEQ ID NO: 3096747 - RNA, 22 nt, Molluscum contagiosum virus
cggaagcuugcucagcagcuuc

SEQ ID NO: 3096748 - RNA, 16 nt, Molluscum contagiosum virus
cguaagccaccgcgca

SEQ ID NO: 3096749 - RNA, 21 nt, Molluscum contagiosum virus
ugggcaacgcgcgcgcgcugg

SEQ ID NO: 3096750 - RNA, 21 nt, Molluscum contagiosum virus
aaauagccaugcuggucacgc

SEQ ID NO: 3096751 - RNA, 17 nt, Molluscum contagiosum virus
cgucgccggacagcuca

SEQ ID NO: 3096752 - RNA, 21 nt, Molluscum contagiosum virus
aggaucggagcgcagcugccg

SEQ ID NO: 3096753 - RNA, 20 nt, Molluscum contagiosum virus
cguccacaaagcccuccuga

SEQ ID NO: 3096754 - RNA, 21 nt, Molluscum contagiosum virus
gcagcuggcgcgcgccgagcc

SEQ ID NO: 3096755 - RNA, 16 nt, Molluscum contagiosum virus
ccauguuuccugcggc

SEQ ID NO: 3096756 - RNA, 22 nt, Molluscum contagiosum virus
ucacggcaaacgccacuggguc

SEQ ID NO: 3096757 - RNA, 16 nt, Molluscum contagiosum virus
cggcgcucgccuuucc

SEQ ID NO: 3096758 - RNA, 15 nt, Molluscum contagiosum virus
cguccgcggcacgcg

SEQ ID NO: 3096759 - RNA, 15 nt, Molluscum contagiosum virus
cgauaucgaucacgc

SEQ ID NO: 3096760 - RNA, 13 nt, Molluscum contagiosum virus
cgagcugcugccc

SEQ ID NO: 3096761 - RNA, 23 nt, Molluscum contagiosum virus
auugcccgcgcgcggacagccua

SEQ ID NO: 3096762 - RNA, 15 nt, Molluscum contagiosum virus
gcgcaagagccgccg

SEQ ID NO: 3096763 - RNA, 23 nt, Molluscum contagiosum virus
accagcuccgccgggaauaccgg

SEQ ID NO: 3096764 - RNA, 15 nt, Molluscum contagiosum virus
ggcaucaugagccag

SEQ ID NO: 3096765 - RNA, 21 nt, Molluscum contagiosum virus
ccgcgcccggcgggcacaucc

SEQ ID NO: 3096766 - RNA, 15 nt, Molluscum contagiosum virus
cgucgaccuggaagc

SEQ ID NO: 3096767 - RNA, 19 nt, Molluscum contagiosum virus
uggccucugccugcaagga

SEQ ID NO: 3096768 - RNA, 14 nt, Molluscum contagiosum virus
gcucagccccagca

SEQ ID NO: 3096769 - RNA, 23 nt, Molluscum contagiosum virus
gccgcggugccgggcgucuccgc

SEQ ID NO: 3096770 - RNA, 20 nt, Molluscum contagiosum virus
guagcgaaugcagugcccgg

SEQ ID NO: 3096771 - RNA, 18 nt, Molluscum contagiosum virus
accuuggacacgugcgug

SEQ ID NO: 3096772 - RNA, 22 nt, Molluscum contagiosum virus
cgcagcccacgugccagcucau

SEQ ID NO: 3096773 - RNA, 14 nt, Molluscum contagiosum virus
accccucgugcugg

SEQ ID NO: 3096774 - RNA, 22 nt, Molluscum contagiosum virus
cugcucaugcgcaagcagcucg

SEQ ID NO: 3096775 - RNA, 20 nt, Molluscum contagiosum virus
guagggggguggggagacuu

SEQ ID NO: 3096776 - RNA, 16 nt, Molluscum contagiosum virus
cgcggcgcgugccagu

SEQ ID NO: 3096777 - RNA, 21 nt, Molluscum contagiosum virus
acaugcucaagcaccugcgcu

SEQ ID NO: 3096778 - RNA, 13 nt, Molluscum contagiosum virus
ucgagcgcgcugg

SEQ ID NO: 3096779 - RNA, 14 nt, Molluscum contagiosum virus
ccggcaguagcagc

SEQ ID NO: 3096780 - RNA, 15 nt, Molluscum contagiosum virus
acgacuuccgcggcg

SEQ ID NO: 3096781 - RNA, 21 nt, Molluscum contagiosum virus
cgaacgagggaugcacacacu

SEQ ID NO: 3096782 - RNA, 19 nt, Molluscum contagiosum virus
uaugccgcgugcucugcuc

SEQ ID NO: 3096783 - RNA, 20 nt, Molluscum contagiosum virus
gcacaucucucagggcagcg

SEQ ID NO: 3096784 - RNA, 18 nt, Molluscum contagiosum virus
cucgugggauaggcacac

SEQ ID NO: 3096785 - RNA, 15 nt, Molluscum contagiosum virus
ccagcagcugcuccg

SEQ ID NO: 3096786 - RNA, 14 nt, Molluscum contagiosum virus
cagugcgcgcacaa

SEQ ID NO: 3096787 - RNA, 22 nt, Molluscum contagiosum virus
ccuacgcgcgcguaacagcgcg

SEQ ID NO: 3096788 - RNA, 18 nt, Molluscum contagiosum virus
ucacggacucgagcccca

SEQ ID NO: 3096789 - RNA, 13 nt, Molluscum contagiosum virus
gcgaaagaacacg

SEQ ID NO: 3096790 - RNA, 13 nt, Molluscum contagiosum virus
cugguggccgcac

SEQ ID NO: 3096791 - RNA, 21 nt, Molluscum contagiosum virus
gagacugacgccgauguccug

SEQ ID NO: 3096792 - RNA, 16 nt, Molluscum contagiosum virus
cauacuccugcuggcg

SEQ ID NO: 3096793 - RNA, 12 nt, Molluscum contagiosum virus
acggacuucuug

SEQ ID NO: 3096794 - RNA, 22 nt, Molluscum contagiosum virus
acggcggcgcaagcgcaagccg

SEQ ID NO: 3096795 - RNA, 20 nt, Molluscum contagiosum virus
gaugucgucgaagcccagcu

SEQ ID NO: 3096796 - RNA, 24 nt, Molluscum contagiosum virus
cuacagcagccgcagcccacgugc

SEQ ID NO: 3096797 - RNA, 20 nt, Molluscum contagiosum virus
cugcgcaacgcgggccaggc

SEQ ID NO: 3096798 - RNA, 20 nt, Molluscum contagiosum virus
cgcaaaagaggccugcugaa

SEQ ID NO: 3096799 - RNA, 16 nt, Molluscum contagiosum virus
cgagacggaaauguug

SEQ ID NO: 3096800 - RNA, 21 nt, Molluscum contagiosum virus
cuagaaugcguguggugacuc

SEQ ID NO: 3096801 - RNA, 22 nt, Molluscum contagiosum virus
gcgcccgcgugcacccuccgca

SEQ ID NO: 3096802 - RNA, 21 nt, Molluscum contagiosum virus
acguccccgaacugcugggcg

SEQ ID NO: 3096803 - RNA, 16 nt, Molluscum contagiosum virus
ccagcuacgagccgcu

SEQ ID NO: 3096804 - RNA, 16 nt, Molluscum contagiosum virus
aguccaugcccacgcg

SEQ ID NO: 3096805 - RNA, 13 nt, Molluscum contagiosum virus
gacggggcgcacg

SEQ ID NO: 3096806 - RNA, 19 nt, Molluscum contagiosum virus
uggucuccgcgggcagccg

SEQ ID NO: 3096807 - RNA, 14 nt, Molluscum contagiosum virus
gcggcauccugaug

SEQ ID NO: 3096808 - RNA, 20 nt, Molluscum contagiosum virus
cgagcgcggcaacagcacga

SEQ ID NO: 3096809 - RNA, 18 nt, Molluscum contagiosum virus
ucuucaggaacaaggcca

SEQ ID NO: 3096810 - RNA, 20 nt, Molluscum contagiosum virus
cggucgacgagugcgccgcg

SEQ ID NO: 3096811 - RNA, 16 nt, Molluscum contagiosum virus
gcgccgccggugcgug

SEQ ID NO: 3096812 - RNA, 21 nt, Molluscum contagiosum virus
aggaaaggcacccgcaacaag

SEQ ID NO: 3096813 - RNA, 17 nt, Molluscum contagiosum virus
gcucggacacacgcacc

SEQ ID NO: 3096814 - RNA, 19 nt, Molluscum contagiosum virus
cacguggaaucacggccag

SEQ ID NO: 3096815 - RNA, 15 nt, Molluscum contagiosum virus
ggaaaggcacccacc

SEQ ID NO: 3096816 - RNA, 17 nt, Molluscum contagiosum virus
cauugcguguggggcau

SEQ ID NO: 3096817 - RNA, 15 nt, Molluscum contagiosum virus
gccgggggaacacgc

SEQ ID NO: 3096818 - RNA, 18 nt, Molluscum contagiosum virus
cucauccaccugcgcaac

SEQ ID NO: 3096819 - RNA, 14 nt, Molluscum contagiosum virus
gugugcacauugcu

SEQ ID NO: 3096820 - RNA, 15 nt, Molluscum contagiosum virus
ggcuccuucuucagc

SEQ ID NO: 3096821 - RNA, 16 nt, Molluscum contagiosum virus
ggcucuucucgcagcg

SEQ ID NO: 3096822 - RNA, 15 nt, Molluscum contagiosum virus
gacagcauccuggag

SEQ ID NO: 3096823 - RNA, 16 nt, Molluscum contagiosum virus
cggcugccgcugccug

SEQ ID NO: 3096824 - RNA, 12 nt, Molluscum contagiosum virus
cucuggcuccag

SEQ ID NO: 3096825 - RNA, 19 nt, Molluscum contagiosum virus
gagcccggaucagccccgc

SEQ ID NO: 3096826 - RNA, 18 nt, Molluscum contagiosum virus
guacagugcgcgcacaaa

SEQ ID NO: 3096827 - RNA, 21 nt, Molluscum contagiosum virus
ggauacagcgcggagagaaca

SEQ ID NO: 3096828 - RNA, 16 nt, Molluscum contagiosum virus
aagcagcaaacugugc

SEQ ID NO: 3096829 - RNA, 17 nt, Molluscum contagiosum virus
caccaggaacagggaaa

SEQ ID NO: 3096830 - RNA, 16 nt, Molluscum contagiosum virus
cacugugccagcagca

SEQ ID NO: 3096831 - RNA, 15 nt, Molluscum contagiosum virus
ucacgaccugguaga

SEQ ID NO: 3096832 - RNA, 22 nt, Molluscum contagiosum virus
cuaugagcggcacgggaaggcu

SEQ ID NO: 3096833 - RNA, 18 nt, Molluscum contagiosum virus
uggcgcgguccagccgca

SEQ ID NO: 3096834 - RNA, 17 nt, Molluscum contagiosum virus
ccgcaggccgggcaccc

SEQ ID NO: 3096835 - RNA, 16 nt, Molluscum contagiosum virus
ugguggacagccuuug

SEQ ID NO: 3096836 - RNA, 20 nt, Molluscum contagiosum virus
gcgugcauagugggcuugcg

SEQ ID NO: 3096837 - RNA, 18 nt, Molluscum contagiosum virus
aggcgcuugggcacugcu

SEQ ID NO: 3096838 - RNA, 23 nt, Molluscum contagiosum virus
cagcacaugcaggccgagaugag

SEQ ID NO: 3096839 - RNA, 13 nt, Molluscum contagiosum virus
cgagugugugcau

SEQ ID NO: 3096840 - RNA, 22 nt, Molluscum contagiosum virus
cgcggggcucguccucgggcgc

SEQ ID NO: 3096841 - RNA, 16 nt, Molluscum contagiosum virus
cuagccccagcaccag

SEQ ID NO: 3096842 - RNA, 14 nt, Molluscum contagiosum virus
caucgcugcacgcg

SEQ ID NO: 3096843 - RNA, 15 nt, Molluscum contagiosum virus
cgccgccaugcugcg

SEQ ID NO: 3096844 - RNA, 18 nt, Molluscum contagiosum virus
gcacccgcaggaaaggca

SEQ ID NO: 3096845 - RNA, 19 nt, Molluscum contagiosum virus
caugcacagccgcuuucug

SEQ ID NO: 3096846 - RNA, 13 nt, Molluscum contagiosum virus
ugcgagucucugu

SEQ ID NO: 3096847 - RNA, 14 nt, Molluscum contagiosum virus
guagcguggagcug

SEQ ID NO: 3096848 - RNA, 13 nt, Molluscum contagiosum virus
cggcgcgccgccc

SEQ ID NO: 3096849 - RNA, 22 nt, Molluscum contagiosum virus
ugcgcaguuuuuuuccgcaaga

SEQ ID NO: 3096850 - RNA, 22 nt, Molluscum contagiosum virus
ugaacucuucccguuccugggc

SEQ ID NO: 3096851 - RNA, 18 nt, Molluscum contagiosum virus
accacgagcacugccugc

SEQ ID NO: 3096852 - RNA, 22 nt, Molluscum contagiosum virus
gugcuggagggcacgcugcaca

SEQ ID NO: 3096853 - RNA, 14 nt, Molluscum contagiosum virus
ccaaaucgccgccc

SEQ ID NO: 3096854 - RNA, 13 nt, Molluscum contagiosum virus
ccugcugcagcuc

SEQ ID NO: 3096855 - RNA, 12 nt, Molluscum contagiosum virus
aggcacccgcaa

SEQ ID NO: 3096856 - RNA, 12 nt, Molluscum contagiosum virus
gcgcauggagag

SEQ ID NO: 3096857 - RNA, 11 nt, Molluscum contagiosum virus
cucggacagug

SEQ ID NO: 3096858 - RNA, 15 nt, Molluscum contagiosum virus
uguuuguugucccac

SEQ ID NO: 3096859 - RNA, 14 nt, Molluscum contagiosum virus
gaugcgccuuuucc

SEQ ID NO: 3096860 - RNA, 17 nt, Molluscum contagiosum virus
accuucggaacugcgga

SEQ ID NO: 3096861 - RNA, 17 nt, Molluscum contagiosum virus
ucggaggcggagcugcc

SEQ ID NO: 3096862 - RNA, 21 nt, Molluscum contagiosum virus
cgucgcggagcgcgcacggca

SEQ ID NO: 3096863 - RNA, 19 nt, Molluscum contagiosum virus
uucaccuuggcgcugcaca

SEQ ID NO: 3096864 - RNA, 13 nt, Molluscum contagiosum virus
ccggcugcccugu

SEQ ID NO: 3096865 - RNA, 20 nt, Molluscum contagiosum virus
aaaggcgggcccgcgaacga

SEQ ID NO: 3096866 - RNA, 20 nt, Molluscum contagiosum virus
cagcucgccgcgcgccgcug

SEQ ID NO: 3096867 - RNA, 17 nt, Molluscum contagiosum virus
ccgcacggcgcccagga

SEQ ID NO: 3096868 - RNA, 18 nt, Molluscum contagiosum virus
ggcgcauccucuccauca

SEQ ID NO: 3096869 - RNA, 19 nt, Molluscum contagiosum virus
gggcccgugcucaggccag

SEQ ID NO: 3096870 - RNA, 19 nt, Molluscum contagiosum virus
cgaagcaugucaggccggu

SEQ ID NO: 3096871 - RNA, 21 nt, Molluscum contagiosum virus
gccugcgggcggcacacacuu

SEQ ID NO: 3096872 - RNA, 17 nt, Molluscum contagiosum virus
gacaaagucgcgcgcgg

SEQ ID NO: 3096873 - RNA, 14 nt, Molluscum contagiosum virus
auggggauguggac

SEQ ID NO: 3096874 - RNA, 16 nt, Molluscum contagiosum virus
ccaacacuaccacagc

SEQ ID NO: 3096875 - RNA, 14 nt, Molluscum contagiosum virus
cagccaugaggaca

SEQ ID NO: 3096876 - RNA, 17 nt, Molluscum contagiosum virus
gcuugcucagcagcuuc

SEQ ID NO: 3096877 - RNA, 14 nt, Molluscum contagiosum virus
agacaccagcuccg

SEQ ID NO: 3096878 - RNA, 23 nt, Molluscum contagiosum virus
gaauaccggagacaccagcuccg

SEQ ID NO: 3096879 - RNA, 16 nt, Molluscum contagiosum virus
ugcauggcggcggcca

SEQ ID NO: 3096880 - RNA, 18 nt, Molluscum contagiosum virus
cacgaucaaggugcagaa

SEQ ID NO: 3096881 - RNA, 15 nt, Molluscum contagiosum virus
gaaaaaucccccgcc

SEQ ID NO: 3096882 - RNA, 14 nt, Molluscum contagiosum virus
caaagccugcugcg

SEQ ID NO: 3096883 - RNA, 20 nt, Molluscum contagiosum virus
cgcgggcucaagucgcccuu

SEQ ID NO: 3096884 - RNA, 15 nt, Molluscum contagiosum virus
uggcaaaccacgagc

SEQ ID NO: 3096885 - RNA, 13 nt, Molluscum contagiosum virus
gccuccaagaaga

SEQ ID NO: 3096886 - RNA, 15 nt, Molluscum contagiosum virus
gcccuuccuggaggg

SEQ ID NO: 3096887 - RNA, 19 nt, Molluscum contagiosum virus
gcaacaggaaagcuucugu

SEQ ID NO: 3096888 - RNA, 20 nt, Molluscum contagiosum virus
ccagauguucucgccagugg

SEQ ID NO: 3096889 - RNA, 16 nt, Molluscum contagiosum virus
ccgccagaagugaaau

SEQ ID NO: 3096890 - RNA, 20 nt, Molluscum contagiosum virus
cucgugccgccugcgcgcac

SEQ ID NO: 3096891 - RNA, 16 nt, Molluscum contagiosum virus
cagcgcgcgacugucu

SEQ ID NO: 3096892 - RNA, 23 nt, Molluscum contagiosum virus
cgagguggcacccuggcugcugc

SEQ ID NO: 3096893 - RNA, 22 nt, Molluscum contagiosum virus
augcucgucgccgggccccugu

SEQ ID NO: 3096894 - RNA, 18 nt, Molluscum contagiosum virus
aguugcgagccagccagg

SEQ ID NO: 3096895 - RNA, 18 nt, Molluscum contagiosum virus
accucaacuguugccugg

SEQ ID NO: 3096896 - RNA, 15 nt, Molluscum contagiosum virus
gcggccacucucccg

SEQ ID NO: 3096897 - RNA, 17 nt, Molluscum contagiosum virus
uugcgagccagccaggc

SEQ ID NO: 3096898 - RNA, 17 nt, Molluscum contagiosum virus
uacuuccgguguccccg

SEQ ID NO: 3096899 - RNA, 20 nt, Molluscum contagiosum virus
cugcuguacucgccguucca

SEQ ID NO: 3096900 - RNA, 15 nt, Molluscum contagiosum virus
acgcuagcuacgagu

SEQ ID NO: 3096901 - RNA, 14 nt, Molluscum contagiosum virus
cgugaacgaggcug

SEQ ID NO: 3096902 - RNA, 14 nt, Molluscum contagiosum virus
gaucgacgaggacc

SEQ ID NO: 3096903 - RNA, 15 nt, Molluscum contagiosum virus
cugagggcgcucgau

SEQ ID NO: 3096904 - RNA, 13 nt, Molluscum contagiosum virus
augaggcugcucu

SEQ ID NO: 3096905 - RNA, 16 nt, Molluscum contagiosum virus
gcggcgcgaagcaggc

SEQ ID NO: 3096906 - RNA, 20 nt, Molluscum contagiosum virus
cgacggugugccgcuggugg

SEQ ID NO: 3096907 - RNA, 14 nt, Molluscum contagiosum virus
ggccgcuagcaggc

SEQ ID NO: 3096908 - RNA, 23 nt, Molluscum contagiosum virus
uagcgucugggugcccaaacagc

SEQ ID NO: 3096909 - RNA, 18 nt, Molluscum contagiosum virus
ccgcaggaaaggcacccg

SEQ ID NO: 3096910 - RNA, 22 nt, Molluscum contagiosum virus
ccgcgcgaacaaaaaacaacuc

SEQ ID NO: 3096911 - RNA, 11 nt, Molluscum contagiosum virus
agagcccgcac

SEQ ID NO: 3096912 - RNA, 16 nt, Molluscum contagiosum virus
ugcugcgcuacaugua

SEQ ID NO: 3096913 - RNA, 19 nt, Molluscum contagiosum virus
cacgagcugacgcagacgc

SEQ ID NO: 3096914 - RNA, 17 nt, Molluscum contagiosum virus
ggaccugcgccagcgcc

SEQ ID NO: 3096915 - RNA, 15 nt, Molluscum contagiosum virus
ugccugugggauggc

SEQ ID NO: 3096916 - RNA, 16 nt, Molluscum contagiosum virus
gugcuugcgcacggac

SEQ ID NO: 3096917 - RNA, 16 nt, Molluscum contagiosum virus
ggcguggugcuggcca

SEQ ID NO: 3096918 - RNA, 21 nt, Molluscum contagiosum virus
cggucuuccagcacugcgcca

SEQ ID NO: 3096919 - RNA, 19 nt, Molluscum contagiosum virus
uggagggguguuuccuugc

SEQ ID NO: 3096920 - RNA, 23 nt, Molluscum contagiosum virus
agugccuccgcggacgcgcccug

SEQ ID NO: 3096921 - RNA, 16 nt, Molluscum contagiosum virus
ggccuuuagcagcggc

SEQ ID NO: 3096922 - RNA, 16 nt, Molluscum contagiosum virus
ugccgguggaagagcc

SEQ ID NO: 3096923 - RNA, 17 nt, Molluscum contagiosum virus
cgagcccgagcccgggc

SEQ ID NO: 3096924 - RNA, 21 nt, Molluscum contagiosum virus
gcaccccgaaaggcacccgca

SEQ ID NO: 3096925 - RNA, 19 nt, Molluscum contagiosum virus
uucugcguugccagcguaa

SEQ ID NO: 3096926 - RNA, 18 nt, Molluscum contagiosum virus
cggagauggacacagcaa

SEQ ID NO: 3096927 - RNA, 17 nt, Molluscum contagiosum virus
uucgagaccagccgcga

SEQ ID NO: 3096928 - RNA, 14 nt, Molluscum contagiosum virus
cgauggcgcagcuc

SEQ ID NO: 3096929 - RNA, 14 nt, Molluscum contagiosum virus
ggggaaccgcugcu

SEQ ID NO: 3096930 - RNA, 14 nt, Molluscum contagiosum virus
gcaacaaagaggaa

SEQ ID NO: 3096931 - RNA, 13 nt, Molluscum contagiosum virus
cauacgcagaggc

SEQ ID NO: 3096932 - RNA, 20 nt, Molluscum contagiosum virus
uggaagcuuccuuuuucacu

SEQ ID NO: 3096933 - RNA, 23 nt, Molluscum contagiosum virus
gcuucaggcaagaggggagccag

SEQ ID NO: 3096934 - RNA, 21 nt, Molluscum contagiosum virus
cguacaucgacuacgcgcugc

SEQ ID NO: 3096935 - RNA, 14 nt, Molluscum contagiosum virus
ugcgaccggcaaca

SEQ ID NO: 3096936 - RNA, 22 nt, Molluscum contagiosum virus
gcugcuggccaacccucgcaag

SEQ ID NO: 3096937 - RNA, 21 nt, Molluscum contagiosum virus
cgucagccucugugcggcgcc

SEQ ID NO: 3096938 - RNA, 22 nt, Molluscum contagiosum virus
caacgagcucuccgaagagcag

SEQ ID NO: 3096939 - RNA, 15 nt, Molluscum contagiosum virus
gacacgagggccuug

SEQ ID NO: 3096940 - RNA, 16 nt, Molluscum contagiosum virus
cauacacuuccugcua

SEQ ID NO: 3096941 - RNA, 18 nt, Molluscum contagiosum virus
gcgggcccgugcucaggc

SEQ ID NO: 3096942 - RNA, 19 nt, Molluscum contagiosum virus
gcaggaggaccgcgagcgc

SEQ ID NO: 3096943 - RNA, 18 nt, Molluscum contagiosum virus
gcaggcgugcucagcacc

SEQ ID NO: 3096944 - RNA, 18 nt, Molluscum contagiosum virus
ccgcgugcucugcuccgc

SEQ ID NO: 3096945 - RNA, 15 nt, Molluscum contagiosum virus
cgcaggaugcugggg

SEQ ID NO: 3096946 - RNA, 15 nt, Molluscum contagiosum virus
gaaacaugugucuga

SEQ ID NO: 3096947 - RNA, 18 nt, Molluscum contagiosum virus
gacgugcugcuggcccug

SEQ ID NO: 3096948 - RNA, 23 nt, Molluscum contagiosum virus
uccggcgcggccuggccacgccg

SEQ ID NO: 3096949 - RNA, 15 nt, Molluscum contagiosum virus
ugcgcaccagcugca

SEQ ID NO: 3096950 - RNA, 22 nt, Molluscum contagiosum virus
cagccgcucguccagcugcgcg

SEQ ID NO: 3096951 - RNA, 16 nt, Molluscum contagiosum virus
cagcagcuccugguag

SEQ ID NO: 3096952 - RNA, 15 nt, Molluscum contagiosum virus
gcgauaggacaugac

SEQ ID NO: 3096953 - RNA, 14 nt, Molluscum contagiosum virus
gcaccgagcccgcc

SEQ ID NO: 3096954 - RNA, 15 nt, Molluscum contagiosum virus
cgcuguugcugcugc

SEQ ID NO: 3096955 - RNA, 23 nt, Molluscum contagiosum virus
guggccgcgccgggcgccagaac

SEQ ID NO: 3096956 - RNA, 14 nt, Molluscum contagiosum virus
ugagcaagcucaag

SEQ ID NO: 3096957 - RNA, 13 nt, Molluscum contagiosum virus
ccgggcccgggcc

SEQ ID NO: 3096958 - RNA, 14 nt, Molluscum contagiosum virus
gccuuccugcuggc

SEQ ID NO: 3096959 - RNA, 15 nt, Molluscum contagiosum virus
cuuucccgggcacug

SEQ ID NO: 3096960 - RNA, 16 nt, Molluscum contagiosum virus
uagcgcucgugcacca

SEQ ID NO: 3096961 - RNA, 20 nt, Molluscum contagiosum virus
agagcaagcgagagaggagu

SEQ ID NO: 3096962 - RNA, 13 nt, Molluscum contagiosum virus
cggagcugugccg

SEQ ID NO: 3096963 - RNA, 12 nt, Molluscum contagiosum virus
cgcgucugcucu

SEQ ID NO: 3096964 - RNA, 16 nt, Molluscum contagiosum virus
uucucagguacguguc

SEQ ID NO: 3096965 - RNA, 23 nt, Molluscum contagiosum virus
gagaaaggcacccaccaggaaca

SEQ ID NO: 3096966 - RNA, 16 nt, Molluscum contagiosum virus
ccgcugcgccggcugc

SEQ ID NO: 3096967 - RNA, 21 nt, Molluscum contagiosum virus
acacucgcgcguccgcaaaga

SEQ ID NO: 3096968 - RNA, 21 nt, Molluscum contagiosum virus
acacucacgcguccacaaaga

SEQ ID NO: 3096969 - RNA, 17 nt, Molluscum contagiosum virus
ugcgccggcugcgccac

SEQ ID NO: 3096970 - RNA, 15 nt, Molluscum contagiosum virus
caacuucgcgcugua

SEQ ID NO: 3096971 - RNA, 24 nt, Molluscum contagiosum virus
agcacacgguagagcugcgagaac

SEQ ID NO: 3096972 - RNA, 18 nt, Molluscum contagiosum virus
aaagguacccgcaggaaa

SEQ ID NO: 3096973 - RNA, 19 nt, Molluscum contagiosum virus
cuauguucuucgcagagga

SEQ ID NO: 3096974 - RNA, 19 nt, Molluscum contagiosum virus
cacgcaccgcgacaugccu

SEQ ID NO: 3096975 - RNA, 16 nt, Molluscum contagiosum virus
cgcucacugcagcagc

SEQ ID NO: 3096976 - RNA, 23 nt, Molluscum contagiosum virus
guuguucguacucaacaagcugc

SEQ ID NO: 3096977 - RNA, 20 nt, Molluscum contagiosum virus
acuggacugagccgcaagca

SEQ ID NO: 3096978 - RNA, 22 nt, Molluscum contagiosum virus
acgacggcugcucgcugccugg

SEQ ID NO: 3096979 - RNA, 14 nt, Molluscum contagiosum virus
agcgggaaacugcu

SEQ ID NO: 3096980 - RNA, 19 nt, Molluscum contagiosum virus
ucgagcgcgcgccugcugg

SEQ ID NO: 3096981 - RNA, 12 nt, Molluscum contagiosum virus
caaucuguccag

SEQ ID NO: 3096982 - RNA, 17 nt, Molluscum contagiosum virus
uguccuuccgacccggc

SEQ ID NO: 3096983 - RNA, 14 nt, Molluscum contagiosum virus
uccggggcgcaagc

SEQ ID NO: 3096984 - RNA, 17 nt, Molluscum contagiosum virus
guuccaggaacgccgcc

SEQ ID NO: 3096985 - RNA, 21 nt, Molluscum contagiosum virus
caccuggcgagcgcucugcau

SEQ ID NO: 3096986 - RNA, 14 nt, Molluscum contagiosum virus
ccaccaccuccagg

SEQ ID NO: 3096987 - RNA, 22 nt, Molluscum contagiosum virus
cacguccuccaauccuccugcc

SEQ ID NO: 3096988 - RNA, 21 nt, Molluscum contagiosum virus
ucuccgcgcugcacuacaacc

SEQ ID NO: 3096989 - RNA, 18 nt, Molluscum contagiosum virus
cuuucacgcugcacgagc

SEQ ID NO: 3096990 - RNA, 13 nt, Molluscum contagiosum virus
cacgagacugagu

SEQ ID NO: 3096991 - RNA, 16 nt, Molluscum contagiosum virus
cacaaaggcgggcccg

SEQ ID NO: 3096992 - RNA, 15 nt, Molluscum contagiosum virus
gcacgggcucgagcu

SEQ ID NO: 3096993 - RNA, 20 nt, Molluscum contagiosum virus
acaacuacuucgaggccggc

SEQ ID NO: 3096994 - RNA, 14 nt, Molluscum contagiosum virus
cgcucgccaccgcg

SEQ ID NO: 3096995 - RNA, 19 nt, Molluscum contagiosum virus
cgcugccgcgcgcgccgca

SEQ ID NO: 3096996 - RNA, 14 nt, Molluscum contagiosum virus
cuuuccgugcuuga

SEQ ID NO: 3096997 - RNA, 13 nt, Molluscum contagiosum virus
acgagccgcugcu

SEQ ID NO: 3096998 - RNA, 18 nt, Molluscum contagiosum virus
ccgacgccuuccugcugg

SEQ ID NO: 3096999 - RNA, 14 nt, Molluscum contagiosum virus
gcagccucaaccug

SEQ ID NO: 3097000 - RNA, 17 nt, Molluscum contagiosum virus
ccaccggcagugcuugc

SEQ ID NO: 3097001 - RNA, 17 nt, Molluscum contagiosum virus
cgugccgccggcgccgc

SEQ ID NO: 3097002 - RNA, 13 nt, Molluscum contagiosum virus
gagcagcugcugc

SEQ ID NO: 3097003 - RNA, 13 nt, Molluscum contagiosum virus
aggaaagcgcaca

SEQ ID NO: 3097004 - RNA, 14 nt, Molluscum contagiosum virus
gcgcccgacgagcu

SEQ ID NO: 3097005 - RNA, 18 nt, Molluscum contagiosum virus
gcgaggccugcguggaca

SEQ ID NO: 3097006 - RNA, 18 nt, Molluscum contagiosum virus
gucuacaacgagcucucc

SEQ ID NO: 3097007 - RNA, 12 nt, Molluscum contagiosum virus
gacaacgugcug

SEQ ID NO: 3097008 - RNA, 14 nt, Molluscum contagiosum virus
caggcgcaggccgc

SEQ ID NO: 3097009 - RNA, 18 nt, Molluscum contagiosum virus
cuacacgcacgaccucac

SEQ ID NO: 3097010 - RNA, 18 nt, Molluscum contagiosum virus
ggcugggaaagggcugcu

SEQ ID NO: 3097011 - RNA, 22 nt, Molluscum contagiosum virus
aguacgcgcgugguacagauga

SEQ ID NO: 3097012 - RNA, 18 nt, Molluscum contagiosum virus
uuuccgcgaaguccuggg

SEQ ID NO: 3097013 - RNA, 13 nt, Molluscum contagiosum virus
gcccaggccaugg

SEQ ID NO: 3097014 - RNA, 18 nt, Molluscum contagiosum virus
gucccagcaccgcgccgc

SEQ ID NO: 3097015 - RNA, 20 nt, Molluscum contagiosum virus
cgcgccggggcgcgcgcugc

SEQ ID NO: 3097016 - RNA, 19 nt, Molluscum contagiosum virus
gcagauaguuuggacgagc

SEQ ID NO: 3097017 - RNA, 16 nt, Molluscum contagiosum virus
gcugcagaacugccug

SEQ ID NO: 3097018 - RNA, 17 nt, Molluscum contagiosum virus
cagcaggaugcuggugu

SEQ ID NO: 3097019 - RNA, 20 nt, Molluscum contagiosum virus
gacacgcugcgcgugcuggg

SEQ ID NO: 3097020 - RNA, 20 nt, Molluscum contagiosum virus
uugcccccgagguggccaag

SEQ ID NO: 3097021 - RNA, 14 nt, Molluscum contagiosum virus
gaugcgcagcgucc

SEQ ID NO: 3097022 - RNA, 12 nt, Molluscum contagiosum virus
cacuagcgcagg

SEQ ID NO: 3097023 - RNA, 21 nt, Molluscum contagiosum virus
uccugcuggcgcgcugcgugc

SEQ ID NO: 3097024 - RNA, 19 nt, Molluscum contagiosum virus
gaagaggccagcacaagcc

SEQ ID NO: 3097025 - RNA, 15 nt, Molluscum contagiosum virus
acgcuguugcugcug

SEQ ID NO: 3097026 - RNA, 13 nt, Molluscum contagiosum virus
gcgcuagugcaga

SEQ ID NO: 3097027 - RNA, 14 nt, Molluscum contagiosum virus
gcgcggcucgcgca

SEQ ID NO: 3097028 - RNA, 14 nt, Molluscum contagiosum virus
gcaggccgugcuca

SEQ ID NO: 3097029 - RNA, 14 nt, Molluscum contagiosum virus
aaacgcacuguguu

SEQ ID NO: 3097030 - RNA, 20 nt, Molluscum contagiosum virus
uccaccggcagcgcauccga

SEQ ID NO: 3097031 - RNA, 19 nt, Molluscum contagiosum virus
gcgggacgcgugccuggcu

SEQ ID NO: 3097032 - RNA, 19 nt, Molluscum contagiosum virus
acgcugcugcacagcuucc

SEQ ID NO: 3097033 - RNA, 19 nt, Molluscum contagiosum virus
cgcaggaaaggucgggccc

SEQ ID NO: 3097034 - RNA, 19 nt, Molluscum contagiosum virus
cucgcguaccuacucgccg

SEQ ID NO: 3097035 - RNA, 23 nt, Molluscum contagiosum virus
aagcugcucaucggcgagcucuu

SEQ ID NO: 3097036 - RNA, 18 nt, Molluscum contagiosum virus
ucgagacgcugccugacg

SEQ ID NO: 3097037 - RNA, 19 nt, Molluscum contagiosum virus
gccgugcgucucucugucu

SEQ ID NO: 3097038 - RNA, 20 nt, Molluscum contagiosum virus
gggugaggagcucgacucga

SEQ ID NO: 3097039 - RNA, 21 nt, Molluscum contagiosum virus
acgugcugcuggcccugcuag

SEQ ID NO: 3097040 - RNA, 17 nt, Molluscum contagiosum virus
gccaacuaccuggggcu

SEQ ID NO: 3097041 - RNA, 19 nt, Molluscum contagiosum virus
ugcaugcggagcuggccga

SEQ ID NO: 3097042 - RNA, 18 nt, Molluscum contagiosum virus
gacucggaugcgcugccg

SEQ ID NO: 3097043 - RNA, 15 nt, Molluscum contagiosum virus
caugaaaggcaccug

SEQ ID NO: 3097044 - RNA, 14 nt, Molluscum contagiosum virus
acuacgcgcugcgg

SEQ ID NO: 3097045 - RNA, 15 nt, Molluscum contagiosum virus
gcgcguggaggacac

SEQ ID NO: 3097046 - RNA, 16 nt, Molluscum contagiosum virus
gccgggcgccagaaca

SEQ ID NO: 3097047 - RNA, 18 nt, Molluscum contagiosum virus
ucaaagcacaacaagaag

SEQ ID NO: 3097048 - RNA, 13 nt, Molluscum contagiosum virus
gcuugcugcgcug

SEQ ID NO: 3097049 - RNA, 16 nt, Molluscum contagiosum virus
ggacuccgaggcaggu

SEQ ID NO: 3097050 - RNA, 21 nt, Molluscum contagiosum virus
cgacuuacggacgcccuccuc

SEQ ID NO: 3097051 - RNA, 16 nt, Molluscum contagiosum virus
cgagcgccgccagcuc

SEQ ID NO: 3097052 - RNA, 21 nt, Molluscum contagiosum virus
ccacguacgagcagcugcugc

SEQ ID NO: 3097053 - RNA, 16 nt, Molluscum contagiosum virus
uccgaaaaaggcccgg

SEQ ID NO: 3097054 - RNA, 18 nt, Molluscum contagiosum virus
ugaacaauacaugcugga

SEQ ID NO: 3097055 - RNA, 13 nt, Molluscum contagiosum virus
aaaucgcaaagca

SEQ ID NO: 3097056 - RNA, 20 nt, Molluscum contagiosum virus
gcugcagaacugccugguca

SEQ ID NO: 3097057 - RNA, 12 nt, Molluscum contagiosum virus
aguguugugaag

SEQ ID NO: 3097058 - RNA, 15 nt, Molluscum contagiosum virus
ccuuccgcgcgggca

SEQ ID NO: 3097059 - RNA, 17 nt, Molluscum contagiosum virus
ugcacggggaagcacgc

SEQ ID NO: 3097060 - RNA, 15 nt, Molluscum contagiosum virus
gcauuacccccccuu

SEQ ID NO: 3097061 - RNA, 16 nt, Molluscum contagiosum virus
acaugcagcugcagga

SEQ ID NO: 3097062 - RNA, 11 nt, Molluscum contagiosum virus
gcacccgcagg

SEQ ID NO: 3097063 - RNA, 21 nt, Molluscum contagiosum virus
gagaagcuuuaguccaugccg

SEQ ID NO: 3097064 - RNA, 17 nt, Molluscum contagiosum virus
gugcuccacgcgcagcu

SEQ ID NO: 3097065 - RNA, 23 nt, Molluscum contagiosum virus
acagccccugcugcucgcggagg

SEQ ID NO: 3097066 - RNA, 14 nt, Molluscum contagiosum virus
gccuccgacuaccu

SEQ ID NO: 3097067 - RNA, 20 nt, Molluscum contagiosum virus
gaagaggccggcacaagccg

SEQ ID NO: 3097068 - RNA, 13 nt, Molluscum contagiosum virus
ccuagcuccagcg

SEQ ID NO: 3097069 - RNA, 13 nt, Molluscum contagiosum virus
cugcacgccgcca

SEQ ID NO: 3097070 - RNA, 22 nt, Molluscum contagiosum virus
cggagaucaggcagcugcugcg

SEQ ID NO: 3097071 - RNA, 13 nt, Molluscum contagiosum virus
cagccccugcugc

SEQ ID NO: 3097072 - RNA, 19 nt, Molluscum contagiosum virus
ggcacagugcuggacacuc

SEQ ID NO: 3097073 - RNA, 16 nt, Molluscum contagiosum virus
cgcaaacaagcauggu

SEQ ID NO: 3097074 - RNA, 15 nt, Molluscum contagiosum virus
gaccugcacgacccu

SEQ ID NO: 3097075 - RNA, 13 nt, Molluscum contagiosum virus
cugcuuccuccuc

SEQ ID NO: 3097076 - RNA, 21 nt, Molluscum contagiosum virus
ugcgcgugcggcgcaaccuca

SEQ ID NO: 3097077 - RNA, 18 nt, Molluscum contagiosum virus
gacgcguucuagcagcgu

SEQ ID NO: 3097078 - RNA, 16 nt, Molluscum contagiosum virus
gagcuucgucuucacc

SEQ ID NO: 3097079 - RNA, 19 nt, Molluscum contagiosum virus
ugcugcuggcccugcuagu

SEQ ID NO: 3097080 - RNA, 16 nt, Molluscum contagiosum virus
cuuggcgcgccgcugc

SEQ ID NO: 3097081 - RNA, 18 nt, Molluscum contagiosum virus
acaugucguaccuggugg

SEQ ID NO: 3097082 - RNA, 15 nt, Molluscum contagiosum virus
guccggcgcucgccc

SEQ ID NO: 3097083 - RNA, 23 nt, Molluscum contagiosum virus
aaaggaguuggcgcgcaagcgcu

SEQ ID NO: 3097084 - RNA, 17 nt, Molluscum contagiosum virus
auccucccugcgggcgc

SEQ ID NO: 3097085 - RNA, 14 nt, Molluscum contagiosum virus
auccugaaguccau

SEQ ID NO: 3097086 - RNA, 16 nt, Molluscum contagiosum virus
cgaagucuaggcagcg

SEQ ID NO: 3097087 - RNA, 21 nt, Molluscum contagiosum virus
cgaaccgcggcagccuugcga

SEQ ID NO: 3097088 - RNA, 14 nt, Molluscum contagiosum virus
cuuccgcgacgagc

SEQ ID NO: 3097089 - RNA, 19 nt, Molluscum contagiosum virus
gacuaugcgucuuccugcu

SEQ ID NO: 3097090 - RNA, 18 nt, Molluscum contagiosum virus
gcacgugcugcagcugcg

SEQ ID NO: 3097091 - RNA, 15 nt, Molluscum contagiosum virus
ccggcggcgcaagca

SEQ ID NO: 3097092 - RNA, 12 nt, Molluscum contagiosum virus
cuccaaggaggu

SEQ ID NO: 3097093 - RNA, 22 nt, Molluscum contagiosum virus
guccgcuccuucucagggcuuc

SEQ ID NO: 3097094 - RNA, 23 nt, Molluscum contagiosum virus
gccaaggaugccugccagcagag

SEQ ID NO: 3097095 - RNA, 14 nt, Molluscum contagiosum virus
gcauagucaucaaa

SEQ ID NO: 3097096 - RNA, 14 nt, Molluscum contagiosum virus
acccagcaaggccc

SEQ ID NO: 3097097 - RNA, 22 nt, Molluscum contagiosum virus
gugcacgcgggcgccggcgucc

SEQ ID NO: 3097098 - RNA, 16 nt, Molluscum contagiosum virus
acgugcuccgaggagg

SEQ ID NO: 3097099 - RNA, 22 nt, Molluscum contagiosum virus
ugcaagagcucguggacagccu

SEQ ID NO: 3097100 - RNA, 13 nt, Molluscum contagiosum virus
cggcgcucugcca

SEQ ID NO: 3097101 - RNA, 14 nt, Molluscum contagiosum virus
ugccaggcaacgca

SEQ ID NO: 3097102 - RNA, 13 nt, Molluscum contagiosum virus
gcccgagcccggc

SEQ ID NO: 3097103 - RNA, 15 nt, Molluscum contagiosum virus
aaacacgagacugag

SEQ ID NO: 3097104 - RNA, 18 nt, Molluscum contagiosum virus
cgcucaacgugggcaccu

SEQ ID NO: 3097105 - RNA, 23 nt, Molluscum contagiosum virus
gacccgcgaacgagggaugcaca

SEQ ID NO: 3097106 - RNA, 12 nt, Molluscum contagiosum virus
ccggcgcuugcg

SEQ ID NO: 3097107 - RNA, 12 nt, Molluscum contagiosum virus
aggcaccugcag

SEQ ID NO: 3097108 - RNA, 14 nt, Molluscum contagiosum virus
aacaccuccugcuu

SEQ ID NO: 3097109 - RNA, 14 nt, Molluscum contagiosum virus
cuccaaggucgagc

SEQ ID NO: 3097110 - RNA, 22 nt, Molluscum contagiosum virus
gaacgcgugaugucugucccgc

SEQ ID NO: 3097111 - RNA, 13 nt, Molluscum contagiosum virus
cccgcugcucuac

SEQ ID NO: 3097112 - RNA, 20 nt, Molluscum contagiosum virus
cgcguccacaaagacggggc

SEQ ID NO: 3097113 - RNA, 21 nt, Molluscum contagiosum virus
caggccuccuucccugacagc

SEQ ID NO: 3097114 - RNA, 12 nt, Molluscum contagiosum virus
gcccgugcucag

SEQ ID NO: 3097115 - RNA, 18 nt, Molluscum contagiosum virus
cgucacaagcaccgccug

SEQ ID NO: 3097116 - RNA, 12 nt, Molluscum contagiosum virus
ucagaggauucu

SEQ ID NO: 3097117 - RNA, 18 nt, Molluscum contagiosum virus
ccucgcaagcugagcgcg

SEQ ID NO: 3097118 - RNA, 13 nt, Molluscum contagiosum virus
cuagucagcggcg

SEQ ID NO: 3097119 - RNA, 20 nt, Molluscum contagiosum virus
ugccccguccucgcucgugc

SEQ ID NO: 3097120 - RNA, 11 nt, Molluscum contagiosum virus
uguaacaagga

SEQ ID NO: 3097121 - RNA, 21 nt, Molluscum contagiosum virus
uccggcuuuauuuccggcucc

SEQ ID NO: 3097122 - RNA, 23 nt, Molluscum contagiosum virus
cagcuccgcgacuaccugcugcu

SEQ ID NO: 3097123 - RNA, 16 nt, Molluscum contagiosum virus
cuguaugaucugcagu

SEQ ID NO: 3097124 - RNA, 20 nt, Molluscum contagiosum virus
auacccuuggcagcaacugc

SEQ ID NO: 3097125 - RNA, 19 nt, Molluscum contagiosum virus
gugcgucgacguggagccu

SEQ ID NO: 3097126 - RNA, 18 nt, Molluscum contagiosum virus
ggcgcgagaugcucgccg

SEQ ID NO: 3097127 - RNA, 19 nt, Molluscum contagiosum virus
gcugggccccuacgugguc

SEQ ID NO: 3097128 - RNA, 14 nt, Molluscum contagiosum virus
ccgagcccgcggcg

SEQ ID NO: 3097129 - RNA, 14 nt, Molluscum contagiosum virus
aucaccagccugcu

SEQ ID NO: 3097130 - RNA, 15 nt, Molluscum contagiosum virus
cagcccgacuucucg

SEQ ID NO: 3097131 - RNA, 18 nt, Molluscum contagiosum virus
cacgcucgcgcgcaugcu

SEQ ID NO: 3097132 - RNA, 13 nt, Molluscum contagiosum virus
gacauggagcgca

SEQ ID NO: 3097133 - RNA, 14 nt, Molluscum contagiosum virus
gcacgggcucgagc

SEQ ID NO: 3097134 - RNA, 18 nt, Molluscum contagiosum virus
cucgccggcaccacggug

SEQ ID NO: 3097135 - RNA, 18 nt, Molluscum contagiosum virus
agacugagugcugagcca

SEQ ID NO: 3097136 - RNA, 23 nt, Molluscum contagiosum virus
gcacguuccaaaagacagaggcc

SEQ ID NO: 3097137 - RNA, 23 nt, Molluscum contagiosum virus
cccgcguggcaagggcuccuucu

SEQ ID NO: 3097138 - RNA, 23 nt, Molluscum contagiosum virus
ggcggcagcgccagcgagaucaa

SEQ ID NO: 3097139 - RNA, 21 nt, Molluscum contagiosum virus
cagugcgagaucgacugcgcc

SEQ ID NO: 3097140 - RNA, 14 nt, Molluscum contagiosum virus
cguggccgagccgc

SEQ ID NO: 3097141 - RNA, 14 nt, Molluscum contagiosum virus
gugcugagccacaa

SEQ ID NO: 3097142 - RNA, 14 nt, Molluscum contagiosum virus
gcguugucgagaau

SEQ ID NO: 3097143 - RNA, 18 nt, Molluscum contagiosum virus
ccaacucugugaccugcg

SEQ ID NO: 3097144 - RNA, 19 nt, Molluscum contagiosum virus
gcuagcgacgcggacacau

SEQ ID NO: 3097145 - RNA, 18 nt, Molluscum contagiosum virus
gcguaucggagucaggca

SEQ ID NO: 3097146 - RNA, 13 nt, Molluscum contagiosum virus
gccgcacgugcug

SEQ ID NO: 3097147 - RNA, 15 nt, Molluscum contagiosum virus
cggacgcaggaugcu

SEQ ID NO: 3097148 - RNA, 15 nt, Molluscum contagiosum virus
ggcugcacgacgguc

SEQ ID NO: 3097149 - RNA, 16 nt, Molluscum contagiosum virus
cugggaacccguggcc

SEQ ID NO: 3097150 - RNA, 14 nt, Molluscum contagiosum virus
cgcgccugcuggcg

SEQ ID NO: 3097151 - RNA, 19 nt, Molluscum contagiosum virus
ccgcacaagggcagcucaa

SEQ ID NO: 3097152 - RNA, 19 nt, Molluscum contagiosum virus
cggugggcgccgcggccug

SEQ ID NO: 3097153 - RNA, 14 nt, Molluscum contagiosum virus
guucccauggaugc

SEQ ID NO: 3097154 - RNA, 16 nt, Molluscum contagiosum virus
gcgcacggcagcggcg

SEQ ID NO: 3097155 - RNA, 15 nt, Molluscum contagiosum virus
gcgcagagcuccccg

SEQ ID NO: 3097156 - RNA, 19 nt, Molluscum contagiosum virus
uuccccuccuagcccagca

SEQ ID NO: 3097157 - RNA, 14 nt, Molluscum contagiosum virus
uacuucgucaagca

SEQ ID NO: 3097158 - RNA, 18 nt, Molluscum contagiosum virus
uggggagacuugagccca

SEQ ID NO: 3097159 - RNA, 19 nt, Molluscum contagiosum virus
cccgugucgggcugcaucu

SEQ ID NO: 3097160 - RNA, 22 nt, Molluscum contagiosum virus
acuggagaccugucgugcaaug

SEQ ID NO: 3097161 - RNA, 12 nt, Molluscum contagiosum virus
cagagcgccagc

SEQ ID NO: 3097162 - RNA, 15 nt, Molluscum contagiosum virus
gcgggccaggcacug

SEQ ID NO: 3097163 - RNA, 13 nt, Molluscum contagiosum virus
guugcugcugccg

SEQ ID NO: 3097164 - RNA, 22 nt, Molluscum contagiosum virus
agaacaugugcuccgccaacgc

SEQ ID NO: 3097165 - RNA, 17 nt, Molluscum contagiosum virus
gaagcccugagaaggag

SEQ ID NO: 3097166 - RNA, 21 nt, Molluscum contagiosum virus
cuggugggcgugcggcgcacc

SEQ ID NO: 3097167 - RNA, 12 nt, Molluscum contagiosum virus
cgcaagccacac

SEQ ID NO: 3097168 - RNA, 13 nt, Molluscum contagiosum virus
cacggcgagcugc

SEQ ID NO: 3097169 - RNA, 13 nt, Molluscum contagiosum virus
ccgcggcgcggcg

SEQ ID NO: 3097170 - RNA, 15 nt, Molluscum contagiosum virus
ugcgugccccucgug

SEQ ID NO: 3097171 - RNA, 17 nt, Molluscum contagiosum virus
gcccgcaccugcgccgc

SEQ ID NO: 3097172 - RNA, 21 nt, Molluscum contagiosum virus
ccggcggcuggaccugcgcca

SEQ ID NO: 3097173 - RNA, 17 nt, Molluscum contagiosum virus
cggaaauguuguuugaa

SEQ ID NO: 3097174 - RNA, 16 nt, Molluscum contagiosum virus
accugcgacagcugcu

SEQ ID NO: 3097175 - RNA, 19 nt, Molluscum contagiosum virus
agccguucucguggcaagc

SEQ ID NO: 3097176 - RNA, 24 nt, Molluscum contagiosum virus
accucugcuucacgcugcucgugc

SEQ ID NO: 3097177 - RNA, 20 nt, Molluscum contagiosum virus
cuggagaaagaagugugccu

SEQ ID NO: 3097178 - RNA, 18 nt, Molluscum contagiosum virus
gacgagcagagccgggac

SEQ ID NO: 3097179 - RNA, 12 nt, Molluscum contagiosum virus
cgcgcugcgccg

SEQ ID NO: 3097180 - RNA, 23 nt, Molluscum contagiosum virus
cgucguagcgcucgugcaccagc

SEQ ID NO: 3097181 - RNA, 17 nt, Molluscum contagiosum virus
ugcaaguucgcugcugg

SEQ ID NO: 3097182 - RNA, 17 nt, Molluscum contagiosum virus
cguggcguugcugcugc

SEQ ID NO: 3097183 - RNA, 24 nt, Molluscum contagiosum virus
ggcgcacggugugcuacugcacug

SEQ ID NO: 3097184 - RNA, 14 nt, Molluscum contagiosum virus
cuggagcugccgcu

SEQ ID NO: 3097185 - RNA, 15 nt, Molluscum contagiosum virus
cgggcugcagcccuu

SEQ ID NO: 3097186 - RNA, 15 nt, Molluscum contagiosum virus
gccgaggucuuccac

SEQ ID NO: 3097187 - RNA, 22 nt, Molluscum contagiosum virus
guaccugcgacagcugcugcuc

SEQ ID NO: 3097188 - RNA, 14 nt, Molluscum contagiosum virus
ggacuacgcacggc

SEQ ID NO: 3097189 - RNA, 17 nt, Molluscum contagiosum virus
gaacggaacacagugcg

SEQ ID NO: 3097190 - RNA, 17 nt, Molluscum contagiosum virus
ucacgcguccacaaaga

SEQ ID NO: 3097191 - RNA, 16 nt, Molluscum contagiosum virus
ucucccgggcucuguc

SEQ ID NO: 3097192 - RNA, 22 nt, Molluscum contagiosum virus
guucugaauaaucucgagcagg

SEQ ID NO: 3097193 - RNA, 21 nt, Molluscum contagiosum virus
gucucaugguggccggccgcc

SEQ ID NO: 3097194 - RNA, 15 nt, Molluscum contagiosum virus
gcgcgccgcucgucg

SEQ ID NO: 3097195 - RNA, 17 nt, Molluscum contagiosum virus
gacucggaugcgcugcc

SEQ ID NO: 3097196 - RNA, 14 nt, Molluscum contagiosum virus
cuguaaauggaccc

SEQ ID NO: 3097197 - RNA, 14 nt, Molluscum contagiosum virus
cgcucgccccuucc

SEQ ID NO: 3097198 - RNA, 15 nt, Molluscum contagiosum virus
caacaacgagagcgg

SEQ ID NO: 3097199 - RNA, 20 nt, Molluscum contagiosum virus
cugcagagcgugcuggucaa

SEQ ID NO: 3097200 - RNA, 14 nt, Molluscum contagiosum virus
gcgcgguccugucc

SEQ ID NO: 3097201 - RNA, 14 nt, Molluscum contagiosum virus
gagacuugugccca

SEQ ID NO: 3097202 - RNA, 13 nt, Molluscum contagiosum virus
cuauugcgcggcg

SEQ ID NO: 3097203 - RNA, 22 nt, Molluscum contagiosum virus
cggcguacgcgcagggagcugc

SEQ ID NO: 3097204 - RNA, 19 nt, Molluscum contagiosum virus
gacgccgccaaugcugccg

SEQ ID NO: 3097205 - RNA, 22 nt, Molluscum contagiosum virus
uugaccgcuucgagugcucccg

SEQ ID NO: 3097206 - RNA, 18 nt, Molluscum contagiosum virus
ugcccaagugcgcguguc

SEQ ID NO: 3097207 - RNA, 21 nt, Molluscum contagiosum virus
aguugcagcccaccagcaggu

SEQ ID NO: 3097208 - RNA, 18 nt, Molluscum contagiosum virus
acagccccugcugcucgc

SEQ ID NO: 3097209 - RNA, 16 nt, Molluscum contagiosum virus
cucuggaaggagcugg

SEQ ID NO: 3097210 - RNA, 18 nt, Molluscum contagiosum virus
cuuggugcucauccuccc

SEQ ID NO: 3097211 - RNA, 15 nt, Molluscum contagiosum virus
cgugcaugcccagca

SEQ ID NO: 3097212 - RNA, 16 nt, Molluscum contagiosum virus
cgcgcgcgcucacccu

SEQ ID NO: 3097213 - RNA, 12 nt, Molluscum contagiosum virus
acagcuuccugg

SEQ ID NO: 3097214 - RNA, 13 nt, Molluscum contagiosum virus
agagaaccugugc

SEQ ID NO: 3097215 - RNA, 13 nt, Molluscum contagiosum virus
ggcgggugccgcc

SEQ ID NO: 3097216 - RNA, 20 nt, Molluscum contagiosum virus
aaagccggccccgcgaacga

SEQ ID NO: 3097217 - RNA, 14 nt, Molluscum contagiosum virus
ccaucgacgagguc

SEQ ID NO: 3097218 - RNA, 15 nt, Molluscum contagiosum virus
cugcgaucgcgggca

SEQ ID NO: 3097219 - RNA, 11 nt, Molluscum contagiosum virus
cacugcuggcg

SEQ ID NO: 3097220 - RNA, 14 nt, Molluscum contagiosum virus
gugcgcgcacggcu

SEQ ID NO: 3097221 - RNA, 21 nt, Molluscum contagiosum virus
ugacgauuaucguggacgagc

SEQ ID NO: 3097222 - RNA, 21 nt, Molluscum contagiosum virus
aguugagagcagcggcuacuu

SEQ ID NO: 3097223 - RNA, 15 nt, Molluscum contagiosum virus
acccuggcagccgag

SEQ ID NO: 3097224 - RNA, 17 nt, Molluscum contagiosum virus
ugcccgcgcacgagcug

SEQ ID NO: 3097225 - RNA, 18 nt, Molluscum contagiosum virus
ugcgagaacuggcgcagc

SEQ ID NO: 3097226 - RNA, 22 nt, Molluscum contagiosum virus
cugcgcgcgcuacugcgcgcac

SEQ ID NO: 3097227 - RNA, 13 nt, Molluscum contagiosum virus
gacgcgcagcugu

SEQ ID NO: 3097228 - RNA, 15 nt, Molluscum contagiosum virus
gucacaagcaccgcc

SEQ ID NO: 3097229 - RNA, 20 nt, Molluscum contagiosum virus
ggaggcgugcguuccgggcc

SEQ ID NO: 3097230 - RNA, 15 nt, Molluscum contagiosum virus
uguucggcaugcagc

SEQ ID NO: 3097231 - RNA, 15 nt, Molluscum contagiosum virus
gccugcucacgcccg

SEQ ID NO: 3097232 - RNA, 19 nt, Molluscum contagiosum virus
uggcacggccggcgccgcg

SEQ ID NO: 3097233 - RNA, 22 nt, Molluscum contagiosum virus
cacgccgcucggcacugcuggc

SEQ ID NO: 3097234 - RNA, 17 nt, Molluscum contagiosum virus
cuccucucacgcccucu

SEQ ID NO: 3097235 - RNA, 19 nt, Molluscum contagiosum virus
gcuuugugcgaccugcugc

SEQ ID NO: 3097236 - RNA, 14 nt, Molluscum contagiosum virus
uagccuccuugucu

SEQ ID NO: 3097237 - RNA, 14 nt, Molluscum contagiosum virus
cgcaccucaccgcg

SEQ ID NO: 3097238 - RNA, 17 nt, Molluscum contagiosum virus
ccagugcgugcacuguc

SEQ ID NO: 3097239 - RNA, 20 nt, Molluscum contagiosum virus
agcccuuccacgacauggac

SEQ ID NO: 3097240 - RNA, 19 nt, Molluscum contagiosum virus
aguggccgcuccagagccg

SEQ ID NO: 3097241 - RNA, 18 nt, Molluscum contagiosum virus
cucgugcuggagcagggc

SEQ ID NO: 3097242 - RNA, 20 nt, Molluscum contagiosum virus
ggcgccguccaugugcccgc

SEQ ID NO: 3097243 - RNA, 11 nt, Molluscum contagiosum virus
gccgcgccgcg

SEQ ID NO: 3097244 - RNA, 22 nt, Molluscum contagiosum virus
cacgaagagucgcgccuggagc

SEQ ID NO: 3097245 - RNA, 22 nt, Molluscum contagiosum virus
agcucugauuacauccugcccu

SEQ ID NO: 3097246 - RNA, 14 nt, Molluscum contagiosum virus
cguccacaggcgcg

SEQ ID NO: 3097247 - RNA, 15 nt, Molluscum contagiosum virus
acuuuaucucucacu

SEQ ID NO: 3097248 - RNA, 17 nt, Molluscum contagiosum virus
cgggcgcagacgccgag

SEQ ID NO: 3097249 - RNA, 23 nt, Molluscum contagiosum virus
cacggccuucuccucgcucugcu

SEQ ID NO: 3097250 - RNA, 21 nt, Molluscum contagiosum virus
cgcgggcguguccgcgggcgc

SEQ ID NO: 3097251 - RNA, 13 nt, Molluscum contagiosum virus
uggccgagccgcu

SEQ ID NO: 3097252 - RNA, 19 nt, Molluscum contagiosum virus
ccggcggcauugugguguu

SEQ ID NO: 3097253 - RNA, 16 nt, Molluscum contagiosum virus
cgggcgccgcggcugc

SEQ ID NO: 3097254 - RNA, 21 nt, Molluscum contagiosum virus
augaguaccuguaugaucugc

SEQ ID NO: 3097255 - RNA, 16 nt, Molluscum contagiosum virus
gacggcacgggcacgc

SEQ ID NO: 3097256 - RNA, 20 nt, Molluscum contagiosum virus
gucugcuuugucugcaggca

SEQ ID NO: 3097257 - RNA, 14 nt, Molluscum contagiosum virus
gcaugcuugaggcg

SEQ ID NO: 3097258 - RNA, 23 nt, Molluscum contagiosum virus
cugagcuagugccgagcucgccu

SEQ ID NO: 3097259 - RNA, 19 nt, Molluscum contagiosum virus
gcucgguagccaggcgccg

SEQ ID NO: 3097260 - RNA, 13 nt, Molluscum contagiosum virus
ggcagacuaagaa

SEQ ID NO: 3097261 - RNA, 22 nt, Molluscum contagiosum virus
acguguacgcacggggccgcac

SEQ ID NO: 3097262 - RNA, 21 nt, Molluscum contagiosum virus
cacgcgaauguccggcgcugg

SEQ ID NO: 3097263 - RNA, 19 nt, Molluscum contagiosum virus
gaggcgcuagugcagauga

SEQ ID NO: 3097264 - RNA, 17 nt, Molluscum contagiosum virus
gccgggcgccggcucug

SEQ ID NO: 3097265 - RNA, 17 nt, Molluscum contagiosum virus
cacgcgagcggagcugg

SEQ ID NO: 3097266 - RNA, 18 nt, Molluscum contagiosum virus
agggcgggcacgugcugc

SEQ ID NO: 3097267 - RNA, 20 nt, Molluscum contagiosum virus
ccaaguccgagcaagcgggc

SEQ ID NO: 3097268 - RNA, 23 nt, Molluscum contagiosum virus
caaaugcgucccagcagcugcuc

SEQ ID NO: 3097269 - RNA, 16 nt, Molluscum contagiosum virus
guuuuguguuggccag

SEQ ID NO: 3097270 - RNA, 17 nt, Molluscum contagiosum virus
cgcaucccccgcguugu

SEQ ID NO: 3097271 - RNA, 17 nt, Molluscum contagiosum virus
gcacaagggcagcucaa

SEQ ID NO: 3097272 - RNA, 17 nt, Molluscum contagiosum virus
gcguccguucacgggca

SEQ ID NO: 3097273 - RNA, 16 nt, Molluscum contagiosum virus
gaccucccggcggcaa

SEQ ID NO: 3097274 - RNA, 15 nt, Molluscum contagiosum virus
gcgcggcagccgcag

SEQ ID NO: 3097275 - RNA, 22 nt, Molluscum contagiosum virus
cugcgcuuugcccccgaggugg

SEQ ID NO: 3097276 - RNA, 14 nt, Molluscum contagiosum virus
acuugugcgccccc

SEQ ID NO: 3097277 - RNA, 17 nt, Molluscum contagiosum virus
ugcugcgcuacauguau

SEQ ID NO: 3097278 - RNA, 12 nt, Molluscum contagiosum virus
ucgaucagcucc

SEQ ID NO: 3097279 - RNA, 22 nt, Molluscum contagiosum virus
ucgccguguuggaagucguggc

SEQ ID NO: 3097280 - RNA, 17 nt, Molluscum contagiosum virus
cgggcaugcacagcugc

SEQ ID NO: 3097281 - RNA, 17 nt, Molluscum contagiosum virus
ccgaggccgcgcucuuc

SEQ ID NO: 3097282 - RNA, 21 nt, Molluscum contagiosum virus
ugaggaggccaacgccagcug

SEQ ID NO: 3097283 - RNA, 17 nt, Molluscum contagiosum virus
ugggcagccgccuggcc

SEQ ID NO: 3097284 - RNA, 16 nt, Molluscum contagiosum virus
acgaggaaaggcaccc

SEQ ID NO: 3097285 - RNA, 14 nt, Molluscum contagiosum virus
gcaggccaggugca

SEQ ID NO: 3097286 - RNA, 17 nt, Molluscum contagiosum virus
cgcaucccugcgcaccu

SEQ ID NO: 3097287 - RNA, 12 nt, Molluscum contagiosum virus
aacgagcucucc

SEQ ID NO: 3097288 - RNA, 17 nt, Molluscum contagiosum virus
uugccgcuugagcagca

SEQ ID NO: 3097289 - RNA, 18 nt, Molluscum contagiosum virus
ccacgugguccaccagca

SEQ ID NO: 3097290 - RNA, 13 nt, Molluscum contagiosum virus
cacgagcccgcaa

SEQ ID NO: 3097291 - RNA, 13 nt, Molluscum contagiosum virus
gacaugcugugcg

SEQ ID NO: 3097292 - RNA, 18 nt, Molluscum contagiosum virus
gcccuccucgaccugcac

SEQ ID NO: 3097293 - RNA, 14 nt, Molluscum contagiosum virus
cugcugcucuucca

SEQ ID NO: 3097294 - RNA, 20 nt, Molluscum contagiosum virus
cgccgcgcaaaagcacagca

SEQ ID NO: 3097295 - RNA, 14 nt, Molluscum contagiosum virus
aaagcgcacacuug

SEQ ID NO: 3097296 - RNA, 15 nt, Molluscum contagiosum virus
cggacgcgcagcugu

SEQ ID NO: 3097297 - RNA, 17 nt, Molluscum contagiosum virus
guccggaggcacgggcu

SEQ ID NO: 3097298 - RNA, 22 nt, Molluscum contagiosum virus
cgggagaguggccgcuccagag

SEQ ID NO: 3097299 - RNA, 12 nt, Molluscum contagiosum virus
gucggagcagga

SEQ ID NO: 3097300 - RNA, 17 nt, Molluscum contagiosum virus
gaggcgcuugggcacug

SEQ ID NO: 3097301 - RNA, 14 nt, Molluscum contagiosum virus
cgaagcaggcgcca

SEQ ID NO: 3097302 - RNA, 15 nt, Molluscum contagiosum virus
ggcgcucgcgagaag

SEQ ID NO: 3097303 - RNA, 12 nt, Molluscum contagiosum virus
ucccggcugccg

SEQ ID NO: 3097304 - RNA, 19 nt, Molluscum contagiosum virus
guugugcacgcuguccagg

SEQ ID NO: 3097305 - RNA, 23 nt, Molluscum contagiosum virus
agaagacggcgcgcgcgcuagcc

SEQ ID NO: 3097306 - RNA, 13 nt, Molluscum contagiosum virus
agcgagcgcgggc

SEQ ID NO: 3097307 - RNA, 19 nt, Molluscum contagiosum virus
gcgcccuaagggcccgcug

SEQ ID NO: 3097308 - RNA, 13 nt, Molluscum contagiosum virus
gcucggcgagagc

SEQ ID NO: 3097309 - RNA, 14 nt, Molluscum contagiosum virus
cgugcaccuggagc

SEQ ID NO: 3097310 - RNA, 18 nt, Molluscum contagiosum virus
caacucugcucgugcccg

SEQ ID NO: 3097311 - RNA, 18 nt, Molluscum contagiosum virus
gagaauaaaugagcagca

SEQ ID NO: 3097312 - RNA, 17 nt, Molluscum contagiosum virus
guacgguguccucuuca

SEQ ID NO: 3097313 - RNA, 20 nt, Molluscum contagiosum virus
aaaguacuugccgucacggc

SEQ ID NO: 3097314 - RNA, 12 nt, Molluscum contagiosum virus
agcguggagcug

SEQ ID NO: 3097315 - RNA, 15 nt, Molluscum contagiosum virus
gccuuccugcuggcg

SEQ ID NO: 3097316 - RNA, 16 nt, Molluscum contagiosum virus
uggcacuagccuccuu

SEQ ID NO: 3097317 - RNA, 17 nt, Molluscum contagiosum virus
cuccaucaucgagcugc

SEQ ID NO: 3097318 - RNA, 19 nt, Molluscum contagiosum virus
cucaacgugggcaccugca

SEQ ID NO: 3097319 - RNA, 15 nt, Molluscum contagiosum virus
gccucugccugcaag

SEQ ID NO: 3097320 - RNA, 17 nt, Molluscum contagiosum virus
cgagacgugcggcacgc

SEQ ID NO: 3097321 - RNA, 19 nt, Molluscum contagiosum virus
gucgacgggaacgagguca

SEQ ID NO: 3097322 - RNA, 18 nt, Molluscum contagiosum virus
ggcuccuucuucagcagg

SEQ ID NO: 3097323 - RNA, 20 nt, Molluscum contagiosum virus
cgcugccgcgcgcgccgcag

SEQ ID NO: 3097324 - RNA, 19 nt, Molluscum contagiosum virus
gcacuaccgcaaccagcug

SEQ ID NO: 3097325 - RNA, 21 nt, Molluscum contagiosum virus
gacggcugguguuaccggguc

SEQ ID NO: 3097326 - RNA, 19 nt, Molluscum contagiosum virus
ggaguccgugacagagugc

SEQ ID NO: 3097327 - RNA, 22 nt, Molluscum contagiosum virus
caucugcaacucgcgcugcagc

SEQ ID NO: 3097328 - RNA, 22 nt, Molluscum contagiosum virus
uugagcucgcgcgcaagaacaa

SEQ ID NO: 3097329 - RNA, 16 nt, Molluscum contagiosum virus
acaccacacgcgcggc

SEQ ID NO: 3097330 - RNA, 22 nt, Molluscum contagiosum virus
gcaugcgcgccgcgcugcuggc

SEQ ID NO: 3097331 - RNA, 21 nt, Molluscum contagiosum virus
ggccgcggaggacucggaggc

SEQ ID NO: 3097332 - RNA, 16 nt, Molluscum contagiosum virus
acagcgugcgcgggca

SEQ ID NO: 3097333 - RNA, 17 nt, Molluscum contagiosum virus
aucgcgugcuugcugcg

SEQ ID NO: 3097334 - RNA, 22 nt, Molluscum contagiosum virus
cacacucgcgcguccacaaggg

SEQ ID NO: 3097335 - RNA, 19 nt, Molluscum contagiosum virus
caggcaagaggggagccag

SEQ ID NO: 3097336 - RNA, 16 nt, Molluscum contagiosum virus
cgagcgcaugcgcgcc

SEQ ID NO: 3097337 - RNA, 14 nt, Molluscum contagiosum virus
cuguucugcuugga

SEQ ID NO: 3097338 - RNA, 20 nt, Molluscum contagiosum virus
cuacugcgcacccgccacga

SEQ ID NO: 3097339 - RNA, 17 nt, Molluscum contagiosum virus
cgcagggagcugcggac

SEQ ID NO: 3097340 - RNA, 13 nt, Molluscum contagiosum virus
ggcgcgcgccagc

SEQ ID NO: 3097341 - RNA, 15 nt, Molluscum contagiosum virus
agugcgugccaggcg

SEQ ID NO: 3097342 - RNA, 17 nt, Molluscum contagiosum virus
ugcgacagcugcugcuc

SEQ ID NO: 3097343 - RNA, 21 nt, Molluscum contagiosum virus
cucgcgggcguggggagcugg

SEQ ID NO: 3097344 - RNA, 14 nt, Molluscum contagiosum virus
gcuccgaguccagc

SEQ ID NO: 3097345 - RNA, 15 nt, Molluscum contagiosum virus
cgccaauggagccgc

SEQ ID NO: 3097346 - RNA, 23 nt, Molluscum contagiosum virus
uggcaccgcgcgcgcuccgagac

SEQ ID NO: 3097347 - RNA, 23 nt, Molluscum contagiosum virus
cugcgugcgauugccccugggcu

SEQ ID NO: 3097348 - RNA, 23 nt, Molluscum contagiosum virus
agucgcccguguucgcggagcug

SEQ ID NO: 3097349 - RNA, 12 nt, Molluscum contagiosum virus
uccagcagcgcc

SEQ ID NO: 3097350 - RNA, 23 nt, Molluscum contagiosum virus
acgcaaagucaucugccucgugg

SEQ ID NO: 3097351 - RNA, 18 nt, Molluscum contagiosum virus
caggaaagguacccgcag

SEQ ID NO: 3097352 - RNA, 15 nt, Molluscum contagiosum virus
ggcaucgcgcugcug

SEQ ID NO: 3097353 - RNA, 14 nt, Molluscum contagiosum virus
cuggggcuagcgcu

SEQ ID NO: 3097354 - RNA, 16 nt, Molluscum contagiosum virus
cugccgcgcgcgccgc

SEQ ID NO: 3097355 - RNA, 17 nt, Molluscum contagiosum virus
cgagcuucgucuucacc

SEQ ID NO: 3097356 - RNA, 21 nt, Molluscum contagiosum virus
cucauggcgcgcaaccagcug

SEQ ID NO: 3097357 - RNA, 15 nt, Molluscum contagiosum virus
uaaacgcggugagug

SEQ ID NO: 3097358 - RNA, 21 nt, Molluscum contagiosum virus
ggcucucgcggaacuggacgc

SEQ ID NO: 3097359 - RNA, 13 nt, Molluscum contagiosum virus
gggcaagcucgcg

SEQ ID NO: 3097360 - RNA, 18 nt, Molluscum contagiosum virus
agaagcccgggucggcaa

SEQ ID NO: 3097361 - RNA, 17 nt, Molluscum contagiosum virus
caguguuucgacgccgg

SEQ ID NO: 3097362 - RNA, 16 nt, Molluscum contagiosum virus
caucaccccgcugggc

SEQ ID NO: 3097363 - RNA, 17 nt, Molluscum contagiosum virus
augaggacagcuugcug

SEQ ID NO: 3097364 - RNA, 14 nt, Molluscum contagiosum virus
ucgaagcgagaggu

SEQ ID NO: 3097365 - RNA, 17 nt, Molluscum contagiosum virus
cgccgccaugcugcgcg

SEQ ID NO: 3097366 - RNA, 16 nt, Molluscum contagiosum virus
cagcucagcaggcugu

SEQ ID NO: 3097367 - RNA, 18 nt, Molluscum contagiosum virus
cuugcgcacggaccucaa

SEQ ID NO: 3097368 - RNA, 17 nt, Molluscum contagiosum virus
cacggccuucgcgcugc

SEQ ID NO: 3097369 - RNA, 13 nt, Molluscum contagiosum virus
ccuguaccacccg

SEQ ID NO: 3097370 - RNA, 23 nt, Molluscum contagiosum virus
cucgccggcgagaugcgagcgcg

SEQ ID NO: 3097371 - RNA, 17 nt, Molluscum contagiosum virus
cagcuucuuggagcccu

SEQ ID NO: 3097372 - RNA, 15 nt, Molluscum contagiosum virus
gcgucacguacucgc

SEQ ID NO: 3097373 - RNA, 21 nt, Molluscum contagiosum virus
aagacggggccgcgaaagagg

SEQ ID NO: 3097374 - RNA, 14 nt, Molluscum contagiosum virus
cuucuugcgcggcg

SEQ ID NO: 3097375 - RNA, 22 nt, Molluscum contagiosum virus
ucgcgcgacuggcacgcgccgc

SEQ ID NO: 3097376 - RNA, 12 nt, Molluscum contagiosum virus
gccgcgcccgcg

SEQ ID NO: 3097377 - RNA, 14 nt, Molluscum contagiosum virus
cgcacgcgcucucc

SEQ ID NO: 3097378 - RNA, 16 nt, Molluscum contagiosum virus
gcaccccgcaggaaag

SEQ ID NO: 3097379 - RNA, 16 nt, Molluscum contagiosum virus
cgagcgcgcgcgcugc

SEQ ID NO: 3097380 - RNA, 16 nt, Molluscum contagiosum virus
ucgcacccgcgccgcg

SEQ ID NO: 3097381 - RNA, 19 nt, Molluscum contagiosum virus
ccugcaggaaaggcacccg

SEQ ID NO: 3097382 - RNA, 13 nt, Molluscum contagiosum virus
ggaccccgagcug

SEQ ID NO: 3097383 - RNA, 20 nt, Molluscum contagiosum virus
gaauuuuuauauggcaagcu

SEQ ID NO: 3097384 - RNA, 19 nt, Molluscum contagiosum virus
aggcguccagcggcugccc

SEQ ID NO: 3097385 - RNA, 20 nt, Molluscum contagiosum virus
cugcuggugcucgccugcau

SEQ ID NO: 3097386 - RNA, 17 nt, Molluscum contagiosum virus
augcaugcggagcuggc

SEQ ID NO: 3097387 - RNA, 20 nt, Molluscum contagiosum virus
cauccucaccuuccugggcg

SEQ ID NO: 3097388 - RNA, 14 nt, Molluscum contagiosum virus
uguugcucuaccug

SEQ ID NO: 3097389 - RNA, 19 nt, Molluscum contagiosum virus
uccuuccggagacaccagc

SEQ ID NO: 3097390 - RNA, 20 nt, Molluscum contagiosum virus
cagacguacgagcaggcgca

SEQ ID NO: 3097391 - RNA, 14 nt, Molluscum contagiosum virus
cgucucggagaaga

SEQ ID NO: 3097392 - RNA, 13 nt, Molluscum contagiosum virus
gagccagcgcgga

SEQ ID NO: 3097393 - RNA, 11 nt, Molluscum contagiosum virus
gcuugcugcug

SEQ ID NO: 3097394 - RNA, 20 nt, Molluscum contagiosum virus
uccggcgcucgccccuuccc

SEQ ID NO: 3097395 - RNA, 15 nt, Molluscum contagiosum virus
gcgcgguccuguccg

SEQ ID NO: 3097396 - RNA, 22 nt, Molluscum contagiosum virus
cugccgcccgcgcccgcgccgc

SEQ ID NO: 3097397 - RNA, 16 nt, Molluscum contagiosum virus
ucgagcuuccucaagg

SEQ ID NO: 3097398 - RNA, 17 nt, Molluscum contagiosum virus
aagaaacucaggaagcg

SEQ ID NO: 3097399 - RNA, 21 nt, Molluscum contagiosum virus
gcacacacuugcacgcgcacg

SEQ ID NO: 3097400 - RNA, 14 nt, Molluscum contagiosum virus
acggcgacgacagc

SEQ ID NO: 3097401 - RNA, 23 nt, Molluscum contagiosum virus
accucccugugaacgcaccgccg

SEQ ID NO: 3097402 - RNA, 12 nt, Molluscum contagiosum virus
gcggcauccuga

SEQ ID NO: 3097403 - RNA, 13 nt, Molluscum contagiosum virus
cgagggccuuggc

SEQ ID NO: 3097404 - RNA, 15 nt, Molluscum contagiosum virus
ggagaucaggcagcu

SEQ ID NO: 3097405 - RNA, 16 nt, Molluscum contagiosum virus
ggacacgggugagcuc

SEQ ID NO: 3097406 - RNA, 19 nt, Molluscum contagiosum virus
acccgcaggaaaggcaccc

SEQ ID NO: 3097407 - RNA, 18 nt, Molluscum contagiosum virus
gcgggaggcucucgagca

SEQ ID NO: 3097408 - RNA, 14 nt, Molluscum contagiosum virus
auacuccugcuggc

SEQ ID NO: 3097409 - RNA, 17 nt, Molluscum contagiosum virus
uggccgcuccagagccg

SEQ ID NO: 3097410 - RNA, 16 nt, Molluscum contagiosum virus
ugccgcggcaguggcc

SEQ ID NO: 3097411 - RNA, 18 nt, Molluscum contagiosum virus
ggcgggcgaaagcgccgc

SEQ ID NO: 3097412 - RNA, 19 nt, Molluscum contagiosum virus
cuugaucgacauggagcgc

SEQ ID NO: 3097413 - RNA, 13 nt, Molluscum contagiosum virus
aaagucuuccugg

SEQ ID NO: 3097414 - RNA, 13 nt, Molluscum contagiosum virus
cuguccgugggcg

SEQ ID NO: 3097415 - RNA, 13 nt, Molluscum contagiosum virus
ggugugugccugc

SEQ ID NO: 3097416 - RNA, 15 nt, Molluscum contagiosum virus
accccuugcuacagg

SEQ ID NO: 3097417 - RNA, 24 nt, Molluscum contagiosum virus
cacgcgugcugcgcggcgccgcag

SEQ ID NO: 3097418 - RNA, 19 nt, Molluscum contagiosum virus
guggcacccuggcugcugc

SEQ ID NO: 3097419 - RNA, 15 nt, Molluscum contagiosum virus
gcacgcagcucuucc

SEQ ID NO: 3097420 - RNA, 21 nt, Molluscum contagiosum virus
cuguccgcggacgcgggccug

SEQ ID NO: 3097421 - RNA, 21 nt, Molluscum contagiosum virus
caccuuucauucgcuggugcg

SEQ ID NO: 3097422 - RNA, 15 nt, Molluscum contagiosum virus
cgcgcgaucgcggcc

SEQ ID NO: 3097423 - RNA, 16 nt, Molluscum contagiosum virus
aacuagggagcggcau

SEQ ID NO: 3097424 - RNA, 23 nt, Molluscum contagiosum virus
uacauggacgugcugcuggcccu

SEQ ID NO: 3097425 - RNA, 20 nt, Molluscum contagiosum virus
gaacgauuuuacgcacacga

SEQ ID NO: 3097426 - RNA, 19 nt, Molluscum contagiosum virus
cuggccgaacugcucugcg

SEQ ID NO: 3097427 - RNA, 14 nt, Molluscum contagiosum virus
guugcacgugcgug

SEQ ID NO: 3097428 - RNA, 18 nt, Molluscum contagiosum virus
gguugcgcggggcaggca

SEQ ID NO: 3097429 - RNA, 20 nt, Molluscum contagiosum virus
cgagugcccgcgcgcuguau

SEQ ID NO: 3097430 - RNA, 21 nt, Molluscum contagiosum virus
cgaggcgccgaagagugcgca

SEQ ID NO: 3097431 - RNA, 12 nt, Molluscum contagiosum virus
aaggcacacccc

SEQ ID NO: 3097432 - RNA, 24 nt, Molluscum contagiosum virus
gacuaucaggcgauaggacaugac

SEQ ID NO: 3097433 - RNA, 22 nt, Molluscum contagiosum virus
cggaggcgcaaccgcgugcgug

SEQ ID NO: 3097434 - RNA, 18 nt, Molluscum contagiosum virus
gccucucucggagaagug

SEQ ID NO: 3097435 - RNA, 15 nt, Molluscum contagiosum virus
cgugacaaucucugc

SEQ ID NO: 3097436 - RNA, 19 nt, Molluscum contagiosum virus
gccgcgcgcugcucuggag
